United States Patent Application Publication US 2022/0213167 A1 - sequence listing, part 24

SEQ ID NO: 502705 - protein, 14 aa, Homo sapiens
  CDR3 for alpha chain variable domain of TCR clone 251353 (TRAV29/DV5, TRAJ48)
CAAMALFGNEKLTF

SEQ ID NO: 502706 - protein, 15 aa, Homo sapiens
  CDR3 for beta chain variable domain of TCR clone 251353 (TRBV7-2, TRBJ2-1)
CARTHGTGIYNEQFF

SEQ ID NO: 502707 - protein, 13 aa, Homo sapiens
  CDR3 for alpha chain variable domain of TCR clone 251354 (TRAV21, TRAJ57)
CAVIEGGSEKLAL

SEQ ID NO: 502708 - protein, 20 aa, Homo sapiens
  CDR3 for beta chain variable domain of TCR clone 251354 (TRBV7-8, TRBJ2-2)
CASSHLFPGPTIHITGELFF

SEQ ID NO: 502709 - protein, 14 aa, Homo sapiens
  CDR3 for alpha chain variable domain of TCR clone 251355 (TRAV16, TRAJ33)
CALSAMDSNYQLIW

SEQ ID NO: 502710 - protein, 15 aa, Homo sapiens
  CDR3 for beta chain variable domain of TCR clone 251355 (TRBV2, TRBJ2-7)
CASSPYGTGASEQYF

SEQ ID NO: 502711 - protein, 10 aa, Homo sapiens
  CDR3 for alpha chain variable domain of TCR clone 251356 (TRAV20, TRAJ22)
CAAPARQLTF

SEQ ID NO: 502712 - protein, 14 aa, Homo sapiens
  CDR3 for beta chain variable domain of TCR clone 251356 (TRBV19, TRBJ2-1)
CASSIGSGATEQFF

SEQ ID NO: 502713 - protein, 13 aa, Homo sapiens
  CDR3 for alpha chain variable domain of TCR clone 251357 (TRAV2, TRAJ15)
CAVEAQAGTALIF

SEQ ID NO: 502714 - protein, 14 aa, Homo sapiens
  CDR3 for beta chain variable domain of TCR clone 251357 (TRBV6-5, TRBJ2-7)
CASVASGGAHEQYF

SEQ ID NO: 502715 - protein, 13 aa, Homo sapiens
  CDR3 for alpha chain variable domain of TCR clone 251358 (TRAV36/DV7, TRAJ56)
CAGTTGANSKLTF

SEQ ID NO: 502716 - protein, 12 aa, Homo sapiens
  CDR3 for beta chain variable domain of TCR clone 251358 (TRBV29-1, TRBJ2-3)
CSVTGGADTQYF

SEQ ID NO: 502717 - protein, 17 aa, Homo sapiens
  CDR3 for alpha chain variable domain of TCR clone 251359 (TRAV26-1, TRAJ46)
IASSESEKKSSGDKLTF

SEQ ID NO: 502718 - protein, 15 aa, Homo sapiens
  CDR3 for beta chain variable domain of TCR clone 251359 (TRBV6-3, TRBJ2-7)
CASSSPGTVFDEQYF

SEQ ID NO: 502719 - protein, 13 aa, Homo sapiens
  CDR3 for alpha chain variable domain of TCR clone 251360 (TRAV17, TRAJ45)
CATPGGGADGLTF

SEQ ID NO: 502720 - protein, 12 aa, Homo sapiens
  CDR3 for beta chain variable domain of TCR clone 251360 (TRBV7-9, TRBJ2-7)
CASSSDITEQYF

SEQ ID NO: 502721 - protein, 13 aa, Homo sapiens
  CDR3 for alpha chain variable domain of TCR clone 251361 (TRAV26-2, TRAJ54)
CIPRVGGAQKLVF

SEQ ID NO: 502722 - protein, 16 aa, Homo sapiens
  CDR3 for beta chain variable domain of TCR clone 251361 (TRBV4-1, TRBJ1-1)
GASSSMSEGPNPEAFF

SEQ ID NO: 502723 - protein, 15 aa, Homo sapiens
  CDR3 for alpha chain variable domain of TCR clone 251362 (TRAV3, TRAJ17)
CAVRDTGAPGNKLTF

SEQ ID NO: 502724 - protein, 14 aa, Homo sapiens
  CDR3 for beta chain variable domain of TCR clone 251362 (TRBV6-3, TRBJ1-1)
CASSNLPPGAEAFF

SEQ ID NO: 502725 - protein, 15 aa, Homo sapiens
  CDR3 for alpha chain variable domain of TCR clone 251363 (TRAV8-4, TRAJ3)
CAVTGENLVQQCFQD

SEQ ID NO: 502726 - protein, 15 aa, Homo sapiens
  CDR3 for beta chain variable domain of TCR clone 251363 (TRBV28, TRBJ2-1)
CASRVGLDEYNEQFF

SEQ ID NO: 502727 - protein, 23 aa, Homo sapiens
  CDR3 for alpha chain variable domain of TCR clone 251364 (TRAV26-1, )
CIADSAGNNHIQNPDPAVYQLRD

SEQ ID NO: 502728 - protein, 13 aa, Homo sapiens
  CDR3 for beta chain variable domain of TCR clone 251364 (TRBV20-1, TRBJ1-1)
CSARGGGNTEAFF

SEQ ID NO: 502729 - protein, 14 aa, Homo sapiens
  CDR3 for alpha chain variable domain of TCR clone 251365 (TRAV1-2, TRAJ8)
CAGREDTGLQKLVF

SEQ ID NO: 502730 - protein, 13 aa, Homo sapiens
  CDR3 for beta chain variable domain of TCR clone 251365 (TRBV19, TRBJ1-2)
CASSVPEQDGYTF

SEQ ID NO: 502731 - protein, 13 aa, Homo sapiens
  CDR3 for alpha chain variable domain of TCR clone 251366 (TRAV8-6, TRAJ50)
CAVIKTSYDTVIF

SEQ ID NO: 502732 - protein, 13 aa, Homo sapiens
  CDR3 for beta chain variable domain of TCR clone 251366 (TRBV4-2, TRBJ1-1)
CASSQAGNTEAFF

SEQ ID NO: 502733 - protein, 13 aa, Homo sapiens
  CDR3 for alpha chain variable domain of TCR clone 251367 (TRAV20, TRAJ48)
CAVHLFGNEKLTF

SEQ ID NO: 502734 - protein, 15 aa, Homo sapiens
  CDR3 for beta chain variable domain of TCR clone 251367 (TRBV6-5, TRBJ2-6)
CASCQWEAGANVLTF

SEQ ID NO: 502735 - protein, 17 aa, Homo sapiens
  CDR3 for alpha chain variable domain of TCR clone 251368 (TRAV13-1, TRAJ31)
CAPRARLMFGDGTQRVV

SEQ ID NO: 502736 - protein, 12 aa, Homo sapiens
  CDR3 for beta chain variable domain of TCR clone 251368 (TRBV7-9, TRBJ2-7)
CASSLEGYEQYF

SEQ ID NO: 502737 - protein, 11 aa, Homo sapiens
  CDR3 for alpha chain variable domain of TCR clone 251369 (TRAV21, TRAJ34)
CAVTNTDKLIF

SEQ ID NO: 502738 - protein, 13 aa, Homo sapiens
  CDR3 for beta chain variable domain of TCR clone 251369 (TRBV6-1, TRBJ2-1)
CAGAGTGLHEQFF

SEQ ID NO: 502739 - protein, 15 aa, Homo sapiens
  CDR3 for alpha chain variable domain of TCR clone 251370 (TRAV3, TRAJ3)
CCERPRYSSASKIIF

SEQ ID NO: 502740 - protein, 14 aa, Homo sapiens
  CDR3 for beta chain variable domain of TCR clone 251370 (TRBV20-1, TRBJ1-1)
CSAQTRIGGTEAFF

SEQ ID NO: 502741 - protein, 14 aa, Homo sapiens
  CDR3 for alpha chain variable domain of TCR clone 251371 (TRAV1-2, TRAJ16)
CAGNRFSDGQKRLF

SEQ ID NO: 502742 - protein, 14 aa, Homo sapiens
  CDR3 for beta chain variable domain of TCR clone 251371 (TRBV7-9, TRBJ2-3)
CASSLEDGTDTQYF

SEQ ID NO: 502743 - protein, 14 aa, Homo sapiens
  CDR3 for alpha chain variable domain of TCR clone 251372 (TRAV12-1, TRAJ33)
CVVNPADSNYQLIW

SEQ ID NO: 502744 - protein, 11 aa, Homo sapiens
  CDR3 for beta chain variable domain of TCR clone 251372 (TRBV7-6, TRBJ2-1)
CASSNYGEQFF

SEQ ID NO: 502745 - protein, 14 aa, Homo sapiens
  CDR3 for alpha chain variable domain of TCR clone 251373 (TRAV17, TRAJ12)
CAILPMDSSYKLIF

SEQ ID NO: 502746 - protein, 13 aa, Homo sapiens
  CDR3 for beta chain variable domain of TCR clone 251373 (TRBV4-1, TRBJ2-2)
CASSQENTGELLF

SEQ ID NO: 502747 - protein, 14 aa, Homo sapiens
  CDR3 for alpha chain variable domain of TCR clone 251374 (TRAV12-2, TRAJ17)
CAVLFKAAGNKLTF

SEQ ID NO: 502748 - protein, 13 aa, Homo sapiens
  CDR3 for beta chain variable domain of TCR clone 251374 (TRBV4-1, TRBJ2-5)
CASSQEVQETQYF

SEQ ID NO: 502749 - protein, 15 aa, Homo sapiens
  CDR3 for alpha chain variable domain of TCR clone 251375 (TRAV3, TRAJ13)
WSVRVYSGGYQKVTF

SEQ ID NO: 502750 - protein, 15 aa, Homo sapiens
  CDR3 for beta chain variable domain of TCR clone 251375 (TRBV5-7, TRBJ1-2)
CASSLGVAANYGYTF

SEQ ID NO: 502751 - protein, 14 aa, Homo sapiens
  CDR3 for alpha chain variable domain of TCR clone 251376 (TRAV8-4, TRAJ34)
CAVSDPGDTDKLIF

SEQ ID NO: 502752 - protein, 19 aa, Homo sapiens
  CDR3 for beta chain variable domain of TCR clone 251376 (TRBV7-2, TRBJ2-3)
CASSFLSRNWGGGTDTQYF

SEQ ID NO: 502753 - protein, 13 aa, Homo sapiens
  CDR3 for alpha chain variable domain of TCR clone 251377 (TRAV16, TRAJ48)
CSPLNFGNAKLTF

SEQ ID NO: 502754 - protein, 11 aa, Homo sapiens
  CDR3 for beta chain variable domain of TCR clone 251377 (TRBV7-9, TRBJ2-3)
CASSATDTQYF

SEQ ID NO: 502755 - protein, 14 aa, Homo sapiens
  CDR3 for alpha chain variable domain of TCR clone 251378 (TRAV23/DV6, TRAJ45)
CAASRRGGADGLTF

SEQ ID NO: 502756 - protein, 14 aa, Homo sapiens
  CDR3 for beta chain variable domain of TCR clone 251378 (TRBV7-6, TRBJ2-3)
CASSLGTVTDTQYF

SEQ ID NO: 502757 - protein, 13 aa, Homo sapiens
  CDR3 for alpha chain variable domain of TCR clone 251379 (TRAV36/DV7, TRAJ49)
CAVEANTGNQFYF

SEQ ID NO: 502758 - protein, 15 aa, Homo sapiens
  CDR3 for beta chain variable domain of TCR clone 251379 (TRBV10-3, TRBJ2-7)
CASKLAVNYESTSGR

SEQ ID NO: 502759 - protein, 11 aa, Homo sapiens
  CDR3 for alpha chain variable domain of TCR clone 251380 (TRAV2, TRAJ20)
CAVSDDYKLSF

SEQ ID NO: 502760 - protein, 20 aa, Homo sapiens
  CDR3 for beta chain variable domain of TCR clone 251380 (TRBV19, TRBJ2-1)
CDSSISRTVTSTRLNNEQFF

SEQ ID NO: 502761 - protein, 14 aa, Homo sapiens
  CDR3 for alpha chain variable domain of TCR clone 251381 (TRAV8-4, TRAJ9)
CAVRINTGGFKTIF

SEQ ID NO: 502762 - protein, 14 aa, Homo sapiens
  CDR3 for beta chain variable domain of TCR clone 251381 (TRBV5-1, TRBJ1-1)
CASTLQGASTEAFF

SEQ ID NO: 502763 - protein, 15 aa, Homo sapiens
  CDR3 for alpha chain variable domain of TCR clone 251382 (TRAV2, TRAJ15)
CAVGGPNQAGTALIF

SEQ ID NO: 502764 - protein, 15 aa, Homo sapiens
  CDR3 for beta chain variable domain of TCR clone 251382 (TRBV5-1, TRBJ2-2)
CASSSQGGNTGELFF

SEQ ID NO: 502765 - protein, 16 aa, Homo sapiens
  CDR3 for alpha chain variable domain of TCR clone 251383 (TRAV30, TRAJ24)
CGTEIVDSDSWGKFQF

SEQ ID NO: 502766 - protein, 12 aa, Homo sapiens
  CDR3 for beta chain variable domain of TCR clone 251383 (TRBV11-2, TRBJ2-1)
CASSPGNNEQFF

SEQ ID NO: 502767 - protein, 14 aa, Homo sapiens
  CDR3 for alpha chain variable domain of TCR clone 251384 (TRAV1-2, TRAJ8)
CAVREDTGFQKLVF

SEQ ID NO: 502768 - protein, 15 aa, Homo sapiens
  CDR3 for beta chain variable domain of TCR clone 251384 (TRBV4-1, TRBJ2-7)
CASSQNTGRVYEQYF

SEQ ID NO: 502769 - protein, 15 aa, Homo sapiens
  CDR3 for alpha chain variable domain of TCR clone 251385 (TRAV39, TRAJ32)
CAVDMEGGATNKLIF

SEQ ID NO: 502770 - protein, 17 aa, Homo sapiens
  CDR3 for beta chain variable domain of TCR clone 251385 (TRBV7-2, TRBJ1-4)
CASSCKAGPTTNEKLFF

SEQ ID NO: 502771 - protein, 11 aa, Homo sapiens
  CDR3 for alpha chain variable domain of TCR clone 251386 (TRAV2, TRAJ13)
CASAGYQKVTF

SEQ ID NO: 502772 - protein, 13 aa, Homo sapiens
  CDR3 for beta chain variable domain of TCR clone 251386 (TRBV20-1, TRBJ1-1)
CSAPLGGGTEAFF

SEQ ID NO: 502773 - protein, 12 aa, Homo sapiens
  CDR3 for alpha chain variable domain of TCR clone 251387 (TRAV12-3, TRAJ17)
CAMTLTGNKLTF

SEQ ID NO: 502774 - protein, 12 aa, Homo sapiens
  CDR3 for beta chain variable domain of TCR clone 251387 (TRBV28, TRBJ2-7)
CASSGRPYEQYF

SEQ ID NO: 502775 - protein, 17 aa, Homo sapiens
  CDR3 for alpha chain variable domain of TCR clone 251388 (TRAV21, TRAJ41)
CAVREFRVCTQLRQTHL

SEQ ID NO: 502776 - protein, 15 aa, Homo sapiens
  CDR3 for beta chain variable domain of TCR clone 251388 (TRBV18, TRBJ1-5)
CASSPQARSNQPQHF

SEQ ID NO: 502777 - protein, 14 aa, Homo sapiens
  CDR3 for alpha chain variable domain of TCR clone 251389 (TRAV26-2, TRAJ31)
FILIPGNNNARPMF

SEQ ID NO: 502778 - protein, 16 aa, Homo sapiens
  CDR3 for beta chain variable domain of TCR clone 251389 (TRBV7-3, TRBJ2-1)
CASSLVSGSSNNEQFF

SEQ ID NO: 502779 - protein, 13 aa, Homo sapiens
  CDR3 for alpha chain variable domain of TCR clone 251390 (TRAV1-2, TRAJ17)
CAVGKAAGNKLTF

SEQ ID NO: 502780 - protein, 13 aa, Homo sapiens
  CDR3 for beta chain variable domain of TCR clone 251390 (TRBV12-4, TRBJ1-2)
CASSLRQGKGYTF

SEQ ID NO: 502781 - protein, 13 aa, Homo sapiens
  CDR3 for alpha chain variable domain of TCR clone 251391 (TRAV17, TRAJ9)
CATFLTGGFKTIF

SEQ ID NO: 502782 - protein, 13 aa, Homo sapiens
  CDR3 for beta chain variable domain of TCR clone 251391 (TRBV10-3, TRBJ2-7)
CASKLAVNYEQYF

SEQ ID NO: 502783 - protein, 14 aa, Homo sapiens
  CDR3 for alpha chain variable domain of TCR clone 251392 (TRAV13-2, TRAJ17)
CAENSKAAGNKLTF

SEQ ID NO: 502784 - protein, 13 aa, Homo sapiens
  CDR3 for beta chain variable domain of TCR clone 251392 (TRBV11-2, TRBJ2-5)
CASSFSSQETQYF

SEQ ID NO: 502785 - protein, 16 aa, Homo sapiens
  CDR3 for alpha chain variable domain of TCR clone 251393 (TRAV30, TRAJ24)
CGTEIVDADSWGKFQF

SEQ ID NO: 502786 - protein, 16 aa, Homo sapiens
  CDR3 for beta chain variable domain of TCR clone 251393 (TRBV12-5, TRBJ2-5)
CASGPRTSGNQDTQYF

SEQ ID NO: 502787 - protein, 13 aa, Homo sapiens
  CDR3 for alpha chain variable domain of TCR clone 251394 (TRAV30, TRAJ34)
CGTVGYNTDKLIF

SEQ ID NO: 502788 - protein, 13 aa, Homo sapiens
  CDR3 for beta chain variable domain of TCR clone 251394 (TRBV7-9, TRBJ1-2)
CASSLGFSSGEDA

SEQ ID NO: 502789 - protein, 15 aa, Homo sapiens
  CDR3 for alpha chain variable domain of TCR clone 251395 (TRAV26-2, TRAJ13)
CLLRDLSGGYQKVTF

SEQ ID NO: 502790 - protein, 14 aa, Homo sapiens
  CDR3 for beta chain variable domain of TCR clone 251395 (TRBV4-1, TRBJ2-3)
CASSQEGSTDTQYF

SEQ ID NO: 502791 - protein, 15 aa, Homo sapiens
  CDR3 for alpha chain variable domain of TCR clone 251396 (TRAV26-1, TRAJ29)
CIVRVEGAGNTPLVF

SEQ ID NO: 502792 - protein, 14 aa, Homo sapiens
  CDR3 for beta chain variable domain of TCR clone 251396 (TRBV18, TRBJ2-5)
CASSPGVSQDTQYF

SEQ ID NO: 502793 - protein, 14 aa, Homo sapiens
  CDR3 for alpha chain variable domain of TCR clone 251397 (TRAV1-2, TRAJ16)
CAVNRFSAGQKLLF

SEQ ID NO: 502794 - protein, 16 aa, Homo sapiens
  CDR3 for beta chain variable domain of TCR clone 251397 (TRBV9, TRBJ2-1)
CASSVGGGGNYNEQFF

SEQ ID NO: 502795 - protein, 15 aa, Homo sapiens
  CDR3 for alpha chain variable domain of TCR clone 251398 (TRAV27, TRAJ42)
CAGAEYGGSQGNLIF

SEQ ID NO: 502796 - protein, 16 aa, Homo sapiens
  CDR3 for beta chain variable domain of TCR clone 251398 (TRBV24-1, TRBJ2-3)
CATSDPGTGATDTQYF

SEQ ID NO: 502797 - protein, 10 aa, Homo sapiens
  CDR3 for alpha chain variable domain of TCR clone 251399 (TRAV30, TRAJ48)
CGIGNEKLTF

SEQ ID NO: 502798 - protein, 14 aa, Homo sapiens
  CDR3 for beta chain variable domain of TCR clone 251399 (TRBV7-2, TRBJ2-7)
CASSLYPGRYEQYF

SEQ ID NO: 502799 - protein, 13 aa, Homo sapiens
  CDR3 for alpha chain variable domain of TCR clone 251400 (TRAV17, TRAJ5)
CALRGTGRRALTF

SEQ ID NO: 502800 - protein, 14 aa, Homo sapiens
  CDR3 for beta chain variable domain of TCR clone 251400 (TRBV12-5, TRBJ2-5)
CASGSRTHQETKYF

SEQ ID NO: 502801 - protein, 15 aa, Homo sapiens
  CDR3 for alpha chain variable domain of TCR clone 251401 (TRAV13-2, TRAJ35)
CAESPNIGFGNVLHC

SEQ ID NO: 502802 - protein, 13 aa, Homo sapiens
  CDR3 for beta chain variable domain of TCR clone 251401 (TRBV10-2, TRBJ2-5)
CASSILARETQYF

SEQ ID NO: 502803 - protein, 13 aa, Homo sapiens
  CDR3 for alpha chain variable domain of TCR clone 251402 (TRAV35, TRAJ39)
CAGPNNAGNMLTF

SEQ ID NO: 502804 - protein, 16 aa, Homo sapiens
  CDR3 for beta chain variable domain of TCR clone 251402 (TRBV2, TRBJ2-3)
CASSTSVEGVTDTQYF

SEQ ID NO: 502805 - protein, 13 aa, Homo sapiens
  CDR3 for alpha chain variable domain of TCR clone 251403 (TRAV12-2, TRAJ39)
CAVNNNAGNMLTY

SEQ ID NO: 502806 - protein, 13 aa, Homo sapiens
  CDR3 for beta chain variable domain of TCR clone 251403 (TRBV2, TRBJ1-5)
CATAGPGNQPQHF

SEQ ID NO: 502807 - protein, 13 aa, Homo sapiens
  CDR3 for alpha chain variable domain of TCR clone 251404 (TRAV17, TRAJ4)
CATKSGGYNKLIF

SEQ ID NO: 502808 - protein, 14 aa, Homo sapiens
  CDR3 for beta chain variable domain of TCR clone 251404 (TRBV20-1, TRBJ1-5)
CSARDDRGYQPQHF

SEQ ID NO: 502809 - protein, 15 aa, Homo sapiens
  CDR3 for alpha chain variable domain of TCR clone 251405 (TRAV8-3, TRAJ27)
CAVGPSKTNAGKSTF

SEQ ID NO: 502810 - protein, 16 aa, Homo sapiens
  CDR3 for beta chain variable domain of TCR clone 251405 (TRBV7-9, TRBJ2-1)
CASSDVAGGSYNEQFF

SEQ ID NO: 502811 - protein, 13 aa, Homo sapiens
  CDR3 for alpha chain variable domain of TCR clone 251406 (TRAV27, TRAJ17)
CAGAATAGNKLTF

SEQ ID NO: 502812 - protein, 15 aa, Homo sapiens
  CDR3 for beta chain variable domain of TCR clone 251406 (TRBV5-1, TRBJ2-3)
CASRNQAGSTDAQYF

SEQ ID NO: 502813 - protein, 15 aa, Homo sapiens
  CDR3 for alpha chain variable domain of TCR clone 251407 (TRAV2, TRAJ15)
CAVEDREQAGTALIF

SEQ ID NO: 502814 - protein, 13 aa, Homo sapiens
  CDR3 for beta chain variable domain of TCR clone 251407 (TRBV10-2, TRBJ2-3)
CASSESGDHTQYC

SEQ ID NO: 502815 - protein, 16 aa, Homo sapiens
  CDR3 for alpha chain variable domain of TCR clone 251408 (TRAV30, TRAJ24)
CGTEIVDADSWGKFQF

SEQ ID NO: 502816 - protein, 15 aa, Homo sapiens
  CDR3 for beta chain variable domain of TCR clone 251408 (TRBV20-1, TRBJ2-5)
CSARDPRGGQETQYF

SEQ ID NO: 502817 - protein, 13 aa, Homo sapiens
  CDR3 for alpha chain variable domain of TCR clone 251409 (TRAV2, TRAJ40)
CAVVTSGTYKYIF

SEQ ID NO: 502818 - protein, 15 aa, Homo sapiens
  CDR3 for beta chain variable domain of TCR clone 251409 (TRBV9, TRBJ1-6)
CASSVAGTGDSPLLF

SEQ ID NO: 502819 - protein, 11 aa, Homo sapiens
  CDR3 for alpha chain variable domain of TCR clone 251410 (TRAV17, TRAJ9)
CGFTGGFKTIF

SEQ ID NO: 502820 - protein, 15 aa, Homo sapiens
  CDR3 for beta chain variable domain of TCR clone 251410 (TRBV28, TRBJ2-7)
CASSPGGRGFYEQYF

SEQ ID NO: 502821 - protein, 14 aa, Homo sapiens
  CDR3 for alpha chain variable domain of TCR clone 251411 (TRAV26-1, TRAJ45)
CIQVTGGGADGLTF

SEQ ID NO: 502822 - protein, 19 aa, Homo sapiens
  CDR3 for beta chain variable domain of TCR clone 251411 (TRBV19, TRBJ2-2)
CASTRPGLAGGRVTGELFF

SEQ ID NO: 502823 - protein, 13 aa, Homo sapiens
  CDR3 for alpha chain variable domain of TCR clone 251412 (TRAV21, TRAJ27)
CAARPGNAGKSNF

SEQ ID NO: 502824 - protein, 14 aa, Homo sapiens
  CDR3 for beta chain variable domain of TCR clone 251412 (TRBV11-2, TRBJ2-3)
CASSRLARTDTQYF

SEQ ID NO: 502825 - protein, 16 aa, Homo sapiens
  CDR3 for alpha chain variable domain of TCR clone 251413 (TRAV1-2, TRAJ10)
CAVRGVLTGGGNKLTF

SEQ ID NO: 502826 - protein, 13 aa, Homo sapiens
  CDR3 for beta chain variable domain of TCR clone 251413 (TRBV20-1, TRBJ1-1)
CGAGTVGNTEAFF

SEQ ID NO: 502827 - protein, 12 aa, Homo sapiens
  CDR3 for alpha chain variable domain of TCR clone 251414 (TRAV23/DV6, TRAJ49)
CAATPGQVGRSF

SEQ ID NO: 502828 - protein, 14 aa, Homo sapiens
  CDR3 for beta chain variable domain of TCR clone 251414 (TRBV7-3, TRBJ1-1)
CASSLKGGNTEAFF

SEQ ID NO: 502829 - protein, 13 aa, Homo sapiens
  CDR3 for alpha chain variable domain of TCR clone 251415 (TRAV21, TRAJ15)
CAVANQAGTALCF

SEQ ID NO: 502830 - protein, 14 aa, Homo sapiens
  CDR3 for beta chain variable domain of TCR clone 251415 (TRBV27, TRBJ2-2)
CASSLGAATGELFF

SEQ ID NO: 502831 - protein, 13 aa, Homo sapiens
  CDR3 for alpha chain variable domain of TCR clone 251416 (TRAV13-1, TRAJ4)
CAASIGGYNKLIF

SEQ ID NO: 502832 - protein, 16 aa, Homo sapiens
  CDR3 for beta chain variable domain of TCR clone 251416 (TRBV20-1, TRBJ2-1)
CSAPGLSGSYSDEQFF

SEQ ID NO: 502833 - protein, 15 aa, Homo sapiens
  CDR3 for alpha chain variable domain of TCR clone 251417 (TRAV16, TRAJ12)
CSKWPLRDSSYTLIF

SEQ ID NO: 502834 - protein, 13 aa, Homo sapiens
  CDR3 for beta chain variable domain of TCR clone 251417 (TRBV4-2, TRBJ1-1)
CASSQAGNTEAFF

SEQ ID NO: 502835 - protein, 15 aa, Homo sapiens
  CDR3 for alpha chain variable domain of TCR clone 251418 (TRAV3, TRAJ5)
CAVRARKTGRRALTF

SEQ ID NO: 502836 - protein, 15 aa, Homo sapiens
  CDR3 for beta chain variable domain of TCR clone 251418 (TRBV7-8, TRBJ2-1)
RASSLADSLYNEQFF

SEQ ID NO: 502837 - protein, 16 aa, Homo sapiens
  CDR3 for alpha chain variable domain of TCR clone 251419 (TRAV3, TRAJ37)
CAVRVRGSGNTGKLIF

SEQ ID NO: 502838 - protein, 11 aa, Homo sapiens
  CDR3 for beta chain variable domain of TCR clone 251419 (TRBV11-2, TRBJ2-2)
CGSSLPGELFF

SEQ ID NO: 502839 - protein, 11 aa, Homo sapiens
  CDR3 for alpha chain variable domain of TCR clone 251420 (TRAV26-2, TRAJ8)
CILTGFQKLVF

SEQ ID NO: 502840 - protein, 14 aa, Homo sapiens
  CDR3 for beta chain variable domain of TCR clone 251420 (TRBV4-2, TRBJ2-1)
CASGLDRAYNEQFF

SEQ ID NO: 502841 - protein, 17 aa, Homo sapiens
  CDR3 for alpha chain variable domain of TCR clone 251421 (TRAV36/DV7, TRAJ42)
CAGGGMNYGGSQGNLIF

SEQ ID NO: 502842 - protein, 17 aa, Homo sapiens
  CDR3 for beta chain variable domain of TCR clone 251421 (TRBV19, TRBJ2-5)
CASSIHSQETSTSGQAR

SEQ ID NO: 502843 - protein, 14 aa, Homo sapiens
  CDR3 for alpha chain variable domain of TCR clone 251422 (TRAV2, TRAJ33)
CAVEDQGSNYQLIW

SEQ ID NO: 502844 - protein, 13 aa, Homo sapiens
  CDR3 for beta chain variable domain of TCR clone 251422 (TRBV7-9, TRBJ1-2)
CASSLKQNYGYTF

SEQ ID NO: 502845 - protein, 14 aa, Homo sapiens
  CDR3 for alpha chain variable domain of TCR clone 251423 (TRAV20, TRAJ42)
CAVQAGGSQGNLIF

SEQ ID NO: 502846 - protein, 14 aa, Homo sapiens
  CDR3 for beta chain variable domain of TCR clone 251423 (TRBV28, TRBJ1-2)
CASRIQGANYGNTF

SEQ ID NO: 502847 - protein, 13 aa, Homo sapiens
  CDR3 for alpha chain variable domain of TCR clone 251424 (TRAV12-3, TRAJ54)
CAMTLQGAQKMVF

SEQ ID NO: 502848 - protein, 14 aa, Homo sapiens
  CDR3 for beta chain variable domain of TCR clone 251424 (TRBV4-1, TRBJ2-2)
CASSQAVNTGELFF

SEQ ID NO: 502849 - protein, 17 aa, Homo sapiens
  CDR3 for alpha chain variable domain of TCR clone 251425 (TRAV1-1, TRAJ9)
CLLLLLCQNTGGFKTIF

SEQ ID NO: 502850 - protein, 14 aa, Homo sapiens
  CDR3 for beta chain variable domain of TCR clone 251425 (TRBV20-1, TRBJ2-1)
CSAQIGGSANEQFF

SEQ ID NO: 502851 - protein, 14 aa, Homo sapiens
  CDR3 for alpha chain variable domain of TCR clone 251426 (TRAV14/DV4, TRAJ32)
SNVLPLTPTNKLIF

SEQ ID NO: 502852 - protein, 17 aa, Homo sapiens
  CDR3 for beta chain variable domain of TCR clone 251426 (TRBV20-1, TRBJ2-1)
CSASSSGLAGSYNEQCF

SEQ ID NO: 502853 - protein, 13 aa, Homo sapiens
  CDR3 for alpha chain variable domain of TCR clone 251427 (TRAV12-2, TRAJ20)
CAVYPSNDYKLSF

SEQ ID NO: 502854 - protein, 14 aa, Homo sapiens
  CDR3 for beta chain variable domain of TCR clone 251427 (TRBV27, TRBJ2-5)
CQQFIPAGGETQYL

SEQ ID NO: 502855 - protein, 13 aa, Homo sapiens
  CDR3 for alpha chain variable domain of TCR clone 251428 (TRAV8-3, TRAJ43)
CAVGPDNNNDMRF

SEQ ID NO: 502856 - protein, 19 aa, Homo sapiens
  CDR3 for beta chain variable domain of TCR clone 251428 (TRBV7-2, TRBJ2-3)
CASSFLSRSWGGGTDTQYF

SEQ ID NO: 502857 - protein, 17 aa, Homo sapiens
  CDR3 for alpha chain variable domain of TCR clone 251429 (TRAV3, TRAJ6)
CAVRAGPRAGGSDIPTF

SEQ ID NO: 502858 - protein, 14 aa, Homo sapiens
  CDR3 for beta chain variable domain of TCR clone 251429 (TRBV7-2, TRBJ2-7)
CASSPKTSFYEQYF

SEQ ID NO: 502859 - protein, 12 aa, Homo sapiens
  CDR3 for alpha chain variable domain of TCR clone 251430 (TRAV8-3, TRAJ27)
CAVGTMQANQPL

SEQ ID NO: 502860 - protein, 14 aa, Homo sapiens
  CDR3 for beta chain variable domain of TCR clone 251430 (TRBV18, TRBJ2-7)
CASSPRGGAYEQYF

SEQ ID NO: 502861 - protein, 16 aa, Homo sapiens
  CDR3 for alpha chain variable domain of TCR clone 251431 (TRAV12-2, TRAJ18)
CAVTTDRGSTLGRLYF

SEQ ID NO: 502862 - protein, 14 aa, Homo sapiens
  CDR3 for beta chain variable domain of TCR clone 251431 (TRBV4-2, TRBJ1-5)
CASSQDSINQPEHF

SEQ ID NO: 502863 - protein, 13 aa, Homo sapiens
  CDR3 for alpha chain variable domain of TCR clone 251432 (TRAV8-1, TRAJ34)
CAVNAGNTDKFIF

SEQ ID NO: 502864 - protein, 13 aa, Homo sapiens
  CDR3 for beta chain variable domain of TCR clone 251432 (TRBV20-1, TRBJ2-1)
CSAGAGTYNEQFF

SEQ ID NO: 502865 - protein, 18 aa, Homo sapiens
  CDR3 for alpha chain variable domain of TCR clone 251433 (TRAV21, TRAJ52)
CSVRPSPAGGTSYGKLTF

SEQ ID NO: 502866 - protein, 15 aa, Homo sapiens
  CDR3 for beta chain variable domain of TCR clone 251433 (TRBV10-3, TRBJ2-3)
CAISLTSGGTDTQYF

SEQ ID NO: 502867 - protein, 13 aa, Homo sapiens
  CDR3 for alpha chain variable domain of TCR clone 251434 (TRAV4, TRAJ34)
CLVGDYNTDKLIF

SEQ ID NO: 502868 - protein, 23 aa, Homo sapiens
  CDR3 for beta chain variable domain of TCR clone 251434 (TRBV4-2, TRBJ2-3)
CASGQDPPRASSISGGRGDTQYF

SEQ ID NO: 502869 - protein, 16 aa, Homo sapiens
  CDR3 for alpha chain variable domain of TCR clone 251435 (TRAV26-1, TRAJ52)
CIVSNAGGTSYGKLTF

SEQ ID NO: 502870 - protein, 16 aa, Homo sapiens
  CDR3 for beta chain variable domain of TCR clone 251435 (TRBV5-1, TRBJ2-1)
CASSLEGRGLYNEQLF

SEQ ID NO: 502871 - protein, 15 aa, Homo sapiens
  CDR3 for alpha chain variable domain of TCR clone 251436 (TRAV21, TRAJ53)
CATLNSGGSNYKLTF

SEQ ID NO: 502872 - protein, 15 aa, Homo sapiens
  CDR3 for beta chain variable domain of TCR clone 251436 (TRBV11-3, TRBJ2-3)
CASSAGTVVTNMQYF

SEQ ID NO: 502873 - protein, 14 aa, Homo sapiens
  CDR3 for alpha chain variable domain of TCR clone 251437 (TRAV26-1, TRAJ38)
CIAANAGNNRKLIW

SEQ ID NO: 502874 - protein, 14 aa, Homo sapiens
  CDR3 for beta chain variable domain of TCR clone 251437 (TRBV20-1, TRBJ1-1)
CSAQTRIGGTEAFF

SEQ ID NO: 502875 - protein, 14 aa, Homo sapiens
  CDR3 for alpha chain variable domain of TCR clone 251438 (TRAV1-1, TRAJ27)
CAVIYNTNAGQSTF

SEQ ID NO: 502876 - protein, 13 aa, Homo sapiens
  CDR3 for beta chain variable domain of TCR clone 251438 (TRBV12-5, TRBJ1-2)
CASGVRTGNGYTF

SEQ ID NO: 502877 - protein, 16 aa, Homo sapiens
  CDR3 for alpha chain variable domain of TCR clone 251439 (TRAV3, TRAJ37)
CAVRPHGFGNTGKLIF

SEQ ID NO: 502878 - protein, 16 aa, Homo sapiens
  CDR3 for beta chain variable domain of TCR clone 251439 (TRBV20-1, TRBJ1-4)
CSAPGQGLLTNDKLFF

SEQ ID NO: 502879 - protein, 12 aa, Homo sapiens
  CDR3 for alpha chain variable domain of TCR clone 251440 (TRAV8-3, TRAJ20)
CAVCANDYKLSF

SEQ ID NO: 502880 - protein, 16 aa, Homo sapiens
  CDR3 for beta chain variable domain of TCR clone 251440 (TRBV19, TRBJ2-2)
CASRSPGTGATGELFV

SEQ ID NO: 502881 - protein, 16 aa, Homo sapiens
  CDR3 for alpha chain variable domain of TCR clone 251441 (TRAV30, TRAJ24)
CGTEIVDADSWGKFQF

SEQ ID NO: 502882 - protein, 15 aa, Homo sapiens
  CDR3 for beta chain variable domain of TCR clone 251441 (TRBV7-6, TRBJ2-5)
CASSKRTGPQETQYF

SEQ ID NO: 502883 - protein, 12 aa, Homo sapiens
  CDR3 for alpha chain variable domain of TCR clone 251442 (TRAV12-3, TRAJ17)
CAMTLTGNELTF

SEQ ID NO: 502884 - protein, 13 aa, Homo sapiens
  CDR3 for beta chain variable domain of TCR clone 251442 (TRBV24-1, TRBJ2-2)
CATSDWSTGELFF

SEQ ID NO: 502885 - protein, 11 aa, Homo sapiens
  CDR3 for alpha chain variable domain of TCR clone 251443 (TRAV21, TRAJ9)
CAVPGGFKTIF

SEQ ID NO: 502886 - protein, 12 aa, Homo sapiens
  CDR3 for beta chain variable domain of TCR clone 251443 (TRBV20-1, TRBJ2-3)
CSARVGTDTHYF

SEQ ID NO: 502887 - protein, 16 aa, Homo sapiens
  CDR3 for alpha chain variable domain of TCR clone 251444 (TRAV12-2, TRAJ45)
CAVQRNPGGGADGLTF

SEQ ID NO: 502888 - protein, 12 aa, Homo sapiens
  CDR3 for beta chain variable domain of TCR clone 251444 (TRBV6-1, TRBJ2-5)
CASSEGRETQDF

SEQ ID NO: 502889 - protein, 16 aa, Homo sapiens
  CDR3 for alpha chain variable domain of TCR clone 251445 (TRAV30, TRAJ24)
CGTEIVDADSWGKFQL

SEQ ID NO: 502890 - protein, 18 aa, Homo sapiens
  CDR3 for beta chain variable domain of TCR clone 251445 (TRBV6-5, TRBJ2-1)
CASSYSSRRAGVYNEQFF

SEQ ID NO: 502891 - protein, 14 aa, Homo sapiens
  CDR3 for alpha chain variable domain of TCR clone 251446 (TRAV12-2, TRAJ40)
CAVKIPSGTYKYIF

SEQ ID NO: 502892 - protein, 14 aa, Homo sapiens
  CDR3 for beta chain variable domain of TCR clone 251446 (TRBV5-1, TRBJ2-3)
CASSLFGPTDTQYF

SEQ ID NO: 502893 - protein, 19 aa, Homo sapiens
  CDR3 for alpha chain variable domain of TCR clone 251447 (TRAV26-1, TRAJ52)
CIVRVANNAGGTSYGKLTF

SEQ ID NO: 502894 - protein, 15 aa, Homo sapiens
  CDR3 for beta chain variable domain of TCR clone 251447 (TRBV6-3, TRBJ2-7)
CASSSPGTVFYEQYF

SEQ ID NO: 502895 - protein, 16 aa, Homo sapiens
  CDR3 for alpha chain variable domain of TCR clone 251448 (TRAV23/DV6, TRAJ9)
CAASIGGNTGGFKTII

SEQ ID NO: 502896 - protein, 15 aa, Homo sapiens
  CDR3 for beta chain variable domain of TCR clone 251448 (TRBV10-2, TRBJ2-6)
CASSEQGTGANVLTF

SEQ ID NO: 502897 - protein, 14 aa, Homo sapiens
  CDR3 for alpha chain variable domain of TCR clone 251449 (TRAV13-1, TRAJ48)
CAASTDFGNEKLTF

SEQ ID NO: 502898 - protein, 13 aa, Homo sapiens
  CDR3 for beta chain variable domain of TCR clone 251449 (TRBV7-3, TRBJ2-3)
CASSLRGSQTQYF

SEQ ID NO: 502899 - protein, 13 aa, Homo sapiens
  CDR3 for alpha chain variable domain of TCR clone 251450 (TRAV17, TRAJ9)
CATDYTGGFKTIF

SEQ ID NO: 502900 - protein, 14 aa, Homo sapiens
  CDR3 for beta chain variable domain of TCR clone 251450 (TRBV4-1, TRBJ2-2)
CASSHAVNTGELSF

SEQ ID NO: 502901 - protein, 13 aa, Homo sapiens
  CDR3 for alpha chain variable domain of TCR clone 251451 (TRAV20, TRAJ34)
CAVSSYNTDELIF

SEQ ID NO: 502902 - protein, 14 aa, Homo sapiens
  CDR3 for beta chain variable domain of TCR clone 251451 (TRBV4-2, TRBJ2-3)
CASSQGGFTDTQYF

SEQ ID NO: 502903 - protein, 14 aa, Homo sapiens
  CDR3 for alpha chain variable domain of TCR clone 251452 (TRAV21, TRAJ45)
CAVSSGGGADGLTF

SEQ ID NO: 502904 - protein, 16 aa, Homo sapiens
  CDR3 for beta chain variable domain of TCR clone 251452 (TRBV20-1, TRBJ2-3)
CSAVRDRGPIADTQCF

SEQ ID NO: 502905 - protein, 10 aa, Homo sapiens
  CDR3 for alpha chain variable domain of TCR clone 251453 (TRAV13-1, TRAJ52)
CAEVKGVLVV

SEQ ID NO: 502906 - protein, 13 aa, Homo sapiens
  CDR3 for beta chain variable domain of TCR clone 251453 (TRBV12-4, TRBJ1-2)
CASSLRQGKGYTF

SEQ ID NO: 502907 - protein, 12 aa, Homo sapiens
  CDR3 for alpha chain variable domain of TCR clone 251454 (TRAV13-2, TRAJ8)
CAPWLGFQNLVF

SEQ ID NO: 502908 - protein, 15 aa, Homo sapiens
  CDR3 for beta chain variable domain of TCR clone 251454 (TRBV12-4, TRBJ2-5)
CASSLSGAFQETQYF

SEQ ID NO: 502909 - protein, 12 aa, Homo sapiens
  CDR3 for alpha chain variable domain of TCR clone 251455 (TRAV30, TRAJ43)
CGTEARGNAMRF

SEQ ID NO: 502910 - protein, 13 aa, Homo sapiens
  CDR3 for beta chain variable domain of TCR clone 251455 (TRBV27, TRBJ2-7)
CASSFSQGYEQYF

SEQ ID NO: 502911 - protein, 14 aa, Homo sapiens
  CDR3 for alpha chain variable domain of TCR clone 251456 (TRAV29/DV5, TRAJ36)
CAARRKTGANNLFF

SEQ ID NO: 502912 - protein, 12 aa, Homo sapiens
  CDR3 for beta chain variable domain of TCR clone 251456 (TRBV12-4, TRBJ2-7)
CASNPGGGEQYF

SEQ ID NO: 502913 - protein, 12 aa, Homo sapiens
  CDR3 for alpha chain variable domain of TCR clone 251457 (TRAV35, TRAJ49)
CSGWNTGSQFYF

SEQ ID NO: 502914 - protein, 16 aa, Homo sapiens
  CDR3 for beta chain variable domain of TCR clone 251457 (TRBV5-1, TRBJ2-2)
CASSRWDTTNTGELFF

SEQ ID NO: 502915 - protein, 11 aa, Homo sapiens
  CDR3 for alpha chain variable domain of TCR clone 251458 (TRAV13-1, TRAJ39)
CASHAGNMLTL

SEQ ID NO: 502916 - protein, 16 aa, Homo sapiens
  CDR3 for beta chain variable domain of TCR clone 251458 (TRBV7-3, TRBJ2-2)
CASSLKRGTLSGELFF

SEQ ID NO: 502917 - protein, 14 aa, Homo sapiens
  CDR3 for alpha chain variable domain of TCR clone 251459 (TRAV26-1, TRAJ38)
CIADNAGNNRNLIW

SEQ ID NO: 502918 - protein, 13 aa, Homo sapiens
  CDR3 for beta chain variable domain of TCR clone 251459 (TRBV19, TRBJ1-2)
CASSVPGQDGYTF

SEQ ID NO: 502919 - protein, 13 aa, Homo sapiens
  CDR3 for alpha chain variable domain of TCR clone 251460 (TRAV8-1, TRAJ36)
CAVNAPTGANNLF

SEQ ID NO: 502920 - protein, 15 aa, Homo sapiens
  CDR3 for beta chain variable domain of TCR clone 251460 (TRBV7-2, TRBJ2-3)
CASSLEQGGTDTQYF

SEQ ID NO: 502921 - protein, 15 aa, Homo sapiens
  CDR3 for alpha chain variable domain of TCR clone 251461 (TRAV8-4, TRAJ44)
CAVSSDTGTARKLTF

SEQ ID NO: 502922 - protein, 14 aa, Homo sapiens
  CDR3 for beta chain variable domain of TCR clone 251461 (TRBV5-1, TRBJ1-1)
CASRAQGAMTEAFF

SEQ ID NO: 502923 - protein, 16 aa, Homo sapiens
  CDR3 for alpha chain variable domain of TCR clone 251462 (TRAV26-1, TRAJ36)
CIVRVPDQTGANNLFF

SEQ ID NO: 502924 - protein, 15 aa, Homo sapiens
  CDR3 for beta chain variable domain of TCR clone 251462 (TRBV19, TRBJ2-4)
CASRGPRRGENSQYF

SEQ ID NO: 502925 - protein, 11 aa, Homo sapiens
  CDR3 for alpha chain variable domain of TCR clone 251463 (TRAV17, TRAJ43)
CATPRSNDMRF

SEQ ID NO: 502926 - protein, 14 aa, Homo sapiens
  CDR3 for beta chain variable domain of TCR clone 251463 (TRBV7-2, TRBJ2-7)
CASRSQGAAYDQYF

SEQ ID NO: 502927 - protein, 15 aa, Homo sapiens
  CDR3 for alpha chain variable domain of TCR clone 251464 (TRAV12-2, TRAJ53)
CAVNGGGGSNYKLTF

SEQ ID NO: 502928 - protein, 17 aa, Homo sapiens
  CDR3 for beta chain variable domain of TCR clone 251464 (TRBV7-3, TRBJ2-3)
CASSLMKRMRGADTQYL

SEQ ID NO: 502929 - protein, 11 aa, Homo sapiens
  CDR3 for alpha chain variable domain of TCR clone 251465 (TRAV12-3, TRAJ27)
CAVANAGKSTF

SEQ ID NO: 502930 - protein, 12 aa, Homo sapiens
  CDR3 for beta chain variable domain of TCR clone 251465 (TRBV11-2, TRBJ2-2)
CASSLGGGELFF

SEQ ID NO: 502931 - protein, 14 aa, Homo sapiens
  CDR3 for alpha chain variable domain of TCR clone 251466 (TRAV1-2, TRAJ8)
CAVREDTGFQNLVF

SEQ ID NO: 502932 - protein, 12 aa, Homo sapiens
  CDR3 for beta chain variable domain of TCR clone 251466 (TRBV11-2, TRBJ2-2)
RASSLPTGELFF

SEQ ID NO: 502933 - protein, 14 aa, Homo sapiens
  CDR3 for alpha chain variable domain of TCR clone 251467 (TRAV2, TRAJ23)
CAVGLRNQGGKLIF

SEQ ID NO: 502934 - protein, 15 aa, Homo sapiens
  CDR3 for beta chain variable domain of TCR clone 251467 (TRBV20-1, TRBJ2-7)
CSARDRVSGMDEQYF

SEQ ID NO: 502935 - protein, 13 aa, Homo sapiens
  CDR3 for alpha chain variable domain of TCR clone 251468 (TRAV9-2, TRAJ49)
CALIQIGGNQFYF

SEQ ID NO: 502936 - protein, 15 aa, Homo sapiens
  CDR3 for beta chain variable domain of TCR clone 251468 (TRBV4-1, TRBJ1-4)
CASSDTGGTNEKLFF

SEQ ID NO: 502937 - protein, 11 aa, Homo sapiens
  CDR3 for alpha chain variable domain of TCR clone 251469 (TRAV12-2, TRAJ31)
CAVTRWARLMF

SEQ ID NO: 502938 - protein, 15 aa, Homo sapiens
  CDR3 for beta chain variable domain of TCR clone 251469 (TRBV7-9, TRBJ1-6)
CASSSPGRGNSPLHF

SEQ ID NO: 502939 - protein, 14 aa, Homo sapiens
  CDR3 for alpha chain variable domain of TCR clone 251470 (TRAV26-1, TRAJ38)
CIADNAGNNRKLIW

SEQ ID NO: 502940 - protein, 13 aa, Homo sapiens
  CDR3 for beta chain variable domain of TCR clone 251470 (TRBV6-1, TRBJ1-1)
CASSRQGNTEAFF

SEQ ID NO: 502941 - protein, 14 aa, Homo sapiens
  CDR3 for alpha chain variable domain of TCR clone 251471 (TRAV21, TRAJ38)
CAVANAGDNRKLIW

SEQ ID NO: 502942 - protein, 16 aa, Homo sapiens
  CDR3 for beta chain variable domain of TCR clone 251471 (TRBV5-4, TRBJ2-1)
CASSLALAGAYNEQFF

SEQ ID NO: 502943 - protein, 15 aa, Homo sapiens
  CDR3 for alpha chain variable domain of TCR clone 251472 (TRAV27, TRAJ53)
CRAINSVGSNYKLTF

SEQ ID NO: 502944 - protein, 14 aa, Homo sapiens
  CDR3 for beta chain variable domain of TCR clone 251472 (TRBV7-3, TRBJ2-1)
CASSLAGGTNEQFF

SEQ ID NO: 502945 - protein, 14 aa, Homo sapiens
  CDR3 for alpha chain variable domain of TCR clone 251473 (TRAV13-1, TRAJ44)
CAAKATGTASKLTF

SEQ ID NO: 502946 - protein, 16 aa, Homo sapiens
  CDR3 for beta chain variable domain of TCR clone 251473 (TRBV15, TRBJ1-2)
CATSRRPRTGGGGYTF

SEQ ID NO: 502947 - protein, 13 aa, Homo sapiens
  CDR3 for alpha chain variable domain of TCR clone 251474 (TRAV12-1, TRAJ34)
CVVTGYNTDKLIF

SEQ ID NO: 502948 - protein, 13 aa, Homo sapiens
  CDR3 for beta chain variable domain of TCR clone 251474 (TRBV28, TRBJ2-7)
CASEAGGVYEQYF

SEQ ID NO: 502949 - protein, 14 aa, Homo sapiens
  CDR3 for alpha chain variable domain of TCR clone 251475 (TRAV1-2, TRAJ16)
FAVNRFSDGQKLLF

SEQ ID NO: 502950 - protein, 15 aa, Homo sapiens
  CDR3 for beta chain variable domain of TCR clone 251475 (TRBV20-1, TRBJ1-5)
CSAFKNGQRNQPQHF

SEQ ID NO: 502951 - protein, 14 aa, Homo sapiens
  CDR3 for alpha chain variable domain of TCR clone 251476 (TRAV8-3, TRAJ4)
CAVGAAGGYNKLIF

SEQ ID NO: 502952 - protein, 18 aa, Homo sapiens
  CDR3 for beta chain variable domain of TCR clone 251476 (TRBV7-8, TRBJ2-1)
CASSPAEGLAGGLNEQFF

SEQ ID NO: 502953 - protein, 15 aa, Homo sapiens
  CDR3 for alpha chain variable domain of TCR clone 251477 (TRAV8-3, TRAJ40)
CAAPSLGSGTYRYIF

SEQ ID NO: 502954 - protein, 17 aa, Homo sapiens
  CDR3 for beta chain variable domain of TCR clone 251477 (TRBV11-2, TRBJ2-1)
CASSLYPPGVEYNEQFF

SEQ ID NO: 502955 - protein, 12 aa, Homo sapiens
  CDR3 for alpha chain variable domain of TCR clone 251478 (TRAV12-3, TRAJ17)
CAMTLTGNTLTF

SEQ ID NO: 502956 - protein, 14 aa, Homo sapiens
  CDR3 for beta chain variable domain of TCR clone 251478 (TRBV20-1, TRBJ2-1)
CSAQIGGSANEQFF

SEQ ID NO: 502957 - protein, 15 aa, Homo sapiens
  CDR3 for alpha chain variable domain of TCR clone 251479 (TRAV12-2, TRAJ53)
CAVNGGGGSNYKLTF

SEQ ID NO: 502958 - protein, 16 aa, Homo sapiens
  CDR3 for beta chain variable domain of TCR clone 251479 (TRBV7-3, TRBJ2-3)
CSSLMKRMRGADTQYF

SEQ ID NO: 502959 - protein, 14 aa, Homo sapiens
  CDR3 for alpha chain variable domain of TCR clone 251480 (TRAV8-3, TRAJ44)
CAVGNTCTASKLTF

SEQ ID NO: 502960 - protein, 15 aa, Homo sapiens
  CDR3 for beta chain variable domain of TCR clone 251480 (TRBV28, TRBJ2-7)
CASSFRGQGRYEQYF

SEQ ID NO: 502961 - protein, 12 aa, Homo sapiens
  CDR3 for alpha chain variable domain of TCR clone 251481 (TRAV30, TRAJ15)
CGTNQAGTALIF

SEQ ID NO: 502962 - protein, 15 aa, Homo sapiens
  CDR3 for beta chain variable domain of TCR clone 251481 (TRBV6-5, TRBJ2-7)
CASSRTSGFSYEQYF

SEQ ID NO: 502963 - protein, 13 aa, Homo sapiens
  CDR3 for alpha chain variable domain of TCR clone 251482 (TRAV3, TRAJ8)
CAVRVTGFQKLVF

SEQ ID NO: 502964 - protein, 15 aa, Homo sapiens
  CDR3 for beta chain variable domain of TCR clone 251482 (TRBV20-1, TRBJ2-7)
CSARDRVSGMDEQYF

SEQ ID NO: 502965 - protein, 15 aa, Homo sapiens
  CDR3 for alpha chain variable domain of TCR clone 251483 (TRAV10, TRAJ6)
CVVRPRTGGSYILTF

SEQ ID NO: 502966 - protein, 15 aa, Homo sapiens
  CDR3 for beta chain variable domain of TCR clone 251483 (TRBV20-1, TRBJ2-7)
CSARDRVSGMDEQYF

SEQ ID NO: 502967 - protein, 12 aa, Homo sapiens
  CDR3 for alpha chain variable domain of TCR clone 251484 (TRAV26-1, TRAJ17)
CISQSCRHQANF

SEQ ID NO: 502968 - protein, 16 aa, Homo sapiens
  CDR3 for beta chain variable domain of TCR clone 251484 (TRBV28, TRBJ1-4)
CASSSRTGAANEKLFF

SEQ ID NO: 502969 - protein, 11 aa, Homo sapiens
  CDR3 for alpha chain variable domain of TCR clone 251485 (TRAV12-3, TRAJ43)
CEMSVANDMRF

SEQ ID NO: 502970 - protein, 13 aa, Homo sapiens
  CDR3 for beta chain variable domain of TCR clone 251485 (TRBV20-1, TRBJ1-1)
CSAPLGGGTEAFF

SEQ ID NO: 502971 - protein, 14 aa, Homo sapiens
  CDR3 for alpha chain variable domain of TCR clone 251486 (TRAV9-2, TRAJ39)
CALYIYNAGNMLTF

SEQ ID NO: 502972 - protein, 12 aa, Homo sapiens
  CDR3 for beta chain variable domain of TCR clone 251486 (TRBV10-3, TRBJ2-7)
CLQLAVNYEQYF

SEQ ID NO: 502973 - protein, 13 aa, Homo sapiens
  CDR3 for alpha chain variable domain of TCR clone 251487 (TRAV36/DV7, TRAJ37)
CAVFSSDTGKLIF

SEQ ID NO: 502974 - protein, 14 aa, Homo sapiens
  CDR3 for beta chain variable domain of TCR clone 251487 (TRBV7-2, TRBJ2-5)
CASSPRGSSETQYF

SEQ ID NO: 502975 - protein, 18 aa, Homo sapiens
  CDR3 for alpha chain variable domain of TCR clone 251488 (TRAV26-2, TRAJ54)
CILRDVEVGIQGSQKLVF

SEQ ID NO: 502976 - protein, 16 aa, Homo sapiens
  CDR3 for beta chain variable domain of TCR clone 251488 (TRBV6-1, TRBJ2-5)
CASSETLDRGAETQYF

SEQ ID NO: 502977 - protein, 20 aa, Homo sapiens
  CDR3 for alpha chain variable domain of TCR clone 251489 (TRAV4, TRAJ29)
CCVLLPRGCVPFSGNTPLVF

SEQ ID NO: 502978 - protein, 17 aa, Homo sapiens
  CDR3 for beta chain variable domain of TCR clone 251489 (TRBV25-1, TRBJ2-5)
CASSDARVVFSSYEQYF

SEQ ID NO: 502979 - protein, 14 aa, Homo sapiens
  CDR3 for alpha chain variable domain of TCR clone 251490 (TRAV36/DV7, TRAJ53)
CAVVDGGSNYKLTF

SEQ ID NO: 502980 - protein, 17 aa, Homo sapiens
  CDR3 for beta chain variable domain of TCR clone 251490 (TRBV20-1, TRBJ2-2)
CSASGSGQGGLTGELFF

SEQ ID NO: 502981 - protein, 10 aa, Homo sapiens
  CDR3 for alpha chain variable domain of TCR clone 251491 (TRAV1-2, TRAJ31)
CAFFDARLMF

SEQ ID NO: 502982 - protein, 14 aa, Homo sapiens
  CDR3 for beta chain variable domain of TCR clone 251491 (TRBV12-4, TRBJ1-3)
CASTLTGAGITIYF

SEQ ID NO: 502983 - protein, 12 aa, Homo sapiens
  CDR3 for alpha chain variable domain of TCR clone 251492 (TRAV23/DV6, TRAJ26)
CAASKFGQNFVF

SEQ ID NO: 502984 - protein, 15 aa, Homo sapiens
  CDR3 for beta chain variable domain of TCR clone 251492 (TRBV19, TRBJ2-1)
CASSSPGVPLDEQFF

SEQ ID NO: 502985 - protein, 14 aa, Homo sapiens
  CDR3 for alpha chain variable domain of TCR clone 251493 (TRAV17, TRAJ45)
CATASGGGADGLTF

SEQ ID NO: 502986 - protein, 15 aa, Homo sapiens
  CDR3 for beta chain variable domain of TCR clone 251493 (TRBV11-2, TRBJ2-1)
CASSRNKGLMYEQFF

SEQ ID NO: 502987 - protein, 12 aa, Homo sapiens
  CDR3 for alpha chain variable domain of TCR clone 251494 (TRAV17, TRAJ20)
CATDSNDYKLSF

SEQ ID NO: 502988 - protein, 16 aa, Homo sapiens
  CDR3 for beta chain variable domain of TCR clone 251494 (TRBV7-2, TRBJ1-2)
CASSSDQDRRGHGYTF

SEQ ID NO: 502989 - protein, 14 aa, Homo sapiens
  CDR3 for alpha chain variable domain of TCR clone 251495 (TRAV17, TRAJ22)
CATSPSGSARQITF

SEQ ID NO: 502990 - protein, 15 aa, Homo sapiens
  CDR3 for beta chain variable domain of TCR clone 251495 (TRBV4-1, TRBJ2-5)
CASSQWDLYQETQYF

SEQ ID NO: 502991 - protein, 16 aa, Homo sapiens
  CDR3 for alpha chain variable domain of TCR clone 251496 (TRAV17, TRAJ54)
CATDSDIIQGAQKLVF

SEQ ID NO: 502992 - protein, 14 aa, Homo sapiens
  CDR3 for beta chain variable domain of TCR clone 251496 (TRBV7-2, TRBJ2-7)
CTSSPKTSFYEQYF

SEQ ID NO: 502993 - protein, 15 aa, Homo sapiens
  CDR3 for alpha chain variable domain of TCR clone 251497 (TRAV21, TRAJ52)
CAVRGGGTSYGKLTF

SEQ ID NO: 502994 - protein, 16 aa, Homo sapiens
  CDR3 for beta chain variable domain of TCR clone 251497 (TRBV6-1, TRBJ1-5)
CASSDIAGQINQPQHF

SEQ ID NO: 502995 - protein, 17 aa, Homo sapiens
  CDR3 for alpha chain variable domain of TCR clone 251498 (TRAV12-2, TRAJ42)
CAVNILNYGGSQGNLIF

SEQ ID NO: 502996 - protein, 15 aa, Homo sapiens
  CDR3 for beta chain variable domain of TCR clone 251498 (TRBV2, TRBJ2-2)
CASSRETVGTGELFF

SEQ ID NO: 502997 - protein, 10 aa, Homo sapiens
  CDR3 for alpha chain variable domain of TCR clone 251499 (TRAV12-3, TRAJ49)
CAMNDDQFNF

SEQ ID NO: 502998 - protein, 15 aa, Homo sapiens
  CDR3 for beta chain variable domain of TCR clone 251499 (TRBV9, TRBJ1-6)
CASSVAGTGDSPLHF

SEQ ID NO: 502999 - protein, 17 aa, Homo sapiens
  CDR3 for alpha chain variable domain of TCR clone 251500 (TRAV8-6, TRAJ58)
CAVSSWVGETSGSRLTF

SEQ ID NO: 503000 - protein, 13 aa, Homo sapiens
  CDR3 for beta chain variable domain of TCR clone 251500 (TRBV4-3, TRBJ1-1)
CASSRKMNTEAFF

SEQ ID NO: 503001 - protein, 16 aa, Homo sapiens
  CDR3 for alpha chain variable domain of TCR clone 251501 (TRAV23/DV6, TRAJ9)
CAASIGGNTGGVKTIF

SEQ ID NO: 503002 - protein, 18 aa, Homo sapiens
  CDR3 for beta chain variable domain of TCR clone 251501 (TRBV7-9, TRBJ2-7)
CASSLTTSGSRTWYEQYF

SEQ ID NO: 503003 - protein, 14 aa, Homo sapiens
  CDR3 for alpha chain variable domain of TCR clone 251502 (TRAV1-2, TRAJ16)
CAVNRFSDGQKLLF

SEQ ID NO: 503004 - protein, 15 aa, Homo sapiens
  CDR3 for beta chain variable domain of TCR clone 251502 (TRBV7-2, TRBJ2-3)
CASSLGGVGRDTQYF

SEQ ID NO: 503005 - protein, 17 aa, Homo sapiens
  CDR3 for alpha chain variable domain of TCR clone 251503 (TRAV3, TRAJ12)
CAVRDGGRMDSSDKLIF

SEQ ID NO: 503006 - protein, 17 aa, Homo sapiens
  CDR3 for beta chain variable domain of TCR clone 251503 (TRBV20-1, TRBJ2-1)
CSASSSGLAGSYNEQFF

SEQ ID NO: 503007 - protein, 13 aa, Homo sapiens
  CDR3 for alpha chain variable domain of TCR clone 251504 (TRAV1-2, TRAJ33)
CAVSEDSNYQLIW

SEQ ID NO: 503008 - protein, 16 aa, Homo sapiens
  CDR3 for beta chain variable domain of TCR clone 251504 (TRBV4-2, TRBJ2-7)
CASSRDGVERGYEQYF

SEQ ID NO: 503009 - protein, 14 aa, Homo sapiens
  CDR3 for alpha chain variable domain of TCR clone 251505 (TRAV12-3, TRAJ10)
SHLPLTGGGNKLTF

SEQ ID NO: 503010 - protein, 15 aa, Homo sapiens
  CDR3 for beta chain variable domain of TCR clone 251505 (TRBV25-1, TRBJ2-4)
CGSSETESAKNIQYF

SEQ ID NO: 503011 - protein, 15 aa, Homo sapiens
  CDR3 for alpha chain variable domain of TCR clone 251506 (TRAV21, TRAJ45)
CALSYSGGGADGLTF

SEQ ID NO: 503012 - protein, 13 aa, Homo sapiens
  CDR3 for beta chain variable domain of TCR clone 251506 (TRBV20-1, TRBJ2-5)
CSAATELQETQYF

SEQ ID NO: 503013 - protein, 12 aa, Homo sapiens
  CDR3 for alpha chain variable domain of TCR clone 251507 (TRAV35, TRAJ30)
CAGLNRDDKIIF

SEQ ID NO: 503014 - protein, 15 aa, Homo sapiens
  CDR3 for beta chain variable domain of TCR clone 251507 (TRBV18, TRBJ2-3)
YASSPLAGETDTQYF

SEQ ID NO: 503015 - protein, 13 aa, Homo sapiens
  CDR3 for alpha chain variable domain of TCR clone 251508 (TRAV26-1, TRAJ40)
CIVRVEGTYKYIF

SEQ ID NO: 503016 - protein, 13 aa, Homo sapiens
  CDR3 for beta chain variable domain of TCR clone 251508 (TRBV19, TRBJ1-5)
CASSIGGNQPQHF

SEQ ID NO: 503017 - protein, 11 aa, Homo sapiens
  CDR3 for alpha chain variable domain of TCR clone 251509 (TRAV8-4, TRAJ20)
CAVTNVLTTTS

SEQ ID NO: 503018 - protein, 13 aa, Homo sapiens
  CDR3 for beta chain variable domain of TCR clone 251509 (TRBV19, TRBJ2-3)
CATWDKIRDTQYF

SEQ ID NO: 503019 - protein, 13 aa, Homo sapiens
  CDR3 for alpha chain variable domain of TCR clone 251510 (TRAV13-1, TRAJ39)
CAASIWAGIMLTF

SEQ ID NO: 503020 - protein, 15 aa, Homo sapiens
  CDR3 for beta chain variable domain of TCR clone 251510 (TRBV7-9, TRBJ1-1)
CASSLLEQGGTEAFF

SEQ ID NO: 503021 - protein, 13 aa, Homo sapiens
  CDR3 for alpha chain variable domain of TCR clone 251511 (TRAV27, TRAJ6)
CAGGTRGSYIPTF

SEQ ID NO: 503022 - protein, 14 aa, Homo sapiens
  CDR3 for beta chain variable domain of TCR clone 251511 (TRBV7-6, TRBJ2-3)
CASSVAGGTDTQYF

SEQ ID NO: 503023 - protein, 16 aa, Homo sapiens
  CDR3 for alpha chain variable domain of TCR clone 251512 (TRAV20, TRAJ26)
CAVQHRRDNYGQNFVF

SEQ ID NO: 503024 - protein, 15 aa, Homo sapiens
  CDR3 for beta chain variable domain of TCR clone 251512 (TRBV15, TRBJ1-1)
CATSLQGGRNTEAFF

SEQ ID NO: 503025 - protein, 14 aa, Homo sapiens
  CDR3 for alpha chain variable domain of TCR clone 251513 (TRAV12-2, TRAJ17)
CAVLFKAAGNKLTF

SEQ ID NO: 503026 - protein, 14 aa, Homo sapiens
  CDR3 for beta chain variable domain of TCR clone 251513 (TRBV28, TRBJ1-5)
CASSLGVLVNNQHF

SEQ ID NO: 503027 - protein, 13 aa, Homo sapiens
  CDR3 for alpha chain variable domain of TCR clone 251514 (TRAV3, TRAJ8)
CAVRFTGFQKLVF

SEQ ID NO: 503028 - protein, 12 aa, Homo sapiens
  CDR3 for beta chain variable domain of TCR clone 251514 (TRBV18, TRBJ2-1)
CASSSDEDEQFF

SEQ ID NO: 503029 - protein, 14 aa, Homo sapiens
  CDR3 for alpha chain variable domain of TCR clone 251515 (TRAV12-2, TRAJ13)
CAVKKTGGYQKVTF

SEQ ID NO: 503030 - protein, 14 aa, Homo sapiens
  CDR3 for beta chain variable domain of TCR clone 251515 (TRBV7-2, TRBJ2-7)
CASSPKTSVYEQYF

SEQ ID NO: 503031 - protein, 13 aa, Homo sapiens
  CDR3 for alpha chain variable domain of TCR clone 251516 (TRAV2, TRAJ16)
CAVERSDGQKLVF

SEQ ID NO: 503032 - protein, 15 aa, Homo sapiens
  CDR3 for beta chain variable domain of TCR clone 251516 (TRBV20-1, TRBJ2-5)
CSAIKGQGSQETQYF

SEQ ID NO: 503033 - protein, 16 aa, Homo sapiens
  CDR3 for alpha chain variable domain of TCR clone 251517 (TRAV3, TRAJ6)
CAVRRPQGRGKLHTYI

SEQ ID NO: 503034 - protein, 15 aa, Homo sapiens
  CDR3 for beta chain variable domain of TCR clone 251517 (TRBV20-1, TRBJ1-1)
CSASWDRFLNTEAFF

SEQ ID NO: 503035 - protein, 16 aa, Homo sapiens
  CDR3 for alpha chain variable domain of TCR clone 251518 (TRAV1-2, TRAJ10)
CAVSGVLTGGGNKLTF

SEQ ID NO: 503036 - protein, 14 aa, Homo sapiens
  CDR3 for beta chain variable domain of TCR clone 251518 (TRBV25-1, TRBJ1-1)
CASTHLGGNTEAFF

SEQ ID NO: 503037 - protein, 15 aa, Homo sapiens
  CDR3 for alpha chain variable domain of TCR clone 251519 (TRAV13-1, TRAJ4)
CAASLISGGYNKLIF

SEQ ID NO: 503038 - protein, 15 aa, Homo sapiens
  CDR3 for beta chain variable domain of TCR clone 251519 (TRBV28, TRBJ2-3)
CASTPRGENADTQYF

SEQ ID NO: 503039 - protein, 14 aa, Homo sapiens
  CDR3 for alpha chain variable domain of TCR clone 251520 (TRAV12-2, TRAJ45)
CAAYSGGGADGLTF

SEQ ID NO: 503040 - protein, 14 aa, Homo sapiens
  CDR3 for beta chain variable domain of TCR clone 251520 (TRBV7-3, TRBJ2-1)
CASSLAGGTNEQFF

SEQ ID NO: 503041 - protein, 18 aa, Homo sapiens
  CDR3 for alpha chain variable domain of TCR clone 251521 (TRAV26-2, TRAJ45)
CILRVDKYSGGGADGLHF

SEQ ID NO: 503042 - protein, 16 aa, Homo sapiens
  CDR3 for beta chain variable domain of TCR clone 251521 (TRBV2, TRBJ1-4)
CASNLLQGATNEKLFF

SEQ ID NO: 503043 - protein, 14 aa, Homo sapiens
  CDR3 for alpha chain variable domain of TCR clone 251522 (TRAV17, TRAJ56)
CATGDTGANSKLTF

SEQ ID NO: 503044 - protein, 16 aa, Homo sapiens
  CDR3 for beta chain variable domain of TCR clone 251522 (TRBV19, TRBJ2-1)
CASSIKLAGSYNEQFF

SEQ ID NO: 503045 - protein, 21 aa, Homo sapiens
  CDR3 for alpha chain variable domain of TCR clone 251523 (TRAV25, TRAJ7)
TATQTTDVGTYFCPGYNRLAF

SEQ ID NO: 503046 - protein, 14 aa, Homo sapiens
  CDR3 for beta chain variable domain of TCR clone 251523 (TRBV11-2, TRBJ2-2)
CASSLGLRVRELFF

SEQ ID NO: 503047 - protein, 14 aa, Homo sapiens
  CDR3 for alpha chain variable domain of TCR clone 251524 (TRAV24, TRAJ42)
CAQNYGGSQGNLIF

SEQ ID NO: 503048 - protein, 15 aa, Homo sapiens
  CDR3 for beta chain variable domain of TCR clone 251524 (TRBV19, TRBJ1-5)
CASSIPGGAGKPQHF

SEQ ID NO: 503049 - protein, 15 aa, Homo sapiens
  CDR3 for alpha chain variable domain of TCR clone 251525 (TRAV3, TRAJ22)
CAVRDRGGSARQLTF

SEQ ID NO: 503050 - protein, 14 aa, Homo sapiens
  CDR3 for beta chain variable domain of TCR clone 251525 (TRBV7-6, TRBJ2-3)
CASSVAGGTDTQYF

SEQ ID NO: 503051 - protein, 14 aa, Homo sapiens
  CDR3 for alpha chain variable domain of TCR clone 251526 (TRAV16, TRAJ31)
CALSGRNKHARLMF

SEQ ID NO: 503052 - protein, 12 aa, Homo sapiens
  CDR3 for beta chain variable domain of TCR clone 251526 (TRBV11-2, TRBJ1-2)
CASSREGDGYTF

SEQ ID NO: 503053 - protein, 18 aa, Homo sapiens
  CDR3 for alpha chain variable domain of TCR clone 251527 (TRAV8-4, TRAJ52)
CAVASFNAVGTSYGKLTF

SEQ ID NO: 503054 - protein, 14 aa, Homo sapiens
  CDR3 for beta chain variable domain of TCR clone 251527 (TRBV18, TRBJ1-5)
CASSRQQRNQPQHF

SEQ ID NO: 503055 - protein, 13 aa, Homo sapiens
  CDR3 for alpha chain variable domain of TCR clone 251528 (TRAV16, TRAJ54)
CALMVQGAQKRVF

SEQ ID NO: 503056 - protein, 12 aa, Homo sapiens
  CDR3 for beta chain variable domain of TCR clone 251528 (TRBV18, TRBJ2-7)
CASSTAMGEQYF

SEQ ID NO: 503057 - protein, 14 aa, Homo sapiens
  CDR3 for alpha chain variable domain of TCR clone 251529 (TRAV13-1, TRAJ8)
CAASEDTGFQKLVF

SEQ ID NO: 503058 - protein, 13 aa, Homo sapiens
  CDR3 for beta chain variable domain of TCR clone 251529 (TRBV19, TRBJ1-5)
CDSSTRRDQPQHF

SEQ ID NO: 503059 - protein, 11 aa, Homo sapiens
  CDR3 for alpha chain variable domain of TCR clone 251530 (TRAV2, TRAJ13)
CASGGYQKVTF

SEQ ID NO: 503060 - protein, 15 aa, Homo sapiens
  CDR3 for beta chain variable domain of TCR clone 251530 (TRBV9, TRBJ1-6)
CASSVAGTGDSTLHF

SEQ ID NO: 503061 - protein, 16 aa, Homo sapiens
  CDR3 for alpha chain variable domain of TCR clone 251531 (TRAV26-1, TRAJ23)
CIVRVHPYHQGGKLIF

SEQ ID NO: 503062 - protein, 15 aa, Homo sapiens
  CDR3 for beta chain variable domain of TCR clone 251531 (TRBV5-7, TRBJ2-7)
CASSPYFEGSYEQYF

SEQ ID NO: 503063 - protein, 10 aa, Homo sapiens
  CDR3 for alpha chain variable domain of TCR clone 251532 (TRAV5, TRAJ34)
CAEDTAKLIF

SEQ ID NO: 503064 - protein, 12 aa, Homo sapiens
  CDR3 for beta chain variable domain of TCR clone 251532 (TRBV11-2, TRBJ2-2)
CASSLGGGELFF

SEQ ID NO: 503065 - protein, 15 aa, Homo sapiens
  CDR3 for alpha chain variable domain of TCR clone 251533 (TRAV26-2, TRAJ21)
CILSNTTSTNFTLDL

SEQ ID NO: 503066 - protein, 16 aa, Homo sapiens
  CDR3 for beta chain variable domain of TCR clone 251533 (TRBV4-2, TRBJ2-6)
CASSQARASGANVLTF

SEQ ID NO: 503067 - protein, 11 aa, Homo sapiens
  CDR3 for alpha chain variable domain of TCR clone 251534 (TRAV17, TRAJ43)
CATPRSNDMRF

SEQ ID NO: 503068 - protein, 15 aa, Homo sapiens
  CDR3 for beta chain variable domain of TCR clone 251534 (TRBV11-2, TRBJ2-1)
CASSLGTSELNEQFF

SEQ ID NO: 503069 - protein, 12 aa, Homo sapiens
  CDR3 for alpha chain variable domain of TCR clone 251535 (TRAV12-3, TRAJ17)
CAMTLTGNKLTF

SEQ ID NO: 503070 - protein, 15 aa, Homo sapiens
  CDR3 for beta chain variable domain of TCR clone 251535 (TRBV20-1, TRBJ2-7)
CSARDRVTGMDERYF

SEQ ID NO: 503071 - protein, 15 aa, Homo sapiens
  CDR3 for alpha chain variable domain of TCR clone 251536 (TRAV20, TRAJ43)
CAVQAGKSSNNDMRF

SEQ ID NO: 503072 - protein, 14 aa, Homo sapiens
  CDR3 for beta chain variable domain of TCR clone 251536 (TRBV27, TRBJ2-1)
CDSRHLGGGKEQFF

SEQ ID NO: 503073 - protein, 14 aa, Homo sapiens
  CDR3 for alpha chain variable domain of TCR clone 251537 (TRAV20, TRAJ56)
CAVQYGGANSKLTF

SEQ ID NO: 503074 - protein, 14 aa, Homo sapiens
  CDR3 for beta chain variable domain of TCR clone 251537 (TRBV20-1, TRBJ2-7)
CSAKRGRSSYEQYF

SEQ ID NO: 503075 - protein, 12 aa, Homo sapiens
  CDR3 for alpha chain variable domain of TCR clone 251538 (TRAV12-3, TRAJ17)
CAMTLTGNELTF

SEQ ID NO: 503076 - protein, 15 aa, Homo sapiens
  CDR3 for beta chain variable domain of TCR clone 251538 (TRBV20-1, TRBJ2-7)
CSARDRVSGMNEQYF

SEQ ID NO: 503077 - protein, 17 aa, Homo sapiens
  CDR3 for alpha chain variable domain of TCR clone 251539 (TRAV3, TRAJ6)
CAVRDGPRAGGSYIPTS

SEQ ID NO: 503078 - protein, 14 aa, Homo sapiens
  CDR3 for beta chain variable domain of TCR clone 251539 (TRBV7-2, TRBJ2-7)
CAGSPKTSFYEQYF

SEQ ID NO: 503079 - protein, 12 aa, Homo sapiens
  CDR3 for alpha chain variable domain of TCR clone 251540 (TRAV17, TRAJ57)
CATDGGSEKLFF

SEQ ID NO: 503080 - protein, 16 aa, Homo sapiens
  CDR3 for beta chain variable domain of TCR clone 251540 (TRBV4-2, TRBJ1-4)
CASSQARGPTNEKLFF

SEQ ID NO: 503081 - protein, 12 aa, Homo sapiens
  CDR3 for alpha chain variable domain of TCR clone 251541 (TRAV13-1, TRAJ21)
CAANEGFNKFYF

SEQ ID NO: 503082 - protein, 13 aa, Homo sapiens
  CDR3 for beta chain variable domain of TCR clone 251541 (TRBV7-9, TRBJ1-2)
CASSLKQNYGYTF

SEQ ID NO: 503083 - protein, 15 aa, Homo sapiens
  CDR3 for alpha chain variable domain of TCR clone 251542 (TRAV12-2, TRAJ53)
CAVNGGGGSNYKLTF

SEQ ID NO: 503084 - protein, 13 aa, Homo sapiens
  CDR3 for beta chain variable domain of TCR clone 251542 (TRBV3-1, TRBJ1-1)
CASSPGVNTEAFF

SEQ ID NO: 503085 - protein, 17 aa, Homo sapiens
  CDR3 for alpha chain variable domain of TCR clone 251543 (TRAV13-1, TRAJ31)
CAPRDRLMFGDGTQLVV

SEQ ID NO: 503086 - protein, 17 aa, Homo sapiens
  CDR3 for beta chain variable domain of TCR clone 251543 (TRBV28, TRBJ2-5)
CASSTPEGDALQETQYF

SEQ ID NO: 503087 - protein, 15 aa, Homo sapiens
  CDR3 for alpha chain variable domain of TCR clone 251544 (TRAV3, TRAJ32)
CAVSSYGGATNKLIF

SEQ ID NO: 503088 - protein, 12 aa, Homo sapiens
  CDR3 for beta chain variable domain of TCR clone 251544 (TRBV11-2, TRBJ2-1)
CASSPGNNEQFF

SEQ ID NO: 503089 - protein, 16 aa, Homo sapiens
  CDR3 for alpha chain variable domain of TCR clone 251545 (TRAV30, TRAJ24)
CGTEIVDADSWGKFQI

SEQ ID NO: 503090 - protein, 13 aa, Homo sapiens
  CDR3 for beta chain variable domain of TCR clone 251545 (TRBV18, TRBJ1-1)
CASSGGRNTEAFF

SEQ ID NO: 503091 - protein, 13 aa, Homo sapiens
  CDR3 for alpha chain variable domain of TCR clone 251546 (TRAV12-3, TRAJ33)
CAMSVNSNYQLIW

SEQ ID NO: 503092 - protein, 15 aa, Homo sapiens
  CDR3 for beta chain variable domain of TCR clone 251546 (TRBV6-5, TRBJ2-1)
CASSYDAGAGNEQFF

SEQ ID NO: 503093 - protein, 16 aa, Homo sapiens
  CDR3 for alpha chain variable domain of TCR clone 251547 (TRAV21, TRAJ37)
CAVRTAGSSNTGKLIF

SEQ ID NO: 503094 - protein, 15 aa, Homo sapiens
  CDR3 for beta chain variable domain of TCR clone 251547 (TRBV4-1, TRBJ2-7)
CASSQEWGPSYEQYF

SEQ ID NO: 503095 - protein, 13 aa, Homo sapiens
  CDR3 for alpha chain variable domain of TCR clone 251548 (TRAV38-1, TRAJ42)
GARWGGSQGNRIF

SEQ ID NO: 503096 - protein, 17 aa, Homo sapiens
  CDR3 for beta chain variable domain of TCR clone 251548 (TRBV20-1, TRBJ2-1)
CSARDPLAGVWDNEQFF

SEQ ID NO: 503097 - protein, 16 aa, Homo sapiens
  CDR3 for alpha chain variable domain of TCR clone 251549 (TRAV12-3, TRAJ53)
CAMSPGSGGSDYKLTF

SEQ ID NO: 503098 - protein, 15 aa, Homo sapiens
  CDR3 for beta chain variable domain of TCR clone 251549 (TRBV27, TRBJ2-1)
CASSNGGGSSNEQFF

SEQ ID NO: 503099 - protein, 15 aa, Homo sapiens
  CDR3 for alpha chain variable domain of TCR clone 251550 (TRAV8-3, TRAJ41)
CAVGSNSNSGYALNF

SEQ ID NO: 503100 - protein, 14 aa, Homo sapiens
  CDR3 for beta chain variable domain of TCR clone 251550 (TRBV19, TRBJ1-1)
CASRRFAGVTEAFF

SEQ ID NO: 503101 - protein, 14 aa, Homo sapiens
  CDR3 for alpha chain variable domain of TCR clone 251551 (TRAV13-2, TRAJ20)
CAESPAKDDYKLSF

SEQ ID NO: 503102 - protein, 12 aa, Homo sapiens
  CDR3 for beta chain variable domain of TCR clone 251551 (TRBV7-8, TRBJ2-5)
GASSPRVETQYF

SEQ ID NO: 503103 - protein, 15 aa, Homo sapiens
  CDR3 for alpha chain variable domain of TCR clone 251552 (TRAV12-1, TRAJ36)
CVVNDHQTGANNLFF

SEQ ID NO: 503104 - protein, 12 aa, Homo sapiens
  CDR3 for beta chain variable domain of TCR clone 251552 (TRBV29-1, TRBJ2-3)
CSVTGGADTQYF

SEQ ID NO: 503105 - protein, 16 aa, Homo sapiens
  CDR3 for alpha chain variable domain of TCR clone 251553 (TRAV12-3, TRAJ53)
CAMSPGSGGSNYKLTF

SEQ ID NO: 503106 - protein, 17 aa, Homo sapiens
  CDR3 for beta chain variable domain of TCR clone 251553 (TRBV28, TRBJ2-5)
CASSTPEGDALQQTQYF

SEQ ID NO: 503107 - protein, 14 aa, Homo sapiens
  CDR3 for alpha chain variable domain of TCR clone 251554 (TRAV3, TRAJ6)
CAVRDWGGSYIPTF

SEQ ID NO: 503108 - protein, 17 aa, Homo sapiens
  CDR3 for beta chain variable domain of TCR clone 251554 (TRBV6-5, TRBJ2-1)
CASRLSRRFESYNEQFF

SEQ ID NO: 503109 - protein, 15 aa, Homo sapiens
  CDR3 for alpha chain variable domain of TCR clone 251555 (TRAV26-1, TRAJ29)
CIVRVEGSGNTPLVF

SEQ ID NO: 503110 - protein, 14 aa, Homo sapiens
  CDR3 for beta chain variable domain of TCR clone 251555 (TRBV7-2, TRBJ2-5)
CASSTGGELKTQYF

SEQ ID NO: 503111 - protein, 12 aa, Homo sapiens
  CDR3 for alpha chain variable domain of TCR clone 251556 (TRAV36/DV7, TRAJ54)
CAVVRGAQKLVF

SEQ ID NO: 503112 - protein, 13 aa, Homo sapiens
  CDR3 for beta chain variable domain of TCR clone 251556 (TRBV7-2, TRBJ1-1)
CASNLKGAKVAFF

SEQ ID NO: 503113 - protein, 14 aa, Homo sapiens
  CDR3 for alpha chain variable domain of TCR clone 251557 (TRAV17, TRAJ4)
CATVPSGGYNKLIF

SEQ ID NO: 503114 - protein, 14 aa, Homo sapiens
  CDR3 for beta chain variable domain of TCR clone 251557 (TRBV12-4, TRBJ2-5)
CASSFGASGGTQYF

SEQ ID NO: 503115 - protein, 14 aa, Homo sapiens
  CDR3 for alpha chain variable domain of TCR clone 251558 (TRAV12-1, TRAJ22)
CVVTTSGSSRQLTF

SEQ ID NO: 503116 - protein, 16 aa, Homo sapiens
  CDR3 for beta chain variable domain of TCR clone 251558 (TRBV6-6, TRBJ2-1)
CASSLLSDSSYNEQFF

SEQ ID NO: 503117 - protein, 15 aa, Homo sapiens
  CDR3 for alpha chain variable domain of TCR clone 251559 (TRAV8-3, TRAJ45)
CASSYSGGGADGLTF

SEQ ID NO: 503118 - protein, 16 aa, Homo sapiens
  CDR3 for beta chain variable domain of TCR clone 251559 (TRBV28, TRBJ1-4)
CASSSRTGAANEKLFF

SEQ ID NO: 503119 - protein, 13 aa, Homo sapiens
  CDR3 for alpha chain variable domain of TCR clone 251560 (TRAV12-3, TRAJ6)
CAMIPGGSYIPTF

SEQ ID NO: 503120 - protein, 16 aa, Homo sapiens
  CDR3 for beta chain variable domain of TCR clone 251560 (TRBV7-2, TRBJ2-7)
CASTSQAASGGYEQYF

SEQ ID NO: 503121 - protein, 16 aa, Homo sapiens
  CDR3 for alpha chain variable domain of TCR clone 251561 (TRAV16, TRAJ52)
CALSAAGGTSYGKLTF

SEQ ID NO: 503122 - protein, 15 aa, Homo sapiens
  CDR3 for beta chain variable domain of TCR clone 251561 (TRBV28, TRBJ1-4)
CASSLGTGTKEKLFF

SEQ ID NO: 503123 - protein, 17 aa, Homo sapiens
  CDR3 for alpha chain variable domain of TCR clone 251562 (TRAV3, TRAJ42)
CAVRYRDYGGSQGNLIF

SEQ ID NO: 503124 - protein, 14 aa, Homo sapiens
  CDR3 for beta chain variable domain of TCR clone 251562 (TRBV12-5, TRBJ2-5)
CASGSRTHQETQYF

SEQ ID NO: 503125 - protein, 11 aa, Homo sapiens
  CDR3 for alpha chain variable domain of TCR clone 251563 (TRAV3, TRAJ21)
CAVCNFNKFYF

SEQ ID NO: 503126 - protein, 15 aa, Homo sapiens
  CDR3 for beta chain variable domain of TCR clone 251563 (TRBV11-2, TRBJ2-1)
CASSRNRGLMYEQFF

SEQ ID NO: 503127 - protein, 14 aa, Homo sapiens
  CDR3 for alpha chain variable domain of TCR clone 251564 (TRAV20, TRAJ22)
CSVQVSGSARQLTF

SEQ ID NO: 503128 - protein, 13 aa, Homo sapiens
  CDR3 for beta chain variable domain of TCR clone 251564 (TRBV20-1, TRBJ2-5)
CSAREGGKETQYF

SEQ ID NO: 503129 - protein, 12 aa, Homo sapiens
  CDR3 for alpha chain variable domain of TCR clone 251565 (TRAV13-1, TRAJ21)
CAAKEGFNKSYF

SEQ ID NO: 503130 - protein, 13 aa, Homo sapiens
  CDR3 for beta chain variable domain of TCR clone 251565 (TRBV19, TRBJ1-2)
CASSVPGQDGDTF

SEQ ID NO: 503131 - protein, 13 aa, Homo sapiens
  CDR3 for alpha chain variable domain of TCR clone 251566 (TRAV39, TRAJ48)
CAAVNFGNEKLTF

SEQ ID NO: 503132 - protein, 15 aa, Homo sapiens
  CDR3 for beta chain variable domain of TCR clone 251566 (TRBV7-9, TRBJ1-6)
CASSSPGRGNSPLHF

SEQ ID NO: 503133 - protein, 15 aa, Homo sapiens
  CDR3 for alpha chain variable domain of TCR clone 251567 (TRAV26-1, TRAJ15)
CIVRAANQAGTALIF

SEQ ID NO: 503134 - protein, 13 aa, Homo sapiens
  CDR3 for beta chain variable domain of TCR clone 251567 (TRBV7-7, TRBJ2-5)
CASSRSGQETQYF

SEQ ID NO: 503135 - protein, 15 aa, Homo sapiens
  CDR3 for alpha chain variable domain of TCR clone 251568 (TRAV26-1, TRAJ29)
CIVRVEGSGNTPLVF

SEQ ID NO: 503136 - protein, 16 aa, Homo sapiens
  CDR3 for beta chain variable domain of TCR clone 251568 (TRBV7-2, TRBJ2-1)
CASSWRSPTGNNEQFF

SEQ ID NO: 503137 - protein, 12 aa, Homo sapiens
  CDR3 for alpha chain variable domain of TCR clone 251569 (TRAV13-1, TRAJ49)
CAAPNTGNQFYF

SEQ ID NO: 503138 - protein, 17 aa, Homo sapiens
  CDR3 for beta chain variable domain of TCR clone 251569 (TRBV25-1, TRBJ2-7)
CACSDARVVLSSYEQYF

SEQ ID NO: 503139 - protein, 11 aa, Homo sapiens
  CDR3 for alpha chain variable domain of TCR clone 251570 (TRAV35, TRAJ22)
CAGPGVGQLTF

SEQ ID NO: 503140 - protein, 15 aa, Homo sapiens
  CDR3 for beta chain variable domain of TCR clone 251570 (TRBV27, TRBJ1-5)
CASSLGTGFDQPQHF

SEQ ID NO: 503141 - protein, 10 aa, Homo sapiens
  CDR3 for alpha chain variable domain of TCR clone 251571 (TRAV21, TRAJ31)
CAVDNARRMF

SEQ ID NO: 503142 - protein, 13 aa, Homo sapiens
  CDR3 for beta chain variable domain of TCR clone 251571 (TRBV4-1, TRBJ1-1)
CASSRKMNTEAFF

SEQ ID NO: 503143 - protein, 13 aa, Homo sapiens
  CDR3 for alpha chain variable domain of TCR clone 251572 (TRAV2, TRAJ40)
CAVVTSGTYKYIF

SEQ ID NO: 503144 - protein, 16 aa, Homo sapiens
  CDR3 for beta chain variable domain of TCR clone 251572 (TRBV5-1, TRBJ2-5)
CASSAARAGAQETQYF

SEQ ID NO: 503145 - protein, 12 aa, Homo sapiens
  CDR3 for alpha chain variable domain of TCR clone 251573 (TRAV12-3, TRAJ17)
CAMTLTGNRLTF

SEQ ID NO: 503146 - protein, 16 aa, Homo sapiens
  CDR3 for beta chain variable domain of TCR clone 251573 (TRBV7-3, TRBJ2-1)
CASSLEGYRSYNEQFF

SEQ ID NO: 503147 - protein, 13 aa, Homo sapiens
  CDR3 for alpha chain variable domain of TCR clone 251574 (TRAV21, TRAJ27)
CAARPGNAGKSTF

SEQ ID NO: 503148 - protein, 14 aa, Homo sapiens
  CDR3 for beta chain variable domain of TCR clone 251574 (TRBV7-6, TRBJ2-3)
CASGLGTVTHTQYF

SEQ ID NO: 503149 - protein, 11 aa, Homo sapiens
  CDR3 for alpha chain variable domain of TCR clone 251575 (TRAV35, TRAJ34)
CWARNTDKLIF

SEQ ID NO: 503150 - protein, 14 aa, Homo sapiens
  CDR3 for beta chain variable domain of TCR clone 251575 (TRBV4-1, TRBJ1-5)
CASSPKGDNQPQHF

SEQ ID NO: 503151 - protein, 16 aa, Homo sapiens
  CDR3 for alpha chain variable domain of TCR clone 251576 (TRAV12-2, TRAJ10)
CAVNRVLTGGGNKLTF

SEQ ID NO: 503152 - protein, 14 aa, Homo sapiens
  CDR3 for beta chain variable domain of TCR clone 251576 (TRBV7-6, TRBJ2-3)
CASSLGTVTDTQYF

SEQ ID NO: 503153 - protein, 16 aa, Homo sapiens
  CDR3 for alpha chain variable domain of TCR clone 251577 (TRAV30, TRAJ24)
CGTEIVDADSCGKFQF

SEQ ID NO: 503154 - protein, 17 aa, Homo sapiens
  CDR3 for beta chain variable domain of TCR clone 251577 (TRBV20-1, TRBJ2-1)
CSASSSGLAGSYNEQFF

SEQ ID NO: 503155 - protein, 20 aa, Homo sapiens
  CDR3 for alpha chain variable domain of TCR clone 251578 (TRAV26-1, TRAJ37)
CCVLLHRQINGSSNTGKLIF

SEQ ID NO: 503156 - protein, 13 aa, Homo sapiens
  CDR3 for beta chain variable domain of TCR clone 251578 (TRBV20-1, TRBJ2-7)
CSARTSGNYEQYL

SEQ ID NO: 503157 - protein, 14 aa, Homo sapiens
  CDR3 for alpha chain variable domain of TCR clone 251579 (TRAV1-2, TRAJ16)
CAVNRFSDGAKLLF

SEQ ID NO: 503158 - protein, 15 aa, Homo sapiens
  CDR3 for beta chain variable domain of TCR clone 251579 (TRBV7-9, TRBJ1-6)
CASSSPGRGNSPLHF

SEQ ID NO: 503159 - protein, 11 aa, Homo sapiens
  CDR3 for alpha chain variable domain of TCR clone 251580 (TRAV2, TRAJ33)
CAVDSNYQLIW

SEQ ID NO: 503160 - protein, 13 aa, Homo sapiens
  CDR3 for beta chain variable domain of TCR clone 251580 (TRBV19, TRBJ1-2)
CASSVPGQDGDTF

SEQ ID NO: 503161 - protein, 14 aa, Homo sapiens
  CDR3 for alpha chain variable domain of TCR clone 251581 (TRAV35, TRAJ22)
CAGLRPGSARQLTF

SEQ ID NO: 503162 - protein, 17 aa, Homo sapiens
  CDR3 for beta chain variable domain of TCR clone 251581 (TRBV15, TRBJ1-4)
CATSRYGTGDPNEKLFC

SEQ ID NO: 503163 - protein, 17 aa, Homo sapiens
  CDR3 for alpha chain variable domain of TCR clone 251582 (TRAV3, TRAJ6)
CAVRDGPRAGGSYIPTF

SEQ ID NO: 503164 - protein, 16 aa, Homo sapiens
  CDR3 for beta chain variable domain of TCR clone 251582 (TRBV27, TRBJ2-2)
CASSFRGPVRTGELFF

SEQ ID NO: 503165 - protein, 13 aa, Homo sapiens
  CDR3 for alpha chain variable domain of TCR clone 251583 (TRAV41, TRAJ49)
CAVSGTPGNQFYF

SEQ ID NO: 503166 - protein, 16 aa, Homo sapiens
  CDR3 for beta chain variable domain of TCR clone 251583 (TRBV12-4, TRBJ2-5)
CTSVPAVAGAGETQYF

SEQ ID NO: 503167 - protein, 16 aa, Homo sapiens
  CDR3 for alpha chain variable domain of TCR clone 251584 (TRAV26-1, TRAJ32)
CIVRTNYGGATNKLIF

SEQ ID NO: 503168 - protein, 14 aa, Homo sapiens
  CDR3 for beta chain variable domain of TCR clone 251584 (TRBV27, TRBJ1-1)
CTSSLLSGLSEAFF

SEQ ID NO: 503169 - protein, 11 aa, Homo sapiens
  CDR3 for alpha chain variable domain of TCR clone 251585 (TRAV3, TRAJ21)
CAVVNFNKFYF

SEQ ID NO: 503170 - protein, 16 aa, Homo sapiens
  CDR3 for beta chain variable domain of TCR clone 251585 (TRBV19, TRBJ2-1)
CASSEAGPSSYNEQFF

SEQ ID NO: 503171 - protein, 16 aa, Homo sapiens
  CDR3 for alpha chain variable domain of TCR clone 251586 (TRAV3, TRAJ42)
CAVRDIEGGSQGNIIF

SEQ ID NO: 503172 - protein, 14 aa, Homo sapiens
  CDR3 for beta chain variable domain of TCR clone 251586 (TRBV18, TRBJ1-1)
CASSPPTGRTEASF

SEQ ID NO: 503173 - protein, 15 aa, Homo sapiens
  CDR3 for alpha chain variable domain of TCR clone 251587 (TRAV16, TRAJ23)
CALSGNYNQGGKLIF

SEQ ID NO: 503174 - protein, 18 aa, Homo sapiens
  CDR3 for beta chain variable domain of TCR clone 251587 (TRBV7-8, TRBJ2-3)
CASSLSWTGGFSTDTQYF

SEQ ID NO: 503175 - protein, 11 aa, Homo sapiens
  CDR3 for alpha chain variable domain of TCR clone 251588 (TRAV2, TRAJ33)
CAVESNYQLIW

SEQ ID NO: 503176 - protein, 15 aa, Homo sapiens
  CDR3 for beta chain variable domain of TCR clone 251588 (TRBV19, TRBJ1-1)
RATTSGQIQNTEAFF

SEQ ID NO: 503177 - protein, 15 aa, Homo sapiens
  CDR3 for alpha chain variable domain of TCR clone 251589 (TRAV30, TRAJ34)
CGTVGYNTTGSSLGL

SEQ ID NO: 503178 - protein, 16 aa, Homo sapiens
  CDR3 for beta chain variable domain of TCR clone 251589 (TRBV7-9, TRBJ1-2)
CASSLGFSSGEDGYTF

SEQ ID NO: 503179 - protein, 13 aa, Homo sapiens
  CDR3 for alpha chain variable domain of TCR clone 251590 (TRAV29/DV5, TRAJ34)
CAARVDNTDKLIF

SEQ ID NO: 503180 - protein, 14 aa, Homo sapiens
  CDR3 for beta chain variable domain of TCR clone 251590 (TRBV9, TRBJ2-7)
CASSVGVGSYEQYF

SEQ ID NO: 503181 - protein, 14 aa, Homo sapiens
  CDR3 for alpha chain variable domain of TCR clone 251591 (TRAV16, TRAJ29)
CALTRNSGNTPLVF

SEQ ID NO: 503182 - protein, 12 aa, Homo sapiens
  CDR3 for beta chain variable domain of TCR clone 251591 (TRBV2, TRBJ2-1)
CAYGPPGNEQFF

SEQ ID NO: 503183 - protein, 14 aa, Homo sapiens
  CDR3 for alpha chain variable domain of TCR clone 251592 (TRAV1-2, TRAJ16)
CAVRGFSDGQKLLF

SEQ ID NO: 503184 - protein, 15 aa, Homo sapiens
  CDR3 for beta chain variable domain of TCR clone 251592 (TRBV7-2, TRBJ2-1)
CASSSGLAGGNEQFF

SEQ ID NO: 503185 - protein, 14 aa, Homo sapiens
  CDR3 for alpha chain variable domain of TCR clone 251593 (TRAV1-2, TRAJ8)
CAVREDTGFPKLVF

SEQ ID NO: 503186 - protein, 16 aa, Homo sapiens
  CDR3 for beta chain variable domain of TCR clone 251593 (TRBV19, TRBJ2-3)
CASGTGPNDGTDTQYF

SEQ ID NO: 503187 - protein, 23 aa, Homo sapiens
  CDR3 for alpha chain variable domain of TCR clone 251594 (TRAV1-1, TRAJ29)
LLQELQMKDSASYFLGGSTPLVF

SEQ ID NO: 503188 - protein, 13 aa, Homo sapiens
  CDR3 for beta chain variable domain of TCR clone 251594 (TRBV25-1, TRBJ2-7)
CASSEDGDYEQYF

SEQ ID NO: 503189 - protein, 15 aa, Homo sapiens
  CDR3 for alpha chain variable domain of TCR clone 251595 (TRAV26-2, TRAJ50)
CILRDEETSYDKLIF

SEQ ID NO: 503190 - protein, 14 aa, Homo sapiens
  CDR3 for beta chain variable domain of TCR clone 251595 (TRBV23-1, TRBJ2-7)
CASSPTVTSSTSGR

SEQ ID NO: 503191 - protein, 11 aa, Homo sapiens
  CDR3 for alpha chain variable domain of TCR clone 251596 (TRAV4, TRAJ31)
CLVGDNARLLF

SEQ ID NO: 503192 - protein, 16 aa, Homo sapiens
  CDR3 for beta chain variable domain of TCR clone 251596 (TRBV7-2, TRBJ2-5)
CASSSKWLSCQETQYF

SEQ ID NO: 503193 - protein, 14 aa, Homo sapiens
  CDR3 for alpha chain variable domain of TCR clone 251597 (TRAV27, TRAJ49)
CAGRPEGTGNQVYF

SEQ ID NO: 503194 - protein, 12 aa, Homo sapiens
  CDR3 for beta chain variable domain of TCR clone 251597 (TRBV12-4, TRBJ2-7)
CASSLGGYEQYF

SEQ ID NO: 503195 - protein, 14 aa, Homo sapiens
  CDR3 for alpha chain variable domain of TCR clone 251598 (TRAV8-3, TRAJ3)
CAVVPRSSASKIIF

SEQ ID NO: 503196 - protein, 16 aa, Homo sapiens
  CDR3 for beta chain variable domain of TCR clone 251598 (TRBV4-1, TRBJ2-3)
CASSQLTSGGGDTQYF

SEQ ID NO: 503197 - protein, 16 aa, Homo sapiens
  CDR3 for alpha chain variable domain of TCR clone 251599 (TRAV1-2, TRAJ10)
CAVRGVLTGGGNKLTF

SEQ ID NO: 503198 - protein, 13 aa, Homo sapiens
  CDR3 for beta chain variable domain of TCR clone 251599 (TRBV20-1, TRBJ1-6)
CSAPLGVVSPLHF

SEQ ID NO: 503199 - protein, 13 aa, Homo sapiens
  CDR3 for alpha chain variable domain of TCR clone 251600 (TRAV8-3, TRAJ43)
CAGVPDNNNDMRF

SEQ ID NO: 503200 - protein, 12 aa, Homo sapiens
  CDR3 for beta chain variable domain of TCR clone 251600 (TRBV7-2, TRBJ1-6)
CASSLSSSPLHF

SEQ ID NO: 503201 - protein, 18 aa, Homo sapiens
  CDR3 for alpha chain variable domain of TCR clone 251601 (TRAV26-2, TRAJ54)
CILRDVEVGIQGAQKLVF

SEQ ID NO: 503202 - protein, 15 aa, Homo sapiens
  CDR3 for beta chain variable domain of TCR clone 251601 (TRBV7-2, TRBJ2-3)
CASSSTGLETDTQYF

SEQ ID NO: 503203 - protein, 17 aa, Homo sapiens
  CDR3 for alpha chain variable domain of TCR clone 251602 (TRAV3, TRAJ12)
CAVRDGGRMDSSYKLIF

SEQ ID NO: 503204 - protein, 14 aa, Homo sapiens
  CDR3 for beta chain variable domain of TCR clone 251602 (TRBV12-4, TRBJ2-2)
CASSLEQDTGELFF

SEQ ID NO: 503205 - protein, 14 aa, Homo sapiens
  CDR3 for alpha chain variable domain of TCR clone 251603 (TRAV1-2, TRAJ8)
CAVREDKGFQKLVC

SEQ ID NO: 503206 - protein, 15 aa, Homo sapiens
  CDR3 for beta chain variable domain of TCR clone 251603 (TRBV6-3, TRBJ2-7)
CASSSPGTVFYEQYF

SEQ ID NO: 503207 - protein, 18 aa, Homo sapiens
  CDR3 for alpha chain variable domain of TCR clone 251604 (TRAV26-2, TRAJ33)
CCVLLHPEEPASNYQLIW

SEQ ID NO: 503208 - protein, 17 aa, Homo sapiens
  CDR3 for beta chain variable domain of TCR clone 251604 (TRBV20-1, TRBJ2-1)
CSASSSGLAGSYNEQFF

SEQ ID NO: 503209 - protein, 13 aa, Homo sapiens
  CDR3 for alpha chain variable domain of TCR clone 251605 (TRAV1-1, TRAJ38)
CAVGAGNNRKLIW

SEQ ID NO: 503210 - protein, 12 aa, Homo sapiens
  CDR3 for beta chain variable domain of TCR clone 251605 (TRBV11-2, TRBJ2-2)
CASSLGGGELFF

SEQ ID NO: 503211 - protein, 14 aa, Homo sapiens
  CDR3 for alpha chain variable domain of TCR clone 251606 (TRAV1-2, TRAJ16)
RAVNRFSDGQKLLF

SEQ ID NO: 503212 - protein, 14 aa, Homo sapiens
  CDR3 for beta chain variable domain of TCR clone 251606 (TRBV11-2, TRBJ2-3)
CASSRLARTDTQYF

SEQ ID NO: 503213 - protein, 14 aa, Homo sapiens
  CDR3 for alpha chain variable domain of TCR clone 251607 (TRAV3, TRAJ21)
CAVESQANFNKFYF

SEQ ID NO: 503214 - protein, 17 aa, Homo sapiens
  CDR3 for beta chain variable domain of TCR clone 251607 (TRBV7-9, TRBJ2-1)
CQQLSCSGTSGRNEQFF

SEQ ID NO: 503215 - protein, 17 aa, Homo sapiens
  CDR3 for alpha chain variable domain of TCR clone 251608 (TRAV17, TRAJ24)
CATANSMTTDSWGQLQF

SEQ ID NO: 503216 - protein, 17 aa, Homo sapiens
  CDR3 for beta chain variable domain of TCR clone 251608 (TRBV6-5, TRBJ2-7)
CASSYSFWGQGSYEQYF

SEQ ID NO: 503217 - protein, 15 aa, Homo sapiens
  CDR3 for alpha chain variable domain of TCR clone 251609 (TRAV8-3, TRAJ45)
CASSYSGGGADGLTF

SEQ ID NO: 503218 - protein, 12 aa, Homo sapiens
  CDR3 for beta chain variable domain of TCR clone 251609 (TRBV14, TRBJ2-7)
CASSLNQRGQYF

SEQ ID NO: 503219 - protein, 13 aa, Homo sapiens
  CDR3 for alpha chain variable domain of TCR clone 251610 (TRAV14/DV4, TRAJ20)
CAMRESNDYKLSF

SEQ ID NO: 503220 - protein, 15 aa, Homo sapiens
  CDR3 for beta chain variable domain of TCR clone 251610 (TRBV7-9, TRBJ1-1)
CSSSRPGTANTEAFF

SEQ ID NO: 503221 - protein, 11 aa, Homo sapiens
  CDR3 for alpha chain variable domain of TCR clone 251611 (TRAV17, TRAJ49)
CATDAGNQFYF

SEQ ID NO: 503222 - protein, 17 aa, Homo sapiens
  CDR3 for beta chain variable domain of TCR clone 251611 (TRBV20-1, TRBJ2-1)
CSARDPLAGVWDNEQFF

SEQ ID NO: 503223 - protein, 11 aa, Homo sapiens
  CDR3 for alpha chain variable domain of TCR clone 251612 (TRAV13-1, TRAJ39)
CASHAGNMLTF

SEQ ID NO: 503224 - protein, 13 aa, Homo sapiens
  CDR3 for beta chain variable domain of TCR clone 251612 (TRBV11-2, TRBJ1-5)
CQQLRQGWQPQHF

SEQ ID NO: 503225 - protein, 12 aa, Homo sapiens
  CDR3 for alpha chain variable domain of TCR clone 251613 (TRAV17, TRAJ20)
CATDSNDYKLSF

SEQ ID NO: 503226 - protein, 15 aa, Homo sapiens
  CDR3 for beta chain variable domain of TCR clone 251613 (TRBV19, TRBJ1-6)
CASSTQGAVGSPLHF

SEQ ID NO: 503227 - protein, 15 aa, Homo sapiens
  CDR3 for alpha chain variable domain of TCR clone 251614 (TRAV16, TRAJ48)
CALFISNFGNEKLTF

SEQ ID NO: 503228 - protein, 13 aa, Homo sapiens
  CDR3 for beta chain variable domain of TCR clone 251614 (TRBV19, TRBJ2-7)
CASSKQGGYEQYF

SEQ ID NO: 503229 - protein, 12 aa, Homo sapiens
  CDR3 for alpha chain variable domain of TCR clone 251615 (TRAV8-4, TRAJ31)
CAVSDSNARLMF

SEQ ID NO: 503230 - protein, 19 aa, Homo sapiens
  CDR3 for beta chain variable domain of TCR clone 251615 (TRBV12-4, TRBJ2-1)
CASTLAFDPRDKEANEQFF

SEQ ID NO: 503231 - protein, 11 aa, Homo sapiens
  CDR3 for alpha chain variable domain of TCR clone 251616 (TRAV12-2, TRAJ43)
CAAYNNNDMRF

SEQ ID NO: 503232 - protein, 14 aa, Homo sapiens
  CDR3 for beta chain variable domain of TCR clone 251616 (TRBV7-8, TRBJ1-2)
CASSAGTAIYAYTF

SEQ ID NO: 503233 - protein, 15 aa, Homo sapiens
  CDR3 for alpha chain variable domain of TCR clone 251617 (TRAV17, TRAJ37)
CATDQGSSNTGKLIF

SEQ ID NO: 503234 - protein, 14 aa, Homo sapiens
  CDR3 for beta chain variable domain of TCR clone 251617 (TRBV7-2, TRBJ2-3)
CASSRTSGADTQYF

SEQ ID NO: 503235 - protein, 11 aa, Homo sapiens
  CDR3 for alpha chain variable domain of TCR clone 251618 (TRAV3, TRAJ21)
CAVGNFNKLYF

SEQ ID NO: 503236 - protein, 16 aa, Homo sapiens
  CDR3 for beta chain variable domain of TCR clone 251618 (TRBV19, TRBJ2-1)
CASRKAGPSSYNEQFF

SEQ ID NO: 503237 - protein, 17 aa, Homo sapiens
  CDR3 for alpha chain variable domain of TCR clone 251619 (TRAV17, TRAJ52)
CATDRNAGGTSYGKLTF

SEQ ID NO: 503238 - protein, 15 aa, Homo sapiens
  CDR3 for beta chain variable domain of TCR clone 251619 (TRBV27, TRBJ2-1)
CASSNGGGSSNEQFF

SEQ ID NO: 503239 - protein, 13 aa, Homo sapiens
  CDR3 for alpha chain variable domain of TCR clone 251620 (TRAV6, TRAJ45)
SPFSGGGADGLTF

SEQ ID NO: 503240 - protein, 14 aa, Homo sapiens
  CDR3 for beta chain variable domain of TCR clone 251620 (TRBV19, TRBJ2-7)
CASSMGQGAIEQYF

SEQ ID NO: 503241 - protein, 11 aa, Homo sapiens
  CDR3 for alpha chain variable domain of TCR clone 251621 (TRAV21, TRAJ48)
CAVEGNEKLTF

SEQ ID NO: 503242 - protein, 16 aa, Homo sapiens
  CDR3 for beta chain variable domain of TCR clone 251621 (TRBV19, TRBJ2-1)
CASSSKGTRSYNEQFF

SEQ ID NO: 503243 - protein, 12 aa, Homo sapiens
  CDR3 for alpha chain variable domain of TCR clone 251622 (TRAV12-3, TRAJ17)
CALTLTGNELTF

SEQ ID NO: 503244 - protein, 15 aa, Homo sapiens
  CDR3 for beta chain variable domain of TCR clone 251622 (TRBV20-1, TRBJ2-7)
CSARDRVSGMDEQYF

SEQ ID NO: 503245 - protein, 14 aa, Homo sapiens
  CDR3 for alpha chain variable domain of TCR clone 251623 (TRAV21, TRAJ15)
CAVSLNQPGTPLTF

SEQ ID NO: 503246 - protein, 11 aa, Homo sapiens
  CDR3 for beta chain variable domain of TCR clone 251623 (TRBV20-1, TRBJ2-7)
CSARTSYEQYF

SEQ ID NO: 503247 - protein, 18 aa, Homo sapiens
  CDR3 for alpha chain variable domain of TCR clone 251624 (TRAV21, TRAJ52)
CAVRPSPAGGTGYGKLTF

SEQ ID NO: 503248 - protein, 17 aa, Homo sapiens
  CDR3 for beta chain variable domain of TCR clone 251624 (TRBV6-5, TRBJ2-6)
CASSSATSGPGANVLTF

SEQ ID NO: 503249 - protein, 15 aa, Homo sapiens
  CDR3 for alpha chain variable domain of TCR clone 251625 (TRAV25, TRAJ52)
CAGTSGGTSYGKLTF

SEQ ID NO: 503250 - protein, 16 aa, Homo sapiens
  CDR3 for beta chain variable domain of TCR clone 251625 (TRBV15, TRBJ1-2)
CATSRGPRTGSGGYTF

SEQ ID NO: 503251 - protein, 13 aa, Homo sapiens
  CDR3 for alpha chain variable domain of TCR clone 251626 (TRAV21, TRAJ57)
CAVTQGGSEKLVF

SEQ ID NO: 503252 - protein, 17 aa, Homo sapiens
  CDR3 for beta chain variable domain of TCR clone 251626 (TRBV15, TRBJ1-2)
CATSGREIDVVNYGYTF

SEQ ID NO: 503253 - protein, 11 aa, Homo sapiens
  CDR3 for alpha chain variable domain of TCR clone 251627 (TRAV26-1, TRAJ12)
ELMDSSYKLIF

SEQ ID NO: 503254 - protein, 11 aa, Homo sapiens
  CDR3 for beta chain variable domain of TCR clone 251627 (TRBV7-9, TRBJ2-3)
CASSPPDTQYF

SEQ ID NO: 503255 - protein, 14 aa, Homo sapiens
  CDR3 for alpha chain variable domain of TCR clone 251628 (TRAV8-3, TRAJ4)
CAVGAAGGCNKLIF

SEQ ID NO: 503256 - protein, 16 aa, Homo sapiens
  CDR3 for beta chain variable domain of TCR clone 251628 (TRBV19, TRBJ2-2)
CASRSPGTGATGELFF

SEQ ID NO: 503257 - protein, 14 aa, Homo sapiens
  CDR3 for alpha chain variable domain of TCR clone 251629 (TRAV26-2, TRAJ38)
CILYNAGNNRKLTW

SEQ ID NO: 503258 - protein, 14 aa, Homo sapiens
  CDR3 for beta chain variable domain of TCR clone 251629 (TRBV19, TRBJ2-1)
CASPTFVLSGEQFF

SEQ ID NO: 503259 - protein, 14 aa, Homo sapiens
  CDR3 for alpha chain variable domain of TCR clone 251630 (TRAV8-1, TRAJ5)
CAVRTDTGRRALPF

SEQ ID NO: 503260 - protein, 15 aa, Homo sapiens
  CDR3 for beta chain variable domain of TCR clone 251630 (TRBV7-3, TRBJ2-1)
CASSPTGGGEVEQFF

SEQ ID NO: 503261 - protein, 10 aa, Homo sapiens
  CDR3 for alpha chain variable domain of TCR clone 251631 (TRAV35, TRAJ34)
LARNTDKLIF

SEQ ID NO: 503262 - protein, 14 aa, Homo sapiens
  CDR3 for beta chain variable domain of TCR clone 251631 (TRBV11-2, TRBJ2-5)
CASSRTGGIETQYF

SEQ ID NO: 503263 - protein, 14 aa, Homo sapiens
  CDR3 for alpha chain variable domain of TCR clone 251632 (TRAV1-2, TRAJ8)
CAVREDTGFQKLVF

SEQ ID NO: 503264 - protein, 16 aa, Homo sapiens
  CDR3 for beta chain variable domain of TCR clone 251632 (TRBV4-3, TRBJ2-3)
CASSQGGLAGTDTQYF

SEQ ID NO: 503265 - protein, 15 aa, Homo sapiens
  CDR3 for alpha chain variable domain of TCR clone 251633 (TRAV12-1, TRAJ39)
CVVSPRRNAGNMLTF

SEQ ID NO: 503266 - protein, 13 aa, Homo sapiens
  CDR3 for beta chain variable domain of TCR clone 251633 (TRBV7-9, TRBJ1-2)
CASSLKQNYGYTF

SEQ ID NO: 503267 - protein, 16 aa, Homo sapiens
  CDR3 for alpha chain variable domain of TCR clone 251634 (TRAV3, TRAJ21)
FAVRDIERGNFNKFYF

SEQ ID NO: 503268 - protein, 13 aa, Homo sapiens
  CDR3 for beta chain variable domain of TCR clone 251634 (TRBV4-2, TRBJ1-1)
CASSQAGNTEAFF

SEQ ID NO: 503269 - protein, 12 aa, Homo sapiens
  CDR3 for alpha chain variable domain of TCR clone 251635 (TRAV17, TRAJ39)
CATGAAGNMLTF

SEQ ID NO: 503270 - protein, 14 aa, Homo sapiens
  CDR3 for beta chain variable domain of TCR clone 251635 (TRBV7-9, TRBJ1-2)
CAGSRQGANNGYTF

SEQ ID NO: 503271 - protein, 15 aa, Homo sapiens
  CDR3 for alpha chain variable domain of TCR clone 251636 (TRAV17, TRAJ17)
CATDASIIRRQQANF

SEQ ID NO: 503272 - protein, 12 aa, Homo sapiens
  CDR3 for beta chain variable domain of TCR clone 251636 (TRBV19, TRBJ1-5)
CASSIAQQPQHF

SEQ ID NO: 503273 - protein, 12 aa, Homo sapiens
  CDR3 for alpha chain variable domain of TCR clone 251637 (TRAV1-2, TRAJ29)
CAVPSGNTPLVF

SEQ ID NO: 503274 - protein, 12 aa, Homo sapiens
  CDR3 for beta chain variable domain of TCR clone 251637 (TRBV5-5, TRBJ2-5)
CASSYFGETQNF

SEQ ID NO: 503275 - protein, 13 aa, Homo sapiens
  CDR3 for alpha chain variable domain of TCR clone 251638 (TRAV21, TRAJ27)
CDARPGNTGKSTF

SEQ ID NO: 503276 - protein, 14 aa, Homo sapiens
  CDR3 for beta chain variable domain of TCR clone 251638 (TRBV7-6, TRBJ2-3)
CASSLGTVTDTQYF

SEQ ID NO: 503277 - protein, 16 aa, Homo sapiens
  CDR3 for alpha chain variable domain of TCR clone 251639 (TRAV30, TRAJ24)
CGTEIVDADSWGKFQF

SEQ ID NO: 503278 - protein, 15 aa, Homo sapiens
  CDR3 for beta chain variable domain of TCR clone 251639 (TRBV4-1, TRBJ2-1)
CASSQAAGGNNEQFF

SEQ ID NO: 503279 - protein, 13 aa, Homo sapiens
  CDR3 for alpha chain variable domain of TCR clone 251640 (TRAV8-3, TRAJ43)
CAVVPYNNNDMRF

SEQ ID NO: 503280 - protein, 17 aa, Homo sapiens
  CDR3 for beta chain variable domain of TCR clone 251640 (TRBV4-1, TRBJ1-4)
CASSQEGPRGVEEKLFF

SEQ ID NO: 503281 - protein, 13 aa, Homo sapiens
  CDR3 for alpha chain variable domain of TCR clone 251641 (TRAV4, TRAJ34)
CLVGDYNTDKLIF

SEQ ID NO: 503282 - protein, 15 aa, Homo sapiens
  CDR3 for beta chain variable domain of TCR clone 251641 (TRBV4-2, TRBJ2-3)
CASSQDPPPGFQYQR

SEQ ID NO: 503283 - protein, 14 aa, Homo sapiens
  CDR3 for alpha chain variable domain of TCR clone 251642 (TRAV17, TRAJ34)
CATDSLEGTDNLIF

SEQ ID NO: 503284 - protein, 15 aa, Homo sapiens
  CDR3 for beta chain variable domain of TCR clone 251642 (TRBV7-2, TRBJ2-1)
CASSFSGGIYNEQFF

SEQ ID NO: 503285 - protein, 15 aa, Homo sapiens
  CDR3 for alpha chain variable domain of TCR clone 251643 (TRAV12-2, TRAJ8)
CAVREENTGFQKLVF

SEQ ID NO: 503286 - protein, 14 aa, Homo sapiens
  CDR3 for beta chain variable domain of TCR clone 251643 (TRBV3-1, TRBJ2-5)
CASSQGPDQETQYF

SEQ ID NO: 503287 - protein, 17 aa, Homo sapiens
  CDR3 for alpha chain variable domain of TCR clone 251644 (TRAV3, TRAJ42)
CAVRDRDYGGSQGNLIF

SEQ ID NO: 503288 - protein, 16 aa, Homo sapiens
  CDR3 for beta chain variable domain of TCR clone 251644 (TRBV12-5, TRBJ2-5)
CASGPRTSGDQETQYF

SEQ ID NO: 503289 - protein, 14 aa, Homo sapiens
  CDR3 for alpha chain variable domain of TCR clone 251645 (TRAV1-2, TRAJ16)
CAVNRFSDGQKLLF

SEQ ID NO: 503290 - protein, 11 aa, Homo sapiens
  CDR3 for beta chain variable domain of TCR clone 251645 (TRBV7-6, TRBJ2-5)
CASSLQETQYF

SEQ ID NO: 503291 - protein, 14 aa, Homo sapiens
  CDR3 for alpha chain variable domain of TCR clone 251646 (TRAV12-3, TRAJ56)
CAMSVTGANSKLTL

SEQ ID NO: 503292 - protein, 17 aa, Homo sapiens
  CDR3 for beta chain variable domain of TCR clone 251646 (TRBV20-1, TRBJ2-3)
CSASLLGRGGGADTQYF

SEQ ID NO: 503293 - protein, 13 aa, Homo sapiens
  CDR3 for alpha chain variable domain of TCR clone 251647 (TRAV8-6, TRAJ40)
CAVSVTGTYKYIF

SEQ ID NO: 503294 - protein, 15 aa, Homo sapiens
  CDR3 for beta chain variable domain of TCR clone 251647 (TRBV4-1, TRBJ2-3)
CASSRGQGIPDTQYV

SEQ ID NO: 503295 - protein, 17 aa, Homo sapiens
  CDR3 for alpha chain variable domain of TCR clone 251648 (TRAV8-2, )
CVVNIQNPDPAVYQLRD

SEQ ID NO: 503296 - protein, 14 aa, Homo sapiens
  CDR3 for beta chain variable domain of TCR clone 251648 (TRBV7-9, TRBJ2-5)
CASSLVGGEENQYF

SEQ ID NO: 503297 - protein, 16 aa, Homo sapiens
  CDR3 for alpha chain variable domain of TCR clone 251649 (TRAV17, TRAJ21)
CATDAETTSTNFTLDL

SEQ ID NO: 503298 - protein, 17 aa, Homo sapiens
  CDR3 for beta chain variable domain of TCR clone 251649 (TRBV13, TRBJ2-3)
CASSLSRVAGGRNTKYF

SEQ ID NO: 503299 - protein, 19 aa, Homo sapiens
  CDR3 for alpha chain variable domain of TCR clone 251650 (TRAV21, TRAJ45)
CAVEAPRGDQEEVLTDSPF

SEQ ID NO: 503300 - protein, 12 aa, Homo sapiens
  CDR3 for beta chain variable domain of TCR clone 251650 (TRBV29-1, TRBJ1-3)
CSTRDSGITIYF

SEQ ID NO: 503301 - protein, 15 aa, Homo sapiens
  CDR3 for alpha chain variable domain of TCR clone 251651 (TRAV26-1, TRAJ29)
CIVRVEGSGNTPLVF

SEQ ID NO: 503302 - protein, 13 aa, Homo sapiens
  CDR3 for beta chain variable domain of TCR clone 251651 (TRBV11-2, TRBJ2-1)
CASSLDLVNEQFF

SEQ ID NO: 503303 - protein, 13 aa, Homo sapiens
  CDR3 for alpha chain variable domain of TCR clone 251652 (TRAV21, TRAJ20)
CAVGLRVDYKLSF

SEQ ID NO: 503304 - protein, 12 aa, Homo sapiens
  CDR3 for beta chain variable domain of TCR clone 251652 (TRBV6-1, TRBJ1-1)
CSSRQGNTEAFF

SEQ ID NO: 503305 - protein, 18 aa, Homo sapiens
  CDR3 for alpha chain variable domain of TCR clone 251653 (TRAV12-1, TRAJ26)
SSVIQPPTSVPYGQNFVF

SEQ ID NO: 503306 - protein, 14 aa, Homo sapiens
  CDR3 for beta chain variable domain of TCR clone 251653 (TRBV5-4, TRBJ2-1)
CASSVDQGLNEQFF

SEQ ID NO: 503307 - protein, 12 aa, Homo sapiens
  CDR3 for alpha chain variable domain of TCR clone 251654 (TRAV12-3, TRAJ17)
CAMTLTGNKLTF

SEQ ID NO: 503308 - protein, 15 aa, Homo sapiens
  CDR3 for beta chain variable domain of TCR clone 251654 (TRBV20-1, TRBJ2-7)
CCARDRVAGMDEQYF

SEQ ID NO: 503309 - protein, 17 aa, Homo sapiens
  CDR3 for alpha chain variable domain of TCR clone 251655 (TRAV4, TRAJ18)
CLVGERSVGSTLGRLYF

SEQ ID NO: 503310 - protein, 13 aa, Homo sapiens
  CDR3 for beta chain variable domain of TCR clone 251655 (TRBV20-1, TRBJ1-1)
CSAPLGGGTEAFF

SEQ ID NO: 503311 - protein, 15 aa, Homo sapiens
  CDR3 for alpha chain variable domain of TCR clone 251656 (TRAV8-3, TRAJ45)
CASSYSGGGAVGLTF

SEQ ID NO: 503312 - protein, 13 aa, Homo sapiens
  CDR3 for beta chain variable domain of TCR clone 251656 (TRBV11-2, TRBJ2-7)
CASSPLGSYEQYF

SEQ ID NO: 503313 - protein, 16 aa, Homo sapiens
  CDR3 for alpha chain variable domain of TCR clone 251657 (TRAV12-3, TRAJ53)
CAMSPGSGGSNYKLTF

SEQ ID NO: 503314 - protein, 11 aa, Homo sapiens
  CDR3 for beta chain variable domain of TCR clone 251657 (TRBV29-1, TRBJ2-5)
CSADRTGTKYF

SEQ ID NO: 503315 - protein, 16 aa, Homo sapiens
  CDR3 for alpha chain variable domain of TCR clone 251658 (TRAV12-2, TRAJ18)
CAVTTDRGSTLGRLYF

SEQ ID NO: 503316 - protein, 13 aa, Homo sapiens
  CDR3 for beta chain variable domain of TCR clone 251658 (TRBV7-2, TRBJ1-5)
CASSFARNQPQHF

SEQ ID NO: 503317 - protein, 11 aa, Homo sapiens
  CDR3 for alpha chain variable domain of TCR clone 251659 (TRAV27, TRAJ45)
CAGAQEEVLTD

SEQ ID NO: 503318 - protein, 12 aa, Homo sapiens
  CDR3 for beta chain variable domain of TCR clone 251659 (TRBV11-2, TRBJ2-2)
CASSLGGGELFF

SEQ ID NO: 503319 - protein, 11 aa, Homo sapiens
  CDR3 for alpha chain variable domain of TCR clone 251660 (TRAV1-1, TRAJ23)
CAVRQGGKLIF

SEQ ID NO: 503320 - protein, 12 aa, Homo sapiens
  CDR3 for beta chain variable domain of TCR clone 251660 (TRBV7-9, TRBJ1-4)
CASSTDREKLFF

SEQ ID NO: 503321 - protein, 16 aa, Homo sapiens
  CDR3 for alpha chain variable domain of TCR clone 251661 (TRAV30, TRAJ24)
CGTEIVDADSWGKFQF

SEQ ID NO: 503322 - protein, 12 aa, Homo sapiens
  CDR3 for beta chain variable domain of TCR clone 251661 (TRBV12-4, TRBJ1-1)
CASSLVDTEAFF

SEQ ID NO: 503323 - protein, 15 aa, Homo sapiens
  CDR3 for alpha chain variable domain of TCR clone 251662 (TRAV30, TRAJ32)
CGTEILGGATNKLIF

SEQ ID NO: 503324 - protein, 15 aa, Homo sapiens
  CDR3 for beta chain variable domain of TCR clone 251662 (TRBV5-7, TRBJ2-7)
CASSLGPGRGHEQYF

SEQ ID NO: 503325 - protein, 14 aa, Homo sapiens
  CDR3 for alpha chain variable domain of TCR clone 251663 (TRAV12-1, TRAJ33)
CVVNPEDSNYQLIW

SEQ ID NO: 503326 - protein, 11 aa, Homo sapiens
  CDR3 for beta chain variable domain of TCR clone 251663 (TRBV7-6, TRBJ2-1)
CVSSSYGEQFF

SEQ ID NO: 503327 - protein, 14 aa, Homo sapiens
  CDR3 for alpha chain variable domain of TCR clone 251664 (TRAV13-1, TRAJ53)
CAASISGSNYKLTF

SEQ ID NO: 503328 - protein, 12 aa, Homo sapiens
  CDR3 for beta chain variable domain of TCR clone 251664 (TRBV7-9, TRBJ1-2)
CASSLGHYGYTF

SEQ ID NO: 503329 - protein, 15 aa, Homo sapiens
  CDR3 for alpha chain variable domain of TCR clone 251665 (TRAV1-2, TRAJ30)
CAVSPHGNRDDKIIF

SEQ ID NO: 503330 - protein, 15 aa, Homo sapiens
  CDR3 for beta chain variable domain of TCR clone 251665 (TRBV19, TRBJ2-1)
CASSTGTSSYNEQFF

SEQ ID NO: 503331 - protein, 15 aa, Homo sapiens
  CDR3 for alpha chain variable domain of TCR clone 251666 (TRAV2, TRAJ22)
CAVPSRGGSARQLTF

SEQ ID NO: 503332 - protein, 13 aa, Homo sapiens
  CDR3 for beta chain variable domain of TCR clone 251666 (TRBV7-2, TRBJ2-2)
CASSLAVTGELFL

SEQ ID NO: 503333 - protein, 13 aa, Homo sapiens
  CDR3 for alpha chain variable domain of TCR clone 251667 (TRAV13-1, TRAJ5)
CAARVTGRRALTF

SEQ ID NO: 503334 - protein, 15 aa, Homo sapiens
  CDR3 for beta chain variable domain of TCR clone 251667 (TRBV7-9, TRBJ2-7)
CVSSPGGGLTYEQYF

SEQ ID NO: 503335 - protein, 17 aa, Homo sapiens
  CDR3 for alpha chain variable domain of TCR clone 251668 (TRAV3, TRAJ6)
CAVRDGPRAGGSNIPTF

SEQ ID NO: 503336 - protein, 14 aa, Homo sapiens
  CDR3 for beta chain variable domain of TCR clone 251668 (TRBV7-2, TRBJ2-7)
CASSPKTSFCEQYF

SEQ ID NO: 503337 - protein, 15 aa, Homo sapiens
  CDR3 for alpha chain variable domain of TCR clone 251669 (TRAV13-1, TRAJ44)
CAASRGGGTAGKLTF

SEQ ID NO: 503338 - protein, 14 aa, Homo sapiens
  CDR3 for beta chain variable domain of TCR clone 251669 (TRBV7-2, TRBJ2-5)
CASSPRGSSETPYF

SEQ ID NO: 503339 - protein, 13 aa, Homo sapiens
  CDR3 for alpha chain variable domain of TCR clone 251670 (TRAV13-1, TRAJ9)
CAASGTGGFKTIF

SEQ ID NO: 503340 - protein, 14 aa, Homo sapiens
  CDR3 for beta chain variable domain of TCR clone 251670 (TRBV7-2, TRBJ2-7)
CASRSQGAAYEQYF

SEQ ID NO: 503341 - protein, 12 aa, Homo sapiens
  CDR3 for alpha chain variable domain of TCR clone 251671 (TRAV3, TRAJ20)
CAVRDPHYKLSF

SEQ ID NO: 503342 - protein, 13 aa, Homo sapiens
  CDR3 for beta chain variable domain of TCR clone 251671 (TRBV9, TRBJ2-1)
CASSVGQGGEQFF

SEQ ID NO: 503343 - protein, 14 aa, Homo sapiens
  CDR3 for alpha chain variable domain of TCR clone 251672 (TRAV14/DV4, TRAJ54)
CAVREAPGAQKLVF

SEQ ID NO: 503344 - protein, 16 aa, Homo sapiens
  CDR3 for beta chain variable domain of TCR clone 251672 (TRBV7-3, TRBJ2-1)
CASSSKSGGIYNEQFF

SEQ ID NO: 503345 - protein, 15 aa, Homo sapiens
  CDR3 for alpha chain variable domain of TCR clone 251673 (TRAV8-3, TRAJ11)
CAVGLLNSGFSTLTF

SEQ ID NO: 503346 - protein, 23 aa, Homo sapiens
  CDR3 for beta chain variable domain of TCR clone 251673 (TRBV7-9, TRBJ1-2)
EAQLEKSRLLSDRFSSGEDGYTF

SEQ ID NO: 503347 - protein, 14 aa, Homo sapiens
  CDR3 for alpha chain variable domain of TCR clone 251674 (TRAV1-2, TRAJ16)
CAVNRFSDGQKLLF

SEQ ID NO: 503348 - protein, 16 aa, Homo sapiens
  CDR3 for beta chain variable domain of TCR clone 251674 (TRBV4-1, TRBJ2-7)
CASTQEWTSGPLEQYF

SEQ ID NO: 503349 - protein, 13 aa, Homo sapiens
  CDR3 for alpha chain variable domain of TCR clone 251675 (TRAV21, TRAJ57)
CAVTQGGSEKLVF

SEQ ID NO: 503350 - protein, 16 aa, Homo sapiens
  CDR3 for beta chain variable domain of TCR clone 251675 (TRBV28, TRBJ2-1)
CDSSSPEYPRDNEQFF

SEQ ID NO: 503351 - protein, 12 aa, Homo sapiens
  CDR3 for alpha chain variable domain of TCR clone 251676 (TRAV13-1, TRAJ53)
AASGGSNYQLTF

SEQ ID NO: 503352 - protein, 11 aa, Homo sapiens
  CDR3 for beta chain variable domain of TCR clone 251676 (TRBV12-4, TRBJ2-2)
CASSSAGELFF

SEQ ID NO: 503353 - protein, 14 aa, Homo sapiens
  CDR3 for alpha chain variable domain of TCR clone 251677 (TRAV8-4, TRAJ17)
CAVSDQAAGNKLTF

SEQ ID NO: 503354 - protein, 16 aa, Homo sapiens
  CDR3 for beta chain variable domain of TCR clone 251677 (TRBV7-3, TRBJ2-1)
CASSKPLAGGYNEQFF

SEQ ID NO: 503355 - protein, 14 aa, Homo sapiens
  CDR3 for alpha chain variable domain of TCR clone 251678 (TRAV22, TRAJ6)
CAGVGPGGSYIPTF

SEQ ID NO: 503356 - protein, 17 aa, Homo sapiens
  CDR3 for beta chain variable domain of TCR clone 251678 (TRBV20-1, TRBJ2-7)
CSARDPEGDHREYEQYF

SEQ ID NO: 503357 - protein, 13 aa, Homo sapiens
  CDR3 for alpha chain variable domain of TCR clone 251679 (TRAV12-1, TRAJ6)
CVVFPGGSYIPTF

SEQ ID NO: 503358 - protein, 16 aa, Homo sapiens
  CDR3 for beta chain variable domain of TCR clone 251679 (TRBV19, TRBJ2-3)
CASSPGAASRTDTQYF

SEQ ID NO: 503359 - protein, 15 aa, Homo sapiens
  CDR3 for alpha chain variable domain of TCR clone 251680 (TRAV8-4, TRAJ37)
CAVSRGSGNTGKLIF

SEQ ID NO: 503360 - protein, 15 aa, Homo sapiens
  CDR3 for beta chain variable domain of TCR clone 251680 (TRBV5-1, TRBJ2-7)
GASSLDLTSSYEQYF

SEQ ID NO: 503361 - protein, 14 aa, Homo sapiens
  CDR3 for alpha chain variable domain of TCR clone 251681 (TRAV20, TRAJ42)
CAVQAGGSQGNLIF

SEQ ID NO: 503362 - protein, 16 aa, Homo sapiens
  CDR3 for beta chain variable domain of TCR clone 251681 (TRBV7-3, TRBJ2-2)
CASSLKRGTLSGELFF

SEQ ID NO: 503363 - protein, 16 aa, Homo sapiens
  CDR3 for alpha chain variable domain of TCR clone 251682 (TRAV14/DV4, TRAJ53)
CAMREGGGGSNYKLTF

SEQ ID NO: 503364 - protein, 16 aa, Homo sapiens
  CDR3 for beta chain variable domain of TCR clone 251682 (TRBV7-6, TRBJ2-1)
CASSDLAGGVYNEQFF

SEQ ID NO: 503365 - protein, 17 aa, Homo sapiens
  CDR3 for alpha chain variable domain of TCR clone 251683 (TRAV3, TRAJ6)
CAVRDGPRAGGSYLPTF

SEQ ID NO: 503366 - protein, 14 aa, Homo sapiens
  CDR3 for beta chain variable domain of TCR clone 251683 (TRBV7-2, TRBJ2-7)
CASSPKTSSYEQYF

SEQ ID NO: 503367 - protein, 15 aa, Homo sapiens
  CDR3 for alpha chain variable domain of TCR clone 251684 (TRAV3, TRAJ3)
CAVRDRDSSASKITF

SEQ ID NO: 503368 - protein, 18 aa, Homo sapiens
  CDR3 for beta chain variable domain of TCR clone 251684 (TRBV25-1, TRBJ1-2)
CASSGLQNGQGVIFGYTF

SEQ ID NO: 503369 - protein, 12 aa, Homo sapiens
  CDR3 for alpha chain variable domain of TCR clone 251685 (TRAV17, TRAJ53)
CAFGGSNYKLTF

SEQ ID NO: 503370 - protein, 16 aa, Homo sapiens
  CDR3 for beta chain variable domain of TCR clone 251685 (TRBV11-2, TRBJ2-4)
CASSKEGRGGLDIQYF

SEQ ID NO: 503371 - protein, 12 aa, Homo sapiens
  CDR3 for alpha chain variable domain of TCR clone 251686 (TRAV8-4, TRAJ43)
CAVSVNNNDMRF

SEQ ID NO: 503372 - protein, 12 aa, Homo sapiens
  CDR3 for beta chain variable domain of TCR clone 251686 (TRBV11-2, TRBJ2-2)
CASSLPTGELFF

SEQ ID NO: 503373 - protein, 13 aa, Homo sapiens
  CDR3 for alpha chain variable domain of TCR clone 251687 (TRAV1-2, TRAJ17)
CAVGKAAGDKLTF

SEQ ID NO: 503374 - protein, 15 aa, Homo sapiens
  CDR3 for beta chain variable domain of TCR clone 251687 (TRBV7-9, TRBJ2-1)
CASSGTGGDYNEQFF

SEQ ID NO: 503375 - protein, 11 aa, Homo sapiens
  CDR3 for alpha chain variable domain of TCR clone 251688 (TRAV3, TRAJ32)
CAVREGIMLVL

SEQ ID NO: 503376 - protein, 13 aa, Homo sapiens
  CDR3 for beta chain variable domain of TCR clone 251688 (TRBV2, TRBJ1-1)
CASGEGGNTEAFF

SEQ ID NO: 503377 - protein, 14 aa, Homo sapiens
  CDR3 for alpha chain variable domain of TCR clone 251689 (TRAV26-1, TRAJ45)
CIVRVVGGAYGLPF

SEQ ID NO: 503378 - protein, 16 aa, Homo sapiens
  CDR3 for beta chain variable domain of TCR clone 251689 (TRBV7-9, TRBJ1-1)
CASSLTQVRSNTEAFF

SEQ ID NO: 503379 - protein, 12 aa, Homo sapiens
  CDR3 for alpha chain variable domain of TCR clone 251690 (TRAV13-2, TRAJ23)
CAERHRGGKLSF

SEQ ID NO: 503380 - protein, 14 aa, Homo sapiens
  CDR3 for beta chain variable domain of TCR clone 251690 (TRBV6-1, TRBJ1-3)
CASVQGGGGNTIYF

SEQ ID NO: 503381 - protein, 18 aa, Homo sapiens
  CDR3 for alpha chain variable domain of TCR clone 251691 (TRAV21, TRAJ52)
CAVRPSPAGGTSYGKLTF

SEQ ID NO: 503382 - protein, 15 aa, Homo sapiens
  CDR3 for beta chain variable domain of TCR clone 251691 (TRBV19, TRBJ1-2)
CASTPGQVANYGYTF

SEQ ID NO: 503383 - protein, 19 aa, Homo sapiens
  CDR3 for alpha chain variable domain of TCR clone 251692 (TRAV25, TRAJ20)
TATQTTDVGILPHDYKLSF

SEQ ID NO: 503384 - protein, 15 aa, Homo sapiens
  CDR3 for beta chain variable domain of TCR clone 251692 (TRBV7-2, TRBJ2-1)
CASTHGTGIYNEQFF

SEQ ID NO: 503385 - protein, 19 aa, Homo sapiens
  CDR3 for alpha chain variable domain of TCR clone 251693 (TRAV30, TRAJ52)
CGTEANTNAGGTSYGKLKF

SEQ ID NO: 503386 - protein, 11 aa, Homo sapiens
  CDR3 for beta chain variable domain of TCR clone 251693 (TRBV29-1, TRBJ2-5)
CSEDRTGTQYF

SEQ ID NO: 503387 - protein, 17 aa, Homo sapiens
  CDR3 for alpha chain variable domain of TCR clone 251694 (TRAV3, TRAJ6)
CALRDGPGAGGSYIPTF

SEQ ID NO: 503388 - protein, 14 aa, Homo sapiens
  CDR3 for beta chain variable domain of TCR clone 251694 (TRBV7-2, TRBJ2-7)
CASSPKTSFYEQYF

SEQ ID NO: 503389 - protein, 15 aa, Homo sapiens
  CDR3 for alpha chain variable domain of TCR clone 251695 (TRAV12-2, TRAJ8)
CAVREENTGFQKLVF

SEQ ID NO: 503390 - protein, 13 aa, Homo sapiens
  CDR3 for beta chain variable domain of TCR clone 251695 (TRBV4-2, TRBJ1-1)
CASSQAGNTEAFF

SEQ ID NO: 503391 - protein, 14 aa, Homo sapiens
  CDR3 for alpha chain variable domain of TCR clone 251696 (TRAV12-1, TRAJ34)
CVLNLDYNTAKLIF

SEQ ID NO: 503392 - protein, 17 aa, Homo sapiens
  CDR3 for beta chain variable domain of TCR clone 251696 (TRBV20-1, TRBJ2-7)
CSAAGTSGGGSSYEQYF

SEQ ID NO: 503393 - protein, 15 aa, Homo sapiens
  CDR3 for alpha chain variable domain of TCR clone 251697 (TRAV3, TRAJ5)
CAVRDLDTGRKAFTF

SEQ ID NO: 503394 - protein, 13 aa, Homo sapiens
  CDR3 for beta chain variable domain of TCR clone 251697 (TRBV12-4, TRBJ2-7)
CASSPTETYEQYF

SEQ ID NO: 503395 - protein, 14 aa, Homo sapiens
  CDR3 for alpha chain variable domain of TCR clone 251698 (TRAV8-4, TRAJ17)
CAVSEGAAGNKLTF

SEQ ID NO: 503396 - protein, 17 aa, Homo sapiens
  CDR3 for beta chain variable domain of TCR clone 251698 (TRBV7-8, TRBJ2-6)
CASSAGTGGAGANVLTF

SEQ ID NO: 503397 - protein, 11 aa, Homo sapiens
  CDR3 for alpha chain variable domain of TCR clone 251699 (TRAV1-2, TRAJ20)
CAVANDYKLSF

SEQ ID NO: 503398 - protein, 15 aa, Homo sapiens
  CDR3 for beta chain variable domain of TCR clone 251699 (TRBV7-3, TRBJ2-2)
CASSETGQGTGELFF

SEQ ID NO: 503399 - protein, 11 aa, Homo sapiens
  CDR3 for alpha chain variable domain of TCR clone 251700 (TRAV21, TRAJ34)
CAHYNTDKLIF

SEQ ID NO: 503400 - protein, 14 aa, Homo sapiens
  CDR3 for beta chain variable domain of TCR clone 251700 (TRBV7-9, TRBJ2-1)
CASSPRDSLYEQFF

SEQ ID NO: 503401 - protein, 14 aa, Homo sapiens
  CDR3 for alpha chain variable domain of TCR clone 251701 (TRAV12-3, TRAJ10)
SHLPLTGGGSKLTF

SEQ ID NO: 503402 - protein, 14 aa, Homo sapiens
  CDR3 for beta chain variable domain of TCR clone 251701 (TRBV19, TRBJ2-1)
CASPTFVLSGGQFF

SEQ ID NO: 503403 - protein, 13 aa, Homo sapiens
  CDR3 for alpha chain variable domain of TCR clone 251702 (TRAV22, TRAJ26)
CAAEHNYGQNFVF

SEQ ID NO: 503404 - protein, 16 aa, Homo sapiens
  CDR3 for beta chain variable domain of TCR clone 251702 (TRBV7-2, TRBJ2-6)
CASSERRASGANVLTF

SEQ ID NO: 503405 - protein, 14 aa, Homo sapiens
  CDR3 for alpha chain variable domain of TCR clone 251703 (TRAV38-1, TRAJ45)
CAYYSGGGADGLTF

SEQ ID NO: 503406 - protein, 13 aa, Homo sapiens
  CDR3 for beta chain variable domain of TCR clone 251703 (TRBV4-1, TRBJ2-2)
CASSQENTGELFF

SEQ ID NO: 503407 - protein, 22 aa, Homo sapiens
  CDR3 for alpha chain variable domain of TCR clone 251704 (TRAV12-2, TRAJ32)
CSSETPSPVVQPPKSATNKLIF

SEQ ID NO: 503408 - protein, 16 aa, Homo sapiens
  CDR3 for beta chain variable domain of TCR clone 251704 (TRBV7-3, TRBJ2-1)
CASSLEGYRSYNEQFF

SEQ ID NO: 503409 - protein, 17 aa, Homo sapiens
  CDR3 for alpha chain variable domain of TCR clone 251705 (TRAV3, TRAJ6)
CAVRDGPRAGGSYIPTF

SEQ ID NO: 503410 - protein, 16 aa, Homo sapiens
  CDR3 for beta chain variable domain of TCR clone 251705 (TRBV7-2, TRBJ2-7)
CASSLVMGVGSYEQYF

SEQ ID NO: 503411 - protein, 16 aa, Homo sapiens
  CDR3 for alpha chain variable domain of TCR clone 251706 (TRAV20, TRAJ22)
CAVQASSFGSARQLTF

SEQ ID NO: 503412 - protein, 13 aa, Homo sapiens
  CDR3 for beta chain variable domain of TCR clone 251706 (TRBV7-2, TRBJ2-5)
CASSQTSVETQYF

SEQ ID NO: 503413 - protein, 13 aa, Homo sapiens
  CDR3 for alpha chain variable domain of TCR clone 251707 (TRAV1-2, TRAJ9)
CAALNTGGFKTIF

SEQ ID NO: 503414 - protein, 15 aa, Homo sapiens
  CDR3 for beta chain variable domain of TCR clone 251707 (TRBV19, TRBJ2-7)
CASSPAGSGEALRYF

SEQ ID NO: 503415 - protein, 14 aa, Homo sapiens
  CDR3 for alpha chain variable domain of TCR clone 251708 (TRAV1-2, TRAJ8)
CAVREDTGFQKLVF

SEQ ID NO: 503416 - protein, 15 aa, Homo sapiens
  CDR3 for beta chain variable domain of TCR clone 251708 (TRBV20-1, TRBJ1-5)
CSARGSVDSNQPQHF

SEQ ID NO: 503417 - protein, 14 aa, Homo sapiens
  CDR3 for alpha chain variable domain of TCR clone 251709 (TRAV20, TRAJ42)
CAVQAGGSQGNLMF

SEQ ID NO: 503418 - protein, 14 aa, Homo sapiens
  CDR3 for beta chain variable domain of TCR clone 251709 (TRBV28, TRBJ1-2)
CASRIQGANYGYTF

SEQ ID NO: 503419 - protein, 16 aa, Homo sapiens
  CDR3 for alpha chain variable domain of TCR clone 251710 (TRAV30, TRAJ24)
CGTEIVDADSWGKFQF

SEQ ID NO: 503420 - protein, 12 aa, Homo sapiens
  CDR3 for beta chain variable domain of TCR clone 251710 (TRBV6-3, TRBJ2-7)
CASSLTSYEQYF

SEQ ID NO: 503421 - protein, 11 aa, Homo sapiens
  CDR3 for alpha chain variable domain of TCR clone 251711 (TRAV2, TRAJ18)
CAVEDHRRLNP

SEQ ID NO: 503422 - protein, 13 aa, Homo sapiens
  CDR3 for beta chain variable domain of TCR clone 251711 (TRBV5-7, TRBJ1-1)
CASGPVLNTEAFF

SEQ ID NO: 503423 - protein, 17 aa, Homo sapiens
  CDR3 for alpha chain variable domain of TCR clone 251712 (TRAV13-1, TRAJ52)
VAAGRNAGGTSYGKLTF

SEQ ID NO: 503424 - protein, 13 aa, Homo sapiens
  CDR3 for beta chain variable domain of TCR clone 251712 (TRBV7-2, TRBJ1-1)
CASNLKGAKVAFF

SEQ ID NO: 503425 - protein, 13 aa, Homo sapiens
  CDR3 for alpha chain variable domain of TCR clone 251713 (TRAV13-1, TRAJ6)
CAASKGGSYIPTF

SEQ ID NO: 503426 - protein, 15 aa, Homo sapiens
  CDR3 for beta chain variable domain of TCR clone 251713 (TRBV27, TRBJ2-1)
CASSNGGGSSNEQFF

SEQ ID NO: 503427 - protein, 11 aa, Homo sapiens
  CDR3 for alpha chain variable domain of TCR clone 251714 (TRAV17, TRAJ43)
CATPRSNDMRF

SEQ ID NO: 503428 - protein, 15 aa, Homo sapiens
  CDR3 for beta chain variable domain of TCR clone 251714 (TRBV11-2, TRBJ2-1)
CASSLGSSGLNEQFF

SEQ ID NO: 503429 - protein, 16 aa, Homo sapiens
  CDR3 for alpha chain variable domain of TCR clone 251715 (TRAV30, TRAJ24)
CGTEIVDADSWGKFQF

SEQ ID NO: 503430 - protein, 18 aa, Homo sapiens
  CDR3 for beta chain variable domain of TCR clone 251715 (TRBV20-1, TRBJ2-6)
CSAETTPTHGSGANVLAF

SEQ ID NO: 503431 - protein, 16 aa, Homo sapiens
  CDR3 for alpha chain variable domain of TCR clone 251716 (TRAV26-1, TRAJ53)
CIVRVAMGGSNYKLTF

SEQ ID NO: 503432 - protein, 11 aa, Homo sapiens
  CDR3 for beta chain variable domain of TCR clone 251716 (TRBV7-9, TRBJ1-5)
CQQPQGQPQHF

SEQ ID NO: 503433 - protein, 10 aa, Homo sapiens
  CDR3 for alpha chain variable domain of TCR clone 251717 (TRAV8-2, TRAJ29)
CTGGNTPLVF

SEQ ID NO: 503434 - protein, 17 aa, Homo sapiens
  CDR3 for beta chain variable domain of TCR clone 251717 (TRBV2, TRBJ2-7)
CASSQALTGWDSDEQYF

SEQ ID NO: 503435 - protein, 14 aa, Homo sapiens
  CDR3 for alpha chain variable domain of TCR clone 251718 (TRAV12-2, TRAJ45)
CAVNKGGGADGLTF

SEQ ID NO: 503436 - protein, 16 aa, Homo sapiens
  CDR3 for beta chain variable domain of TCR clone 251718 (TRBV20-1, TRBJ1-1)
CSASALTQGMNTEAFF

SEQ ID NO: 503437 - protein, 16 aa, Homo sapiens
  CDR3 for alpha chain variable domain of TCR clone 251719 (TRAV3, TRAJ32)
CAVRENYGGATNKLIF

SEQ ID NO: 503438 - protein, 12 aa, Homo sapiens
  CDR3 for beta chain variable domain of TCR clone 251719 (TRBV20-1, TRBJ1-2)
CIVTPEGYGYTF

SEQ ID NO: 503439 - protein, 11 aa, Homo sapiens
  CDR3 for alpha chain variable domain of TCR clone 251720 (TRAV1-2, TRAJ20)
CAVANDYKLSF

SEQ ID NO: 503440 - protein, 13 aa, Homo sapiens
  CDR3 for beta chain variable domain of TCR clone 251720 (TRBV7-7, TRBJ2-3)
CASSLSRADTQYF

SEQ ID NO: 503441 - protein, 16 aa, Homo sapiens
  CDR3 for alpha chain variable domain of TCR clone 251721 (TRAV12-3, TRAJ50)
CAMRDPMKTSYDKVIF

SEQ ID NO: 503442 - protein, 17 aa, Homo sapiens
  CDR3 for beta chain variable domain of TCR clone 251721 (TRBV11-2, TRBJ2-1)
CASSLYPPGVEYNEQFF

SEQ ID NO: 503443 - protein, 16 aa, Homo sapiens
  CDR3 for alpha chain variable domain of TCR clone 251722 (TRAV3, TRAJ37)
CAVRPNGSGNTGKLIF

SEQ ID NO: 503444 - protein, 16 aa, Homo sapiens
  CDR3 for beta chain variable domain of TCR clone 251722 (TRBV9, TRBJ1-2)
CASSVEEKVSPYGYNF

SEQ ID NO: 503445 - protein, 16 aa, Homo sapiens
  CDR3 for alpha chain variable domain of TCR clone 251723 (TRAV26-1, TRAJ31)
CIVRPPVLNNNARLMF

SEQ ID NO: 503446 - protein, 13 aa, Homo sapiens
  CDR3 for beta chain variable domain of TCR clone 251723 (TRBV7-8, TRBJ2-7)
CASSSPSGSEQYF

SEQ ID NO: 503447 - protein, 13 aa, Homo sapiens
  CDR3 for alpha chain variable domain of TCR clone 251724 (TRAV12-1, TRAJ49)
CVVGANTGNQFYF

SEQ ID NO: 503448 - protein, 15 aa, Homo sapiens
  CDR3 for beta chain variable domain of TCR clone 251724 (TRBV29-1, TRBJ2-7)
CSVEFFDRGSYEQYF

SEQ ID NO: 503449 - protein, 11 aa, Homo sapiens
  CDR3 for alpha chain variable domain of TCR clone 251725 (TRAV17, TRAJ31)
CATSNNARLKF

SEQ ID NO: 503450 - protein, 16 aa, Homo sapiens
  CDR3 for beta chain variable domain of TCR clone 251725 (TRBV4-2, TRBJ2-3)
CASSQELAGDTDTQYF

SEQ ID NO: 503451 - protein, 14 aa, Homo sapiens
  CDR3 for alpha chain variable domain of TCR clone 251726 (TRAV17, TRAJ16)
CATADFSDGQKLLF

SEQ ID NO: 503452 - protein, 13 aa, Homo sapiens
  CDR3 for beta chain variable domain of TCR clone 251726 (TRBV7-6, TRBJ1-2)
CASSLVADYGYTF

SEQ ID NO: 503453 - protein, 15 aa, Homo sapiens
  CDR3 for alpha chain variable domain of TCR clone 251727 (TRAV8-4, TRAJ6)
CAVSAPSGGSYIPTF

SEQ ID NO: 503454 - protein, 15 aa, Homo sapiens
  CDR3 for beta chain variable domain of TCR clone 251727 (TRBV2, TRBJ2-1)
CASSEARSAYNGQFF

SEQ ID NO: 503455 - protein, 14 aa, Homo sapiens
  CDR3 for alpha chain variable domain of TCR clone 251728 (TRAV8-3, TRAJ12)
CAVGARDSSYKLIF

SEQ ID NO: 503456 - protein, 12 aa, Homo sapiens
  CDR3 for beta chain variable domain of TCR clone 251728 (TRBV11-2, TRBJ2-1)
CASSPGNNEQFF

SEQ ID NO: 503457 - protein, 13 aa, Homo sapiens
  CDR3 for alpha chain variable domain of TCR clone 251729 (TRAV17, TRAJ5)
CAPMDTGRGALTF

SEQ ID NO: 503458 - protein, 13 aa, Homo sapiens
  CDR3 for beta chain variable domain of TCR clone 251729 (TRBV19, TRBJ2-2)
CASKVSAAGELFF

SEQ ID NO: 503459 - protein, 22 aa, Homo sapiens
  CDR3 for alpha chain variable domain of TCR clone 251730 (TRAV12-2, TRAJ32)
CSSETPSPVIQPPKSATNKLIF

SEQ ID NO: 503460 - protein, 14 aa, Homo sapiens
  CDR3 for beta chain variable domain of TCR clone 251730 (TRBV7-3, TRBJ2-1)
CASSLSGSYNEQFV

SEQ ID NO: 503461 - protein, 16 aa, Homo sapiens
  CDR3 for alpha chain variable domain of TCR clone 251731 (TRAV26-2, TRAJ22)
CILRDGASGSARQLTF

SEQ ID NO: 503462 - protein, 17 aa, Homo sapiens
  CDR3 for beta chain variable domain of TCR clone 251731 (TRBV20-1, TRBJ2-2)
CSARGDSGRTNTGELFF

SEQ ID NO: 503463 - protein, 14 aa, Homo sapiens
  CDR3 for alpha chain variable domain of TCR clone 251732 (TRAV17, TRAJ26)
CATDDHNYGQNFVF

SEQ ID NO: 503464 - protein, 16 aa, Homo sapiens
  CDR3 for beta chain variable domain of TCR clone 251732 (TRBV5-1, TRBJ1-1)
CASSSGGNSLNTEAFF

SEQ ID NO: 503465 - protein, 12 aa, Homo sapiens
  CDR3 for alpha chain variable domain of TCR clone 251733 (TRAV21, TRAJ13)
PGPSGGYQKVTF

SEQ ID NO: 503466 - protein, 17 aa, Homo sapiens
  CDR3 for beta chain variable domain of TCR clone 251733 (TRBV5-1, TRBJ2-1)
CASSLGQISFSCNEQFF

SEQ ID NO: 503467 - protein, 12 aa, Homo sapiens
  CDR3 for alpha chain variable domain of TCR clone 251734 (TRAV12-3, TRAJ17)
CAMTLTGNKLTF

SEQ ID NO: 503468 - protein, 14 aa, Homo sapiens
  CDR3 for beta chain variable domain of TCR clone 251734 (TRBV12-4, TRBJ2-7)
CASSASGGWYEQYF

SEQ ID NO: 503469 - protein, 14 aa, Homo sapiens
  CDR3 for alpha chain variable domain of TCR clone 251735 (TRAV29/DV5, TRAJ36)
CAARRKTGANNLFF

SEQ ID NO: 503470 - protein, 14 aa, Homo sapiens
  CDR3 for beta chain variable domain of TCR clone 251735 (TRBV12-5, TRBJ2-5)
CACGSRTHQETQYF

SEQ ID NO: 503471 - protein, 11 aa, Homo sapiens
  CDR3 for alpha chain variable domain of TCR clone 251736 (TRAV8-3, TRAJ34)
CAIPGKLIFGT

SEQ ID NO: 503472 - protein, 16 aa, Homo sapiens
  CDR3 for beta chain variable domain of TCR clone 251736 (TRBV28, TRBJ2-7)
CASSLFFETGGPEQYF

SEQ ID NO: 503473 - protein, 15 aa, Homo sapiens
  CDR3 for alpha chain variable domain of TCR clone 251737 (TRAV3, TRAJ3)
CAVRDMSSSASKKIF

SEQ ID NO: 503474 - protein, 14 aa, Homo sapiens
  CDR3 for beta chain variable domain of TCR clone 251737 (TRBV19, TRBJ2-1)
CASPTFVLSGEQFF

SEQ ID NO: 503475 - protein, 14 aa, Homo sapiens
  CDR3 for alpha chain variable domain of TCR clone 251738 (TRAV3, TRAJ9)
CAVRLNTGGFKTIF

SEQ ID NO: 503476 - protein, 16 aa, Homo sapiens
  CDR3 for beta chain variable domain of TCR clone 251738 (TRBV19, TRBJ2-6)
CATTGQLRSGANVLTF

SEQ ID NO: 503477 - protein, 12 aa, Homo sapiens
  CDR3 for alpha chain variable domain of TCR clone 251739 (TRAV12-1, TRAJ34)
CVGTFNTDKLIF

SEQ ID NO: 503478 - protein, 14 aa, Homo sapiens
  CDR3 for beta chain variable domain of TCR clone 251739 (TRBV19, TRBJ1-1)
CASLRTGLNTEAFF

SEQ ID NO: 503479 - protein, 16 aa, Homo sapiens
  CDR3 for alpha chain variable domain of TCR clone 251740 (TRAV16, TRAJ57)
CAPYLITQGGSDKLVF

SEQ ID NO: 503480 - protein, 17 aa, Homo sapiens
  CDR3 for beta chain variable domain of TCR clone 251740 (TRBV24-1, TRBJ2-4)
CATSDAEARGVRNTQYF

SEQ ID NO: 503481 - protein, 16 aa, Homo sapiens
  CDR3 for alpha chain variable domain of TCR clone 251741 (TRAV1-1, TRAJ28)
CAVRDDSGAGSYQLTF

SEQ ID NO: 503482 - protein, 11 aa, Homo sapiens
  CDR3 for beta chain variable domain of TCR clone 251741 (TRBV11-2, TRBJ2-2)
CASSLPGELFF

SEQ ID NO: 503483 - protein, 14 aa, Homo sapiens
  CDR3 for alpha chain variable domain of TCR clone 251742 (TRAV12-2, TRAJ17)
CAVLFKAAGNKLTF

SEQ ID NO: 503484 - protein, 16 aa, Homo sapiens
  CDR3 for beta chain variable domain of TCR clone 251742 (TRBV27, TRBJ2-2)
CASSCRGLVRTGELFF

SEQ ID NO: 503485 - protein, 13 aa, Homo sapiens
  CDR3 for alpha chain variable domain of TCR clone 251743 (TRAV8-4, TRAJ10)
CAAFPGGGNKLTF

SEQ ID NO: 503486 - protein, 12 aa, Homo sapiens
  CDR3 for beta chain variable domain of TCR clone 251743 (TRBV3-1, TRBJ2-1)
CASSQGSSGQFF

SEQ ID NO: 503487 - protein, 18 aa, Homo sapiens
  CDR3 for alpha chain variable domain of TCR clone 251744 (TRAV3, TRAJ17)
CAVRARRGGRSCRQQANF

SEQ ID NO: 503488 - protein, 15 aa, Homo sapiens
  CDR3 for beta chain variable domain of TCR clone 251744 (TRBV5-1, TRBJ2-3)
CASSSTSGSTDTQYF

SEQ ID NO: 503489 - protein, 14 aa, Homo sapiens
  CDR3 for alpha chain variable domain of TCR clone 251745 (TRAV38-1, TRAJ11)
CAFMKHEGYSTLTF

SEQ ID NO: 503490 - protein, 14 aa, Homo sapiens
  CDR3 for beta chain variable domain of TCR clone 251745 (TRBV11-2, TRBJ1-5)
CASSLDRGRQPQHF

SEQ ID NO: 503491 - protein, 13 aa, Homo sapiens
  CDR3 for alpha chain variable domain of TCR clone 251746 (TRAV13-1, TRAJ6)
CAASSGVSYIPTF

SEQ ID NO: 503492 - protein, 14 aa, Homo sapiens
  CDR3 for beta chain variable domain of TCR clone 251746 (TRBV20-1, TRBJ2-4)
CSAVAGGPGNIQYF

SEQ ID NO: 503493 - protein, 13 aa, Homo sapiens
  CDR3 for alpha chain variable domain of TCR clone 251747 (TRAV27, TRAJ41)
CAGEENSGYALNF

SEQ ID NO: 503494 - protein, 13 aa, Homo sapiens
  CDR3 for beta chain variable domain of TCR clone 251747 (TRBV7-2, TRBJ1-2)
CASSLVADYGYTF

SEQ ID NO: 503495 - protein, 11 aa, Homo sapiens
  CDR3 for alpha chain variable domain of TCR clone 251748 (TRAV17, TRAJ31)
CATSNNARLMF

SEQ ID NO: 503496 - protein, 16 aa, Homo sapiens
  CDR3 for beta chain variable domain of TCR clone 251748 (TRBV7-8, TRBJ2-4)
CASSAARTLAKNIQYF

SEQ ID NO: 503497 - protein, 14 aa, Homo sapiens
  CDR3 for alpha chain variable domain of TCR clone 251749 (TRAV38-1, TRAJ40)
CALRPISGTYKYIF

SEQ ID NO: 503498 - protein, 16 aa, Homo sapiens
  CDR3 for beta chain variable domain of TCR clone 251749 (TRBV6-1, TRBJ2-5)
CASSETLDRGAETQYF

SEQ ID NO: 503499 - protein, 15 aa, Homo sapiens
  CDR3 for alpha chain variable domain of TCR clone 251750 (TRAV17, TRAJ22)
CATVAPSGSARQLTS

SEQ ID NO: 503500 - protein, 15 aa, Homo sapiens
  CDR3 for beta chain variable domain of TCR clone 251750 (TRBV20-1, TRBJ2-7)
CSARDRVSGMDEQYF

SEQ ID NO: 503501 - protein, 16 aa, Homo sapiens
  CDR3 for alpha chain variable domain of TCR clone 251751 (TRAV13-1, TRAJ37)
CAASSLGSSNTGKLIF

SEQ ID NO: 503502 - protein, 12 aa, Homo sapiens
  CDR3 for beta chain variable domain of TCR clone 251751 (TRBV6-1, TRBJ2-5)
CASSEGRENQYF

SEQ ID NO: 503503 - protein, 14 aa, Homo sapiens
  CDR3 for alpha chain variable domain of TCR clone 251752 (TRAV12-2, TRAJ44)
CAVNPAATASKLTF

SEQ ID NO: 503504 - protein, 13 aa, Homo sapiens
  CDR3 for beta chain variable domain of TCR clone 251752 (TRBV20-1, TRBJ1-6)
CSAPLGVGSPLHF

SEQ ID NO: 503505 - protein, 14 aa, Homo sapiens
  CDR3 for alpha chain variable domain of TCR clone 251753 (TRAV1-2, TRAJ8)
CAVREDTGFQKLVF

SEQ ID NO: 503506 - protein, 12 aa, Homo sapiens
  CDR3 for beta chain variable domain of TCR clone 251753 (TRBV20-1, TRBJ2-3)
CSADGAGDTQYF

SEQ ID NO: 503507 - protein, 13 aa, Homo sapiens
  CDR3 for alpha chain variable domain of TCR clone 251754 (TRAV3, TRAJ33)
CAVRDRSNYQLSW

SEQ ID NO: 503508 - protein, 16 aa, Homo sapiens
  CDR3 for beta chain variable domain of TCR clone 251754 (TRBV4-2, TRBJ2-7)
CASSQDRGTSSYEQYF

SEQ ID NO: 503509 - protein, 12 aa, Homo sapiens
  CDR3 for alpha chain variable domain of TCR clone 251755 (TRAV13-1, TRAJ49)
CAASPMGNQFYF

SEQ ID NO: 503510 - protein, 13 aa, Homo sapiens
  CDR3 for beta chain variable domain of TCR clone 251755 (TRBV20-1, TRBJ2-2)
CGASAAGTGERFF

SEQ ID NO: 503511 - protein, 13 aa, Homo sapiens
  CDR3 for alpha chain variable domain of TCR clone 251756 (TRAV13-1, TRAJ9)
CAASGTGGFKTIF

SEQ ID NO: 503512 - protein, 14 aa, Homo sapiens
  CDR3 for beta chain variable domain of TCR clone 251756 (TRBV7-7, TRBJ2-2)
CATRQDSDTGELFF

SEQ ID NO: 503513 - protein, 13 aa, Homo sapiens
  CDR3 for alpha chain variable domain of TCR clone 251757 (TRAV13-1, TRAJ12)
CAASPDSSYKLIF

SEQ ID NO: 503514 - protein, 15 aa, Homo sapiens
  CDR3 for beta chain variable domain of TCR clone 251757 (TRBV20-1, TRBJ2-7)
CSARGPLAGGREQYF

SEQ ID NO: 503515 - protein, 14 aa, Homo sapiens
  CDR3 for alpha chain variable domain of TCR clone 251758 (TRAV9-2, TRAJ39)
CALYIYNAGNMPTF

SEQ ID NO: 503516 - protein, 13 aa, Homo sapiens
  CDR3 for beta chain variable domain of TCR clone 251758 (TRBV4-2, TRBJ1-1)
CASSQAGNTEAFF

SEQ ID NO: 503517 - protein, 13 aa, Homo sapiens
  CDR3 for alpha chain variable domain of TCR clone 251759 (TRAV12-2, TRAJ49)
CAVKPNTGNQFYF

SEQ ID NO: 503518 - protein, 16 aa, Homo sapiens
  CDR3 for beta chain variable domain of TCR clone 251759 (TRBV7-3, TRBJ2-2)
CASSLKRGTLSGELFF

SEQ ID NO: 503519 - protein, 12 aa, Homo sapiens
  CDR3 for alpha chain variable domain of TCR clone 251760 (TRAV12-1, TRAJ31)
CVSWNKNARLMF

SEQ ID NO: 503520 - protein, 15 aa, Homo sapiens
  CDR3 for beta chain variable domain of TCR clone 251760 (TRBV7-2, TRBJ1-5)
CASSLDRGQDQPQHF

SEQ ID NO: 503521 - protein, 14 aa, Homo sapiens
  CDR3 for alpha chain variable domain of TCR clone 251761 (TRAV24, TRAJ42)
CAQNYGGSQEHLIF

SEQ ID NO: 503522 - protein, 15 aa, Homo sapiens
  CDR3 for beta chain variable domain of TCR clone 251761 (TRBV19, TRBJ1-5)
CASSIPGGAGQPQHF

SEQ ID NO: 503523 - protein, 11 aa, Homo sapiens
  CDR3 for alpha chain variable domain of TCR clone 251762 (TRAV8-2, TRAJ26)
CVVNLLLGSEF

SEQ ID NO: 503524 - protein, 15 aa, Homo sapiens
  CDR3 for beta chain variable domain of TCR clone 251762 (TRBV11-2, TRBJ2-2)
CASSSDRVNAGELFF

SEQ ID NO: 503525 - protein, 14 aa, Homo sapiens
  CDR3 for alpha chain variable domain of TCR clone 251763 (TRAV12-2, TRAJ13)
CAVKKTGGYQKVTF

SEQ ID NO: 503526 - protein, 14 aa, Homo sapiens
  CDR3 for beta chain variable domain of TCR clone 251763 (TRBV4-1, TRBJ1-1)
CASSRSGQSFEAFF

SEQ ID NO: 503527 - protein, 11 aa, Homo sapiens
  CDR3 for alpha chain variable domain of TCR clone 251764 (TRAV12-2, TRAJ39)
CAVNNMLTFGG

SEQ ID NO: 503528 - protein, 12 aa, Homo sapiens
  CDR3 for beta chain variable domain of TCR clone 251764 (TRBV7-8, TRBJ2-7)
CASSLGDREQYF

SEQ ID NO: 503529 - protein, 15 aa, Homo sapiens
  CDR3 for alpha chain variable domain of TCR clone 251765 (TRAV20, TRAJ6)
CAVRLQSGGSYIPTF

SEQ ID NO: 503530 - protein, 14 aa, Homo sapiens
  CDR3 for beta chain variable domain of TCR clone 251765 (TRBV12-4, TRBJ2-7)
CASIASGGWYEQYF

SEQ ID NO: 503531 - protein, 20 aa, Homo sapiens
  CDR3 for alpha chain variable domain of TCR clone 251766 (TRAV26-1, TRAJ42)
CCVLLHRQTYYGGSQGNLIF

SEQ ID NO: 503532 - protein, 13 aa, Homo sapiens
  CDR3 for beta chain variable domain of TCR clone 251766 (TRBV10-3, TRBJ2-7)
CASKLAVNYEQYF

SEQ ID NO: 503533 - protein, 16 aa, Homo sapiens
  CDR3 for alpha chain variable domain of TCR clone 251767 (TRAV3, TRAJ10)
CAVRDMRAGGGNKLTL

SEQ ID NO: 503534 - protein, 12 aa, Homo sapiens
  CDR3 for beta chain variable domain of TCR clone 251767 (TRBV7-9, TRBJ1-1)
CASSLVRGEAFF

SEQ ID NO: 503535 - protein, 14 aa, Homo sapiens
  CDR3 for alpha chain variable domain of TCR clone 251768 (TRAV26-1, TRAJ49)
CIVRLTNPGNQFYF

SEQ ID NO: 503536 - protein, 13 aa, Homo sapiens
  CDR3 for beta chain variable domain of TCR clone 251768 (TRBV10-1, TRBJ1-1)
CASQGQTNTEAFF

SEQ ID NO: 503537 - protein, 22 aa, Homo sapiens
  CDR3 for alpha chain variable domain of TCR clone 251769 (TRAV8-2, TRAJ45)
HLTKPSAHMSDAAEYSADGLTF

SEQ ID NO: 503538 - protein, 16 aa, Homo sapiens
  CDR3 for beta chain variable domain of TCR clone 251769 (TRBV27, TRBJ2-2)
CASSFRGLVRTGELFF

SEQ ID NO: 503539 - protein, 10 aa, Homo sapiens
  CDR3 for alpha chain variable domain of TCR clone 251770 (TRAV5, TRAJ34)
CAEDTDKLIF

SEQ ID NO: 503540 - protein, 14 aa, Homo sapiens
  CDR3 for beta chain variable domain of TCR clone 251770 (TRBV13, TRBJ2-5)
CASSLERVGETQYF

SEQ ID NO: 503541 - protein, 14 aa, Homo sapiens
  CDR3 for alpha chain variable domain of TCR clone 251771 (TRAV2, TRAJ37)
CAVEDLGNTGKLIF

SEQ ID NO: 503542 - protein, 15 aa, Homo sapiens
  CDR3 for beta chain variable domain of TCR clone 251771 (TRBV7-2, TRBJ2-1)
CASSSGLAGGNEQFF

SEQ ID NO: 503543 - protein, 17 aa, Homo sapiens
  CDR3 for alpha chain variable domain of TCR clone 251772 (TRAV3, TRAJ6)
CAVRDGPRAGGSYIPTF

SEQ ID NO: 503544 - protein, 14 aa, Homo sapiens
  CDR3 for beta chain variable domain of TCR clone 251772 (TRBV5-1, TRBJ1-1)
CASSLTRRSTEAFF

SEQ ID NO: 503545 - protein, 10 aa, Homo sapiens
  CDR3 for alpha chain variable domain of TCR clone 251773 (TRAV30, TRAJ48)
CGIGNEKLTF

SEQ ID NO: 503546 - protein, 13 aa, Homo sapiens
  CDR3 for beta chain variable domain of TCR clone 251773 (TRBV7-2, TRBJ2-7)
CANSSPSGSEQYF

SEQ ID NO: 503547 - protein, 12 aa, Homo sapiens
  CDR3 for alpha chain variable domain of TCR clone 251774 (TRAV3, TRAJ27)
CAVRDKAGKSTF

SEQ ID NO: 503548 - protein, 14 aa, Homo sapiens
  CDR3 for beta chain variable domain of TCR clone 251774 (TRBV15, TRBJ2-5)
CATSIGGLGETQYV

SEQ ID NO: 503549 - protein, 22 aa, Homo sapiens
  CDR3 for alpha chain variable domain of TCR clone 251775 (TRAV13-1, TRAJ35)
CAASKGGFGNVQHCGSGPQVIV

SEQ ID NO: 503550 - protein, 13 aa, Homo sapiens
  CDR3 for beta chain variable domain of TCR clone 251775 (TRBV7-3, TRBJ1-1)
CASSQDWGAEAFF

SEQ ID NO: 503551 - protein, 15 aa, Homo sapiens
  CDR3 for alpha chain variable domain of TCR clone 251776 (TRAV8-2, TRAJ16)
CVVSDGFSDGQKLLF

SEQ ID NO: 503552 - protein, 14 aa, Homo sapiens
  CDR3 for beta chain variable domain of TCR clone 251776 (TRBV7-3, TRBJ2-1)
CASSLAGGTNEQFF

SEQ ID NO: 503553 - protein, 18 aa, Homo sapiens
  CDR3 for alpha chain variable domain of TCR clone 251777 (TRAV13-1, TRAJ52)
CAADFPNAGGTRYGKLTF

SEQ ID NO: 503554 - protein, 14 aa, Homo sapiens
  CDR3 for beta chain variable domain of TCR clone 251777 (TRBV11-2, TRBJ2-3)
CASSLYAGRDTQYF

SEQ ID NO: 503555 - protein, 17 aa, Homo sapiens
  CDR3 for alpha chain variable domain of TCR clone 251778 (TRAV1-2, TRAJ26)
LPLCCERPDNYGQNFVF

SEQ ID NO: 503556 - protein, 14 aa, Homo sapiens
  CDR3 for beta chain variable domain of TCR clone 251778 (TRBV4-1, TRBJ2-2)
CASSQAANTGELFF

SEQ ID NO: 503557 - protein, 12 aa, Homo sapiens
  CDR3 for alpha chain variable domain of TCR clone 251779 (TRAV1-1, TRAJ8)
CAGGTGFQKLVF

SEQ ID NO: 503558 - protein, 14 aa, Homo sapiens
  CDR3 for beta chain variable domain of TCR clone 251779 (TRBV4-2, TRBJ2-1)
CASGLDRAYNEQFF

SEQ ID NO: 503559 - protein, 12 aa, Homo sapiens
  CDR3 for alpha chain variable domain of TCR clone 251780 (TRAV1-1, TRAJ24)
CAATDSWGKLQF

SEQ ID NO: 503560 - protein, 13 aa, Homo sapiens
  CDR3 for beta chain variable domain of TCR clone 251780 (TRBV12-4, TRBJ2-7)
CASSPTETYEQYF

SEQ ID NO: 503561 - protein, 13 aa, Homo sapiens
  CDR3 for alpha chain variable domain of TCR clone 251781 (TRAV1-1, TRAJ7)
CAVSPLWEQQTRF

SEQ ID NO: 503562 - protein, 19 aa, Homo sapiens
  CDR3 for beta chain variable domain of TCR clone 251781 (TRBV4-3, TRBJ2-7)
CISAPAAKQPSGTPYEQYF

SEQ ID NO: 503563 - protein, 16 aa, Homo sapiens
  CDR3 for alpha chain variable domain of TCR clone 251782 (TRAV12-3, TRAJ53)
CAMSPGSGGSNYKLTL

SEQ ID NO: 503564 - protein, 14 aa, Homo sapiens
  CDR3 for beta chain variable domain of TCR clone 251782 (TRBV7-2, TRBJ1-1)
CASSFLTGTTEAFF

SEQ ID NO: 503565 - protein, 14 aa, Homo sapiens
  CDR3 for alpha chain variable domain of TCR clone 251783 (TRAV12-2, TRAJ40)
CAVKIPSGTYKYIF

SEQ ID NO: 503566 - protein, 16 aa, Homo sapiens
  CDR3 for beta chain variable domain of TCR clone 251783 (TRBV28, TRBJ2-5)
CACSFSPAGGWETQYF

SEQ ID NO: 503567 - protein, 14 aa, Homo sapiens
  CDR3 for alpha chain variable domain of TCR clone 251784 (TRAV21, TRAJ35)
CAVMPIGFGNVLHC

SEQ ID NO: 503568 - protein, 15 aa, Homo sapiens
  CDR3 for beta chain variable domain of TCR clone 251784 (TRBV7-9, TRBJ2-7)
CASSLDLDRGYEQYF

SEQ ID NO: 503569 - protein, 17 aa, Homo sapiens
  CDR3 for alpha chain variable domain of TCR clone 251785 (TRAV9-2, TRAJ45)
CALSGYYSGGGADGLTF

SEQ ID NO: 503570 - protein, 13 aa, Homo sapiens
  CDR3 for beta chain variable domain of TCR clone 251785 (TRBV11-2, TRBJ2-7)
CASSGTRPYEQYF

SEQ ID NO: 503571 - protein, 23 aa, Homo sapiens
  CDR3 for alpha chain variable domain of TCR clone 251786 (TRAV8-3, )
CAVVTTRIPVIQNPDPAVYQLRD

SEQ ID NO: 503572 - protein, 14 aa, Homo sapiens
  CDR3 for beta chain variable domain of TCR clone 251786 (TRBV11-2, TRBJ2-7)
CASSPSTTSYEQYF

SEQ ID NO: 503573 - protein, 13 aa, Homo sapiens
  CDR3 for alpha chain variable domain of TCR clone 251787 (TRAV27, TRAJ29)
CAGAHSGNTPLVF

SEQ ID NO: 503574 - protein, 12 aa, Homo sapiens
  CDR3 for beta chain variable domain of TCR clone 251787 (TRBV6-6, TRBJ1-3)
CASSYSKWTQFL

SEQ ID NO: 503575 - protein, 10 aa, Homo sapiens
  CDR3 for alpha chain variable domain of TCR clone 251788 (TRAV12-3, TRAJ43)
CAMSASDMRF

SEQ ID NO: 503576 - protein, 13 aa, Homo sapiens
  CDR3 for beta chain variable domain of TCR clone 251788 (TRBV20-1, TRBJ2-3)
CSARAGGRDTQYF

SEQ ID NO: 503577 - protein, 11 aa, Homo sapiens
  CDR3 for alpha chain variable domain of TCR clone 251789 (TRAV21, TRAJ41)
CAVWSGYALNF

SEQ ID NO: 503578 - protein, 13 aa, Homo sapiens
  CDR3 for beta chain variable domain of TCR clone 251789 (TRBV7-2, TRBJ2-5)
CASSQTSVETQYF

SEQ ID NO: 503579 - protein, 14 aa, Homo sapiens
  CDR3 for alpha chain variable domain of TCR clone 251790 (TRAV12-2, TRAJ13)
CAVKKTGGYQKVTV

SEQ ID NO: 503580 - protein, 15 aa, Homo sapiens
  CDR3 for beta chain variable domain of TCR clone 251790 (TRBV27, TRBJ2-1)
CASSNGEGPPMSSSS

SEQ ID NO: 503581 - protein, 15 aa, Homo sapiens
  CDR3 for alpha chain variable domain of TCR clone 251791 (TRAV3, TRAJ5)
CAVRDRKTGRRALTF

SEQ ID NO: 503582 - protein, 14 aa, Homo sapiens
  CDR3 for beta chain variable domain of TCR clone 251791 (TRBV27, TRBJ2-7)
CASSFRDGPYEQYF

SEQ ID NO: 503583 - protein, 14 aa, Homo sapiens
  CDR3 for alpha chain variable domain of TCR clone 251792 (TRAV12-2, TRAJ40)
CAVKIPSGTYKYIF

SEQ ID NO: 503584 - protein, 16 aa, Homo sapiens
  CDR3 for beta chain variable domain of TCR clone 251792 (TRBV28, TRBJ2-7)
CASSPWVATGDLAQYF

SEQ ID NO: 503585 - protein, 15 aa, Homo sapiens
  CDR3 for alpha chain variable domain of TCR clone 251793 (TRAV3, TRAJ22)
CSVRDRGGSARQLTF

SEQ ID NO: 503586 - protein, 14 aa, Homo sapiens
  CDR3 for beta chain variable domain of TCR clone 251793 (TRBV19, TRBJ1-5)
CASSIGLIGKPQHF

SEQ ID NO: 503587 - protein, 14 aa, Homo sapiens
  CDR3 for alpha chain variable domain of TCR clone 251794 (TRAV1-2, TRAJ8)
CAVREDTGFPKLVF

SEQ ID NO: 503588 - protein, 14 aa, Homo sapiens
  CDR3 for beta chain variable domain of TCR clone 251794 (TRBV7-9, TRBJ1-1)
CASSLGGANTEAFF

SEQ ID NO: 503589 - protein, 23 aa, Homo sapiens
  CDR3 for alpha chain variable domain of TCR clone 251795 (TRAV17, TRAJ36)
CAPTGATTSSLGLERDSPLFPIS

SEQ ID NO: 503590 - protein, 12 aa, Homo sapiens
  CDR3 for beta chain variable domain of TCR clone 251795 (TRBV29-1, TRBJ2-3)
CSVTGGADTQYF

SEQ ID NO: 503591 - protein, 16 aa, Homo sapiens
  CDR3 for alpha chain variable domain of TCR clone 251796 (TRAV30, TRAJ26)
CGTESVWDNYGQNFVF

SEQ ID NO: 503592 - protein, 13 aa, Homo sapiens
  CDR3 for beta chain variable domain of TCR clone 251796 (TRBV19, TRBJ1-2)
CASSISEDYGYTF

SEQ ID NO: 503593 - protein, 11 aa, Homo sapiens
  CDR3 for alpha chain variable domain of TCR clone 251797 (TRAV12-1, TRAJ34)
CVVNKGRELIF

SEQ ID NO: 503594 - protein, 12 aa, Homo sapiens
  CDR3 for beta chain variable domain of TCR clone 251797 (TRBV2, TRBJ2-1)
CDYGPPGNEQFF

SEQ ID NO: 503595 - protein, 15 aa, Homo sapiens
  CDR3 for alpha chain variable domain of TCR clone 251798 (TRAV12-1, TRAJ9)
CVVSFGDTGGFKTIF

SEQ ID NO: 503596 - protein, 13 aa, Homo sapiens
  CDR3 for beta chain variable domain of TCR clone 251798 (TRBV19, TRBJ1-2)
CASSVPGQDGYTF

SEQ ID NO: 503597 - protein, 11 aa, Homo sapiens
  CDR3 for alpha chain variable domain of TCR clone 251799 (TRAV1-2, TRAJ40)
CAVPGTYKYIF

SEQ ID NO: 503598 - protein, 15 aa, Homo sapiens
  CDR3 for beta chain variable domain of TCR clone 251799 (TRBV5-7, TRBJ1-5)
CASSYGKLWDQAQHF

SEQ ID NO: 503599 - protein, 13 aa, Homo sapiens
  CDR3 for alpha chain variable domain of TCR clone 251800 (TRAV20, TRAJ45)
CAVKKRRCRRTHL

SEQ ID NO: 503600 - protein, 14 aa, Homo sapiens
  CDR3 for beta chain variable domain of TCR clone 251800 (TRBV15, TRBJ2-5)
CATSIGGLEETQYF

SEQ ID NO: 503601 - protein, 17 aa, Homo sapiens
  CDR3 for alpha chain variable domain of TCR clone 251801 (TRAV3, TRAJ6)
CAVSDGPRAGGSYIPTF

SEQ ID NO: 503602 - protein, 16 aa, Homo sapiens
  CDR3 for beta chain variable domain of TCR clone 251801 (TRBV7-8, TRBJ2-3)
CASSTEGQRETGTQYF

SEQ ID NO: 503603 - protein, 12 aa, Homo sapiens
  CDR3 for alpha chain variable domain of TCR clone 251802 (TRAV13-1, TRAJ21)
CAAKEGFNKFYF

SEQ ID NO: 503604 - protein, 17 aa, Homo sapiens
  CDR3 for beta chain variable domain of TCR clone 251802 (TRBV20-1, TRBJ2-1)
CSASSSGLAGSHNEQFF

SEQ ID NO: 503605 - protein, 16 aa, Homo sapiens
  CDR3 for alpha chain variable domain of TCR clone 251803 (TRAV12-3, TRAJ53)
CAMSPGSGGSNYKLTF

SEQ ID NO: 503606 - protein, 16 aa, Homo sapiens
  CDR3 for beta chain variable domain of TCR clone 251803 (TRBV29-1, TRBJ2-7)
WSVEDAEDGTAYEQYF

SEQ ID NO: 503607 - protein, 14 aa, Homo sapiens
  CDR3 for alpha chain variable domain of TCR clone 251804 (TRAV38-1, TRAJ45)
CAYYSGGGADGLTF

SEQ ID NO: 503608 - protein, 16 aa, Homo sapiens
  CDR3 for beta chain variable domain of TCR clone 251804 (TRBV19, TRBJ2-1)
CASSKAGPSSYNEQFF

SEQ ID NO: 503609 - protein, 11 aa, Homo sapiens
  CDR3 for alpha chain variable domain of TCR clone 251805 (TRAV17, TRAJ36)
CAPTGANHLFF

SEQ ID NO: 503610 - protein, 12 aa, Homo sapiens
  CDR3 for beta chain variable domain of TCR clone 251805 (TRBV29-1, TRBJ2-3)
CSVVLGADTQYF

SEQ ID NO: 503611 - protein, 15 aa, Homo sapiens
  CDR3 for alpha chain variable domain of TCR clone 251806 (TRAV12-1, TRAJ44)
CVADLPTGTASKITF

SEQ ID NO: 503612 - protein, 15 aa, Homo sapiens
  CDR3 for beta chain variable domain of TCR clone 251806 (TRBV2, TRBJ2-5)
CASSEQGLIGETQYF

SEQ ID NO: 503613 - protein, 14 aa, Homo sapiens
  CDR3 for alpha chain variable domain of TCR clone 251807 (TRAV8-6, TRAJ5)
CAVSLDTGRRALTF

SEQ ID NO: 503614 - protein, 14 aa, Homo sapiens
  CDR3 for beta chain variable domain of TCR clone 251807 (TRBV6-1, TRBJ1-3)
CASVQGGGGNTIYF

SEQ ID NO: 503615 - protein, 17 aa, Homo sapiens
  CDR3 for alpha chain variable domain of TCR clone 251808 (TRAV3, TRAJ42)
CAVRDRDYGGSQGNLIF

SEQ ID NO: 503616 - protein, 17 aa, Homo sapiens
  CDR3 for beta chain variable domain of TCR clone 251808 (TRBV7-6, TRBJ2-5)
CASSLGGLAGGLKTQYF

SEQ ID NO: 503617 - protein, 12 aa, Homo sapiens
  CDR3 for alpha chain variable domain of TCR clone 251809 (TRAV12-3, TRAJ39)
CAMTQAGNMLTF

SEQ ID NO: 503618 - protein, 13 aa, Homo sapiens
  CDR3 for beta chain variable domain of TCR clone 251809 (TRBV20-1, TRBJ1-1)
CSAPEGGSTEAFF

SEQ ID NO: 503619 - protein, 11 aa, Homo sapiens
  CDR3 for alpha chain variable domain of TCR clone 251810 (TRAV17, TRAJ9)
CATTGGFKLIF

SEQ ID NO: 503620 - protein, 14 aa, Homo sapiens
  CDR3 for beta chain variable domain of TCR clone 251810 (TRBV7-9, TRBJ2-2)
CASSGLADTGELFF

SEQ ID NO: 503621 - protein, 13 aa, Homo sapiens
  CDR3 for alpha chain variable domain of TCR clone 251811 (TRAV27, TRAJ17)
CAGAATAGNKLTF

SEQ ID NO: 503622 - protein, 15 aa, Homo sapiens
  CDR3 for beta chain variable domain of TCR clone 251811 (TRBV5-1, TRBJ2-3)
CASRNKAGSTDTQYF

SEQ ID NO: 503623 - protein, 15 aa, Homo sapiens
  CDR3 for alpha chain variable domain of TCR clone 251812 (TRAV17, TRAJ56)
CATDANTGANSKMTF

SEQ ID NO: 503624 - protein, 14 aa, Homo sapiens
  CDR3 for beta chain variable domain of TCR clone 251812 (TRBV19, TRBJ1-5)
CASSLGTGGQPQHF

SEQ ID NO: 503625 - protein, 11 aa, Homo sapiens
  CDR3 for alpha chain variable domain of TCR clone 251813 (TRAV3, TRAJ21)
CAVGNYNEFYF

SEQ ID NO: 503626 - protein, 16 aa, Homo sapiens
  CDR3 for beta chain variable domain of TCR clone 251813 (TRBV19, TRBJ2-1)
CASSKAGPSSYNEQFF

SEQ ID NO: 503627 - protein, 15 aa, Homo sapiens
  CDR3 for alpha chain variable domain of TCR clone 251814 (TRAV26-1, TRAJ44)
CIIRANTGTARKLTF

SEQ ID NO: 503628 - protein, 16 aa, Homo sapiens
  CDR3 for beta chain variable domain of TCR clone 251814 (TRBV7-7, TRBJ2-1)
CASSLASGTSYNEQFF

SEQ ID NO: 503629 - protein, 15 aa, Homo sapiens
  CDR3 for alpha chain variable domain of TCR clone 251815 (TRAV20, TRAJ40)
CAVQRGSSGTYKYIF

SEQ ID NO: 503630 - protein, 19 aa, Homo sapiens
  CDR3 for beta chain variable domain of TCR clone 251815 (TRBV28, TRBJ2-7)
CASSYSGTSRLGWVYEQYF

SEQ ID NO: 503631 - protein, 13 aa, Homo sapiens
  CDR3 for alpha chain variable domain of TCR clone 251816 (TRAV36/DV7, TRAJ49)
CAGDSNIGNQFYF

SEQ ID NO: 503632 - protein, 12 aa, Homo sapiens
  CDR3 for beta chain variable domain of TCR clone 251816 (TRBV11-2, TRBJ2-2)
CASSLGDGELFF

SEQ ID NO: 503633 - protein, 12 aa, Homo sapiens
  CDR3 for alpha chain variable domain of TCR clone 251817 (TRAV30, TRAJ43)
CGTEERGNDMSF

SEQ ID NO: 503634 - protein, 13 aa, Homo sapiens
  CDR3 for beta chain variable domain of TCR clone 251817 (TRBV12-4, TRBJ1-2)
CASSSGSKDGYTF

SEQ ID NO: 503635 - protein, 15 aa, Homo sapiens
  CDR3 for alpha chain variable domain of TCR clone 251818 (TRAV29/DV5, TRAJ53)
CAVPSSGGSNYKLTF

SEQ ID NO: 503636 - protein, 16 aa, Homo sapiens
  CDR3 for beta chain variable domain of TCR clone 251818 (TRBV7-3, TRBJ2-2)
CASSLKRGTLSGELFF

SEQ ID NO: 503637 - protein, 13 aa, Homo sapiens
  CDR3 for alpha chain variable domain of TCR clone 251819 (TRAV1-2, TRAJ9)
CAALNTGGFKTNF

SEQ ID NO: 503638 - protein, 14 aa, Homo sapiens
  CDR3 for beta chain variable domain of TCR clone 251819 (TRBV13, TRBJ2-5)
CASSLERVGETQYF

SEQ ID NO: 503639 - protein, 23 aa, Homo sapiens
  CDR3 for alpha chain variable domain of TCR clone 251820 (TRAV4, TRAJ26)
IPADRKSSTLSLHRVYYGQNFVF

SEQ ID NO: 503640 - protein, 16 aa, Homo sapiens
  CDR3 for beta chain variable domain of TCR clone 251820 (TRBV7-2, TRBJ1-2)
CASSSNQDRRGHGYTF

SEQ ID NO: 503641 - protein, 19 aa, Homo sapiens
  CDR3 for alpha chain variable domain of TCR clone 251821 (TRAV40, )
CLPIPDIQNPDPAVYQLRD

SEQ ID NO: 503642 - protein, 13 aa, Homo sapiens
  CDR3 for beta chain variable domain of TCR clone 251821 (TRBV12-4, TRBJ1-1)
CASSPGTGFEAFF

SEQ ID NO: 503643 - protein, 14 aa, Homo sapiens
  CDR3 for alpha chain variable domain of TCR clone 251822 (TRAV8-1, TRAJ3)
CAVEGYSSASKIIF

SEQ ID NO: 503644 - protein, 14 aa, Homo sapiens
  CDR3 for beta chain variable domain of TCR clone 251822 (TRBV6-1, TRBJ1-3)
CASVQGGGGNTIYF

SEQ ID NO: 503645 - protein, 14 aa, Homo sapiens
  CDR3 for alpha chain variable domain of TCR clone 251823 (TRAV20, TRAJ22)
CAVALGGSARQLTF

SEQ ID NO: 503646 - protein, 14 aa, Homo sapiens
  CDR3 for beta chain variable domain of TCR clone 251823 (TRBV20-1, TRBJ1-1)
CSAQTRIGGTEAFF

SEQ ID NO: 503647 - protein, 11 aa, Homo sapiens
  CDR3 for alpha chain variable domain of TCR clone 251824 (TRAV35, TRAJ57)
GPQGGSEKLVF

SEQ ID NO: 503648 - protein, 16 aa, Homo sapiens
  CDR3 for beta chain variable domain of TCR clone 251824 (TRBV7-2, TRBJ1-5)
CASSWTGGPGKQPQHF

SEQ ID NO: 503649 - protein, 18 aa, Homo sapiens
  CDR3 for alpha chain variable domain of TCR clone 251825 (TRAV26-2, TRAJ54)
CILRDVEVGIQGAQKLVF

SEQ ID NO: 503650 - protein, 13 aa, Homo sapiens
  CDR3 for beta chain variable domain of TCR clone 251825 (TRBV7-8, TRBJ2-7)
RRVRLTEMGEQYF

SEQ ID NO: 503651 - protein, 14 aa, Homo sapiens
  CDR3 for alpha chain variable domain of TCR clone 251826 (TRAV13-1, TRAJ44)
CAAKATGPASKLTF

SEQ ID NO: 503652 - protein, 17 aa, Homo sapiens
  CDR3 for beta chain variable domain of TCR clone 251826 (TRBV7-3, TRBJ2-3)
CASSVMKRMRGADTQYF

SEQ ID NO: 503653 - protein, 14 aa, Homo sapiens
  CDR3 for alpha chain variable domain of TCR clone 251827 (TRAV3, TRAJ26)
CAVRDYNYGQNFVF

SEQ ID NO: 503654 - protein, 15 aa, Homo sapiens
  CDR3 for beta chain variable domain of TCR clone 251827 (TRBV20-1, TRBJ2-5)
CSANTPGRGGGTQYF

SEQ ID NO: 503655 - protein, 14 aa, Homo sapiens
  CDR3 for alpha chain variable domain of TCR clone 251828 (TRAV12-1, TRAJ23)
CVVMIYNQGVKLIF

SEQ ID NO: 503656 - protein, 23 aa, Homo sapiens
  CDR3 for beta chain variable domain of TCR clone 251828 (TRBV7-3, TRBJ1-6)
CASSLTSRDEASDPSSYNSPLHF

SEQ ID NO: 503657 - protein, 12 aa, Homo sapiens
  CDR3 for alpha chain variable domain of TCR clone 251829 (TRAV21, TRAJ37)
CAVRGNTGKLIF

SEQ ID NO: 503658 - protein, 17 aa, Homo sapiens
  CDR3 for beta chain variable domain of TCR clone 251829 (TRBV13, TRBJ2-3)
CASSLSRVAGGRNTQYF

SEQ ID NO: 503659 - protein, 15 aa, Homo sapiens
  CDR3 for alpha chain variable domain of TCR clone 251830 (TRAV26-1, TRAJ39)
CIVRDGSNAGNMLPF

SEQ ID NO: 503660 - protein, 14 aa, Homo sapiens
  CDR3 for beta chain variable domain of TCR clone 251830 (TRBV10-3, TRBJ1-2)
CAIRAGTGDYGYTF

SEQ ID NO: 503661 - protein, 15 aa, Homo sapiens
  CDR3 for alpha chain variable domain of TCR clone 251831 (TRAV20, TRAJ53)
CAVQASGGSNYKLTF

SEQ ID NO: 503662 - protein, 15 aa, Homo sapiens
  CDR3 for beta chain variable domain of TCR clone 251831 (TRBV7-6, TRBJ2-2)
CASGPLDTFPGELFF

SEQ ID NO: 503663 - protein, 20 aa, Homo sapiens
  CDR3 for alpha chain variable domain of TCR clone 251832 (TRAV25, TRAJ21)
TATQTTDVGTYPLSFNKFYF

SEQ ID NO: 503664 - protein, 14 aa, Homo sapiens
  CDR3 for beta chain variable domain of TCR clone 251832 (TRBV11-2, TRBJ2-7)
CASSSTGEGYEQYF

SEQ ID NO: 503665 - protein, 17 aa, Homo sapiens
  CDR3 for alpha chain variable domain of TCR clone 251833 (TRAV17, TRAJ52)
CATERPSGGTSYVKLTF

SEQ ID NO: 503666 - protein, 15 aa, Homo sapiens
  CDR3 for beta chain variable domain of TCR clone 251833 (TRBV5-1, TRBJ2-1)
CASSLVANSYNEQFF

SEQ ID NO: 503667 - protein, 17 aa, Homo sapiens
  CDR3 for alpha chain variable domain of TCR clone 251834 (TRAV38-1, TRAJ45)
CAFMKHYMGGGADGRTF

SEQ ID NO: 503668 - protein, 19 aa, Homo sapiens
  CDR3 for beta chain variable domain of TCR clone 251834 (TRBV6-1, TRBJ2-5)
CASSEQGLAGGLYQETQYF

SEQ ID NO: 503669 - protein, 17 aa, Homo sapiens
  CDR3 for alpha chain variable domain of TCR clone 251835 (TRAV3, TRAJ42)
CAVRDRDYGGSQGNLIF

SEQ ID NO: 503670 - protein, 14 aa, Homo sapiens
  CDR3 for beta chain variable domain of TCR clone 251835 (TRBV7-9, TRBJ1-1)
CASAPLQSYTEAFF

SEQ ID NO: 503671 - protein, 15 aa, Homo sapiens
  CDR3 for alpha chain variable domain of TCR clone 251836 (TRAV27, TRAJ38)
CAARRNAGNNRKLIW

SEQ ID NO: 503672 - protein, 14 aa, Homo sapiens
  CDR3 for beta chain variable domain of TCR clone 251836 (TRBV2, TRBJ2-3)
CASSEGQNTDTQYF

SEQ ID NO: 503673 - protein, 12 aa, Homo sapiens
  CDR3 for alpha chain variable domain of TCR clone 251837 (TRAV16, TRAJ9)
CALSSGGFKTIF

SEQ ID NO: 503674 - protein, 13 aa, Homo sapiens
  CDR3 for beta chain variable domain of TCR clone 251837 (TRBV7-9, TRBJ2-1)
CQSLAGPYNEQFF

SEQ ID NO: 503675 - protein, 14 aa, Homo sapiens
  CDR3 for alpha chain variable domain of TCR clone 251838 (TRAV34, TRAJ22)
CGADTSGSARQRTF

SEQ ID NO: 503676 - protein, 14 aa, Homo sapiens
  CDR3 for beta chain variable domain of TCR clone 251838 (TRBV6-1, TRBJ1-2)
CASSDTGASYGYTF

SEQ ID NO: 503677 - protein, 13 aa, Homo sapiens
  CDR3 for alpha chain variable domain of TCR clone 251839 (TRAV13-1, TRAJ9)
CAARGNGGFKTIF

SEQ ID NO: 503678 - protein, 12 aa, Homo sapiens
  CDR3 for beta chain variable domain of TCR clone 251839 (TRBV2, TRBJ2-1)
CAYGPPGNEQFF

SEQ ID NO: 503679 - protein, 18 aa, Homo sapiens
  CDR3 for alpha chain variable domain of TCR clone 251840 (TRAV21, TRAJ52)
CAVRPSPAGGTSYAKLTF

SEQ ID NO: 503680 - protein, 13 aa, Homo sapiens
  CDR3 for beta chain variable domain of TCR clone 251840 (TRBV20-1, TRBJ2-5)
CSAREAFQETQYF

SEQ ID NO: 503681 - protein, 12 aa, Homo sapiens
  CDR3 for alpha chain variable domain of TCR clone 251841 (TRAV12-3, TRAJ3)
CAIDSSASKIIF

SEQ ID NO: 503682 - protein, 17 aa, Homo sapiens
  CDR3 for beta chain variable domain of TCR clone 251841 (TRBV7-9, TRBJ2-3)
CASSLEEAGAYPYTQYI

SEQ ID NO: 503683 - protein, 14 aa, Homo sapiens
  CDR3 for alpha chain variable domain of TCR clone 251842 (TRAV27, TRAJ12)
CAGARMDSSYKLLF

SEQ ID NO: 503684 - protein, 18 aa, Homo sapiens
  CDR3 for beta chain variable domain of TCR clone 251842 (TRBV10-3, TRBJ2-7)
CAISESGRPSGGRVEQYF

SEQ ID NO: 503685 - protein, 12 aa, Homo sapiens
  CDR3 for alpha chain variable domain of TCR clone 251843 (TRAV2, TRAJ33)
CAVPDSNYQLIW

SEQ ID NO: 503686 - protein, 15 aa, Homo sapiens
  CDR3 for beta chain variable domain of TCR clone 251843 (TRBV15, TRBJ1-5)
CATSRDPVSNQPQHF

SEQ ID NO: 503687 - protein, 13 aa, Homo sapiens
  CDR3 for alpha chain variable domain of TCR clone 251844 (TRAV1-1, TRAJ31)
CASYLNNNARLMF

SEQ ID NO: 503688 - protein, 15 aa, Homo sapiens
  CDR3 for beta chain variable domain of TCR clone 251844 (TRBV4-2, TRBJ1-1)
CASSQEDLPRTEAFF

SEQ ID NO: 503689 - protein, 15 aa, Homo sapiens
  CDR3 for alpha chain variable domain of TCR clone 251845 (TRAV8-4, TRAJ36)
CAVRKSWTGANNRFF

SEQ ID NO: 503690 - protein, 17 aa, Homo sapiens
  CDR3 for beta chain variable domain of TCR clone 251845 (TRBV3-1, TRBJ2-2)
CASSQDSQGPNTGGLFF

SEQ ID NO: 503691 - protein, 13 aa, Homo sapiens
  CDR3 for alpha chain variable domain of TCR clone 251846 (TRAV17, TRAJ30)
CATDADRDDKIIF

SEQ ID NO: 503692 - protein, 19 aa, Homo sapiens
  CDR3 for beta chain variable domain of TCR clone 251846 (TRBV25-1, TRBJ2-2)
CAILVYRVDRGRKTGELFF

SEQ ID NO: 503693 - protein, 19 aa, Homo sapiens
  CDR3 for alpha chain variable domain of TCR clone 251847 (TRAV26-1, TRAJ52)
CIVSAHRNAGGTSYGKLTC

SEQ ID NO: 503694 - protein, 15 aa, Homo sapiens
  CDR3 for beta chain variable domain of TCR clone 251847 (TRBV29-1, TRBJ2-1)
CSGRDRKSSYNEQFF

SEQ ID NO: 503695 - protein, 11 aa, Homo sapiens
  CDR3 for alpha chain variable domain of TCR clone 251848 (TRAV2, TRAJ33)
CAVDSNYQIIW

SEQ ID NO: 503696 - protein, 15 aa, Homo sapiens
  CDR3 for beta chain variable domain of TCR clone 251848 (TRBV19, TRBJ1-2)
CASSVGQVLNYGYTF

SEQ ID NO: 503697 - protein, 13 aa, Homo sapiens
  CDR3 for alpha chain variable domain of TCR clone 251849 (TRAV30, TRAJ24)
CGTVTDSWGQWQF

SEQ ID NO: 503698 - protein, 15 aa, Homo sapiens
  CDR3 for beta chain variable domain of TCR clone 251849 (TRBV25-1, TRBJ1-4)
CASSPGDSTNEKLFF

SEQ ID NO: 503699 - protein, 15 aa, Homo sapiens
  CDR3 for alpha chain variable domain of TCR clone 251850 (TRAV12-1, TRAJ44)
CVVDEYTGTASKLTF

SEQ ID NO: 503700 - protein, 11 aa, Homo sapiens
  CDR3 for beta chain variable domain of TCR clone 251850 (TRBV12-4, TRBJ2-3)
CASTATDTQYF

SEQ ID NO: 503701 - protein, 13 aa, Homo sapiens
  CDR3 for alpha chain variable domain of TCR clone 251851 (TRAV21, TRAJ26)
CAVLDNNGQNFVF

SEQ ID NO: 503702 - protein, 16 aa, Homo sapiens
  CDR3 for beta chain variable domain of TCR clone 251851 (TRBV29-1, TRBJ2-2)
CSVETRASGNTGELFF

SEQ ID NO: 503703 - protein, 15 aa, Homo sapiens
  CDR3 for alpha chain variable domain of TCR clone 251852 (TRAV21, TRAJ53)
CATLNSGGSNYKLTF

SEQ ID NO: 503704 - protein, 15 aa, Homo sapiens
  CDR3 for beta chain variable domain of TCR clone 251852 (TRBV5-4, TRBJ2-3)
CASSLDQRATDTQYF

SEQ ID NO: 503705 - protein, 17 aa, Homo sapiens
  CDR3 for alpha chain variable domain of TCR clone 251853 (TRAV26-1, TRAJ10)
CIVSFRGLTGGGNKLTF

SEQ ID NO: 503706 - protein, 13 aa, Homo sapiens
  CDR3 for beta chain variable domain of TCR clone 251853 (TRBV20-1, TRBJ2-3)
SAVSRQAADTQYF

SEQ ID NO: 503707 - protein, 15 aa, Homo sapiens
  CDR3 for alpha chain variable domain of TCR clone 251854 (TRAV8-3, TRAJ45)
CASSYSGGGADGLAF

SEQ ID NO: 503708 - protein, 14 aa, Homo sapiens
  CDR3 for beta chain variable domain of TCR clone 251854 (TRBV18, TRBJ2-5)
CASSPGVSQETQYF

SEQ ID NO: 503709 - protein, 14 aa, Homo sapiens
  CDR3 for alpha chain variable domain of TCR clone 251855 (TRAV1-2, TRAJ16)
CAVNRFSDGQQLLF

SEQ ID NO: 503710 - protein, 13 aa, Homo sapiens
  CDR3 for beta chain variable domain of TCR clone 251855 (TRBV15, TRBJ1-6)
CATSGGLNSPLHF

SEQ ID NO: 503711 - protein, 14 aa, Homo sapiens
  CDR3 for alpha chain variable domain of TCR clone 251856 (TRAV35, TRAJ22)
CAGLRPGSARQLTF

SEQ ID NO: 503712 - protein, 17 aa, Homo sapiens
  CDR3 for beta chain variable domain of TCR clone 251856 (TRBV15, TRBJ1-5)
CATSRAPPGTRNQPQHF

SEQ ID NO: 503713 - protein, 16 aa, Homo sapiens
  CDR3 for alpha chain variable domain of TCR clone 251857 (TRAV30, TRAJ24)
CGTELVDADSWGQFQF

SEQ ID NO: 503714 - protein, 16 aa, Homo sapiens
  CDR3 for beta chain variable domain of TCR clone 251857 (TRBV12-5, TRBJ2-5)
CASGPRTSGNQETQYF

SEQ ID NO: 503715 - protein, 14 aa, Homo sapiens
  CDR3 for alpha chain variable domain of TCR clone 251858 (TRAV12-1, TRAJ12)
CVVTRMDRSSKLIF

SEQ ID NO: 503716 - protein, 13 aa, Homo sapiens
  CDR3 for beta chain variable domain of TCR clone 251858 (TRBV20-1, TRBJ1-1)
CSARGGGNTEAFF

SEQ ID NO: 503717 - protein, 14 aa, Homo sapiens
  CDR3 for alpha chain variable domain of TCR clone 251859 (TRAV1-2, TRAJ16)
CAVNRFSDGQKLLF

SEQ ID NO: 503718 - protein, 12 aa, Homo sapiens
  CDR3 for beta chain variable domain of TCR clone 251859 (TRBV11-2, TRBJ2-2)
CASSLVGGELFF

SEQ ID NO: 503719 - protein, 15 aa, Homo sapiens
  CDR3 for alpha chain variable domain of TCR clone 251860 (TRAV8-3, TRAJ21)
CAVGALPPRGYKFYF

SEQ ID NO: 503720 - protein, 14 aa, Homo sapiens
  CDR3 for beta chain variable domain of TCR clone 251860 (TRBV5-1, TRBJ2-7)
CASSLQGAVDEQYF

SEQ ID NO: 503721 - protein, 15 aa, Homo sapiens
  CDR3 for alpha chain variable domain of TCR clone 251861 (TRAV12-2, TRAJ53)
CAVNGGGGSNYKLTF

SEQ ID NO: 503722 - protein, 15 aa, Homo sapiens
  CDR3 for beta chain variable domain of TCR clone 251861 (TRBV28, TRBJ2-1)
CASSFQEGVYNEQFF

SEQ ID NO: 503723 - protein, 12 aa, Homo sapiens
  CDR3 for alpha chain variable domain of TCR clone 251862 (TRAV25, TRAJ53)
CQRGGSNYKLTF

SEQ ID NO: 503724 - protein, 15 aa, Homo sapiens
  CDR3 for beta chain variable domain of TCR clone 251862 (TRBV5-1, TRBJ2-2)
CASSWTRPNTGELFF

SEQ ID NO: 503725 - protein, 13 aa, Homo sapiens
  CDR3 for alpha chain variable domain of TCR clone 251863 (TRAV25, TRAJ30)
CEGRVDRDDKIIF

SEQ ID NO: 503726 - protein, 17 aa, Homo sapiens
  CDR3 for beta chain variable domain of TCR clone 251863 (TRBV7-9, TRBJ2-6)
CASSFGAGYSGANVLTF

SEQ ID NO: 503727 - protein, 13 aa, Homo sapiens
  CDR3 for alpha chain variable domain of TCR clone 251864 (TRAV17, TRAJ9)
CATDGTGGFKTIF

SEQ ID NO: 503728 - protein, 17 aa, Homo sapiens
  CDR3 for beta chain variable domain of TCR clone 251864 (TRBV7-8, TRBJ2-6)
CASSAGTGGAGANVLTF

SEQ ID NO: 503729 - protein, 15 aa, Homo sapiens
  CDR3 for alpha chain variable domain of TCR clone 251865 (TRAV8-4, TRAJ9)
CAVSDLEGGGFKTIF

SEQ ID NO: 503730 - protein, 14 aa, Homo sapiens
  CDR3 for beta chain variable domain of TCR clone 251865 (TRBV19, TRBJ2-3)
CASSIDLGGDTQYF

SEQ ID NO: 503731 - protein, 14 aa, Homo sapiens
  CDR3 for alpha chain variable domain of TCR clone 251866 (TRAV12-2, TRAJ40)
CAVKIPSGTYKYIF

SEQ ID NO: 503732 - protein, 15 aa, Homo sapiens
  CDR3 for beta chain variable domain of TCR clone 251866 (TRBV5-1, TRBJ2-5)
RASSFGGPPQETQYF

SEQ ID NO: 503733 - protein, 18 aa, Homo sapiens
  CDR3 for alpha chain variable domain of TCR clone 251867 (TRAV21, TRAJ52)
CAVRPSPAGGASYGKLTF

SEQ ID NO: 503734 - protein, 17 aa, Homo sapiens
  CDR3 for beta chain variable domain of TCR clone 251867 (TRBV13, TRBJ2-3)
CASSLSRGAGGRNTQYF

SEQ ID NO: 503735 - protein, 15 aa, Homo sapiens
  CDR3 for alpha chain variable domain of TCR clone 251868 (TRAV12-2, TRAJ53)
CAVNGGGGSNYKLPF

SEQ ID NO: 503736 - protein, 15 aa, Homo sapiens
  CDR3 for beta chain variable domain of TCR clone 251868 (TRBV12-4, TRBJ2-5)
CASSPPTGLQETQYF

SEQ ID NO: 503737 - protein, 15 aa, Homo sapiens
  CDR3 for alpha chain variable domain of TCR clone 251869 (TRAV3, TRAJ12)
CTSVPWMDSSYKLIF

SEQ ID NO: 503738 - protein, 16 aa, Homo sapiens
  CDR3 for beta chain variable domain of TCR clone 251869 (TRBV27, TRBJ2-2)
CASSFRGLVRTGELFF

SEQ ID NO: 503739 - protein, 18 aa, Homo sapiens
  CDR3 for alpha chain variable domain of TCR clone 251870 (TRAV1-2, TRAJ18)
CAVRDMGDRGSALGRLYF

SEQ ID NO: 503740 - protein, 16 aa, Homo sapiens
  CDR3 for beta chain variable domain of TCR clone 251870 (TRBV29-1, TRBJ1-2)
CSVEANRDIANYGYTF

SEQ ID NO: 503741 - protein, 11 aa, Homo sapiens
  CDR3 for alpha chain variable domain of TCR clone 251871 (TRAV17, TRAJ43)
CATDVTGDMRF

SEQ ID NO: 503742 - protein, 14 aa, Homo sapiens
  CDR3 for beta chain variable domain of TCR clone 251871 (TRBV7-3, TRBJ2-1)
CASSLAGGTNEQFF

SEQ ID NO: 503743 - protein, 12 aa, Homo sapiens
  CDR3 for alpha chain variable domain of TCR clone 251872 (TRAV20, TRAJ23)
CAVHNQGGKLIF

SEQ ID NO: 503744 - protein, 20 aa, Homo sapiens
  CDR3 for beta chain variable domain of TCR clone 251872 (TRBV19, TRBJ2-1)
CASSISRTVTSTRLNNEQFF

SEQ ID NO: 503745 - protein, 14 aa, Homo sapiens
  CDR3 for alpha chain variable domain of TCR clone 251873 (TRAV17, TRAJ37)
CATDGSSNTGKLIF

SEQ ID NO: 503746 - protein, 15 aa, Homo sapiens
  CDR3 for beta chain variable domain of TCR clone 251873 (TRBV19, TRBJ1-2)
CASSVGQVLNYGYTF

SEQ ID NO: 503747 - protein, 15 aa, Homo sapiens
  CDR3 for alpha chain variable domain of TCR clone 251874 (TRAV13-1, TRAJ36)
CAASIRQTGANNFFF

SEQ ID NO: 503748 - protein, 17 aa, Homo sapiens
  CDR3 for beta chain variable domain of TCR clone 251874 (TRBV20-1, TRBJ2-2)
CSARDRTSGRHTGELFF

SEQ ID NO: 503749 - protein, 11 aa, Homo sapiens
  CDR3 for alpha chain variable domain of TCR clone 251875 (TRAV35, TRAJ30)
CAGPGDDKIIF

SEQ ID NO: 503750 - protein, 14 aa, Homo sapiens
  CDR3 for beta chain variable domain of TCR clone 251875 (TRBV7-6, TRBJ1-6)
CASSQAGGCSPLHF

SEQ ID NO: 503751 - protein, 13 aa, Homo sapiens
  CDR3 for alpha chain variable domain of TCR clone 251876 (TRAV13-1, TRAJ41)
CADAPNSGYALNF

SEQ ID NO: 503752 - protein, 13 aa, Homo sapiens
  CDR3 for beta chain variable domain of TCR clone 251876 (TRBV19, TRBJ2-7)
CASEGTTTYEQYV

SEQ ID NO: 503753 - protein, 14 aa, Homo sapiens
  CDR3 for alpha chain variable domain of TCR clone 251877 (TRAV12-2, TRAJ44)
CAVNPAGTASELTF

SEQ ID NO: 503754 - protein, 16 aa, Homo sapiens
  CDR3 for beta chain variable domain of TCR clone 251877 (TRBV2, TRBJ2-6)
CASSEVGGAGANVLTF

SEQ ID NO: 503755 - protein, 12 aa, Homo sapiens
  CDR3 for alpha chain variable domain of TCR clone 251878 (TRAV3, TRAJ20)
CAVRDGDYKLSF

SEQ ID NO: 503756 - protein, 15 aa, Homo sapiens
  CDR3 for beta chain variable domain of TCR clone 251878 (TRBV6-5, TRBJ2-1)
CASSYDAGAGNEQFF

SEQ ID NO: 503757 - protein, 14 aa, Homo sapiens
  CDR3 for alpha chain variable domain of TCR clone 251879 (TRAV17, TRAJ56)
CATVPAGANSKLTF

SEQ ID NO: 503758 - protein, 14 aa, Homo sapiens
  CDR3 for beta chain variable domain of TCR clone 251879 (TRBV4-1, TRBJ2-2)
CASSQAVNTGELFF

SEQ ID NO: 503759 - protein, 22 aa, Homo sapiens
  CDR3 for alpha chain variable domain of TCR clone 251880 (TRAV1-1, TRAJ30)
CAVRDQTEMTRSSLEKGHDFIF

SEQ ID NO: 503760 - protein, 15 aa, Homo sapiens
  CDR3 for beta chain variable domain of TCR clone 251880 (TRBV5-1, TRBJ2-3)
CASSVTSGSTDTQYF

SEQ ID NO: 503761 - protein, 14 aa, Homo sapiens
  CDR3 for alpha chain variable domain of TCR clone 251881 (TRAV12-3, TRAJ33)
CAMSVPGSNYQLIW

SEQ ID NO: 503762 - protein, 14 aa, Homo sapiens
  CDR3 for beta chain variable domain of TCR clone 251881 (TRBV6-5, TRBJ2-7)
CASSTTGGPYEQYF

SEQ ID NO: 503763 - protein, 15 aa, Homo sapiens
  CDR3 for alpha chain variable domain of TCR clone 251882 (TRAV26-1, TRAJ42)
CIVRVKVGSQGNLIF

SEQ ID NO: 503764 - protein, 14 aa, Homo sapiens
  CDR3 for beta chain variable domain of TCR clone 251882 (TRBV19, TRBJ2-2)
CATTGHANTGELFF

SEQ ID NO: 503765 - protein, 14 aa, Homo sapiens
  CDR3 for alpha chain variable domain of TCR clone 251883 (TRAV12-2, TRAJ17)
CAVLFKAAGNKLTF

SEQ ID NO: 503766 - protein, 13 aa, Homo sapiens
  CDR3 for beta chain variable domain of TCR clone 251883 (TRBV2, TRBJ2-7)
CASSVGGSGEQYF

SEQ ID NO: 503767 - protein, 12 aa, Homo sapiens
  CDR3 for alpha chain variable domain of TCR clone 251884 (TRAV12-2, TRAJ40)
CAVNPGSYKYIF

SEQ ID NO: 503768 - protein, 15 aa, Homo sapiens
  CDR3 for beta chain variable domain of TCR clone 251884 (TRBV2, TRBJ1-4)
CASSEWTGINEKLFF

SEQ ID NO: 503769 - protein, 16 aa, Homo sapiens
  CDR3 for alpha chain variable domain of TCR clone 251885 (TRAV23/DV6, TRAJ9)
CAASIGGNTGGFKTIV

SEQ ID NO: 503770 - protein, 14 aa, Homo sapiens
  CDR3 for beta chain variable domain of TCR clone 251885 (TRBV9, TRBJ2-7)
CASSVGVGSYEQYF

SEQ ID NO: 503771 - protein, 11 aa, Homo sapiens
  CDR3 for alpha chain variable domain of TCR clone 251886 (TRAV21, TRAJ34)
CAVTNTDELIF

SEQ ID NO: 503772 - protein, 16 aa, Homo sapiens
  CDR3 for beta chain variable domain of TCR clone 251886 (TRBV18, TRBJ1-1)
CASSPGVGGRGGEASF

SEQ ID NO: 503773 - protein, 15 aa, Homo sapiens
  CDR3 for alpha chain variable domain of TCR clone 251887 (TRAV34, TRAJ38)
CGADFTPGNNRQLIW

SEQ ID NO: 503774 - protein, 16 aa, Homo sapiens
  CDR3 for beta chain variable domain of TCR clone 251887 (TRBV6-1, TRBJ2-3)
CASSEVIGQGTDTQYF

SEQ ID NO: 503775 - protein, 14 aa, Homo sapiens
  CDR3 for alpha chain variable domain of TCR clone 251888 (TRAV2, TRAJ20)
CAVEDGTNDYKLSF

SEQ ID NO: 503776 - protein, 11 aa, Homo sapiens
  CDR3 for beta chain variable domain of TCR clone 251888 (TRBV29-1, TRBJ2-5)
CSEDRTGTQYF

SEQ ID NO: 503777 - protein, 19 aa, Homo sapiens
  CDR3 for alpha chain variable domain of TCR clone 251889 (TRAV2, TRAJ20)
ILQVREADAAVYRDCKLSF

SEQ ID NO: 503778 - protein, 14 aa, Homo sapiens
  CDR3 for beta chain variable domain of TCR clone 251889 (TRBV18, TRBJ2-5)
CASSPGVSQETQYF

SEQ ID NO: 503779 - protein, 13 aa, Homo sapiens
  CDR3 for alpha chain variable domain of TCR clone 251890 (TRAV12-3, TRAJ41)
CAIAPNSGYALNF

SEQ ID NO: 503780 - protein, 14 aa, Homo sapiens
  CDR3 for beta chain variable domain of TCR clone 251890 (TRBV7-2, TRBJ1-3)
CASSLGTAGNTIYF

SEQ ID NO: 503781 - protein, 12 aa, Homo sapiens
  CDR3 for alpha chain variable domain of TCR clone 251891 (TRAV12-3, TRAJ17)
CAMTLTGNKLTF

SEQ ID NO: 503782 - protein, 15 aa, Homo sapiens
  CDR3 for beta chain variable domain of TCR clone 251891 (TRBV20-1, TRBJ2-7)
RSARDRVSGMDEHYF

SEQ ID NO: 503783 - protein, 15 aa, Homo sapiens
  CDR3 for alpha chain variable domain of TCR clone 251892 (TRAV27, TRAJ38)
CAARRNAGNNRKLSW

SEQ ID NO: 503784 - protein, 13 aa, Homo sapiens
  CDR3 for beta chain variable domain of TCR clone 251892 (TRBV20-1, TRBJ1-1)
CSARAGGNTEAFF

SEQ ID NO: 503785 - protein, 15 aa, Homo sapiens
  CDR3 for alpha chain variable domain of TCR clone 251893 (TRAV17, TRAJ13)
CATDAGSGGYQKVTF

SEQ ID NO: 503786 - protein, 17 aa, Homo sapiens
  CDR3 for beta chain variable domain of TCR clone 251893 (TRBV11-2, TRBJ2-1)
CASSLYPPGVEYNEQFS

SEQ ID NO: 503787 - protein, 11 aa, Homo sapiens
  CDR3 for alpha chain variable domain of TCR clone 251894 (TRAV21, TRAJ23)
CAPQRRGKLIF

SEQ ID NO: 503788 - protein, 13 aa, Homo sapiens
  CDR3 for beta chain variable domain of TCR clone 251894 (TRBV20-1, TRBJ1-1)
CSAPLGGGTEAVF

SEQ ID NO: 503789 - protein, 15 aa, Homo sapiens
  CDR3 for alpha chain variable domain of TCR clone 251895 (TRAV36/DV7, TRAJ54)
CAVEKPVQGAQKLVF

SEQ ID NO: 503790 - protein, 14 aa, Homo sapiens
  CDR3 for beta chain variable domain of TCR clone 251895 (TRBV4-3, TRBJ2-2)
CASSRGHVTGELFF

SEQ ID NO: 503791 - protein, 15 aa, Homo sapiens
  CDR3 for alpha chain variable domain of TCR clone 251896 (TRAV26-2, TRAJ13)
CIMRDLSGGYQKVTF

SEQ ID NO: 503792 - protein, 11 aa, Homo sapiens
  CDR3 for beta chain variable domain of TCR clone 251896 (TRBV7-9, TRBJ2-5)
CASSLSATQYF

SEQ ID NO: 503793 - protein, 15 aa, Homo sapiens
  CDR3 for alpha chain variable domain of TCR clone 251897 (TRAV8-2, TRAJ44)
CVVSPNTGTASKLTF

SEQ ID NO: 503794 - protein, 11 aa, Homo sapiens
  CDR3 for beta chain variable domain of TCR clone 251897 (TRBV11-2, TRBJ2-2)
CSSKKHRGAVF

SEQ ID NO: 503795 - protein, 14 aa, Homo sapiens
  CDR3 for alpha chain variable domain of TCR clone 251898 (TRAV13-1, TRAJ6)
CAASITGGSYIPTF

SEQ ID NO: 503796 - protein, 14 aa, Homo sapiens
  CDR3 for beta chain variable domain of TCR clone 251898 (TRBV6-3, TRBJ2-1)
CASLHSADYNEQFF

SEQ ID NO: 503797 - protein, 13 aa, Homo sapiens
  CDR3 for alpha chain variable domain of TCR clone 251899 (TRAV8-6, TRAJ49)
CAVITNTGNQVYF

SEQ ID NO: 503798 - protein, 12 aa, Homo sapiens
  CDR3 for beta chain variable domain of TCR clone 251899 (TRBV12-4, TRBJ2-7)
CASSLGGYEQYF

SEQ ID NO: 503799 - protein, 23 aa, Homo sapiens
  CDR3 for alpha chain variable domain of TCR clone 251900 (TRAV8-4, TRAJ38)
CARPNAGNNHIQNPDPALYQLRD

SEQ ID NO: 503800 - protein, 12 aa, Homo sapiens
  CDR3 for beta chain variable domain of TCR clone 251900 (TRBV6-1, TRBJ2-7)
CASSEPLYEQYF

SEQ ID NO: 503801 - protein, 15 aa, Homo sapiens
  CDR3 for alpha chain variable domain of TCR clone 251901 (TRAV3, TRAJ4)
CAVRDGPGGYTKLIF

SEQ ID NO: 503802 - protein, 16 aa, Homo sapiens
  CDR3 for beta chain variable domain of TCR clone 251901 (TRBV27, TRBJ2-2)
CASSSSGVSNTGELFF

SEQ ID NO: 503803 - protein, 12 aa, Homo sapiens
  CDR3 for alpha chain variable domain of TCR clone 251902 (TRAV27, TRAJ9)
CAGESGGFKTIF

SEQ ID NO: 503804 - protein, 14 aa, Homo sapiens
  CDR3 for beta chain variable domain of TCR clone 251902 (TRBV28, TRBJ1-2)
CASRIQGANYGYTF

SEQ ID NO: 503805 - protein, 11 aa, Homo sapiens
  CDR3 for alpha chain variable domain of TCR clone 251903 (TRAV21, TRAJ34)
CAVTNTDKLIF

SEQ ID NO: 503806 - protein, 16 aa, Homo sapiens
  CDR3 for beta chain variable domain of TCR clone 251903 (TRBV7-7, TRBJ2-1)
CASSLASGTSYNEQFF

SEQ ID NO: 503807 - protein, 15 aa, Homo sapiens
  CDR3 for alpha chain variable domain of TCR clone 251904 (TRAV26-1, TRAJ29)
CIFRVEGSGNTPLVF

SEQ ID NO: 503808 - protein, 16 aa, Homo sapiens
  CDR3 for beta chain variable domain of TCR clone 251904 (TRBV12-5, TRBJ2-5)
CASGPRTSGNQETQYF

SEQ ID NO: 503809 - protein, 15 aa, Homo sapiens
  CDR3 for alpha chain variable domain of TCR clone 251905 (TRAV12-2, TRAJ53)
CAVNGGGGSNYKLTL

SEQ ID NO: 503810 - protein, 14 aa, Homo sapiens
  CDR3 for beta chain variable domain of TCR clone 251905 (TRBV4-1, TRBJ2-2)
CASSQAVNTGELFF

SEQ ID NO: 503811 - protein, 14 aa, Homo sapiens
  CDR3 for alpha chain variable domain of TCR clone 251906 (TRAV21, TRAJ21)
CAVGVEDNFNKFYF

SEQ ID NO: 503812 - protein, 15 aa, Homo sapiens
  CDR3 for beta chain variable domain of TCR clone 251906 (TRBV7-2, TRBJ2-1)
CASTSASGDYNEQFF

SEQ ID NO: 503813 - protein, 10 aa, Homo sapiens
  CDR3 for alpha chain variable domain of TCR clone 251907 (TRAV26-1, TRAJ40)
CIAGTYKYIF

SEQ ID NO: 503814 - protein, 11 aa, Homo sapiens
  CDR3 for beta chain variable domain of TCR clone 251907 (TRBV29-1, TRBJ2-5)
CSEDRTGTQYF

SEQ ID NO: 503815 - protein, 14 aa, Homo sapiens
  CDR3 for alpha chain variable domain of TCR clone 251908 (TRAV1-1, TRAJ35)
CAVRSIGFGNVLHC

SEQ ID NO: 503816 - protein, 15 aa, Homo sapiens
  CDR3 for beta chain variable domain of TCR clone 251908 (TRBV29-1, TRBJ2-1)
CSVPTGLALYNEQFF

SEQ ID NO: 503817 - protein, 15 aa, Homo sapiens
  CDR3 for alpha chain variable domain of TCR clone 251909 (TRAV38-1, TRAJ37)
CAFIHGSGNTGKIIF

SEQ ID NO: 503818 - protein, 20 aa, Homo sapiens
  CDR3 for beta chain variable domain of TCR clone 251909 (TRBV7-8, TRBJ2-2)
CASSHLFPGPTIHITGELFF

SEQ ID NO: 503819 - protein, 13 aa, Homo sapiens
  CDR3 for alpha chain variable domain of TCR clone 251910 (TRAV2, TRAJ12)
CAVGADSSYKLIF

SEQ ID NO: 503820 - protein, 13 aa, Homo sapiens
  CDR3 for beta chain variable domain of TCR clone 251910 (TRBV20-1, TRBJ2-1)
FSARSSPRDEQFF

SEQ ID NO: 503821 - protein, 13 aa, Homo sapiens
  CDR3 for alpha chain variable domain of TCR clone 251911 (TRAV12-2, TRAJ42)
CAVKRGSQGNLIF

SEQ ID NO: 503822 - protein, 13 aa, Homo sapiens
  CDR3 for beta chain variable domain of TCR clone 251911 (TRBV7-9, TRBJ2-3)
CASSPGSTDTQCF

SEQ ID NO: 503823 - protein, 18 aa, Homo sapiens
  CDR3 for alpha chain variable domain of TCR clone 251912 (TRAV12-3, TRAJ52)
CAMSVGGAGGTSCGKLTF

SEQ ID NO: 503824 - protein, 14 aa, Homo sapiens
  CDR3 for beta chain variable domain of TCR clone 251912 (TRBV7-2, TRBJ2-7)
CASRSQGAAYEQYF

SEQ ID NO: 503825 - protein, 12 aa, Homo sapiens
  CDR3 for alpha chain variable domain of TCR clone 251913 (TRAV1-1, TRAJ8)
CAGGTGFQKLVF

SEQ ID NO: 503826 - protein, 16 aa, Homo sapiens
  CDR3 for beta chain variable domain of TCR clone 251913 (TRBV4-2, TRBJ1-1)
CASRPLDGGGDTEAFF

SEQ ID NO: 503827 - protein, 17 aa, Homo sapiens
  CDR3 for alpha chain variable domain of TCR clone 251914 (TRAV13-2, TRAJ42)
CAEKGKNYGGSQGNLIF

SEQ ID NO: 503828 - protein, 13 aa, Homo sapiens
  CDR3 for beta chain variable domain of TCR clone 251914 (TRBV7-9, TRBJ1-1)
CASSQAGNTEAFF

SEQ ID NO: 503829 - protein, 13 aa, Homo sapiens
  CDR3 for alpha chain variable domain of TCR clone 251915 (TRAV12-2, TRAJ20)
CAVYPSKDYKLSF

SEQ ID NO: 503830 - protein, 15 aa, Homo sapiens
  CDR3 for beta chain variable domain of TCR clone 251915 (TRBV27, TRBJ2-5)
CASSLYPRGGETQYF

SEQ ID NO: 503831 - protein, 14 aa, Homo sapiens
  CDR3 for alpha chain variable domain of TCR clone 251916 (TRAV35, TRAJ40)
CAGSTTAGTYKYIF

SEQ ID NO: 503832 - protein, 13 aa, Homo sapiens
  CDR3 for beta chain variable domain of TCR clone 251916 (TRBV20-1, TRBJ1-6)
CSAPLGVGSPLHF

SEQ ID NO: 503833 - protein, 11 aa, Homo sapiens
  CDR3 for alpha chain variable domain of TCR clone 251917 (TRAV12-3, TRAJ17)
CAMTLRQQANF

SEQ ID NO: 503834 - protein, 18 aa, Homo sapiens
  CDR3 for beta chain variable domain of TCR clone 251917 (TRBV4-3, TRBJ1-6)
CASSQETPASSYNSPLHF

SEQ ID NO: 503835 - protein, 15 aa, Homo sapiens
  CDR3 for alpha chain variable domain of TCR clone 251918 (TRAV25, TRAJ52)
CAGRPGGTSNGKLTF

SEQ ID NO: 503836 - protein, 17 aa, Homo sapiens
  CDR3 for beta chain variable domain of TCR clone 251918 (TRBV7-8, TRBJ2-6)
CASSAGTGGAGANVLTF

SEQ ID NO: 503837 - protein, 14 aa, Homo sapiens
  CDR3 for alpha chain variable domain of TCR clone 251919 (TRAV14/DV4, TRAJ32)
SNVLPLAPTNKLIF

SEQ ID NO: 503838 - protein, 16 aa, Homo sapiens
  CDR3 for beta chain variable domain of TCR clone 251919 (TRBV20-1, TRBJ1-4)
CSAPGQGLLTNEKLFC

SEQ ID NO: 503839 - protein, 12 aa, Homo sapiens
  CDR3 for alpha chain variable domain of TCR clone 251920 (TRAV8-3, TRAJ20)
CAVGANYYELSF

SEQ ID NO: 503840 - protein, 16 aa, Homo sapiens
  CDR3 for beta chain variable domain of TCR clone 251920 (TRBV19, TRBJ2-2)
CASRSPGTGATGELFF

SEQ ID NO: 503841 - protein, 15 aa, Homo sapiens
  CDR3 for alpha chain variable domain of TCR clone 251921 (TRAV8-6, TRAJ42)
CAVMNYGGSQGNLIF

SEQ ID NO: 503842 - protein, 13 aa, Homo sapiens
  CDR3 for beta chain variable domain of TCR clone 251921 (TRBV19, TRBJ2-2)
CASKVSAAGELFF

SEQ ID NO: 503843 - protein, 15 aa, Homo sapiens
  CDR3 for alpha chain variable domain of TCR clone 251922 (TRAV26-1, TRAJ40)
CIVRVTTSGTYKYIF

SEQ ID NO: 503844 - protein, 15 aa, Homo sapiens
  CDR3 for beta chain variable domain of TCR clone 251922 (TRBV4-2, TRBJ1-2)
CASSQRTGGRDGYTF

SEQ ID NO: 503845 - protein, 13 aa, Homo sapiens
  CDR3 for alpha chain variable domain of TCR clone 251923 (TRAV26-2, TRAJ43)
CILRAVNNNDMRF

SEQ ID NO: 503846 - protein, 16 aa, Homo sapiens
  CDR3 for beta chain variable domain of TCR clone 251923 (TRBV12-5, TRBJ2-5)
CASGPRTSGNQETRYF

SEQ ID NO: 503847 - protein, 16 aa, Homo sapiens
  CDR3 for alpha chain variable domain of TCR clone 251924 (TRAV17, TRAJ53)
CATDALSGGSNYNLTF

SEQ ID NO: 503848 - protein, 12 aa, Homo sapiens
  CDR3 for beta chain variable domain of TCR clone 251924 (TRBV5-1, TRBJ2-7)
CASSCRGYEQYF

SEQ ID NO: 503849 - protein, 11 aa, Homo sapiens
  CDR3 for alpha chain variable domain of TCR clone 251925 (TRAV8-3, TRAJ20)
CCGCKRLQLSF

SEQ ID NO: 503850 - protein, 16 aa, Homo sapiens
  CDR3 for beta chain variable domain of TCR clone 251925 (TRBV19, TRBJ2-2)
CASRSPGTGATGELFF

SEQ ID NO: 503851 - protein, 15 aa, Homo sapiens
  CDR3 for alpha chain variable domain of TCR clone 251926 (TRAV21, TRAJ53)
CTTLNSGGSNYKLTF

SEQ ID NO: 503852 - protein, 14 aa, Homo sapiens
  CDR3 for beta chain variable domain of TCR clone 251926 (TRBV19, TRBJ2-1)
CASPTFVLSGEQFF

SEQ ID NO: 503853 - protein, 12 aa, Homo sapiens
  CDR3 for alpha chain variable domain of TCR clone 251927 (TRAV1-2, TRAJ4)
CAVRSPRGKLIF

SEQ ID NO: 503854 - protein, 14 aa, Homo sapiens
  CDR3 for beta chain variable domain of TCR clone 251927 (TRBV7-6, TRBJ2-3)
CASSLGTVTDTQYF

SEQ ID NO: 503855 - protein, 12 aa, Homo sapiens
  CDR3 for alpha chain variable domain of TCR clone 251928 (TRAV8-3, TRAJ6)
CAVAGGSYIPPF

SEQ ID NO: 503856 - protein, 14 aa, Homo sapiens
  CDR3 for beta chain variable domain of TCR clone 251928 (TRBV27, TRBJ2-7)
CASATGTERREQYF

SEQ ID NO: 503857 - protein, 10 aa, Homo sapiens
  CDR3 for alpha chain variable domain of TCR clone 251929 (TRAV1-2, TRAJ18)
CAVRGEAQPW

SEQ ID NO: 503858 - protein, 14 aa, Homo sapiens
  CDR3 for beta chain variable domain of TCR clone 251929 (TRBV4-1, TRBJ2-2)
CASSQAVNTGELFF

SEQ ID NO: 503859 - protein, 15 aa, Homo sapiens
  CDR3 for alpha chain variable domain of TCR clone 251930 (TRAV21, TRAJ53)
CATLNSGVSNYKLTF

SEQ ID NO: 503860 - protein, 14 aa, Homo sapiens
  CDR3 for beta chain variable domain of TCR clone 251930 (TRBV23-1, TRBJ2-5)
CASGFLRSQETQYF

SEQ ID NO: 503861 - protein, 13 aa, Homo sapiens
  CDR3 for alpha chain variable domain of TCR clone 251931 (TRAV21, TRAJ20)
CAVGLRVDYKLSF

SEQ ID NO: 503862 - protein, 12 aa, Homo sapiens
  CDR3 for beta chain variable domain of TCR clone 251931 (TRBV6-5, TRBJ2-7)
CASYIYGYEQYF

SEQ ID NO: 503863 - protein, 13 aa, Homo sapiens
  CDR3 for alpha chain variable domain of TCR clone 251932 (TRAV23/DV6, TRAJ47)
CSASMTRGNKLVF

SEQ ID NO: 503864 - protein, 12 aa, Homo sapiens
  CDR3 for beta chain variable domain of TCR clone 251932 (TRBV28, TRBJ2-7)
CASSFSSYEQYF

SEQ ID NO: 503865 - protein, 11 aa, Homo sapiens
  CDR3 for alpha chain variable domain of TCR clone 251933 (TRAV1-1, TRAJ23)
CAVRQGGKLIF

SEQ ID NO: 503866 - protein, 15 aa, Homo sapiens
  CDR3 for beta chain variable domain of TCR clone 251933 (TRBV13, TRBJ1-2)
CASSLGRQPGYGYTF

SEQ ID NO: 503867 - protein, 12 aa, Homo sapiens
  CDR3 for alpha chain variable domain of TCR clone 251934 (TRAV2, TRAJ31)
CAVEDNNARLMF

SEQ ID NO: 503868 - protein, 14 aa, Homo sapiens
  CDR3 for beta chain variable domain of TCR clone 251934 (TRBV7-2, TRBJ1-1)
CASSFLTGTTEAVF

SEQ ID NO: 503869 - protein, 14 aa, Homo sapiens
  CDR3 for alpha chain variable domain of TCR clone 251935 (TRAV14/DV4, TRAJ54)
CAMREAPGAQKLVF

SEQ ID NO: 503870 - protein, 14 aa, Homo sapiens
  CDR3 for beta chain variable domain of TCR clone 251935 (TRBV6-1, TRBJ1-3)
CASVQGGGGNTIYF

SEQ ID NO: 503871 - protein, 14 aa, Homo sapiens
  CDR3 for alpha chain variable domain of TCR clone 251936 (TRAV8-4, TRAJ9)
CAVWINTGGFKTIF

SEQ ID NO: 503872 - protein, 15 aa, Homo sapiens
  CDR3 for beta chain variable domain of TCR clone 251936 (TRBV6-5, TRBJ2-1)
CASSYDAGAGNEQFF

SEQ ID NO: 503873 - protein, 11 aa, Homo sapiens
  CDR3 for alpha chain variable domain of TCR clone 251937 (TRAV2, TRAJ33)
CAVDSNCQLIW

SEQ ID NO: 503874 - protein, 15 aa, Homo sapiens
  CDR3 for beta chain variable domain of TCR clone 251937 (TRBV19, TRBJ1-2)
CASSVGQVLNYGYTF

SEQ ID NO: 503875 - protein, 12 aa, Homo sapiens
  CDR3 for alpha chain variable domain of TCR clone 251938 (TRAV1-1, TRAJ8)
CAGGTGFQKLVF

SEQ ID NO: 503876 - protein, 14 aa, Homo sapiens
  CDR3 for beta chain variable domain of TCR clone 251938 (TRBV13, TRBJ2-5)
CASSLGPRGETQYF

SEQ ID NO: 503877 - protein, 14 aa, Homo sapiens
  CDR3 for alpha chain variable domain of TCR clone 251939 (TRAV17, TRAJ12)
CATDEKDSSYKLIF

SEQ ID NO: 503878 - protein, 15 aa, Homo sapiens
  CDR3 for beta chain variable domain of TCR clone 251939 (TRBV7-9, TRBJ1-4)
CASSARTGGNEKLFF

SEQ ID NO: 503879 - protein, 12 aa, Homo sapiens
  CDR3 for alpha chain variable domain of TCR clone 251940 (TRAV2, TRAJ30)
CAVEDKDDKIIF

SEQ ID NO: 503880 - protein, 12 aa, Homo sapiens
  CDR3 for beta chain variable domain of TCR clone 251940 (TRBV19, TRBJ1-1)
CASSLSDTEAFF

SEQ ID NO: 503881 - protein, 10 aa, Homo sapiens
  CDR3 for alpha chain variable domain of TCR clone 251941 (TRAV36/DV7, TRAJ48)
CAVGNEKLTF

SEQ ID NO: 503882 - protein, 12 aa, Homo sapiens
  CDR3 for beta chain variable domain of TCR clone 251941 (TRBV20-1, TRBJ2-5)
CSAVGAGETQYF

SEQ ID NO: 503883 - protein, 12 aa, Homo sapiens
  CDR3 for alpha chain variable domain of TCR clone 251942 (TRAV12-3, TRAJ17)
CAMTLTGNKLTF

SEQ ID NO: 503884 - protein, 17 aa, Homo sapiens
  CDR3 for beta chain variable domain of TCR clone 251942 (TRBV20-1, TRBJ2-7)
CSATRAGGVAGVGEQYF

SEQ ID NO: 503885 - protein, 11 aa, Homo sapiens
  CDR3 for alpha chain variable domain of TCR clone 251943 (TRAV3, TRAJ6)
CAVRDRNPSRS

SEQ ID NO: 503886 - protein, 15 aa, Homo sapiens
  CDR3 for beta chain variable domain of TCR clone 251943 (TRBV18, TRBJ2-7)
CASSPTFMDSYEQYF

SEQ ID NO: 503887 - protein, 14 aa, Homo sapiens
  CDR3 for alpha chain variable domain of TCR clone 251944 (TRAV17, TRAJ57)
CATDPQGGSEKMVF

SEQ ID NO: 503888 - protein, 14 aa, Homo sapiens
  CDR3 for beta chain variable domain of TCR clone 251944 (TRBV27, TRBJ2-5)
CASSSLKGWETQYF

SEQ ID NO: 503889 - protein, 14 aa, Homo sapiens
  CDR3 for alpha chain variable domain of TCR clone 251945 (TRAV12-2, TRAJ17)
CAVLFKAAGNKLTF

SEQ ID NO: 503890 - protein, 15 aa, Homo sapiens
  CDR3 for beta chain variable domain of TCR clone 251945 (TRBV18, TRBJ2-7)
CASSPRSGTAYEQYF

SEQ ID NO: 503891 - protein, 11 aa, Homo sapiens
  CDR3 for alpha chain variable domain of TCR clone 251946 (TRAV3, TRAJ21)
CAVGNFNKFYF

SEQ ID NO: 503892 - protein, 11 aa, Homo sapiens
  CDR3 for beta chain variable domain of TCR clone 251946 (TRBV12-4, TRBJ2-1)
CASSCLTEQFF

SEQ ID NO: 503893 - protein, 14 aa, Homo sapiens
  CDR3 for alpha chain variable domain of TCR clone 251947 (TRAV12-1, TRAJ27)
CGEHIRTNAGKSTF

SEQ ID NO: 503894 - protein, 15 aa, Homo sapiens
  CDR3 for beta chain variable domain of TCR clone 251947 (TRBV7-2, TRBJ2-1)
CASSLASGRVNEQFF

SEQ ID NO: 503895 - protein, 15 aa, Homo sapiens
  CDR3 for alpha chain variable domain of TCR clone 251948 (TRAV35, TRAJ24)
CAGQSAQGSWGKLQF

SEQ ID NO: 503896 - protein, 13 aa, Homo sapiens
  CDR3 for beta chain variable domain of TCR clone 251948 (TRBV7-9, TRBJ1-2)
CASSLKQNYGYTF

SEQ ID NO: 503897 - protein, 14 aa, Homo sapiens
  CDR3 for alpha chain variable domain of TCR clone 251949 (TRAV21, TRAJ35)
CAVMPIGWGNVLHC

SEQ ID NO: 503898 - protein, 12 aa, Homo sapiens
  CDR3 for beta chain variable domain of TCR clone 251949 (TRBV7-9, TRBJ2-7)
CASSIKREEQYF

SEQ ID NO: 503899 - protein, 15 aa, Homo sapiens
  CDR3 for alpha chain variable domain of TCR clone 251950 (TRAV23/DV6, TRAJ30)
CAASSQESRDYKIIF

SEQ ID NO: 503900 - protein, 17 aa, Homo sapiens
  CDR3 for beta chain variable domain of TCR clone 251950 (TRBV4-3, TRBJ2-1)
CASSQFSSGRASGEQFF

SEQ ID NO: 503901 - protein, 15 aa, Homo sapiens
  CDR3 for alpha chain variable domain of TCR clone 251951 (TRAV8-3, TRAJ45)
CASSSSGGGADGLTF

SEQ ID NO: 503902 - protein, 13 aa, Homo sapiens
  CDR3 for beta chain variable domain of TCR clone 251951 (TRBV10-3, TRBJ2-7)
CASKLSVNYEQYF

SEQ ID NO: 503903 - protein, 10 aa, Homo sapiens
  CDR3 for alpha chain variable domain of TCR clone 251952 (TRAV38-1, TRAJ34)
CAFMDDKLIF

SEQ ID NO: 503904 - protein, 14 aa, Homo sapiens
  CDR3 for beta chain variable domain of TCR clone 251952 (TRBV6-1, TRBJ1-3)
CASVQGGGGNTIYF

SEQ ID NO: 503905 - protein, 14 aa, Homo sapiens
  CDR3 for alpha chain variable domain of TCR clone 251953 (TRAV3, TRAJ17)
CAVRDAAAGNKPTY

SEQ ID NO: 503906 - protein, 13 aa, Homo sapiens
  CDR3 for beta chain variable domain of TCR clone 251953 (TRBV2, TRBJ1-1)
CASSVSGYTEAFF

SEQ ID NO: 503907 - protein, 13 aa, Homo sapiens
  CDR3 for alpha chain variable domain of TCR clone 251954 (TRAV8-3, TRAJ28)
CAVGAVGSYQLTF

SEQ ID NO: 503908 - protein, 14 aa, Homo sapiens
  CDR3 for beta chain variable domain of TCR clone 251954 (TRBV11-2, TRBJ2-5)
CASRPLAGRETQYF

SEQ ID NO: 503909 - protein, 14 aa, Homo sapiens
  CDR3 for alpha chain variable domain of TCR clone 251955 (TRAV12-1, TRAJ36)
CVVNYWGKQPLLCD

SEQ ID NO: 503910 - protein, 13 aa, Homo sapiens
  CDR3 for beta chain variable domain of TCR clone 251955 (TRBV14, TRBJ1-1)
CASSREFGTEAFF

SEQ ID NO: 503911 - protein, 18 aa, Homo sapiens
  CDR3 for alpha chain variable domain of TCR clone 251956 (TRAV21, TRAJ52)
CAVRPSPAGGTSYGKLTF

SEQ ID NO: 503912 - protein, 17 aa, Homo sapiens
  CDR3 for beta chain variable domain of TCR clone 251956 (TRBV4-1, TRBJ1-4)
YASSQEGPRGVEEKLFF

SEQ ID NO: 503913 - protein, 17 aa, Homo sapiens
  CDR3 for alpha chain variable domain of TCR clone 251957 (TRAV13-1, )
CAANIQNPDPAVYQLRD

SEQ ID NO: 503914 - protein, 14 aa, Homo sapiens
  CDR3 for beta chain variable domain of TCR clone 251957 (TRBV19, TRBJ2-7)
CASSIGPNSYEQYC

SEQ ID NO: 503915 - protein, 18 aa, Homo sapiens
  CDR3 for alpha chain variable domain of TCR clone 251958 (TRAV21, TRAJ52)
CAVRPSPAGGTSYGKLTF

SEQ ID NO: 503916 - protein, 16 aa, Homo sapiens
  CDR3 for beta chain variable domain of TCR clone 251958 (TRBV2, TRBJ1-4)
CASNLLHGATNEKLFF

SEQ ID NO: 503917 - protein, 13 aa, Homo sapiens
  CDR3 for alpha chain variable domain of TCR clone 251959 (TRAV2, TRAJ40)
CAVVTSGTYKYIF

SEQ ID NO: 503918 - protein, 16 aa, Homo sapiens
  CDR3 for beta chain variable domain of TCR clone 251959 (TRBV28, TRBJ1-4)
CASSPPYRGRSEKLFF

SEQ ID NO: 503919 - protein, 14 aa, Homo sapiens
  CDR3 for alpha chain variable domain of TCR clone 251960 (TRAV38-1, TRAJ39)
CAFAYNNAGNMLTF

SEQ ID NO: 503920 - protein, 15 aa, Homo sapiens
  CDR3 for beta chain variable domain of TCR clone 251960 (TRBV19, TRBJ2-6)
CASSIGPCGANVLTF

SEQ ID NO: 503921 - protein, 15 aa, Homo sapiens
  CDR3 for alpha chain variable domain of TCR clone 251961 (TRAV3, TRAJ3)
CAVRDMSSSASKIIF

SEQ ID NO: 503922 - protein, 14 aa, Homo sapiens
  CDR3 for beta chain variable domain of TCR clone 251961 (TRBV11-2, TRBJ2-7)
CASSLGAGAYEQYF

SEQ ID NO: 503923 - protein, 14 aa, Homo sapiens
  CDR3 for alpha chain variable domain of TCR clone 251962 (TRAV13-1, TRAJ44)
CAAKATGTASKITF

SEQ ID NO: 503924 - protein, 13 aa, Homo sapiens
  CDR3 for beta chain variable domain of TCR clone 251962 (TRBV19, TRBJ1-2)
CASSQGQVYGYTF

SEQ ID NO: 503925 - protein, 11 aa, Homo sapiens
  CDR3 for alpha chain variable domain of TCR clone 251963 (TRAV26-1, TRAJ37)
CIVRVGRKLIF

SEQ ID NO: 503926 - protein, 15 aa, Homo sapiens
  CDR3 for beta chain variable domain of TCR clone 251963 (TRBV2, TRBJ2-7)
CASSEGLARSYEQYF

SEQ ID NO: 503927 - protein, 12 aa, Homo sapiens
  CDR3 for alpha chain variable domain of TCR clone 251964 (TRAV30, TRAJ39)
CGRGNAGNILTF

SEQ ID NO: 503928 - protein, 13 aa, Homo sapiens
  CDR3 for beta chain variable domain of TCR clone 251964 (TRBV11-2, TRBJ2-2)
CASGRDREEELFF

SEQ ID NO: 503929 - protein, 16 aa, Homo sapiens
  CDR3 for alpha chain variable domain of TCR clone 251965 (TRAV26-1, TRAJ33)
CIVPFWGEDSNYQSIW

SEQ ID NO: 503930 - protein, 14 aa, Homo sapiens
  CDR3 for beta chain variable domain of TCR clone 251965 (TRBV6-3, TRBJ1-1)
CASSYHSKNTEAFF

SEQ ID NO: 503931 - protein, 12 aa, Homo sapiens
  CDR3 for alpha chain variable domain of TCR clone 251966 (TRAV2, TRAJ31)
CAVEEGNARLMF

SEQ ID NO: 503932 - protein, 13 aa, Homo sapiens
  CDR3 for beta chain variable domain of TCR clone 251966 (TRBV27, TRBJ2-7)
CASSFSQGYEQYF

SEQ ID NO: 503933 - protein, 15 aa, Homo sapiens
  CDR3 for alpha chain variable domain of TCR clone 251967 (TRAV3, TRAJ3)
CAVRDRRSSASKIIF

SEQ ID NO: 503934 - protein, 15 aa, Homo sapiens
  CDR3 for beta chain variable domain of TCR clone 251967 (TRBV2, TRBJ2-1)
CASSELAGGYNEQFF

SEQ ID NO: 503935 - protein, 15 aa, Homo sapiens
  CDR3 for alpha chain variable domain of TCR clone 251968 (TRAV3, TRAJ22)
CAVRDRGGSARQLNF

SEQ ID NO: 503936 - protein, 14 aa, Homo sapiens
  CDR3 for beta chain variable domain of TCR clone 251968 (TRBV19, TRBJ1-5)
CASSLGLIGQPQHF

SEQ ID NO: 503937 - protein, 13 aa, Homo sapiens
  CDR3 for alpha chain variable domain of TCR clone 251969 (TRAV12-2, TRAJ52)
CAVSVTSYGKLTF

SEQ ID NO: 503938 - protein, 17 aa, Homo sapiens
  CDR3 for beta chain variable domain of TCR clone 251969 (TRBV11-2, TRBJ2-1)
CASSLYPPGVEYTEQFF

SEQ ID NO: 503939 - protein, 15 aa, Homo sapiens
  CDR3 for alpha chain variable domain of TCR clone 251970 (TRAV4, TRAJ12)
CLVGDLMDSSYKLFF

SEQ ID NO: 503940 - protein, 14 aa, Homo sapiens
  CDR3 for beta chain variable domain of TCR clone 251970 (TRBV7-2, TRBJ1-1)
CASSHRQGRTEAFF

SEQ ID NO: 503941 - protein, 13 aa, Homo sapiens
  CDR3 for alpha chain variable domain of TCR clone 251971 (TRAV3, TRAJ15)
CAVRDQAGTGLIF

SEQ ID NO: 503942 - protein, 15 aa, Homo sapiens
  CDR3 for beta chain variable domain of TCR clone 251971 (TRBV11-1, TRBJ2-7)
CASSLNYGASYEQYF

SEQ ID NO: 503943 - protein, 14 aa, Homo sapiens
  CDR3 for alpha chain variable domain of TCR clone 251972 (TRAV13-2, TRAJ54)
CAENMIQGAQKLVF

SEQ ID NO: 503944 - protein, 15 aa, Homo sapiens
  CDR3 for beta chain variable domain of TCR clone 251972 (TRBV19, TRBJ2-1)
CASSIQATSYNEQFF

SEQ ID NO: 503945 - protein, 13 aa, Homo sapiens
  CDR3 for alpha chain variable domain of TCR clone 251973 (TRAV12-1, TRAJ7)
CVVNMMGNNRIAF

SEQ ID NO: 503946 - protein, 15 aa, Homo sapiens
  CDR3 for beta chain variable domain of TCR clone 251973 (TRBV27, TRBJ2-3)
CASSLGLAATDTQYF

SEQ ID NO: 503947 - protein, 11 aa, Homo sapiens
  CDR3 for alpha chain variable domain of TCR clone 251974 (TRAV1-2, TRAJ40)
CAVPGTYKYIF

SEQ ID NO: 503948 - protein, 16 aa, Homo sapiens
  CDR3 for beta chain variable domain of TCR clone 251974 (TRBV7-3, TRBJ2-2)
CASSLKRGTLSGVLFF

SEQ ID NO: 503949 - protein, 14 aa, Homo sapiens
  CDR3 for alpha chain variable domain of TCR clone 251975 (TRAV26-1, TRAJ44)
CISPLPGTASKLTF

SEQ ID NO: 503950 - protein, 16 aa, Homo sapiens
  CDR3 for beta chain variable domain of TCR clone 251975 (TRBV19, TRBJ2-1)
CASSTAGPSSYNEQFF

SEQ ID NO: 503951 - protein, 14 aa, Homo sapiens
  CDR3 for alpha chain variable domain of TCR clone 251976 (TRAV1-2, TRAJ16)
CAVTRFSDGQKLLF

SEQ ID NO: 503952 - protein, 16 aa, Homo sapiens
  CDR3 for beta chain variable domain of TCR clone 251976 (TRBV19, TRBJ2-3)
CASSPEWDRGTDTQYF

SEQ ID NO: 503953 - protein, 14 aa, Homo sapiens
  CDR3 for alpha chain variable domain of TCR clone 251977 (TRAV26-1, TRAJ39)
CIVSGARAGNMLTF

SEQ ID NO: 503954 - protein, 15 aa, Homo sapiens
  CDR3 for beta chain variable domain of TCR clone 251977 (TRBV7-9, TRBJ1-5)
CASSQGHRPNQPQHF

SEQ ID NO: 503955 - protein, 15 aa, Homo sapiens
  CDR3 for alpha chain variable domain of TCR clone 251978 (TRAV3, TRAJ22)
CAVRDRGGSARQLTF

SEQ ID NO: 503956 - protein, 14 aa, Homo sapiens
  CDR3 for beta chain variable domain of TCR clone 251978 (TRBV19, TRBJ1-1)
CASLRTGLNTEAFF

SEQ ID NO: 503957 - protein, 15 aa, Homo sapiens
  CDR3 for alpha chain variable domain of TCR clone 251979 (TRAV4, TRAJ3)
CLVGDSDSSASKIIF

SEQ ID NO: 503958 - protein, 16 aa, Homo sapiens
  CDR3 for beta chain variable domain of TCR clone 251979 (TRBV5-1, TRBJ2-2)
CASSLWDTTNTGELFF

SEQ ID NO: 503959 - protein, 13 aa, Homo sapiens
  CDR3 for alpha chain variable domain of TCR clone 251980 (TRAV1-2, TRAJ9)
CAALNTGGFKTIF

SEQ ID NO: 503960 - protein, 14 aa, Homo sapiens
  CDR3 for beta chain variable domain of TCR clone 251980 (TRBV7-3, TRBJ2-1)
CASSLVGGTNEQFF

SEQ ID NO: 503961 - protein, 15 aa, Homo sapiens
  CDR3 for alpha chain variable domain of TCR clone 251981 (TRAV12-2, TRAJ57)
CAVSRGQGGSEKLVF

SEQ ID NO: 503962 - protein, 15 aa, Homo sapiens
  CDR3 for beta chain variable domain of TCR clone 251981 (TRBV5-1, TRBJ2-1)
GASSPPRAPYNEQFF

SEQ ID NO: 503963 - protein, 15 aa, Homo sapiens
  CDR3 for alpha chain variable domain of TCR clone 251982 (TRAV17, TRAJ4)
RATGTWSGGYNKLIF

SEQ ID NO: 503964 - protein, 13 aa, Homo sapiens
  CDR3 for beta chain variable domain of TCR clone 251982 (TRBV6-6, TRBJ2-7)
CASSPKHLDEQYF

SEQ ID NO: 503965 - protein, 15 aa, Homo sapiens
  CDR3 for alpha chain variable domain of TCR clone 251983 (TRAV12-3, TRAJ42)
CAMSGHGGSQGNLIF

SEQ ID NO: 503966 - protein, 14 aa, Homo sapiens
  CDR3 for beta chain variable domain of TCR clone 251983 (TRBV7-3, TRBJ2-1)
CASSLAGGTNEQFF

SEQ ID NO: 503967 - protein, 15 aa, Homo sapiens
  CDR3 for alpha chain variable domain of TCR clone 251984 (TRAV8-3, TRAJ11)
CAVGLLNSGYSTLTF

SEQ ID NO: 503968 - protein, 12 aa, Homo sapiens
  CDR3 for beta chain variable domain of TCR clone 251984 (TRBV7-9, TRBJ1-1)
CASSLVRGEAFF

SEQ ID NO: 503969 - protein, 15 aa, Homo sapiens
  CDR3 for alpha chain variable domain of TCR clone 251985 (TRAV3, TRAJ4)
CAVRDGTGGFNKLIF

SEQ ID NO: 503970 - protein, 16 aa, Homo sapiens
  CDR3 for beta chain variable domain of TCR clone 251985 (TRBV27, TRBJ2-2)
GASSSSGVSNTGELFF

SEQ ID NO: 503971 - protein, 10 aa, Homo sapiens
  CDR3 for alpha chain variable domain of TCR clone 251986 (TRAV21, TRAJ30)
NSNRDDKIIF

SEQ ID NO: 503972 - protein, 13 aa, Homo sapiens
  CDR3 for beta chain variable domain of TCR clone 251986 (TRBV2, TRBJ1-1)
CARNPTGGFHAFF

SEQ ID NO: 503973 - protein, 13 aa, Homo sapiens
  CDR3 for alpha chain variable domain of TCR clone 251987 (TRAV35, TRAJ42)
CAGFPGSQGNLIF

SEQ ID NO: 503974 - protein, 14 aa, Homo sapiens
  CDR3 for beta chain variable domain of TCR clone 251987 (TRBV29-1, TRBJ2-2)
CSVLAETNTGELFF

SEQ ID NO: 503975 - protein, 13 aa, Homo sapiens
  CDR3 for alpha chain variable domain of TCR clone 251988 (TRAV30, TRAJ24)
CGTVTDSWGKLQF

SEQ ID NO: 503976 - protein, 13 aa, Homo sapiens
  CDR3 for beta chain variable domain of TCR clone 251988 (TRBV6-1, TRBJ1-1)
CASSEVFGTEAFF

SEQ ID NO: 503977 - protein, 17 aa, Homo sapiens
  CDR3 for alpha chain variable domain of TCR clone 251989 (TRAV3, TRAJ6)
CAVRDGPRAGGSYIPTF

SEQ ID NO: 503978 - protein, 14 aa, Homo sapiens
  CDR3 for beta chain variable domain of TCR clone 251989 (TRBV7-2, TRBJ2-7)
RASSPKTSFYEQYF

SEQ ID NO: 503979 - protein, 15 aa, Homo sapiens
  CDR3 for alpha chain variable domain of TCR clone 251990 (TRAV3, TRAJ22)
CAVRDRGGSARQLTF

SEQ ID NO: 503980 - protein, 14 aa, Homo sapiens
  CDR3 for beta chain variable domain of TCR clone 251990 (TRBV25-1, TRBJ1-1)
CASTNLGGNTEAFF

SEQ ID NO: 503981 - protein, 12 aa, Homo sapiens
  CDR3 for alpha chain variable domain of TCR clone 251991 (TRAV12-2, TRAJ4)
CRPFWCYNKLIF

SEQ ID NO: 503982 - protein, 15 aa, Homo sapiens
  CDR3 for beta chain variable domain of TCR clone 251991 (TRBV10-3, TRBJ2-1)
CAISDVQDRAYEQFF

SEQ ID NO: 503983 - protein, 14 aa, Homo sapiens
  CDR3 for alpha chain variable domain of TCR clone 251992 (TRAV1-2, TRAJ8)
CAVREDTGFKKLVF

SEQ ID NO: 503984 - protein, 15 aa, Homo sapiens
  CDR3 for beta chain variable domain of TCR clone 251992 (TRBV27, TRBJ2-1)
CASSNGGGSSNEQFF

SEQ ID NO: 503985 - protein, 13 aa, Homo sapiens
  CDR3 for alpha chain variable domain of TCR clone 251993 (TRAV13-1, TRAJ20)
CAARVSNDYKLSF

SEQ ID NO: 503986 - protein, 12 aa, Homo sapiens
  CDR3 for beta chain variable domain of TCR clone 251993 (TRBV20-1, TRBJ2-1)
CSARLGTDEKFF

SEQ ID NO: 503987 - protein, 14 aa, Homo sapiens
  CDR3 for alpha chain variable domain of TCR clone 251994 (TRAV3, TRAJ40)
CAVRDRRGTYKYIF

SEQ ID NO: 503988 - protein, 12 aa, Homo sapiens
  CDR3 for beta chain variable domain of TCR clone 251994 (TRBV24-1, TRBJ2-7)
CATSDPGYEQYF

SEQ ID NO: 503989 - protein, 17 aa, Homo sapiens
  CDR3 for alpha chain variable domain of TCR clone 251995 (TRAV1-2, TRAJ27)
CAVRDNTGDTNAGKSTF

SEQ ID NO: 503990 - protein, 15 aa, Homo sapiens
  CDR3 for beta chain variable domain of TCR clone 251995 (TRBV2, TRBJ2-5)
CASSGTVAAGETQYF

SEQ ID NO: 503991 - protein, 17 aa, Homo sapiens
  CDR3 for alpha chain variable domain of TCR clone 251996 (TRAV3, TRAJ6)
CAVRDGPRVGGRYITTF

SEQ ID NO: 503992 - protein, 12 aa, Homo sapiens
  CDR3 for beta chain variable domain of TCR clone 251996 (TRBV11-2, TRBJ2-2)
CASSLGGGELFF

SEQ ID NO: 503993 - protein, 14 aa, Homo sapiens
  CDR3 for alpha chain variable domain of TCR clone 251997 (TRAV12-2, TRAJ24)
CAVTPADSWGKLQF

SEQ ID NO: 503994 - protein, 12 aa, Homo sapiens
  CDR3 for beta chain variable domain of TCR clone 251997 (TRBV3-1, TRBJ2-1)
CASNQGSSGQFF

SEQ ID NO: 503995 - protein, 15 aa, Homo sapiens
  CDR3 for alpha chain variable domain of TCR clone 251998 (TRAV12-1, TRAJ22)
CVMRISSGSARQLTF

SEQ ID NO: 503996 - protein, 13 aa, Homo sapiens
  CDR3 for beta chain variable domain of TCR clone 251998 (TRBV6-3, TRBJ1-1)
CASSYSRTDSAFF

SEQ ID NO: 503997 - protein, 13 aa, Homo sapiens
  CDR3 for alpha chain variable domain of TCR clone 251999 (TRAV13-1, TRAJ40)
CAAISPGTYKYIF

SEQ ID NO: 503998 - protein, 12 aa, Homo sapiens
  CDR3 for beta chain variable domain of TCR clone 251999 (TRBV3-1, TRBJ2-1)
CASGGLGNEHFF

SEQ ID NO: 503999 - protein, 14 aa, Homo sapiens
  CDR3 for alpha chain variable domain of TCR clone 252000 (TRAV8-4, TRAJ43)
CAVSDPRNNNDMRF

SEQ ID NO: 504000 - protein, 16 aa, Homo sapiens
  CDR3 for beta chain variable domain of TCR clone 252000 (TRBV20-1, TRBJ1-4)
CSAPGQGLLTNEKLFF

SEQ ID NO: 504001 - protein, 12 aa, Homo sapiens
  CDR3 for alpha chain variable domain of TCR clone 252001 (TRAV21, TRAJ31)
GAVSPARGRLMF

SEQ ID NO: 504002 - protein, 14 aa, Homo sapiens
  CDR3 for beta chain variable domain of TCR clone 252001 (TRBV28, TRBJ2-7)
CASSLLRISYEQYF

SEQ ID NO: 504003 - protein, 15 aa, Homo sapiens
  CDR3 for alpha chain variable domain of TCR clone 252002 (TRAV12-2, TRAJ53)
CAVNGGGDSNYKLTF

SEQ ID NO: 504004 - protein, 13 aa, Homo sapiens
  CDR3 for beta chain variable domain of TCR clone 252002 (TRBV3-1, TRBJ1-1)
CASSPGVITEAFF

SEQ ID NO: 504005 - protein, 13 aa, Homo sapiens
  CDR3 for alpha chain variable domain of TCR clone 252003 (TRAV13-1, TRAJ39)
CAASIWAGKMLTF

SEQ ID NO: 504006 - protein, 15 aa, Homo sapiens
  CDR3 for beta chain variable domain of TCR clone 252003 (TRBV7-9, TRBJ1-1)
CASSLLEQGGTEAFF

SEQ ID NO: 504007 - protein, 15 aa, Homo sapiens
  CDR3 for alpha chain variable domain of TCR clone 252004 (TRAV20, TRAJ4)
CAVEGSSGGYNKLIF

SEQ ID NO: 504008 - protein, 14 aa, Homo sapiens
  CDR3 for beta chain variable domain of TCR clone 252004 (TRBV7-8, TRBJ2-7)
CASTLGGALGEQYC

SEQ ID NO: 504009 - protein, 14 aa, Homo sapiens
  CDR3 for alpha chain variable domain of TCR clone 252005 (TRAV13-2, TRAJ32)
CAESLGGATNKLIF

SEQ ID NO: 504010 - protein, 15 aa, Homo sapiens
  CDR3 for beta chain variable domain of TCR clone 252005 (TRBV7-9, TRBJ1-4)
CASSRTGGFNEKLFF

SEQ ID NO: 504011 - protein, 13 aa, Homo sapiens
  CDR3 for alpha chain variable domain of TCR clone 252006 (TRAV21, TRAJ27)
CAALNTNAGKSTF

SEQ ID NO: 504012 - protein, 14 aa, Homo sapiens
  CDR3 for beta chain variable domain of TCR clone 252006 (TRBV27, TRBJ1-1)
CASILLISLSEAFF

SEQ ID NO: 504013 - protein, 17 aa, Homo sapiens
  CDR3 for alpha chain variable domain of TCR clone 252007 (TRAV13-1, TRAJ52)
CAAGRNAGGTSYGKLTF

SEQ ID NO: 504014 - protein, 14 aa, Homo sapiens
  CDR3 for beta chain variable domain of TCR clone 252007 (TRBV4-1, TRBJ2-2)
CASSRAVNTGELFF

SEQ ID NO: 504015 - protein, 12 aa, Homo sapiens
  CDR3 for alpha chain variable domain of TCR clone 252008 (TRAV12-3, TRAJ17)
CAMTLTGYKLTF

SEQ ID NO: 504016 - protein, 18 aa, Homo sapiens
  CDR3 for beta chain variable domain of TCR clone 252008 (TRBV4-3, TRBJ1-6)
CASSQETPASSYNSPLHF

SEQ ID NO: 504017 - protein, 12 aa, Homo sapiens
  CDR3 for alpha chain variable domain of TCR clone 252009 (TRAV27, TRAJ9)
CAGESGGFKTIL

SEQ ID NO: 504018 - protein, 16 aa, Homo sapiens
  CDR3 for beta chain variable domain of TCR clone 252009 (TRBV7-8, TRBJ2-4)
CASSAERTLAKNIQYF

SEQ ID NO: 504019 - protein, 15 aa, Homo sapiens
  CDR3 for alpha chain variable domain of TCR clone 252010 (TRAV12-2, TRAJ53)
CAVNTGGGRNYKLTF

SEQ ID NO: 504020 - protein, 15 aa, Homo sapiens
  CDR3 for beta chain variable domain of TCR clone 252010 (TRBV5-1, TRBJ2-5)
CASSLGLGERKTQYF

SEQ ID NO: 504021 - protein, 15 aa, Homo sapiens
  CDR3 for alpha chain variable domain of TCR clone 252011 (TRAV27, TRAJ38)
CAARRNAGNNRKLIW

SEQ ID NO: 504022 - protein, 13 aa, Homo sapiens
  CDR3 for beta chain variable domain of TCR clone 252011 (TRBV7-3, TRBJ2-1)
CASSLDSYKEHFF

SEQ ID NO: 504023 - protein, 16 aa, Homo sapiens
  CDR3 for alpha chain variable domain of TCR clone 252012 (TRAV3, TRAJ10)
CAMRDMRAGGGNKLTF

SEQ ID NO: 504024 - protein, 17 aa, Homo sapiens
  CDR3 for beta chain variable domain of TCR clone 252012 (TRBV28, TRBJ2-5)
CASSTPEGDALQETQYF

SEQ ID NO: 504025 - protein, 12 aa, Homo sapiens
  CDR3 for alpha chain variable domain of TCR clone 252013 (TRAV23/DV6, TRAJ30)
CAASKWDDKIIF

SEQ ID NO: 504026 - protein, 18 aa, Homo sapiens
  CDR3 for beta chain variable domain of TCR clone 252013 (TRBV10-3, TRBJ2-3)
CAISESRVGPMRGDTQYF

SEQ ID NO: 504027 - protein, 14 aa, Homo sapiens
  CDR3 for alpha chain variable domain of TCR clone 252014 (TRAV12-2, TRAJ13)
CAVKKTGVYQKVTF

SEQ ID NO: 504028 - protein, 16 aa, Homo sapiens
  CDR3 for beta chain variable domain of TCR clone 252014 (TRBV2, TRBJ2-1)
CASRSPAGGKYNEQFF

SEQ ID NO: 504029 - protein, 12 aa, Homo sapiens
  CDR3 for alpha chain variable domain of TCR clone 252015 (TRAV17, TRAJ20)
CATQSTDYKLSF

SEQ ID NO: 504030 - protein, 13 aa, Homo sapiens
  CDR3 for beta chain variable domain of TCR clone 252015 (TRBV10-3, TRBJ1-1)
CAIIPEGGTEAFF

SEQ ID NO: 504031 - protein, 15 aa, Homo sapiens
  CDR3 for alpha chain variable domain of TCR clone 252016 (TRAV26-1, TRAJ29)
CIVRGEGSGNKPLVF

SEQ ID NO: 504032 - protein, 14 aa, Homo sapiens
  CDR3 for beta chain variable domain of TCR clone 252016 (TRBV7-9, TRBJ2-1)
CASSPRDSLYEQFF

SEQ ID NO: 504033 - protein, 17 aa, Homo sapiens
  CDR3 for alpha chain variable domain of TCR clone 252017 (TRAV3, TRAJ42)
CAVRDRDYGGSQGNLIF

SEQ ID NO: 504034 - protein, 13 aa, Homo sapiens
  CDR3 for beta chain variable domain of TCR clone 252017 (TRBV20-1, TRBJ2-5)
CSARRGTGATQYL

SEQ ID NO: 504035 - protein, 17 aa, Homo sapiens
  CDR3 for alpha chain variable domain of TCR clone 252018 (TRAV3, TRAJ6)
CAVRDGPRAGGSYIPTI

SEQ ID NO: 504036 - protein, 17 aa, Homo sapiens
  CDR3 for beta chain variable domain of TCR clone 252018 (TRBV3-1, TRBJ2-5)
CASSQDTLAGGGETQYF

SEQ ID NO: 504037 - protein, 14 aa, Homo sapiens
  CDR3 for alpha chain variable domain of TCR clone 252019 (TRAV1-2, TRAJ8)
CAVREDTGFQKLVF

SEQ ID NO: 504038 - protein, 12 aa, Homo sapiens
  CDR3 for beta chain variable domain of TCR clone 252019 (TRBV24-1, TRBJ1-1)
CATLYPDTESFF

SEQ ID NO: 504039 - protein, 12 aa, Homo sapiens
  CDR3 for alpha chain variable domain of TCR clone 252020 (TRAV12-3, TRAJ17)
CAMTLTGNKLTF

SEQ ID NO: 504040 - protein, 11 aa, Homo sapiens
  CDR3 for beta chain variable domain of TCR clone 252020 (TRBV28, TRBJ2-1)
CASMRVNEQFF

SEQ ID NO: 504041 - protein, 12 aa, Homo sapiens
  CDR3 for alpha chain variable domain of TCR clone 252021 (TRAV16, TRAJ22)
CALEVSARHLTF

SEQ ID NO: 504042 - protein, 14 aa, Homo sapiens
  CDR3 for beta chain variable domain of TCR clone 252021 (TRBV11-2, TRBJ2-3)
CASSSIASTDTQYF

SEQ ID NO: 504043 - protein, 16 aa, Homo sapiens
  CDR3 for alpha chain variable domain of TCR clone 252022 (TRAV21, TRAJ52)
CAVTNAGGTSYGKLTF

SEQ ID NO: 504044 - protein, 14 aa, Homo sapiens
  CDR3 for beta chain variable domain of TCR clone 252022 (TRBV7-2, TRBJ1-1)
CASSHRQGRTEAFF

SEQ ID NO: 504045 - protein, 15 aa, Homo sapiens
  CDR3 for alpha chain variable domain of TCR clone 252023 (TRAV8-3, TRAJ40)
CAVGPYTSGTYNYIF

SEQ ID NO: 504046 - protein, 16 aa, Homo sapiens
  CDR3 for beta chain variable domain of TCR clone 252023 (TRBV7-2, TRBJ2-7)
CASSLDPGGGSGGQYF

SEQ ID NO: 504047 - protein, 13 aa, Homo sapiens
  CDR3 for alpha chain variable domain of TCR clone 252024 (TRAV26-1, TRAJ48)
CIVKVGGDEKLTF

SEQ ID NO: 504048 - protein, 16 aa, Homo sapiens
  CDR3 for beta chain variable domain of TCR clone 252024 (TRBV12-5, TRBJ2-5)
CASGPRTSGNQETQYF

SEQ ID NO: 504049 - protein, 17 aa, Homo sapiens
  CDR3 for alpha chain variable domain of TCR clone 252025 (TRAV3, TRAJ6)
CAVRDGPRAGGSYIPTF

SEQ ID NO: 504050 - protein, 12 aa, Homo sapiens
  CDR3 for beta chain variable domain of TCR clone 252025 (TRBV11-2, TRBJ2-2)
CASNLGGGELFF

SEQ ID NO: 504051 - protein, 18 aa, Homo sapiens
  CDR3 for alpha chain variable domain of TCR clone 252026 (TRAV21, TRAJ52)
CAVRPSPAGGTSYGTLTF

SEQ ID NO: 504052 - protein, 16 aa, Homo sapiens
  CDR3 for beta chain variable domain of TCR clone 252026 (TRBV19, TRBJ2-2)
CASRSPGTGATGELFF

SEQ ID NO: 504053 - protein, 12 aa, Homo sapiens
  CDR3 for alpha chain variable domain of TCR clone 252027 (TRAV13-1, TRAJ15)
CAASKPGTALIF

SEQ ID NO: 504054 - protein, 16 aa, Homo sapiens
  CDR3 for beta chain variable domain of TCR clone 252027 (TRBV18, TRBJ2-7)
CASSPRVLGTDSEQYL

SEQ ID NO: 504055 - protein, 11 aa, Homo sapiens
  CDR3 for alpha chain variable domain of TCR clone 252028 (TRAV3, TRAJ21)
CAVGYFNKFYF

SEQ ID NO: 504056 - protein, 14 aa, Homo sapiens
  CDR3 for beta chain variable domain of TCR clone 252028 (TRBV18, TRBJ2-5)
CASSPGVSQETQYF

SEQ ID NO: 504057 - protein, 12 aa, Homo sapiens
  CDR3 for alpha chain variable domain of TCR clone 252029 (TRAV13-1, TRAJ21)
CAAKEGFNKFYF

SEQ ID NO: 504058 - protein, 13 aa, Homo sapiens
  CDR3 for beta chain variable domain of TCR clone 252029 (TRBV7-3, TRBJ1-1)
CASSQDWGAEDFF

SEQ ID NO: 504059 - protein, 14 aa, Homo sapiens
  CDR3 for alpha chain variable domain of TCR clone 252030 (TRAV3, TRAJ9)
GTVRLNTGGFKTIF

SEQ ID NO: 504060 - protein, 15 aa, Homo sapiens
  CDR3 for beta chain variable domain of TCR clone 252030 (TRBV7-2, TRBJ2-1)
CASSLASGRVNEQFF

SEQ ID NO: 504061 - protein, 11 aa, Homo sapiens
  CDR3 for alpha chain variable domain of TCR clone 252031 (TRAV21, TRAJ34)
CAVTNTDKLIF

SEQ ID NO: 504062 - protein, 19 aa, Homo sapiens
  CDR3 for beta chain variable domain of TCR clone 252031 (TRBV20-1, TRBJ2-1)
CSARSPSGGPPTMSSSAGQ

SEQ ID NO: 504063 - protein, 14 aa, Homo sapiens
  CDR3 for alpha chain variable domain of TCR clone 252032 (TRAV20, TRAJ42)
CAVQAGGRKGNLIF

SEQ ID NO: 504064 - protein, 14 aa, Homo sapiens
  CDR3 for beta chain variable domain of TCR clone 252032 (TRBV28, TRBJ1-2)
CASRIQGANYGYTF

SEQ ID NO: 504065 - protein, 13 aa, Homo sapiens
  CDR3 for alpha chain variable domain of TCR clone 252033 (TRAV23/DV6, TRAJ6)
CAAKTGGSYIPTC

SEQ ID NO: 504066 - protein, 15 aa, Homo sapiens
  CDR3 for beta chain variable domain of TCR clone 252033 (TRBV5-1, TRBJ1-2)
CASSSYGEFDYGYTF

SEQ ID NO: 504067 - protein, 13 aa, Homo sapiens
  CDR3 for alpha chain variable domain of TCR clone 252034 (TRAV8-4, TRAJ29)
CAVSATGNTPLVF

SEQ ID NO: 504068 - protein, 12 aa, Homo sapiens
  CDR3 for beta chain variable domain of TCR clone 252034 (TRBV11-2, TRBJ2-2)
CASSLGGGELFF

SEQ ID NO: 504069 - protein, 13 aa, Homo sapiens
  CDR3 for alpha chain variable domain of TCR clone 252035 (TRAV1-1, TRAJ13)
CAVNSGGYQKVTF

SEQ ID NO: 504070 - protein, 15 aa, Homo sapiens
  CDR3 for beta chain variable domain of TCR clone 252035 (TRBV5-1, TRBJ2-3)
CASSVTSGSTDTQYF

SEQ ID NO: 504071 - protein, 16 aa, Homo sapiens
  CDR3 for alpha chain variable domain of TCR clone 252036 (TRAV3, TRAJ37)
CAVRPHGSGNTGKLIF

SEQ ID NO: 504072 - protein, 13 aa, Homo sapiens
  CDR3 for beta chain variable domain of TCR clone 252036 (TRBV7-9, TRBJ2-1)
CASSLDVGNEQFF

SEQ ID NO: 504073 - protein, 15 aa, Homo sapiens
  CDR3 for alpha chain variable domain of TCR clone 252037 (TRAV8-4, TRAJ39)
CAVSHQRGAGNMLTF

SEQ ID NO: 504074 - protein, 15 aa, Homo sapiens
  CDR3 for beta chain variable domain of TCR clone 252037 (TRBV20-1, TRBJ1-1)
CSARPRQGAPTEAFF

SEQ ID NO: 504075 - protein, 18 aa, Homo sapiens
  CDR3 for alpha chain variable domain of TCR clone 252038 (TRAV21, TRAJ52)
CAVRPSPAGGTSYGKLTF

SEQ ID NO: 504076 - protein, 17 aa, Homo sapiens
  CDR3 for beta chain variable domain of TCR clone 252038 (TRBV13, TRBJ2-3)
CASSLSRVAGGSNTQSF

SEQ ID NO: 504077 - protein, 15 aa, Homo sapiens
  CDR3 for alpha chain variable domain of TCR clone 252039 (TRAV3, TRAJ5)
CAVRDRKTGRRALTF

SEQ ID NO: 504078 - protein, 15 aa, Homo sapiens
  CDR3 for beta chain variable domain of TCR clone 252039 (TRBV7-2, TRBJ2-7)
CASSLAVGQVYEQYF

SEQ ID NO: 504079 - protein, 16 aa, Homo sapiens
  CDR3 for alpha chain variable domain of TCR clone 252040 (TRAV16, TRAJ57)
CAPYLITQGGSEKLVF

SEQ ID NO: 504080 - protein, 17 aa, Homo sapiens
  CDR3 for beta chain variable domain of TCR clone 252040 (TRBV28, TRBJ2-5)
CASSTPEGDALQDTQYF

SEQ ID NO: 504081 - protein, 14 aa, Homo sapiens
  CDR3 for alpha chain variable domain of TCR clone 252041 (TRAV1-2, TRAJ8)
CAVREDTGFRKLVF

SEQ ID NO: 504082 - protein, 13 aa, Homo sapiens
  CDR3 for beta chain variable domain of TCR clone 252041 (TRBV14, TRBJ2-7)
CASSQDRRYERYF

SEQ ID NO: 504083 - protein, 18 aa, Homo sapiens
  CDR3 for alpha chain variable domain of TCR clone 252042 (TRAV13-1, TRAJ52)
CAASKRSSGCTSYGKLTF

SEQ ID NO: 504084 - protein, 13 aa, Homo sapiens
  CDR3 for beta chain variable domain of TCR clone 252042 (TRBV12-4, TRBJ1-2)
CASSLRQGKGYTF

SEQ ID NO: 504085 - protein, 16 aa, Homo sapiens
  CDR3 for alpha chain variable domain of TCR clone 252043 (TRAV30, TRAJ24)
CGTEIVDADSWGKFKF

SEQ ID NO: 504086 - protein, 18 aa, Homo sapiens
  CDR3 for beta chain variable domain of TCR clone 252043 (TRBV7-9, TRBJ2-7)
CVSSLTTSGSRTWYEQYF

SEQ ID NO: 504087 - protein, 13 aa, Homo sapiens
  CDR3 for alpha chain variable domain of TCR clone 252044 (TRAV27, TRAJ49)
CAPLPYTGNQFYF

SEQ ID NO: 504088 - protein, 16 aa, Homo sapiens
  CDR3 for beta chain variable domain of TCR clone 252044 (TRBV4-1, TRBJ1-2)
CASNQDAGQVLYGYTF

SEQ ID NO: 504089 - protein, 13 aa, Homo sapiens
  CDR3 for alpha chain variable domain of TCR clone 252045 (TRAV21, TRAJ33)
CAVAGDSYYQLIW

SEQ ID NO: 504090 - protein, 13 aa, Homo sapiens
  CDR3 for beta chain variable domain of TCR clone 252045 (TRBV10-3, TRBJ2-7)
CASKLAVNYEQYF

SEQ ID NO: 504091 - protein, 15 aa, Homo sapiens
  CDR3 for alpha chain variable domain of TCR clone 252046 (TRAV13-1, TRAJ50)
CAAKGSETSYDKVIF

SEQ ID NO: 504092 - protein, 16 aa, Homo sapiens
  CDR3 for beta chain variable domain of TCR clone 252046 (TRBV12-4, TRBJ2-1)
CASSPQERPSYNEQFF

SEQ ID NO: 504093 - protein, 15 aa, Homo sapiens
  CDR3 for alpha chain variable domain of TCR clone 252047 (TRAV26-1, TRAJ17)
CIVSILGAAGNKLTF

SEQ ID NO: 504094 - protein, 17 aa, Homo sapiens
  CDR3 for beta chain variable domain of TCR clone 252047 (TRBV6-5, TRBJ2-7)
CASSYSFWGQGSYEQYF

SEQ ID NO: 504095 - protein, 13 aa, Homo sapiens
  CDR3 for alpha chain variable domain of TCR clone 252048 (TRAV3, TRAJ31)
CAVREGNNDRLMF

SEQ ID NO: 504096 - protein, 15 aa, Homo sapiens
  CDR3 for beta chain variable domain of TCR clone 252048 (TRBV6-1, TRBJ1-1)
CASRTPGQLNTEAFF

SEQ ID NO: 504097 - protein, 14 aa, Homo sapiens
  CDR3 for alpha chain variable domain of TCR clone 252049 (TRAV13-1, TRAJ26)
CAAPKGPDGQNFVF

SEQ ID NO: 504098 - protein, 15 aa, Homo sapiens
  CDR3 for beta chain variable domain of TCR clone 252049 (TRBV28, TRBJ2-5)
CAISFRQGALETQYF

SEQ ID NO: 504099 - protein, 14 aa, Homo sapiens
  CDR3 for alpha chain variable domain of TCR clone 252050 (TRAV23/DV6, TRAJ57)
CAAALKGGSEKLVF

SEQ ID NO: 504100 - protein, 14 aa, Homo sapiens
  CDR3 for beta chain variable domain of TCR clone 252050 (TRBV19, TRBJ2-1)
CASPTFVLSGEQFF

SEQ ID NO: 504101 - protein, 12 aa, Homo sapiens
  CDR3 for alpha chain variable domain of TCR clone 252051 (TRAV13-1, TRAJ21)
CAAKEGFNKFYF

SEQ ID NO: 504102 - protein, 17 aa, Homo sapiens
  CDR3 for beta chain variable domain of TCR clone 252051 (TRBV20-1, TRBJ2-1)
CSASSSGLAGSDNEQFF

SEQ ID NO: 504103 - protein, 12 aa, Homo sapiens
  CDR3 for alpha chain variable domain of TCR clone 252052 (TRAV3, TRAJ43)
CAVRDPNNDMRF

SEQ ID NO: 504104 - protein, 16 aa, Homo sapiens
  CDR3 for beta chain variable domain of TCR clone 252052 (TRBV12-4, TRBJ2-5)
CASSWRPSGDLETQYF

SEQ ID NO: 504105 - protein, 16 aa, Homo sapiens
  CDR3 for alpha chain variable domain of TCR clone 252053 (TRAV30, TRAJ24)
CGTEIVDADSWWKFQF

SEQ ID NO: 504106 - protein, 13 aa, Homo sapiens
  CDR3 for beta chain variable domain of TCR clone 252053 (TRBV18, TRBJ1-2)
CASSASATEGYSF

SEQ ID NO: 504107 - protein, 13 aa, Homo sapiens
  CDR3 for alpha chain variable domain of TCR clone 252054 (TRAV27, TRAJ6)
YAGGTRGSYIPTS

SEQ ID NO: 504108 - protein, 14 aa, Homo sapiens
  CDR3 for beta chain variable domain of TCR clone 252054 (TRBV6-3, TRBJ1-1)
CASSYQRRDTVAFF

SEQ ID NO: 504109 - protein, 12 aa, Homo sapiens
  CDR3 for alpha chain variable domain of TCR clone 252055 (TRAV21, TRAJ23)
CAVMLQGGKLIF

SEQ ID NO: 504110 - protein, 14 aa, Homo sapiens
  CDR3 for beta chain variable domain of TCR clone 252055 (TRBV7-9, TRBJ1-4)
CAITDGEANDKLFF

SEQ ID NO: 504111 - protein, 15 aa, Homo sapiens
  CDR3 for alpha chain variable domain of TCR clone 252056 (TRAV13-1, TRAJ17)
CAASIERAAGNKLTF

SEQ ID NO: 504112 - protein, 13 aa, Homo sapiens
  CDR3 for beta chain variable domain of TCR clone 252056 (TRBV11-2, TRBJ1-1)
CASSLGRNTEAFF

SEQ ID NO: 504113 - protein, 14 aa, Homo sapiens
  CDR3 for alpha chain variable domain of TCR clone 252057 (TRAV1-2, TRAJ8)
CAVREDTGFQKRVF

SEQ ID NO: 504114 - protein, 15 aa, Homo sapiens
  CDR3 for beta chain variable domain of TCR clone 252057 (TRBV27, TRBJ2-1)
CASSNGGGSSNEQFF

SEQ ID NO: 504115 - protein, 13 aa, Homo sapiens
  CDR3 for alpha chain variable domain of TCR clone 252058 (TRAV29/DV5, TRAJ31)
CAASRNNNARLMF

SEQ ID NO: 504116 - protein, 12 aa, Homo sapiens
  CDR3 for beta chain variable domain of TCR clone 252058 (TRBV14, TRBJ2-5)
CASSHLKETQCF

SEQ ID NO: 504117 - protein, 15 aa, Homo sapiens
  CDR3 for alpha chain variable domain of TCR clone 252059 (TRAV21, TRAJ13)
CAVRPNSGGYQKVTF

SEQ ID NO: 504118 - protein, 14 aa, Homo sapiens
  CDR3 for beta chain variable domain of TCR clone 252059 (TRBV7-2, TRBJ2-7)
CASSPKTSFYEQYF

SEQ ID NO: 504119 - protein, 18 aa, Homo sapiens
  CDR3 for alpha chain variable domain of TCR clone 252060 (TRAV21, TRAJ52)
CAVRPSPAGGTSNGKLTF

SEQ ID NO: 504120 - protein, 16 aa, Homo sapiens
  CDR3 for beta chain variable domain of TCR clone 252060 (TRBV7-3, TRBJ2-2)
CASSLKRGTLSGELFF

SEQ ID NO: 504121 - protein, 17 aa, Homo sapiens
  CDR3 for alpha chain variable domain of TCR clone 252061 (TRAV3, TRAJ7)
CAVRVMSPLEGTTDSLL

SEQ ID NO: 504122 - protein, 17 aa, Homo sapiens
  CDR3 for beta chain variable domain of TCR clone 252061 (TRBV15, TRBJ1-2)
CATSGREIDVVNYGYTF

SEQ ID NO: 504123 - protein, 11 aa, Homo sapiens
  CDR3 for alpha chain variable domain of TCR clone 252062 (TRAV1-1, TRAJ16)
CAAGDGQKLPF

SEQ ID NO: 504124 - protein, 15 aa, Homo sapiens
  CDR3 for beta chain variable domain of TCR clone 252062 (TRBV28, TRBJ1-2)
CASIPQGSDDYGYTF

SEQ ID NO: 504125 - protein, 11 aa, Homo sapiens
  CDR3 for alpha chain variable domain of TCR clone 252063 (TRAV12-2, TRAJ36)
CAVDGANNLFF

SEQ ID NO: 504126 - protein, 13 aa, Homo sapiens
  CDR3 for beta chain variable domain of TCR clone 252063 (TRBV28, TRBJ2-5)
CAGVSRVEETQYF

SEQ ID NO: 504127 - protein, 15 aa, Homo sapiens
  CDR3 for alpha chain variable domain of TCR clone 252064 (TRAV13-1, TRAJ32)
CAASNGWWCYNQAHL

SEQ ID NO: 504128 - protein, 15 aa, Homo sapiens
  CDR3 for beta chain variable domain of TCR clone 252064 (TRBV20-1, TRBJ1-2)
CSAIRTGAFNYGYTF

SEQ ID NO: 504129 - protein, 15 aa, Homo sapiens
  CDR3 for alpha chain variable domain of TCR clone 252065 (TRAV4, TRAJ39)
CLVGPNNNAGNMRTF

SEQ ID NO: 504130 - protein, 12 aa, Homo sapiens
  CDR3 for beta chain variable domain of TCR clone 252065 (TRBV12-4, TRBJ2-7)
CASNPGGGEQYF

SEQ ID NO: 504131 - protein, 14 aa, Homo sapiens
  CDR3 for alpha chain variable domain of TCR clone 252066 (TRAV13-2, TRAJ43)
CAEIPTYNNNDMRF

SEQ ID NO: 504132 - protein, 15 aa, Homo sapiens
  CDR3 for beta chain variable domain of TCR clone 252066 (TRBV7-9, TRBJ2-2)
CANGPLDTFPGELFF

SEQ ID NO: 504133 - protein, 14 aa, Homo sapiens
  CDR3 for alpha chain variable domain of TCR clone 252067 (TRAV12-3, TRAJ10)
SHLPLTGGGNKLTF

SEQ ID NO: 504134 - protein, 12 aa, Homo sapiens
  CDR3 for beta chain variable domain of TCR clone 252067 (TRBV7-8, TRBJ2-7)
CASNLGDRAQYF

SEQ ID NO: 504135 - protein, 14 aa, Homo sapiens
  CDR3 for alpha chain variable domain of TCR clone 252068 (TRAV12-2, TRAJ13)
CAVKKTGGYQKVTF

SEQ ID NO: 504136 - protein, 17 aa, Homo sapiens
  CDR3 for beta chain variable domain of TCR clone 252068 (TRBV7-2, TRBJ2-3)
CASSLMKRMRGADTQYF

SEQ ID NO: 504137 - protein, 13 aa, Homo sapiens
  CDR3 for alpha chain variable domain of TCR clone 252069 (TRAV21, TRAJ20)
CAVGLRVDYKLSF

SEQ ID NO: 504138 - protein, 16 aa, Homo sapiens
  CDR3 for beta chain variable domain of TCR clone 252069 (TRBV9, TRBJ2-2)
CASSAMGKRNTGELFF

SEQ ID NO: 504139 - protein, 13 aa, Homo sapiens
  CDR3 for alpha chain variable domain of TCR clone 252070 (TRAV12-3, TRAJ43)
CAMIRPNNNHMRF

SEQ ID NO: 504140 - protein, 12 aa, Homo sapiens
  CDR3 for beta chain variable domain of TCR clone 252070 (TRBV11-2, TRBJ2-5)
CASSLGQETQYF

SEQ ID NO: 504141 - protein, 14 aa, Homo sapiens
  CDR3 for alpha chain variable domain of TCR clone 252071 (TRAV8-2, TRAJ4)
CVVSPSGGYNRLIF

SEQ ID NO: 504142 - protein, 14 aa, Homo sapiens
  CDR3 for beta chain variable domain of TCR clone 252071 (TRBV19, TRBJ2-5)
CASSSSGIQETQYF

SEQ ID NO: 504143 - protein, 16 aa, Homo sapiens
  CDR3 for alpha chain variable domain of TCR clone 252072 (TRAV30, TRAJ24)
CGTEIVDADSWGKLQF

SEQ ID NO: 504144 - protein, 13 aa, Homo sapiens
  CDR3 for beta chain variable domain of TCR clone 252072 (TRBV10-3, TRBJ2-7)
CASKLAVNYEQYF

SEQ ID NO: 504145 - protein, 14 aa, Homo sapiens
  CDR3 for alpha chain variable domain of TCR clone 252073 (TRAV1-2, TRAJ16)
CAVNRFSDGQKLLF

SEQ ID NO: 504146 - protein, 14 aa, Homo sapiens
  CDR3 for beta chain variable domain of TCR clone 252073 (TRBV11-2, TRBJ2-7)
CDSSLGAGAYEQYF

SEQ ID NO: 504147 - protein, 15 aa, Homo sapiens
  CDR3 for alpha chain variable domain of TCR clone 252074 (TRAV3, TRAJ7)
CAVRDNDNGNNRLAF

SEQ ID NO: 504148 - protein, 19 aa, Homo sapiens
  CDR3 for beta chain variable domain of TCR clone 252074 (TRBV5-8, TRBJ2-3)
CASSFLGTSGSHRTDTQYF

SEQ ID NO: 504149 - protein, 11 aa, Homo sapiens
  CDR3 for alpha chain variable domain of TCR clone 252075 (TRAV12-3, TRAJ41)
CAMNARGALNF

SEQ ID NO: 504150 - protein, 16 aa, Homo sapiens
  CDR3 for beta chain variable domain of TCR clone 252075 (TRBV7-8, TRBJ2-3)
CASSTEGQRETDTQYF

SEQ ID NO: 504151 - protein, 16 aa, Homo sapiens
  CDR3 for alpha chain variable domain of TCR clone 252076 (TRAV21, TRAJ52)
CAVNNAGGTSYGKLTF

SEQ ID NO: 504152 - protein, 13 aa, Homo sapiens
  CDR3 for beta chain variable domain of TCR clone 252076 (TRBV7-9, TRBJ2-1)
CASSLDVGNEQFF

SEQ ID NO: 504153 - protein, 14 aa, Homo sapiens
  CDR3 for alpha chain variable domain of TCR clone 252077 (TRAV12-2, TRAJ52)
CRCAGGTSYGNLTF

SEQ ID NO: 504154 - protein, 13 aa, Homo sapiens
  CDR3 for beta chain variable domain of TCR clone 252077 (TRBV11-2, TRBJ2-1)
CASSLRLTHEQFF

SEQ ID NO: 504155 - protein, 13 aa, Homo sapiens
  CDR3 for alpha chain variable domain of TCR clone 252078 (TRAV13-1, TRAJ33)
CAASRAGNYQLIW

SEQ ID NO: 504156 - protein, 12 aa, Homo sapiens
  CDR3 for beta chain variable domain of TCR clone 252078 (TRBV11-2, TRBJ1-2)
CASSREGDGYPF

SEQ ID NO: 504157 - protein, 13 aa, Homo sapiens
  CDR3 for alpha chain variable domain of TCR clone 252079 (TRAV21, TRAJ27)
CAARPGNAGKSSC

SEQ ID NO: 504158 - protein, 14 aa, Homo sapiens
  CDR3 for beta chain variable domain of TCR clone 252079 (TRBV7-6, TRBJ2-3)
CASSLGTVTDTQYF

SEQ ID NO: 504159 - protein, 18 aa, Homo sapiens
  CDR3 for alpha chain variable domain of TCR clone 252080 (TRAV13-1, TRAJ52)
CAAKNPNAGGTSYGKLTF

SEQ ID NO: 504160 - protein, 13 aa, Homo sapiens
  CDR3 for beta chain variable domain of TCR clone 252080 (TRBV19, TRBJ2-7)
CASRKAGGSEQYF

SEQ ID NO: 504161 - protein, 12 aa, Homo sapiens
  CDR3 for alpha chain variable domain of TCR clone 252081 (TRAV20, TRAJ56)
CAVTGANSKLTF

SEQ ID NO: 504162 - protein, 18 aa, Homo sapiens
  CDR3 for beta chain variable domain of TCR clone 252081 (TRBV12-4, TRBJ2-2)
CASSLVAGTRGRTGELFF

SEQ ID NO: 504163 - protein, 12 aa, Homo sapiens
  CDR3 for alpha chain variable domain of TCR clone 252082 (TRAV8-3, TRAJ34)
CAVLTNTDKLIF

SEQ ID NO: 504164 - protein, 14 aa, Homo sapiens
  CDR3 for beta chain variable domain of TCR clone 252082 (TRBV7-2, TRBJ2-7)
CRSLGIGNDYEQYF

SEQ ID NO: 504165 - protein, 14 aa, Homo sapiens
  CDR3 for alpha chain variable domain of TCR clone 252083 (TRAV9-2, TRAJ39)
CALYIYNAGNMLTF

SEQ ID NO: 504166 - protein, 14 aa, Homo sapiens
  CDR3 for beta chain variable domain of TCR clone 252083 (TRBV7-9, TRBJ1-1)
CASSWGQGDTEAFF

SEQ ID NO: 504167 - protein, 11 aa, Homo sapiens
  CDR3 for alpha chain variable domain of TCR clone 252084 (TRAV2, TRAJ23)
CAVETRGKLIF

SEQ ID NO: 504168 - protein, 15 aa, Homo sapiens
  CDR3 for beta chain variable domain of TCR clone 252084 (TRBV4-1, TRBJ1-4)
CASSDTGGTNEKLFF

SEQ ID NO: 504169 - protein, 11 aa, Homo sapiens
  CDR3 for alpha chain variable domain of TCR clone 252085 (TRAV12-1, TRAJ20)
CVVSNDYKLSF

SEQ ID NO: 504170 - protein, 14 aa, Homo sapiens
  CDR3 for beta chain variable domain of TCR clone 252085 (TRBV19, TRBJ2-2)
CASSGQGIAGELFF

SEQ ID NO: 504171 - protein, 13 aa, Homo sapiens
  CDR3 for alpha chain variable domain of TCR clone 252086 (TRAV3, TRAJ21)
CAVREPDFNKFYF

SEQ ID NO: 504172 - protein, 12 aa, Homo sapiens
  CDR3 for beta chain variable domain of TCR clone 252086 (TRBV11-2, TRBJ2-2)
CASSLGAGELFF

SEQ ID NO: 504173 - protein, 14 aa, Homo sapiens
  CDR3 for alpha chain variable domain of TCR clone 252087 (TRAV12-2, TRAJ6)
CASKWGGGSYIPTF

SEQ ID NO: 504174 - protein, 11 aa, Homo sapiens
  CDR3 for beta chain variable domain of TCR clone 252087 (TRBV27, TRBJ2-2)
CASPPRLAKHR

SEQ ID NO: 504175 - protein, 14 aa, Homo sapiens
  CDR3 for alpha chain variable domain of TCR clone 252088 (TRAV27, TRAJ22)
CAGLPSGSARQLTF

SEQ ID NO: 504176 - protein, 12 aa, Homo sapiens
  CDR3 for beta chain variable domain of TCR clone 252088 (TRBV6-5, TRBJ2-2)
CASSLATGELFF

SEQ ID NO: 504177 - protein, 13 aa, Homo sapiens
  CDR3 for alpha chain variable domain of TCR clone 252089 (TRAV13-2, TRAJ48)
CAEMDFGNEKLTF

SEQ ID NO: 504178 - protein, 14 aa, Homo sapiens
  CDR3 for beta chain variable domain of TCR clone 252089 (TRBV20-1, TRBJ2-7)
CGAKDRKGAYEQYF

SEQ ID NO: 504179 - protein, 12 aa, Homo sapiens
  CDR3 for alpha chain variable domain of TCR clone 252090 (TRAV1-2, TRAJ33)
CAALDSNYQLIW

SEQ ID NO: 504180 - protein, 15 aa, Homo sapiens
  CDR3 for beta chain variable domain of TCR clone 252090 (TRBV2, TRBJ2-7)
CASSEGLARSYEQYF

SEQ ID NO: 504181 - protein, 12 aa, Homo sapiens
  CDR3 for alpha chain variable domain of TCR clone 252091 (TRAV12-2, TRAJ10)
LGVTGGGNKLTF

SEQ ID NO: 504182 - protein, 14 aa, Homo sapiens
  CDR3 for beta chain variable domain of TCR clone 252091 (TRBV27, TRBJ2-7)
CASATGTERREQYF

SEQ ID NO: 504183 - protein, 15 aa, Homo sapiens
  CDR3 for alpha chain variable domain of TCR clone 252092 (TRAV27, TRAJ38)
CAGMLNAGNNRKLIW

SEQ ID NO: 504184 - protein, 12 aa, Homo sapiens
  CDR3 for beta chain variable domain of TCR clone 252092 (TRBV12-4, TRBJ1-3)
CASSFSGNTIYF

SEQ ID NO: 504185 - protein, 15 aa, Homo sapiens
  CDR3 for alpha chain variable domain of TCR clone 252093 (TRAV21, TRAJ53)
CATLNSGGSHYKLTF

SEQ ID NO: 504186 - protein, 16 aa, Homo sapiens
  CDR3 for beta chain variable domain of TCR clone 252093 (TRBV29-1, TRBJ1-2)
CSVEANRDIANYGYTF

SEQ ID NO: 504187 - protein, 15 aa, Homo sapiens
  CDR3 for alpha chain variable domain of TCR clone 252094 (TRAV8-3, TRAJ45)
CASSYSGGGADGLTF

SEQ ID NO: 504188 - protein, 14 aa, Homo sapiens
  CDR3 for beta chain variable domain of TCR clone 252094 (TRBV7-9, TRBJ1-2)
CASSRQGANYGYTF

SEQ ID NO: 504189 - protein, 14 aa, Homo sapiens
  CDR3 for alpha chain variable domain of TCR clone 252095 (TRAV1-2, TRAJ16)
CAVNRFSDGQKLLF

SEQ ID NO: 504190 - protein, 13 aa, Homo sapiens
  CDR3 for beta chain variable domain of TCR clone 252095 (TRBV19, TRBJ2-2)
CASQEGIHGELFF

SEQ ID NO: 504191 - protein, 12 aa, Homo sapiens
  CDR3 for alpha chain variable domain of TCR clone 252096 (TRAV27, TRAJ9)
CAGESGGFKTIF

SEQ ID NO: 504192 - protein, 17 aa, Homo sapiens
  CDR3 for beta chain variable domain of TCR clone 252096 (TRBV5-5, TRBJ1-2)
CASSLGSLDGQSEGYTF

SEQ ID NO: 504193 - protein, 20 aa, Homo sapiens
  CDR3 for alpha chain variable domain of TCR clone 252097 (TRAV12-3, TRAJ41)
SLFIRDSQPSDSATPEALNF

SEQ ID NO: 504194 - protein, 14 aa, Homo sapiens
  CDR3 for beta chain variable domain of TCR clone 252097 (TRBV19, TRBJ2-7)
CASTVQGRPYEQYF

SEQ ID NO: 504195 - protein, 12 aa, Homo sapiens
  CDR3 for alpha chain variable domain of TCR clone 252098 (TRAV12-3, TRAJ29)
CAAREGNTPLVF

SEQ ID NO: 504196 - protein, 17 aa, Homo sapiens
  CDR3 for beta chain variable domain of TCR clone 252098 (TRBV18, TRBJ2-1)
CASSQLAAGAGDNEQFF

SEQ ID NO: 504197 - protein, 15 aa, Homo sapiens
  CDR3 for alpha chain variable domain of TCR clone 252099 (TRAV3, TRAJ23)
CAVRDRGNQGGKLIF

SEQ ID NO: 504198 - protein, 15 aa, Homo sapiens
  CDR3 for beta chain variable domain of TCR clone 252099 (TRBV7-3, TRBJ2-1)
CQQLAPSGSYNEQFF

SEQ ID NO: 504199 - protein, 14 aa, Homo sapiens
  CDR3 for alpha chain variable domain of TCR clone 252100 (TRAV1-2, TRAJ8)
CAVREDTGFQKLVF

SEQ ID NO: 504200 - protein, 16 aa, Homo sapiens
  CDR3 for beta chain variable domain of TCR clone 252100 (TRBV19, TRBJ2-3)
CASGTGPNAGTDTQYF

SEQ ID NO: 504201 - protein, 11 aa, Homo sapiens
  CDR3 for alpha chain variable domain of TCR clone 252101 (TRAV1-2, TRAJ40)
RAVPGTYKYIF

SEQ ID NO: 504202 - protein, 15 aa, Homo sapiens
  CDR3 for beta chain variable domain of TCR clone 252101 (TRBV25-1, TRBJ1-4)
CTSSPGDSTNEKLFF

SEQ ID NO: 504203 - protein, 15 aa, Homo sapiens
  CDR3 for alpha chain variable domain of TCR clone 252102 (TRAV12-3, TRAJ6)
CAMSATSGGSYIPTF

SEQ ID NO: 504204 - protein, 14 aa, Homo sapiens
  CDR3 for beta chain variable domain of TCR clone 252102 (TRBV7-3, TRBJ1-1)
CASSLKGGNTEAFF

SEQ ID NO: 504205 - protein, 15 aa, Homo sapiens
  CDR3 for alpha chain variable domain of TCR clone 252103 (TRAV34, TRAJ38)
CGADFTPGNNRKLIW

SEQ ID NO: 504206 - protein, 15 aa, Homo sapiens
  CDR3 for beta chain variable domain of TCR clone 252103 (TRBV6-1, TRBJ2-4)
CASSEAVWTINIQYF

SEQ ID NO: 504207 - protein, 13 aa, Homo sapiens
  CDR3 for alpha chain variable domain of TCR clone 252104 (TRAV2, TRAJ20)
CAVEDPSEYKLSF

SEQ ID NO: 504208 - protein, 16 aa, Homo sapiens
  CDR3 for beta chain variable domain of TCR clone 252104 (TRBV25-1, TRBJ2-7)
CASSELTGWGIYEQYF

SEQ ID NO: 504209 - protein, 15 aa, Homo sapiens
  CDR3 for alpha chain variable domain of TCR clone 252105 (TRAV1-2, TRAJ16)
CAVRARFSDGQKLLF

SEQ ID NO: 504210 - protein, 17 aa, Homo sapiens
  CDR3 for beta chain variable domain of TCR clone 252105 (TRBV11-3, TRBJ2-3)
CASSLMKRMRGADTQYF

SEQ ID NO: 504211 - protein, 12 aa, Homo sapiens
  CDR3 for alpha chain variable domain of TCR clone 252106 (TRAV13-1, TRAJ21)
CAAKEGFNRFYF

SEQ ID NO: 504212 - protein, 14 aa, Homo sapiens
  CDR3 for beta chain variable domain of TCR clone 252106 (TRBV25-1, TRBJ1-4)
CQQSRGQHYEKLFF

SEQ ID NO: 504213 - protein, 15 aa, Homo sapiens
  CDR3 for alpha chain variable domain of TCR clone 252107 (TRAV8-3, TRAJ7)
CAVGSISYGNNRLAF

SEQ ID NO: 504214 - protein, 12 aa, Homo sapiens
  CDR3 for beta chain variable domain of TCR clone 252107 (TRBV7-9, TRBJ1-5)
CASSPQGQPQHF

SEQ ID NO: 504215 - protein, 11 aa, Homo sapiens
  CDR3 for alpha chain variable domain of TCR clone 252108 (TRAV17, TRAJ43)
CATSRSNDMPF

SEQ ID NO: 504216 - protein, 15 aa, Homo sapiens
  CDR3 for beta chain variable domain of TCR clone 252108 (TRBV11-2, TRBJ2-1)
CASSLGTSGLNEQFF

SEQ ID NO: 504217 - protein, 11 aa, Homo sapiens
  CDR3 for alpha chain variable domain of TCR clone 252109 (TRAV1-1, TRAJ23)
CAVRQGGKLIF

SEQ ID NO: 504218 - protein, 15 aa, Homo sapiens
  CDR3 for beta chain variable domain of TCR clone 252109 (TRBV5-1, TRBJ2-7)
CASSLNGGPAREQYF

SEQ ID NO: 504219 - protein, 16 aa, Homo sapiens
  CDR3 for alpha chain variable domain of TCR clone 252110 (TRAV12-3, TRAJ53)
CAMSPGSGSSNYTLTF

SEQ ID NO: 504220 - protein, 16 aa, Homo sapiens
  CDR3 for beta chain variable domain of TCR clone 252110 (TRBV19, TRBJ2-1)
CASSKAGPSSYNEQFF

SEQ ID NO: 504221 - protein, 12 aa, Homo sapiens
  CDR3 for alpha chain variable domain of TCR clone 252111 (TRAV12-2, TRAJ21)
CAPSDNFNKFYF

SEQ ID NO: 504222 - protein, 13 aa, Homo sapiens
  CDR3 for beta chain variable domain of TCR clone 252111 (TRBV7-3, TRBJ1-1)
CASSQDWGAEAFL

SEQ ID NO: 504223 - protein, 15 aa, Homo sapiens
  CDR3 for alpha chain variable domain of TCR clone 252112 (TRAV21, TRAJ40)
CAVRPQTSGTYKYIF

SEQ ID NO: 504224 - protein, 11 aa, Homo sapiens
  CDR3 for beta chain variable domain of TCR clone 252112 (TRBV12-4, TRBJ2-3)
CASTATDTQYF

SEQ ID NO: 504225 - protein, 13 aa, Homo sapiens
  CDR3 for alpha chain variable domain of TCR clone 252113 (TRAV8-3, TRAJ28)
CAVGGLGVTNSLS

SEQ ID NO: 504226 - protein, 15 aa, Homo sapiens
  CDR3 for beta chain variable domain of TCR clone 252113 (TRBV7-9, TRBJ1-5)
CASSQGHQPNQPQHF

SEQ ID NO: 504227 - protein, 12 aa, Homo sapiens
  CDR3 for alpha chain variable domain of TCR clone 252114 (TRAV8-3, TRAJ34)
WASGYNTDKRIF

SEQ ID NO: 504228 - protein, 13 aa, Homo sapiens
  CDR3 for beta chain variable domain of TCR clone 252114 (TRBV6-4, TRBJ2-3)
CASSVSWADTQYF

SEQ ID NO: 504229 - protein, 16 aa, Homo sapiens
  CDR3 for alpha chain variable domain of TCR clone 252115 (TRAV21, TRAJ37)
CAVRPRGSSNTGKLIF

SEQ ID NO: 504230 - protein, 15 aa, Homo sapiens
  CDR3 for beta chain variable domain of TCR clone 252115 (TRBV19, TRBJ2-4)
CASRGPRRGENIQYF

SEQ ID NO: 504231 - protein, 18 aa, Homo sapiens
  CDR3 for alpha chain variable domain of TCR clone 252116 (TRAV12-2, )
CAVEDIQNPDPAVSQLRD

SEQ ID NO: 504232 - protein, 16 aa, Homo sapiens
  CDR3 for beta chain variable domain of TCR clone 252116 (TRBV6-1, TRBJ1-2)
CASSGAWQGRSHGYTF

SEQ ID NO: 504233 - protein, 14 aa, Homo sapiens
  CDR3 for alpha chain variable domain of TCR clone 252117 (TRAV13-1, TRAJ35)
CAASKGGFGNVLHC

SEQ ID NO: 504234 - protein, 13 aa, Homo sapiens
  CDR3 for beta chain variable domain of TCR clone 252117 (TRBV7-3, TRBJ1-1)
CSSSQDWGAEAFF

SEQ ID NO: 504235 - protein, 16 aa, Homo sapiens
  CDR3 for alpha chain variable domain of TCR clone 252118 (TRAV26-1, TRAJ23)
CIVRVHPYNPGGKLIF

SEQ ID NO: 504236 - protein, 13 aa, Homo sapiens
  CDR3 for beta chain variable domain of TCR clone 252118 (TRBV20-1, TRBJ2-5)
CSARGDYQETQYF

SEQ ID NO: 504237 - protein, 15 aa, Homo sapiens
  CDR3 for alpha chain variable domain of TCR clone 252119 (TRAV8-3, TRAJ45)
CASSYSGGCADGLTL

SEQ ID NO: 504238 - protein, 13 aa, Homo sapiens
  CDR3 for beta chain variable domain of TCR clone 252119 (TRBV10-3, TRBJ2-7)
CASKPAVNYEQYF

SEQ ID NO: 504239 - protein, 14 aa, Homo sapiens
  CDR3 for alpha chain variable domain of TCR clone 252120 (TRAV12-3, TRAJ29)
CAMILLSGNKPLAF

SEQ ID NO: 504240 - protein, 16 aa, Homo sapiens
  CDR3 for beta chain variable domain of TCR clone 252120 (TRBV28, TRBJ2-7)
CASSSGTSGRGYEQYF

SEQ ID NO: 504241 - protein, 16 aa, Homo sapiens
  CDR3 for alpha chain variable domain of TCR clone 252121 (TRAV30, TRAJ24)
CGTEIVDSDSWGKFQF

SEQ ID NO: 504242 - protein, 19 aa, Homo sapiens
  CDR3 for beta chain variable domain of TCR clone 252121 (TRBV25-1, TRBJ2-2)
WAILVYRVDRGRKTGELFF

SEQ ID NO: 504243 - protein, 13 aa, Homo sapiens
  CDR3 for alpha chain variable domain of TCR clone 252122 (TRAV13-1, TRAJ10)
CAATAGGGNKLTF

SEQ ID NO: 504244 - protein, 14 aa, Homo sapiens
  CDR3 for beta chain variable domain of TCR clone 252122 (TRBV7-2, TRBJ2-7)
CASSPKTSFYEQYF

SEQ ID NO: 504245 - protein, 13 aa, Homo sapiens
  CDR3 for alpha chain variable domain of TCR clone 252123 (TRAV1-2, TRAJ11)
CAVRREGYSTLTF

SEQ ID NO: 504246 - protein, 15 aa, Homo sapiens
  CDR3 for beta chain variable domain of TCR clone 252123 (TRBV13, TRBJ2-3)
CASSLSGGRTDTQYF

SEQ ID NO: 504247 - protein, 13 aa, Homo sapiens
  CDR3 for alpha chain variable domain of TCR clone 252124 (TRAV12-2, TRAJ39)
CAVNNNAGNMLTF

SEQ ID NO: 504248 - protein, 16 aa, Homo sapiens
  CDR3 for beta chain variable domain of TCR clone 252124 (TRBV6-1, TRBJ1-2)
CASSGAWQGRSHGYTF

SEQ ID NO: 504249 - protein, 23 aa, Homo sapiens
  CDR3 for alpha chain variable domain of TCR clone 252125 (TRAV26-1, TRAJ38)
CIADNAGNNHIQNPDPAAYQLRD

SEQ ID NO: 504250 - protein, 12 aa, Homo sapiens
  CDR3 for beta chain variable domain of TCR clone 252125 (TRBV20-1, TRBJ1-1)
QCWGGGNTEAFF

SEQ ID NO: 504251 - protein, 11 aa, Homo sapiens
  CDR3 for alpha chain variable domain of TCR clone 252126 (TRAV1-1, TRAJ23)
CAVRQGGKLIF

SEQ ID NO: 504252 - protein, 13 aa, Homo sapiens
  CDR3 for beta chain variable domain of TCR clone 252126 (TRBV7-8, TRBJ2-1)
CASTRDAVDEQFF

SEQ ID NO: 504253 - protein, 10 aa, Homo sapiens
  CDR3 for alpha chain variable domain of TCR clone 252127 (TRAV1-2, TRAJ23)
CAGQGGKLIF

SEQ ID NO: 504254 - protein, 16 aa, Homo sapiens
  CDR3 for beta chain variable domain of TCR clone 252127 (TRBV11-2, TRBJ1-1)
CSSSLRQGGEHSKAFF

SEQ ID NO: 504255 - protein, 16 aa, Homo sapiens
  CDR3 for alpha chain variable domain of TCR clone 252128 (TRAV30, TRAJ24)
CGTEIVDAASWGKFQF

SEQ ID NO: 504256 - protein, 12 aa, Homo sapiens
  CDR3 for beta chain variable domain of TCR clone 252128 (TRBV7-9, TRBJ2-7)
CASSIEGYEHYF

SEQ ID NO: 504257 - protein, 14 aa, Homo sapiens
  CDR3 for alpha chain variable domain of TCR clone 252129 (TRAV17, TRAJ56)
CATVPAGATSKPTF

SEQ ID NO: 504258 - protein, 13 aa, Homo sapiens
  CDR3 for beta chain variable domain of TCR clone 252129 (TRBV12-4, TRBJ2-2)
CASSITGSGELFF

SEQ ID NO: 504259 - protein, 13 aa, Homo sapiens
  CDR3 for alpha chain variable domain of TCR clone 252130 (TRAV8-1, TRAJ39)
CAVVNNAGNMLTF

SEQ ID NO: 504260 - protein, 15 aa, Homo sapiens
  CDR3 for beta chain variable domain of TCR clone 252130 (TRBV7-2, TRBJ2-1)
CASSLNRGAYNEQFF

SEQ ID NO: 504261 - protein, 14 aa, Homo sapiens
  CDR3 for alpha chain variable domain of TCR clone 252131 (TRAV12-2, TRAJ33)
CAVKRARSNYQLIW

SEQ ID NO: 504262 - protein, 20 aa, Homo sapiens
  CDR3 for beta chain variable domain of TCR clone 252131 (TRBV7-9, TRBJ2-1)
CASSSPRAPRTRSSYNEQFF

SEQ ID NO: 504263 - protein, 18 aa, Homo sapiens
  CDR3 for alpha chain variable domain of TCR clone 252132 (TRAV12-2, )
CAVEDIQNPDPAVYQLRD

SEQ ID NO: 504264 - protein, 15 aa, Homo sapiens
  CDR3 for beta chain variable domain of TCR clone 252132 (TRBV7-3, TRBJ2-1)
CQQLQTSGRYNEQFF

SEQ ID NO: 504265 - protein, 12 aa, Homo sapiens
  CDR3 for alpha chain variable domain of TCR clone 252133 (TRAV1-2, TRAJ24)
CAVGGSWGTFQF

SEQ ID NO: 504266 - protein, 15 aa, Homo sapiens
  CDR3 for beta chain variable domain of TCR clone 252133 (TRBV6-1, TRBJ2-7)
CASSEGVGNPYEQYF

SEQ ID NO: 504267 - protein, 17 aa, Homo sapiens
  CDR3 for alpha chain variable domain of TCR clone 252134 (TRAV3, TRAJ6)
CAVRDGPRAGGSYIPTF

SEQ ID NO: 504268 - protein, 15 aa, Homo sapiens
  CDR3 for beta chain variable domain of TCR clone 252134 (TRBV4-3, TRBJ2-7)
CASSQGDWGDYEQYF

SEQ ID NO: 504269 - protein, 15 aa, Homo sapiens
  CDR3 for alpha chain variable domain of TCR clone 252135 (TRAV21, TRAJ53)
CATLNSGGSNYKLTF

SEQ ID NO: 504270 - protein, 13 aa, Homo sapiens
  CDR3 for beta chain variable domain of TCR clone 252135 (TRBV7-9, TRBJ2-3)
CASSRGSTDTQYF

SEQ ID NO: 504271 - protein, 13 aa, Homo sapiens
  CDR3 for alpha chain variable domain of TCR clone 252136 (TRAV8-4, TRAJ30)
CATYENRDDKIIF

SEQ ID NO: 504272 - protein, 15 aa, Homo sapiens
  CDR3 for beta chain variable domain of TCR clone 252136 (TRBV4-1, TRBJ2-7)
CASSQQGQGFDEQYF

SEQ ID NO: 504273 - protein, 12 aa, Homo sapiens
  CDR3 for alpha chain variable domain of TCR clone 252137 (TRAV3, TRAJ31)
CAVRDGNARLMF

SEQ ID NO: 504274 - protein, 15 aa, Homo sapiens
  CDR3 for beta chain variable domain of TCR clone 252137 (TRBV5-1, TRBJ2-3)
CASSYTSGSTDTQYF

SEQ ID NO: 504275 - protein, 13 aa, Homo sapiens
  CDR3 for alpha chain variable domain of TCR clone 252138 (TRAV27, TRAJ58)
CAGAETSGSRLPF

SEQ ID NO: 504276 - protein, 13 aa, Homo sapiens
  CDR3 for beta chain variable domain of TCR clone 252138 (TRBV7-2, TRBJ2-1)
CASNRDRWNEQFF

SEQ ID NO: 504277 - protein, 17 aa, Homo sapiens
  CDR3 for alpha chain variable domain of TCR clone 252139 (TRAV8-3, TRAJ42)
CCVAGMNYGGSQGNLIF

SEQ ID NO: 504278 - protein, 11 aa, Homo sapiens
  CDR3 for beta chain variable domain of TCR clone 252139 (TRBV7-2, TRBJ2-3)
CASSSSDTQYF

SEQ ID NO: 504279 - protein, 12 aa, Homo sapiens
  CDR3 for alpha chain variable domain of TCR clone 252140 (TRAV38-1, TRAJ43)
CSFMTRLADMRF

SEQ ID NO: 504280 - protein, 14 aa, Homo sapiens
  CDR3 for beta chain variable domain of TCR clone 252140 (TRBV27, TRBJ2-2)
CASSLSVVDGRMFF

SEQ ID NO: 504281 - protein, 13 aa, Homo sapiens
  CDR3 for alpha chain variable domain of TCR clone 252141 (TRAV16, TRAJ26)
CITVLCLGQNFVF

SEQ ID NO: 504282 - protein, 12 aa, Homo sapiens
  CDR3 for beta chain variable domain of TCR clone 252141 (TRBV11-2, TRBJ2-1)
CASSPGNNEQFV

SEQ ID NO: 504283 - protein, 15 aa, Homo sapiens
  CDR3 for alpha chain variable domain of TCR clone 252142 (TRAV8-3, TRAJ45)
CASSYSGGGADGLTF

SEQ ID NO: 504284 - protein, 17 aa, Homo sapiens
  CDR3 for beta chain variable domain of TCR clone 252142 (TRBV7-8, TRBJ1-2)
CASSLRPQQGHLYGYTF

SEQ ID NO: 504285 - protein, 16 aa, Homo sapiens
  CDR3 for alpha chain variable domain of TCR clone 252143 (TRAV30, TRAJ24)
CGTEIVDADSWGKFQF

SEQ ID NO: 504286 - protein, 14 aa, Homo sapiens
  CDR3 for beta chain variable domain of TCR clone 252143 (TRBV19, TRBJ2-7)
CASSDRAGPYEQYF

SEQ ID NO: 504287 - protein, 13 aa, Homo sapiens
  CDR3 for alpha chain variable domain of TCR clone 252144 (TRAV3, TRAJ30)
CAVRDRGDDKIIF

SEQ ID NO: 504288 - protein, 13 aa, Homo sapiens
  CDR3 for beta chain variable domain of TCR clone 252144 (TRBV20-1, TRBJ2-7)
CSATHTSGYEQYF

SEQ ID NO: 504289 - protein, 12 aa, Homo sapiens
  CDR3 for alpha chain variable domain of TCR clone 252145 (TRAV13-2, TRAJ23)
CAERHRGGKLIF

SEQ ID NO: 504290 - protein, 14 aa, Homo sapiens
  CDR3 for beta chain variable domain of TCR clone 252145 (TRBV20-1, TRBJ2-5)
CSAHRQGLWETQYF

SEQ ID NO: 504291 - protein, 14 aa, Homo sapiens
  CDR3 for alpha chain variable domain of TCR clone 252146 (TRAV35, TRAJ42)
CAGRYGGSQGNLIF

SEQ ID NO: 504292 - protein, 11 aa, Homo sapiens
  CDR3 for beta chain variable domain of TCR clone 252146 (TRBV29-1, TRBJ2-5)
CSEDRTGTQYF

SEQ ID NO: 504293 - protein, 14 aa, Homo sapiens
  CDR3 for alpha chain variable domain of TCR clone 252147 (TRAV12-2, TRAJ53)
CAVKGGGSNYKLTI

SEQ ID NO: 504294 - protein, 14 aa, Homo sapiens
  CDR3 for beta chain variable domain of TCR clone 252147 (TRBV7-7, TRBJ2-2)
CATRQDSDTGELFF

SEQ ID NO: 504295 - protein, 10 aa, Homo sapiens
  CDR3 for alpha chain variable domain of TCR clone 252148 (TRAV30, TRAJ48)
CGIGNEKLTF

SEQ ID NO: 504296 - protein, 13 aa, Homo sapiens
  CDR3 for beta chain variable domain of TCR clone 252148 (TRBV19, TRBJ1-2)
CASSVPGQDGYTF

SEQ ID NO: 504297 - protein, 16 aa, Homo sapiens
  CDR3 for alpha chain variable domain of TCR clone 252149 (TRAV16, TRAJ4)
CALSRMFSGGYNKLIF

SEQ ID NO: 504298 - protein, 12 aa, Homo sapiens
  CDR3 for beta chain variable domain of TCR clone 252149 (TRBV19, TRBJ2-1)
CASSRQGAEQFF

SEQ ID NO: 504299 - protein, 14 aa, Homo sapiens
  CDR3 for alpha chain variable domain of TCR clone 252150 (TRAV17, TRAJ39)
CATDPVRSGNMLTF

SEQ ID NO: 504300 - protein, 15 aa, Homo sapiens
  CDR3 for beta chain variable domain of TCR clone 252150 (TRBV13, TRBJ1-5)
CASSFGQGGVQPQHF

SEQ ID NO: 504301 - protein, 15 aa, Homo sapiens
  CDR3 for alpha chain variable domain of TCR clone 252151 (TRAV12-2, TRAJ32)
CAVNHYVGATNKLIF

SEQ ID NO: 504302 - protein, 14 aa, Homo sapiens
  CDR3 for beta chain variable domain of TCR clone 252151 (TRBV27, TRBJ2-1)
CASSFGREANEQFF

SEQ ID NO: 504303 - protein, 13 aa, Homo sapiens
  CDR3 for alpha chain variable domain of TCR clone 252152 (TRAV3, TRAJ20)
CAVRDTGDYKLSF

SEQ ID NO: 504304 - protein, 15 aa, Homo sapiens
  CDR3 for beta chain variable domain of TCR clone 252152 (TRBV6-3, TRBJ2-7)
CASSSPGTVFYEQYF

SEQ ID NO: 504305 - protein, 14 aa, Homo sapiens
  CDR3 for alpha chain variable domain of TCR clone 252153 (TRAV8-3, TRAJ22)
FAVKPPGSARQLTF

SEQ ID NO: 504306 - protein, 14 aa, Homo sapiens
  CDR3 for beta chain variable domain of TCR clone 252153 (TRBV12-4, TRBJ2-2)
CASSLSQDTGELFF

SEQ ID NO: 504307 - protein, 18 aa, Homo sapiens
  CDR3 for alpha chain variable domain of TCR clone 252154 (TRAV1-1, TRAJ42)
CALSPSAFYGGSQGNLIF

SEQ ID NO: 504308 - protein, 14 aa, Homo sapiens
  CDR3 for beta chain variable domain of TCR clone 252154 (TRBV6-3, TRBJ2-7)
CASSYSTGGDEQYF

SEQ ID NO: 504309 - protein, 12 aa, Homo sapiens
  CDR3 for alpha chain variable domain of TCR clone 252155 (TRAV2, TRAJ26)
CAGSPGRLWSEF

SEQ ID NO: 504310 - protein, 15 aa, Homo sapiens
  CDR3 for beta chain variable domain of TCR clone 252155 (TRBV7-2, TRBJ2-1)
CASSSGLAGGNEQFF

SEQ ID NO: 504311 - protein, 13 aa, Homo sapiens
  CDR3 for alpha chain variable domain of TCR clone 252156 (TRAV27, TRAJ41)
CAGEGNSGYALNF

SEQ ID NO: 504312 - protein, 15 aa, Homo sapiens
  CDR3 for beta chain variable domain of TCR clone 252156 (TRBV9, TRBJ2-7)
CASSVAEYTSSTSGR

SEQ ID NO: 504313 - protein, 13 aa, Homo sapiens
  CDR3 for alpha chain variable domain of TCR clone 252157 (TRAV12-1, TRAJ37)
CVVNAGNTGKLIF

SEQ ID NO: 504314 - protein, 14 aa, Homo sapiens
  CDR3 for beta chain variable domain of TCR clone 252157 (TRBV7-2, TRBJ2-3)
RASRRGLAADTQYF

SEQ ID NO: 504315 - protein, 16 aa, Homo sapiens
  CDR3 for alpha chain variable domain of TCR clone 252158 (TRAV3, TRAJ21)
CAVRDIERGNFNKCYF

SEQ ID NO: 504316 - protein, 11 aa, Homo sapiens
  CDR3 for beta chain variable domain of TCR clone 252158 (TRBV4-1, TRBJ2-2)
CASSQASPPGL

SEQ ID NO: 504317 - protein, 13 aa, Homo sapiens
  CDR3 for alpha chain variable domain of TCR clone 252159 (TRAV36/DV7, TRAJ37)
CAVFSSNTGKLIF

SEQ ID NO: 504318 - protein, 12 aa, Homo sapiens
  CDR3 for beta chain variable domain of TCR clone 252159 (TRBV11-2, TRBJ2-2)
CASSLGGGELFC

SEQ ID NO: 504319 - protein, 21 aa, Homo sapiens
  CDR3 for alpha chain variable domain of TCR clone 252160 (TRAV27, TRAJ38)
CAARRNAGNNHIQNPDPAVYQ

SEQ ID NO: 504320 - protein, 15 aa, Homo sapiens
  CDR3 for beta chain variable domain of TCR clone 252160 (TRBV12-4, TRBJ2-3)
CASSLAERPTDTQYF

SEQ ID NO: 504321 - protein, 15 aa, Homo sapiens
  CDR3 for alpha chain variable domain of TCR clone 252161 (TRAV26-1, TRAJ29)
CIVRVEGSGNTPLVF

SEQ ID NO: 504322 - protein, 15 aa, Homo sapiens
  CDR3 for beta chain variable domain of TCR clone 252161 (TRBV7-9, TRBJ1-5)
CASSHGHQPNQPHHF

SEQ ID NO: 504323 - protein, 11 aa, Homo sapiens
  CDR3 for alpha chain variable domain of TCR clone 252162 (TRAV23/DV6, TRAJ48)
CAPRWGEKLTF

SEQ ID NO: 504324 - protein, 13 aa, Homo sapiens
  CDR3 for beta chain variable domain of TCR clone 252162 (TRBV29-1, TRBJ1-3)
CSVATGSLETPYI

SEQ ID NO: 504325 - protein, 14 aa, Homo sapiens
  CDR3 for alpha chain variable domain of TCR clone 252163 (TRAV1-2, TRAJ16)
CAVNRFSDGQKLLF

SEQ ID NO: 504326 - protein, 12 aa, Homo sapiens
  CDR3 for beta chain variable domain of TCR clone 252163 (TRBV11-2, TRBJ2-1)
CASSPGKNEQFF

SEQ ID NO: 504327 - protein, 10 aa, Homo sapiens
  CDR3 for alpha chain variable domain of TCR clone 252164 (TRAV12-3, TRAJ34)
CAMSADELIF

SEQ ID NO: 504328 - protein, 15 aa, Homo sapiens
  CDR3 for beta chain variable domain of TCR clone 252164 (TRBV27, TRBJ2-1)
CASSNGGGSSNEQFF

SEQ ID NO: 504329 - protein, 12 aa, Homo sapiens
  CDR3 for alpha chain variable domain of TCR clone 252165 (TRAV22, TRAJ22)
CAPGGSARQLTF

SEQ ID NO: 504330 - protein, 13 aa, Homo sapiens
  CDR3 for beta chain variable domain of TCR clone 252165 (TRBV15, TRBJ1-6)
CATSGGRNSPLHF

SEQ ID NO: 504331 - protein, 13 aa, Homo sapiens
  CDR3 for alpha chain variable domain of TCR clone 252166 (TRAV8-3, TRAJ47)
CAVSMEYGNKLVF

SEQ ID NO: 504332 - protein, 15 aa, Homo sapiens
  CDR3 for beta chain variable domain of TCR clone 252166 (TRBV20-1, TRBJ2-7)
CSARDRVSGMDEQYF

SEQ ID NO: 504333 - protein, 16 aa, Homo sapiens
  CDR3 for alpha chain variable domain of TCR clone 252167 (TRAV30, TRAJ24)
CGTEIVDADSWGKFKV

SEQ ID NO: 504334 - protein, 17 aa, Homo sapiens
  CDR3 for beta chain variable domain of TCR clone 252167 (TRBV20-1, TRBJ2-2)
CSASGSGQGGLTGELFF

SEQ ID NO: 504335 - protein, 13 aa, Homo sapiens
  CDR3 for alpha chain variable domain of TCR clone 252168 (TRAV21, TRAJ20)
CAVSRLGDYKLSF

SEQ ID NO: 504336 - protein, 13 aa, Homo sapiens
  CDR3 for beta chain variable domain of TCR clone 252168 (TRBV7-3, TRBJ1-1)
CASSPAGGLVAFF

SEQ ID NO: 504337 - protein, 14 aa, Homo sapiens
  CDR3 for alpha chain variable domain of TCR clone 252169 (TRAV12-2, TRAJ17)
CAVNIKAAGNKLTF

SEQ ID NO: 504338 - protein, 16 aa, Homo sapiens
  CDR3 for beta chain variable domain of TCR clone 252169 (TRBV20-1, TRBJ2-6)
CSASSQGYDGANFLTF

SEQ ID NO: 504339 - protein, 10 aa, Homo sapiens
  CDR3 for alpha chain variable domain of TCR clone 252170 (TRAV21, TRAJ31)
CAVDNARLMF

SEQ ID NO: 504340 - protein, 15 aa, Homo sapiens
  CDR3 for beta chain variable domain of TCR clone 252170 (TRBV12-4, TRBJ2-5)
CASSPPTGLQETQYF

SEQ ID NO: 504341 - protein, 17 aa, Homo sapiens
  CDR3 for alpha chain variable domain of TCR clone 252171 (TRAV3, TRAJ6)
CAVRDGPRAGGSYIPTF

SEQ ID NO: 504342 - protein, 15 aa, Homo sapiens
  CDR3 for beta chain variable domain of TCR clone 252171 (TRBV6-1, TRBJ2-2)
CASSRLRGDTGELFF

SEQ ID NO: 504343 - protein, 14 aa, Homo sapiens
  CDR3 for alpha chain variable domain of TCR clone 252172 (TRAV13-1, TRAJ3)
CAAEGYSSASKIIF

SEQ ID NO: 504344 - protein, 14 aa, Homo sapiens
  CDR3 for beta chain variable domain of TCR clone 252172 (TRBV19, TRBJ2-5)
CASSSSGIQETQFF

SEQ ID NO: 504345 - protein, 14 aa, Homo sapiens
  CDR3 for alpha chain variable domain of TCR clone 252173 (TRAV1-2, TRAJ16)
CAVNRFSDAQKLLF

SEQ ID NO: 504346 - protein, 13 aa, Homo sapiens
  CDR3 for beta chain variable domain of TCR clone 252173 (TRBV20-1, TRBJ1-1)
CSARLGQGTEAFF

SEQ ID NO: 504347 - protein, 10 aa, Homo sapiens
  CDR3 for alpha chain variable domain of TCR clone 252174 (TRAV13-1, TRAJ7)
LIGGNNRLAF

SEQ ID NO: 504348 - protein, 16 aa, Homo sapiens
  CDR3 for beta chain variable domain of TCR clone 252174 (TRBV4-1, TRBJ1-2)
CASSQDAGQVLYGYNF

SEQ ID NO: 504349 - protein, 13 aa, Homo sapiens
  CDR3 for alpha chain variable domain of TCR clone 252175 (TRAV29/DV5, TRAJ31)
CAASRNNNARLMF

SEQ ID NO: 504350 - protein, 12 aa, Homo sapiens
  CDR3 for beta chain variable domain of TCR clone 252175 (TRBV20-1, TRBJ2-1)
CSAQYTYNEQFF

SEQ ID NO: 504351 - protein, 11 aa, Homo sapiens
  CDR3 for alpha chain variable domain of TCR clone 252176 (TRAV3, TRAJ21)
CAVGNFNKFYF

SEQ ID NO: 504352 - protein, 17 aa, Homo sapiens
  CDR3 for beta chain variable domain of TCR clone 252176 (TRBV25-1, TRBJ2-7)
CQPRQPPRTGVTYEQYF

SEQ ID NO: 504353 - protein, 17 aa, Homo sapiens
  CDR3 for alpha chain variable domain of TCR clone 252177 (TRAV38-1, TRAJ42)
CDVFRARWGGSQGNLIC

SEQ ID NO: 504354 - protein, 17 aa, Homo sapiens
  CDR3 for beta chain variable domain of TCR clone 252177 (TRBV20-1, TRBJ2-1)
CSARDPLAGVWDNEQFF

SEQ ID NO: 504355 - protein, 12 aa, Homo sapiens
  CDR3 for alpha chain variable domain of TCR clone 252178 (TRAV23/DV6, TRAJ54)
CAVVRGAQKLVF

SEQ ID NO: 504356 - protein, 14 aa, Homo sapiens
  CDR3 for beta chain variable domain of TCR clone 252178 (TRBV7-3, TRBJ1-1)
CASSLKGGDTEAVF

SEQ ID NO: 504357 - protein, 13 aa, Homo sapiens
  CDR3 for alpha chain variable domain of TCR clone 252179 (TRAV8-6, TRAJ16)
CAVSRWVGQKLLF

SEQ ID NO: 504358 - protein, 16 aa, Homo sapiens
  CDR3 for beta chain variable domain of TCR clone 252179 (TRBV12-4, TRBJ2-5)
CASSFFVRGRQETQYF

SEQ ID NO: 504359 - protein, 16 aa, Homo sapiens
  CDR3 for alpha chain variable domain of TCR clone 252180 (TRAV3, TRAJ10)
CAVRDTRAGGGNKLTF

SEQ ID NO: 504360 - protein, 13 aa, Homo sapiens
  CDR3 for beta chain variable domain of TCR clone 252180 (TRBV10-3, TRBJ2-7)
CASKLAVNYEQYF

SEQ ID NO: 504361 - protein, 14 aa, Homo sapiens
  CDR3 for alpha chain variable domain of TCR clone 252181 (TRAV16, TRAJ33)
CALSAMDSNFQLIW

SEQ ID NO: 504362 - protein, 16 aa, Homo sapiens
  CDR3 for beta chain variable domain of TCR clone 252181 (TRBV25-1, TRBJ2-7)
CASSELTGGGIYEQYF

SEQ ID NO: 504363 - protein, 16 aa, Homo sapiens
  CDR3 for alpha chain variable domain of TCR clone 252182 (TRAV3, TRAJ28)
CAVLPRSGAGSYQLTF

SEQ ID NO: 504364 - protein, 13 aa, Homo sapiens
  CDR3 for beta chain variable domain of TCR clone 252182 (TRBV12-4, TRBJ2-5)
CASGLAVQETQYF

SEQ ID NO: 504365 - protein, 15 aa, Homo sapiens
  CDR3 for alpha chain variable domain of TCR clone 252183 (TRAV8-3, TRAJ45)
CASSYSEGGADGLAF

SEQ ID NO: 504366 - protein, 17 aa, Homo sapiens
  CDR3 for beta chain variable domain of TCR clone 252183 (TRBV7-8, TRBJ1-2)
CASSLRPLQGHLYGYTF

SEQ ID NO: 504367 - protein, 15 aa, Homo sapiens
  CDR3 for alpha chain variable domain of TCR clone 252184 (TRAV1-2, TRAJ28)
CAVQDSGAGSYQLTF

SEQ ID NO: 504368 - protein, 15 aa, Homo sapiens
  CDR3 for beta chain variable domain of TCR clone 252184 (TRBV20-1, TRBJ2-7)
CSARDRVSGMDEQYF

SEQ ID NO: 504369 - protein, 17 aa, Homo sapiens
  CDR3 for alpha chain variable domain of TCR clone 252185 (TRAV3, TRAJ42)
CAVRDRDYGGSQGNLIF

SEQ ID NO: 504370 - protein, 17 aa, Homo sapiens
  CDR3 for beta chain variable domain of TCR clone 252185 (TRBV7-6, TRBJ2-5)
CASSPGLADPWGETQYF

SEQ ID NO: 504371 - protein, 13 aa, Homo sapiens
  CDR3 for alpha chain variable domain of TCR clone 252186 (TRAV39, TRAJ48)
CAAVTFGNEKLTF

SEQ ID NO: 504372 - protein, 12 aa, Homo sapiens
  CDR3 for beta chain variable domain of TCR clone 252186 (TRBV5-5, TRBJ2-5)
CASSYFGETQYF

SEQ ID NO: 504373 - protein, 12 aa, Homo sapiens
  CDR3 for alpha chain variable domain of TCR clone 252187 (TRAV17, TRAJ12)
CATLRSSYKLIF

SEQ ID NO: 504374 - protein, 17 aa, Homo sapiens
  CDR3 for beta chain variable domain of TCR clone 252187 (TRBV7-8, TRBJ2-5)
CASSLASGGRFQETQYF

SEQ ID NO: 504375 - protein, 15 aa, Homo sapiens
  CDR3 for alpha chain variable domain of TCR clone 252188 (TRAV13-1, TRAJ17)
CAASVERAAGNKLTF

SEQ ID NO: 504376 - protein, 12 aa, Homo sapiens
  CDR3 for beta chain variable domain of TCR clone 252188 (TRBV5-7, TRBJ1-1)
CASSLGRGKAFF

SEQ ID NO: 504377 - protein, 14 aa, Homo sapiens
  CDR3 for alpha chain variable domain of TCR clone 252189 (TRAV12-1, TRAJ42)
CVVIYGGSHGNHIF

SEQ ID NO: 504378 - protein, 13 aa, Homo sapiens
  CDR3 for beta chain variable domain of TCR clone 252189 (TRBV18, TRBJ2-5)
CASSPPGKETQYF

SEQ ID NO: 504379 - protein, 16 aa, Homo sapiens
  CDR3 for alpha chain variable domain of TCR clone 252190 (TRAV8-3, TRAJ13)
YAVGAYPSGGYQKVTF

SEQ ID NO: 504380 - protein, 13 aa, Homo sapiens
  CDR3 for beta chain variable domain of TCR clone 252190 (TRBV7-9, TRBJ1-2)
CASSLKQNYGYTV

SEQ ID NO: 504381 - protein, 19 aa, Homo sapiens
  CDR3 for alpha chain variable domain of TCR clone 252191 (TRAV25, TRAJ20)
TATQTTDVGILPHDYKLSF

SEQ ID NO: 504382 - protein, 14 aa, Homo sapiens
  CDR3 for beta chain variable domain of TCR clone 252191 (TRBV7-2, TRBJ2-7)
CASRSQGAAYEQYF

SEQ ID NO: 504383 - protein, 13 aa, Homo sapiens
  CDR3 for alpha chain variable domain of TCR clone 252192 (TRAV3, TRAJ27)
CAVRPRGAGKSTF

SEQ ID NO: 504384 - protein, 13 aa, Homo sapiens
  CDR3 for beta chain variable domain of TCR clone 252192 (TRBV7-9, TRBJ2-3)
GASSPGSTDTQYF

SEQ ID NO: 504385 - protein, 15 aa, Homo sapiens
  CDR3 for alpha chain variable domain of TCR clone 252193 (TRAV12-1, TRAJ44)
CVVDEYTGTASKLTF

SEQ ID NO: 504386 - protein, 14 aa, Homo sapiens
  CDR3 for beta chain variable domain of TCR clone 252193 (TRBV19, TRBJ2-1)
CATSQGDTYNEQFF

SEQ ID NO: 504387 - protein, 12 aa, Homo sapiens
  CDR3 for alpha chain variable domain of TCR clone 252194 (TRAV23/DV6, TRAJ49)
CAATYTGNPFYF

SEQ ID NO: 504388 - protein, 17 aa, Homo sapiens
  CDR3 for beta chain variable domain of TCR clone 252194 (TRBV4-1, TRBJ2-3)
CASSQVLQGGGTDTQYF

SEQ ID NO: 504389 - protein, 12 aa, Homo sapiens
  CDR3 for alpha chain variable domain of TCR clone 252195 (TRAV27, TRAJ42)
CAGGGSQGNLIF

SEQ ID NO: 504390 - protein, 13 aa, Homo sapiens
  CDR3 for beta chain variable domain of TCR clone 252195 (TRBV19, TRBJ2-7)
CASSSRSSYEQYF

SEQ ID NO: 504391 - protein, 20 aa, Homo sapiens
  CDR3 for alpha chain variable domain of TCR clone 252196 (TRAV26-1, TRAJ42)
CCVLLHRQTYYGGSQGNLIF

SEQ ID NO: 504392 - protein, 15 aa, Homo sapiens
  CDR3 for beta chain variable domain of TCR clone 252196 (TRBV7-3, TRBJ2-2)
CASSLDRGATGELFF

SEQ ID NO: 504393 - protein, 15 aa, Homo sapiens
  CDR3 for alpha chain variable domain of TCR clone 252197 (TRAV26-2, TRAJ26)
CILRDFDNYGQNFVF

SEQ ID NO: 504394 - protein, 15 aa, Homo sapiens
  CDR3 for beta chain variable domain of TCR clone 252197 (TRBV27, TRBJ2-1)
CASSNGGGSSNEQLF

SEQ ID NO: 504395 - protein, 12 aa, Homo sapiens
  CDR3 for alpha chain variable domain of TCR clone 252198 (TRAV12-3, TRAJ17)
CAMTLTGNKLTF

SEQ ID NO: 504396 - protein, 11 aa, Homo sapiens
  CDR3 for beta chain variable domain of TCR clone 252198 (TRBV12-4, TRBJ2-2)
RASSSAGELFF

SEQ ID NO: 504397 - protein, 12 aa, Homo sapiens
  CDR3 for alpha chain variable domain of TCR clone 252199 (TRAV3, TRAJ20)
CSVRDPDYKLSF

SEQ ID NO: 504398 - protein, 15 aa, Homo sapiens
  CDR3 for beta chain variable domain of TCR clone 252199 (TRBV2, TRBJ2-2)
CASSRETVGTGELFF

SEQ ID NO: 504399 - protein, 15 aa, Homo sapiens
  CDR3 for alpha chain variable domain of TCR clone 252200 (TRAV1-2, TRAJ32)
CAVRGYGGATNKPIF

SEQ ID NO: 504400 - protein, 15 aa, Homo sapiens
  CDR3 for beta chain variable domain of TCR clone 252200 (TRBV25-1, TRBJ2-5)
CASSDTGTHQETQYF

SEQ ID NO: 504401 - protein, 16 aa, Homo sapiens
  CDR3 for alpha chain variable domain of TCR clone 252201 (TRAV21, TRAJ37)
FAVRTAGSSNTGKLIF

SEQ ID NO: 504402 - protein, 13 aa, Homo sapiens
  CDR3 for beta chain variable domain of TCR clone 252201 (TRBV7-9, TRBJ2-5)
CASLPSGRETHHF

SEQ ID NO: 504403 - protein, 16 aa, Homo sapiens
  CDR3 for alpha chain variable domain of TCR clone 252202 (TRAV3, TRAJ5)
CAGRNLMDTGRRALTL

SEQ ID NO: 504404 - protein, 16 aa, Homo sapiens
  CDR3 for beta chain variable domain of TCR clone 252202 (TRBV4-2, TRBJ2-7)
CASSQEGIAISYEQYF

SEQ ID NO: 504405 - protein, 13 aa, Homo sapiens
  CDR3 for alpha chain variable domain of TCR clone 252203 (TRAV23/DV6, TRAJ22)
CAPYSGSARQLTF

SEQ ID NO: 504406 - protein, 15 aa, Homo sapiens
  CDR3 for beta chain variable domain of TCR clone 252203 (TRBV19, TRBJ2-1)
CASSGGGTLYNEQFF

SEQ ID NO: 504407 - protein, 13 aa, Homo sapiens
  CDR3 for alpha chain variable domain of TCR clone 252204 (TRAV21, TRAJ27)
CAQWGGNAGKSTL

SEQ ID NO: 504408 - protein, 14 aa, Homo sapiens
  CDR3 for beta chain variable domain of TCR clone 252204 (TRBV2, TRBJ2-3)
CAVGGTISTDTQYF

SEQ ID NO: 504409 - protein, 16 aa, Homo sapiens
  CDR3 for alpha chain variable domain of TCR clone 252205 (TRAV12-3, TRAJ53)
CAMSPGRGGSNYKLTV

SEQ ID NO: 504410 - protein, 14 aa, Homo sapiens
  CDR3 for beta chain variable domain of TCR clone 252205 (TRBV4-2, TRBJ2-1)
CASGLDRAYNEQFF

SEQ ID NO: 504411 - protein, 13 aa, Homo sapiens
  CDR3 for alpha chain variable domain of TCR clone 252206 (TRAV3, TRAJ27)
CAVRPLGAGKSTV

SEQ ID NO: 504412 - protein, 12 aa, Homo sapiens
  CDR3 for beta chain variable domain of TCR clone 252206 (TRBV7-9, TRBJ2-7)
CATRTDAYEQYF

SEQ ID NO: 504413 - protein, 12 aa, Homo sapiens
  CDR3 for alpha chain variable domain of TCR clone 252207 (TRAV27, TRAJ9)
CAGESGGFKTIF

SEQ ID NO: 504414 - protein, 14 aa, Homo sapiens
  CDR3 for beta chain variable domain of TCR clone 252207 (TRBV9, TRBJ2-7)
CASSVAGVPYEQYF

SEQ ID NO: 504415 - protein, 14 aa, Homo sapiens
  CDR3 for alpha chain variable domain of TCR clone 252208 (TRAV8-4, TRAJ8)
CAVIGNTGFQKLVF

SEQ ID NO: 504416 - protein, 16 aa, Homo sapiens
  CDR3 for beta chain variable domain of TCR clone 252208 (TRBV4-1, TRBJ1-2)
CASSQDRAVPVGGYTF

SEQ ID NO: 504417 - protein, 14 aa, Homo sapiens
  CDR3 for alpha chain variable domain of TCR clone 252209 (TRAV12-1, TRAJ33)
CVVAGVDSNYQLIW

SEQ ID NO: 504418 - protein, 14 aa, Homo sapiens
  CDR3 for beta chain variable domain of TCR clone 252209 (TRBV28, TRBJ1-6)
CASSLWADYSPLHF

SEQ ID NO: 504419 - protein, 15 aa, Homo sapiens
  CDR3 for alpha chain variable domain of TCR clone 252210 (TRAV29/DV5, TRAJ40)
CAASAQGSGTCKYIF

SEQ ID NO: 504420 - protein, 15 aa, Homo sapiens
  CDR3 for beta chain variable domain of TCR clone 252210 (TRBV6-1, TRBJ2-3)
CASSERGGITDTQYF

SEQ ID NO: 504421 - protein, 15 aa, Homo sapiens
  CDR3 for alpha chain variable domain of TCR clone 252211 (TRAV27, TRAJ38)
CVARRNAGNNRKLIG

SEQ ID NO: 504422 - protein, 13 aa, Homo sapiens
  CDR3 for beta chain variable domain of TCR clone 252211 (TRBV12-5, TRBJ2-3)
CASGDRQSDTQYF

SEQ ID NO: 504423 - protein, 23 aa, Homo sapiens
  CDR3 for alpha chain variable domain of TCR clone 252212 (TRAV3, TRAJ32)
CAVRDELVLQTSSSLELALRLLS

SEQ ID NO: 504424 - protein, 12 aa, Homo sapiens
  CDR3 for beta chain variable domain of TCR clone 252212 (TRBV6-1, TRBJ2-7)
CASSDYSYEQYF

SEQ ID NO: 504425 - protein, 15 aa, Homo sapiens
  CDR3 for alpha chain variable domain of TCR clone 252213 (TRAV3, TRAJ13)
CAVRDIAGGYQKFTF

SEQ ID NO: 504426 - protein, 13 aa, Homo sapiens
  CDR3 for beta chain variable domain of TCR clone 252213 (TRBV2, TRBJ2-2)
CASSKKNTGELFF

SEQ ID NO: 504427 - protein, 13 aa, Homo sapiens
  CDR3 for alpha chain variable domain of TCR clone 252214 (TRAV8-1, TRAJ30)
CYVIMNRDDKVIF

SEQ ID NO: 504428 - protein, 14 aa, Homo sapiens
  CDR3 for beta chain variable domain of TCR clone 252214 (TRBV7-2, TRBJ1-6)
CASSLQGANSPLHF

SEQ ID NO: 504429 - protein, 15 aa, Homo sapiens
  CDR3 for alpha chain variable domain of TCR clone 252215 (TRAV8-3, TRAJ11)
CAVGLLNSGYSTLTF

SEQ ID NO: 504430 - protein, 14 aa, Homo sapiens
  CDR3 for beta chain variable domain of TCR clone 252215 (TRBV4-1, TRBJ2-5)
CASSRSGSGEQQYF

SEQ ID NO: 504431 - protein, 16 aa, Homo sapiens
  CDR3 for alpha chain variable domain of TCR clone 252216 (TRAV30, TRAJ24)
CGTEIVDADSWGKFQF

SEQ ID NO: 504432 - protein, 14 aa, Homo sapiens
  CDR3 for beta chain variable domain of TCR clone 252216 (TRBV12-5, TRBJ2-5)
CARGSRTQQETQYF

SEQ ID NO: 504433 - protein, 11 aa, Homo sapiens
  CDR3 for alpha chain variable domain of TCR clone 252217 (TRAV21, TRAJ11)
CAVNGYSTLTF

SEQ ID NO: 504434 - protein, 12 aa, Homo sapiens
  CDR3 for beta chain variable domain of TCR clone 252217 (TRBV19, TRBJ2-1)
CASSMQDTEQFF

SEQ ID NO: 504435 - protein, 16 aa, Homo sapiens
  CDR3 for alpha chain variable domain of TCR clone 252218 (TRAV8-3, TRAJ18)
CAVGARRGSTLGRLYF

SEQ ID NO: 504436 - protein, 12 aa, Homo sapiens
  CDR3 for beta chain variable domain of TCR clone 252218 (TRBV7-2, TRBJ2-5)
CASSQYQETQYF

SEQ ID NO: 504437 - protein, 16 aa, Homo sapiens
  CDR3 for alpha chain variable domain of TCR clone 252219 (TRAV3, TRAJ37)
CDVRGKGSGNTGKLIF

SEQ ID NO: 504438 - protein, 20 aa, Homo sapiens
  CDR3 for beta chain variable domain of TCR clone 252219 (TRBV7-8, TRBJ2-2)
CASSHLFPGPTIHITGELFF

SEQ ID NO: 504439 - protein, 16 aa, Homo sapiens
  CDR3 for alpha chain variable domain of TCR clone 252220 (TRAV38-2/DV8, TRAJ45)
CAYRGNSGGGADGLTF

SEQ ID NO: 504440 - protein, 15 aa, Homo sapiens
  CDR3 for beta chain variable domain of TCR clone 252220 (TRBV29-1, TRBJ1-2)
CSVVLEAGSNYGYTF

SEQ ID NO: 504441 - protein, 12 aa, Homo sapiens
  CDR3 for alpha chain variable domain of TCR clone 252221 (TRAV13-1, TRAJ15)
CAANRAGTALIF

SEQ ID NO: 504442 - protein, 14 aa, Homo sapiens
  CDR3 for beta chain variable domain of TCR clone 252221 (TRBV20-1, TRBJ2-5)
CSARYRGLQETQYF

SEQ ID NO: 504443 - protein, 15 aa, Homo sapiens
  CDR3 for alpha chain variable domain of TCR clone 252222 (TRAV12-3, TRAJ11)
CAMSEENSGYSTRTF

SEQ ID NO: 504444 - protein, 13 aa, Homo sapiens
  CDR3 for beta chain variable domain of TCR clone 252222 (TRBV15, TRBJ1-6)
CATSGGLNSPLHF

SEQ ID NO: 504445 - protein, 14 aa, Homo sapiens
  CDR3 for alpha chain variable domain of TCR clone 252223 (TRAV12-2, TRAJ33)
CAVKRARSNYQLIW

SEQ ID NO: 504446 - protein, 12 aa, Homo sapiens
  CDR3 for beta chain variable domain of TCR clone 252223 (TRBV24-1, TRBJ2-3)
CATSDSTDTPYF

SEQ ID NO: 504447 - protein, 17 aa, Homo sapiens
  CDR3 for alpha chain variable domain of TCR clone 252224 (TRAV1-1, TRAJ10)
EASNTVMLTGGGNKLTF

SEQ ID NO: 504448 - protein, 15 aa, Homo sapiens
  CDR3 for beta chain variable domain of TCR clone 252224 (TRBV28, TRBJ2-1)
CASSIIAGGRSEQFF

SEQ ID NO: 504449 - protein, 13 aa, Homo sapiens
  CDR3 for alpha chain variable domain of TCR clone 252225 (TRAV36/DV7, TRAJ50)
CAVSKTSYDKVIL

SEQ ID NO: 504450 - protein, 13 aa, Homo sapiens
  CDR3 for beta chain variable domain of TCR clone 252225 (TRBV18, TRBJ2-7)
CASSPGRNYEQYF

SEQ ID NO: 504451 - protein, 14 aa, Homo sapiens
  CDR3 for alpha chain variable domain of TCR clone 252226 (TRAV12-2, TRAJ17)
CAVLFKAAGNELTF

SEQ ID NO: 504452 - protein, 14 aa, Homo sapiens
  CDR3 for beta chain variable domain of TCR clone 252226 (TRBV15, TRBJ1-2)
CATSRDFDRVGYTF

SEQ ID NO: 504453 - protein, 12 aa, Homo sapiens
  CDR3 for alpha chain variable domain of TCR clone 252227 (TRAV12-3, TRAJ29)
CAAREGNTPLVF

SEQ ID NO: 504454 - protein, 17 aa, Homo sapiens
  CDR3 for beta chain variable domain of TCR clone 252227 (TRBV18, TRBJ2-1)
CSSSPLAAGAGDNEQFF

SEQ ID NO: 504455 - protein, 14 aa, Homo sapiens
  CDR3 for alpha chain variable domain of TCR clone 252228 (TRAV13-1, TRAJ35)
CAASKGGFGNVLHC

SEQ ID NO: 504456 - protein, 13 aa, Homo sapiens
  CDR3 for beta chain variable domain of TCR clone 252228 (TRBV7-3, TRBJ1-1)
CARSQDWGAEASF

SEQ ID NO: 504457 - protein, 18 aa, Homo sapiens
  CDR3 for alpha chain variable domain of TCR clone 252229 (TRAV26-1, TRAJ23)
CIVRVGLEVWNQGGKLIF

SEQ ID NO: 504458 - protein, 14 aa, Homo sapiens
  CDR3 for beta chain variable domain of TCR clone 252229 (TRBV7-2, TRBJ2-7)
CASRPKTSFYEQYF

SEQ ID NO: 504459 - protein, 14 aa, Homo sapiens
  CDR3 for alpha chain variable domain of TCR clone 252230 (TRAV12-2, TRAJ17)
CAALFKAAGNKLTF

SEQ ID NO: 504460 - protein, 16 aa, Homo sapiens
  CDR3 for beta chain variable domain of TCR clone 252230 (TRBV20-1, TRBJ2-2)
CSASASGIPGAGELIF

SEQ ID NO: 504461 - protein, 15 aa, Homo sapiens
  CDR3 for alpha chain variable domain of TCR clone 252231 (TRAV13-1, TRAJ18)
CAASGGGSTLGRLYF

SEQ ID NO: 504462 - protein, 13 aa, Homo sapiens
  CDR3 for beta chain variable domain of TCR clone 252231 (TRBV10-3, TRBJ2-7)
FASKLAVNYEQYF

SEQ ID NO: 504463 - protein, 11 aa, Homo sapiens
  CDR3 for alpha chain variable domain of TCR clone 252232 (TRAV16, TRAJ33)
CALHSNYHLIW

SEQ ID NO: 504464 - protein, 15 aa, Homo sapiens
  CDR3 for beta chain variable domain of TCR clone 252232 (TRBV4-1, TRBJ2-7)
CASSQQGQGFDEQYF

SEQ ID NO: 504465 - protein, 16 aa, Homo sapiens
  CDR3 for alpha chain variable domain of TCR clone 252233 (TRAV13-1, TRAJ48)
CAASIFGNFGNEKLTF

SEQ ID NO: 504466 - protein, 14 aa, Homo sapiens
  CDR3 for beta chain variable domain of TCR clone 252233 (TRBV7-3, TRBJ1-1)
CASSLKGGDTEAFF

SEQ ID NO: 504467 - protein, 13 aa, Homo sapiens
  CDR3 for alpha chain variable domain of TCR clone 252234 (TRAV2, TRAJ40)
CAVVTSGTYKYIF

SEQ ID NO: 504468 - protein, 18 aa, Homo sapiens
  CDR3 for beta chain variable domain of TCR clone 252234 (TRBV7-9, TRBJ1-2)
CASSSIAGTSQANYGYTF

SEQ ID NO: 504469 - protein, 13 aa, Homo sapiens
  CDR3 for alpha chain variable domain of TCR clone 252235 (TRAV12-2, TRAJ13)
SVKKTGGYQKVTF

SEQ ID NO: 504470 - protein, 14 aa, Homo sapiens
  CDR3 for beta chain variable domain of TCR clone 252235 (TRBV4-2, TRBJ2-1)
CASGLDRAYNEQFF

SEQ ID NO: 504471 - protein, 15 aa, Homo sapiens
  CDR3 for alpha chain variable domain of TCR clone 252236 (TRAV8-3, TRAJ27)
CAVGPSKTNTGKSTF

SEQ ID NO: 504472 - protein, 15 aa, Homo sapiens
  CDR3 for beta chain variable domain of TCR clone 252236 (TRBV11-2, TRBJ1-2)
CASSLEGVQRNGYTF

SEQ ID NO: 504473 - protein, 13 aa, Homo sapiens
  CDR3 for alpha chain variable domain of TCR clone 252237 (TRAV13-2, TRAJ15)
CAEKNQDGTALIF

SEQ ID NO: 504474 - protein, 15 aa, Homo sapiens
  CDR3 for beta chain variable domain of TCR clone 252237 (TRBV29-1, TRBJ2-5)
CSVAPGQGARETQYF

SEQ ID NO: 504475 - protein, 14 aa, Homo sapiens
  CDR3 for alpha chain variable domain of TCR clone 252238 (TRAV26-1, TRAJ39)
CIVRGSRAGNMLTF

SEQ ID NO: 504476 - protein, 16 aa, Homo sapiens
  CDR3 for beta chain variable domain of TCR clone 252238 (TRBV27, TRBJ2-2)
CASSFRGLVRTGELFF

SEQ ID NO: 504477 - protein, 14 aa, Homo sapiens
  CDR3 for alpha chain variable domain of TCR clone 252239 (TRAV35, TRAJ33)
CAGSSQDSNHQLIW

SEQ ID NO: 504478 - protein, 15 aa, Homo sapiens
  CDR3 for beta chain variable domain of TCR clone 252239 (TRBV5-1, TRBJ1-4)
FAPAAWKDGNEKLFF

SEQ ID NO: 504479 - protein, 12 aa, Homo sapiens
  CDR3 for alpha chain variable domain of TCR clone 252240 (TRAV1-1, TRAJ30)
CAVRGRDDKIIF

SEQ ID NO: 504480 - protein, 14 aa, Homo sapiens
  CDR3 for beta chain variable domain of TCR clone 252240 (TRBV7-2, TRBJ2-7)
CASSPKTSFYEQYF

SEQ ID NO: 504481 - protein, 13 aa, Homo sapiens
  CDR3 for alpha chain variable domain of TCR clone 252241 (TRAV36/DV7, TRAJ37)
CAVFASNTGKLIF

SEQ ID NO: 504482 - protein, 16 aa, Homo sapiens
  CDR3 for beta chain variable domain of TCR clone 252241 (TRBV3-1, TRBJ2-5)
CASSPGQFNGFGTQYF

SEQ ID NO: 504483 - protein, 11 aa, Homo sapiens
  CDR3 for alpha chain variable domain of TCR clone 252242 (TRAV1-2, TRAJ20)
CAVSNDYKLSF

SEQ ID NO: 504484 - protein, 16 aa, Homo sapiens
  CDR3 for beta chain variable domain of TCR clone 252242 (TRBV29-1, TRBJ2-6)
CSVEYITYSGANVLAF

SEQ ID NO: 504485 - protein, 16 aa, Homo sapiens
  CDR3 for alpha chain variable domain of TCR clone 252243 (TRAV8-3, TRAJ13)
CAVGAYPSGGYQKVTF

SEQ ID NO: 504486 - protein, 14 aa, Homo sapiens
  CDR3 for beta chain variable domain of TCR clone 252243 (TRBV18, TRBJ2-5)
CASSLRASSETQYF

SEQ ID NO: 504487 - protein, 12 aa, Homo sapiens
  CDR3 for alpha chain variable domain of TCR clone 252244 (TRAV12-3, TRAJ17)
CAMTLTGNKLTF

SEQ ID NO: 504488 - protein, 14 aa, Homo sapiens
  CDR3 for beta chain variable domain of TCR clone 252244 (TRBV7-6, TRBJ2-3)
CASSLGTVTDTQDF

SEQ ID NO: 504489 - protein, 11 aa, Homo sapiens
  CDR3 for alpha chain variable domain of TCR clone 252245 (TRAV13-2, TRAJ20)
CAENMSYKLSF

SEQ ID NO: 504490 - protein, 13 aa, Homo sapiens
  CDR3 for beta chain variable domain of TCR clone 252245 (TRBV20-1, TRBJ2-5)
CSARDTGEETQYF

SEQ ID NO: 504491 - protein, 14 aa, Homo sapiens
  CDR3 for alpha chain variable domain of TCR clone 252246 (TRAV13-1, TRAJ44)
CAAKATGTASKLTF

SEQ ID NO: 504492 - protein, 13 aa, Homo sapiens
  CDR3 for beta chain variable domain of TCR clone 252246 (TRBV5-5, TRBJ1-2)
CASSFWRGEDCTL

SEQ ID NO: 504493 - protein, 12 aa, Homo sapiens
  CDR3 for alpha chain variable domain of TCR clone 252247 (TRAV12-3, TRAJ3)
CAIDSSASKIIF

SEQ ID NO: 504494 - protein, 14 aa, Homo sapiens
  CDR3 for beta chain variable domain of TCR clone 252247 (TRBV25-1, TRBJ1-1)
CASTHLGGNTEAFF

SEQ ID NO: 504495 - protein, 10 aa, Homo sapiens
  CDR3 for alpha chain variable domain of TCR clone 252248 (TRAV12-1, TRAJ23)
CVVSGGKLIF

SEQ ID NO: 504496 - protein, 13 aa, Homo sapiens
  CDR3 for beta chain variable domain of TCR clone 252248 (TRBV7-9, TRBJ1-2)
CAGSLKQNYGYTF

SEQ ID NO: 504497 - protein, 13 aa, Homo sapiens
  CDR3 for alpha chain variable domain of TCR clone 252249 (TRAV1-2, TRAJ9)
CAASNTGGFKTIF

SEQ ID NO: 504498 - protein, 15 aa, Homo sapiens
  CDR3 for beta chain variable domain of TCR clone 252249 (TRBV6-3, TRBJ2-7)
CASSTPGTVFYEQYF

SEQ ID NO: 504499 - protein, 14 aa, Homo sapiens
  CDR3 for alpha chain variable domain of TCR clone 252250 (TRAV12-3, TRAJ10)
SHLPLTGGGNKLTF

SEQ ID NO: 504500 - protein, 14 aa, Homo sapiens
  CDR3 for beta chain variable domain of TCR clone 252250 (TRBV11-2, TRBJ2-5)
CASRPLAGRETQYF

SEQ ID NO: 504501 - protein, 14 aa, Homo sapiens
  CDR3 for alpha chain variable domain of TCR clone 252251 (TRAV17, TRAJ43)
CATDHPYNNNDMRF

SEQ ID NO: 504502 - protein, 17 aa, Homo sapiens
  CDR3 for beta chain variable domain of TCR clone 252251 (TRBV13, TRBJ2-3)
CASSLSRVAGGRNTQYF

SEQ ID NO: 504503 - protein, 12 aa, Homo sapiens
  CDR3 for alpha chain variable domain of TCR clone 252252 (TRAV13-2, TRAJ23)
CAERHRGRKLIF

SEQ ID NO: 504504 - protein, 15 aa, Homo sapiens
  CDR3 for beta chain variable domain of TCR clone 252252 (TRBV7-9, TRBJ1-6)
CASSSPGRGNSPLHF

SEQ ID NO: 504505 - protein, 14 aa, Homo sapiens
  CDR3 for alpha chain variable domain of TCR clone 252253 (TRAV12-2, TRAJ5)
CAVNRSTGRKALTF

SEQ ID NO: 504506 - protein, 14 aa, Homo sapiens
  CDR3 for beta chain variable domain of TCR clone 252253 (TRBV18, TRBJ2-5)
CASSPGVSQETQYF

SEQ ID NO: 504507 - protein, 13 aa, Homo sapiens
  CDR3 for alpha chain variable domain of TCR clone 252254 (TRAV8-6, TRAJ54)
CAVSDQGAQKLVF

SEQ ID NO: 504508 - protein, 13 aa, Homo sapiens
  CDR3 for beta chain variable domain of TCR clone 252254 (TRBV10-3, TRBJ2-7)
CASKLAVNYEQYF

SEQ ID NO: 504509 - protein, 14 aa, Homo sapiens
  CDR3 for alpha chain variable domain of TCR clone 252255 (TRAV1-2, TRAJ16)
CAVNRFSDGQKLLC

SEQ ID NO: 504510 - protein, 14 aa, Homo sapiens
  CDR3 for beta chain variable domain of TCR clone 252255 (TRBV7-9, TRBJ1-4)
CAITEGEANEKLFF

SEQ ID NO: 504511 - protein, 12 aa, Homo sapiens
  CDR3 for alpha chain variable domain of TCR clone 252256 (TRAV13-2, TRAJ8)
CAPWLGFQKLVF

SEQ ID NO: 504512 - protein, 13 aa, Homo sapiens
  CDR3 for beta chain variable domain of TCR clone 252256 (TRBV12-4, TRBJ1-5)
CASSPDRAQTQHF

SEQ ID NO: 504513 - protein, 14 aa, Homo sapiens
  CDR3 for alpha chain variable domain of TCR clone 252257 (TRAV1-2, TRAJ6)
CAVCLSGGSYIPTF

SEQ ID NO: 504514 - protein, 15 aa, Homo sapiens
  CDR3 for beta chain variable domain of TCR clone 252257 (TRBV7-9, TRBJ2-7)
CASSPGGGLTYEQYF

SEQ ID NO: 504515 - protein, 16 aa, Homo sapiens
  CDR3 for alpha chain variable domain of TCR clone 252258 (TRAV30, TRAJ24)
CGTEIVDADSWGKFQF

SEQ ID NO: 504516 - protein, 19 aa, Homo sapiens
  CDR3 for beta chain variable domain of TCR clone 252258 (TRBV25-1, TRBJ2-2)
CANLVYRVDRGRKTGELFF

SEQ ID NO: 504517 - protein, 15 aa, Homo sapiens
  CDR3 for alpha chain variable domain of TCR clone 252259 (TRAV35, TRAJ40)
CAGQLGTSGTYKYIF

SEQ ID NO: 504518 - protein, 14 aa, Homo sapiens
  CDR3 for beta chain variable domain of TCR clone 252259 (TRBV4-1, TRBJ2-2)
CASSQAVNTGELFF

SEQ ID NO: 504519 - protein, 14 aa, Homo sapiens
  CDR3 for alpha chain variable domain of TCR clone 252260 (TRAV16, TRAJ33)
CALSAMDSNYQLIW

SEQ ID NO: 504520 - protein, 18 aa, Homo sapiens
  CDR3 for beta chain variable domain of TCR clone 252260 (TRBV12-4, TRBJ2-2)
CASSLVAGTRGRTGELFF

SEQ ID NO: 504521 - protein, 14 aa, Homo sapiens
  CDR3 for alpha chain variable domain of TCR clone 252261 (TRAV12-1, TRAJ23)
CVVIVYNQGGKLVF

SEQ ID NO: 504522 - protein, 13 aa, Homo sapiens
  CDR3 for beta chain variable domain of TCR clone 252261 (TRBV11-2, TRBJ2-5)
CASSFSSQETQYF

SEQ ID NO: 504523 - protein, 14 aa, Homo sapiens
  CDR3 for alpha chain variable domain of TCR clone 252262 (TRAV1-1, TRAJ27)
CAVIYNTTAGKSTS

SEQ ID NO: 504524 - protein, 15 aa, Homo sapiens
  CDR3 for beta chain variable domain of TCR clone 252262 (TRBV7-2, TRBJ2-1)
CASSSGLAGGNEQFF

SEQ ID NO: 504525 - protein, 20 aa, Homo sapiens
  CDR3 for alpha chain variable domain of TCR clone 252263 (TRAV8-3, TRAJ44)
LSTSVLWVRLYTGTASKLTF

SEQ ID NO: 504526 - protein, 16 aa, Homo sapiens
  CDR3 for beta chain variable domain of TCR clone 252263 (TRBV7-2, TRBJ2-3)
CASSLVALYSTDTQYF

SEQ ID NO: 504527 - protein, 13 aa, Homo sapiens
  CDR3 for alpha chain variable domain of TCR clone 252264 (TRAV8-4, TRAJ10)
CAAFTGGGNKLTF

SEQ ID NO: 504528 - protein, 18 aa, Homo sapiens
  CDR3 for beta chain variable domain of TCR clone 252264 (TRBV7-3, TRBJ2-1)
CASSLTLASGRAMVSSSS

SEQ ID NO: 504529 - protein, 14 aa, Homo sapiens
  CDR3 for alpha chain variable domain of TCR clone 252265 (TRAV8-1, TRAJ5)
CAVRTGTGRRALTF

SEQ ID NO: 504530 - protein, 12 aa, Homo sapiens
  CDR3 for beta chain variable domain of TCR clone 252265 (TRBV11-2, TRBJ2-1)
CASSPGNNEQFF

SEQ ID NO: 504531 - protein, 15 aa, Homo sapiens
  CDR3 for alpha chain variable domain of TCR clone 252266 (TRAV21, TRAJ10)
CAVPLLTGGGNKRTF

SEQ ID NO: 504532 - protein, 14 aa, Homo sapiens
  CDR3 for beta chain variable domain of TCR clone 252266 (TRBV12-4, TRBJ1-1)
CASSLGTGGTEAFF

SEQ ID NO: 504533 - protein, 13 aa, Homo sapiens
  CDR3 for alpha chain variable domain of TCR clone 252267 (TRAV13-1, TRAJ39)
CAASIWAGNMLTF

SEQ ID NO: 504534 - protein, 17 aa, Homo sapiens
  CDR3 for beta chain variable domain of TCR clone 252267 (TRBV13, TRBJ2-3)
CASSLSRVAGGRNTQYF

SEQ ID NO: 504535 - protein, 15 aa, Homo sapiens
  CDR3 for alpha chain variable domain of TCR clone 252268 (TRAV8-3, TRAJ45)
CASSYSGGGADGLTF

SEQ ID NO: 504536 - protein, 15 aa, Homo sapiens
  CDR3 for beta chain variable domain of TCR clone 252268 (TRBV27, TRBJ1-4)
CASSPRRATNEKLFF

SEQ ID NO: 504537 - protein, 16 aa, Homo sapiens
  CDR3 for alpha chain variable domain of TCR clone 252269 (TRAV12-3, TRAJ53)
CAMSPGRGGSNYKLTF

SEQ ID NO: 504538 - protein, 20 aa, Homo sapiens
  CDR3 for beta chain variable domain of TCR clone 252269 (TRBV28, TRBJ2-1)
CASTPIGRSPGLAGGNEQFF

SEQ ID NO: 504539 - protein, 13 aa, Homo sapiens
  CDR3 for alpha chain variable domain of TCR clone 252270 (TRAV17, TRAJ22)
CAHHSGSARQLTF

SEQ ID NO: 504540 - protein, 14 aa, Homo sapiens
  CDR3 for beta chain variable domain of TCR clone 252270 (TRBV16, TRBJ1-1)
CASSQAGPNTEAFS

SEQ ID NO: 504541 - protein, 17 aa, Homo sapiens
  CDR3 for alpha chain variable domain of TCR clone 252271 (TRAV3, TRAJ6)
CAVRDGPRAGGSYIPTF

SEQ ID NO: 504542 - protein, 20 aa, Homo sapiens
  CDR3 for beta chain variable domain of TCR clone 252271 (TRBV28, TRBJ2-1)
CASTPIGRSPGLAGGNEHFF

SEQ ID NO: 504543 - protein, 13 aa, Homo sapiens
  CDR3 for alpha chain variable domain of TCR clone 252272 (TRAV29/DV5, TRAJ21)
CAASVYNFNKFYF

SEQ ID NO: 504544 - protein, 15 aa, Homo sapiens
  CDR3 for beta chain variable domain of TCR clone 252272 (TRBV12-4, TRBJ2-5)
CASSPPTGLQETQYF

SEQ ID NO: 504545 - protein, 14 aa, Homo sapiens
  CDR3 for alpha chain variable domain of TCR clone 252273 (TRAV1-2, TRAJ31)
CAVRDMRGNARLMF

SEQ ID NO: 504546 - protein, 15 aa, Homo sapiens
  CDR3 for beta chain variable domain of TCR clone 252273 (TRBV3-1, TRBJ2-5)
CASSANLGGPETQYF

SEQ ID NO: 504547 - protein, 12 aa, Homo sapiens
  CDR3 for alpha chain variable domain of TCR clone 252274 (TRAV12-3, TRAJ48)
CAMRIGNEKLTF

SEQ ID NO: 504548 - protein, 12 aa, Homo sapiens
  CDR3 for beta chain variable domain of TCR clone 252274 (TRBV13, TRBJ2-7)
WASSLQACEQYF

SEQ ID NO: 504549 - protein, 15 aa, Homo sapiens
  CDR3 for alpha chain variable domain of TCR clone 252275 (TRAV27, TRAJ38)
CAARGNAGNNRKLFW

SEQ ID NO: 504550 - protein, 13 aa, Homo sapiens
  CDR3 for beta chain variable domain of TCR clone 252275 (TRBV12-5, TRBJ2-3)
CASGDRQSDTQYF

SEQ ID NO: 504551 - protein, 17 aa, Homo sapiens
  CDR3 for alpha chain variable domain of TCR clone 252276 (TRAV13-1, TRAJ31)
CAPRDRLMFGDGTQMVV

SEQ ID NO: 504552 - protein, 12 aa, Homo sapiens
  CDR3 for beta chain variable domain of TCR clone 252276 (TRBV7-9, TRBJ2-7)
CASSVEGYEQYF

SEQ ID NO: 504553 - protein, 16 aa, Homo sapiens
  CDR3 for alpha chain variable domain of TCR clone 252277 (TRAV1-2, TRAJ26)
CAVRDLITMVRILSLF

SEQ ID NO: 504554 - protein, 12 aa, Homo sapiens
  CDR3 for beta chain variable domain of TCR clone 252277 (TRBV20-1, TRBJ2-1)
CSAQYTYNEQFF

SEQ ID NO: 504555 - protein, 12 aa, Homo sapiens
  CDR3 for alpha chain variable domain of TCR clone 252278 (TRAV29/DV5, TRAJ49)
CAATDTGNQFYF

SEQ ID NO: 504556 - protein, 19 aa, Homo sapiens
  CDR3 for beta chain variable domain of TCR clone 252278 (TRBV25-1, TRBJ2-2)
CAILVYREDRGRKTGELFF

SEQ ID NO: 504557 - protein, 13 aa, Homo sapiens
  CDR3 for alpha chain variable domain of TCR clone 252279 (TRAV12-3, TRAJ50)
CAMSAMGNLLLQG

SEQ ID NO: 504558 - protein, 12 aa, Homo sapiens
  CDR3 for beta chain variable domain of TCR clone 252279 (TRBV14, TRBJ2-7)
CASSRLKGEQYF

SEQ ID NO: 504559 - protein, 13 aa, Homo sapiens
  CDR3 for alpha chain variable domain of TCR clone 252280 (TRAV27, TRAJ43)
CAGAGNNNNDMRF

SEQ ID NO: 504560 - protein, 15 aa, Homo sapiens
  CDR3 for beta chain variable domain of TCR clone 252280 (TRBV20-1, TRBJ1-5)
CSAFKNGQRNQPQHF

SEQ ID NO: 504561 - protein, 14 aa, Homo sapiens
  CDR3 for alpha chain variable domain of TCR clone 252281 (TRAV9-2, TRAJ39)
CALYIYNAGNMLTF

SEQ ID NO: 504562 - protein, 15 aa, Homo sapiens
  CDR3 for beta chain variable domain of TCR clone 252281 (TRBV7-2, TRBJ2-7)
CASSLALGSAYEQYF

SEQ ID NO: 504563 - protein, 16 aa, Homo sapiens
  CDR3 for alpha chain variable domain of TCR clone 252282 (TRAV30, TRAJ24)
CGIEIVDADSWGKFQF

SEQ ID NO: 504564 - protein, 12 aa, Homo sapiens
  CDR3 for beta chain variable domain of TCR clone 252282 (TRBV11-2, TRBJ2-2)
CASSLPTGELFF

SEQ ID NO: 504565 - protein, 12 aa, Homo sapiens
  CDR3 for alpha chain variable domain of TCR clone 252283 (TRAV21, TRAJ36)
CAVYTGANNLFF

SEQ ID NO: 504566 - protein, 14 aa, Homo sapiens
  CDR3 for beta chain variable domain of TCR clone 252283 (TRBV11-2, TRBJ2-1)
CASSLEVANNEQFF

SEQ ID NO: 504567 - protein, 14 aa, Homo sapiens
  CDR3 for alpha chain variable domain of TCR clone 252284 (TRAV12-2, TRAJ9)
CAVNMEGGGFKTIF

SEQ ID NO: 504568 - protein, 15 aa, Homo sapiens
  CDR3 for beta chain variable domain of TCR clone 252284 (TRBV28, TRBJ2-1)
CASSIIAGGRSEQFF

SEQ ID NO: 504569 - protein, 14 aa, Homo sapiens
  CDR3 for alpha chain variable domain of TCR clone 252285 (TRAV26-1, TRAJ48)
CIVRTNFGTEKLTF

SEQ ID NO: 504570 - protein, 12 aa, Homo sapiens
  CDR3 for beta chain variable domain of TCR clone 252285 (TRBV20-1, TRBJ2-7)
RSASSGANEQYF

SEQ ID NO: 504571 - protein, 15 aa, Homo sapiens
  CDR3 for alpha chain variable domain of TCR clone 252286 (TRAV13-2, TRAJ32)
CAENKDGGATNKLIF

SEQ ID NO: 504572 - protein, 14 aa, Homo sapiens
  CDR3 for beta chain variable domain of TCR clone 252286 (TRBV25-1, TRBJ1-1)
CASTHLGGNTEAFF

SEQ ID NO: 504573 - protein, 10 aa, Homo sapiens
  CDR3 for alpha chain variable domain of TCR clone 252287 (TRAV12-2, TRAJ20)
CAVYLYRLSF

SEQ ID NO: 504574 - protein, 16 aa, Homo sapiens
  CDR3 for beta chain variable domain of TCR clone 252287 (TRBV4-3, TRBJ1-6)
CASSAQPGGEGSPLHF

SEQ ID NO: 504575 - protein, 15 aa, Homo sapiens
  CDR3 for alpha chain variable domain of TCR clone 252288 (TRAV35, TRAJ40)
CAGQLGTSGTYKYIF

SEQ ID NO: 504576 - protein, 15 aa, Homo sapiens
  CDR3 for beta chain variable domain of TCR clone 252288 (TRBV20-1, TRBJ2-7)
CSARDRVSGMDEQYF

SEQ ID NO: 504577 - protein, 12 aa, Homo sapiens
  CDR3 for alpha chain variable domain of TCR clone 252289 (TRAV13-1, TRAJ15)
CAASQAGTALIF

SEQ ID NO: 504578 - protein, 13 aa, Homo sapiens
  CDR3 for beta chain variable domain of TCR clone 252289 (TRBV7-9, TRBJ1-2)
CASSLKQNYGYTF

SEQ ID NO: 504579 - protein, 15 aa, Homo sapiens
  CDR3 for alpha chain variable domain of TCR clone 252290 (TRAV12-1, TRAJ44)
CVVFVNTGTASKLTF

SEQ ID NO: 504580 - protein, 17 aa, Homo sapiens
  CDR3 for beta chain variable domain of TCR clone 252290 (TRBV7-8, TRBJ2-6)
RASSAGTGGAGANVLTF

SEQ ID NO: 504581 - protein, 12 aa, Homo sapiens
  CDR3 for alpha chain variable domain of TCR clone 252291 (TRAV2, TRAJ9)
CAVGAGGFKTIF

SEQ ID NO: 504582 - protein, 15 aa, Homo sapiens
  CDR3 for beta chain variable domain of TCR clone 252291 (TRBV12-4, TRBJ2-5)
CASSPPTGLQETQYF

SEQ ID NO: 504583 - protein, 13 aa, Homo sapiens
  CDR3 for alpha chain variable domain of TCR clone 252292 (TRAV21, TRAJ52)
CAVRPSPAGGTSY

SEQ ID NO: 504584 - protein, 16 aa, Homo sapiens
  CDR3 for beta chain variable domain of TCR clone 252292 (TRBV7-6, TRBJ2-3)
CASSPRRGGLGDTQYF

SEQ ID NO: 504585 - protein, 23 aa, Homo sapiens
  CDR3 for alpha chain variable domain of TCR clone 252293 (TRAV8-3, TRAJ34)
RKPSVHWSDAAEYFCAIPGKLIF

SEQ ID NO: 504586 - protein, 15 aa, Homo sapiens
  CDR3 for beta chain variable domain of TCR clone 252293 (TRBV5-7, TRBJ2-1)
CASSRRLAGDNEQFF

SEQ ID NO: 504587 - protein, 15 aa, Homo sapiens
  CDR3 for alpha chain variable domain of TCR clone 252294 (TRAV21, TRAJ40)
CAVRPQTSGTYKYIF

SEQ ID NO: 504588 - protein, 17 aa, Homo sapiens
  CDR3 for beta chain variable domain of TCR clone 252294 (TRBV11-2, TRBJ2-1)
CASSLYPPGVEYNEQFF

SEQ ID NO: 504589 - protein, 13 aa, Homo sapiens
  CDR3 for alpha chain variable domain of TCR clone 252295 (TRAV21, TRAJ20)
CAVGVFAAYKLSF

SEQ ID NO: 504590 - protein, 14 aa, Homo sapiens
  CDR3 for beta chain variable domain of TCR clone 252295 (TRBV4-2, TRBJ1-4)
CASSPSSGNEKLFF

SEQ ID NO: 504591 - protein, 14 aa, Homo sapiens
  CDR3 for alpha chain variable domain of TCR clone 252296 (TRAV1-2, TRAJ16)
CAVNRFSDGQKLLF

SEQ ID NO: 504592 - protein, 14 aa, Homo sapiens
  CDR3 for beta chain variable domain of TCR clone 252296 (TRBV7-2, TRBJ2-5)
CASSRRDGQETQYF

SEQ ID NO: 504593 - protein, 12 aa, Homo sapiens
  CDR3 for alpha chain variable domain of TCR clone 252297 (TRAV13-1, TRAJ49)
CAASPMGNQFYF

SEQ ID NO: 504594 - protein, 13 aa, Homo sapiens
  CDR3 for beta chain variable domain of TCR clone 252297 (TRBV20-1, TRBJ2-2)
CSDSAAGTGELFF

SEQ ID NO: 504595 - protein, 15 aa, Homo sapiens
  CDR3 for alpha chain variable domain of TCR clone 252298 (TRAV8-3, TRAJ45)
CASSYPGGGADGITF

SEQ ID NO: 504596 - protein, 13 aa, Homo sapiens
  CDR3 for beta chain variable domain of TCR clone 252298 (TRBV10-3, TRBJ2-7)
CASKLAVNYEQYF

SEQ ID NO: 504597 - protein, 19 aa, Homo sapiens
  CDR3 for alpha chain variable domain of TCR clone 252299 (TRAV26-1, TRAJ52)
CIGRAHRNAGGTSYGNLTF

SEQ ID NO: 504598 - protein, 15 aa, Homo sapiens
  CDR3 for beta chain variable domain of TCR clone 252299 (TRBV12-4, TRBJ2-5)
CASSPPTGLQETQYF

SEQ ID NO: 504599 - protein, 14 aa, Homo sapiens
  CDR3 for alpha chain variable domain of TCR clone 252300 (TRAV13-1, TRAJ40)
CAASMTSGTYKYIF

SEQ ID NO: 504600 - protein, 14 aa, Homo sapiens
  CDR3 for beta chain variable domain of TCR clone 252300 (TRBV7-8, TRBJ2-3)
CASSLEAGTDTQYF

SEQ ID NO: 504601 - protein, 15 aa, Homo sapiens
  CDR3 for alpha chain variable domain of TCR clone 252301 (TRAV12-3, TRAJ27)
CAMKAYNTNAGKSTF

SEQ ID NO: 504602 - protein, 13 aa, Homo sapiens
  CDR3 for beta chain variable domain of TCR clone 252301 (TRBV11-2, TRBJ2-5)
CASSRGPSETQFF

SEQ ID NO: 504603 - protein, 14 aa, Homo sapiens
  CDR3 for alpha chain variable domain of TCR clone 252302 (TRAV2, TRAJ9)
CAVEDRSGGFKTIF

SEQ ID NO: 504604 - protein, 12 aa, Homo sapiens
  CDR3 for beta chain variable domain of TCR clone 252302 (TRBV7-9, TRBJ1-4)
CASSTDREKLFF

SEQ ID NO: 504605 - protein, 12 aa, Homo sapiens
  CDR3 for alpha chain variable domain of TCR clone 252303 (TRAV13-2, TRAJ23)
CAERHRGGKLIF

SEQ ID NO: 504606 - protein, 16 aa, Homo sapiens
  CDR3 for beta chain variable domain of TCR clone 252303 (TRBV4-1, TRBJ2-5)
CASSPADRAGGETQYF

SEQ ID NO: 504607 - protein, 13 aa, Homo sapiens
  CDR3 for alpha chain variable domain of TCR clone 252304 (TRAV17, TRAJ5)
CALRGTGRRALTF

SEQ ID NO: 504608 - protein, 14 aa, Homo sapiens
  CDR3 for beta chain variable domain of TCR clone 252304 (TRBV12-5, TRBJ2-5)
RASGSRTHQETQYF

SEQ ID NO: 504609 - protein, 15 aa, Homo sapiens
  CDR3 for alpha chain variable domain of TCR clone 252305 (TRAV26-1, TRAJ56)
CIVRVASGANSKLTF

SEQ ID NO: 504610 - protein, 15 aa, Homo sapiens
  CDR3 for beta chain variable domain of TCR clone 252305 (TRBV27, TRBJ2-7)
CASSPQREGQREQYF

SEQ ID NO: 504611 - protein, 14 aa, Homo sapiens
  CDR3 for alpha chain variable domain of TCR clone 252306 (TRAV3, TRAJ17)
CAVRDAAAGNKLTF

SEQ ID NO: 504612 - protein, 13 aa, Homo sapiens
  CDR3 for beta chain variable domain of TCR clone 252306 (TRBV19, TRBJ1-2)
CASGVPGQDGYTF

SEQ ID NO: 504613 - protein, 12 aa, Homo sapiens
  CDR3 for alpha chain variable domain of TCR clone 252307 (TRAV12-3, TRAJ17)
CAMTLTGNKLTF

SEQ ID NO: 504614 - protein, 16 aa, Homo sapiens
  CDR3 for beta chain variable domain of TCR clone 252307 (TRBV7-2, TRBJ2-3)
CASSLAGAWSGDTQYF

SEQ ID NO: 504615 - protein, 10 aa, Homo sapiens
  CDR3 for alpha chain variable domain of TCR clone 252308 (TRAV36/DV7, TRAJ49)
CALTGNQFYF

SEQ ID NO: 504616 - protein, 14 aa, Homo sapiens
  CDR3 for beta chain variable domain of TCR clone 252308 (TRBV18, TRBJ2-5)
CASSPGVSQETQYF

SEQ ID NO: 504617 - protein, 14 aa, Homo sapiens
  CDR3 for alpha chain variable domain of TCR clone 252309 (TRAV35, TRAJ13)
CDGSPSGGYQKVTF

SEQ ID NO: 504618 - protein, 13 aa, Homo sapiens
  CDR3 for beta chain variable domain of TCR clone 252309 (TRBV29-1, TRBJ1-1)
CSVGDSRNTEAFF

SEQ ID NO: 504619 - protein, 14 aa, Homo sapiens
  CDR3 for alpha chain variable domain of TCR clone 252310 (TRAV17, TRAJ31)
CATVLRNNNARLMF

SEQ ID NO: 504620 - protein, 14 aa, Homo sapiens
  CDR3 for beta chain variable domain of TCR clone 252310 (TRBV12-4, TRBJ2-5)
CASSLWQRQETQYF

SEQ ID NO: 504621 - protein, 14 aa, Homo sapiens
  CDR3 for alpha chain variable domain of TCR clone 252311 (TRAV38-1, TRAJ45)
CAYYSGGGADGLTF

SEQ ID NO: 504622 - protein, 20 aa, Homo sapiens
  CDR3 for beta chain variable domain of TCR clone 252311 (TRBV28, TRBJ2-1)
CASTPIGRSPGLAGGNELFF

SEQ ID NO: 504623 - protein, 14 aa, Homo sapiens
  CDR3 for alpha chain variable domain of TCR clone 252312 (TRAV16, TRAJ15)
CALSGPQEGTALIF

SEQ ID NO: 504624 - protein, 12 aa, Homo sapiens
  CDR3 for beta chain variable domain of TCR clone 252312 (TRBV18, TRBJ2-5)
CASSPSKETQYF

SEQ ID NO: 504625 - protein, 15 aa, Homo sapiens
  CDR3 for alpha chain variable domain of TCR clone 252313 (TRAV17, TRAJ10)
CATVLVTGGGNKLTF

SEQ ID NO: 504626 - protein, 16 aa, Homo sapiens
  CDR3 for beta chain variable domain of TCR clone 252313 (TRBV7-9, TRBJ2-3)
CASSPWREVGTDTQYF

SEQ ID NO: 504627 - protein, 14 aa, Homo sapiens
  CDR3 for alpha chain variable domain of TCR clone 252314 (TRAV9-2, TRAJ39)
CALYIYNSGNMLTF

SEQ ID NO: 504628 - protein, 15 aa, Homo sapiens
  CDR3 for beta chain variable domain of TCR clone 252314 (TRBV27, TRBJ1-6)
CASSFDRGLGSPLHF

SEQ ID NO: 504629 - protein, 14 aa, Homo sapiens
  CDR3 for alpha chain variable domain of TCR clone 252315 (TRAV8-3, TRAJ39)
CAVGANNAGNMLTF

SEQ ID NO: 504630 - protein, 15 aa, Homo sapiens
  CDR3 for beta chain variable domain of TCR clone 252315 (TRBV11-2, TRBJ2-1)
CASSKNRGLIYEQFF

SEQ ID NO: 504631 - protein, 14 aa, Homo sapiens
  CDR3 for alpha chain variable domain of TCR clone 252316 (TRAV21, TRAJ35)
CAVMPIGCGNVLHC

SEQ ID NO: 504632 - protein, 12 aa, Homo sapiens
  CDR3 for beta chain variable domain of TCR clone 252316 (TRBV7-9, TRBJ2-7)
CASSIKREAQYF

SEQ ID NO: 504633 - protein, 13 aa, Homo sapiens
  CDR3 for alpha chain variable domain of TCR clone 252317 (TRAV38-1, TRAJ52)
CAFRGTSYGKLTF

SEQ ID NO: 504634 - protein, 15 aa, Homo sapiens
  CDR3 for beta chain variable domain of TCR clone 252317 (TRBV7-8, TRBJ2-5)
CASSDAAGSQDTQYF

SEQ ID NO: 504635 - protein, 13 aa, Homo sapiens
  CDR3 for alpha chain variable domain of TCR clone 252318 (TRAV2, TRAJ29)
CAAQNSGNTPLVF

SEQ ID NO: 504636 - protein, 15 aa, Homo sapiens
  CDR3 for beta chain variable domain of TCR clone 252318 (TRBV7-9, TRBJ1-6)
CASSSPGRGNSPLHF

SEQ ID NO: 504637 - protein, 14 aa, Homo sapiens
  CDR3 for alpha chain variable domain of TCR clone 252319 (TRAV26-1, TRAJ38)
CIADNAGNNRKPIW

SEQ ID NO: 504638 - protein, 16 aa, Homo sapiens
  CDR3 for beta chain variable domain of TCR clone 252319 (TRBV12-5, TRBJ2-5)
CASGPRTSGNQETQYF

SEQ ID NO: 504639 - protein, 16 aa, Homo sapiens
  CDR3 for alpha chain variable domain of TCR clone 252320 (TRAV30, TRAJ24)
CGTEIVDADSWGKFQF

SEQ ID NO: 504640 - protein, 14 aa, Homo sapiens
  CDR3 for beta chain variable domain of TCR clone 252320 (TRBV12-5, TRBJ2-5)
CGSGSRTQQETQYF

SEQ ID NO: 504641 - protein, 15 aa, Homo sapiens
  CDR3 for alpha chain variable domain of TCR clone 252321 (TRAV13-1, TRAJ17)
CAASIERAAGNKRTF

SEQ ID NO: 504642 - protein, 12 aa, Homo sapiens
  CDR3 for beta chain variable domain of TCR clone 252321 (TRBV5-7, TRBJ1-1)
CASSLGRGKAFF

SEQ ID NO: 504643 - protein, 10 aa, Homo sapiens
  CDR3 for alpha chain variable domain of TCR clone 252322 (TRAV23/DV6, TRAJ57)
CAASSTPSQG

SEQ ID NO: 504644 - protein, 14 aa, Homo sapiens
  CDR3 for beta chain variable domain of TCR clone 252322 (TRBV25-1, TRBJ1-1)
CASTHLGGNTEDFF

SEQ ID NO: 504645 - protein, 13 aa, Homo sapiens
  CDR3 for alpha chain variable domain of TCR clone 252323 (TRAV36/DV7, TRAJ53)
CALSGGSNYKLTF

SEQ ID NO: 504646 - protein, 13 aa, Homo sapiens
  CDR3 for beta chain variable domain of TCR clone 252323 (TRBV28, TRBJ2-7)
CASSLPSRYEEYF

SEQ ID NO: 504647 - protein, 17 aa, Homo sapiens
  CDR3 for alpha chain variable domain of TCR clone 252324 (TRAV26-2, TRAJ42)
CILRDVGYGGSQGNLIF

SEQ ID NO: 504648 - protein, 16 aa, Homo sapiens
  CDR3 for beta chain variable domain of TCR clone 252324 (TRBV6-5, TRBJ2-1)
CASSDTLAGHYNEQFF

SEQ ID NO: 504649 - protein, 15 aa, Homo sapiens
  CDR3 for alpha chain variable domain of TCR clone 252325 (TRAV8-3, TRAJ15)
CAVVAPNQAGTALIF

SEQ ID NO: 504650 - protein, 14 aa, Homo sapiens
  CDR3 for beta chain variable domain of TCR clone 252325 (TRBV20-1, TRBJ2-1)
CSPNDEASYNEQFF

SEQ ID NO: 504651 - protein, 15 aa, Homo sapiens
  CDR3 for alpha chain variable domain of TCR clone 252326 (TRAV2, TRAJ18)
CAVEDRGSTLGRLYF

SEQ ID NO: 504652 - protein, 13 aa, Homo sapiens
  CDR3 for beta chain variable domain of TCR clone 252326 (TRBV2, TRBJ2-1)
CATSRGTDNEQFF

SEQ ID NO: 504653 - protein, 16 aa, Homo sapiens
  CDR3 for alpha chain variable domain of TCR clone 252327 (TRAV12-3, TRAJ53)
CAMSPGSGGSNYKLTF

SEQ ID NO: 504654 - protein, 15 aa, Homo sapiens
  CDR3 for beta chain variable domain of TCR clone 252327 (TRBV10-3, TRBJ1-3)
CAISDSQGAGNTIYF

SEQ ID NO: 504655 - protein, 17 aa, Homo sapiens
  CDR3 for alpha chain variable domain of TCR clone 252328 (TRAV3, TRAJ42)
CAVRDRDYGGSKGNIIF

SEQ ID NO: 504656 - protein, 12 aa, Homo sapiens
  CDR3 for beta chain variable domain of TCR clone 252328 (TRBV29-1, TRBJ2-2)
CSVDKYTGELFF

SEQ ID NO: 504657 - protein, 14 aa, Homo sapiens
  CDR3 for alpha chain variable domain of TCR clone 252329 (TRAV26-1, TRAJ38)
CIAAHAGSNRKLIW

SEQ ID NO: 504658 - protein, 13 aa, Homo sapiens
  CDR3 for beta chain variable domain of TCR clone 252329 (TRBV20-1, TRBJ1-1)
CSARGGGNTEAFF

SEQ ID NO: 504659 - protein, 15 aa, Homo sapiens
  CDR3 for alpha chain variable domain of TCR clone 252330 (TRAV17, TRAJ22)
CATVAPSGSARQLTF

SEQ ID NO: 504660 - protein, 17 aa, Homo sapiens
  CDR3 for beta chain variable domain of TCR clone 252330 (TRBV7-3, TRBJ2-5)
CASSLGSGRSGSETQYF

SEQ ID NO: 504661 - protein, 12 aa, Homo sapiens
  CDR3 for alpha chain variable domain of TCR clone 252331 (TRAV27, TRAJ41)
CAGRNSGYALNF

SEQ ID NO: 504662 - protein, 15 aa, Homo sapiens
  CDR3 for beta chain variable domain of TCR clone 252331 (TRBV20-1, TRBJ1-5)
CSATSDRGLGQPHHF

SEQ ID NO: 504663 - protein, 15 aa, Homo sapiens
  CDR3 for alpha chain variable domain of TCR clone 252332 (TRAV8-3, TRAJ23)
CAVGDRYNQGGKLIF

SEQ ID NO: 504664 - protein, 22 aa, Homo sapiens
  CDR3 for beta chain variable domain of TCR clone 252332 (TRBV29-1, TRBJ2-5)
TVSNMSPEDSSIYLCSAGTQDF

SEQ ID NO: 504665 - protein, 14 aa, Homo sapiens
  CDR3 for alpha chain variable domain of TCR clone 252333 (TRAV12-3, TRAJ9)
CAISPNTGGFKTIF

SEQ ID NO: 504666 - protein, 12 aa, Homo sapiens
  CDR3 for beta chain variable domain of TCR clone 252333 (TRBV19, TRBJ1-5)
RASSIAQQPQHF

SEQ ID NO: 504667 - protein, 15 aa, Homo sapiens
  CDR3 for alpha chain variable domain of TCR clone 252334 (TRAV4, TRAJ39)
CLVGPNNIAGNMLTF

SEQ ID NO: 504668 - protein, 16 aa, Homo sapiens
  CDR3 for beta chain variable domain of TCR clone 252334 (TRBV13, TRBJ2-2)
CASSPRTGEHTGELFF

SEQ ID NO: 504669 - protein, 14 aa, Homo sapiens
  CDR3 for alpha chain variable domain of TCR clone 252335 (TRAV1-2, TRAJ8)
CAVREYTGFQKLVF

SEQ ID NO: 504670 - protein, 15 aa, Homo sapiens
  CDR3 for beta chain variable domain of TCR clone 252335 (TRBV4-1, TRBJ2-7)
CASSQNTGRLYEQYF

SEQ ID NO: 504671 - protein, 14 aa, Homo sapiens
  CDR3 for alpha chain variable domain of TCR clone 252336 (TRAV2, TRAJ9)
CAVEDRSGGFKTIF

SEQ ID NO: 504672 - protein, 15 aa, Homo sapiens
  CDR3 for beta chain variable domain of TCR clone 252336 (TRBV5-7, TRBJ1-5)
CASSYGKLWDQPLHF

SEQ ID NO: 504673 - protein, 14 aa, Homo sapiens
  CDR3 for alpha chain variable domain of TCR clone 252337 (TRAV1-2, TRAJ16)
CAVNRFSDGQKLLF

SEQ ID NO: 504674 - protein, 17 aa, Homo sapiens
  CDR3 for beta chain variable domain of TCR clone 252337 (TRBV4-3, TRBJ2-1)
CASSQFSSGRASGEQFF

SEQ ID NO: 504675 - protein, 16 aa, Homo sapiens
  CDR3 for alpha chain variable domain of TCR clone 252338 (TRAV30, TRAJ24)
CGTEIVDADSWGKFQS

SEQ ID NO: 504676 - protein, 12 aa, Homo sapiens
  CDR3 for beta chain variable domain of TCR clone 252338 (TRBV11-2, TRBJ2-1)
CASSPGNNEQFF

SEQ ID NO: 504677 - protein, 20 aa, Homo sapiens
  CDR3 for alpha chain variable domain of TCR clone 252339 (TRAV16, TRAJ32)
CSRGRLSHVLGGGATNKLIF

SEQ ID NO: 504678 - protein, 15 aa, Homo sapiens
  CDR3 for beta chain variable domain of TCR clone 252339 (TRBV9, TRBJ1-6)
CASSVAGTGDSTLHF

SEQ ID NO: 504679 - protein, 14 aa, Homo sapiens
  CDR3 for alpha chain variable domain of TCR clone 252340 (TRAV16, TRAJ31)
CALSGGVETMPLMF

SEQ ID NO: 504680 - protein, 16 aa, Homo sapiens
  CDR3 for beta chain variable domain of TCR clone 252340 (TRBV28, TRBJ2-7)
CASSLFFETGGPEQYF

SEQ ID NO: 504681 - protein, 14 aa, Homo sapiens
  CDR3 for alpha chain variable domain of TCR clone 252341 (TRAV9-2, TRAJ22)
CALRGSGSARQLTF

SEQ ID NO: 504682 - protein, 15 aa, Homo sapiens
  CDR3 for beta chain variable domain of TCR clone 252341 (TRBV7-2, TRBJ2-1)
CASSSGLAGGNEQFF

SEQ ID NO: 504683 - protein, 15 aa, Homo sapiens
  CDR3 for alpha chain variable domain of TCR clone 252342 (TRAV12-3, TRAJ6)
CAMSATTGGSHIPTF

SEQ ID NO: 504684 - protein, 13 aa, Homo sapiens
  CDR3 for beta chain variable domain of TCR clone 252342 (TRBV7-9, TRBJ1-2)
CASSLKQNYGYTF

SEQ ID NO: 504685 - protein, 13 aa, Homo sapiens
  CDR3 for alpha chain variable domain of TCR clone 252343 (TRAV1-1, TRAJ9)
CAPKNTGAFKTIF

SEQ ID NO: 504686 - protein, 14 aa, Homo sapiens
  CDR3 for beta chain variable domain of TCR clone 252343 (TRBV20-1, TRBJ2-1)
CSAQIGGSANEQFF

SEQ ID NO: 504687 - protein, 14 aa, Homo sapiens
  CDR3 for alpha chain variable domain of TCR clone 252344 (TRAV26-1, TRAJ21)
CIVRPPYNFNKFYF

SEQ ID NO: 504688 - protein, 12 aa, Homo sapiens
  CDR3 for beta chain variable domain of TCR clone 252344 (TRBV6-3, TRBJ2-7)
CASSRQGYEQYF

SEQ ID NO: 504689 - protein, 14 aa, Homo sapiens
  CDR3 for alpha chain variable domain of TCR clone 252345 (TRAV12-2, TRAJ13)
CAVKKTGGYQKVTF

SEQ ID NO: 504690 - protein, 13 aa, Homo sapiens
  CDR3 for beta chain variable domain of TCR clone 252345 (TRBV20-1, TRBJ1-1)
CSARGGGNTEAFC

SEQ ID NO: 504691 - protein, 13 aa, Homo sapiens
  CDR3 for alpha chain variable domain of TCR clone 252346 (TRAV2, TRAJ10)
CAVETGGGNKHTF

SEQ ID NO: 504692 - protein, 14 aa, Homo sapiens
  CDR3 for beta chain variable domain of TCR clone 252346 (TRBV20-1, TRBJ2-3)
CSAGGRRGTDTQYF

SEQ ID NO: 504693 - protein, 12 aa, Homo sapiens
  CDR3 for alpha chain variable domain of TCR clone 252347 (TRAV13-2, TRAJ23)
CAERPRGGKLIF

SEQ ID NO: 504694 - protein, 15 aa, Homo sapiens
  CDR3 for beta chain variable domain of TCR clone 252347 (TRBV19, TRBJ1-2)
CASSVGQVLNYGYTF

SEQ ID NO: 504695 - protein, 17 aa, Homo sapiens
  CDR3 for alpha chain variable domain of TCR clone 252348 (TRAV3, TRAJ6)
CAVSDGPRAGGSYIPTF

SEQ ID NO: 504696 - protein, 17 aa, Homo sapiens
  CDR3 for beta chain variable domain of TCR clone 252348 (TRBV15, TRBJ1-5)
CATSRAPPGTRNQPQHF

SEQ ID NO: 504697 - protein, 15 aa, Homo sapiens
  CDR3 for alpha chain variable domain of TCR clone 252349 (TRAV12-1, TRAJ9)
CVVSFGDTGCFKTIF

SEQ ID NO: 504698 - protein, 19 aa, Homo sapiens
  CDR3 for beta chain variable domain of TCR clone 252349 (TRBV25-1, TRBJ2-2)
CAILVYRVDRGRKTGELFF

SEQ ID NO: 504699 - protein, 13 aa, Homo sapiens
  CDR3 for alpha chain variable domain of TCR clone 252350 (TRAV1-1, TRAJ31)
CASYLINNARLMF

SEQ ID NO: 504700 - protein, 13 aa, Homo sapiens
  CDR3 for beta chain variable domain of TCR clone 252350 (TRBV15, TRBJ1-6)
CATSGGLNSPLHF

SEQ ID NO: 504701 - protein, 15 aa, Homo sapiens
  CDR3 for alpha chain variable domain of TCR clone 252351 (TRAV26-1, TRAJ56)
CIVRVDNGANSKLTF

SEQ ID NO: 504702 - protein, 15 aa, Homo sapiens
  CDR3 for beta chain variable domain of TCR clone 252351 (TRBV20-1, TRBJ2-7)
CSARAPTEVGHEQYF

SEQ ID NO: 504703 - protein, 14 aa, Homo sapiens
  CDR3 for alpha chain variable domain of TCR clone 252352 (TRAV26-1, TRAJ38)
CIADNAGNNRKLMW

SEQ ID NO: 504704 - protein, 15 aa, Homo sapiens
  CDR3 for beta chain variable domain of TCR clone 252352 (TRBV7-6, TRBJ1-4)
CASSLGAGAGEKLFF

SEQ ID NO: 504705 - protein, 13 aa, Homo sapiens
  CDR3 for alpha chain variable domain of TCR clone 252353 (TRAV8-6, TRAJ43)
CAVGDLGNNDMRF

SEQ ID NO: 504706 - protein, 13 aa, Homo sapiens
  CDR3 for beta chain variable domain of TCR clone 252353 (TRBV20-1, TRBJ1-1)
CSARGGGNTEAFF

SEQ ID NO: 504707 - protein, 12 aa, Homo sapiens
  CDR3 for alpha chain variable domain of TCR clone 252354 (TRAV13-1, TRAJ48)
CAARAGGEKLTF

SEQ ID NO: 504708 - protein, 14 aa, Homo sapiens
  CDR3 for beta chain variable domain of TCR clone 252354 (TRBV20-1, TRBJ2-7)
CSASSTSGTYEQYF

SEQ ID NO: 504709 - protein, 12 aa, Homo sapiens
  CDR3 for alpha chain variable domain of TCR clone 252355 (TRAV12-3, TRAJ41)
CAMSYSGYALNF

SEQ ID NO: 504710 - protein, 13 aa, Homo sapiens
  CDR3 for beta chain variable domain of TCR clone 252355 (TRBV7-3, TRBJ1-1)
CASSQDWDDEAFF

SEQ ID NO: 504711 - protein, 13 aa, Homo sapiens
  CDR3 for alpha chain variable domain of TCR clone 252356 (TRAV3, TRAJ27)
CAVRPLGAGKSTF

SEQ ID NO: 504712 - protein, 17 aa, Homo sapiens
  CDR3 for beta chain variable domain of TCR clone 252356 (TRBV24-1, TRBJ2-4)
CATSDAEARGVRNIQYF

SEQ ID NO: 504713 - protein, 14 aa, Homo sapiens
  CDR3 for alpha chain variable domain of TCR clone 252357 (TRAV16, TRAJ33)
CALSATYSHYQLIW

SEQ ID NO: 504714 - protein, 12 aa, Homo sapiens
  CDR3 for beta chain variable domain of TCR clone 252357 (TRBV5-1, TRBJ1-2)
CASSQDTYGYTF

SEQ ID NO: 504715 - protein, 13 aa, Homo sapiens
  CDR3 for alpha chain variable domain of TCR clone 252358 (TRAV13-1, TRAJ33)
CAASRAGNYQLIW

SEQ ID NO: 504716 - protein, 15 aa, Homo sapiens
  CDR3 for beta chain variable domain of TCR clone 252358 (TRBV2, TRBJ2-7)
EDSAMYFYASSEQYF

SEQ ID NO: 504717 - protein, 18 aa, Homo sapiens
  CDR3 for alpha chain variable domain of TCR clone 252359 (TRAV9-2, TRAJ52)
CALSRHNSGGTSYGKLTF

SEQ ID NO: 504718 - protein, 13 aa, Homo sapiens
  CDR3 for beta chain variable domain of TCR clone 252359 (TRBV7-9, TRBJ1-2)
CASSLKENYGYSF

SEQ ID NO: 504719 - protein, 13 aa, Homo sapiens
  CDR3 for alpha chain variable domain of TCR clone 252360 (TRAV2, TRAJ40)
RAVVTSGTYKSTF

SEQ ID NO: 504720 - protein, 14 aa, Homo sapiens
  CDR3 for beta chain variable domain of TCR clone 252360 (TRBV19, TRBJ2-1)
CASPTFVLSGEQFF

SEQ ID NO: 504721 - protein, 14 aa, Homo sapiens
  CDR3 for alpha chain variable domain of TCR clone 252361 (TRAV1-2, TRAJ8)
CAVREDTGFQKLVF

SEQ ID NO: 504722 - protein, 15 aa, Homo sapiens
  CDR3 for beta chain variable domain of TCR clone 252361 (TRBV18, TRBJ2-5)
CASSPDPGLQETQYF

SEQ ID NO: 504723 - protein, 14 aa, Homo sapiens
  CDR3 for alpha chain variable domain of TCR clone 252362 (TRAV8-3, TRAJ47)
CAVGHMEYGNELVF

SEQ ID NO: 504724 - protein, 15 aa, Homo sapiens
  CDR3 for beta chain variable domain of TCR clone 252362 (TRBV11-2, TRBJ2-1)
CASSLTSGGYNEQFF

SEQ ID NO: 504725 - protein, 13 aa, Homo sapiens
  CDR3 for alpha chain variable domain of TCR clone 252363 (TRAV21, TRAJ27)
CAALNTNAGKSTF

SEQ ID NO: 504726 - protein, 16 aa, Homo sapiens
  CDR3 for beta chain variable domain of TCR clone 252363 (TRBV19, TRBJ2-1)
CASSKAGPSSYNEQFF

SEQ ID NO: 504727 - protein, 16 aa, Homo sapiens
  CDR3 for alpha chain variable domain of TCR clone 252364 (TRAV30, TRAJ24)
CGTEIVDADSWGKFQF

SEQ ID NO: 504728 - protein, 14 aa, Homo sapiens
  CDR3 for beta chain variable domain of TCR clone 252364 (TRBV12-5, TRBJ2-3)
CASGSRTHQETQYF

SEQ ID NO: 504729 - protein, 14 aa, Homo sapiens
  CDR3 for alpha chain variable domain of TCR clone 252365 (TRAV2, TRAJ29)
CAVTPPSGDTPLVF

SEQ ID NO: 504730 - protein, 13 aa, Homo sapiens
  CDR3 for beta chain variable domain of TCR clone 252365 (TRBV11-2, TRBJ2-1)
CASSLGLAGGRFF

SEQ ID NO: 504731 - protein, 15 aa, Homo sapiens
  CDR3 for alpha chain variable domain of TCR clone 252366 (TRAV20, TRAJ50)
CAVRQMKTSYDKVIF

SEQ ID NO: 504732 - protein, 15 aa, Homo sapiens
  CDR3 for beta chain variable domain of TCR clone 252366 (TRBV11-2, TRBJ2-2)
CASRGLAANAGELFF

SEQ ID NO: 504733 - protein, 14 aa, Homo sapiens
  CDR3 for alpha chain variable domain of TCR clone 252367 (TRAV1-1, TRAJ30)
CAVRSLNRYDKIIF

SEQ ID NO: 504734 - protein, 12 aa, Homo sapiens
  CDR3 for beta chain variable domain of TCR clone 252367 (TRBV7-9, TRBJ2-7)
CASSFGSYEQYF

SEQ ID NO: 504735 - protein, 14 aa, Homo sapiens
  CDR3 for alpha chain variable domain of TCR clone 252368 (TRAV17, TRAJ16)
CATADFSDGQKLLF

SEQ ID NO: 504736 - protein, 12 aa, Homo sapiens
  CDR3 for beta chain variable domain of TCR clone 252368 (TRBV24-1, TRBJ1-1)
CATLYPDTEDFI

SEQ ID NO: 504737 - protein, 14 aa, Homo sapiens
  CDR3 for alpha chain variable domain of TCR clone 252369 (TRAV12-2, TRAJ13)
CAVKKTGDYQKVTF

SEQ ID NO: 504738 - protein, 13 aa, Homo sapiens
  CDR3 for beta chain variable domain of TCR clone 252369 (TRBV7-2, TRBJ2-5)
CASSQTSVETQYF

SEQ ID NO: 504739 - protein, 17 aa, Homo sapiens
  CDR3 for alpha chain variable domain of TCR clone 252370 (TRAV3, TRAJ6)
CAVRDGPRAGGRYIPTF

SEQ ID NO: 504740 - protein, 14 aa, Homo sapiens
  CDR3 for beta chain variable domain of TCR clone 252370 (TRBV7-2, TRBJ2-7)
CASSPKTSFYEQDF

SEQ ID NO: 504741 - protein, 11 aa, Homo sapiens
  CDR3 for alpha chain variable domain of TCR clone 252371 (TRAV12-3, TRAJ27)
CAMANAGKSTF

SEQ ID NO: 504742 - protein, 15 aa, Homo sapiens
  CDR3 for beta chain variable domain of TCR clone 252371 (TRBV7-9, TRBJ2-7)
CASSLALAEAYEQYF

SEQ ID NO: 504743 - protein, 14 aa, Homo sapiens
  CDR3 for alpha chain variable domain of TCR clone 252372 (TRAV20, TRAJ49)
CAVQAVVAGNQFYF

SEQ ID NO: 504744 - protein, 15 aa, Homo sapiens
  CDR3 for beta chain variable domain of TCR clone 252372 (TRBV5-1, TRBJ2-7)
CASSLDLTSSYEQYF

SEQ ID NO: 504745 - protein, 14 aa, Homo sapiens
  CDR3 for alpha chain variable domain of TCR clone 252373 (TRAV3, TRAJ17)
CAVRDAAPGNKLTF

SEQ ID NO: 504746 - protein, 15 aa, Homo sapiens
  CDR3 for beta chain variable domain of TCR clone 252373 (TRBV9, TRBJ1-6)
CASSVAGTGDSPLHF

SEQ ID NO: 504747 - protein, 14 aa, Homo sapiens
  CDR3 for alpha chain variable domain of TCR clone 252374 (TRAV35, TRAJ28)
CAGVEGAGSYQLTF

SEQ ID NO: 504748 - protein, 15 aa, Homo sapiens
  CDR3 for beta chain variable domain of TCR clone 252374 (TRBV5-1, TRBJ2-1)
CASSPPRAPYNEQFF

SEQ ID NO: 504749 - protein, 15 aa, Homo sapiens
  CDR3 for alpha chain variable domain of TCR clone 252375 (TRAV3, TRAJ9)
CAVRARNTGGFKTIF

SEQ ID NO: 504750 - protein, 14 aa, Homo sapiens
  CDR3 for beta chain variable domain of TCR clone 252375 (TRBV7-2, TRBJ2-7)
CASSLYPGRYEQYF

SEQ ID NO: 504751 - protein, 20 aa, Homo sapiens
  CDR3 for alpha chain variable domain of TCR clone 252376 (TRAV26-1, TRAJ42)
CCVLLHRQTYYGGSQGNLIF

SEQ ID NO: 504752 - protein, 16 aa, Homo sapiens
  CDR3 for beta chain variable domain of TCR clone 252376 (TRBV7-3, TRBJ2-2)
CASSLKRVTLSGELFF

SEQ ID NO: 504753 - protein, 16 aa, Homo sapiens
  CDR3 for alpha chain variable domain of TCR clone 252377 (TRAV3, TRAJ21)
CAVRDIERGNFNKFYF

SEQ ID NO: 504754 - protein, 13 aa, Homo sapiens
  CDR3 for beta chain variable domain of TCR clone 252377 (TRBV7-9, TRBJ2-1)
CASSWESYNEQFF

SEQ ID NO: 504755 - protein, 14 aa, Homo sapiens
  CDR3 for alpha chain variable domain of TCR clone 252378 (TRAV12-3, TRAJ10)
SHLPLTGGGNKLTF

SEQ ID NO: 504756 - protein, 13 aa, Homo sapiens
  CDR3 for beta chain variable domain of TCR clone 252378 (TRBV7-7, TRBJ2-7)
CASSRSGQETQYF

SEQ ID NO: 504757 - protein, 13 aa, Homo sapiens
  CDR3 for alpha chain variable domain of TCR clone 252379 (TRAV12-2, TRAJ10)
CAVPTGGGNKLTF

SEQ ID NO: 504758 - protein, 11 aa, Homo sapiens
  CDR3 for beta chain variable domain of TCR clone 252379 (TRBV6-1, TRBJ2-1)
CASFSSNEQFF

SEQ ID NO: 504759 - protein, 14 aa, Homo sapiens
  CDR3 for alpha chain variable domain of TCR clone 252380 (TRAV12-2, TRAJ4)
CAEDLSGGYNKLIL

SEQ ID NO: 504760 - protein, 13 aa, Homo sapiens
  CDR3 for beta chain variable domain of TCR clone 252380 (TRBV7-9, TRBJ1-2)
CASSVKQNYGYTF

SEQ ID NO: 504761 - protein, 15 aa, Homo sapiens
  CDR3 for alpha chain variable domain of TCR clone 252381 (TRAV26-1, TRAJ38)
CIVRAEGGNDRKLIW

SEQ ID NO: 504762 - protein, 14 aa, Homo sapiens
  CDR3 for beta chain variable domain of TCR clone 252381 (TRBV7-6, TRBJ2-5)
CASSSPSGSETQYF

SEQ ID NO: 504763 - protein, 11 aa, Homo sapiens
  CDR3 for alpha chain variable domain of TCR clone 252382 (TRAV2, TRAJ33)
CAVDSNYQLIW

SEQ ID NO: 504764 - protein, 15 aa, Homo sapiens
  CDR3 for beta chain variable domain of TCR clone 252382 (TRBV19, TRBJ1-1)
CASTSGQIQNTEAFL

SEQ ID NO: 504765 - protein, 15 aa, Homo sapiens
  CDR3 for alpha chain variable domain of TCR clone 252383 (TRAV17, TRAJ56)
SATDANTGANSKLTF

SEQ ID NO: 504766 - protein, 12 aa, Homo sapiens
  CDR3 for beta chain variable domain of TCR clone 252383 (TRBV7-8, TRBJ2-7)
CASSIGDREQYF

SEQ ID NO: 504767 - protein, 14 aa, Homo sapiens
  CDR3 for alpha chain variable domain of TCR clone 252384 (TRAV20, TRAJ56)
CAVQFGGANSKLTF

SEQ ID NO: 504768 - protein, 15 aa, Homo sapiens
  CDR3 for beta chain variable domain of TCR clone 252384 (TRBV6-3, TRBJ2-7)
CASSSPGTVFYEQYF

SEQ ID NO: 504769 - protein, 16 aa, Homo sapiens
  CDR3 for alpha chain variable domain of TCR clone 252385 (TRAV3, TRAJ6)
CAVRDGMGRRKLHPYI

SEQ ID NO: 504770 - protein, 15 aa, Homo sapiens
  CDR3 for beta chain variable domain of TCR clone 252385 (TRBV9, TRBJ2-1)
CASSLAGSSYNEQFF

SEQ ID NO: 504771 - protein, 16 aa, Homo sapiens
  CDR3 for alpha chain variable domain of TCR clone 252386 (TRAV4, TRAJ18)
CCVLLIGGSTLGRLYF

SEQ ID NO: 504772 - protein, 13 aa, Homo sapiens
  CDR3 for beta chain variable domain of TCR clone 252386 (TRBV15, TRBJ2-7)
CATSTTGHYEQYF

SEQ ID NO: 504773 - protein, 15 aa, Homo sapiens
  CDR3 for alpha chain variable domain of TCR clone 252387 (TRAV20, TRAJ53)
CAVQASGGSNYKLTF

SEQ ID NO: 504774 - protein, 12 aa, Homo sapiens
  CDR3 for beta chain variable domain of TCR clone 252387 (TRBV7-8, TRBJ2-7)
CASSLGEREQYF

SEQ ID NO: 504775 - protein, 16 aa, Homo sapiens
  CDR3 for alpha chain variable domain of TCR clone 252388 (TRAV14/DV4, TRAJ53)
CAMREGGGGSNYKLTF

SEQ ID NO: 504776 - protein, 13 aa, Homo sapiens
  CDR3 for beta chain variable domain of TCR clone 252388 (TRBV2, TRBJ1-1)
CASSEGGNTEAFF

SEQ ID NO: 504777 - protein, 13 aa, Homo sapiens
  CDR3 for alpha chain variable domain of TCR clone 252389 (TRAV2, TRAJ15)
CAVASQAGTALIF

SEQ ID NO: 504778 - protein, 15 aa, Homo sapiens
  CDR3 for beta chain variable domain of TCR clone 252389 (TRBV7-3, TRBJ2-1)
CASSPTGGGGVEQFF

SEQ ID NO: 504779 - protein, 17 aa, Homo sapiens
  CDR3 for alpha chain variable domain of TCR clone 252390 (TRAV17, TRAJ28)
CATDAVYSGVGSYQLTF

SEQ ID NO: 504780 - protein, 16 aa, Homo sapiens
  CDR3 for beta chain variable domain of TCR clone 252390 (TRBV6-1, TRBJ2-5)
RASSETLDRGAETQYF

SEQ ID NO: 504781 - protein, 12 aa, Homo sapiens
  CDR3 for alpha chain variable domain of TCR clone 252391 (TRAV12-3, TRAJ31)
CAMSVPNARLMF

SEQ ID NO: 504782 - protein, 12 aa, Homo sapiens
  CDR3 for beta chain variable domain of TCR clone 252391 (TRBV11-2, TRBJ2-1)
CASSVQREGQLF

SEQ ID NO: 504783 - protein, 14 aa, Homo sapiens
  CDR3 for alpha chain variable domain of TCR clone 252392 (TRAV12-3, TRAJ28)
CATNSGAGSYQLTF

SEQ ID NO: 504784 - protein, 15 aa, Homo sapiens
  CDR3 for beta chain variable domain of TCR clone 252392 (TRBV2, TRBJ2-1)
CASSELAGSYNEQFF

SEQ ID NO: 504785 - protein, 12 aa, Homo sapiens
  CDR3 for alpha chain variable domain of TCR clone 252393 (TRAV13-1, TRAJ15)
CAASQAGTALIF

SEQ ID NO: 504786 - protein, 14 aa, Homo sapiens
  CDR3 for beta chain variable domain of TCR clone 252393 (TRBV19, TRBJ2-1)
CASPTSVLSGEQFF

SEQ ID NO: 504787 - protein, 17 aa, Homo sapiens
  CDR3 for alpha chain variable domain of TCR clone 252394 (TRAV13-1, TRAJ52)
CAASSGAVGTSYGKLTF

SEQ ID NO: 504788 - protein, 12 aa, Homo sapiens
  CDR3 for beta chain variable domain of TCR clone 252394 (TRBV11-2, TRBJ2-2)
CASSLGGGELFF

SEQ ID NO: 504789 - protein, 14 aa, Homo sapiens
  CDR3 for alpha chain variable domain of TCR clone 252395 (TRAV2, TRAJ37)
CAVDFTSNTGKLIF

SEQ ID NO: 504790 - protein, 13 aa, Homo sapiens
  CDR3 for beta chain variable domain of TCR clone 252395 (TRBV4-3, TRBJ1-1)
CASSQAGNTEAFF

SEQ ID NO: 504791 - protein, 12 aa, Homo sapiens
  CDR3 for alpha chain variable domain of TCR clone 252396 (TRAV8-3, TRAJ26)
CAGDNYGQNFVF

SEQ ID NO: 504792 - protein, 13 aa, Homo sapiens
  CDR3 for beta chain variable domain of TCR clone 252396 (TRBV6-1, TRBJ2-1)
CASSHDRNNEQFF

SEQ ID NO: 504793 - protein, 14 aa, Homo sapiens
  CDR3 for alpha chain variable domain of TCR clone 252397 (TRAV12-2, TRAJ36)
CAVNTPTGANNLFF

SEQ ID NO: 504794 - protein, 13 aa, Homo sapiens
  CDR3 for beta chain variable domain of TCR clone 252397 (TRBV20-1, TRBJ1-6)
CSAPTGLGSPLHF

SEQ ID NO: 504795 - protein, 15 aa, Homo sapiens
  CDR3 for alpha chain variable domain of TCR clone 252398 (TRAV12-1, TRAJ4)
CVVTPWMGGYNKLIF

SEQ ID NO: 504796 - protein, 12 aa, Homo sapiens
  CDR3 for beta chain variable domain of TCR clone 252398 (TRBV25-1, TRBJ2-7)
CASSDGFDEQYF

SEQ ID NO: 504797 - protein, 13 aa, Homo sapiens
  CDR3 for alpha chain variable domain of TCR clone 252399 (TRAV2, TRAJ20)
CAVEDPSEYKLSS

SEQ ID NO: 504798 - protein, 16 aa, Homo sapiens
  CDR3 for beta chain variable domain of TCR clone 252399 (TRBV25-1, TRBJ2-7)
CASSELTGGGIYEQYF

SEQ ID NO: 504799 - protein, 15 aa, Homo sapiens
  CDR3 for alpha chain variable domain of TCR clone 252400 (TRAV13-1, TRAJ16)
CAERYQMSRSCSLQG

SEQ ID NO: 504800 - protein, 13 aa, Homo sapiens
  CDR3 for beta chain variable domain of TCR clone 252400 (TRBV4-1, TRBJ2-1)
CASSQAGGDEQFF

SEQ ID NO: 504801 - protein, 13 aa, Homo sapiens
  CDR3 for alpha chain variable domain of TCR clone 252401 (TRAV8-3, TRAJ48)
CSVVPFGNEKLTF

SEQ ID NO: 504802 - protein, 15 aa, Homo sapiens
  CDR3 for beta chain variable domain of TCR clone 252401 (TRBV11-2, TRBJ2-1)
CASSSPATRYNEQFF

SEQ ID NO: 504803 - protein, 14 aa, Homo sapiens
  CDR3 for alpha chain variable domain of TCR clone 252402 (TRAV17, TRAJ22)
CATSPSGSARQLTF

SEQ ID NO: 504804 - protein, 15 aa, Homo sapiens
  CDR3 for beta chain variable domain of TCR clone 252402 (TRBV9, TRBJ2-1)
CASSLAGSSYNEQFF

SEQ ID NO: 504805 - protein, 17 aa, Homo sapiens
  CDR3 for alpha chain variable domain of TCR clone 252403 (TRAV8-1, TRAJ43)
RAVTNDMRFGAGTRLTV

SEQ ID NO: 504806 - protein, 12 aa, Homo sapiens
  CDR3 for beta chain variable domain of TCR clone 252403 (TRBV11-2, TRBJ2-2)
CASSLGGGELFF

SEQ ID NO: 504807 - protein, 13 aa, Homo sapiens
  CDR3 for alpha chain variable domain of TCR clone 252404 (TRAV16, TRAJ26)
CITVLCLGQNFVF

SEQ ID NO: 504808 - protein, 15 aa, Homo sapiens
  CDR3 for beta chain variable domain of TCR clone 252404 (TRBV20-1, TRBJ2-7)
CSARDRVSGMDEQYF

SEQ ID NO: 504809 - protein, 15 aa, Homo sapiens
  CDR3 for alpha chain variable domain of TCR clone 252405 (TRAV26-1, TRAJ44)
CIVRANTGTASSLTF

SEQ ID NO: 504810 - protein, 16 aa, Homo sapiens
  CDR3 for beta chain variable domain of TCR clone 252405 (TRBV7-7, TRBJ2-1)
CASSLASGTSYNEQFF

SEQ ID NO: 504811 - protein, 12 aa, Homo sapiens
  CDR3 for alpha chain variable domain of TCR clone 252406 (TRAV9-2, TRAJ36)
CALKKWANNLFF

SEQ ID NO: 504812 - protein, 13 aa, Homo sapiens
  CDR3 for beta chain variable domain of TCR clone 252406 (TRBV27, TRBJ1-1)
CASSLSIGGEAFF

SEQ ID NO: 504813 - protein, 13 aa, Homo sapiens
  CDR3 for alpha chain variable domain of TCR clone 252407 (TRAV30, TRAJ24)
CGTEGNGWGKFQF

SEQ ID NO: 504814 - protein, 17 aa, Homo sapiens
  CDR3 for beta chain variable domain of TCR clone 252407 (TRBV7-8, TRBJ1-1)
CASTNPTGTSLNTEAFF

SEQ ID NO: 504815 - protein, 14 aa, Homo sapiens
  CDR3 for alpha chain variable domain of TCR clone 252408 (TRAV13-2, TRAJ47)
CAESSMEYGNKLVF

SEQ ID NO: 504816 - protein, 17 aa, Homo sapiens
  CDR3 for beta chain variable domain of TCR clone 252408 (TRBV7-3, TRBJ2-3)
CASSLMKRMRGADTQYF

SEQ ID NO: 504817 - protein, 16 aa, Homo sapiens
  CDR3 for alpha chain variable domain of TCR clone 252409 (TRAV3, TRAJ27)
CAVRDPQGTNAGKSTF

SEQ ID NO: 504818 - protein, 15 aa, Homo sapiens
  CDR3 for beta chain variable domain of TCR clone 252409 (TRBV7-9, TRBJ2-3)
CASSVGDRYTDTQYF

SEQ ID NO: 504819 - protein, 12 aa, Homo sapiens
  CDR3 for alpha chain variable domain of TCR clone 252410 (TRAV38-2/DV8, TRAJ26)
CAYSTYGQNFVF

SEQ ID NO: 504820 - protein, 16 aa, Homo sapiens
  CDR3 for beta chain variable domain of TCR clone 252410 (TRBV12-4, TRBJ1-5)
CASRQPVEGSNQPQHF

SEQ ID NO: 504821 - protein, 17 aa, Homo sapiens
  CDR3 for alpha chain variable domain of TCR clone 252411 (TRAV3, TRAJ28)
CAVREAYSGAGSCQLTF

SEQ ID NO: 504822 - protein, 15 aa, Homo sapiens
  CDR3 for beta chain variable domain of TCR clone 252411 (TRBV19, TRBJ2-7)
CASSFNSGGVWEQYF

SEQ ID NO: 504823 - protein, 15 aa, Homo sapiens
  CDR3 for alpha chain variable domain of TCR clone 252412 (TRAV36/DV7, TRAJ53)
WVGENSGGSNYKLTF

SEQ ID NO: 504824 - protein, 15 aa, Homo sapiens
  CDR3 for beta chain variable domain of TCR clone 252412 (TRBV6-1, TRBJ2-5)
CASSEGWGIQETQYF

SEQ ID NO: 504825 - protein, 12 aa, Homo sapiens
  CDR3 for alpha chain variable domain of TCR clone 252413 (TRAV21, TRAJ11)
CAATSGYSTLTF

SEQ ID NO: 504826 - protein, 14 aa, Homo sapiens
  CDR3 for beta chain variable domain of TCR clone 252413 (TRBV20-1, TRBJ2-7)
CSAPELAGVCEQYF

SEQ ID NO: 504827 - protein, 15 aa, Homo sapiens
  CDR3 for alpha chain variable domain of TCR clone 252414 (TRAV17, TRAJ56)
CATDANTGANSKLTF

SEQ ID NO: 504828 - protein, 14 aa, Homo sapiens
  CDR3 for beta chain variable domain of TCR clone 252414 (TRBV19, TRBJ1-5)
CAISLGTGGQPQHF

SEQ ID NO: 504829 - protein, 17 aa, Homo sapiens
  CDR3 for alpha chain variable domain of TCR clone 252415 (TRAV3, TRAJ42)
CAVRDRDYGGSQGNFIF

SEQ ID NO: 504830 - protein, 15 aa, Homo sapiens
  CDR3 for beta chain variable domain of TCR clone 252415 (TRBV27, TRBJ1-6)
CASSFDRGLGSPLHF

SEQ ID NO: 504831 - protein, 14 aa, Homo sapiens
  CDR3 for alpha chain variable domain of TCR clone 252416 (TRAV1-2, TRAJ8)
CAVREDTGFQKLVF

SEQ ID NO: 504832 - protein, 12 aa, Homo sapiens
  CDR3 for beta chain variable domain of TCR clone 252416 (TRBV2, TRBJ2-1)
CAYGPLGNEQFF

SEQ ID NO: 504833 - protein, 14 aa, Homo sapiens
  CDR3 for alpha chain variable domain of TCR clone 252417 (TRAV1-2, TRAJ16)
CAGNRFSDGQKLLF

SEQ ID NO: 504834 - protein, 14 aa, Homo sapiens
  CDR3 for beta chain variable domain of TCR clone 252417 (TRBV12-4, TRBJ1-1)
CASSLGTGGTEAFF

SEQ ID NO: 504835 - protein, 13 aa, Homo sapiens
  CDR3 for alpha chain variable domain of TCR clone 252418 (TRAV12-3, TRAJ4)
CATTSVGYNKLIF

SEQ ID NO: 504836 - protein, 15 aa, Homo sapiens
  CDR3 for beta chain variable domain of TCR clone 252418 (TRBV7-2, TRBJ2-3)
CASRLAGGSTDTQYF

SEQ ID NO: 504837 - protein, 13 aa, Homo sapiens
  CDR3 for alpha chain variable domain of TCR clone 252419 (TRAV21, TRAJ36)
CAVIKTGINNLFF

SEQ ID NO: 504838 - protein, 13 aa, Homo sapiens
  CDR3 for beta chain variable domain of TCR clone 252419 (TRBV29-1, TRBJ2-3)
CSATRGGRDTQYF

SEQ ID NO: 504839 - protein, 14 aa, Homo sapiens
  CDR3 for alpha chain variable domain of TCR clone 252420 (TRAV29/DV5, TRAJ36)
CAARRKTGAKNLFF

SEQ ID NO: 504840 - protein, 14 aa, Homo sapiens
  CDR3 for beta chain variable domain of TCR clone 252420 (TRBV20-1, TRBJ1-1)
CSAQTRIGGTEAFF

SEQ ID NO: 504841 - protein, 13 aa, Homo sapiens
  CDR3 for alpha chain variable domain of TCR clone 252421 (TRAV12-1, TRAJ26)
CVVRRNYGQNFVF

SEQ ID NO: 504842 - protein, 16 aa, Homo sapiens
  CDR3 for beta chain variable domain of TCR clone 252421 (TRBV7-2, TRBJ2-5)
CASSPGGARRGETQYF

SEQ ID NO: 504843 - protein, 19 aa, Homo sapiens
  CDR3 for alpha chain variable domain of TCR clone 252422 (TRAV38-1, TRAJ53)
CASMKHGLESGGSNYKLTF

SEQ ID NO: 504844 - protein, 12 aa, Homo sapiens
  CDR3 for beta chain variable domain of TCR clone 252422 (TRBV11-2, TRBJ2-2)
CASSLPTGELFF

SEQ ID NO: 504845 - protein, 14 aa, Homo sapiens
  CDR3 for alpha chain variable domain of TCR clone 252423 (TRAV12-2, TRAJ13)
CAVKKTRGYQKVTF

SEQ ID NO: 504846 - protein, 15 aa, Homo sapiens
  CDR3 for beta chain variable domain of TCR clone 252423 (TRBV7-3, TRBJ2-1)
CVSSPTGGGEVEQFF

SEQ ID NO: 504847 - protein, 16 aa, Homo sapiens
  CDR3 for alpha chain variable domain of TCR clone 252424 (TRAV30, TRAJ24)
CGTEIVDADSWGKFQF

SEQ ID NO: 504848 - protein, 16 aa, Homo sapiens
  CDR3 for beta chain variable domain of TCR clone 252424 (TRBV7-3, TRBJ2-2)
CASSLNRGTLSGELFF

SEQ ID NO: 504849 - protein, 16 aa, Homo sapiens
  CDR3 for alpha chain variable domain of TCR clone 252425 (TRAV3, TRAJ37)
CAVRGKGSGNTGKLIF

SEQ ID NO: 504850 - protein, 15 aa, Homo sapiens
  CDR3 for beta chain variable domain of TCR clone 252425 (TRBV7-3, TRBJ2-1)
CQQLQTSGRYNEQFF

SEQ ID NO: 504851 - protein, 19 aa, Homo sapiens
  CDR3 for alpha chain variable domain of TCR clone 252426 (TRAV2, TRAJ20)
ILQVREADAAVYRDCKLSF

SEQ ID NO: 504852 - protein, 13 aa, Homo sapiens
  CDR3 for beta chain variable domain of TCR clone 252426 (TRBV29-1, TRBJ1-1)
CSVGDSRNTEAFF

SEQ ID NO: 504853 - protein, 10 aa, Homo sapiens
  CDR3 for alpha chain variable domain of TCR clone 252427 (TRAV25, TRAJ53)
SGGSNYKLTF

SEQ ID NO: 504854 - protein, 14 aa, Homo sapiens
  CDR3 for beta chain variable domain of TCR clone 252427 (TRBV11-2, TRBJ2-3)
CASSRLARTDTQYF

SEQ ID NO: 504855 - protein, 13 aa, Homo sapiens
  CDR3 for alpha chain variable domain of TCR clone 252428 (TRAV4, TRAJ42)
CLVGGGSQGNLIF

SEQ ID NO: 504856 - protein, 17 aa, Homo sapiens
  CDR3 for beta chain variable domain of TCR clone 252428 (TRBV16, TRBJ2-1)
CASSPLTSGSYYNEQFF

SEQ ID NO: 504857 - protein, 16 aa, Homo sapiens
  CDR3 for alpha chain variable domain of TCR clone 252429 (TRAV30, TRAJ49)
SAAQRVGPNTGNQFYF

SEQ ID NO: 504858 - protein, 15 aa, Homo sapiens
  CDR3 for beta chain variable domain of TCR clone 252429 (TRBV7-2, TRBJ2-1)
CASSSELAGGNEQFF

SEQ ID NO: 504859 - protein, 14 aa, Homo sapiens
  CDR3 for alpha chain variable domain of TCR clone 252430 (TRAV26-1, TRAJ52)
CIVKGGTSYGKLTF

SEQ ID NO: 504860 - protein, 13 aa, Homo sapiens
  CDR3 for beta chain variable domain of TCR clone 252430 (TRBV28, TRBJ2-5)
CASSSRNQETQYF

SEQ ID NO: 504861 - protein, 15 aa, Homo sapiens
  CDR3 for alpha chain variable domain of TCR clone 252431 (TRAV13-1, TRAJ32)
CAASNGWWCSKQAHL

SEQ ID NO: 504862 - protein, 15 aa, Homo sapiens
  CDR3 for beta chain variable domain of TCR clone 252431 (TRBV20-1, TRBJ1-2)
CSAIRTGAFNYGYTF

SEQ ID NO: 504863 - protein, 13 aa, Homo sapiens
  CDR3 for alpha chain variable domain of TCR clone 252432 (TRAV12-3, TRAJ33)
RAMSVNSNYQLIW

SEQ ID NO: 504864 - protein, 15 aa, Homo sapiens
  CDR3 for beta chain variable domain of TCR clone 252432 (TRBV20-1, TRBJ2-7)
CSARDRVSGMDEQYF

SEQ ID NO: 504865 - protein, 11 aa, Homo sapiens
  CDR3 for alpha chain variable domain of TCR clone 252433 (TRAV8-4, TRAJ20)
CAVTNVLTTTS

SEQ ID NO: 504866 - protein, 13 aa, Homo sapiens
  CDR3 for beta chain variable domain of TCR clone 252433 (TRBV19, TRBJ2-3)
CATWDKITDTQYL

SEQ ID NO: 504867 - protein, 14 aa, Homo sapiens
  CDR3 for alpha chain variable domain of TCR clone 252434 (TRAV1-2, TRAJ8)
CAVREDTGFKKLVF

SEQ ID NO: 504868 - protein, 12 aa, Homo sapiens
  CDR3 for beta chain variable domain of TCR clone 252434 (TRBV27, TRBJ2-7)
CASSGGFYEQYF

SEQ ID NO: 504869 - protein, 14 aa, Homo sapiens
  CDR3 for alpha chain variable domain of TCR clone 252435 (TRAV16, TRAJ33)
CALSAMYSNYQLIW

SEQ ID NO: 504870 - protein, 15 aa, Homo sapiens
  CDR3 for beta chain variable domain of TCR clone 252435 (TRBV9, TRBJ1-6)
CASSVAGTGDSPLHF

SEQ ID NO: 504871 - protein, 13 aa, Homo sapiens
  CDR3 for alpha chain variable domain of TCR clone 252436 (TRAV13-1, TRAJ10)
CAAAEGGGNKLTF

SEQ ID NO: 504872 - protein, 15 aa, Homo sapiens
  CDR3 for beta chain variable domain of TCR clone 252436 (TRBV7-8, TRBJ2-2)
CASSLDQGWNGELFF

SEQ ID NO: 504873 - protein, 12 aa, Homo sapiens
  CDR3 for alpha chain variable domain of TCR clone 252437 (TRAV13-2, TRAJ23)
CAERHRGGKPIF

SEQ ID NO: 504874 - protein, 13 aa, Homo sapiens
  CDR3 for beta chain variable domain of TCR clone 252437 (TRBV2, TRBJ1-6)
CADSGSYNSPLHF

SEQ ID NO: 504875 - protein, 14 aa, Homo sapiens
  CDR3 for alpha chain variable domain of TCR clone 252438 (TRAV1-2, TRAJ8)
CAVREDTGFQKFVF

SEQ ID NO: 504876 - protein, 16 aa, Homo sapiens
  CDR3 for beta chain variable domain of TCR clone 252438 (TRBV27, TRBJ2-2)
CASSFRGLVRTGELFL

SEQ ID NO: 504877 - protein, 16 aa, Homo sapiens
  CDR3 for alpha chain variable domain of TCR clone 252439 (TRAV38-1, TRAJ39)
CAFMKHYLGAGNMLTF

SEQ ID NO: 504878 - protein, 20 aa, Homo sapiens
  CDR3 for beta chain variable domain of TCR clone 252439 (TRBV6-7, TRBJ2-1)
TSVPAAPLRGRGGGVNEQFF

SEQ ID NO: 504879 - protein, 14 aa, Homo sapiens
  CDR3 for alpha chain variable domain of TCR clone 252440 (TRAV17, TRAJ22)
CATSPSGSARQLTF

SEQ ID NO: 504880 - protein, 14 aa, Homo sapiens
  CDR3 for beta chain variable domain of TCR clone 252440 (TRBV11-2, TRBJ2-1)
CASTTGQGNNEQFF

SEQ ID NO: 504881 - protein, 15 aa, Homo sapiens
  CDR3 for alpha chain variable domain of TCR clone 252441 (TRAV23/DV6, TRAJ37)
CAASRGSSNPGKLIF

SEQ ID NO: 504882 - protein, 15 aa, Homo sapiens
  CDR3 for beta chain variable domain of TCR clone 252441 (TRBV6-5, TRBJ2-7)
CASSARRGSDNEQYF

SEQ ID NO: 504883 - protein, 11 aa, Homo sapiens
  CDR3 for alpha chain variable domain of TCR clone 252442 (TRAV23/DV6, TRAJ48)
CAPRWGEKLTF

SEQ ID NO: 504884 - protein, 16 aa, Homo sapiens
  CDR3 for beta chain variable domain of TCR clone 252442 (TRBV5-7, TRBJ2-7)
CASSPTSGRELDEQYF

SEQ ID NO: 504885 - protein, 17 aa, Homo sapiens
  CDR3 for alpha chain variable domain of TCR clone 252443 (TRAV3, TRAJ6)
CAVRDGPRAGGSYIPTF

SEQ ID NO: 504886 - protein, 14 aa, Homo sapiens
  CDR3 for beta chain variable domain of TCR clone 252443 (TRBV4-1, TRBJ1-2)
CASSQDPLPYGYTF

SEQ ID NO: 504887 - protein, 17 aa, Homo sapiens
  CDR3 for alpha chain variable domain of TCR clone 252444 (TRAV23/DV6, TRAJ3)
CSKHFCFGWSSASKIIF

SEQ ID NO: 504888 - protein, 15 aa, Homo sapiens
  CDR3 for beta chain variable domain of TCR clone 252444 (TRBV19, TRBJ1-6)
CASSTQGAVGSPLHF

SEQ ID NO: 504889 - protein, 13 aa, Homo sapiens
  CDR3 for alpha chain variable domain of TCR clone 252445 (TRAV20, TRAJ54)
CAVQAGGAQKLVF

SEQ ID NO: 504890 - protein, 14 aa, Homo sapiens
  CDR3 for beta chain variable domain of TCR clone 252445 (TRBV25-1, TRBJ1-1)
CASTHLGGNTEAFF

SEQ ID NO: 504891 - protein, 12 aa, Homo sapiens
  CDR3 for alpha chain variable domain of TCR clone 252446 (TRAV12-3, TRAJ17)
CAMTLTGNKLTF

SEQ ID NO: 504892 - protein, 15 aa, Homo sapiens
  CDR3 for beta chain variable domain of TCR clone 252446 (TRBV20-1, TRBJ2-7)
CSARDRVSGMVEQYS

SEQ ID NO: 504893 - protein, 14 aa, Homo sapiens
  CDR3 for alpha chain variable domain of TCR clone 252447 (TRAV12-2, TRAJ40)
CAGTIPSGTYKYIF

SEQ ID NO: 504894 - protein, 14 aa, Homo sapiens
  CDR3 for beta chain variable domain of TCR clone 252447 (TRBV20-1, TRBJ1-1)
CSAQTRIGGTEAVF

SEQ ID NO: 504895 - protein, 12 aa, Homo sapiens
  CDR3 for alpha chain variable domain of TCR clone 252448 (TRAV12-3, TRAJ17)
CALTLTGNKLTF

SEQ ID NO: 504896 - protein, 15 aa, Homo sapiens
  CDR3 for beta chain variable domain of TCR clone 252448 (TRBV20-1, TRBJ2-7)
CSARDRVPGMDEQYF

SEQ ID NO: 504897 - protein, 14 aa, Homo sapiens
  CDR3 for alpha chain variable domain of TCR clone 252449 (TRAV12-1, TRAJ30)
CEVNIGGRDDKIIF

SEQ ID NO: 504898 - protein, 13 aa, Homo sapiens
  CDR3 for beta chain variable domain of TCR clone 252449 (TRBV12-5, TRBJ2-1)
CASGLGRGNEQFF

SEQ ID NO: 504899 - protein, 15 aa, Homo sapiens
  CDR3 for alpha chain variable domain of TCR clone 252450 (TRAV20, TRAJ58)
CAVQDLETSGSRFTF

SEQ ID NO: 504900 - protein, 17 aa, Homo sapiens
  CDR3 for beta chain variable domain of TCR clone 252450 (TRBV7-8, TRBJ2-6)
CASSAGTGGAGANVLTF

SEQ ID NO: 504901 - protein, 12 aa, Homo sapiens
  CDR3 for alpha chain variable domain of TCR clone 252451 (TRAV12-2, TRAJ10)
WGVTGGGNKLTF

SEQ ID NO: 504902 - protein, 14 aa, Homo sapiens
  CDR3 for beta chain variable domain of TCR clone 252451 (TRBV19, TRBJ2-3)
CASSAPRSTDTQYF

SEQ ID NO: 504903 - protein, 14 aa, Homo sapiens
  CDR3 for alpha chain variable domain of TCR clone 252452 (TRAV12-3, TRAJ10)
SHLPLTGGGNKLTF

SEQ ID NO: 504904 - protein, 13 aa, Homo sapiens
  CDR3 for beta chain variable domain of TCR clone 252452 (TRBV27, TRBJ1-1)
CAGSLSIGAEAFF

SEQ ID NO: 504905 - protein, 16 aa, Homo sapiens
  CDR3 for alpha chain variable domain of TCR clone 252453 (TRAV3, TRAJ10)
CAVRDMMAGGGNKITF

SEQ ID NO: 504906 - protein, 12 aa, Homo sapiens
  CDR3 for beta chain variable domain of TCR clone 252453 (TRBV20-1, TRBJ2-7)
CSAGLKMGEQYF

SEQ ID NO: 504907 - protein, 13 aa, Homo sapiens
  CDR3 for alpha chain variable domain of TCR clone 252454 (TRAV12-2, TRAJ6)
CAVNVSRKLHTYI

SEQ ID NO: 504908 - protein, 12 aa, Homo sapiens
  CDR3 for beta chain variable domain of TCR clone 252454 (TRBV29-1, TRBJ2-3)
CGVTGGADTQYF

SEQ ID NO: 504909 - protein, 14 aa, Homo sapiens
  CDR3 for alpha chain variable domain of TCR clone 252455 (TRAV2, TRAJ9)
CAVEDRSGGFKTIF

SEQ ID NO: 504910 - protein, 14 aa, Homo sapiens
  CDR3 for beta chain variable domain of TCR clone 252455 (TRBV25-1, TRBJ1-1)
CASAHLGGNTEAFF

SEQ ID NO: 504911 - protein, 12 aa, Homo sapiens
  CDR3 for alpha chain variable domain of TCR clone 252456 (TRAV17, TRAJ34)
CAMDAKGAKLIF

SEQ ID NO: 504912 - protein, 12 aa, Homo sapiens
  CDR3 for beta chain variable domain of TCR clone 252456 (TRBV7-2, TRBJ2-7)
CASSSHSYEQYF

SEQ ID NO: 504913 - protein, 18 aa, Homo sapiens
  CDR3 for alpha chain variable domain of TCR clone 252457 (TRAV17, TRAJ45)
CATSLDLYSGGGADGLTF

SEQ ID NO: 504914 - protein, 15 aa, Homo sapiens
  CDR3 for beta chain variable domain of TCR clone 252457 (TRBV11-2, TRBJ2-1)
CASSKSRALIYEQFF

SEQ ID NO: 504915 - protein, 16 aa, Homo sapiens
  CDR3 for alpha chain variable domain of TCR clone 252458 (TRAV17, TRAJ53)
CATEALSGGSNYKLTF

SEQ ID NO: 504916 - protein, 12 aa, Homo sapiens
  CDR3 for beta chain variable domain of TCR clone 252458 (TRBV5-1, TRBJ2-7)
CASSFRGYEQYF

SEQ ID NO: 504917 - protein, 18 aa, Homo sapiens
  CDR3 for alpha chain variable domain of TCR clone 252459 (TRAV21, TRAJ52)
CAVRPSPAGGTSYGKLTF

SEQ ID NO: 504918 - protein, 17 aa, Homo sapiens
  CDR3 for beta chain variable domain of TCR clone 252459 (TRBV13, TRBJ2-3)
CASSPARVAGGRNTQYF

SEQ ID NO: 504919 - protein, 14 aa, Homo sapiens
  CDR3 for alpha chain variable domain of TCR clone 252460 (TRAV1-2, TRAJ8)
CAVREDTGFQKLLF

SEQ ID NO: 504920 - protein, 15 aa, Homo sapiens
  CDR3 for beta chain variable domain of TCR clone 252460 (TRBV5-7, TRBJ2-3)
CASSPGLATTDTQYF

SEQ ID NO: 504921 - protein, 17 aa, Homo sapiens
  CDR3 for alpha chain variable domain of TCR clone 252461 (TRAV3, TRAJ6)
CAVRDGPRAGGSFIPTF

SEQ ID NO: 504922 - protein, 20 aa, Homo sapiens
  CDR3 for beta chain variable domain of TCR clone 252461 (TRBV7-8, TRBJ2-2)
CASSHLFPGPTIHITGELFF

SEQ ID NO: 504923 - protein, 12 aa, Homo sapiens
  CDR3 for alpha chain variable domain of TCR clone 252462 (TRAV21, TRAJ31)
CVLAGYNARPMF

SEQ ID NO: 504924 - protein, 16 aa, Homo sapiens
  CDR3 for beta chain variable domain of TCR clone 252462 (TRBV27, TRBJ2-5)
CASSFGPGGTKETQYF

SEQ ID NO: 504925 - protein, 18 aa, Homo sapiens
  CDR3 for alpha chain variable domain of TCR clone 252463 (TRAV26-2, TRAJ45)
CILRLWGYSGGGADGLTF

SEQ ID NO: 504926 - protein, 17 aa, Homo sapiens
  CDR3 for beta chain variable domain of TCR clone 252463 (TRBV4-1, TRBJ2-2)
RQQPRKSESLNNGELFF

SEQ ID NO: 504927 - protein, 14 aa, Homo sapiens
  CDR3 for alpha chain variable domain of TCR clone 252464 (TRAV38-1, TRAJ40)
CALRPTSGTSQYIF

SEQ ID NO: 504928 - protein, 14 aa, Homo sapiens
  CDR3 for beta chain variable domain of TCR clone 252464 (TRBV25-1, TRBJ1-1)
CASTHLGGNTEAFF

SEQ ID NO: 504929 - protein, 14 aa, Homo sapiens
  CDR3 for alpha chain variable domain of TCR clone 252465 (TRAV35, TRAJ13)
CAGSPSGGYQEVTF

SEQ ID NO: 504930 - protein, 17 aa, Homo sapiens
  CDR3 for beta chain variable domain of TCR clone 252465 (TRBV7-6, TRBJ2-5)
CASSPGLAEPWGETQYF

SEQ ID NO: 504931 - protein, 11 aa, Homo sapiens
  CDR3 for alpha chain variable domain of TCR clone 252466 (TRAV21, TRAJ34)
CAVTNTDKLIF

SEQ ID NO: 504932 - protein, 12 aa, Homo sapiens
  CDR3 for beta chain variable domain of TCR clone 252466 (TRBV11-2, TRBJ2-2)
CASSRGGGELFF

SEQ ID NO: 504933 - protein, 11 aa, Homo sapiens
  CDR3 for alpha chain variable domain of TCR clone 252467 (TRAV3, TRAJ20)
CAVRPSVTTTS

SEQ ID NO: 504934 - protein, 15 aa, Homo sapiens
  CDR3 for beta chain variable domain of TCR clone 252467 (TRBV6-5, TRBJ2-1)
CAGSYDAGAGNEQFF

SEQ ID NO: 504935 - protein, 13 aa, Homo sapiens
  CDR3 for alpha chain variable domain of TCR clone 252468 (TRAV13-1, TRAJ13)
CAERPGGYQKVTF

SEQ ID NO: 504936 - protein, 15 aa, Homo sapiens
  CDR3 for beta chain variable domain of TCR clone 252468 (TRBV4-1, TRBJ1-4)
CASSDTGGTNEKLFF

SEQ ID NO: 504937 - protein, 13 aa, Homo sapiens
  CDR3 for alpha chain variable domain of TCR clone 252469 (TRAV35, TRAJ36)
CAGPRIGANNLFF

SEQ ID NO: 504938 - protein, 15 aa, Homo sapiens
  CDR3 for beta chain variable domain of TCR clone 252469 (TRBV19, TRBJ1-1)
CASSIRRQMNTEAFF

SEQ ID NO: 504939 - protein, 14 aa, Homo sapiens
  CDR3 for alpha chain variable domain of TCR clone 252470 (TRAV27, TRAJ22)
CAGVVPGSARQLTF

SEQ ID NO: 504940 - protein, 16 aa, Homo sapiens
  CDR3 for beta chain variable domain of TCR clone 252470 (TRBV9, TRBJ2-7)
CASSVGLGGGTYEQHF

SEQ ID NO: 504941 - protein, 14 aa, Homo sapiens
  CDR3 for alpha chain variable domain of TCR clone 252471 (TRAV1-2, TRAJ8)
CAVREDTGFQKLVF

SEQ ID NO: 504942 - protein, 18 aa, Homo sapiens
  CDR3 for beta chain variable domain of TCR clone 252471 (TRBV7-2, TRBJ2-3)
CASSLETSRGRKADTQYF

SEQ ID NO: 504943 - protein, 11 aa, Homo sapiens
  CDR3 for alpha chain variable domain of TCR clone 252472 (TRAV12-2, TRAJ6)
CAVNVSRKLQT

SEQ ID NO: 504944 - protein, 12 aa, Homo sapiens
  CDR3 for beta chain variable domain of TCR clone 252472 (TRBV29-1, TRBJ2-3)
CSVTGGADTQYF

SEQ ID NO: 504945 - protein, 13 aa, Homo sapiens
  CDR3 for alpha chain variable domain of TCR clone 252473 (TRAV21, TRAJ20)
CAVGLRVDYKLSF

SEQ ID NO: 504946 - protein, 15 aa, Homo sapiens
  CDR3 for beta chain variable domain of TCR clone 252473 (TRBV20-1, TRBJ2-2)
CSARGGQGNTGELFF

SEQ ID NO: 504947 - protein, 13 aa, Homo sapiens
  CDR3 for alpha chain variable domain of TCR clone 252474 (TRAV26-2, TRAJ57)
CILSRGGSEKLIF

SEQ ID NO: 504948 - protein, 16 aa, Homo sapiens
  CDR3 for beta chain variable domain of TCR clone 252474 (TRBV18, TRBJ1-5)
CASSPRTGGGNQPQHF

SEQ ID NO: 504949 - protein, 22 aa, Homo sapiens
  CDR3 for alpha chain variable domain of TCR clone 252475 (TRAV26-1, TRAJ30)
CIVRVRTEMTRSSLEKGHDFIF

SEQ ID NO: 504950 - protein, 18 aa, Homo sapiens
  CDR3 for beta chain variable domain of TCR clone 252475 (TRBV4-1, TRBJ1-5)
CASSQDPRGQGLNQTQHF

SEQ ID NO: 504951 - protein, 12 aa, Homo sapiens
  CDR3 for alpha chain variable domain of TCR clone 252476 (TRAV13-1, TRAJ15)
CAASQAGTALVF

SEQ ID NO: 504952 - protein, 18 aa, Homo sapiens
  CDR3 for beta chain variable domain of TCR clone 252476 (TRBV7-9, TRBJ2-3)
CASSLPINGQISTDTQYF

SEQ ID NO: 504953 - protein, 11 aa, Homo sapiens
  CDR3 for alpha chain variable domain of TCR clone 252477 (TRAV4, TRAJ31)
CLVGDNARLMF

SEQ ID NO: 504954 - protein, 16 aa, Homo sapiens
  CDR3 for beta chain variable domain of TCR clone 252477 (TRBV7-2, TRBJ2-5)
CASSSKWLSGEETQYF

SEQ ID NO: 504955 - protein, 15 aa, Homo sapiens
  CDR3 for alpha chain variable domain of TCR clone 252478 (TRAV12-2, TRAJ53)
CAVNGGGGSNYKLTF

SEQ ID NO: 504956 - protein, 15 aa, Homo sapiens
  CDR3 for beta chain variable domain of TCR clone 252478 (TRBV4-1, TRBJ2-7)
CASSQQGQGFDEQYF

SEQ ID NO: 504957 - protein, 13 aa, Homo sapiens
  CDR3 for alpha chain variable domain of TCR clone 252479 (TRAV12-1, TRAJ17)
CVVNKAAGNKITF

SEQ ID NO: 504958 - protein, 16 aa, Homo sapiens
  CDR3 for beta chain variable domain of TCR clone 252479 (TRBV11-2, TRBJ2-2)
CASSLRTGNLIGELFF

SEQ ID NO: 504959 - protein, 17 aa, Homo sapiens
  CDR3 for alpha chain variable domain of TCR clone 252480 (TRAV3, TRAJ6)
CAVRDGPRAGGSYIPTF

SEQ ID NO: 504960 - protein, 20 aa, Homo sapiens
  CDR3 for beta chain variable domain of TCR clone 252480 (TRBV28, TRBJ2-1)
CASTPIGRSPGLAGANEQFF

SEQ ID NO: 504961 - protein, 11 aa, Homo sapiens
  CDR3 for alpha chain variable domain of TCR clone 252481 (TRAV12-3, TRAJ27)
CAMANAGKSTF

SEQ ID NO: 504962 - protein, 14 aa, Homo sapiens
  CDR3 for beta chain variable domain of TCR clone 252481 (TRBV7-2, TRBJ1-4)
CASSVVEGGEKLFF

SEQ ID NO: 504963 - protein, 16 aa, Homo sapiens
  CDR3 for alpha chain variable domain of TCR clone 252482 (TRAV30, TRAJ24)
CGTEIVDADSWGKFQF

SEQ ID NO: 504964 - protein, 15 aa, Homo sapiens
  CDR3 for beta chain variable domain of TCR clone 252482 (TRBV29-1, TRBJ2-7)
CSVEFCDRGSYEQYF

SEQ ID NO: 504965 - protein, 12 aa, Homo sapiens
  CDR3 for alpha chain variable domain of TCR clone 252483 (TRAV16, TRAJ9)
CALSSGGFKTNF

SEQ ID NO: 504966 - protein, 14 aa, Homo sapiens
  CDR3 for beta chain variable domain of TCR clone 252483 (TRBV7-9, TRBJ2-1)
CASSLAGPCNEQFF

SEQ ID NO: 504967 - protein, 15 aa, Homo sapiens
  CDR3 for alpha chain variable domain of TCR clone 252484 (TRAV14/DV4, TRAJ10)
CAMRELTGGGNKLTF

SEQ ID NO: 504968 - protein, 16 aa, Homo sapiens
  CDR3 for beta chain variable domain of TCR clone 252484 (TRBV20-1, TRBJ1-4)
CSAPGQGLLTNEKLFF

SEQ ID NO: 504969 - protein, 16 aa, Homo sapiens
  CDR3 for alpha chain variable domain of TCR clone 252485 (TRAV14/DV4, TRAJ53)
RAMREGGGGSNYKLTF

SEQ ID NO: 504970 - protein, 12 aa, Homo sapiens
  CDR3 for beta chain variable domain of TCR clone 252485 (TRBV5-1, TRBJ1-1)
CASSQGNTEAFF

SEQ ID NO: 504971 - protein, 13 aa, Homo sapiens
  CDR3 for alpha chain variable domain of TCR clone 252486 (TRAV35, TRAJ21)
CAGQLSNFKKFYF

SEQ ID NO: 504972 - protein, 16 aa, Homo sapiens
  CDR3 for beta chain variable domain of TCR clone 252486 (TRBV12-5, TRBJ2-5)
CASGPRTSGNQETQYF

SEQ ID NO: 504973 - protein, 12 aa, Homo sapiens
  CDR3 for alpha chain variable domain of TCR clone 252487 (TRAV3, TRAJ27)
CAVRDKAGKSTF

SEQ ID NO: 504974 - protein, 15 aa, Homo sapiens
  CDR3 for beta chain variable domain of TCR clone 252487 (TRBV7-9, TRBJ1-5)
CASSQGHQPNQPQHF

SEQ ID NO: 504975 - protein, 11 aa, Homo sapiens
  CDR3 for alpha chain variable domain of TCR clone 252488 (TRAV2, TRAJ33)
CAVESNYQLIW

SEQ ID NO: 504976 - protein, 15 aa, Homo sapiens
  CDR3 for beta chain variable domain of TCR clone 252488 (TRBV7-2, TRBJ2-1)
CASTHGAGIYNEQFF

SEQ ID NO: 504977 - protein, 14 aa, Homo sapiens
  CDR3 for alpha chain variable domain of TCR clone 252489 (TRAV2, TRAJ23)
CAVGLRNLGGKLIF

SEQ ID NO: 504978 - protein, 13 aa, Homo sapiens
  CDR3 for beta chain variable domain of TCR clone 252489 (TRBV12-4, TRBJ2-5)
CASSPGTEETQYF

SEQ ID NO: 504979 - protein, 14 aa, Homo sapiens
  CDR3 for alpha chain variable domain of TCR clone 252490 (TRAV1-2, TRAJ8)
CAVREDTGLQKLVF

SEQ ID NO: 504980 - protein, 16 aa, Homo sapiens
  CDR3 for beta chain variable domain of TCR clone 252490 (TRBV20-1, TRBJ1-4)
CSAPGQGLLTNEKLFF

SEQ ID NO: 504981 - protein, 14 aa, Homo sapiens
  CDR3 for alpha chain variable domain of TCR clone 252491 (TRAV17, TRAJ4)
CATAPLGGYNKLIF

SEQ ID NO: 504982 - protein, 13 aa, Homo sapiens
  CDR3 for beta chain variable domain of TCR clone 252491 (TRBV12-4, TRBJ1-3)
CASSLASRNTIYF

SEQ ID NO: 504983 - protein, 11 aa, Homo sapiens
  CDR3 for alpha chain variable domain of TCR clone 252492 (TRAV12-2, TRAJ43)
CAARHNNDMRF

SEQ ID NO: 504984 - protein, 15 aa, Homo sapiens
  CDR3 for beta chain variable domain of TCR clone 252492 (TRBV12-4, TRBJ1-5)
CASRATDNQPSILVM

SEQ ID NO: 504985 - protein, 13 aa, Homo sapiens
  CDR3 for alpha chain variable domain of TCR clone 252493 (TRAV35, TRAJ42)
CAGFPGSQGDLIF

SEQ ID NO: 504986 - protein, 13 aa, Homo sapiens
  CDR3 for beta chain variable domain of TCR clone 252493 (TRBV7-9, TRBJ1-2)
CASSLKQNYGYTF

SEQ ID NO: 504987 - protein, 18 aa, Homo sapiens
  CDR3 for alpha chain variable domain of TCR clone 252494 (TRAV26-1, TRAJ22)
CIVRVELISSGSARQLTF

SEQ ID NO: 504988 - protein, 13 aa, Homo sapiens
  CDR3 for beta chain variable domain of TCR clone 252494 (TRBV13, TRBJ2-5)
CASSPEVGETQYF

SEQ ID NO: 504989 - protein, 14 aa, Homo sapiens
  CDR3 for alpha chain variable domain of TCR clone 252495 (TRAV12-2, TRAJ40)
CAVKIPSGTYNYIF

SEQ ID NO: 504990 - protein, 14 aa, Homo sapiens
  CDR3 for beta chain variable domain of TCR clone 252495 (TRBV7-9, TRBJ1-2)
CASSRQGANYGYTF

SEQ ID NO: 504991 - protein, 14 aa, Homo sapiens
  CDR3 for alpha chain variable domain of TCR clone 252496 (TRAV13-1, TRAJ9)
CAASALTGGFKTIF

SEQ ID NO: 504992 - protein, 15 aa, Homo sapiens
  CDR3 for beta chain variable domain of TCR clone 252496 (TRBV28, TRBJ2-5)
CASSPPWSYQETQYF

SEQ ID NO: 504993 - protein, 12 aa, Homo sapiens
  CDR3 for alpha chain variable domain of TCR clone 252497 (TRAV21, TRAJ39)
CAADNAGNMLTF

SEQ ID NO: 504994 - protein, 14 aa, Homo sapiens
  CDR3 for beta chain variable domain of TCR clone 252497 (TRBV7-2, TRBJ2-3)
CASSQTGSSYTQYF

SEQ ID NO: 504995 - protein, 15 aa, Homo sapiens
  CDR3 for alpha chain variable domain of TCR clone 252498 (TRAV8-3, TRAJ45)
CASSYSGGGADGLTI

SEQ ID NO: 504996 - protein, 13 aa, Homo sapiens
  CDR3 for beta chain variable domain of TCR clone 252498 (TRBV7-7, TRBJ2-3)
CASSLSRADTQYF

SEQ ID NO: 504997 - protein, 15 aa, Homo sapiens
  CDR3 for alpha chain variable domain of TCR clone 252499 (TRAV8-3, TRAJ45)
CASSYSGGGADGLTF

SEQ ID NO: 504998 - protein, 12 aa, Homo sapiens
  CDR3 for beta chain variable domain of TCR clone 252499 (TRBV3-1, TRBJ2-1)
CASSQGSSGQFF

SEQ ID NO: 504999 - protein, 14 aa, Homo sapiens
  CDR3 for alpha chain variable domain of TCR clone 252500 (TRAV12-2, TRAJ13)
CAVKKTGGYQKVTF

SEQ ID NO: 505000 - protein, 11 aa, Homo sapiens
  CDR3 for beta chain variable domain of TCR clone 252500 (TRBV29-1, TRBJ2-5)
CSEDRTGTQYC

SEQ ID NO: 505001 - protein, 15 aa, Homo sapiens
  CDR3 for alpha chain variable domain of TCR clone 252501 (TRAV12-1, TRAJ42)
CVVTRDGGSQGILIF

SEQ ID NO: 505002 - protein, 14 aa, Homo sapiens
  CDR3 for beta chain variable domain of TCR clone 252501 (TRBV11-2, TRBJ2-3)
CASSLGGGANTQYF

SEQ ID NO: 505003 - protein, 12 aa, Homo sapiens
  CDR3 for alpha chain variable domain of TCR clone 252502 (TRAV12-2, TRAJ10)
WGVTVGGNKLTF

SEQ ID NO: 505004 - protein, 16 aa, Homo sapiens
  CDR3 for beta chain variable domain of TCR clone 252502 (TRBV6-4, TRBJ1-2)
CASSEAVGDPNYGYTF

SEQ ID NO: 505005 - protein, 13 aa, Homo sapiens
  CDR3 for alpha chain variable domain of TCR clone 252503 (TRAV23/DV6, TRAJ47)
CAASSQYGNKLVF

SEQ ID NO: 505006 - protein, 15 aa, Homo sapiens
  CDR3 for beta chain variable domain of TCR clone 252503 (TRBV7-3, TRBJ2-1)
CASSLDGNAYNEQVF

SEQ ID NO: 505007 - protein, 13 aa, Homo sapiens
  CDR3 for alpha chain variable domain of TCR clone 252504 (TRAV26-2, TRAJ43)
CTLRAVNNNDMRF

SEQ ID NO: 505008 - protein, 13 aa, Homo sapiens
  CDR3 for beta chain variable domain of TCR clone 252504 (TRBV4-2, TRBJ1-1)
CASSQAGNTEAFF

SEQ ID NO: 505009 - protein, 10 aa, Homo sapiens
  CDR3 for alpha chain variable domain of TCR clone 252505 (TRAV1-2, TRAJ23)
CAGQGGKLSF

SEQ ID NO: 505010 - protein, 14 aa, Homo sapiens
  CDR3 for beta chain variable domain of TCR clone 252505 (TRBV6-1, TRBJ1-3)
CASVQGGGGNTIYF

SEQ ID NO: 505011 - protein, 16 aa, Homo sapiens
  CDR3 for alpha chain variable domain of TCR clone 252506 (TRAV30, TRAJ24)
CDTEIVDADSWGKFQF

SEQ ID NO: 505012 - protein, 15 aa, Homo sapiens
  CDR3 for beta chain variable domain of TCR clone 252506 (TRBV9, TRBJ2-1)
CASSLAGSSYNEQFF

SEQ ID NO: 505013 - protein, 12 aa, Homo sapiens
  CDR3 for alpha chain variable domain of TCR clone 252507 (TRAV1-1, TRAJ8)
CAGGTGFQKLVF

SEQ ID NO: 505014 - protein, 15 aa, Homo sapiens
  CDR3 for beta chain variable domain of TCR clone 252507 (TRBV7-9, TRAJ18)
CASSRKGGFNEKMFF

SEQ ID NO: 505015 - protein, 14 aa, Homo sapiens
  CDR3 for alpha chain variable domain of TCR clone 252508 (TRAV9-2, TRAJ39)
CALYIYNAGNMPTF

SEQ ID NO: 505016 - protein, 15 aa, Homo sapiens
  CDR3 for beta chain variable domain of TCR clone 252508 (TRBV19, TRBJ1-6)
CASSTQGAVGSPLHF

SEQ ID NO: 505017 - protein, 13 aa, Homo sapiens
  CDR3 for alpha chain variable domain of TCR clone 252509 (TRAV17, TRAJ54)
FATVIQGAQKLVF

SEQ ID NO: 505018 - protein, 15 aa, Homo sapiens
  CDR3 for beta chain variable domain of TCR clone 252509 (TRBV13, TRBJ2-1)
CASSLLSGLNNEQFF

SEQ ID NO: 505019 - protein, 18 aa, Homo sapiens
  CDR3 for alpha chain variable domain of TCR clone 252510 (TRAV21, TRAJ52)
CAVRPSPAGGTSSGKLTF

SEQ ID NO: 505020 - protein, 15 aa, Homo sapiens
  CDR3 for beta chain variable domain of TCR clone 252510 (TRBV20-1, TRBJ2-7)
CSARKGLAESYEQYF

SEQ ID NO: 505021 - protein, 16 aa, Homo sapiens
  CDR3 for alpha chain variable domain of TCR clone 252511 (TRAV26-1, TRAJ48)
CIVRESPNFGNEKLTF

SEQ ID NO: 505022 - protein, 12 aa, Homo sapiens
  CDR3 for beta chain variable domain of TCR clone 252511 (TRBV19, TRBJ2-1)
CASSRQGAEQFF

SEQ ID NO: 505023 - protein, 18 aa, Homo sapiens
  CDR3 for alpha chain variable domain of TCR clone 252512 (TRAV13-1, TRAJ52)
CAAKIPNAGGTSYGKLTF

SEQ ID NO: 505024 - protein, 15 aa, Homo sapiens
  CDR3 for beta chain variable domain of TCR clone 252512 (TRBV28, TRBJ2-1)
CASSIIAGGRSEQFF

SEQ ID NO: 505025 - protein, 23 aa, Homo sapiens
  CDR3 for alpha chain variable domain of TCR clone 252513 (TRAV8-6, TRAJ9)
CAVSDRDTGGFKTILEQEQDYLL

SEQ ID NO: 505026 - protein, 16 aa, Homo sapiens
  CDR3 for beta chain variable domain of TCR clone 252513 (TRBV19, TRBJ2-3)
CASSPEWDRGTDTQYF

SEQ ID NO: 505027 - protein, 13 aa, Homo sapiens
  CDR3 for alpha chain variable domain of TCR clone 252514 (TRAV12-1, TRAJ16)
CVVNGPDGQKLPY

SEQ ID NO: 505028 - protein, 12 aa, Homo sapiens
  CDR3 for beta chain variable domain of TCR clone 252514 (TRBV24-1, TRBJ2-2)
CATSDPGLTGLQ

SEQ ID NO: 505029 - protein, 17 aa, Homo sapiens
  CDR3 for alpha chain variable domain of TCR clone 252515 (TRAV12-3, TRAJ18)
CAMIRADRGSTLGRLYF

SEQ ID NO: 505030 - protein, 14 aa, Homo sapiens
  CDR3 for beta chain variable domain of TCR clone 252515 (TRBV5-7, TRBJ1-6)
CASTPWPADSHLLF

SEQ ID NO: 505031 - protein, 16 aa, Homo sapiens
  CDR3 for alpha chain variable domain of TCR clone 252516 (TRAV8-3, TRAJ13)
CAGGAYPSGGYQKVTF

SEQ ID NO: 505032 - protein, 13 aa, Homo sapiens
  CDR3 for beta chain variable domain of TCR clone 252516 (TRBV7-9, TRBJ1-2)
CASSLKQNYGYTF

SEQ ID NO: 505033 - protein, 14 aa, Homo sapiens
  CDR3 for alpha chain variable domain of TCR clone 252517 (TRAV3, TRAJ16)
CAVSLFSDGQKLLF

SEQ ID NO: 505034 - protein, 16 aa, Homo sapiens
  CDR3 for beta chain variable domain of TCR clone 252517 (TRBV12-4, TRBJ2-7)
CASSPEGQGSSYEQYF

SEQ ID NO: 505035 - protein, 14 aa, Homo sapiens
  CDR3 for alpha chain variable domain of TCR clone 252518 (TRAV17, TRAJ57)
CATDPQGGSEKLVF

SEQ ID NO: 505036 - protein, 18 aa, Homo sapiens
  CDR3 for beta chain variable domain of TCR clone 252518 (TRBV6-6, TRBJ1-3)
CASSYSKWDSISGDTMYF

SEQ ID NO: 505037 - protein, 12 aa, Homo sapiens
  CDR3 for alpha chain variable domain of TCR clone 252519 (TRAV8-6, TRAJ36)
CAVSDWRGQTTS

SEQ ID NO: 505038 - protein, 15 aa, Homo sapiens
  CDR3 for beta chain variable domain of TCR clone 252519 (TRBV6-1, TRBJ2-3)
CASSERGGITDTQYF

SEQ ID NO: 505039 - protein, 13 aa, Homo sapiens
  CDR3 for alpha chain variable domain of TCR clone 252520 (TRAV8-1, TRAJ39)
CAGLNNAGNMLTF

SEQ ID NO: 505040 - protein, 17 aa, Homo sapiens
  CDR3 for beta chain variable domain of TCR clone 252520 (TRBV19, TRBJ2-3)
CASGIDPAGGGTDTQYF

SEQ ID NO: 505041 - protein, 14 aa, Homo sapiens
  CDR3 for alpha chain variable domain of TCR clone 252521 (TRAV16, TRAJ33)
CALSAMDSNYQLIW

SEQ ID NO: 505042 - protein, 13 aa, Homo sapiens
  CDR3 for beta chain variable domain of TCR clone 252521 (TRBV20-1, TRBJ2-5)
CSAREAFQETQYF

SEQ ID NO: 505043 - protein, 13 aa, Homo sapiens
  CDR3 for alpha chain variable domain of TCR clone 252522 (TRAV8-1, TRAJ41)
CAVNPGSGYALNF

SEQ ID NO: 505044 - protein, 14 aa, Homo sapiens
  CDR3 for beta chain variable domain of TCR clone 252522 (TRBV19, TRBJ2-1)
CASPTFVLSGEQFF

SEQ ID NO: 505045 - protein, 13 aa, Homo sapiens
  CDR3 for alpha chain variable domain of TCR clone 252523 (TRAV2, TRAJ40)
CAVVTSGTYKYIF

SEQ ID NO: 505046 - protein, 14 aa, Homo sapiens
  CDR3 for beta chain variable domain of TCR clone 252523 (TRBV7-2, TRBJ2-7)
FASSPKTSFYEQYF

SEQ ID NO: 505047 - protein, 16 aa, Homo sapiens
  CDR3 for alpha chain variable domain of TCR clone 252524 (TRAV12-2, TRAJ10)
CAVNRVLTGGGNKLTY

SEQ ID NO: 505048 - protein, 12 aa, Homo sapiens
  CDR3 for beta chain variable domain of TCR clone 252524 (TRBV28, TRBJ2-7)
CASSCSSYEQYF

SEQ ID NO: 505049 - protein, 14 aa, Homo sapiens
  CDR3 for alpha chain variable domain of TCR clone 252525 (TRAV16, TRAJ8)
CALLLNTGFQKLVF

SEQ ID NO: 505050 - protein, 15 aa, Homo sapiens
  CDR3 for beta chain variable domain of TCR clone 252525 (TRBV7-7, TRBJ2-2)
CATSKLAKNTEEQFF

SEQ ID NO: 505051 - protein, 11 aa, Homo sapiens
  CDR3 for alpha chain variable domain of TCR clone 252526 (TRAV3, TRAJ21)
CAVGNCNKFYF

SEQ ID NO: 505052 - protein, 15 aa, Homo sapiens
  CDR3 for beta chain variable domain of TCR clone 252526 (TRBV2, TRBJ2-1)
CASSEEREGDNEQFF

SEQ ID NO: 505053 - protein, 12 aa, Homo sapiens
  CDR3 for alpha chain variable domain of TCR clone 252527 (TRAV3, TRAJ31)
CAVRDGNARLMF

SEQ ID NO: 505054 - protein, 15 aa, Homo sapiens
  CDR3 for beta chain variable domain of TCR clone 252527 (TRBV5-5, TRBJ1-2)
CASSPYGSSAEGYTF

SEQ ID NO: 505055 - protein, 11 aa, Homo sapiens
  CDR3 for alpha chain variable domain of TCR clone 252528 (TRAV13-2, TRAJ23)
CAESPRGKLIF

SEQ ID NO: 505056 - protein, 15 aa, Homo sapiens
  CDR3 for beta chain variable domain of TCR clone 252528 (TRBV28, TRBJ2-1)
CASSGLAEVYNEQFF

SEQ ID NO: 505057 - protein, 12 aa, Homo sapiens
  CDR3 for alpha chain variable domain of TCR clone 252529 (TRAV16, TRAJ26)
CALRSYGQNFVF

SEQ ID NO: 505058 - protein, 14 aa, Homo sapiens
  CDR3 for beta chain variable domain of TCR clone 252529 (TRBV10-3, TRBJ2-1)
CAVSSDLAYNEQFF

SEQ ID NO: 505059 - protein, 12 aa, Homo sapiens
  CDR3 for alpha chain variable domain of TCR clone 252530 (TRAV16, TRAJ10)
CSRTGGGNKLTF

SEQ ID NO: 505060 - protein, 12 aa, Homo sapiens
  CDR3 for beta chain variable domain of TCR clone 252530 (TRBV12-4, TRBJ2-7)
CASNPGGGEQYF

SEQ ID NO: 505061 - protein, 12 aa, Homo sapiens
  CDR3 for alpha chain variable domain of TCR clone 252531 (TRAV13-1, TRAJ21)
CAPFFNFNKFYF

SEQ ID NO: 505062 - protein, 14 aa, Homo sapiens
  CDR3 for beta chain variable domain of TCR clone 252531 (TRBV4-1, TRBJ2-7)
CASRLTSGSYEQYF

SEQ ID NO: 505063 - protein, 12 aa, Homo sapiens
  CDR3 for alpha chain variable domain of TCR clone 252532 (TRAV12-3, TRAJ17)
CAMTLTGNKLTF

SEQ ID NO: 505064 - protein, 15 aa, Homo sapiens
  CDR3 for beta chain variable domain of TCR clone 252532 (TRBV29-1, TRBJ2-6)
CSFTGGRSGANGLTF

SEQ ID NO: 505065 - protein, 12 aa, Homo sapiens
  CDR3 for alpha chain variable domain of TCR clone 252533 (TRAV3, TRAJ26)
CAVRDYGQNFVF

SEQ ID NO: 505066 - protein, 14 aa, Homo sapiens
  CDR3 for beta chain variable domain of TCR clone 252533 (TRBV2, TRBJ2-1)
CASSDRAYYNEQFF

SEQ ID NO: 505067 - protein, 15 aa, Homo sapiens
  CDR3 for alpha chain variable domain of TCR clone 252534 (TRAV12-3, TRAJ6)
CAMSATSGGSYIPTF

SEQ ID NO: 505068 - protein, 13 aa, Homo sapiens
  CDR3 for beta chain variable domain of TCR clone 252534 (TRBV7-6, TRBJ1-2)
CASSLVADYGYTF

SEQ ID NO: 505069 - protein, 23 aa, Homo sapiens
  CDR3 for alpha chain variable domain of TCR clone 252535 (TRAV8-6, )
CAVRNDGNNHIQNPDPAVYPLRD

SEQ ID NO: 505070 - protein, 15 aa, Homo sapiens
  CDR3 for beta chain variable domain of TCR clone 252535 (TRBV4-1, TRBJ2-2)
CASSEGQGITGELFF

SEQ ID NO: 505071 - protein, 18 aa, Homo sapiens
  CDR3 for alpha chain variable domain of TCR clone 252536 (TRAV21, TRAJ52)
CAVRPSPAGGTSYGKLTF

SEQ ID NO: 505072 - protein, 18 aa, Homo sapiens
  CDR3 for beta chain variable domain of TCR clone 252536 (TRBV27, TRBJ2-1)
CASGNRAVGVGSKNEQFF

SEQ ID NO: 505073 - protein, 14 aa, Homo sapiens
  CDR3 for alpha chain variable domain of TCR clone 252537 (TRAV8-2, TRAJ4)
CVVSPSGGYTKLIF

SEQ ID NO: 505074 - protein, 16 aa, Homo sapiens
  CDR3 for beta chain variable domain of TCR clone 252537 (TRBV7-3, TRBJ2-1)
CASSLEGYRSYNEQFF

SEQ ID NO: 505075 - protein, 20 aa, Homo sapiens
  CDR3 for alpha chain variable domain of TCR clone 252538 (TRAV1-2, TRAJ10)
CLLPLCCRGVLTGGGNKLTF

SEQ ID NO: 505076 - protein, 13 aa, Homo sapiens
  CDR3 for beta chain variable domain of TCR clone 252538 (TRBV20-1, TRBJ1-6)
CSAPLGVGSPLHF

SEQ ID NO: 505077 - protein, 13 aa, Homo sapiens
  CDR3 for alpha chain variable domain of TCR clone 252539 (TRAV12-3, TRAJ43)
CAMIRPNNNEMRF

SEQ ID NO: 505078 - protein, 16 aa, Homo sapiens
  CDR3 for beta chain variable domain of TCR clone 252539 (TRBV20-1, TRBJ2-4)
CSATSLAELAKNIQYF

SEQ ID NO: 505079 - protein, 13 aa, Homo sapiens
  CDR3 for alpha chain variable domain of TCR clone 252540 (TRAV29/DV5, TRAJ31)
CAASRKNNARLMF

SEQ ID NO: 505080 - protein, 16 aa, Homo sapiens
  CDR3 for beta chain variable domain of TCR clone 252540 (TRBV20-1, TRBJ1-4)
CSAPGQGLLTNEKLFF

SEQ ID NO: 505081 - protein, 11 aa, Homo sapiens
  CDR3 for alpha chain variable domain of TCR clone 252541 (TRAV21, TRAJ34)
CAVTNTDKLIF

SEQ ID NO: 505082 - protein, 16 aa, Homo sapiens
  CDR3 for beta chain variable domain of TCR clone 252541 (TRBV7-2, TRBJ1-2)
CASSSNQDRRGHDYTF

SEQ ID NO: 505083 - protein, 16 aa, Homo sapiens
  CDR3 for alpha chain variable domain of TCR clone 252542 (TRAV12-3, TRAJ37)
CAMSAYSSSNTGKLIF

SEQ ID NO: 505084 - protein, 14 aa, Homo sapiens
  CDR3 for beta chain variable domain of TCR clone 252542 (TRBV4-2, TRBJ2-7)
CASSPNRAPYEQYF

SEQ ID NO: 505085 - protein, 15 aa, Homo sapiens
  CDR3 for alpha chain variable domain of TCR clone 252543 (TRAV21, TRAJ53)
CATLNSGGSNYKLTF

SEQ ID NO: 505086 - protein, 14 aa, Homo sapiens
  CDR3 for beta chain variable domain of TCR clone 252543 (TRBV15, TRBJ2-5)
CATSIGGLVETQYF

SEQ ID NO: 505087 - protein, 16 aa, Homo sapiens
  CDR3 for alpha chain variable domain of TCR clone 252544 (TRAV20, TRAJ38)
CAVQASNAGNNRKLIW

SEQ ID NO: 505088 - protein, 17 aa, Homo sapiens
  CDR3 for beta chain variable domain of TCR clone 252544 (TRBV3-1, TRBJ2-6)
CASSPNTGPAGANVLTF

SEQ ID NO: 505089 - protein, 13 aa, Homo sapiens
  CDR3 for alpha chain variable domain of TCR clone 252545 (TRAV24, TRAJ23)
CASFLVQGGKLIF

SEQ ID NO: 505090 - protein, 14 aa, Homo sapiens
  CDR3 for beta chain variable domain of TCR clone 252545 (TRBV12-4, TRBJ2-3)
CASTIAGWGDTQYL

SEQ ID NO: 505091 - protein, 11 aa, Homo sapiens
  CDR3 for alpha chain variable domain of TCR clone 252546 (TRAV1-1, TRAJ23)
CAVRQGGKLII

SEQ ID NO: 505092 - protein, 20 aa, Homo sapiens
  CDR3 for beta chain variable domain of TCR clone 252546 (TRBV7-8, TRBJ2-2)
CASSHLFPGPTIHITGQLFF

SEQ ID NO: 505093 - protein, 15 aa, Homo sapiens
  CDR3 for alpha chain variable domain of TCR clone 252547 (TRAV17, TRAJ40)
CATVSSTSGTYKYIF

SEQ ID NO: 505094 - protein, 15 aa, Homo sapiens
  CDR3 for beta chain variable domain of TCR clone 252547 (TRBV5-1, TRBJ2-1)
CASSQAGYWWNEQFL

SEQ ID NO: 505095 - protein, 14 aa, Homo sapiens
  CDR3 for alpha chain variable domain of TCR clone 252548 (TRAV17, TRAJ16)
CATADFSDGQKLLF

SEQ ID NO: 505096 - protein, 13 aa, Homo sapiens
  CDR3 for beta chain variable domain of TCR clone 252548 (TRBV19, TRBJ1-2)
CASSPGTGVGYTF

SEQ ID NO: 505097 - protein, 12 aa, Homo sapiens
  CDR3 for alpha chain variable domain of TCR clone 252549 (TRAV12-3, TRAJ17)
CAMTLTGNKLTF

SEQ ID NO: 505098 - protein, 15 aa, Homo sapiens
  CDR3 for beta chain variable domain of TCR clone 252549 (TRBV20-1, TRBJ2-7)
CSARDRVSGIDERYF

SEQ ID NO: 505099 - protein, 16 aa, Homo sapiens
  CDR3 for alpha chain variable domain of TCR clone 252550 (TRAV3, TRAJ37)
CAVRGKGSGNTGKLIF

SEQ ID NO: 505100 - protein, 20 aa, Homo sapiens
  CDR3 for beta chain variable domain of TCR clone 252550 (TRBV7-8, TRBJ2-2)
CASSHLFPGPTIHITGELSF

SEQ ID NO: 505101 - protein, 17 aa, Homo sapiens
  CDR3 for alpha chain variable domain of TCR clone 252551 (TRAV3, TRAJ6)
CAVRDGPRAGGSYIPTF

SEQ ID NO: 505102 - protein, 11 aa, Homo sapiens
  CDR3 for beta chain variable domain of TCR clone 252551 (TRBV24-1, TRBJ1-1)
CQAKGWTEAFF

SEQ ID NO: 505103 - protein, 13 aa, Homo sapiens
  CDR3 for alpha chain variable domain of TCR clone 252552 (TRAV3, TRAJ20)
CCEAFCNDYKLSF

SEQ ID NO: 505104 - protein, 15 aa, Homo sapiens
  CDR3 for beta chain variable domain of TCR clone 252552 (TRBV19, TRBJ2-6)
CASVRRDSGANVLTV

SEQ ID NO: 505105 - protein, 15 aa, Homo sapiens
  CDR3 for alpha chain variable domain of TCR clone 252553 (TRAV23/DV6, TRAJ13)
CAAWPGGGGYQKVTF

SEQ ID NO: 505106 - protein, 13 aa, Homo sapiens
  CDR3 for beta chain variable domain of TCR clone 252553 (TRBV7-9, TRBJ2-5)
CASLSPGQETQYF

SEQ ID NO: 505107 - protein, 15 aa, Homo sapiens
  CDR3 for alpha chain variable domain of TCR clone 252554 (TRAV26-1, TRAJ48)
CIARWSWFGNEKLTF

SEQ ID NO: 505108 - protein, 13 aa, Homo sapiens
  CDR3 for beta chain variable domain of TCR clone 252554 (TRBV7-6, TRBJ2-3)
CASSLRSDNTQYF

SEQ ID NO: 505109 - protein, 14 aa, Homo sapiens
  CDR3 for alpha chain variable domain of TCR clone 252555 (TRAV35, TRAJ22)
CAWLRPGSARQLTF

SEQ ID NO: 505110 - protein, 14 aa, Homo sapiens
  CDR3 for beta chain variable domain of TCR clone 252555 (TRBV7-6, TRBJ2-3)
CASSLGTVTDTQYF

SEQ ID NO: 505111 - protein, 17 aa, Homo sapiens
  CDR3 for alpha chain variable domain of TCR clone 252556 (TRAV3, TRAJ42)
FAVRDRDYGGSQGNLIF

SEQ ID NO: 505112 - protein, 14 aa, Homo sapiens
  CDR3 for beta chain variable domain of TCR clone 252556 (TRBV19, TRBJ2-5)
CASSMTGQQETQYF

SEQ ID NO: 505113 - protein, 14 aa, Homo sapiens
  CDR3 for alpha chain variable domain of TCR clone 252557 (TRAV12-3, TRAJ42)
CAMNYGGSQGNLIF

SEQ ID NO: 505114 - protein, 15 aa, Homo sapiens
  CDR3 for beta chain variable domain of TCR clone 252557 (TRBV5-7, TRBJ1-5)
CASSYGRVWDQPQHF

SEQ ID NO: 505115 - protein, 11 aa, Homo sapiens
  CDR3 for alpha chain variable domain of TCR clone 252558 (TRAV10, TRAJ6)
CGPGGSYIPTF

SEQ ID NO: 505116 - protein, 16 aa, Homo sapiens
  CDR3 for beta chain variable domain of TCR clone 252558 (TRBV12-5, TRBJ2-5)
CASGPRTSGNQETQYF

SEQ ID NO: 505117 - protein, 15 aa, Homo sapiens
  CDR3 for alpha chain variable domain of TCR clone 252559 (TRAV38-1, TRAJ57)
CAFMDSQGGSEKLVF

SEQ ID NO: 505118 - protein, 15 aa, Homo sapiens
  CDR3 for beta chain variable domain of TCR clone 252559 (TRBV7-2, TRBJ2-2)
CASRRPGQNTGELFF

SEQ ID NO: 505119 - protein, 14 aa, Homo sapiens
  CDR3 for alpha chain variable domain of TCR clone 252560 (TRAV17, TRAJ16)
CATADFSDCQKLLF

SEQ ID NO: 505120 - protein, 12 aa, Homo sapiens
  CDR3 for beta chain variable domain of TCR clone 252560 (TRBV11-2, TRBJ2-1)
CASSPGNNEQFF

SEQ ID NO: 505121 - protein, 14 aa, Homo sapiens
  CDR3 for alpha chain variable domain of TCR clone 252561 (TRAV17, TRAJ39)
CATDPVRAGNMLTF

SEQ ID NO: 505122 - protein, 15 aa, Homo sapiens
  CDR3 for beta chain variable domain of TCR clone 252561 (TRBV13, TRBJ1-5)
CASSFGQGGVRHQHF

SEQ ID NO: 505123 - protein, 12 aa, Homo sapiens
  CDR3 for alpha chain variable domain of TCR clone 252562 (TRAV13-1, TRAJ21)
CAAKEGFYKFYF

SEQ ID NO: 505124 - protein, 15 aa, Homo sapiens
  CDR3 for beta chain variable domain of TCR clone 252562 (TRBV12-4, TRBJ2-5)
CASSPPTGLQETQYF

SEQ ID NO: 505125 - protein, 15 aa, Homo sapiens
  CDR3 for alpha chain variable domain of TCR clone 252563 (TRAV8-3, TRAJ27)
CAVGPSKTNAGKSTF

SEQ ID NO: 505126 - protein, 13 aa, Homo sapiens
  CDR3 for beta chain variable domain of TCR clone 252563 (TRBV5-5, TRBJ1-2)
CASSFWRGEDYTF

SEQ ID NO: 505127 - protein, 14 aa, Homo sapiens
  CDR3 for alpha chain variable domain of TCR clone 252564 (TRAV16, TRAJ15)
CALSFDQAGTALIF

SEQ ID NO: 505128 - protein, 14 aa, Homo sapiens
  CDR3 for beta chain variable domain of TCR clone 252564 (TRBV19, TRBJ2-2)
CATTGHANTGELFF

SEQ ID NO: 505129 - protein, 12 aa, Homo sapiens
  CDR3 for alpha chain variable domain of TCR clone 252565 (TRAV1-1, TRAJ24)
CAVRGSWGKFQF

SEQ ID NO: 505130 - protein, 16 aa, Homo sapiens
  CDR3 for beta chain variable domain of TCR clone 252565 (TRBV27, TRBJ2-2)
YASSFRGLVRTGELFF

SEQ ID NO: 505131 - protein, 14 aa, Homo sapiens
  CDR3 for alpha chain variable domain of TCR clone 252566 (TRAV25, TRAJ22)
CAVRSSGSARQLTF

SEQ ID NO: 505132 - protein, 13 aa, Homo sapiens
  CDR3 for beta chain variable domain of TCR clone 252566 (TRBV7-7, TRBJ2-3)
CASSLSRADTQYF

SEQ ID NO: 505133 - protein, 13 aa, Homo sapiens
  CDR3 for alpha chain variable domain of TCR clone 252567 (TRAV12-1, TRAJ49)
CVVILNTGNQFYL

SEQ ID NO: 505134 - protein, 13 aa, Homo sapiens
  CDR3 for beta chain variable domain of TCR clone 252567 (TRBV10-3, TRBJ2-7)
CASKLAVNYEQYF

SEQ ID NO: 505135 - protein, 13 aa, Homo sapiens
  CDR3 for alpha chain variable domain of TCR clone 252568 (TRAV12-3, TRAJ13)
CAMGTGGYQKVTF

SEQ ID NO: 505136 - protein, 14 aa, Homo sapiens
  CDR3 for beta chain variable domain of TCR clone 252568 (TRBV7-2, TRBJ2-5)
CASSTGEELKTQYF

SEQ ID NO: 505137 - protein, 15 aa, Homo sapiens
  CDR3 for alpha chain variable domain of TCR clone 252569 (TRAV17, TRAJ57)
CATCPSQGGSEKLVF

SEQ ID NO: 505138 - protein, 16 aa, Homo sapiens
  CDR3 for beta chain variable domain of TCR clone 252569 (TRBV12-4, TRBJ1-5)
CASSRPVGGTNQPQHF

SEQ ID NO: 505139 - protein, 11 aa, Homo sapiens
  CDR3 for alpha chain variable domain of TCR clone 252570 (TRAV12-1, TRAJ21)
CVVNNFNKFYF

SEQ ID NO: 505140 - protein, 17 aa, Homo sapiens
  CDR3 for beta chain variable domain of TCR clone 252570 (TRBV7-2, TRBJ2-2)
CASSARGAGEGTGELFF

SEQ ID NO: 505141 - protein, 16 aa, Homo sapiens
  CDR3 for alpha chain variable domain of TCR clone 252571 (TRAV12-3, TRAJ53)
CAMSPGSGGSNYKLTF

SEQ ID NO: 505142 - protein, 12 aa, Homo sapiens
  CDR3 for beta chain variable domain of TCR clone 252571 (TRBV7-8, TRBJ2-7)
CASILGDREQYF

SEQ ID NO: 505143 - protein, 13 aa, Homo sapiens
  CDR3 for alpha chain variable domain of TCR clone 252572 (TRAV29/DV5, TRAJ30)
CAASKQRWQDHLW

SEQ ID NO: 505144 - protein, 13 aa, Homo sapiens
  CDR3 for beta chain variable domain of TCR clone 252572 (TRBV12-5, TRBJ2-3)
CASQNRGTDTQYF

SEQ ID NO: 505145 - protein, 14 aa, Homo sapiens
  CDR3 for alpha chain variable domain of TCR clone 252573 (TRAV38-1, TRAJ43)
CAFMKHNNNNDMRF

SEQ ID NO: 505146 - protein, 13 aa, Homo sapiens
  CDR3 for beta chain variable domain of TCR clone 252573 (TRBV7-3, TRBJ1-1)
CASSQDWGAEAFF

SEQ ID NO: 505147 - protein, 13 aa, Homo sapiens
  CDR3 for alpha chain variable domain of TCR clone 252574 (TRAV30, TRAJ24)
CGTVTDSWGKLQF

SEQ ID NO: 505148 - protein, 14 aa, Homo sapiens
  CDR3 for beta chain variable domain of TCR clone 252574 (TRBV13, TRBJ2-5)
CASSLGTAQETQYF

SEQ ID NO: 505149 - protein, 18 aa, Homo sapiens
  CDR3 for alpha chain variable domain of TCR clone 252575 (TRAV16, TRAJ45)
CAHASYPSSGGGADGLTF

SEQ ID NO: 505150 - protein, 12 aa, Homo sapiens
  CDR3 for beta chain variable domain of TCR clone 252575 (TRBV11-3, TRBJ2-4)
CASSAGRVIQYF

SEQ ID NO: 505151 - protein, 16 aa, Homo sapiens
  CDR3 for alpha chain variable domain of TCR clone 252576 (TRAV30, TRAJ24)
CGSEIVDADSWGKFQF

SEQ ID NO: 505152 - protein, 16 aa, Homo sapiens
  CDR3 for beta chain variable domain of TCR clone 252576 (TRBV19, TRBJ1-2)
CASSIGSNRDGYGYTF

SEQ ID NO: 505153 - protein, 14 aa, Homo sapiens
  CDR3 for alpha chain variable domain of TCR clone 252577 (TRAV21, TRAJ37)
CDVKGSSNTGKLIF

SEQ ID NO: 505154 - protein, 14 aa, Homo sapiens
  CDR3 for beta chain variable domain of TCR clone 252577 (TRBV7-2, TRBJ2-1)
CASSRGGARNEQFF

SEQ ID NO: 505155 - protein, 11 aa, Homo sapiens
  CDR3 for alpha chain variable domain of TCR clone 252578 (TRAV2, TRAJ13)
CASGGYQKVTF

SEQ ID NO: 505156 - protein, 14 aa, Homo sapiens
  CDR3 for beta chain variable domain of TCR clone 252578 (TRBV6-3, TRBJ1-1)
CASSNLLPGAGAFF

SEQ ID NO: 505157 - protein, 19 aa, Homo sapiens
  CDR3 for alpha chain variable domain of TCR clone 252579 (TRAV26-1, TRAJ52)
CIVRAHRNADGTSYGKLTF

SEQ ID NO: 505158 - protein, 15 aa, Homo sapiens
  CDR3 for beta chain variable domain of TCR clone 252579 (TRBV29-1, TRBJ2-1)
CSGRDRKSSYNEQFF

SEQ ID NO: 505159 - protein, 13 aa, Homo sapiens
  CDR3 for alpha chain variable domain of TCR clone 252580 (TRAV13-1, TRAJ22)
CAASRGSARQLTF

SEQ ID NO: 505160 - protein, 16 aa, Homo sapiens
  CDR3 for beta chain variable domain of TCR clone 252580 (TRBV4-3, TRBJ2-2)
CASSHLQGSGTGELFF

SEQ ID NO: 505161 - protein, 16 aa, Homo sapiens
  CDR3 for alpha chain variable domain of TCR clone 252581 (TRAV30, TRAJ24)
CGTEIVDADSWGKFQF

SEQ ID NO: 505162 - protein, 13 aa, Homo sapiens
  CDR3 for beta chain variable domain of TCR clone 252581 (TRBV7-9, TRBJ1-2)
CASSLKQNYGCTF

SEQ ID NO: 505163 - protein, 12 aa, Homo sapiens
  CDR3 for alpha chain variable domain of TCR clone 252582 (TRAV25, TRAJ29)
CAGPRGNTPLVF

SEQ ID NO: 505164 - protein, 15 aa, Homo sapiens
  CDR3 for beta chain variable domain of TCR clone 252582 (TRBV7-2, TRBJ2-7)
CASSLKGALTYEQYF

SEQ ID NO: 505165 - protein, 16 aa, Homo sapiens
  CDR3 for alpha chain variable domain of TCR clone 252583 (TRAV26-1, TRAJ38)
CIVRVSGAGNNRKLIW

SEQ ID NO: 505166 - protein, 17 aa, Homo sapiens
  CDR3 for beta chain variable domain of TCR clone 252583 (TRBV5-1, TRBJ1-5)
CASSLGLYRVRNQPQHF

SEQ ID NO: 505167 - protein, 13 aa, Homo sapiens
  CDR3 for alpha chain variable domain of TCR clone 252584 (TRAV23/DV6, TRAJ24)
CAASEDSWGKLQF

SEQ ID NO: 505168 - protein, 15 aa, Homo sapiens
  CDR3 for beta chain variable domain of TCR clone 252584 (TRBV5-1, TRBJ2-7)
CASSLDLTSSYEQYF

SEQ ID NO: 505169 - protein, 13 aa, Homo sapiens
  CDR3 for alpha chain variable domain of TCR clone 252585 (TRAV2, TRAJ40)
CAVVTSGTYKYIF

SEQ ID NO: 505170 - protein, 14 aa, Homo sapiens
  CDR3 for beta chain variable domain of TCR clone 252585 (TRBV19, TRBJ2-3)
RASSAPRGTDTQYF

SEQ ID NO: 505171 - protein, 16 aa, Homo sapiens
  CDR3 for alpha chain variable domain of TCR clone 252586 (TRAV30, TRAJ24)
CGTEIEDADSWGKFQF

SEQ ID NO: 505172 - protein, 17 aa, Homo sapiens
  CDR3 for beta chain variable domain of TCR clone 252586 (TRBV20-1, TRBJ2-1)
CSAPPRLAGTRYNEQFF

SEQ ID NO: 505173 - protein, 15 aa, Homo sapiens
  CDR3 for alpha chain variable domain of TCR clone 252587 (TRAV12-1, TRAJ9)
CVVSFGDTGGLKTIF

SEQ ID NO: 505174 - protein, 13 aa, Homo sapiens
  CDR3 for beta chain variable domain of TCR clone 252587 (TRBV12-4, TRBJ2-7)
CASSPTGTYEQYF

SEQ ID NO: 505175 - protein, 15 aa, Homo sapiens
  CDR3 for alpha chain variable domain of TCR clone 252588 (TRAV27, TRAJ38)
CAGRFDAGNNRQLIW

SEQ ID NO: 505176 - protein, 13 aa, Homo sapiens
  CDR3 for beta chain variable domain of TCR clone 252588 (TRBV20-1, TRBJ2-1)
TSGALPPGNEQFF

SEQ ID NO: 505177 - protein, 14 aa, Homo sapiens
  CDR3 for alpha chain variable domain of TCR clone 252589 (TRAV12-2, TRAJ17)
CAWLFKAAGNKLTF

SEQ ID NO: 505178 - protein, 17 aa, Homo sapiens
  CDR3 for beta chain variable domain of TCR clone 252589 (TRBV20-1, TRBJ2-2)
CSASGSGQGGLTGELFF

SEQ ID NO: 505179 - protein, 14 aa, Homo sapiens
  CDR3 for alpha chain variable domain of TCR clone 252590 (TRAV16, TRAJ29)
CALTRNSGNTPLVF

SEQ ID NO: 505180 - protein, 15 aa, Homo sapiens
  CDR3 for beta chain variable domain of TCR clone 252590 (TRBV27, TRBJ2-1)
CASSNGGGSSNEQFF

SEQ ID NO: 505181 - protein, 13 aa, Homo sapiens
  CDR3 for alpha chain variable domain of TCR clone 252591 (TRAV12-3, TRAJ7)
CAMTPYGNNRLAF

SEQ ID NO: 505182 - protein, 15 aa, Homo sapiens
  CDR3 for beta chain variable domain of TCR clone 252591 (TRBV20-1, TRBJ1-1)
CSASRGVTGNTEAFF

SEQ ID NO: 505183 - protein, 14 aa, Homo sapiens
  CDR3 for alpha chain variable domain of TCR clone 252592 (TRAV2, TRAJ37)
CAVDFTSNTGKLIF

SEQ ID NO: 505184 - protein, 14 aa, Homo sapiens
  CDR3 for beta chain variable domain of TCR clone 252592 (TRBV11-3, TRBJ2-6)
CASNKGSVDNVLTF

SEQ ID NO: 505185 - protein, 15 aa, Homo sapiens
  CDR3 for alpha chain variable domain of TCR clone 252593 (TRAV8-3, TRAJ11)
CAVGLLNSGYSTLTF

SEQ ID NO: 505186 - protein, 15 aa, Homo sapiens
  CDR3 for beta chain variable domain of TCR clone 252593 (TRBV19, TRBJ2-4)
CASRGPRRGENIQYF

SEQ ID NO: 505187 - protein, 13 aa, Homo sapiens
  CDR3 for alpha chain variable domain of TCR clone 252594 (TRAV12-2, TRAJ6)
CAVNVSRKLHTYI

SEQ ID NO: 505188 - protein, 14 aa, Homo sapiens
  CDR3 for beta chain variable domain of TCR clone 252594 (TRBV11-2, TRBJ1-2)
CASSLYRGNYGDTF

SEQ ID NO: 505189 - protein, 14 aa, Homo sapiens
  CDR3 for alpha chain variable domain of TCR clone 252595 (TRAV16, TRAJ26)
CALSSANYGRNFVF

SEQ ID NO: 505190 - protein, 12 aa, Homo sapiens
  CDR3 for beta chain variable domain of TCR clone 252595 (TRBV6-5, TRBJ2-2)
CASRTGTGELFF

SEQ ID NO: 505191 - protein, 16 aa, Homo sapiens
  CDR3 for alpha chain variable domain of TCR clone 252596 (TRAV3, TRAJ21)
CAVRDIERGNFSKFYF

SEQ ID NO: 505192 - protein, 14 aa, Homo sapiens
  CDR3 for beta chain variable domain of TCR clone 252596 (TRBV19, TRBJ2-1)
CASPTFVLSGEQFF

SEQ ID NO: 505193 - protein, 14 aa, Homo sapiens
  CDR3 for alpha chain variable domain of TCR clone 252597 (TRAV3, TRAJ9)
CAVRLNTGGFKTIF

SEQ ID NO: 505194 - protein, 14 aa, Homo sapiens
  CDR3 for beta chain variable domain of TCR clone 252597 (TRBV7-2, TRBJ1-1)
CASSFLTGTTEAFF

SEQ ID NO: 505195 - protein, 15 aa, Homo sapiens
  CDR3 for alpha chain variable domain of TCR clone 252598 (TRAV29/DV5, TRAJ53)
CAASASGSSNNKLTF

SEQ ID NO: 505196 - protein, 19 aa, Homo sapiens
  CDR3 for beta chain variable domain of TCR clone 252598 (TRBV5-1, TRBJ2-3)
CASSLWLAGGITTTDTQYF

SEQ ID NO: 505197 - protein, 13 aa, Homo sapiens
  CDR3 for alpha chain variable domain of TCR clone 252599 (TRAV13-1, TRAJ39)
CSKYSNAGNMLTF

SEQ ID NO: 505198 - protein, 16 aa, Homo sapiens
  CDR3 for beta chain variable domain of TCR clone 252599 (TRBV7-2, TRBJ2-3)
CASSVVALYSTDTQYF

SEQ ID NO: 505199 - protein, 13 aa, Homo sapiens
  CDR3 for alpha chain variable domain of TCR clone 252600 (TRAV12-1, TRAJ3)
CVVSPRGASKIIF

SEQ ID NO: 505200 - protein, 13 aa, Homo sapiens
  CDR3 for beta chain variable domain of TCR clone 252600 (TRBV28, TRBJ1-5)
CASSDRGNQPQHF

SEQ ID NO: 505201 - protein, 11 aa, Homo sapiens
  CDR3 for alpha chain variable domain of TCR clone 252601 (TRAV21, TRAJ34)
CAVTNTDKPIF

SEQ ID NO: 505202 - protein, 13 aa, Homo sapiens
  CDR3 for beta chain variable domain of TCR clone 252601 (TRBV29-1, TRBJ1-3)
CSVEGGSGNTIYF

SEQ ID NO: 505203 - protein, 13 aa, Homo sapiens
  CDR3 for alpha chain variable domain of TCR clone 252602 (TRAV20, TRAJ56)
CAVQCLANSKLTF

SEQ ID NO: 505204 - protein, 12 aa, Homo sapiens
  CDR3 for beta chain variable domain of TCR clone 252602 (TRBV7-2, TRBJ2-1)
CASSPQDIEQFF

SEQ ID NO: 505205 - protein, 15 aa, Homo sapiens
  CDR3 for alpha chain variable domain of TCR clone 252603 (TRAV3, TRAJ20)
CAVRDSRSNAYKLSF

SEQ ID NO: 505206 - protein, 14 aa, Homo sapiens
  CDR3 for beta chain variable domain of TCR clone 252603 (TRBV20-1, TRBJ2-7)
CSARRGNGIYEQYF

SEQ ID NO: 505207 - protein, 12 aa, Homo sapiens
  CDR3 for alpha chain variable domain of TCR clone 252604 (TRAV3, TRAJ26)
CAVRDYGQNFVF

SEQ ID NO: 505208 - protein, 16 aa, Homo sapiens
  CDR3 for beta chain variable domain of TCR clone 252604 (TRBV11-2, TRBJ1-2)
CASSPSGRETNYGYTF

SEQ ID NO: 505209 - protein, 17 aa, Homo sapiens
  CDR3 for alpha chain variable domain of TCR clone 252605 (TRAV8-2, TRAJ17)
CVVSDRRFKAAGNKLTF

SEQ ID NO: 505210 - protein, 15 aa, Homo sapiens
  CDR3 for beta chain variable domain of TCR clone 252605 (TRBV5-1, TRBJ2-7)
CASSLNGGPAREQYF

SEQ ID NO: 505211 - protein, 19 aa, Homo sapiens
  CDR3 for alpha chain variable domain of TCR clone 252606 (TRAV2, TRAJ20)
ILQVREADAAVYRDCKLSF

SEQ ID NO: 505212 - protein, 15 aa, Homo sapiens
  CDR3 for beta chain variable domain of TCR clone 252606 (TRBV13, TRBJ1-5)
CASSFGQGGVQPQHF

SEQ ID NO: 505213 - protein, 13 aa, Homo sapiens
  CDR3 for alpha chain variable domain of TCR clone 252607 (TRAV16, TRAJ52)
CALRGTSYGKLTF

SEQ ID NO: 505214 - protein, 13 aa, Homo sapiens
  CDR3 for beta chain variable domain of TCR clone 252607 (TRBV14, TRBJ1-1)
CASSQEAGTEAFF

SEQ ID NO: 505215 - protein, 14 aa, Homo sapiens
  CDR3 for alpha chain variable domain of TCR clone 252608 (TRAV12-1, TRAJ12)
CVVTRMDSSYKLIF

SEQ ID NO: 505216 - protein, 11 aa, Homo sapiens
  CDR3 for beta chain variable domain of TCR clone 252608 (TRBV23-1, TRBJ2-7)
SSSGTGLEQYF

SEQ ID NO: 505217 - protein, 17 aa, Homo sapiens
  CDR3 for alpha chain variable domain of TCR clone 252609 (TRAV23/DV6, TRAJ58)
CAARLLRGETSGSRLTF

SEQ ID NO: 505218 - protein, 13 aa, Homo sapiens
  CDR3 for beta chain variable domain of TCR clone 252609 (TRBV28, TRBJ2-5)
CASSSRNQETQYF

SEQ ID NO: 505219 - protein, 15 aa, Homo sapiens
  CDR3 for alpha chain variable domain of TCR clone 252610 (TRAV8-3, TRAJ45)
CASSYSGGGADGLTF

SEQ ID NO: 505220 - protein, 14 aa, Homo sapiens
  CDR3 for beta chain variable domain of TCR clone 252610 (TRBV19, TRBJ2-3)
CASSVGRGSDTQYF

SEQ ID NO: 505221 - protein, 14 aa, Homo sapiens
  CDR3 for alpha chain variable domain of TCR clone 252611 (TRAV29/DV5, TRAJ43)
FAAIHSYNNNATRF

SEQ ID NO: 505222 - protein, 14 aa, Homo sapiens
  CDR3 for beta chain variable domain of TCR clone 252611 (TRBV12-4, TRBJ2-5)
CASSSTEGTKTQYF

SEQ ID NO: 505223 - protein, 12 aa, Homo sapiens
  CDR3 for alpha chain variable domain of TCR clone 252612 (TRAV12-3, TRAJ17)
CAMTLTGNKLTF

SEQ ID NO: 505224 - protein, 14 aa, Homo sapiens
  CDR3 for beta chain variable domain of TCR clone 252612 (TRBV7-3, TRBJ2-7)
CASSVSGVSYEQYF

SEQ ID NO: 505225 - protein, 22 aa, Homo sapiens
  CDR3 for alpha chain variable domain of TCR clone 252613 (TRAV26-1, TRAJ42)
CIVRPIMDEAKAISSLEKALNS

SEQ ID NO: 505226 - protein, 16 aa, Homo sapiens
  CDR3 for beta chain variable domain of TCR clone 252613 (TRBV7-3, TRBJ2-2)
CASSLKRGTLSGELFF

SEQ ID NO: 505227 - protein, 14 aa, Homo sapiens
  CDR3 for alpha chain variable domain of TCR clone 252614 (TRAV9-2, TRAJ39)
CALYIYNAGNMLTF

SEQ ID NO: 505228 - protein, 15 aa, Homo sapiens
  CDR3 for beta chain variable domain of TCR clone 252614 (TRBV7-3, TRBJ2-2)
CQQLKAGTLSGELFF

SEQ ID NO: 505229 - protein, 12 aa, Homo sapiens
  CDR3 for alpha chain variable domain of TCR clone 252615 (TRAV8-6, TRAJ4)
CAVRDHPNKLIF

SEQ ID NO: 505230 - protein, 14 aa, Homo sapiens
  CDR3 for beta chain variable domain of TCR clone 252615 (TRBV19, TRBJ2-2)
CASSGQGIAGELFF

SEQ ID NO: 505231 - protein, 14 aa, Homo sapiens
  CDR3 for alpha chain variable domain of TCR clone 252616 (TRAV12-3, TRAJ9)
CAMSPNTGGFKTIF

SEQ ID NO: 505232 - protein, 19 aa, Homo sapiens
  CDR3 for beta chain variable domain of TCR clone 252616 (TRBV25-1, TRBJ2-2)
CAILVYRVDRGRKTGELFF

SEQ ID NO: 505233 - protein, 17 aa, Homo sapiens
  CDR3 for alpha chain variable domain of TCR clone 252617 (TRAV4, TRAJ22)
CCVLLPRGGGSARQLTF

SEQ ID NO: 505234 - protein, 14 aa, Homo sapiens
  CDR3 for beta chain variable domain of TCR clone 252617 (TRBV20-1, TRBJ1-1)
YSARAVNGYTEAFF

SEQ ID NO: 505235 - protein, 12 aa, Homo sapiens
  CDR3 for alpha chain variable domain of TCR clone 252618 (TRAV12-2, TRAJ10)
WGVTGGGNKLTF

SEQ ID NO: 505236 - protein, 16 aa, Homo sapiens
  CDR3 for beta chain variable domain of TCR clone 252618 (TRBV6-4, TRBJ1-2)
SDSSEAVGDPNYGYTF

SEQ ID NO: 505237 - protein, 16 aa, Homo sapiens
  CDR3 for alpha chain variable domain of TCR clone 252619 (TRAV30, TRAJ24)
CGTEIVDADSWGKFQF

SEQ ID NO: 505238 - protein, 15 aa, Homo sapiens
  CDR3 for beta chain variable domain of TCR clone 252619 (TRBV18, TRBJ2-1)
CASLPDRGGDNEQFF

SEQ ID NO: 505239 - protein, 13 aa, Homo sapiens
  CDR3 for alpha chain variable domain of TCR clone 252620 (TRAV1-2, TRAJ9)
CAALNTGGFKTIF

SEQ ID NO: 505240 - protein, 14 aa, Homo sapiens
  CDR3 for beta chain variable domain of TCR clone 252620 (TRBV19, TRBJ1-6)
CASSNDGWNSPLHF

SEQ ID NO: 505241 - protein, 14 aa, Homo sapiens
  CDR3 for alpha chain variable domain of TCR clone 252621 (TRAV12-2, TRAJ40)
CAVKIPSGTYKYIF

SEQ ID NO: 505242 - protein, 12 aa, Homo sapiens
  CDR3 for beta chain variable domain of TCR clone 252621 (TRBV6-3, TRBJ2-1)
CASSGSYNEQFF

SEQ ID NO: 505243 - protein, 18 aa, Homo sapiens
  CDR3 for alpha chain variable domain of TCR clone 252622 (TRAV9-2, TRAJ52)
CALSRHNAGGTSYGKLTF

SEQ ID NO: 505244 - protein, 14 aa, Homo sapiens
  CDR3 for beta chain variable domain of TCR clone 252622 (TRBV7-3, TRBJ2-4)
CASSFGGDPNMQYF

SEQ ID NO: 505245 - protein, 14 aa, Homo sapiens
  CDR3 for alpha chain variable domain of TCR clone 252623 (TRAV17, TRAJ20)
CATPHPSNDYKLSF

SEQ ID NO: 505246 - protein, 12 aa, Homo sapiens
  CDR3 for beta chain variable domain of TCR clone 252623 (TRBV28, TRBJ1-2)
CASSLTTGGYTF

SEQ ID NO: 505247 - protein, 13 aa, Homo sapiens
  CDR3 for alpha chain variable domain of TCR clone 252624 (TRAV12-3, TRAJ35)
CAMAIGFGNVLHC

SEQ ID NO: 505248 - protein, 14 aa, Homo sapiens
  CDR3 for beta chain variable domain of TCR clone 252624 (TRBV12-4, TRBJ1-1)
CASSLRSSGTEAFF

SEQ ID NO: 505249 - protein, 13 aa, Homo sapiens
  CDR3 for alpha chain variable domain of TCR clone 252625 (TRAV29/DV5, TRAJ47)
CAASAEYGNKLVF

SEQ ID NO: 505250 - protein, 12 aa, Homo sapiens
  CDR3 for beta chain variable domain of TCR clone 252625 (TRBV11-2, TRBJ2-2)
CASSLGGGELFF

SEQ ID NO: 505251 - protein, 12 aa, Homo sapiens
  CDR3 for alpha chain variable domain of TCR clone 252626 (TRAV8-3, TRAJ26)
CAGDNYGQNFVF

SEQ ID NO: 505252 - protein, 13 aa, Homo sapiens
  CDR3 for beta chain variable domain of TCR clone 252626 (TRBV20-1, TRBJ2-5)
CSARGDYQETHYF

SEQ ID NO: 505253 - protein, 13 aa, Homo sapiens
  CDR3 for alpha chain variable domain of TCR clone 252627 (TRAV8-6, TRAJ54)
CAVSEEGAQKLVF

SEQ ID NO: 505254 - protein, 13 aa, Homo sapiens
  CDR3 for beta chain variable domain of TCR clone 252627 (TRBV19, TRBJ1-2)
CASSISEDYGYTF

SEQ ID NO: 505255 - protein, 17 aa, Homo sapiens
  CDR3 for alpha chain variable domain of TCR clone 252628 (TRAV38-2/DV8, TRAJ38)
CAYRSARGAGNNRKLIW

SEQ ID NO: 505256 - protein, 13 aa, Homo sapiens
  CDR3 for beta chain variable domain of TCR clone 252628 (TRBV6-5, TRBJ2-1)
CASRGRVGIEQFF

SEQ ID NO: 505257 - protein, 16 aa, Homo sapiens
  CDR3 for alpha chain variable domain of TCR clone 252629 (TRAV4, TRAJ9)
CLVGDPNRPGDFKTIF

SEQ ID NO: 505258 - protein, 16 aa, Homo sapiens
  CDR3 for beta chain variable domain of TCR clone 252629 (TRBV28, TRBJ1-4)
CASSPPYRGRSEKLFF

SEQ ID NO: 505259 - protein, 16 aa, Homo sapiens
  CDR3 for alpha chain variable domain of TCR clone 252630 (TRAV3, TRAJ37)
CAVRGKGSCNTGKLIF

SEQ ID NO: 505260 - protein, 15 aa, Homo sapiens
  CDR3 for beta chain variable domain of TCR clone 252630 (TRBV7-9, TRBJ2-2)
CASGPLDTFPGELFF

SEQ ID NO: 505261 - protein, 12 aa, Homo sapiens
  CDR3 for alpha chain variable domain of TCR clone 252631 (TRAV3, TRAJ43)
CAVRDPNNDMRF

SEQ ID NO: 505262 - protein, 17 aa, Homo sapiens
  CDR3 for beta chain variable domain of TCR clone 252631 (TRBV7-8, TRBJ2-6)
CASSDGTEGAGANVLTF

SEQ ID NO: 505263 - protein, 14 aa, Homo sapiens
  CDR3 for alpha chain variable domain of TCR clone 252632 (TRAV12-2, TRAJ45)
CAVNIGGGAVGLTF

SEQ ID NO: 505264 - protein, 17 aa, Homo sapiens
  CDR3 for beta chain variable domain of TCR clone 252632 (TRBV7-8, TRBJ2-6)
CASSAGTGGAGANVLAF

SEQ ID NO: 505265 - protein, 15 aa, Homo sapiens
  CDR3 for alpha chain variable domain of TCR clone 252633 (TRAV3, TRAJ45)
CAVRTPWGGADGLTF

SEQ ID NO: 505266 - protein, 16 aa, Homo sapiens
  CDR3 for beta chain variable domain of TCR clone 252633 (TRBV6-1, TRBJ2-2)
CASSFGQGVNTGELFF

SEQ ID NO: 505267 - protein, 11 aa, Homo sapiens
  CDR3 for alpha chain variable domain of TCR clone 252634 (TRAV2, TRAJ13)
CASGGYQKVTF

SEQ ID NO: 505268 - protein, 15 aa, Homo sapiens
  CDR3 for beta chain variable domain of TCR clone 252634 (TRBV19, TRBJ1-5)
CASSIVWADNQPQHF

SEQ ID NO: 505269 - protein, 12 aa, Homo sapiens
  CDR3 for alpha chain variable domain of TCR clone 252635 (TRAV16, TRAJ10)
CSRMGGGNKLTF

SEQ ID NO: 505270 - protein, 16 aa, Homo sapiens
  CDR3 for beta chain variable domain of TCR clone 252635 (TRBV13, TRBJ2-2)
CASSPRTGEHTGELFF

SEQ ID NO: 505271 - protein, 13 aa, Homo sapiens
  CDR3 for alpha chain variable domain of TCR clone 252636 (TRAV2, TRAJ40)
CAVVTSGTYKYIF

SEQ ID NO: 505272 - protein, 16 aa, Homo sapiens
  CDR3 for beta chain variable domain of TCR clone 252636 (TRBV19, TRBJ1-1)
CASSPTRFWPGTEVFF

SEQ ID NO: 505273 - protein, 14 aa, Homo sapiens
  CDR3 for alpha chain variable domain of TCR clone 252637 (TRAV12-2, TRAJ48)
CAVNAFFGNEKLPF

SEQ ID NO: 505274 - protein, 13 aa, Homo sapiens
  CDR3 for beta chain variable domain of TCR clone 252637 (TRBV28, TRBJ2-7)
CAGAQQGLDEQYF

SEQ ID NO: 505275 - protein, 13 aa, Homo sapiens
  CDR3 for alpha chain variable domain of TCR clone 252638 (TRAV4, TRAJ31)
CLVARMPDSCLEM

SEQ ID NO: 505276 - protein, 15 aa, Homo sapiens
  CDR3 for beta chain variable domain of TCR clone 252638 (TRBV7-8, TRBJ1-2)
CASSLVRDGGLGYTF

SEQ ID NO: 505277 - protein, 15 aa, Homo sapiens
  CDR3 for alpha chain variable domain of TCR clone 252639 (TRAV8-3, TRAJ27)
CAVGPSKTNAGKSTF

SEQ ID NO: 505278 - protein, 14 aa, Homo sapiens
  CDR3 for beta chain variable domain of TCR clone 252639 (TRBV7-8, TRBJ1-5)
CASSLGAFNQPQHF

SEQ ID NO: 505279 - protein, 12 aa, Homo sapiens
  CDR3 for alpha chain variable domain of TCR clone 252640 (TRAV12-3, TRAJ17)
CAMTLTGNKLTF

SEQ ID NO: 505280 - protein, 14 aa, Homo sapiens
  CDR3 for beta chain variable domain of TCR clone 252640 (TRBV12-4, TRBJ2-3)
CASSGQGSADTQYF

SEQ ID NO: 505281 - protein, 12 aa, Homo sapiens
  CDR3 for alpha chain variable domain of TCR clone 252641 (TRAV21, TRAJ29)
CGTISGNTPLVF

SEQ ID NO: 505282 - protein, 13 aa, Homo sapiens
  CDR3 for beta chain variable domain of TCR clone 252641 (TRBV19, TRBJ2-5)
CASSIRGRETQYF

SEQ ID NO: 505283 - protein, 15 aa, Homo sapiens
  CDR3 for alpha chain variable domain of TCR clone 252642 (TRAV1-2, TRAJ28)
CAVQSSGAGSYQLTF

SEQ ID NO: 505284 - protein, 13 aa, Homo sapiens
  CDR3 for beta chain variable domain of TCR clone 252642 (TRBV20-1, TRBJ2-7)
CSATHTSGYEQYF

SEQ ID NO: 505285 - protein, 13 aa, Homo sapiens
  CDR3 for alpha chain variable domain of TCR clone 252643 (TRAV12-3, TRAJ47)
CAMKKEYGNKLFF

SEQ ID NO: 505286 - protein, 17 aa, Homo sapiens
  CDR3 for beta chain variable domain of TCR clone 252643 (TRBV11-2, TRBJ2-1)
CASSLYPPGVEYNEQFF

SEQ ID NO: 505287 - protein, 14 aa, Homo sapiens
  CDR3 for alpha chain variable domain of TCR clone 252644 (TRAV8-3, TRAJ39)
CAVGANNAGNMLTF

SEQ ID NO: 505288 - protein, 14 aa, Homo sapiens
  CDR3 for beta chain variable domain of TCR clone 252644 (TRBV6-1, TRBJ1-6)
CASSGTAYNSPLLF

SEQ ID NO: 505289 - protein, 11 aa, Homo sapiens
  CDR3 for alpha chain variable domain of TCR clone 252645 (TRAV17, TRAJ9)
CGFTGGFKAIF

SEQ ID NO: 505290 - protein, 14 aa, Homo sapiens
  CDR3 for beta chain variable domain of TCR clone 252645 (TRBV20-1, TRBJ1-1)
CSAQTRIGGTEAFF

SEQ ID NO: 505291 - protein, 16 aa, Homo sapiens
  CDR3 for alpha chain variable domain of TCR clone 252646 (TRAV1-1, TRAJ28)
CAVRDDSGAGSYQLTF

SEQ ID NO: 505292 - protein, 14 aa, Homo sapiens
  CDR3 for beta chain variable domain of TCR clone 252646 (TRBV28, TRBJ2-3)
CASSFVSGTDTQYF

SEQ ID NO: 505293 - protein, 23 aa, Homo sapiens
  CDR3 for alpha chain variable domain of TCR clone 252647 (TRAV26-1, TRAJ38)
CIADNAGNNHIQNPDTAMYQLRD

SEQ ID NO: 505294 - protein, 14 aa, Homo sapiens
  CDR3 for beta chain variable domain of TCR clone 252647 (TRBV7-3, TRBJ1-1)
CASSLKGGNTEAFF

SEQ ID NO: 505295 - protein, 12 aa, Homo sapiens
  CDR3 for alpha chain variable domain of TCR clone 252648 (TRAV12-3, TRAJ17)
CAMTLTGNKLTF

SEQ ID NO: 505296 - protein, 15 aa, Homo sapiens
  CDR3 for beta chain variable domain of TCR clone 252648 (TRBV20-1, TRBJ2-7)
CSARGRVTGMDEQYF

SEQ ID NO: 505297 - protein, 14 aa, Homo sapiens
  CDR3 for alpha chain variable domain of TCR clone 252649 (TRAV1-1, TRAJ23)
CAVSIYNQGGKLIF

SEQ ID NO: 505298 - protein, 16 aa, Homo sapiens
  CDR3 for beta chain variable domain of TCR clone 252649 (TRBV4-2, TRBJ2-1)
CASSQETATPYNEQFF

SEQ ID NO: 505299 - protein, 12 aa, Homo sapiens
  CDR3 for alpha chain variable domain of TCR clone 252650 (TRAV12-3, TRAJ17)
CAMTLTGNKLTF

SEQ ID NO: 505300 - protein, 16 aa, Homo sapiens
  CDR3 for beta chain variable domain of TCR clone 252650 (TRBV11-2, TRBJ2-7)
CASSPLAGGPRYEQYF

SEQ ID NO: 505301 - protein, 17 aa, Homo sapiens
  CDR3 for alpha chain variable domain of TCR clone 252651 (TRAV8-2, TRAJ17)
CVVSDRRFKAAGNKLTF

SEQ ID NO: 505302 - protein, 18 aa, Homo sapiens
  CDR3 for beta chain variable domain of TCR clone 252651 (TRBV7-9, TRBJ2-7)
CASSLTTSVSRTWYEQYF

SEQ ID NO: 505303 - protein, 12 aa, Homo sapiens
  CDR3 for alpha chain variable domain of TCR clone 252652 (TRAV2, TRAJ10)
CASTGGGNKLTF

SEQ ID NO: 505304 - protein, 21 aa, Homo sapiens
  CDR3 for beta chain variable domain of TCR clone 252652 (TRBV7-2, TRBJ2-2)
RRTRPCISVPGGQGAAGELFF

SEQ ID NO: 505305 - protein, 14 aa, Homo sapiens
  CDR3 for alpha chain variable domain of TCR clone 252653 (TRAV4, TRAJ10)
CLVGDTGGGNKLIF

SEQ ID NO: 505306 - protein, 14 aa, Homo sapiens
  CDR3 for beta chain variable domain of TCR clone 252653 (TRBV19, TRBJ2-1)
CASSEPGGHGEQFF

SEQ ID NO: 505307 - protein, 17 aa, Homo sapiens
  CDR3 for alpha chain variable domain of TCR clone 252654 (TRAV3, TRAJ6)
CDARDGPRAGGSYIPTF

SEQ ID NO: 505308 - protein, 14 aa, Homo sapiens
  CDR3 for beta chain variable domain of TCR clone 252654 (TRBV7-2, TRBJ2-7)
CASSPKTSFYEQYF

SEQ ID NO: 505309 - protein, 14 aa, Homo sapiens
  CDR3 for alpha chain variable domain of TCR clone 252655 (TRAV16, TRAJ32)
CALKSGGATNKPIF

SEQ ID NO: 505310 - protein, 17 aa, Homo sapiens
  CDR3 for beta chain variable domain of TCR clone 252655 (TRBV20-1, TRBJ2-1)
CSASSSGLAGSYNEQFF

SEQ ID NO: 505311 - protein, 17 aa, Homo sapiens
  CDR3 for alpha chain variable domain of TCR clone 252656 (TRAV26-1, TRAJ46)
IASSESEKKSSGDKLTF

SEQ ID NO: 505312 - protein, 13 aa, Homo sapiens
  CDR3 for beta chain variable domain of TCR clone 252656 (TRBV12-4, TRBJ2-7)
CASSPTETYEQYF

SEQ ID NO: 505313 - protein, 13 aa, Homo sapiens
  CDR3 for alpha chain variable domain of TCR clone 252657 (TRAV3, TRAJ15)
SAVRDQAGTALIF

SEQ ID NO: 505314 - protein, 15 aa, Homo sapiens
  CDR3 for beta chain variable domain of TCR clone 252657 (TRBV11-1, TRBJ2-7)
CASSLNYGASYEQYF

SEQ ID NO: 505315 - protein, 13 aa, Homo sapiens
  CDR3 for alpha chain variable domain of TCR clone 252658 (TRAV21, TRAJ27)
CTARPGNAGKSTF

SEQ ID NO: 505316 - protein, 14 aa, Homo sapiens
  CDR3 for beta chain variable domain of TCR clone 252658 (TRBV7-2, TRBJ2-7)
CASRSQGAAYEQYF

SEQ ID NO: 505317 - protein, 18 aa, Homo sapiens
  CDR3 for alpha chain variable domain of TCR clone 252659 (TRAV12-3, TRAJ52)
CAMSRTNAGGTSYGKLTF

SEQ ID NO: 505318 - protein, 15 aa, Homo sapiens
  CDR3 for beta chain variable domain of TCR clone 252659 (TRBV27, TRBJ2-5)
CASSLIPSGGETQYF

SEQ ID NO: 505319 - protein, 15 aa, Homo sapiens
  CDR3 for alpha chain variable domain of TCR clone 252660 (TRAV21, TRAJ53)
CATLNSGGSNYKLTF

SEQ ID NO: 505320 - protein, 15 aa, Homo sapiens
  CDR3 for beta chain variable domain of TCR clone 252660 (TRBV18, TRBJ2-1)
CASSPPSASYNEQFS

SEQ ID NO: 505321 - protein, 15 aa, Homo sapiens
  CDR3 for alpha chain variable domain of TCR clone 252661 (TRAV26-1, TRAJ29)
CIVRVEGSGNTPLVF

SEQ ID NO: 505322 - protein, 14 aa, Homo sapiens
  CDR3 for beta chain variable domain of TCR clone 252661 (TRBV20-1, TRBJ1-1)
CSAPPADMNTEAFF

SEQ ID NO: 505323 - protein, 15 aa, Homo sapiens
  CDR3 for alpha chain variable domain of TCR clone 252662 (TRAV25, TRAJ52)
CAGRPGGTSYGKLTF

SEQ ID NO: 505324 - protein, 14 aa, Homo sapiens
  CDR3 for beta chain variable domain of TCR clone 252662 (TRBV18, TRBJ1-1)
CASSPPTGRTEAFF

SEQ ID NO: 505325 - protein, 16 aa, Homo sapiens
  CDR3 for alpha chain variable domain of TCR clone 252663 (TRAV12-3, TRAJ53)
CAMSPGSGGSNYKLTY

SEQ ID NO: 505326 - protein, 16 aa, Homo sapiens
  CDR3 for beta chain variable domain of TCR clone 252663 (TRBV4-2, TRBJ1-1)
CASSQAGFGMNTEAFF

SEQ ID NO: 505327 - protein, 14 aa, Homo sapiens
  CDR3 for alpha chain variable domain of TCR clone 252664 (TRAV17, TRAJ50)
CATMMKTSYDKVIF

SEQ ID NO: 505328 - protein, 14 aa, Homo sapiens
  CDR3 for beta chain variable domain of TCR clone 252664 (TRBV11-2, TRBJ1-2)
CASSLGTANYGYTF

SEQ ID NO: 505329 - protein, 11 aa, Homo sapiens
  CDR3 for alpha chain variable domain of TCR clone 252665 (TRAV3, TRAJ21)
CAVGNLNKFYF

SEQ ID NO: 505330 - protein, 16 aa, Homo sapiens
  CDR3 for beta chain variable domain of TCR clone 252665 (TRBV19, TRBJ2-1)
RASSKAGPSSYNEQFF

SEQ ID NO: 505331 - protein, 13 aa, Homo sapiens
  CDR3 for alpha chain variable domain of TCR clone 252666 (TRAV17, TRAJ57)
CAIYQGGSEKLVF

SEQ ID NO: 505332 - protein, 16 aa, Homo sapiens
  CDR3 for beta chain variable domain of TCR clone 252666 (TRBV4-3, TRBJ2-1)
CASSQERLAGFNEQSF

SEQ ID NO: 505333 - protein, 14 aa, Homo sapiens
  CDR3 for alpha chain variable domain of TCR clone 252667 (TRAV8-3, TRAJ39)
CAVGAWGEGNMLTF

SEQ ID NO: 505334 - protein, 16 aa, Homo sapiens
  CDR3 for beta chain variable domain of TCR clone 252667 (TRBV7-2, TRBJ1-3)
CASSSGRVLSGNTIYF

SEQ ID NO: 505335 - protein, 13 aa, Homo sapiens
  CDR3 for alpha chain variable domain of TCR clone 252668 (TRAV20, TRAJ37)
CAGCSSNTGKLIF

SEQ ID NO: 505336 - protein, 20 aa, Homo sapiens
  CDR3 for beta chain variable domain of TCR clone 252668 (TRBV6-4, TRBJ2-7)
CASSDSSVSGQVPTSYEQYF

SEQ ID NO: 505337 - protein, 13 aa, Homo sapiens
  CDR3 for alpha chain variable domain of TCR clone 252669 (TRAV12-3, TRAJ30)
CAMSAKWDDKIIF

SEQ ID NO: 505338 - protein, 14 aa, Homo sapiens
  CDR3 for beta chain variable domain of TCR clone 252669 (TRBV7-3, TRBJ1-1)
CASSLKGGNTEAFF

SEQ ID NO: 505339 - protein, 15 aa, Homo sapiens
  CDR3 for alpha chain variable domain of TCR clone 252670 (TRAV16, TRAJ6)
CALNDASGGSYIPTF

SEQ ID NO: 505340 - protein, 16 aa, Homo sapiens
  CDR3 for beta chain variable domain of TCR clone 252670 (TRBV5-1, TRBJ1-1)
CASSSGGNSLNTEAFF

SEQ ID NO: 505341 - protein, 15 aa, Homo sapiens
  CDR3 for alpha chain variable domain of TCR clone 252671 (TRAV12-1, TRAJ10)
RVVNKLTGGGNKLTF

SEQ ID NO: 505342 - protein, 17 aa, Homo sapiens
  CDR3 for beta chain variable domain of TCR clone 252671 (TRBV5-1, TRBJ1-6)
CASSPSLQGSDNSPLHF

SEQ ID NO: 505343 - protein, 16 aa, Homo sapiens
  CDR3 for alpha chain variable domain of TCR clone 252672 (TRAV30, TRAJ24)
CGTEIVGADSWGKFQF

SEQ ID NO: 505344 - protein, 15 aa, Homo sapiens
  CDR3 for beta chain variable domain of TCR clone 252672 (TRBV9, TRBJ1-6)
CASSVAGTGDSPLHF

SEQ ID NO: 505345 - protein, 10 aa, Homo sapiens
  CDR3 for alpha chain variable domain of TCR clone 252673 (TRAV12-3, TRAJ49)
CAMNDDQFYF

SEQ ID NO: 505346 - protein, 13 aa, Homo sapiens
  CDR3 for beta chain variable domain of TCR clone 252673 (TRBV12-4, TRBJ1-1)
CASSPGSGFEAFF

SEQ ID NO: 505347 - protein, 15 aa, Homo sapiens
  CDR3 for alpha chain variable domain of TCR clone 252674 (TRAV8-3, TRAJ15)
CAVGAPNQAGTALFF

SEQ ID NO: 505348 - protein, 14 aa, Homo sapiens
  CDR3 for beta chain variable domain of TCR clone 252674 (TRBV20-1, TRBJ2-1)
CSPSDEASYNEQFF

SEQ ID NO: 505349 - protein, 14 aa, Homo sapiens
  CDR3 for alpha chain variable domain of TCR clone 252675 (TRAV26-1, TRAJ38)
CIADNAGNNLKLIW

SEQ ID NO: 505350 - protein, 13 aa, Homo sapiens
  CDR3 for beta chain variable domain of TCR clone 252675 (TRBV20-1, TRBJ1-1)
CSARGGGNTEDFF

SEQ ID NO: 505351 - protein, 18 aa, Homo sapiens
  CDR3 for alpha chain variable domain of TCR clone 252676 (TRAV21, TRAJ52)
CAVRPSPAGGTGYGKLTF

SEQ ID NO: 505352 - protein, 15 aa, Homo sapiens
  CDR3 for beta chain variable domain of TCR clone 252676 (TRBV9, TRBJ1-6)
CASSVAGTGDSPLHF

SEQ ID NO: 505353 - protein, 16 aa, Homo sapiens
  CDR3 for alpha chain variable domain of TCR clone 252677 (TRAV16, TRAJ4)
CITVLPFSGGYNKLIF

SEQ ID NO: 505354 - protein, 13 aa, Homo sapiens
  CDR3 for beta chain variable domain of TCR clone 252677 (TRBV7-9, TRBJ2-3)
CASSPGSTDTQYL

SEQ ID NO: 505355 - protein, 16 aa, Homo sapiens
  CDR3 for alpha chain variable domain of TCR clone 252678 (TRAV35, TRAJ37)
CWAFLRGSSNTGKLIF

SEQ ID NO: 505356 - protein, 13 aa, Homo sapiens
  CDR3 for beta chain variable domain of TCR clone 252678 (TRBV2, TRBJ1-2)
FASSVRGNYGYTF

SEQ ID NO: 505357 - protein, 14 aa, Homo sapiens
  CDR3 for alpha chain variable domain of TCR clone 252679 (TRAV8-1, TRAJ5)
CAVRTDTGRRAITL

SEQ ID NO: 505358 - protein, 14 aa, Homo sapiens
  CDR3 for beta chain variable domain of TCR clone 252679 (TRBV7-8, TRBJ2-3)
CASSFPDGQDTQYF

SEQ ID NO: 505359 - protein, 23 aa, Homo sapiens
  CDR3 for alpha chain variable domain of TCR clone 252680 (TRAV26-1, TRAJ38)
CIADNAGNNHIQNPDPAVNPLRD

SEQ ID NO: 505360 - protein, 13 aa, Homo sapiens
  CDR3 for beta chain variable domain of TCR clone 252680 (TRBV20-1, TRBJ1-1)
CSARGGGNTEAFF

SEQ ID NO: 505361 - protein, 11 aa, Homo sapiens
  CDR3 for alpha chain variable domain of TCR clone 252681 (TRAV2, TRAJ33)
CAVESNYQLIW

SEQ ID NO: 505362 - protein, 13 aa, Homo sapiens
  CDR3 for beta chain variable domain of TCR clone 252681 (TRBV4-1, TRBJ2-5)
CASSLTRGETQYF

SEQ ID NO: 505363 - protein, 13 aa, Homo sapiens
  CDR3 for alpha chain variable domain of TCR clone 252682 (TRAV3, TRAJ29)
CAVRDWGKTPLVF

SEQ ID NO: 505364 - protein, 15 aa, Homo sapiens
  CDR3 for beta chain variable domain of TCR clone 252682 (TRBV12-4, TRBJ2-5)
CASIGRTGEGETQYF

SEQ ID NO: 505365 - protein, 16 aa, Homo sapiens
  CDR3 for alpha chain variable domain of TCR clone 252683 (TRAV26-1, TRAJ53)
GIVRVALGGSNYKLTF

SEQ ID NO: 505366 - protein, 12 aa, Homo sapiens
  CDR3 for beta chain variable domain of TCR clone 252683 (TRBV7-9, TRBJ1-5)
CASSPQGQPQHF

SEQ ID NO: 505367 - protein, 17 aa, Homo sapiens
  CDR3 for alpha chain variable domain of TCR clone 252684 (TRAV3, TRAJ42)
CAVRDRDYGGSQGNLTF

SEQ ID NO: 505368 - protein, 12 aa, Homo sapiens
  CDR3 for beta chain variable domain of TCR clone 252684 (TRBV14, TRBJ2-7)
CASSSLKGEQYF

SEQ ID NO: 505369 - protein, 14 aa, Homo sapiens
  CDR3 for alpha chain variable domain of TCR clone 252685 (TRAV16, TRAJ15)
CALSGTQAGTAMIF

SEQ ID NO: 505370 - protein, 12 aa, Homo sapiens
  CDR3 for beta chain variable domain of TCR clone 252685 (TRBV18, TRBJ2-5)
CASSPSKETQYF

SEQ ID NO: 505371 - protein, 13 aa, Homo sapiens
  CDR3 for alpha chain variable domain of TCR clone 252686 (TRAV12-2, TRAJ12)
CACPEDSSYKLIF

SEQ ID NO: 505372 - protein, 13 aa, Homo sapiens
  CDR3 for beta chain variable domain of TCR clone 252686 (TRBV28, TRBJ2-1)
CASSLIGRDEQFF

SEQ ID NO: 505373 - protein, 14 aa, Homo sapiens
  CDR3 for alpha chain variable domain of TCR clone 252687 (TRAV16, TRAJ33)
CALSAMDSNYQLIW

SEQ ID NO: 505374 - protein, 15 aa, Homo sapiens
  CDR3 for beta chain variable domain of TCR clone 252687 (TRBV5-1, TRBJ1-4)
FAPAAWKDGNEKLFF

SEQ ID NO: 505375 - protein, 16 aa, Homo sapiens
  CDR3 for alpha chain variable domain of TCR clone 252688 (TRAV38-2/DV8, TRAJ47)
CAYRSAIMEYGNKLVF

SEQ ID NO: 505376 - protein, 14 aa, Homo sapiens
  CDR3 for beta chain variable domain of TCR clone 252688 (TRBV19, TRBJ2-7)
CACSIFAGTYEQYF

SEQ ID NO: 505377 - protein, 14 aa, Homo sapiens
  CDR3 for alpha chain variable domain of TCR clone 252689 (TRAV8-1, TRAJ15)
CAVNGQQAGTALIF

SEQ ID NO: 505378 - protein, 15 aa, Homo sapiens
  CDR3 for beta chain variable domain of TCR clone 252689 (TRBV20-1, TRBJ2-7)
CSARDRVSGMDEQYF

SEQ ID NO: 505379 - protein, 13 aa, Homo sapiens
  CDR3 for alpha chain variable domain of TCR clone 252690 (TRAV21, TRAJ52)
CAVRPSPAGGTSY

SEQ ID NO: 505380 - protein, 15 aa, Homo sapiens
  CDR3 for beta chain variable domain of TCR clone 252690 (TRBV9, TRBJ1-6)
CASSVAGTGDSPLHF

SEQ ID NO: 505381 - protein, 14 aa, Homo sapiens
  CDR3 for alpha chain variable domain of TCR clone 252691 (TRAV3, TRAJ9)
CAVRGNTGGFKIIF

SEQ ID NO: 505382 - protein, 14 aa, Homo sapiens
  CDR3 for beta chain variable domain of TCR clone 252691 (TRBV15, TRBJ2-1)
CATSGVEDYNEQFF

SEQ ID NO: 505383 - protein, 16 aa, Homo sapiens
  CDR3 for alpha chain variable domain of TCR clone 252692 (TRAV30, TRAJ24)
CGTEIVDADSGGKFQF

SEQ ID NO: 505384 - protein, 15 aa, Homo sapiens
  CDR3 for beta chain variable domain of TCR clone 252692 (TRBV18, TRBJ2-1)
CASLPDRGRDNEQFF

SEQ ID NO: 505385 - protein, 14 aa, Homo sapiens
  CDR3 for alpha chain variable domain of TCR clone 252693 (TRAV26-1, TRAJ44)
CIVLPTGTASKLTF

SEQ ID NO: 505386 - protein, 12 aa, Homo sapiens
  CDR3 for beta chain variable domain of TCR clone 252693 (TRBV11-3, TRBJ1-1)
CASSLRDSEAFF

SEQ ID NO: 505387 - protein, 13 aa, Homo sapiens
  CDR3 for alpha chain variable domain of TCR clone 252694 (TRAV30, TRAJ29)
CGTEDSGNTPLVF

SEQ ID NO: 505388 - protein, 16 aa, Homo sapiens
  CDR3 for beta chain variable domain of TCR clone 252694 (TRBV9, TRBJ2-1)
CASSVGGGGNYNEQFF

SEQ ID NO: 505389 - protein, 15 aa, Homo sapiens
  CDR3 for alpha chain variable domain of TCR clone 252695 (TRAV13-1, TRAJ42)
CAASIAGGSQGNLTF

SEQ ID NO: 505390 - protein, 15 aa, Homo sapiens
  CDR3 for beta chain variable domain of TCR clone 252695 (TRBV19, TRBJ2-1)
CASSIVRGEGREQFF

SEQ ID NO: 505391 - protein, 12 aa, Homo sapiens
  CDR3 for alpha chain variable domain of TCR clone 252696 (TRAV25, TRAJ53)
CQSGGSNYTLTF

SEQ ID NO: 505392 - protein, 12 aa, Homo sapiens
  CDR3 for beta chain variable domain of TCR clone 252696 (TRBV14, TRBJ2-7)
CASSSLKGEQYF

SEQ ID NO: 505393 - protein, 15 aa, Homo sapiens
  CDR3 for alpha chain variable domain of TCR clone 252697 (TRAV12-1, TRAJ44)
CVADLPTGTAGKLTF

SEQ ID NO: 505394 - protein, 13 aa, Homo sapiens
  CDR3 for beta chain variable domain of TCR clone 252697 (TRBV20-1, TRBJ2-5)
CSARGDYQETQYF

SEQ ID NO: 505395 - protein, 14 aa, Homo sapiens
  CDR3 for alpha chain variable domain of TCR clone 252698 (TRAV13-1, TRAJ35)
CAASKGGFGNVLHC

SEQ ID NO: 505396 - protein, 14 aa, Homo sapiens
  CDR3 for beta chain variable domain of TCR clone 252698 (TRBV2, TRBJ2-2)
CASRRDTVAGELFF

SEQ ID NO: 505397 - protein, 18 aa, Homo sapiens
  CDR3 for alpha chain variable domain of TCR clone 252699 (TRAV21, TRAJ52)
FAVRPSPAGGTSYGKLTF

SEQ ID NO: 505398 - protein, 17 aa, Homo sapiens
  CDR3 for beta chain variable domain of TCR clone 252699 (TRBV13, TRBJ2-3)
CASSRSRVVGGRNTQYF

SEQ ID NO: 505399 - protein, 12 aa, Homo sapiens
  CDR3 for alpha chain variable domain of TCR clone 252700 (TRAV21, TRAJ6)
CAVKGGSHIPTF

SEQ ID NO: 505400 - protein, 13 aa, Homo sapiens
  CDR3 for beta chain variable domain of TCR clone 252700 (TRBV11-2, TRBJ1-1)
CASSFTENTEAFF

SEQ ID NO: 505401 - protein, 12 aa, Homo sapiens
  CDR3 for alpha chain variable domain of TCR clone 252701 (TRAV12-3, TRAJ17)
CAMTLTGNRLTF

SEQ ID NO: 505402 - protein, 14 aa, Homo sapiens
  CDR3 for beta chain variable domain of TCR clone 252701 (TRBV7-3, TRBJ2-1)
CASSLAGGTNEQFF

SEQ ID NO: 505403 - protein, 11 aa, Homo sapiens
  CDR3 for alpha chain variable domain of TCR clone 252702 (TRAV1-1, TRAJ23)
CAVRQGGKLIF

SEQ ID NO: 505404 - protein, 14 aa, Homo sapiens
  CDR3 for beta chain variable domain of TCR clone 252702 (TRBV19, TRBJ2-7)
RRNSPGTVFYEQYF

SEQ ID NO: 505405 - protein, 14 aa, Homo sapiens
  CDR3 for alpha chain variable domain of TCR clone 252703 (TRAV26-1, TRAJ34)
CIVRVADNTDKLIF

SEQ ID NO: 505406 - protein, 14 aa, Homo sapiens
  CDR3 for beta chain variable domain of TCR clone 252703 (TRBV12-5, TRBJ2-5)
CASGSRTHQETQYF

SEQ ID NO: 505407 - protein, 16 aa, Homo sapiens
  CDR3 for alpha chain variable domain of TCR clone 252704 (TRAV3, TRAJ23)
CAVKIGIYNQGGKLIF

SEQ ID NO: 505408 - protein, 17 aa, Homo sapiens
  CDR3 for beta chain variable domain of TCR clone 252704 (TRBV10-3, TRBJ2-6)
CAISESSAPSGANVLTF

SEQ ID NO: 505409 - protein, 23 aa, Homo sapiens
  CDR3 for alpha chain variable domain of TCR clone 252705 (TRAV21, TRAJ9)
CAVEAVALEASKLSLEQEQDYLL

SEQ ID NO: 505410 - protein, 13 aa, Homo sapiens
  CDR3 for beta chain variable domain of TCR clone 252705 (TRBV12-4, TRBJ1-2)
CASSSGLTVRSTF

SEQ ID NO: 505411 - protein, 15 aa, Homo sapiens
  CDR3 for alpha chain variable domain of TCR clone 252706 (TRAV1-2, TRAJ30)
CAVRPPGNRDDKIIF

SEQ ID NO: 505412 - protein, 13 aa, Homo sapiens
  CDR3 for beta chain variable domain of TCR clone 252706 (TRBV4-1, TRBJ2-7)
CASSQGQAYEQYF

SEQ ID NO: 505413 - protein, 16 aa, Homo sapiens
  CDR3 for alpha chain variable domain of TCR clone 252707 (TRAV3, TRAJ37)
CAVRVRGSGNTDKLIF

SEQ ID NO: 505414 - protein, 11 aa, Homo sapiens
  CDR3 for beta chain variable domain of TCR clone 252707 (TRBV11-2, TRBJ2-2)
CASSLPGELFF

SEQ ID NO: 505415 - protein, 15 aa, Homo sapiens
  CDR3 for alpha chain variable domain of TCR clone 252708 (TRAV8-1, TRAJ6)
CAVNTPPGGSYIPTF

SEQ ID NO: 505416 - protein, 12 aa, Homo sapiens
  CDR3 for beta chain variable domain of TCR clone 252708 (TRBV11-2, TRBJ2-2)
CASSLGGGELFF

SEQ ID NO: 505417 - protein, 15 aa, Homo sapiens
  CDR3 for alpha chain variable domain of TCR clone 252709 (TRAV21, TRAJ53)
CATLNSGGSNYKLTF

SEQ ID NO: 505418 - protein, 18 aa, Homo sapiens
  CDR3 for beta chain variable domain of TCR clone 252709 (TRBV7-9, TRBJ2-7)
CASSLTTSGSRTWYEQYF

SEQ ID NO: 505419 - protein, 18 aa, Homo sapiens
  CDR3 for alpha chain variable domain of TCR clone 252710 (TRAV13-1, TRAJ52)
CAASKRSAGGNSYGKLTS

SEQ ID NO: 505420 - protein, 13 aa, Homo sapiens
  CDR3 for beta chain variable domain of TCR clone 252710 (TRBV12-4, TRBJ1-2)
CASSLRQGKGYTF

SEQ ID NO: 505421 - protein, 13 aa, Homo sapiens
  CDR3 for alpha chain variable domain of TCR clone 252711 (TRAV12-3, TRAJ54)
CAMSVQGAQKLVF

SEQ ID NO: 505422 - protein, 16 aa, Homo sapiens
  CDR3 for beta chain variable domain of TCR clone 252711 (TRBV15, TRBJ1-2)
CVTSRGPRTGGGGYTF

SEQ ID NO: 505423 - protein, 16 aa, Homo sapiens
  CDR3 for alpha chain variable domain of TCR clone 252712 (TRAV12-3, TRAJ53)
CAMSPGSGGSNYKLTF

SEQ ID NO: 505424 - protein, 13 aa, Homo sapiens
  CDR3 for beta chain variable domain of TCR clone 252712 (TRBV4-1, TRBJ2-1)
CASSQEVQYEQFF

SEQ ID NO: 505425 - protein, 13 aa, Homo sapiens
  CDR3 for alpha chain variable domain of TCR clone 252713 (TRAV27, TRAJ57)
CRSAQGGCEKLVF

SEQ ID NO: 505426 - protein, 11 aa, Homo sapiens
  CDR3 for beta chain variable domain of TCR clone 252713 (TRBV11-2, TRBJ1-1)
CASSINTEAFF

SEQ ID NO: 505427 - protein, 14 aa, Homo sapiens
  CDR3 for alpha chain variable domain of TCR clone 252714 (TRAV13-1, TRAJ35)
CAASKGGFGNVLHC

SEQ ID NO: 505428 - protein, 17 aa, Homo sapiens
  CDR3 for beta chain variable domain of TCR clone 252714 (TRBV7-3, TRBJ1-4)
CASSQEGPRGVEEKLFF

SEQ ID NO: 505429 - protein, 15 aa, Homo sapiens
  CDR3 for alpha chain variable domain of TCR clone 252715 (TRAV3, TRAJ5)
CAVRDLDTGRRALTF

SEQ ID NO: 505430 - protein, 16 aa, Homo sapiens
  CDR3 for beta chain variable domain of TCR clone 252715 (TRBV7-7, TRBJ2-1)
CASSLASGTSYKEQFF

SEQ ID NO: 505431 - protein, 11 aa, Homo sapiens
  CDR3 for alpha chain variable domain of TCR clone 252716 (TRAV13-1, TRAJ52)
PGGTSYGKLTF

SEQ ID NO: 505432 - protein, 18 aa, Homo sapiens
  CDR3 for beta chain variable domain of TCR clone 252716 (TRBV28, TRBJ2-7)
CASSHGSRQGTFHSTSGR

SEQ ID NO: 505433 - protein, 14 aa, Homo sapiens
  CDR3 for alpha chain variable domain of TCR clone 252717 (TRAV8-3, TRAJ39)
CAVGANNAGNMLTF

SEQ ID NO: 505434 - protein, 14 aa, Homo sapiens
  CDR3 for beta chain variable domain of TCR clone 252717 (TRBV12-4, TRBJ1-1)
CASSLGTGGTEAFF

SEQ ID NO: 505435 - protein, 12 aa, Homo sapiens
  CDR3 for alpha chain variable domain of TCR clone 252718 (TRAV13-1, TRAJ48)
CAENFGNEKLTF

SEQ ID NO: 505436 - protein, 12 aa, Homo sapiens
  CDR3 for beta chain variable domain of TCR clone 252718 (TRBV11-2, TRBJ2-1)
CASSPGNNEQFF

SEQ ID NO: 505437 - protein, 12 aa, Homo sapiens
  CDR3 for alpha chain variable domain of TCR clone 252719 (TRAV23/DV6, TRAJ26)
CAASQFGQNFVF

SEQ ID NO: 505438 - protein, 13 aa, Homo sapiens
  CDR3 for beta chain variable domain of TCR clone 252719 (TRBV11-2, TRBJ1-5)
CASSLDRNQPQHF

SEQ ID NO: 505439 - protein, 10 aa, Homo sapiens
  CDR3 for alpha chain variable domain of TCR clone 252720 (TRAV1-2, TRAJ31)
CVSEDARLMF

SEQ ID NO: 505440 - protein, 15 aa, Homo sapiens
  CDR3 for beta chain variable domain of TCR clone 252720 (TRBV19, TRBJ1-5)
CASSIVWADNQPQHF

SEQ ID NO: 505441 - protein, 14 aa, Homo sapiens
  CDR3 for alpha chain variable domain of TCR clone 252721 (TRAV12-3, TRAJ35)
CAMSLIGFGNVLHC

SEQ ID NO: 505442 - protein, 12 aa, Homo sapiens
  CDR3 for beta chain variable domain of TCR clone 252721 (TRBV12-4, TRBJ1-1)
CANSLAGLEAFF

SEQ ID NO: 505443 - protein, 13 aa, Homo sapiens
  CDR3 for alpha chain variable domain of TCR clone 252722 (TRAV8-6, TRAJ49)
CAVITNTGNQFYF

SEQ ID NO: 505444 - protein, 14 aa, Homo sapiens
  CDR3 for beta chain variable domain of TCR clone 252722 (TRBV18, TRBJ1-1)
CASSPPTGRTEAFF

SEQ ID NO: 505445 - protein, 14 aa, Homo sapiens
  CDR3 for alpha chain variable domain of TCR clone 252723 (TRAV8-4, TRAJ13)
CAVTLSGGYQKVTF

SEQ ID NO: 505446 - protein, 15 aa, Homo sapiens
  CDR3 for beta chain variable domain of TCR clone 252723 (TRBV7-2, TRBJ1-2)
CASSPRAGWNYGYTF

SEQ ID NO: 505447 - protein, 14 aa, Homo sapiens
  CDR3 for alpha chain variable domain of TCR clone 252724 (TRAV12-2, TRAJ17)
CAVLFKAAGNKLTF

SEQ ID NO: 505448 - protein, 16 aa, Homo sapiens
  CDR3 for beta chain variable domain of TCR clone 252724 (TRBV27, TRBJ2-2)
CASSLSGFWVTGELFF

SEQ ID NO: 505449 - protein, 12 aa, Homo sapiens
  CDR3 for alpha chain variable domain of TCR clone 252725 (TRAV12-3, TRAJ17)
CSMTLTGNKLTF

SEQ ID NO: 505450 - protein, 16 aa, Homo sapiens
  CDR3 for beta chain variable domain of TCR clone 252725 (TRBV29-1, TRBJ2-7)
CSVEDAEDGTAYEQYF

SEQ ID NO: 505451 - protein, 13 aa, Homo sapiens
  CDR3 for alpha chain variable domain of TCR clone 252726 (TRAV13-1, TRAJ39)
CAASIWAGNMPTF

SEQ ID NO: 505452 - protein, 15 aa, Homo sapiens
  CDR3 for beta chain variable domain of TCR clone 252726 (TRBV7-9, TRBJ1-1)
CASSLLEQGGTEASF

SEQ ID NO: 505453 - protein, 18 aa, Homo sapiens
  CDR3 for alpha chain variable domain of TCR clone 252727 (TRAV12-3, TRAJ52)
CAMSVGGAGGTSYGKLTF

SEQ ID NO: 505454 - protein, 15 aa, Homo sapiens
  CDR3 for beta chain variable domain of TCR clone 252727 (TRBV2, TRBJ2-1)
CASSELAGSYNEQFF

SEQ ID NO: 505455 - protein, 12 aa, Homo sapiens
  CDR3 for alpha chain variable domain of TCR clone 252728 (TRAV35, TRAJ39)
LAPSNAGNMLTF

SEQ ID NO: 505456 - protein, 16 aa, Homo sapiens
  CDR3 for beta chain variable domain of TCR clone 252728 (TRBV2, TRBJ2-3)
CASSTSVEGVTDTQYF

SEQ ID NO: 505457 - protein, 17 aa, Homo sapiens
  CDR3 for alpha chain variable domain of TCR clone 252729 (TRAV26-2, TRAJ37)
CILRELVGSSNTGKLIF

SEQ ID NO: 505458 - protein, 15 aa, Homo sapiens
  CDR3 for beta chain variable domain of TCR clone 252729 (TRBV20-1, TRBJ2-7)
CSARDRVSGMDEQYF

SEQ ID NO: 505459 - protein, 15 aa, Homo sapiens
  CDR3 for alpha chain variable domain of TCR clone 252730 (TRAV8-6, TRAJ6)
CAVSFTSGGSYIPTF

SEQ ID NO: 505460 - protein, 13 aa, Homo sapiens
  CDR3 for beta chain variable domain of TCR clone 252730 (TRBV29-1, TRBJ2-1)
CSVEGERVNEQFF

SEQ ID NO: 505461 - protein, 10 aa, Homo sapiens
  CDR3 for alpha chain variable domain of TCR clone 252731 (TRAV26-1, TRAJ22)
CIAGSRQLTF

SEQ ID NO: 505462 - protein, 16 aa, Homo sapiens
  CDR3 for beta chain variable domain of TCR clone 252731 (TRBV7-9, TRBJ1-2)
CASSPGGGAINYGYTF

SEQ ID NO: 505463 - protein, 23 aa, Homo sapiens
  CDR3 for alpha chain variable domain of TCR clone 252732 (TRAV30, TRAJ43)
CTLRPPSSVTQEPTSAALSDMRF

SEQ ID NO: 505464 - protein, 13 aa, Homo sapiens
  CDR3 for beta chain variable domain of TCR clone 252732 (TRBV12-4, TRBJ2-2)
CASSITASGELFF

SEQ ID NO: 505465 - protein, 13 aa, Homo sapiens
  CDR3 for alpha chain variable domain of TCR clone 252733 (TRAV12-1, TRAJ26)
WVVRRNYGQNFVF

SEQ ID NO: 505466 - protein, 14 aa, Homo sapiens
  CDR3 for beta chain variable domain of TCR clone 252733 (TRBV6-3, TRBJ1-1)
CASRYTGESTEAFF

SEQ ID NO: 505467 - protein, 16 aa, Homo sapiens
  CDR3 for alpha chain variable domain of TCR clone 252734 (TRAV26-1, TRAJ53)
CIVRVAMGGSNYKLTF

SEQ ID NO: 505468 - protein, 14 aa, Homo sapiens
  CDR3 for beta chain variable domain of TCR clone 252734 (TRBV2, TRBJ1-5)
CASSGTGFNQPQHF

SEQ ID NO: 505469 - protein, 14 aa, Homo sapiens
  CDR3 for alpha chain variable domain of TCR clone 252735 (TRAV8-4, TRAJ9)
CAVRINTGGFKTIF

SEQ ID NO: 505470 - protein, 14 aa, Homo sapiens
  CDR3 for beta chain variable domain of TCR clone 252735 (TRBV5-1, TRBJ1-1)
RASSLQGASTEAFF

SEQ ID NO: 505471 - protein, 14 aa, Homo sapiens
  CDR3 for alpha chain variable domain of TCR clone 252736 (TRAV1-2, TRAJ29)
CAVRELTSATPLVL

SEQ ID NO: 505472 - protein, 14 aa, Homo sapiens
  CDR3 for beta chain variable domain of TCR clone 252736 (TRBV3-1, TRBJ2-5)
CASSQGPDQETQYF

SEQ ID NO: 505473 - protein, 15 aa, Homo sapiens
  CDR3 for alpha chain variable domain of TCR clone 252737 (TRAV3, TRAJ22)
CAVRDRGGSARQLTF

SEQ ID NO: 505474 - protein, 12 aa, Homo sapiens
  CDR3 for beta chain variable domain of TCR clone 252737 (TRBV7-9, TRBJ1-6)
CASSLMTSPLHF

SEQ ID NO: 505475 - protein, 13 aa, Homo sapiens
  CDR3 for alpha chain variable domain of TCR clone 252738 (TRAV4, TRAJ31)
CLVYRNNNARLMF

SEQ ID NO: 505476 - protein, 16 aa, Homo sapiens
  CDR3 for beta chain variable domain of TCR clone 252738 (TRBV12-5, TRBJ2-5)
CASGPRTSGNQETQYF

SEQ ID NO: 505477 - protein, 15 aa, Homo sapiens
  CDR3 for alpha chain variable domain of TCR clone 252739 (TRAV17, TRAJ56)
CATDANTGANSKLTF

SEQ ID NO: 505478 - protein, 14 aa, Homo sapiens
  CDR3 for beta chain variable domain of TCR clone 252739 (TRBV19, TRBJ1-5)
CASSLGTGGQPQHL

SEQ ID NO: 505479 - protein, 12 aa, Homo sapiens
  CDR3 for alpha chain variable domain of TCR clone 252740 (TRAV12-3, TRAJ20)
CAMVRGDYKLSF

SEQ ID NO: 505480 - protein, 15 aa, Homo sapiens
  CDR3 for beta chain variable domain of TCR clone 252740 (TRBV7-3, TRBJ2-1)
CASSLGQGPFGEQFF

SEQ ID NO: 505481 - protein, 17 aa, Homo sapiens
  CDR3 for alpha chain variable domain of TCR clone 252741 (TRAV12-1, TRAJ13)
CVVNKRGEFWGLPESYL

SEQ ID NO: 505482 - protein, 17 aa, Homo sapiens
  CDR3 for beta chain variable domain of TCR clone 252741 (TRBV28, TRBJ2-5)
CASSTTEGDALQETQYF

SEQ ID NO: 505483 - protein, 15 aa, Homo sapiens
  CDR3 for alpha chain variable domain of TCR clone 252742 (TRAV12-2, )
CAVASLATTISRILT

SEQ ID NO: 505484 - protein, 16 aa, Homo sapiens
  CDR3 for beta chain variable domain of TCR clone 252742 (TRBV5-1, TRBJ2-2)
CASSSRTGGRTGELFF

SEQ ID NO: 505485 - protein, 23 aa, Homo sapiens
  CDR3 for alpha chain variable domain of TCR clone 252743 (TRAV26-1, )
CIADNAGNKHIQNPDPAVYQLRD

SEQ ID NO: 505486 - protein, 13 aa, Homo sapiens
  CDR3 for beta chain variable domain of TCR clone 252743 (TRBV20-1, TRBJ1-1)
CSARGGGNDEAFF

SEQ ID NO: 505487 - protein, 18 aa, Homo sapiens
  CDR3 for alpha chain variable domain of TCR clone 252744 (TRAV13-1, TRAJ52)
CAAQNPNAGGTSYGKLTF

SEQ ID NO: 505488 - protein, 15 aa, Homo sapiens
  CDR3 for beta chain variable domain of TCR clone 252744 (TRBV6-1, TRBJ2-3)
CASGERGGITDTQYF

SEQ ID NO: 505489 - protein, 13 aa, Homo sapiens
  CDR3 for alpha chain variable domain of TCR clone 252745 (TRAV8-1, TRAJ34)
CAVRPYNTDKLIF

SEQ ID NO: 505490 - protein, 15 aa, Homo sapiens
  CDR3 for beta chain variable domain of TCR clone 252745 (TRBV7-9, TRBJ1-3)
CASILRSGSGNTIYF

SEQ ID NO: 505491 - protein, 15 aa, Homo sapiens
  CDR3 for alpha chain variable domain of TCR clone 252746 (TRAV12-2, TRAJ53)
CAVNGGGGSNYKLTF

SEQ ID NO: 505492 - protein, 13 aa, Homo sapiens
  CDR3 for beta chain variable domain of TCR clone 252746 (TRBV3-1, TRBJ1-1)
CASSQGVITEAFF

SEQ ID NO: 505493 - protein, 16 aa, Homo sapiens
  CDR3 for alpha chain variable domain of TCR clone 252747 (TRAV23/DV6, TRAJ9)
CAASIGGNTGGFKTIF

SEQ ID NO: 505494 - protein, 15 aa, Homo sapiens
  CDR3 for beta chain variable domain of TCR clone 252747 (TRBV28, TRBJ1-3)
CASSMGWASGNTIYF

SEQ ID NO: 505495 - protein, 10 aa, Homo sapiens
  CDR3 for alpha chain variable domain of TCR clone 252748 (TRAV16, TRAJ26)
CAPEEPWSEF

SEQ ID NO: 505496 - protein, 15 aa, Homo sapiens
  CDR3 for beta chain variable domain of TCR clone 252748 (TRBV7-2, TRBJ2-3)
CASSVTGTSTDTQYF

SEQ ID NO: 505497 - protein, 15 aa, Homo sapiens
  CDR3 for alpha chain variable domain of TCR clone 252749 (TRAV3, TRAJ45)
CAVRTPWGGADGLTV

SEQ ID NO: 505498 - protein, 16 aa, Homo sapiens
  CDR3 for beta chain variable domain of TCR clone 252749 (TRBV6-1, TRBJ2-2)
CASSFGQVANTGELFF

SEQ ID NO: 505499 - protein, 13 aa, Homo sapiens
  CDR3 for alpha chain variable domain of TCR clone 252750 (TRAV13-2, TRAJ48)
CAEMDFGNEKLTF

SEQ ID NO: 505500 - protein, 15 aa, Homo sapiens
  CDR3 for beta chain variable domain of TCR clone 252750 (TRBV11-2, TRBJ2-1)
CASSKNRGLIYEQFF

SEQ ID NO: 505501 - protein, 14 aa, Homo sapiens
  CDR3 for alpha chain variable domain of TCR clone 252751 (TRAV1-2, TRAJ8)
CAVREDTGFQKLVF

SEQ ID NO: 505502 - protein, 14 aa, Homo sapiens
  CDR3 for beta chain variable domain of TCR clone 252751 (TRBV7-8, TRBJ2-7)
CASSPGLADYEQYF

SEQ ID NO: 505503 - protein, 13 aa, Homo sapiens
  CDR3 for alpha chain variable domain of TCR clone 252752 (TRAV2, TRAJ24)
CAVPTDSWGKLQF

SEQ ID NO: 505504 - protein, 14 aa, Homo sapiens
  CDR3 for beta chain variable domain of TCR clone 252752 (TRBV13, TRBJ2-5)
CASSLGRGQETQYF

SEQ ID NO: 505505 - protein, 11 aa, Homo sapiens
  CDR3 for alpha chain variable domain of TCR clone 252753 (TRAV21, TRAJ11)
CAVNGYSTLTF

SEQ ID NO: 505506 - protein, 13 aa, Homo sapiens
  CDR3 for beta chain variable domain of TCR clone 252753 (TRBV7-6, TRBJ2-1)
CQQLGGGADEQFF

SEQ ID NO: 505507 - protein, 13 aa, Homo sapiens
  CDR3 for alpha chain variable domain of TCR clone 252754 (TRAV26-2, TRAJ54)
CIPRVGGAQKLVF

SEQ ID NO: 505508 - protein, 11 aa, Homo sapiens
  CDR3 for beta chain variable domain of TCR clone 252754 (TRBV7-8, TRBJ2-7)
CASSLSLEQYF

SEQ ID NO: 505509 - protein, 17 aa, Homo sapiens
  CDR3 for alpha chain variable domain of TCR clone 252755 (TRAV12-2, TRAJ22)
CAVNRIPFSGSARPLTF

SEQ ID NO: 505510 - protein, 13 aa, Homo sapiens
  CDR3 for beta chain variable domain of TCR clone 252755 (TRBV11-3, TRBJ1-1)
CASSSNRDTEAFF

SEQ ID NO: 505511 - protein, 17 aa, Homo sapiens
  CDR3 for alpha chain variable domain of TCR clone 252756 (TRAV3, TRAJ6)
CAVRDGPRAGGSSIPTF

SEQ ID NO: 505512 - protein, 14 aa, Homo sapiens
  CDR3 for beta chain variable domain of TCR clone 252756 (TRBV7-2, TRBJ2-7)
CASSPKTSFYEQFF

SEQ ID NO: 505513 - protein, 15 aa, Homo sapiens
  CDR3 for alpha chain variable domain of TCR clone 252757 (TRAV38-2/DV8, TRAJ28)
WAYRSRGAGSYQLAF

SEQ ID NO: 505514 - protein, 14 aa, Homo sapiens
  CDR3 for beta chain variable domain of TCR clone 252757 (TRBV7-9, TRBJ2-7)
CASSLSQGSYEQYF

SEQ ID NO: 505515 - protein, 18 aa, Homo sapiens
  CDR3 for alpha chain variable domain of TCR clone 252758 (TRAV21, TRAJ52)
CAVRPSPAGGTSYGKLTF

SEQ ID NO: 505516 - protein, 13 aa, Homo sapiens
  CDR3 for beta chain variable domain of TCR clone 252758 (TRBV24-1, TRBJ2-2)
CATTATRTGELFF

SEQ ID NO: 505517 - protein, 11 aa, Homo sapiens
  CDR3 for alpha chain variable domain of TCR clone 252759 (TRAV2, TRAJ33)
CAVDSNYQLIW

SEQ ID NO: 505518 - protein, 15 aa, Homo sapiens
  CDR3 for beta chain variable domain of TCR clone 252759 (TRBV19, TRBJ1-2)
CASSVGLVLNYGYTF

SEQ ID NO: 505519 - protein, 14 aa, Homo sapiens
  CDR3 for alpha chain variable domain of TCR clone 252760 (TRAV17, TRAJ12)
CAILPMDSSYKLIF

SEQ ID NO: 505520 - protein, 15 aa, Homo sapiens
  CDR3 for beta chain variable domain of TCR clone 252760 (TRBV5-1, TRBJ1-1)
CASSLGEGENTEASF

SEQ ID NO: 505521 - protein, 11 aa, Homo sapiens
  CDR3 for alpha chain variable domain of TCR clone 252761 (TRAV2, TRAJ13)
CASGGYQRVTF

SEQ ID NO: 505522 - protein, 14 aa, Homo sapiens
  CDR3 for beta chain variable domain of TCR clone 252761 (TRBV12-5, TRBJ2-5)
CASGSRTHQETQYF

SEQ ID NO: 505523 - protein, 12 aa, Homo sapiens
  CDR3 for alpha chain variable domain of TCR clone 252762 (TRAV3, TRAJ20)
CAVRDPDYKLSF

SEQ ID NO: 505524 - protein, 14 aa, Homo sapiens
  CDR3 for beta chain variable domain of TCR clone 252762 (TRBV20-1, TRBJ2-7)
CSAKRGRSSYEQYF

SEQ ID NO: 505525 - protein, 20 aa, Homo sapiens
  CDR3 for alpha chain variable domain of TCR clone 252763 (TRAV21, TRAJ22)
SLVTQPPTLKSSGSARQLIF

SEQ ID NO: 505526 - protein, 16 aa, Homo sapiens
  CDR3 for beta chain variable domain of TCR clone 252763 (TRBV7-3, TRBJ2-2)
CASSLKRGTLSGELFF

SEQ ID NO: 505527 - protein, 14 aa, Homo sapiens
  CDR3 for alpha chain variable domain of TCR clone 252764 (TRAV1-2, TRAJ8)
CAVREDTGFQKLVF

SEQ ID NO: 505528 - protein, 13 aa, Homo sapiens
  CDR3 for beta chain variable domain of TCR clone 252764 (TRBV12-4, TRBJ1-5)
CASSPQGHQPQHF

SEQ ID NO: 505529 - protein, 12 aa, Homo sapiens
  CDR3 for alpha chain variable domain of TCR clone 252765 (TRAV27, TRAJ9)
CAGESGGFKTIF

SEQ ID NO: 505530 - protein, 15 aa, Homo sapiens
  CDR3 for beta chain variable domain of TCR clone 252765 (TRBV7-2, TRBJ2-3)
CASSSTGLETDTQYF

SEQ ID NO: 505531 - protein, 13 aa, Homo sapiens
  CDR3 for alpha chain variable domain of TCR clone 252766 (TRAV13-2, TRAJ5)
CAESDTGRRALNF

SEQ ID NO: 505532 - protein, 14 aa, Homo sapiens
  CDR3 for beta chain variable domain of TCR clone 252766 (TRBV2, TRBJ1-1)
CASTQVGENTEAFF

SEQ ID NO: 505533 - protein, 12 aa, Homo sapiens
  CDR3 for alpha chain variable domain of TCR clone 252767 (TRAV36/DV7, TRAJ50)
CAVEPENLLRQG

SEQ ID NO: 505534 - protein, 14 aa, Homo sapiens
  CDR3 for beta chain variable domain of TCR clone 252767 (TRBV4-1, TRBJ2-2)
CASSQAVNTGELFF

SEQ ID NO: 505535 - protein, 13 aa, Homo sapiens
  CDR3 for alpha chain variable domain of TCR clone 252768 (TRAV8-3, TRAJ42)
CARYGGSQGSLIF

SEQ ID NO: 505536 - protein, 14 aa, Homo sapiens
  CDR3 for beta chain variable domain of TCR clone 252768 (TRBV20-1, TRBJ2-1)
CSALDRGTYNEQFF

SEQ ID NO: 505537 - protein, 11 aa, Homo sapiens
  CDR3 for alpha chain variable domain of TCR clone 252769 (TRAV2, TRAJ33)
CAVESNYQLIW

SEQ ID NO: 505538 - protein, 14 aa, Homo sapiens
  CDR3 for beta chain variable domain of TCR clone 252769 (TRBV19, TRBJ2-3)
CASSIGLGGDTQYF

SEQ ID NO: 505539 - protein, 13 aa, Homo sapiens
  CDR3 for alpha chain variable domain of TCR clone 252770 (TRAV2, TRAJ13)
CAVESGGYQKVTF

SEQ ID NO: 505540 - protein, 14 aa, Homo sapiens
  CDR3 for beta chain variable domain of TCR clone 252770 (TRBV15, TRBJ2-5)
RATSIGGLGETQYF

SEQ ID NO: 505541 - protein, 12 aa, Homo sapiens
  CDR3 for alpha chain variable domain of TCR clone 252771 (TRAV1-1, TRAJ39)
CAVPVVGNMLTF

SEQ ID NO: 505542 - protein, 15 aa, Homo sapiens
  CDR3 for beta chain variable domain of TCR clone 252771 (TRBV19, TRBJ1-6)
CASSTQGAVGSPLHV

SEQ ID NO: 505543 - protein, 15 aa, Homo sapiens
  CDR3 for alpha chain variable domain of TCR clone 252772 (TRAV12-2, TRAJ43)
CAFDMRFGAGTRLTV

SEQ ID NO: 505544 - protein, 14 aa, Homo sapiens
  CDR3 for beta chain variable domain of TCR clone 252772 (TRBV28, TRBJ2-1)
CASSLNGRNNEQFF

SEQ ID NO: 505545 - protein, 14 aa, Homo sapiens
  CDR3 for alpha chain variable domain of TCR clone 252773 (TRAV13-1, TRAJ39)
CAAGYNNAGNMLTF

SEQ ID NO: 505546 - protein, 15 aa, Homo sapiens
  CDR3 for beta chain variable domain of TCR clone 252773 (TRBV11-3, TRBJ2-3)
CASLKDGREGDTQYF

SEQ ID NO: 505547 - protein, 15 aa, Homo sapiens
  CDR3 for alpha chain variable domain of TCR clone 252774 (TRAV25, TRAJ53)
CAATGGGGSNYKLTF

SEQ ID NO: 505548 - protein, 18 aa, Homo sapiens
  CDR3 for beta chain variable domain of TCR clone 252774 (TRBV18, TRBJ2-3)
CASSYTSGAAGGTDTQYF

SEQ ID NO: 505549 - protein, 14 aa, Homo sapiens
  CDR3 for alpha chain variable domain of TCR clone 252775 (TRAV16, TRAJ30)
CAPPSLNRDDKIIF

SEQ ID NO: 505550 - protein, 19 aa, Homo sapiens
  CDR3 for beta chain variable domain of TCR clone 252775 (TRBV5-1, TRBJ2-3)
CASSLWLAGGITTTDTQYF

SEQ ID NO: 505551 - protein, 13 aa, Homo sapiens
  CDR3 for alpha chain variable domain of TCR clone 252776 (TRAV19, TRAJ5)
CSEEGHGRRALTF

SEQ ID NO: 505552 - protein, 15 aa, Homo sapiens
  CDR3 for beta chain variable domain of TCR clone 252776 (TRBV2, TRBJ2-5)
CASSEAGTRQETQYF

SEQ ID NO: 505553 - protein, 10 aa, Homo sapiens
  CDR3 for alpha chain variable domain of TCR clone 252777 (TRAV12-1, TRAJ43)
CVVHNNDMRF

SEQ ID NO: 505554 - protein, 13 aa, Homo sapiens
  CDR3 for beta chain variable domain of TCR clone 252777 (TRBV12-4, TRBJ1-2)
RASSSGLTVIPTF

SEQ ID NO: 505555 - protein, 14 aa, Homo sapiens
  CDR3 for alpha chain variable domain of TCR clone 252778 (TRAV20, TRAJ56)
CAVQFGGANSKLTF

SEQ ID NO: 505556 - protein, 14 aa, Homo sapiens
  CDR3 for beta chain variable domain of TCR clone 252778 (TRBV20-1, TRBJ2-7)
CSAKRGKSSYEHYF

SEQ ID NO: 505557 - protein, 23 aa, Homo sapiens
  CDR3 for alpha chain variable domain of TCR clone 252779 (TRAV8-6, TRAJ36)
CAVSDWLGQTASSLGLERASPLF

SEQ ID NO: 505558 - protein, 12 aa, Homo sapiens
  CDR3 for beta chain variable domain of TCR clone 252779 (TRBV11-2, TRBJ2-2)
CASSLPTGELFF

SEQ ID NO: 505559 - protein, 12 aa, Homo sapiens
  CDR3 for alpha chain variable domain of TCR clone 252780 (TRAV30, TRAJ43)
CGTEERGNDMRF

SEQ ID NO: 505560 - protein, 16 aa, Homo sapiens
  CDR3 for beta chain variable domain of TCR clone 252780 (TRBV7-3, TRBJ2-2)
CASSLKRGSLSGELFF

SEQ ID NO: 505561 - protein, 15 aa, Homo sapiens
  CDR3 for alpha chain variable domain of TCR clone 252781 (TRAV21, TRAJ24)
CAARSSTDRWGNLQF

SEQ ID NO: 505562 - protein, 13 aa, Homo sapiens
  CDR3 for beta chain variable domain of TCR clone 252781 (TRBV11-2, TRBJ2-5)
CASSATGEETQYF

SEQ ID NO: 505563 - protein, 12 aa, Homo sapiens
  CDR3 for alpha chain variable domain of TCR clone 252782 (TRAV12-2, TRAJ47)
CAVAECGNKLVF

SEQ ID NO: 505564 - protein, 14 aa, Homo sapiens
  CDR3 for beta chain variable domain of TCR clone 252782 (TRBV20-1, TRBJ1-1)
CSAMGGTANTEAFF

SEQ ID NO: 505565 - protein, 16 aa, Homo sapiens
  CDR3 for alpha chain variable domain of TCR clone 252783 (TRAV3, TRAJ37)
CAVRGNGSGNTGKLIF

SEQ ID NO: 505566 - protein, 14 aa, Homo sapiens
  CDR3 for beta chain variable domain of TCR clone 252783 (TRBV20-1, TRBJ2-3)
CSARGGTSTDTQYF

SEQ ID NO: 505567 - protein, 15 aa, Homo sapiens
  CDR3 for alpha chain variable domain of TCR clone 252784 (TRAV12-2, TRAJ43)
CAFDMRFGAGTRLTV

SEQ ID NO: 505568 - protein, 13 aa, Homo sapiens
  CDR3 for beta chain variable domain of TCR clone 252784 (TRBV27, TRBJ2-7)
CASGRGGAYEQYF

SEQ ID NO: 505569 - protein, 12 aa, Homo sapiens
  CDR3 for alpha chain variable domain of TCR clone 252785 (TRAV12-1, TRAJ40)
CLFYSGTYKYIF

SEQ ID NO: 505570 - protein, 12 aa, Homo sapiens
  CDR3 for beta chain variable domain of TCR clone 252785 (TRBV7-3, TRBJ2-1)
CASSFINNEQFF

SEQ ID NO: 505571 - protein, 18 aa, Homo sapiens
  CDR3 for alpha chain variable domain of TCR clone 252786 (TRAV21, TRAJ52)
CAVGPSPAGGTSYGKLTF

SEQ ID NO: 505572 - protein, 14 aa, Homo sapiens
  CDR3 for beta chain variable domain of TCR clone 252786 (TRBV19, TRBJ1-5)
CASRAPDSFLSQHF

SEQ ID NO: 505573 - protein, 13 aa, Homo sapiens
  CDR3 for alpha chain variable domain of TCR clone 252787 (TRAV17, TRAJ26)
CATVDNYGQNFVF

SEQ ID NO: 505574 - protein, 13 aa, Homo sapiens
  CDR3 for beta chain variable domain of TCR clone 252787 (TRBV7-2, TRBJ2-3)
CASSFPGTDTQYF

SEQ ID NO: 505575 - protein, 15 aa, Homo sapiens
  CDR3 for alpha chain variable domain of TCR clone 252788 (TRAV27, TRAJ38)
CAARRNAGNNRKLIW

SEQ ID NO: 505576 - protein, 18 aa, Homo sapiens
  CDR3 for beta chain variable domain of TCR clone 252788 (TRBV7-9, TRBJ2-7)
CASSLTTSGSRTWYEQYF

SEQ ID NO: 505577 - protein, 12 aa, Homo sapiens
  CDR3 for alpha chain variable domain of TCR clone 252789 (TRAV2, TRAJ10)
CASTGGGNKLTF

SEQ ID NO: 505578 - protein, 20 aa, Homo sapiens
  CDR3 for beta chain variable domain of TCR clone 252789 (TRBV7-8, TRBJ2-2)
CASSHLFPGATIHITGELFF

SEQ ID NO: 505579 - protein, 14 aa, Homo sapiens
  CDR3 for alpha chain variable domain of TCR clone 252790 (TRAV1-2, TRAJ8)
FAVREDTGFQKLEF

SEQ ID NO: 505580 - protein, 12 aa, Homo sapiens
  CDR3 for beta chain variable domain of TCR clone 252790 (TRBV7-8, TRBJ2-7)
CASSLGDREQYF

SEQ ID NO: 505581 - protein, 14 aa, Homo sapiens
  CDR3 for alpha chain variable domain of TCR clone 252791 (TRAV21, TRAJ35)
CAVMPIGFGYVLHF

SEQ ID NO: 505582 - protein, 12 aa, Homo sapiens
  CDR3 for beta chain variable domain of TCR clone 252791 (TRBV7-9, TRBJ2-7)
CASSIKREEQYF

SEQ ID NO: 505583 - protein, 11 aa, Homo sapiens
  CDR3 for alpha chain variable domain of TCR clone 252792 (TRAV35, TRAJ30)
CAPGGDDKIIF

SEQ ID NO: 505584 - protein, 11 aa, Homo sapiens
  CDR3 for beta chain variable domain of TCR clone 252792 (TRBV20-1, TRBJ1-2)
CSIWASYGYTF

SEQ ID NO: 505585 - protein, 15 aa, Homo sapiens
  CDR3 for alpha chain variable domain of TCR clone 252793 (TRAV29/DV5, TRAJ48)
CAAKISTFGNEKLTF

SEQ ID NO: 505586 - protein, 15 aa, Homo sapiens
  CDR3 for beta chain variable domain of TCR clone 252793 (TRBV7-8, TRBJ2-1)
CASSPSGTIYNEQFF

SEQ ID NO: 505587 - protein, 14 aa, Homo sapiens
  CDR3 for alpha chain variable domain of TCR clone 252794 (TRAV1-2, TRAJ16)
CAVNRFSDGQKLLF

SEQ ID NO: 505588 - protein, 18 aa, Homo sapiens
  CDR3 for beta chain variable domain of TCR clone 252794 (TRBV7-2, TRBJ2-7)
CASSLSGRGLAGGYEQYF

SEQ ID NO: 505589 - protein, 15 aa, Homo sapiens
  CDR3 for alpha chain variable domain of TCR clone 252795 (TRAV23/DV6, TRAJ30)
CAASSQESRDDKTIF

SEQ ID NO: 505590 - protein, 17 aa, Homo sapiens
  CDR3 for beta chain variable domain of TCR clone 252795 (TRBV4-3, TRBJ2-1)
CASSQFPSGRASGEQFF

SEQ ID NO: 505591 - protein, 12 aa, Homo sapiens
  CDR3 for alpha chain variable domain of TCR clone 252796 (TRAV20, TRAJ39)
CAVGNAGNMLTF

SEQ ID NO: 505592 - protein, 12 aa, Homo sapiens
  CDR3 for beta chain variable domain of TCR clone 252796 (TRBV29-1, TRBJ2-3)
CSVTGGADTQYF

SEQ ID NO: 505593 - protein, 16 aa, Homo sapiens
  CDR3 for alpha chain variable domain of TCR clone 252797 (TRAV13-1, TRAJ18)
CAASRMRGSTLGMLYF

SEQ ID NO: 505594 - protein, 16 aa, Homo sapiens
  CDR3 for beta chain variable domain of TCR clone 252797 (TRBV27, TRBJ1-1)
CASSSRGRTGYTEAFF

SEQ ID NO: 505595 - protein, 11 aa, Homo sapiens
  CDR3 for alpha chain variable domain of TCR clone 252798 (TRAV4, TRAJ31)
CLVGDNARLTF

SEQ ID NO: 505596 - protein, 14 aa, Homo sapiens
  CDR3 for beta chain variable domain of TCR clone 252798 (TRBV2, TRBJ1-5)
CASSEAAGGQPQHF

SEQ ID NO: 505597 - protein, 13 aa, Homo sapiens
  CDR3 for alpha chain variable domain of TCR clone 252799 (TRAV21, TRAJ20)
CAVGLRVDYKLSF

SEQ ID NO: 505598 - protein, 18 aa, Homo sapiens
  CDR3 for beta chain variable domain of TCR clone 252799 (TRBV7-6, TRBJ2-1)
CASSARTSGMSSYNEQFF

SEQ ID NO: 505599 - protein, 13 aa, Homo sapiens
  CDR3 for alpha chain variable domain of TCR clone 252800 (TRAV12-3, TRAJ7)
CAMSASGNNRIAF

SEQ ID NO: 505600 - protein, 14 aa, Homo sapiens
  CDR3 for beta chain variable domain of TCR clone 252800 (TRBV13, TRBJ2-5)
CARSLGPRGETQYF

SEQ ID NO: 505601 - protein, 16 aa, Homo sapiens
  CDR3 for alpha chain variable domain of TCR clone 252801 (TRAV12-3, TRAJ53)
CAMSPGSGGSNYKLAF

SEQ ID NO: 505602 - protein, 11 aa, Homo sapiens
  CDR3 for beta chain variable domain of TCR clone 252801 (TRBV29-1, TRBJ2-5)
CSEDRTGNQYF

SEQ ID NO: 505603 - protein, 11 aa, Homo sapiens
  CDR3 for alpha chain variable domain of TCR clone 252802 (TRAV35, TRAJ34)
CWARNTDKLIF

SEQ ID NO: 505604 - protein, 13 aa, Homo sapiens
  CDR3 for beta chain variable domain of TCR clone 252802 (TRBV11-3, TRBJ1-2)
CASSQRTSRGYTF

SEQ ID NO: 505605 - protein, 15 aa, Homo sapiens
  CDR3 for alpha chain variable domain of TCR clone 252803 (TRAV20, TRAJ43)
CAVQAGKSSNNDMRF

SEQ ID NO: 505606 - protein, 13 aa, Homo sapiens
  CDR3 for beta chain variable domain of TCR clone 252803 (TRBV27, TRBJ1-1)
CASSLSIGAEAFF

SEQ ID NO: 505607 - protein, 12 aa, Homo sapiens
  CDR3 for alpha chain variable domain of TCR clone 252804 (TRAV2, TRAJ9)
CAVGAGGFKTIF

SEQ ID NO: 505608 - protein, 19 aa, Homo sapiens
  CDR3 for beta chain variable domain of TCR clone 252804 (TRBV7-2, TRBJ2-3)
CASSSQGGPRLAGADTQYF

SEQ ID NO: 505609 - protein, 11 aa, Homo sapiens
  CDR3 for alpha chain variable domain of TCR clone 252805 (TRAV1-1, TRAJ9)
CAVAGGFKTIF

SEQ ID NO: 505610 - protein, 16 aa, Homo sapiens
  CDR3 for beta chain variable domain of TCR clone 252805 (TRBV19, TRBJ1-1)
CASSPTRFWPGTEAFF

SEQ ID NO: 505611 - protein, 12 aa, Homo sapiens
  CDR3 for alpha chain variable domain of TCR clone 252806 (TRAV21, TRAJ58)
CALSASGSRLTF

SEQ ID NO: 505612 - protein, 13 aa, Homo sapiens
  CDR3 for beta chain variable domain of TCR clone 252806 (TRBV5-7, TRBJ1-2)
CASSLGVVNGYSF

SEQ ID NO: 505613 - protein, 15 aa, Homo sapiens
  CDR3 for alpha chain variable domain of TCR clone 252807 (TRAV21, TRAJ53)
CATLNSGGSNYKLTF

SEQ ID NO: 505614 - protein, 16 aa, Homo sapiens
  CDR3 for beta chain variable domain of TCR clone 252807 (TRBV20-1, TRBJ1-4)
CSAPGQGLLTNGKLFF

SEQ ID NO: 505615 - protein, 12 aa, Homo sapiens
  CDR3 for alpha chain variable domain of TCR clone 252808 (TRAV23/DV6, TRAJ3)
CAARAPQQCFQD

SEQ ID NO: 505616 - protein, 17 aa, Homo sapiens
  CDR3 for beta chain variable domain of TCR clone 252808 (TRBV7-9, TRBJ2-3)
CASSPTVAGDLTDTLYF

SEQ ID NO: 505617 - protein, 14 aa, Homo sapiens
  CDR3 for alpha chain variable domain of TCR clone 252809 (TRAV14/DV4, TRAJ54)
CAMRGAPGAQKLVF

SEQ ID NO: 505618 - protein, 15 aa, Homo sapiens
  CDR3 for beta chain variable domain of TCR clone 252809 (TRBV5-1, TRBJ2-7)
CASSLNGGPAREQYF

SEQ ID NO: 505619 - protein, 15 aa, Homo sapiens
  CDR3 for alpha chain variable domain of TCR clone 252810 (TRAV8-4, TRAJ47)
CAVSDPEEYGNKLVF

SEQ ID NO: 505620 - protein, 15 aa, Homo sapiens
  CDR3 for beta chain variable domain of TCR clone 252810 (TRBV5-1, TRBJ2-7)
CASSLNGGPAREQYF

SEQ ID NO: 505621 - protein, 13 aa, Homo sapiens
  CDR3 for alpha chain variable domain of TCR clone 252811 (TRAV12-1, TRAJ34)
CVVTGYNTDKLIF

SEQ ID NO: 505622 - protein, 16 aa, Homo sapiens
  CDR3 for beta chain variable domain of TCR clone 252811 (TRBV28, TRBJ2-7)
CPSVPAKRGGVYEQYF

SEQ ID NO: 505623 - protein, 14 aa, Homo sapiens
  CDR3 for alpha chain variable domain of TCR clone 252812 (TRAV1-2, TRAJ8)
CAVREDTGFQKLVF

SEQ ID NO: 505624 - protein, 17 aa, Homo sapiens
  CDR3 for beta chain variable domain of TCR clone 252812 (TRBV28, TRBJ2-5)
CASSRQGGLAGAETQYC

SEQ ID NO: 505625 - protein, 11 aa, Homo sapiens
  CDR3 for alpha chain variable domain of TCR clone 252813 (TRAV17, TRAJ9)
CGSTGGFKTIF

SEQ ID NO: 505626 - protein, 14 aa, Homo sapiens
  CDR3 for beta chain variable domain of TCR clone 252813 (TRBV18, TRBJ2-7)
CASSPRGGAYEQYF

SEQ ID NO: 505627 - protein, 16 aa, Homo sapiens
  CDR3 for alpha chain variable domain of TCR clone 252814 (TRAV12-3, TRAJ53)
CAMSVGSGGSNCKLTF

SEQ ID NO: 505628 - protein, 15 aa, Homo sapiens
  CDR3 for beta chain variable domain of TCR clone 252814 (TRBV7-3, TRBJ2-2)
CASSETGQGTGELFF

SEQ ID NO: 505629 - protein, 19 aa, Homo sapiens
  CDR3 for alpha chain variable domain of TCR clone 252815 (TRAV26-1, TRAJ52)
CIVRAHRNAGGTSYGKLTF

SEQ ID NO: 505630 - protein, 15 aa, Homo sapiens
  CDR3 for beta chain variable domain of TCR clone 252815 (TRBV12-4, TRBJ2-5)
CASSPPAGLQETQYF

SEQ ID NO: 505631 - protein, 11 aa, Homo sapiens
  CDR3 for alpha chain variable domain of TCR clone 252816 (TRAV12-2, TRAJ6)
CAVNVSRKLHT

SEQ ID NO: 505632 - protein, 16 aa, Homo sapiens
  CDR3 for beta chain variable domain of TCR clone 252816 (TRBV13, TRBJ2-2)
CASSPRTGEHTGELFF

SEQ ID NO: 505633 - protein, 12 aa, Homo sapiens
  CDR3 for alpha chain variable domain of TCR clone 252817 (TRAV20, TRAJ39)
CAVGNAGNMLTF

SEQ ID NO: 505634 - protein, 12 aa, Homo sapiens
  CDR3 for beta chain variable domain of TCR clone 252817 (TRBV12-4, TRBJ1-3)
CASSFSGNTIYF

SEQ ID NO: 505635 - protein, 15 aa, Homo sapiens
  CDR3 for alpha chain variable domain of TCR clone 252818 (TRAV13-1, TRAJ44)
CAASRGGGTASKLTF

SEQ ID NO: 505636 - protein, 14 aa, Homo sapiens
  CDR3 for beta chain variable domain of TCR clone 252818 (TRBV7-2, TRBJ2-5)
CAASPRGSSETQYF

SEQ ID NO: 505637 - protein, 16 aa, Homo sapiens
  CDR3 for alpha chain variable domain of TCR clone 252819 (TRAV14/DV4, TRAJ21)
CAMREGPDNNFNKFYF

SEQ ID NO: 505638 - protein, 12 aa, Homo sapiens
  CDR3 for beta chain variable domain of TCR clone 252819 (TRBV29-1, TRBJ2-2)
CSVDEYTGELFF

SEQ ID NO: 505639 - protein, 13 aa, Homo sapiens
  CDR3 for alpha chain variable domain of TCR clone 252820 (TRAV8-3, TRAJ28)
CAVGAVGSYQLTF

SEQ ID NO: 505640 - protein, 13 aa, Homo sapiens
  CDR3 for beta chain variable domain of TCR clone 252820 (TRBV4-1, TRBJ2-3)
CASSQPPTDTQYF

SEQ ID NO: 505641 - protein, 16 aa, Homo sapiens
  CDR3 for alpha chain variable domain of TCR clone 252821 (TRAV20, TRAJ10)
CAVLRGLTGGGNKLTF

SEQ ID NO: 505642 - protein, 14 aa, Homo sapiens
  CDR3 for beta chain variable domain of TCR clone 252821 (TRBV27, TRBJ2-7)
CASATGTERREQYF

SEQ ID NO: 505643 - protein, 17 aa, Homo sapiens
  CDR3 for alpha chain variable domain of TCR clone 252822 (TRAV16, TRAJ37)
CAFWPKNGSSNTGKLIF

SEQ ID NO: 505644 - protein, 16 aa, Homo sapiens
  CDR3 for beta chain variable domain of TCR clone 252822 (TRBV20-1, TRBJ2-3)
CSAVRDRGPIADTQYF

SEQ ID NO: 505645 - protein, 11 aa, Homo sapiens
  CDR3 for alpha chain variable domain of TCR clone 252823 (TRAV2, TRAJ13)
CSSGGYQKVTF

SEQ ID NO: 505646 - protein, 14 aa, Homo sapiens
  CDR3 for beta chain variable domain of TCR clone 252823 (TRBV7-3, TRBJ2-7)
CASSYDQDYYEQYF

SEQ ID NO: 505647 - protein, 15 aa, Homo sapiens
  CDR3 for alpha chain variable domain of TCR clone 252824 (TRAV36/DV7, TRAJ22)
CAVTFSSGSARQLTF

SEQ ID NO: 505648 - protein, 14 aa, Homo sapiens
  CDR3 for beta chain variable domain of TCR clone 252824 (TRBV25-1, TRBJ1-1)
CASTHLGGNTEAFF

SEQ ID NO: 505649 - protein, 13 aa, Homo sapiens
  CDR3 for alpha chain variable domain of TCR clone 252825 (TRAV1-2, TRAJ24)
CAVTGYSWGKLQF

SEQ ID NO: 505650 - protein, 15 aa, Homo sapiens
  CDR3 for beta chain variable domain of TCR clone 252825 (TRBV7-2, TRBJ2-7)
CASSLGGAKSGEQYF

SEQ ID NO: 505651 - protein, 16 aa, Homo sapiens
  CDR3 for alpha chain variable domain of TCR clone 252826 (TRAV36/DV7, TRAJ33)
WMPGNKVQDSNYQLIW

SEQ ID NO: 505652 - protein, 15 aa, Homo sapiens
  CDR3 for beta chain variable domain of TCR clone 252826 (TRBV29-1, TRBJ2-1)
CSVGRHALFYNEQFF

SEQ ID NO: 505653 - protein, 14 aa, Homo sapiens
  CDR3 for alpha chain variable domain of TCR clone 252827 (TRAV9-2, TRAJ39)
CALYIYNAGNMLTF

SEQ ID NO: 505654 - protein, 12 aa, Homo sapiens
  CDR3 for beta chain variable domain of TCR clone 252827 (TRBV12-4, TRBJ1-5)
CASSLGRQPQHF

SEQ ID NO: 505655 - protein, 10 aa, Homo sapiens
  CDR3 for alpha chain variable domain of TCR clone 252828 (TRAV29/DV5, TRAJ48)
CAAVGEKLTF

SEQ ID NO: 505656 - protein, 14 aa, Homo sapiens
  CDR3 for beta chain variable domain of TCR clone 252828 (TRBV7-9, TRBJ2-5)
CASSLAPDQETQYF

SEQ ID NO: 505657 - protein, 15 aa, Homo sapiens
  CDR3 for alpha chain variable domain of TCR clone 252829 (TRAV12-1, TRAJ45)
CVVLSGGGGADGLTF

SEQ ID NO: 505658 - protein, 15 aa, Homo sapiens
  CDR3 for beta chain variable domain of TCR clone 252829 (TRBV12-4, TRBJ2-3)
CASSSTSGSTDTQYF

SEQ ID NO: 505659 - protein, 15 aa, Homo sapiens
  CDR3 for alpha chain variable domain of TCR clone 252830 (TRAV26-1, TRAJ42)
CIVRVKGGSQGNLIL

SEQ ID NO: 505660 - protein, 14 aa, Homo sapiens
  CDR3 for beta chain variable domain of TCR clone 252830 (TRBV19, TRBJ2-2)
CATTGHANTGGLFF

SEQ ID NO: 505661 - protein, 16 aa, Homo sapiens
  CDR3 for alpha chain variable domain of TCR clone 252831 (TRAV12-2, TRAJ32)
CAVNLGQGGATDKPIF

SEQ ID NO: 505662 - protein, 15 aa, Homo sapiens
  CDR3 for beta chain variable domain of TCR clone 252831 (TRBV20-1, TRBJ2-7)
CSARGPLAGGREQYF

SEQ ID NO: 505663 - protein, 15 aa, Homo sapiens
  CDR3 for alpha chain variable domain of TCR clone 252832 (TRAV17, TRAJ37)
CATDHGTSNTGKLIF

SEQ ID NO: 505664 - protein, 14 aa, Homo sapiens
  CDR3 for beta chain variable domain of TCR clone 252832 (TRBV7-2, TRBJ2-3)
CASSRTSGADTQYF

SEQ ID NO: 505665 - protein, 12 aa, Homo sapiens
  CDR3 for alpha chain variable domain of TCR clone 252833 (TRAV12-3, TRAJ17)
CAMTLTGTKLTF

SEQ ID NO: 505666 - protein, 14 aa, Homo sapiens
  CDR3 for beta chain variable domain of TCR clone 252833 (TRBV7-9, TRBJ2-3)
CASSLEDGTDTQYF

SEQ ID NO: 505667 - protein, 17 aa, Homo sapiens
  CDR3 for alpha chain variable domain of TCR clone 252834 (TRAV3, TRAJ6)
CAVRDGPRAGGSYIPTF

SEQ ID NO: 505668 - protein, 11 aa, Homo sapiens
  CDR3 for beta chain variable domain of TCR clone 252834 (TRBV11-2, TRBJ2-2)
CSSLGGGELFF

SEQ ID NO: 505669 - protein, 15 aa, Homo sapiens
  CDR3 for alpha chain variable domain of TCR clone 252835 (TRAV26-1, TRAJ38)
CIASSNAGYNRKLIW

SEQ ID NO: 505670 - protein, 12 aa, Homo sapiens
  CDR3 for beta chain variable domain of TCR clone 252835 (TRBV5-8, TRBJ1-2)
CASSFGVYGYTF

SEQ ID NO: 505671 - protein, 15 aa, Homo sapiens
  CDR3 for alpha chain variable domain of TCR clone 252836 (TRAV1-1, TRAJ20)
CAVRDNVANDYKLSF

SEQ ID NO: 505672 - protein, 17 aa, Homo sapiens
  CDR3 for beta chain variable domain of TCR clone 252836 (TRBV7-2, TRBJ2-3)
CASSLAGGLAGTAGQYS

SEQ ID NO: 505673 - protein, 14 aa, Homo sapiens
  CDR3 for alpha chain variable domain of TCR clone 252837 (TRAV1-2, TRAJ8)
CAVREDTGFQKLVF

SEQ ID NO: 505674 - protein, 14 aa, Homo sapiens
  CDR3 for beta chain variable domain of TCR clone 252837 (TRBV5-7, TRBJ2-1)
CASSSVANYNEQFF

SEQ ID NO: 505675 - protein, 14 aa, Homo sapiens
  CDR3 for alpha chain variable domain of TCR clone 252838 (TRAV8-6, TRAJ49)
CAVSVRYTGNQFYF

SEQ ID NO: 505676 - protein, 19 aa, Homo sapiens
  CDR3 for beta chain variable domain of TCR clone 252838 (TRBV28, TRBJ2-1)
CASSFSNRGSGRTRYEQFF

SEQ ID NO: 505677 - protein, 13 aa, Homo sapiens
  CDR3 for alpha chain variable domain of TCR clone 252839 (TRAV35, TRAJ21)
CAGQLSNFTKFYF

SEQ ID NO: 505678 - protein, 16 aa, Homo sapiens
  CDR3 for beta chain variable domain of TCR clone 252839 (TRBV4-3, TRBJ2-2)
CASSHLQGSGTGELLF

SEQ ID NO: 505679 - protein, 13 aa, Homo sapiens
  CDR3 for alpha chain variable domain of TCR clone 252840 (TRAV35, TRAJ9)
CAGHEFGNEKLTF

SEQ ID NO: 505680 - protein, 16 aa, Homo sapiens
  CDR3 for beta chain variable domain of TCR clone 252840 (TRBV19, TRBJ2-3)
CSSSPEWDRGTDTQYF

SEQ ID NO: 505681 - protein, 15 aa, Homo sapiens
  CDR3 for alpha chain variable domain of TCR clone 252841 (TRAV25, TRAJ52)
CAGTSGGTSYGKLTF

SEQ ID NO: 505682 - protein, 15 aa, Homo sapiens
  CDR3 for beta chain variable domain of TCR clone 252841 (TRBV18, TRBJ2-7)
CASSPSATGNYEQYF

SEQ ID NO: 505683 - protein, 12 aa, Homo sapiens
  CDR3 for alpha chain variable domain of TCR clone 252842 (TRAV13-2, TRAJ23)
CAERHRGGKLIF

SEQ ID NO: 505684 - protein, 15 aa, Homo sapiens
  CDR3 for beta chain variable domain of TCR clone 252842 (TRBV12-4, TRBJ1-6)
CASSLGGQWTSPLHF

SEQ ID NO: 505685 - protein, 11 aa, Homo sapiens
  CDR3 for alpha chain variable domain of TCR clone 252843 (TRAV12-3, TRAJ43)
CAMSVSNDMRF

SEQ ID NO: 505686 - protein, 13 aa, Homo sapiens
  CDR3 for beta chain variable domain of TCR clone 252843 (TRBV20-1, TRBJ1-1)
CSAPVGGGSEAFF

SEQ ID NO: 505687 - protein, 15 aa, Homo sapiens
  CDR3 for alpha chain variable domain of TCR clone 252844 (TRAV21, TRAJ53)
CATLNSGGSNYKLIF

SEQ ID NO: 505688 - protein, 14 aa, Homo sapiens
  CDR3 for beta chain variable domain of TCR clone 252844 (TRBV7-2, TRBJ2-7)
CASRSQGAAYEQYF

SEQ ID NO: 505689 - protein, 14 aa, Homo sapiens
  CDR3 for alpha chain variable domain of TCR clone 252845 (TRAV26-1, TRAJ38)
CIADNAGNNRKLIW

SEQ ID NO: 505690 - protein, 15 aa, Homo sapiens
  CDR3 for beta chain variable domain of TCR clone 252845 (TRBV20-1, TRBJ1-1)
CSASRGVTGDTEAFF

SEQ ID NO: 505691 - protein, 14 aa, Homo sapiens
  CDR3 for alpha chain variable domain of TCR clone 252846 (TRAV3, TRAJ9)
CAVRLNTGGFKTIC

SEQ ID NO: 505692 - protein, 16 aa, Homo sapiens
  CDR3 for beta chain variable domain of TCR clone 252846 (TRBV12-5, TRBJ2-5)
CASGPRTSGNQETQYF

SEQ ID NO: 505693 - protein, 14 aa, Homo sapiens
  CDR3 for alpha chain variable domain of TCR clone 252847 (TRAV12-2, TRAJ17)
CAVNIKAAGNKLTF

SEQ ID NO: 505694 - protein, 20 aa, Homo sapiens
  CDR3 for beta chain variable domain of TCR clone 252847 (TRBV7-8, TRBJ2-2)
CASSHLFPGPTIHITGELFF

SEQ ID NO: 505695 - protein, 13 aa, Homo sapiens
  CDR3 for alpha chain variable domain of TCR clone 252848 (TRAV36/DV7, TRAJ49)
CAVEANTGNQFYF

SEQ ID NO: 505696 - protein, 20 aa, Homo sapiens
  CDR3 for beta chain variable domain of TCR clone 252848 (TRBV11-3, TRBJ2-7)
CASSQRTSGSLRAVLRAGHQ

SEQ ID NO: 505697 - protein, 14 aa, Homo sapiens
  CDR3 for alpha chain variable domain of TCR clone 252849 (TRAV12-2, TRAJ17)
CAVLFKAAGNKLTF

SEQ ID NO: 505698 - protein, 19 aa, Homo sapiens
  CDR3 for beta chain variable domain of TCR clone 252849 (TRBV25-1, TRBJ2-2)
CAILVYRVDRGRKTGELFF

SEQ ID NO: 505699 - protein, 16 aa, Homo sapiens
  CDR3 for alpha chain variable domain of TCR clone 252850 (TRAV12-3, TRAJ53)
CAMSPGSGGSNYKLTF

SEQ ID NO: 505700 - protein, 12 aa, Homo sapiens
  CDR3 for beta chain variable domain of TCR clone 252850 (TRBV3-1, TRBJ2-1)
CASSQGSSGQFF

SEQ ID NO: 505701 - protein, 16 aa, Homo sapiens
  CDR3 for alpha chain variable domain of TCR clone 252851 (TRAV12-3, TRAJ58)
CAMTDTEETRGSRLTF

SEQ ID NO: 505702 - protein, 22 aa, Homo sapiens
  CDR3 for beta chain variable domain of TCR clone 252851 (TRBV23-1, TRBJ2-7)
CASSRRMDSGQGYVGGGYEQYF

SEQ ID NO: 505703 - protein, 16 aa, Homo sapiens
  CDR3 for alpha chain variable domain of TCR clone 252852 (TRAV30, TRAJ24)
CGTEIVDADSWGKLQF

SEQ ID NO: 505704 - protein, 14 aa, Homo sapiens
  CDR3 for beta chain variable domain of TCR clone 252852 (TRBV12-5, TRBJ2-5)
CASGSRTHQETQYL

SEQ ID NO: 505705 - protein, 14 aa, Homo sapiens
  CDR3 for alpha chain variable domain of TCR clone 252853 (TRAV17, TRAJ17)
CTTDDAAAGNKLTF

SEQ ID NO: 505706 - protein, 16 aa, Homo sapiens
  CDR3 for beta chain variable domain of TCR clone 252853 (TRBV19, TRBJ2-1)
CASSIETGSPYNEQFF

SEQ ID NO: 505707 - protein, 11 aa, Homo sapiens
  CDR3 for alpha chain variable domain of TCR clone 252854 (TRAV1-1, TRAJ23)
GAVRQGGKLIF

SEQ ID NO: 505708 - protein, 12 aa, Homo sapiens
  CDR3 for beta chain variable domain of TCR clone 252854 (TRBV19, TRBJ1-5)
CASSIAQQPQHF

SEQ ID NO: 505709 - protein, 13 aa, Homo sapiens
  CDR3 for alpha chain variable domain of TCR clone 252855 (TRAV12-3, TRAJ13)
CAMGTGGYQKVTF

SEQ ID NO: 505710 - protein, 14 aa, Homo sapiens
  CDR3 for beta chain variable domain of TCR clone 252855 (TRBV7-2, TRBJ2-5)
CASSTGGEFKTQYF

SEQ ID NO: 505711 - protein, 13 aa, Homo sapiens
  CDR3 for alpha chain variable domain of TCR clone 252856 (TRAV22, TRAJ26)
CAVENNYGQNFVF

SEQ ID NO: 505712 - protein, 16 aa, Homo sapiens
  CDR3 for beta chain variable domain of TCR clone 252856 (TRBV7-2, TRBJ2-6)
CASSERRAAGANVLTF

SEQ ID NO: 505713 - protein, 14 aa, Homo sapiens
  CDR3 for alpha chain variable domain of TCR clone 252857 (TRAV16, TRAJ54)
CALSDGQGAQKLVF

SEQ ID NO: 505714 - protein, 13 aa, Homo sapiens
  CDR3 for beta chain variable domain of TCR clone 252857 (TRBV20-1, TRBJ2-4)
CSAPAWAGNIQYF

SEQ ID NO: 505715 - protein, 11 aa, Homo sapiens
  CDR3 for alpha chain variable domain of TCR clone 252858 (TRAV2, TRAJ40)
CAVEDPGNLQI

SEQ ID NO: 505716 - protein, 15 aa, Homo sapiens
  CDR3 for beta chain variable domain of TCR clone 252858 (TRBV6-3, TRBJ2-7)
CASSSPGTVFYEQYF

SEQ ID NO: 505717 - protein, 14 aa, Homo sapiens
  CDR3 for alpha chain variable domain of TCR clone 252859 (TRAV21, TRAJ34)
CAALPSYNTDKLIF

SEQ ID NO: 505718 - protein, 14 aa, Homo sapiens
  CDR3 for beta chain variable domain of TCR clone 252859 (TRBV7-3, TRBJ2-1)
CASSLAGGTNEQLF

SEQ ID NO: 505719 - protein, 18 aa, Homo sapiens
  CDR3 for alpha chain variable domain of TCR clone 252860 (TRAV26-2, TRAJ54)
CILRDVEVGIQRAQKLVF

SEQ ID NO: 505720 - protein, 16 aa, Homo sapiens
  CDR3 for beta chain variable domain of TCR clone 252860 (TRBV6-1, TRBJ2-5)
CASSETLDRGAETQYF

SEQ ID NO: 505721 - protein, 13 aa, Homo sapiens
  CDR3 for alpha chain variable domain of TCR clone 252861 (TRAV30, TRAJ49)
CGTESQPVTSAIL

SEQ ID NO: 505722 - protein, 13 aa, Homo sapiens
  CDR3 for beta chain variable domain of TCR clone 252861 (TRBV7-2, TRBJ2-2)
CASSLAVTGELFF

SEQ ID NO: 505723 - protein, 15 aa, Homo sapiens
  CDR3 for alpha chain variable domain of TCR clone 252862 (TRAV26-1, TRAJ22)
CIVRVTFWFRKATDL

SEQ ID NO: 505724 - protein, 13 aa, Homo sapiens
  CDR3 for beta chain variable domain of TCR clone 252862 (TRBV7-9, TRBJ1-2)
CASSLKQNYGYTF

SEQ ID NO: 505725 - protein, 13 aa, Homo sapiens
  CDR3 for alpha chain variable domain of TCR clone 252863 (TRAV38-1, TRAJ42)
CARWGGSQGNLIF

SEQ ID NO: 505726 - protein, 14 aa, Homo sapiens
  CDR3 for beta chain variable domain of TCR clone 252863 (TRBV19, TRBJ2-7)
CASSRGRGTYEQYF

SEQ ID NO: 505727 - protein, 14 aa, Homo sapiens
  CDR3 for alpha chain variable domain of TCR clone 252864 (TRAV3, TRAJ7)
CAVREEEREQQTRF

SEQ ID NO: 505728 - protein, 17 aa, Homo sapiens
  CDR3 for beta chain variable domain of TCR clone 252864 (TRBV7-8, TRBJ2-6)
CASSAGTGGAGANVLTF

SEQ ID NO: 505729 - protein, 17 aa, Homo sapiens
  CDR3 for alpha chain variable domain of TCR clone 252865 (TRAV3, TRAJ6)
CAVRYGPRAGGSYIPTF

SEQ ID NO: 505730 - protein, 14 aa, Homo sapiens
  CDR3 for beta chain variable domain of TCR clone 252865 (TRBV7-2, TRBJ2-7)
CASSPKNSFYEQCF

SEQ ID NO: 505731 - protein, 18 aa, Homo sapiens
  CDR3 for alpha chain variable domain of TCR clone 252866 (TRAV13-1, TRAJ52)
CAAKNPNAGGTSYGKLHF

SEQ ID NO: 505732 - protein, 15 aa, Homo sapiens
  CDR3 for beta chain variable domain of TCR clone 252866 (TRBV6-1, TRBJ2-3)
CASSERGGITDTQYF

SEQ ID NO: 505733 - protein, 14 aa, Homo sapiens
  CDR3 for alpha chain variable domain of TCR clone 252867 (TRAV8-3, TRAJ9)
CAVVYNTGSFKTIF

SEQ ID NO: 505734 - protein, 14 aa, Homo sapiens
  CDR3 for beta chain variable domain of TCR clone 252867 (TRBV7-3, TRBJ2-2)
CASSSGGYTGELFF

SEQ ID NO: 505735 - protein, 15 aa, Homo sapiens
  CDR3 for alpha chain variable domain of TCR clone 252868 (TRAV26-2, TRAJ13)
CILRDLSGGYQKVTS

SEQ ID NO: 505736 - protein, 14 aa, Homo sapiens
  CDR3 for beta chain variable domain of TCR clone 252868 (TRBV7-2, TRBJ1-1)
CASSFLTGTTEAFF

SEQ ID NO: 505737 - protein, 13 aa, Homo sapiens
  CDR3 for alpha chain variable domain of TCR clone 252869 (TRAV21, TRAJ57)
RAVTQGGSEKLVF

SEQ ID NO: 505738 - protein, 16 aa, Homo sapiens
  CDR3 for beta chain variable domain of TCR clone 252869 (TRBV29-1, TRBJ2-7)
CSVEDAEHGTAYEQYF

SEQ ID NO: 505739 - protein, 12 aa, Homo sapiens
  CDR3 for alpha chain variable domain of TCR clone 252870 (TRAV12-3, TRAJ5)
CAMDTGRRALTF

SEQ ID NO: 505740 - protein, 13 aa, Homo sapiens
  CDR3 for beta chain variable domain of TCR clone 252870 (TRBV7-7, TRBJ2-2)
CAGSLTSAGELFF

SEQ ID NO: 505741 - protein, 16 aa, Homo sapiens
  CDR3 for alpha chain variable domain of TCR clone 252871 (TRAV3, TRAJ37)
CAVRGKGSGNPGKLIF

SEQ ID NO: 505742 - protein, 14 aa, Homo sapiens
  CDR3 for beta chain variable domain of TCR clone 252871 (TRBV20-1, TRBJ2-3)
CSARGGTSTDTQYF

SEQ ID NO: 505743 - protein, 13 aa, Homo sapiens
  CDR3 for alpha chain variable domain of TCR clone 252872 (TRAV12-3, TRAJ9)
CSMRNTGGFKTIF

SEQ ID NO: 505744 - protein, 13 aa, Homo sapiens
  CDR3 for beta chain variable domain of TCR clone 252872 (TRBV27, TRBJ2-1)
CASRTLGVGEQFF

SEQ ID NO: 505745 - protein, 14 aa, Homo sapiens
  CDR3 for alpha chain variable domain of TCR clone 252873 (TRAV26-1, TRAJ38)
CIADNAGNNRKLLW

SEQ ID NO: 505746 - protein, 13 aa, Homo sapiens
  CDR3 for beta chain variable domain of TCR clone 252873 (TRBV7-3, TRBJ1-1)
CASSQDWGAEAFF

SEQ ID NO: 505747 - protein, 14 aa, Homo sapiens
  CDR3 for alpha chain variable domain of TCR clone 252874 (TRAV12-2, TRAJ52)
CAVLGGTSYGKLTF

SEQ ID NO: 505748 - protein, 12 aa, Homo sapiens
  CDR3 for beta chain variable domain of TCR clone 252874 (TRBV18, TRBJ2-1)
CASSPGTSEGFF

SEQ ID NO: 505749 - protein, 12 aa, Homo sapiens
  CDR3 for alpha chain variable domain of TCR clone 252875 (TRAV8-3, TRAJ40)
CAVTSGTYKYIF

SEQ ID NO: 505750 - protein, 16 aa, Homo sapiens
  CDR3 for beta chain variable domain of TCR clone 252875 (TRBV16, TRBJ2-7)
CASSRPAGGSSYEQYF

SEQ ID NO: 505751 - protein, 14 aa, Homo sapiens
  CDR3 for alpha chain variable domain of TCR clone 252876 (TRAV12-2, TRAJ5)
CAVKGDTGRRALTF

SEQ ID NO: 505752 - protein, 14 aa, Homo sapiens
  CDR3 for beta chain variable domain of TCR clone 252876 (TRBV7-3, TRBJ2-3)
CASSSTGVADTQYF

SEQ ID NO: 505753 - protein, 13 aa, Homo sapiens
  CDR3 for alpha chain variable domain of TCR clone 252877 (TRAV13-1, TRAJ6)
CAASKGGSYIPTF

SEQ ID NO: 505754 - protein, 14 aa, Homo sapiens
  CDR3 for beta chain variable domain of TCR clone 252877 (TRBV7-2, TRBJ2-1)
CASSLEVGYNEQFF

SEQ ID NO: 505755 - protein, 11 aa, Homo sapiens
  CDR3 for alpha chain variable domain of TCR clone 252878 (TRAV13-1, TRAJ20)
CSPHGLYKLSF

SEQ ID NO: 505756 - protein, 14 aa, Homo sapiens
  CDR3 for beta chain variable domain of TCR clone 252878 (TRBV28, TRBJ2-5)
CASTWAGGVETQYF

SEQ ID NO: 505757 - protein, 12 aa, Homo sapiens
  CDR3 for alpha chain variable domain of TCR clone 252879 (TRAV13-2, TRAJ8)
CAPWLGFQKLVF

SEQ ID NO: 505758 - protein, 15 aa, Homo sapiens
  CDR3 for beta chain variable domain of TCR clone 252879 (TRBV11-2, TRBJ1-1)
CASSSRSRLLLSLDK

SEQ ID NO: 505759 - protein, 16 aa, Homo sapiens
  CDR3 for alpha chain variable domain of TCR clone 252880 (TRAV3, TRAJ15)
CAVRDRTNQAGTALIF

SEQ ID NO: 505760 - protein, 15 aa, Homo sapiens
  CDR3 for beta chain variable domain of TCR clone 252880 (TRBV19, TRBJ2-7)
CASSFNSGGVWEQYF

SEQ ID NO: 505761 - protein, 17 aa, Homo sapiens
  CDR3 for alpha chain variable domain of TCR clone 252881 (TRAV26-1, TRAJ22)
CIVRVPSHSGSAGQLTF

SEQ ID NO: 505762 - protein, 16 aa, Homo sapiens
  CDR3 for beta chain variable domain of TCR clone 252881 (TRBV28, TRBJ2-1)
CASRRSGRVVGNEQFF

SEQ ID NO: 505763 - protein, 13 aa, Homo sapiens
  CDR3 for alpha chain variable domain of TCR clone 252882 (TRAV16, TRAJ30)
CALAQNRDDKIIF

SEQ ID NO: 505764 - protein, 16 aa, Homo sapiens
  CDR3 for beta chain variable domain of TCR clone 252882 (TRBV7-2, TRBJ1-1)
CASSLAAGRSLTEAFF

SEQ ID NO: 505765 - protein, 15 aa, Homo sapiens
  CDR3 for alpha chain variable domain of TCR clone 252883 (TRAV27, TRAJ38)
CAARRNAGNNRKLIW

SEQ ID NO: 505766 - protein, 15 aa, Homo sapiens
  CDR3 for beta chain variable domain of TCR clone 252883 (TRBV7-2, TRBJ2-1)
CASSLASGRVNEQFF

SEQ ID NO: 505767 - protein, 12 aa, Homo sapiens
  CDR3 for alpha chain variable domain of TCR clone 252884 (TRAV21, TRAJ23)
CAVGPQGGKLIF

SEQ ID NO: 505768 - protein, 13 aa, Homo sapiens
  CDR3 for beta chain variable domain of TCR clone 252884 (TRBV20-1, TRBJ2-7)
CSARTGAGYEQYL

SEQ ID NO: 505769 - protein, 16 aa, Homo sapiens
  CDR3 for alpha chain variable domain of TCR clone 252885 (TRAV17, TRAJ28)
CASYAYSGAGSYQRTF

SEQ ID NO: 505770 - protein, 15 aa, Homo sapiens
  CDR3 for beta chain variable domain of TCR clone 252885 (TRBV4-2, TRBJ2-1)
CASSPSGGLYNEQFF

SEQ ID NO: 505771 - protein, 11 aa, Homo sapiens
  CDR3 for alpha chain variable domain of TCR clone 252886 (TRAV13-1, TRAJ6)
CATLGSYIPTF

SEQ ID NO: 505772 - protein, 12 aa, Homo sapiens
  CDR3 for beta chain variable domain of TCR clone 252886 (TRBV11-2, TRBJ2-1)
CARSRGTNEQFF

SEQ ID NO: 505773 - protein, 11 aa, Homo sapiens
  CDR3 for alpha chain variable domain of TCR clone 252887 (TRAV1-2, TRAJ31)
CAANNNARLMF

SEQ ID NO: 505774 - protein, 15 aa, Homo sapiens
  CDR3 for beta chain variable domain of TCR clone 252887 (TRBV28, TRBJ2-1)
CASSIIAGGRSEQFF

SEQ ID NO: 505775 - protein, 16 aa, Homo sapiens
  CDR3 for alpha chain variable domain of TCR clone 252888 (TRAV3, TRAJ37)
CAVRGKGSGNTGKLIF

SEQ ID NO: 505776 - protein, 11 aa, Homo sapiens
  CDR3 for beta chain variable domain of TCR clone 252888 (TRBV28, TRBJ1-1)
CASSPTGEAFF

SEQ ID NO: 505777 - protein, 16 aa, Homo sapiens
  CDR3 for alpha chain variable domain of TCR clone 252889 (TRAV3, TRAJ10)
CAVRDMNAGGGNKLTF

SEQ ID NO: 505778 - protein, 13 aa, Homo sapiens
  CDR3 for beta chain variable domain of TCR clone 252889 (TRBV12-4, TRBJ1-2)
CASSSGLTVISTF

SEQ ID NO: 505779 - protein, 14 aa, Homo sapiens
  CDR3 for alpha chain variable domain of TCR clone 252890 (TRAV23/DV6, TRAJ13)
CAAMYSGGYQKVTF

SEQ ID NO: 505780 - protein, 14 aa, Homo sapiens
  CDR3 for beta chain variable domain of TCR clone 252890 (TRBV7-9, TRBJ2-1)
CASSPRDSLYKQFF

SEQ ID NO: 505781 - protein, 15 aa, Homo sapiens
  CDR3 for alpha chain variable domain of TCR clone 252891 (TRAV23/DV6, TRAJ57)
CAASSTLSHGGSEQL

SEQ ID NO: 505782 - protein, 14 aa, Homo sapiens
  CDR3 for beta chain variable domain of TCR clone 252891 (TRBV25-1, TRBJ1-1)
CASTHLGGNTEAFF

SEQ ID NO: 505783 - protein, 14 aa, Homo sapiens
  CDR3 for alpha chain variable domain of TCR clone 252892 (TRAV17, TRAJ32)
CATDPGGATNKLIF

SEQ ID NO: 505784 - protein, 14 aa, Homo sapiens
  CDR3 for beta chain variable domain of TCR clone 252892 (TRBV2, TRBJ1-5)
CARSENRGGQPQHF

SEQ ID NO: 505785 - protein, 13 aa, Homo sapiens
  CDR3 for alpha chain variable domain of TCR clone 252893 (TRAV12-2, TRAJ18)
CAVRGSTLGRLYF

SEQ ID NO: 505786 - protein, 14 aa, Homo sapiens
  CDR3 for beta chain variable domain of TCR clone 252893 (TRBV7-9, TRBJ1-6)
CASRPGTVNSPLHF

SEQ ID NO: 505787 - protein, 14 aa, Homo sapiens
  CDR3 for alpha chain variable domain of TCR clone 252894 (TRAV24, TRAJ42)
CAQNYGGSQGNLIF

SEQ ID NO: 505788 - protein, 18 aa, Homo sapiens
  CDR3 for beta chain variable domain of TCR clone 252894 (TRBV11-2, TRBJ2-3)
CASSLGGASRGAPNTQYF

SEQ ID NO: 505789 - protein, 12 aa, Homo sapiens
  CDR3 for alpha chain variable domain of TCR clone 252895 (TRAV24, TRAJ40)
CAFMPETYKYIF

SEQ ID NO: 505790 - protein, 11 aa, Homo sapiens
  CDR3 for beta chain variable domain of TCR clone 252895 (TRBV10-1, TRBJ2-3)
CASSDSDTQYF

SEQ ID NO: 505791 - protein, 13 aa, Homo sapiens
  CDR3 for alpha chain variable domain of TCR clone 252896 (TRAV1-2, TRAJ11)
CAVRDSGYSTLTF

SEQ ID NO: 505792 - protein, 13 aa, Homo sapiens
  CDR3 for beta chain variable domain of TCR clone 252896 (TRBV15, TRBJ1-2)
CATSRGQLYGYTF

SEQ ID NO: 505793 - protein, 12 aa, Homo sapiens
  CDR3 for alpha chain variable domain of TCR clone 252897 (TRAV8-3, TRAJ6)
CAVAGGSYIPTF

SEQ ID NO: 505794 - protein, 15 aa, Homo sapiens
  CDR3 for beta chain variable domain of TCR clone 252897 (TRBV20-1, TRBJ1-1)
CSASRGVTGNTEAFF

SEQ ID NO: 505795 - protein, 14 aa, Homo sapiens
  CDR3 for alpha chain variable domain of TCR clone 252898 (TRAV5, TRAJ21)
CAESILDNFNKFYF

SEQ ID NO: 505796 - protein, 13 aa, Homo sapiens
  CDR3 for beta chain variable domain of TCR clone 252898 (TRBV7-3, TRBJ1-1)
CASSQDWGAEAFF

SEQ ID NO: 505797 - protein, 16 aa, Homo sapiens
  CDR3 for alpha chain variable domain of TCR clone 252899 (TRAV12-3, TRAJ53)
CAMNPGSGGSNYKLTF

SEQ ID NO: 505798 - protein, 13 aa, Homo sapiens
  CDR3 for beta chain variable domain of TCR clone 252899 (TRBV19, TRBJ1-2)
CASSVPGQDGYTF

SEQ ID NO: 505799 - protein, 13 aa, Homo sapiens
  CDR3 for alpha chain variable domain of TCR clone 252900 (TRAV1-2, TRAJ9)
CAALNTGGFKTNF

SEQ ID NO: 505800 - protein, 13 aa, Homo sapiens
  CDR3 for beta chain variable domain of TCR clone 252900 (TRBV19, TRBJ1-2)
CASSAPGQDGYTF

SEQ ID NO: 505801 - protein, 20 aa, Homo sapiens
  CDR3 for alpha chain variable domain of TCR clone 252901 (TRAV4, TRAJ29)
CCVLLPRGCVPFSGNTPLVF

SEQ ID NO: 505802 - protein, 17 aa, Homo sapiens
  CDR3 for beta chain variable domain of TCR clone 252901 (TRBV25-1, TRBJ2-7)
CASSGARVVFSSYEQYF

SEQ ID NO: 505803 - protein, 12 aa, Homo sapiens
  CDR3 for alpha chain variable domain of TCR clone 252902 (TRAV13-2, TRAJ23)
CAERHRGGKLIF

SEQ ID NO: 505804 - protein, 13 aa, Homo sapiens
  CDR3 for beta chain variable domain of TCR clone 252902 (TRBV27, TRBJ1-1)
CASSLSIGSEAFF

SEQ ID NO: 505805 - protein, 13 aa, Homo sapiens
  CDR3 for alpha chain variable domain of TCR clone 252903 (TRAV21, TRAJ15)
CAVCNQAGTALTF

SEQ ID NO: 505806 - protein, 16 aa, Homo sapiens
  CDR3 for beta chain variable domain of TCR clone 252903 (TRBV12-4, TRBJ1-5)
CASSRPVGGSNQPQHF

SEQ ID NO: 505807 - protein, 11 aa, Homo sapiens
  CDR3 for alpha chain variable domain of TCR clone 252904 (TRAV21, TRAJ23)
CAPQRRGKLIF

SEQ ID NO: 505808 - protein, 14 aa, Homo sapiens
  CDR3 for beta chain variable domain of TCR clone 252904 (TRBV12-4, TRBJ1-1)
CASTWTGQDTEAFF

SEQ ID NO: 505809 - protein, 17 aa, Homo sapiens
  CDR3 for alpha chain variable domain of TCR clone 252905 (TRAV3, TRAJ6)
CAVRDGPRAGGSYIHPF

SEQ ID NO: 505810 - protein, 14 aa, Homo sapiens
  CDR3 for beta chain variable domain of TCR clone 252905 (TRBV7-2, TRBJ2-7)
CASSPKTSFYEQYF

SEQ ID NO: 505811 - protein, 13 aa, Homo sapiens
  CDR3 for alpha chain variable domain of TCR clone 252906 (TRAV35, TRAJ42)
CAGFPGSQGNLIF

SEQ ID NO: 505812 - protein, 13 aa, Homo sapiens
  CDR3 for beta chain variable domain of TCR clone 252906 (TRBV29-1, TRBJ2-1)
CSVEGGRVNEQIF

SEQ ID NO: 505813 - protein, 14 aa, Homo sapiens
  CDR3 for alpha chain variable domain of TCR clone 252907 (TRAV1-2, TRAJ16)
CAVNRFSDGQKLLF

SEQ ID NO: 505814 - protein, 14 aa, Homo sapiens
  CDR3 for beta chain variable domain of TCR clone 252907 (TRBV13, TRBJ2-5)
CASSSGRGQETQYF

SEQ ID NO: 505815 - protein, 16 aa, Homo sapiens
  CDR3 for alpha chain variable domain of TCR clone 252908 (TRAV12-3, TRAJ53)
CAMSPGSGGSNYKLTF

SEQ ID NO: 505816 - protein, 11 aa, Homo sapiens
  CDR3 for beta chain variable domain of TCR clone 252908 (TRBV29-1, TRBJ2-5)
RSEDRTGTQYC

SEQ ID NO: 505817 - protein, 14 aa, Homo sapiens
  CDR3 for alpha chain variable domain of TCR clone 252909 (TRAV2, TRAJ9)
CAVEDRSGGFKTIF

SEQ ID NO: 505818 - protein, 15 aa, Homo sapiens
  CDR3 for beta chain variable domain of TCR clone 252909 (TRBV19, TRBJ2-1)
CASSIVRGEGREQFC

SEQ ID NO: 505819 - protein, 15 aa, Homo sapiens
  CDR3 for alpha chain variable domain of TCR clone 252910 (TRAV26-1, TRAJ29)
CIVRVEGSGNTPLVF

SEQ ID NO: 505820 - protein, 11 aa, Homo sapiens
  CDR3 for beta chain variable domain of TCR clone 252910 (TRBV7-2, TRBJ2-7)
CASSLGWEQYF

SEQ ID NO: 505821 - protein, 12 aa, Homo sapiens
  CDR3 for alpha chain variable domain of TCR clone 252911 (TRAV12-3, TRAJ17)
CAMTLTGNKLTF

SEQ ID NO: 505822 - protein, 15 aa, Homo sapiens
  CDR3 for beta chain variable domain of TCR clone 252911 (TRBV19, TRBJ1-1)
CASSIRRQMNTEAFF

SEQ ID NO: 505823 - protein, 14 aa, Homo sapiens
  CDR3 for alpha chain variable domain of TCR clone 252912 (TRAV1-2, TRAJ16)
CAANRFSDGQKLLF

SEQ ID NO: 505824 - protein, 11 aa, Homo sapiens
  CDR3 for beta chain variable domain of TCR clone 252912 (TRBV11-2, TRBJ2-2)
CASSLPGELFF

SEQ ID NO: 505825 - protein, 15 aa, Homo sapiens
  CDR3 for alpha chain variable domain of TCR clone 252913 (TRAV35, TRAJ58)
CAGRRQETSGSRLPL

SEQ ID NO: 505826 - protein, 16 aa, Homo sapiens
  CDR3 for beta chain variable domain of TCR clone 252913 (TRBV2, TRBJ2-1)
CASSVGGSLSYNEQFF

SEQ ID NO: 505827 - protein, 14 aa, Homo sapiens
  CDR3 for alpha chain variable domain of TCR clone 252914 (TRAV1-2, TRAJ8)
GAVREDTGFQKLVF

SEQ ID NO: 505828 - protein, 15 aa, Homo sapiens
  CDR3 for beta chain variable domain of TCR clone 252914 (TRBV11-3, TRBJ2-1)
CASSLGDSSHNEQFF

SEQ ID NO: 505829 - protein, 14 aa, Homo sapiens
  CDR3 for alpha chain variable domain of TCR clone 252915 (TRAV12-2, TRAJ36)
CAVKISTGANNLFF

SEQ ID NO: 505830 - protein, 14 aa, Homo sapiens
  CDR3 for beta chain variable domain of TCR clone 252915 (TRBV25-1, TRBJ1-2)
CDSSDTTGVVGYTF

SEQ ID NO: 505831 - protein, 14 aa, Homo sapiens
  CDR3 for alpha chain variable domain of TCR clone 252916 (TRAV36/DV7, TRAJ40)
CAVETTSGAYKYIF

SEQ ID NO: 505832 - protein, 13 aa, Homo sapiens
  CDR3 for beta chain variable domain of TCR clone 252916 (TRBV10-3, TRBJ2-5)
CAMTSGAGETQYV

SEQ ID NO: 505833 - protein, 17 aa, Homo sapiens
  CDR3 for alpha chain variable domain of TCR clone 252917 (TRAV38-2/DV8, TRAJ56)
CAYRSEVGTGANSKLTF

SEQ ID NO: 505834 - protein, 15 aa, Homo sapiens
  CDR3 for beta chain variable domain of TCR clone 252917 (TRBV7-3, TRBJ2-1)
CASSPTGGGEVEQFF

SEQ ID NO: 505835 - protein, 14 aa, Homo sapiens
  CDR3 for alpha chain variable domain of TCR clone 252918 (TRAV2, TRAJ29)
CAVTPPSGNTPLVF

SEQ ID NO: 505836 - protein, 16 aa, Homo sapiens
  CDR3 for beta chain variable domain of TCR clone 252918 (TRBV29-1, TRBJ1-2)
CSVEANRDIANYGYTF

SEQ ID NO: 505837 - protein, 15 aa, Homo sapiens
  CDR3 for alpha chain variable domain of TCR clone 252919 (TRAV23/DV6, TRAJ44)
CAASGGTGTASKLTF

SEQ ID NO: 505838 - protein, 14 aa, Homo sapiens
  CDR3 for beta chain variable domain of TCR clone 252919 (TRBV19, TRBJ2-1)
CASPTFVLSGEQFF

SEQ ID NO: 505839 - protein, 15 aa, Homo sapiens
  CDR3 for alpha chain variable domain of TCR clone 252920 (TRAV12-1, TRAJ9)
CVVSFVDTGGFKTIV

SEQ ID NO: 505840 - protein, 13 aa, Homo sapiens
  CDR3 for beta chain variable domain of TCR clone 252920 (TRBV2, TRBJ1-4)
CASSERAGEKLLF

SEQ ID NO: 505841 - protein, 12 aa, Homo sapiens
  CDR3 for alpha chain variable domain of TCR clone 252921 (TRAV8-6, TRAJ22)
CAVNPGTRQLTF

SEQ ID NO: 505842 - protein, 13 aa, Homo sapiens
  CDR3 for beta chain variable domain of TCR clone 252921 (TRBV7-2, TRBJ2-7)
CASRTSASWEQYF

SEQ ID NO: 505843 - protein, 18 aa, Homo sapiens
  CDR3 for alpha chain variable domain of TCR clone 252922 (TRAV13-1, TRAJ52)
CAAKNPNAGGTSYGKLTF

SEQ ID NO: 505844 - protein, 17 aa, Homo sapiens
  CDR3 for beta chain variable domain of TCR clone 252922 (TRBV28, TRBJ2-5)
CASSTPEGDALQETQYF

SEQ ID NO: 505845 - protein, 13 aa, Homo sapiens
  CDR3 for alpha chain variable domain of TCR clone 252923 (TRAV2, TRAJ29)
CAAGNSGNTPLVF

SEQ ID NO: 505846 - protein, 16 aa, Homo sapiens
  CDR3 for beta chain variable domain of TCR clone 252923 (TRBV7-9, TRBJ1-2)
CASSPGGGAINYGDTC

SEQ ID NO: 505847 - protein, 15 aa, Homo sapiens
  CDR3 for alpha chain variable domain of TCR clone 252924 (TRAV36/DV7, TRAJ44)
CAVCRNTGTASKLTF

SEQ ID NO: 505848 - protein, 13 aa, Homo sapiens
  CDR3 for beta chain variable domain of TCR clone 252924 (TRBV18, TRBJ2-3)
CASSTGRTDTHYF

SEQ ID NO: 505849 - protein, 15 aa, Homo sapiens
  CDR3 for alpha chain variable domain of TCR clone 252925 (TRAV12-3, TRAJ6)
CAMSATTGGSYIPTF

SEQ ID NO: 505850 - protein, 14 aa, Homo sapiens
  CDR3 for beta chain variable domain of TCR clone 252925 (TRBV11-2, TRBJ2-7)
CASSRGGGLYEQYF

SEQ ID NO: 505851 - protein, 12 aa, Homo sapiens
  CDR3 for alpha chain variable domain of TCR clone 252926 (TRAV1-2, TRAJ33)
CAALDSNYQLIW

SEQ ID NO: 505852 - protein, 13 aa, Homo sapiens
  CDR3 for beta chain variable domain of TCR clone 252926 (TRBV19, TRBJ2-7)
CASRKAGRSEQYF

SEQ ID NO: 505853 - protein, 12 aa, Homo sapiens
  CDR3 for alpha chain variable domain of TCR clone 252927 (TRAV2, TRAJ3)
CAVRSSASKIIF

SEQ ID NO: 505854 - protein, 15 aa, Homo sapiens
  CDR3 for beta chain variable domain of TCR clone 252927 (TRBV23-1, TRBJ2-7)
CASRLDSVTSSTSGR

SEQ ID NO: 505855 - protein, 14 aa, Homo sapiens
  CDR3 for alpha chain variable domain of TCR clone 252928 (TRAV1-2, TRAJ16)
CAVNRFSDGQKLLF

SEQ ID NO: 505856 - protein, 12 aa, Homo sapiens
  CDR3 for beta chain variable domain of TCR clone 252928 (TRBV7-6, TRBJ2-7)
RASSLADSEQYF

SEQ ID NO: 505857 - protein, 13 aa, Homo sapiens
  CDR3 for alpha chain variable domain of TCR clone 252929 (TRAV8-3, TRAJ34)
CAVGAYNTDKLIF

SEQ ID NO: 505858 - protein, 12 aa, Homo sapiens
  CDR3 for beta chain variable domain of TCR clone 252929 (TRBV7-8, TRBJ2-7)
CASSLGDREQYF

SEQ ID NO: 505859 - protein, 13 aa, Homo sapiens
  CDR3 for alpha chain variable domain of TCR clone 252930 (TRAV21, TRAJ42)
CAVGGGSQGTLIF

SEQ ID NO: 505860 - protein, 15 aa, Homo sapiens
  CDR3 for beta chain variable domain of TCR clone 252930 (TRBV20-1, TRBJ2-7)
CSARDRVSGMDEQYF

SEQ ID NO: 505861 - protein, 15 aa, Homo sapiens
  CDR3 for alpha chain variable domain of TCR clone 252931 (TRAV26-1, TRAJ29)
CIVRVTNSGDTPLVF

SEQ ID NO: 505862 - protein, 12 aa, Homo sapiens
  CDR3 for beta chain variable domain of TCR clone 252931 (TRBV20-1, TRBJ1-2)
CSASWQGYGYTF

SEQ ID NO: 505863 - protein, 14 aa, Homo sapiens
  CDR3 for alpha chain variable domain of TCR clone 252932 (TRAV2, TRAJ9)
CAVEDRSGGFKTIF

SEQ ID NO: 505864 - protein, 16 aa, Homo sapiens
  CDR3 for beta chain variable domain of TCR clone 252932 (TRBV20-1, TRBJ2-3)
CSAERDRGPIADTQYF

SEQ ID NO: 505865 - protein, 13 aa, Homo sapiens
  CDR3 for alpha chain variable domain of TCR clone 252933 (TRAV3, TRAJ5)
CAVREGGRRALTF

SEQ ID NO: 505866 - protein, 16 aa, Homo sapiens
  CDR3 for beta chain variable domain of TCR clone 252933 (TRBV28, TRBJ2-2)
CASSLEGGSNTGELFF

SEQ ID NO: 505867 - protein, 12 aa, Homo sapiens
  CDR3 for alpha chain variable domain of TCR clone 252934 (TRAV13-2, TRAJ23)
CAERHRGGKLIF

SEQ ID NO: 505868 - protein, 16 aa, Homo sapiens
  CDR3 for beta chain variable domain of TCR clone 252934 (TRBV11-2, TRBJ2-1)
CQQLIPPGVEYNEQFF

SEQ ID NO: 505869 - protein, 14 aa, Homo sapiens
  CDR3 for alpha chain variable domain of TCR clone 252935 (TRAV29/DV5, TRAJ20)
CAASAPIEDYKLTF

SEQ ID NO: 505870 - protein, 15 aa, Homo sapiens
  CDR3 for beta chain variable domain of TCR clone 252935 (TRBV9, TRBJ2-1)
CASSLAGSSYNEQFL

SEQ ID NO: 505871 - protein, 16 aa, Homo sapiens
  CDR3 for alpha chain variable domain of TCR clone 252936 (TRAV4, TRAJ5)
CLVGPDHGHGQERTYF

SEQ ID NO: 505872 - protein, 15 aa, Homo sapiens
  CDR3 for beta chain variable domain of TCR clone 252936 (TRBV27, TRBJ2-5)
CASSLIPSGGETQYF

SEQ ID NO: 505873 - protein, 16 aa, Homo sapiens
  CDR3 for alpha chain variable domain of TCR clone 252937 (TRAV21, TRAJ52)
CAVTNAGGTSYGKLTF

SEQ ID NO: 505874 - protein, 16 aa, Homo sapiens
  CDR3 for beta chain variable domain of TCR clone 252937 (TRBV2, TRBJ2-1)
CASSVGRSLSYNEQFF

SEQ ID NO: 505875 - protein, 12 aa, Homo sapiens
  CDR3 for alpha chain variable domain of TCR clone 252938 (TRAV2, TRAJ9)
CAVGAGGFKTIF

SEQ ID NO: 505876 - protein, 14 aa, Homo sapiens
  CDR3 for beta chain variable domain of TCR clone 252938 (TRBV2, TRBJ2-7)
CASSLTSGGYEQYF

SEQ ID NO: 505877 - protein, 15 aa, Homo sapiens
  CDR3 for alpha chain variable domain of TCR clone 252939 (TRAV27, TRAJ38)
CAARRNAGNNRKLIW

SEQ ID NO: 505878 - protein, 13 aa, Homo sapiens
  CDR3 for beta chain variable domain of TCR clone 252939 (TRBV7-3, TRBJ2-1)
CASSLYSYNEQFF

SEQ ID NO: 505879 - protein, 15 aa, Homo sapiens
  CDR3 for alpha chain variable domain of TCR clone 252940 (TRAV3, TRAJ29)
CAVRDLYSGNTPLVF

SEQ ID NO: 505880 - protein, 12 aa, Homo sapiens
  CDR3 for beta chain variable domain of TCR clone 252940 (TRBV7-9, TRBJ1-4)
CASSTDREKLFF

SEQ ID NO: 505881 - protein, 14 aa, Homo sapiens
  CDR3 for alpha chain variable domain of TCR clone 252941 (TRAV13-2, TRAJ41)
CAERPDWAGYALNF

SEQ ID NO: 505882 - protein, 13 aa, Homo sapiens
  CDR3 for beta chain variable domain of TCR clone 252941 (TRBV4-2, TRBJ1-1)
CASSQAGNTEALF

SEQ ID NO: 505883 - protein, 13 aa, Homo sapiens
  CDR3 for alpha chain variable domain of TCR clone 252942 (TRAV13-1, TRAJ39)
CAASIWAGDMLTF

SEQ ID NO: 505884 - protein, 15 aa, Homo sapiens
  CDR3 for beta chain variable domain of TCR clone 252942 (TRBV7-9, TRBJ1-1)
YASSLLEQGGTEAFF

SEQ ID NO: 505885 - protein, 12 aa, Homo sapiens
  CDR3 for alpha chain variable domain of TCR clone 252943 (TRAV8-3, TRAJ40)
CAVTSGTYKYIF

SEQ ID NO: 505886 - protein, 14 aa, Homo sapiens
  CDR3 for beta chain variable domain of TCR clone 252943 (TRBV12-4, TRBJ2-3)
CASSGQGSTDTLYF

SEQ ID NO: 505887 - protein, 13 aa, Homo sapiens
  CDR3 for alpha chain variable domain of TCR clone 252944 (TRAV1-1, TRAJ7)
CAVRDHGNNRLAF

SEQ ID NO: 505888 - protein, 20 aa, Homo sapiens
  CDR3 for beta chain variable domain of TCR clone 252944 (TRBV28, TRBJ2-3)
CASSLGVRSTSGGSTDTQYF

SEQ ID NO: 505889 - protein, 10 aa, Homo sapiens
  CDR3 for alpha chain variable domain of TCR clone 252945 (TRAV29/DV5, TRAJ54)
LIQGAQKLVF

SEQ ID NO: 505890 - protein, 14 aa, Homo sapiens
  CDR3 for beta chain variable domain of TCR clone 252945 (TRBV19, TRBJ2-7)
CASNFRDTFTGMYF

SEQ ID NO: 505891 - protein, 13 aa, Homo sapiens
  CDR3 for alpha chain variable domain of TCR clone 252946 (TRAV2, TRAJ29)
CAAGKSGNTPLVF

SEQ ID NO: 505892 - protein, 15 aa, Homo sapiens
  CDR3 for beta chain variable domain of TCR clone 252946 (TRBV28, TRBJ2-7)
CASSLEAYPIYEQYF

SEQ ID NO: 505893 - protein, 13 aa, Homo sapiens
  CDR3 for alpha chain variable domain of TCR clone 252947 (TRAV21, TRAJ15)
CAVRNQAGTALIF

SEQ ID NO: 505894 - protein, 16 aa, Homo sapiens
  CDR3 for beta chain variable domain of TCR clone 252947 (TRBV20-1, TRBJ2-5)
CSPGGTSGGYMETQYL

SEQ ID NO: 505895 - protein, 12 aa, Homo sapiens
  CDR3 for alpha chain variable domain of TCR clone 252948 (TRAV12-2, TRAJ7)
CAVMRGNNRIAF

SEQ ID NO: 505896 - protein, 12 aa, Homo sapiens
  CDR3 for beta chain variable domain of TCR clone 252948 (TRBV7-8, TRBJ2-7)
CASSLGDREQYF

SEQ ID NO: 505897 - protein, 13 aa, Homo sapiens
  CDR3 for alpha chain variable domain of TCR clone 252949 (TRAV8-6, TRAJ49)
CAVITNTGNQFYF

SEQ ID NO: 505898 - protein, 14 aa, Homo sapiens
  CDR3 for beta chain variable domain of TCR clone 252949 (TRBV15, TRBJ2-1)
CATSGVEDYNEQFF

SEQ ID NO: 505899 - protein, 14 aa, Homo sapiens
  CDR3 for alpha chain variable domain of TCR clone 252950 (TRAV12-3, TRAJ10)
SHLPLTGGGNKLTF

SEQ ID NO: 505900 - protein, 15 aa, Homo sapiens
  CDR3 for beta chain variable domain of TCR clone 252950 (TRBV7-6, TRBJ1-5)
CASSQSSGINQAQHF

SEQ ID NO: 505901 - protein, 12 aa, Homo sapiens
  CDR3 for alpha chain variable domain of TCR clone 252951 (TRAV21, TRAJ37)
CAVRGNTGKLIF

SEQ ID NO: 505902 - protein, 14 aa, Homo sapiens
  CDR3 for beta chain variable domain of TCR clone 252951 (TRBV7-2, TRBJ2-1)
CASSFGTSYGEQFF

SEQ ID NO: 505903 - protein, 16 aa, Homo sapiens
  CDR3 for alpha chain variable domain of TCR clone 252952 (TRAV17, TRAJ53)
CATDALSGGSNDKLTF

SEQ ID NO: 505904 - protein, 12 aa, Homo sapiens
  CDR3 for beta chain variable domain of TCR clone 252952 (TRBV5-1, TRBJ2-7)
CASSCRGYEQYF

SEQ ID NO: 505905 - protein, 14 aa, Homo sapiens
  CDR3 for alpha chain variable domain of TCR clone 252953 (TRAV1-2, TRAJ16)
CAVNRFSDGQKLLF

SEQ ID NO: 505906 - protein, 14 aa, Homo sapiens
  CDR3 for beta chain variable domain of TCR clone 252953 (TRBV20-1, TRBJ1-5)
CSAPGTGVGQHQHF

SEQ ID NO: 505907 - protein, 18 aa, Homo sapiens
  CDR3 for alpha chain variable domain of TCR clone 252954 (TRAV26-1, TRAJ5)
CIVRVVPPRDTGRRALTF

SEQ ID NO: 505908 - protein, 15 aa, Homo sapiens
  CDR3 for beta chain variable domain of TCR clone 252954 (TRBV7-9, TRBJ2-7)
CASSLPMGQANEQYI

SEQ ID NO: 505909 - protein, 15 aa, Homo sapiens
  CDR3 for alpha chain variable domain of TCR clone 252955 (TRAV27, TRAJ38)
CAARRNAGNNRKLVW

SEQ ID NO: 505910 - protein, 16 aa, Homo sapiens
  CDR3 for beta chain variable domain of TCR clone 252955 (TRBV27, TRBJ2-2)
CASSFRGLVRTGELFF

SEQ ID NO: 505911 - protein, 15 aa, Homo sapiens
  CDR3 for alpha chain variable domain of TCR clone 252956 (TRAV12-3, TRAJ6)
CAMSATTGGSYIHTF

SEQ ID NO: 505912 - protein, 16 aa, Homo sapiens
  CDR3 for beta chain variable domain of TCR clone 252956 (TRBV20-1, TRBJ1-2)
CSALMGQGVANYGYTF

SEQ ID NO: 505913 - protein, 14 aa, Homo sapiens
  CDR3 for alpha chain variable domain of TCR clone 252957 (TRAV9-2, TRAJ39)
CGLYIYNAGNMLTF

SEQ ID NO: 505914 - protein, 13 aa, Homo sapiens
  CDR3 for beta chain variable domain of TCR clone 252957 (TRBV19, TRBJ1-2)
CASSVPGQDGYTF

SEQ ID NO: 505915 - protein, 16 aa, Homo sapiens
  CDR3 for alpha chain variable domain of TCR clone 252958 (TRAV12-2, TRAJ52)
CRLANAGGTSYGKLTF

SEQ ID NO: 505916 - protein, 14 aa, Homo sapiens
  CDR3 for beta chain variable domain of TCR clone 252958 (TRBV7-9, TRBJ2-5)
CASSLDTAQETQYF

SEQ ID NO: 505917 - protein, 14 aa, Homo sapiens
  CDR3 for alpha chain variable domain of TCR clone 252959 (TRAV38-1, TRAJ45)
CASHSGGGADGLTF

SEQ ID NO: 505918 - protein, 14 aa, Homo sapiens
  CDR3 for beta chain variable domain of TCR clone 252959 (TRBV18, TRBJ2-2)
CASSPGQNTGELFF

SEQ ID NO: 505919 - protein, 12 aa, Homo sapiens
  CDR3 for alpha chain variable domain of TCR clone 252960 (TRAV36/DV7, TRAJ54)
CAVVRGAQKLVF

SEQ ID NO: 505920 - protein, 13 aa, Homo sapiens
  CDR3 for beta chain variable domain of TCR clone 252960 (TRBV19, TRBJ1-3)
CASRLSLGNTIYF

SEQ ID NO: 505921 - protein, 13 aa, Homo sapiens
  CDR3 for alpha chain variable domain of TCR clone 252961 (TRAV3, TRAJ17)
CSPRGAAGNKLTF

SEQ ID NO: 505922 - protein, 16 aa, Homo sapiens
  CDR3 for beta chain variable domain of TCR clone 252961 (TRBV7-6, TRBJ2-1)
CASSAPGPSSYNEQFF

SEQ ID NO: 505923 - protein, 16 aa, Homo sapiens
  CDR3 for alpha chain variable domain of TCR clone 252962 (TRAV29/DV5, TRAJ28)
CAADAYSGAGSYQLPF

SEQ ID NO: 505924 - protein, 15 aa, Homo sapiens
  CDR3 for beta chain variable domain of TCR clone 252962 (TRBV24-1, TRBJ1-4)
CATSDPQGADEKLFF

SEQ ID NO: 505925 - protein, 13 aa, Homo sapiens
  CDR3 for alpha chain variable domain of TCR clone 252963 (TRAV2, TRAJ40)
CAVVTSGTYKYIF

SEQ ID NO: 505926 - protein, 15 aa, Homo sapiens
  CDR3 for beta chain variable domain of TCR clone 252963 (TRBV11-3, TRBJ2-3)
CASLKDGRQGDTQYF

SEQ ID NO: 505927 - protein, 12 aa, Homo sapiens
  CDR3 for alpha chain variable domain of TCR clone 252964 (TRAV25, TRAJ33)
CAGPDSNYQLIW

SEQ ID NO: 505928 - protein, 11 aa, Homo sapiens
  CDR3 for beta chain variable domain of TCR clone 252964 (TRBV12-4, TRBJ2-3)
CASTATDTQYF

SEQ ID NO: 505929 - protein, 16 aa, Homo sapiens
  CDR3 for alpha chain variable domain of TCR clone 252965 (TRAV30, TRAJ24)
CGTEIADADSWGKFQF

SEQ ID NO: 505930 - protein, 14 aa, Homo sapiens
  CDR3 for beta chain variable domain of TCR clone 252965 (TRBV12-5, TRBJ2-5)
CASGSRTHQETHYF

SEQ ID NO: 505931 - protein, 12 aa, Homo sapiens
  CDR3 for alpha chain variable domain of TCR clone 252966 (TRAV21, TRAJ13)
PGPSGGYQKVTF

SEQ ID NO: 505932 - protein, 13 aa, Homo sapiens
  CDR3 for beta chain variable domain of TCR clone 252966 (TRBV2, TRBJ2-2)
CASRAWRTGELFF

SEQ ID NO: 505933 - protein, 18 aa, Homo sapiens
  CDR3 for alpha chain variable domain of TCR clone 252967 (TRAV21, TRAJ53)
CAVKGGENSGGSNYKLTF

SEQ ID NO: 505934 - protein, 14 aa, Homo sapiens
  CDR3 for beta chain variable domain of TCR clone 252967 (TRBV28, TRBJ2-5)
CASSSGTAQETQYF

SEQ ID NO: 505935 - protein, 14 aa, Homo sapiens
  CDR3 for alpha chain variable domain of TCR clone 252968 (TRAV8-3, TRAJ27)
CAGGGTTNAGKSTF

SEQ ID NO: 505936 - protein, 15 aa, Homo sapiens
  CDR3 for beta chain variable domain of TCR clone 252968 (TRBV11-3, TRBJ2-5)
CASSLRGRVQETQYF

SEQ ID NO: 505937 - protein, 17 aa, Homo sapiens
  CDR3 for alpha chain variable domain of TCR clone 252969 (TRAV26-1, TRAJ28)
CIVRVPDSGAGCYQLTF

SEQ ID NO: 505938 - protein, 17 aa, Homo sapiens
  CDR3 for beta chain variable domain of TCR clone 252969 (TRBV28, TRBJ2-7)
CASSPLPAGGKSYEQYF

SEQ ID NO: 505939 - protein, 12 aa, Homo sapiens
  CDR3 for alpha chain variable domain of TCR clone 252970 (TRAV12-3, TRAJ40)
CAMSSGTYKYIF

SEQ ID NO: 505940 - protein, 13 aa, Homo sapiens
  CDR3 for beta chain variable domain of TCR clone 252970 (TRBV4-1, TRBJ2-1)
CASSQAGGDEQFF

SEQ ID NO: 505941 - protein, 15 aa, Homo sapiens
  CDR3 for alpha chain variable domain of TCR clone 252971 (TRAV3, TRAJ4)
CAVRDGTGGYNKLIF

SEQ ID NO: 505942 - protein, 11 aa, Homo sapiens
  CDR3 for beta chain variable domain of TCR clone 252971 (TRBV7-8, TRBJ2-7)
CASSLSLEQYF

SEQ ID NO: 505943 - protein, 10 aa, Homo sapiens
  CDR3 for alpha chain variable domain of TCR clone 252972 (TRAV12-3, TRAJ18)
CAMSAEAQPW

SEQ ID NO: 505944 - protein, 15 aa, Homo sapiens
  CDR3 for beta chain variable domain of TCR clone 252972 (TRBV11-2, TRBJ2-1)
CASSLGTSGLNEQFF

SEQ ID NO: 505945 - protein, 12 aa, Homo sapiens
  CDR3 for alpha chain variable domain of TCR clone 252973 (TRAV16, TRAJ10)
CSRTGGGNKLTF

SEQ ID NO: 505946 - protein, 15 aa, Homo sapiens
  CDR3 for beta chain variable domain of TCR clone 252973 (TRBV11-2, TRBJ1-4)
CASSLNPDTTEKLFF

SEQ ID NO: 505947 - protein, 16 aa, Homo sapiens
  CDR3 for alpha chain variable domain of TCR clone 252974 (TRAV14/DV4, TRAJ20)
CAMREDRSRDDYKLSF

SEQ ID NO: 505948 - protein, 17 aa, Homo sapiens
  CDR3 for beta chain variable domain of TCR clone 252974 (TRBV15, TRBJ1-1)
CATSRVGGADGDTEAFF

SEQ ID NO: 505949 - protein, 14 aa, Homo sapiens
  CDR3 for alpha chain variable domain of TCR clone 252975 (TRAV12-3, TRAJ10)
GRLPLTGGGNKLTF

SEQ ID NO: 505950 - protein, 14 aa, Homo sapiens
  CDR3 for beta chain variable domain of TCR clone 252975 (TRBV6-1, TRBJ1-3)
CASVQGGGGNTIYI

SEQ ID NO: 505951 - protein, 12 aa, Homo sapiens
  CDR3 for alpha chain variable domain of TCR clone 252976 (TRAV12-3, TRAJ17)
CTMTLTGNKLTF

SEQ ID NO: 505952 - protein, 15 aa, Homo sapiens
  CDR3 for beta chain variable domain of TCR clone 252976 (TRBV20-1, TRBJ2-7)
CSARDRFSGMDEQYF

SEQ ID NO: 505953 - protein, 15 aa, Homo sapiens
  CDR3 for alpha chain variable domain of TCR clone 252977 (TRAV12-2, TRAJ32)
CAARWLRGATNKLIF

SEQ ID NO: 505954 - protein, 11 aa, Homo sapiens
  CDR3 for beta chain variable domain of TCR clone 252977 (TRBV29-1, TRBJ2-5)
CSEDRTGTQYF

SEQ ID NO: 505955 - protein, 12 aa, Homo sapiens
  CDR3 for alpha chain variable domain of TCR clone 252978 (TRAV8-3, TRAJ20)
CVVDFNDYKLSF

SEQ ID NO: 505956 - protein, 14 aa, Homo sapiens
  CDR3 for beta chain variable domain of TCR clone 252978 (TRBV5-1, TRBJ2-3)
CASSRGQGGGTQYF

SEQ ID NO: 505957 - protein, 23 aa, Homo sapiens
  CDR3 for alpha chain variable domain of TCR clone 252979 (TRAV16, TRAJ10)
CSRGRLSHVLLRSRTGGGNKLTF

SEQ ID NO: 505958 - protein, 15 aa, Homo sapiens
  CDR3 for beta chain variable domain of TCR clone 252979 (TRBV6-3, TRBJ2-7)
CASSSPGTVFYEQYF

SEQ ID NO: 505959 - protein, 15 aa, Homo sapiens
  CDR3 for alpha chain variable domain of TCR clone 252980 (TRAV23/DV6, TRAJ53)
CAASKLGSGGSNYTL

SEQ ID NO: 505960 - protein, 14 aa, Homo sapiens
  CDR3 for beta chain variable domain of TCR clone 252980 (TRBV7-9, TRBJ2-3)
CASSLEQGTNTQYF

SEQ ID NO: 505961 - protein, 13 aa, Homo sapiens
  CDR3 for alpha chain variable domain of TCR clone 252981 (TRAV12-3, TRAJ35)
CAMARGFGNVLHC

SEQ ID NO: 505962 - protein, 15 aa, Homo sapiens
  CDR3 for beta chain variable domain of TCR clone 252981 (TRBV20-1, TRBJ2-1)
CSARGSGTYYNEQFF

SEQ ID NO: 505963 - protein, 14 aa, Homo sapiens
  CDR3 for alpha chain variable domain of TCR clone 252982 (TRAV12-1, TRAJ33)
FVVNPYYINYQLIW

SEQ ID NO: 505964 - protein, 11 aa, Homo sapiens
  CDR3 for beta chain variable domain of TCR clone 252982 (TRBV7-6, TRBJ2-1)
CASSNYGEQFF

SEQ ID NO: 505965 - protein, 13 aa, Homo sapiens
  CDR3 for alpha chain variable domain of TCR clone 252983 (TRAV12-3, TRAJ13)
CAMSSGGYQKVTF

SEQ ID NO: 505966 - protein, 17 aa, Homo sapiens
  CDR3 for beta chain variable domain of TCR clone 252983 (TRBV4-1, TRBJ1-4)
CASSQEGPRWVEEKLFF

SEQ ID NO: 505967 - protein, 14 aa, Homo sapiens
  CDR3 for alpha chain variable domain of TCR clone 252984 (TRAV38-1, TRAJ40)
CALRPTSGTYKYIF

SEQ ID NO: 505968 - protein, 12 aa, Homo sapiens
  CDR3 for beta chain variable domain of TCR clone 252984 (TRBV4-1, TRBJ2-3)
CASSQGTDTQYF

SEQ ID NO: 505969 - protein, 13 aa, Homo sapiens
  CDR3 for alpha chain variable domain of TCR clone 252985 (TRAV21, TRAJ27)
CAARPGNAGKSTF

SEQ ID NO: 505970 - protein, 16 aa, Homo sapiens
  CDR3 for beta chain variable domain of TCR clone 252985 (TRBV20-1, TRBJ1-4)
CSAPGQGLLTNEKLFF

SEQ ID NO: 505971 - protein, 14 aa, Homo sapiens
  CDR3 for alpha chain variable domain of TCR clone 252986 (TRAV13-2, TRAJ6)
CAERGSGGSYIPTF

SEQ ID NO: 505972 - protein, 16 aa, Homo sapiens
  CDR3 for beta chain variable domain of TCR clone 252986 (TRBV27, TRBJ2-2)
CASSFRGLVRTGELFF

SEQ ID NO: 505973 - protein, 15 aa, Homo sapiens
  CDR3 for alpha chain variable domain of TCR clone 252987 (TRAV3, TRAJ13)
GAVRVYSGGYQKVTF

SEQ ID NO: 505974 - protein, 15 aa, Homo sapiens
  CDR3 for beta chain variable domain of TCR clone 252987 (TRBV5-7, TRBJ1-2)
CASSLGVAANYGYTF

SEQ ID NO: 505975 - protein, 13 aa, Homo sapiens
  CDR3 for alpha chain variable domain of TCR clone 252988 (TRAV35, TRAJ21)
CAGQLSNFNKFYF

SEQ ID NO: 505976 - protein, 16 aa, Homo sapiens
  CDR3 for beta chain variable domain of TCR clone 252988 (TRBV4-3, TRBJ2-2)
CASSHLRGSGTGELFF

SEQ ID NO: 505977 - protein, 17 aa, Homo sapiens
  CDR3 for alpha chain variable domain of TCR clone 252989 (TRAV13-1, TRAJ53)
CAASWKSSGGSNHKLTF

SEQ ID NO: 505978 - protein, 19 aa, Homo sapiens
  CDR3 for beta chain variable domain of TCR clone 252989 (TRBV7-9, TRBJ2-1)
CASSHNRGALLRSYNEQFF

SEQ ID NO: 505979 - protein, 13 aa, Homo sapiens
  CDR3 for alpha chain variable domain of TCR clone 252990 (TRAV3, TRAJ21)
CAVREPDFNKFFF

SEQ ID NO: 505980 - protein, 15 aa, Homo sapiens
  CDR3 for beta chain variable domain of TCR clone 252990 (TRBV3-1, TRBJ2-7)
CASSQAPSGSYEQYF

SEQ ID NO: 505981 - protein, 11 aa, Homo sapiens
  CDR3 for alpha chain variable domain of TCR clone 252991 (TRAV3, TRAJ21)
CAVGNFNKFYF

SEQ ID NO: 505982 - protein, 15 aa, Homo sapiens
  CDR3 for beta chain variable domain of TCR clone 252991 (TRBV19, TRBJ2-5)
CASSQLHGAGETQCF

SEQ ID NO: 505983 - protein, 12 aa, Homo sapiens
  CDR3 for alpha chain variable domain of TCR clone 252992 (TRAV27, TRAJ33)
CAGEDSNYQLIW

SEQ ID NO: 505984 - protein, 17 aa, Homo sapiens
  CDR3 for beta chain variable domain of TCR clone 252992 (TRBV7-3, TRBJ1-3)
CASSPLGRGTPGNTIDF

SEQ ID NO: 505985 - protein, 16 aa, Homo sapiens
  CDR3 for alpha chain variable domain of TCR clone 252993 (TRAV12-3, TRAJ18)
CAMRGSRGSTLGRLYF

SEQ ID NO: 505986 - protein, 19 aa, Homo sapiens
  CDR3 for beta chain variable domain of TCR clone 252993 (TRBV6-3, TRBJ2-7)
CASSYRTGLAGGVSGELYF

SEQ ID NO: 505987 - protein, 13 aa, Homo sapiens
  CDR3 for alpha chain variable domain of TCR clone 252994 (TRAV16, TRAJ47)
CALSRGYGNKLVF

SEQ ID NO: 505988 - protein, 16 aa, Homo sapiens
  CDR3 for beta chain variable domain of TCR clone 252994 (TRBV19, TRBJ2-1)
CANSKAGPSSYNEQFF

SEQ ID NO: 505989 - protein, 14 aa, Homo sapiens
  CDR3 for alpha chain variable domain of TCR clone 252995 (TRAV26-1, TRAJ38)
CIADNAGNNRNLIW

SEQ ID NO: 505990 - protein, 17 aa, Homo sapiens
  CDR3 for beta chain variable domain of TCR clone 252995 (TRBV7-9, TRBJ2-3)
CASSPTVAGDLTDTQYF

SEQ ID NO: 505991 - protein, 14 aa, Homo sapiens
  CDR3 for alpha chain variable domain of TCR clone 252996 (TRAV8-1, TRAJ4)
CAVKFSGGYNKLIF

SEQ ID NO: 505992 - protein, 22 aa, Homo sapiens
  CDR3 for beta chain variable domain of TCR clone 252996 (TRBV7-3, TRBJ2-5)
CASARDKVILRPRDPVLRARHA

SEQ ID NO: 505993 - protein, 14 aa, Homo sapiens
  CDR3 for alpha chain variable domain of TCR clone 252997 (TRAV1-2, TRAJ16)
CAVNRFSDVQKLLF

SEQ ID NO: 505994 - protein, 15 aa, Homo sapiens
  CDR3 for beta chain variable domain of TCR clone 252997 (TRBV3-1, TRBJ2-5)
CASSANLGGPETQYF

SEQ ID NO: 505995 - protein, 13 aa, Homo sapiens
  CDR3 for alpha chain variable domain of TCR clone 252998 (TRAV23/DV6, TRAJ58)
CAARLIRGSRLTF

SEQ ID NO: 505996 - protein, 13 aa, Homo sapiens
  CDR3 for beta chain variable domain of TCR clone 252998 (TRBV2, TRBJ1-6)
CSDSGSYNSPLHF

SEQ ID NO: 505997 - protein, 11 aa, Homo sapiens
  CDR3 for alpha chain variable domain of TCR clone 252999 (TRAV27, TRAJ45)
CAGAKEEVLTD

SEQ ID NO: 505998 - protein, 14 aa, Homo sapiens
  CDR3 for beta chain variable domain of TCR clone 252999 (TRBV7-9, TRBJ2-2)
CASSGLADTGELFF

SEQ ID NO: 505999 - protein, 11 aa, Homo sapiens
  CDR3 for alpha chain variable domain of TCR clone 253000 (TRAV1-1, TRAJ23)
CAVRQGGKLIF

SEQ ID NO: 506000 - protein, 14 aa, Homo sapiens
  CDR3 for beta chain variable domain of TCR clone 253000 (TRBV4-2, TRBJ1-2)
CASSPGGSNYGYTF

SEQ ID NO: 506001 - protein, 13 aa, Homo sapiens
  CDR3 for alpha chain variable domain of TCR clone 253001 (TRAV12-2, TRAJ20)
CAVYPSNDYKLSF

SEQ ID NO: 506002 - protein, 14 aa, Homo sapiens
  CDR3 for beta chain variable domain of TCR clone 253001 (TRBV5-5, TRBJ1-5)
CASSGQGVDQPQHF

SEQ ID NO: 506003 - protein, 15 aa, Homo sapiens
  CDR3 for alpha chain variable domain of TCR clone 253002 (TRAV3, TRAJ3)
CAVRARDSSASKIIF

SEQ ID NO: 506004 - protein, 18 aa, Homo sapiens
  CDR3 for beta chain variable domain of TCR clone 253002 (TRBV25-1, TRBJ1-2)
CASSGLQNGQGLIFGDTF

SEQ ID NO: 506005 - protein, 14 aa, Homo sapiens
  CDR3 for alpha chain variable domain of TCR clone 253003 (TRAV21, TRAJ35)
CAVMPIGFGNVLHC

SEQ ID NO: 506006 - protein, 12 aa, Homo sapiens
  CDR3 for beta chain variable domain of TCR clone 253003 (TRBV7-9, TRBJ2-7)
CASSIEREEQYF

SEQ ID NO: 506007 - protein, 14 aa, Homo sapiens
  CDR3 for alpha chain variable domain of TCR clone 253004 (TRAV1-2, TRAJ16)
CAVNRSSDGQKLLF

SEQ ID NO: 506008 - protein, 13 aa, Homo sapiens
  CDR3 for beta chain variable domain of TCR clone 253004 (TRBV12-4, TRBJ2-5)
CASSWGGSRTQYF

SEQ ID NO: 506009 - protein, 14 aa, Homo sapiens
  CDR3 for alpha chain variable domain of TCR clone 253005 (TRAV23/DV6, TRAJ13)
CAAMYSGGYQKVTF

SEQ ID NO: 506010 - protein, 14 aa, Homo sapiens
  CDR3 for beta chain variable domain of TCR clone 253005 (TRBV7-9, TRBJ2-1)
CASSPRDSLYESSS

SEQ ID NO: 506011 - protein, 12 aa, Homo sapiens
  CDR3 for alpha chain variable domain of TCR clone 253006 (TRAV35, TRAJ49)
CAGWNTGNQFYF

SEQ ID NO: 506012 - protein, 16 aa, Homo sapiens
  CDR3 for beta chain variable domain of TCR clone 253006 (TRBV5-1, TRBJ2-2)
CASSLWDTTNIGELFF

SEQ ID NO: 506013 - protein, 12 aa, Homo sapiens
  CDR3 for alpha chain variable domain of TCR clone 253007 (TRAV26-1, TRAJ48)
CIAVFGNEKLTF

SEQ ID NO: 506014 - protein, 17 aa, Homo sapiens
  CDR3 for beta chain variable domain of TCR clone 253007 (TRBV7-6, TRBJ2-1)
CASSFGLAGGTYNAQFF

SEQ ID NO: 506015 - protein, 15 aa, Homo sapiens
  CDR3 for alpha chain variable domain of TCR clone 253008 (TRAV21, TRAJ53)
CATLNSGGSNYKLTF

SEQ ID NO: 506016 - protein, 15 aa, Homo sapiens
  CDR3 for beta chain variable domain of TCR clone 253008 (TRBV5-1, TRBJ2-2)
CASSSQGGNTGGLFF

SEQ ID NO: 506017 - protein, 15 aa, Homo sapiens
  CDR3 for alpha chain variable domain of TCR clone 253009 (TRAV29/DV5, TRAJ53)
CAARYSGGINYKLTF

SEQ ID NO: 506018 - protein, 15 aa, Homo sapiens
  CDR3 for beta chain variable domain of TCR clone 253009 (TRBV28, TRBJ2-1)
CASSLGTRLYNEQFL

SEQ ID NO: 506019 - protein, 16 aa, Homo sapiens
  CDR3 for alpha chain variable domain of TCR clone 253010 (TRAV17, TRAJ36)
CATVSFNWGKQPLLWD

SEQ ID NO: 506020 - protein, 13 aa, Homo sapiens
  CDR3 for beta chain variable domain of TCR clone 253010 (TRBV4-1, TRBJ1-1)
SASSQLGTGEAFF

SEQ ID NO: 506021 - protein, 14 aa, Homo sapiens
  CDR3 for alpha chain variable domain of TCR clone 253011 (TRAV3, TRAJ37)
CAVKESGNTGKLIF

SEQ ID NO: 506022 - protein, 15 aa, Homo sapiens
  CDR3 for beta chain variable domain of TCR clone 253011 (TRBV18, TRBJ2-5)
CASSPDPGLQETQYF

SEQ ID NO: 506023 - protein, 14 aa, Homo sapiens
  CDR3 for alpha chain variable domain of TCR clone 253012 (TRAV17, TRAJ54)
CATDANQGAQKLVF

SEQ ID NO: 506024 - protein, 12 aa, Homo sapiens
  CDR3 for beta chain variable domain of TCR clone 253012 (TRBV6-3, TRBJ2-1)
CASSGSYNAQFF

SEQ ID NO: 506025 - protein, 14 aa, Homo sapiens
  CDR3 for alpha chain variable domain of TCR clone 253013 (TRAV21, TRAJ35)
CAVMPIGFGNVLHC

SEQ ID NO: 506026 - protein, 17 aa, Homo sapiens
  CDR3 for beta chain variable domain of TCR clone 253013 (TRBV11-3, TRBJ2-6)
CASSLDRTGSGANVLTF

SEQ ID NO: 506027 - protein, 15 aa, Homo sapiens
  CDR3 for alpha chain variable domain of TCR clone 253014 (TRAV3, TRAJ22)
CAVRDRGGSARQLTF

SEQ ID NO: 506028 - protein, 14 aa, Homo sapiens
  CDR3 for beta chain variable domain of TCR clone 253014 (TRBV12-5, TRBJ2-5)
CASGSRTHQENQYF

SEQ ID NO: 506029 - protein, 12 aa, Homo sapiens
  CDR3 for alpha chain variable domain of TCR clone 253015 (TRAV35, TRAJ23)
CCAHNQGGKLIF

SEQ ID NO: 506030 - protein, 16 aa, Homo sapiens
  CDR3 for beta chain variable domain of TCR clone 253015 (TRBV2, TRBJ1-4)
CASNLLQGATNEKLFS

SEQ ID NO: 506031 - protein, 12 aa, Homo sapiens
  CDR3 for alpha chain variable domain of TCR clone 253016 (TRAV13-1, TRAJ21)
CAAKEGFNKFYF

SEQ ID NO: 506032 - protein, 13 aa, Homo sapiens
  CDR3 for beta chain variable domain of TCR clone 253016 (TRBV7-3, TRBJ1-2)
CASSLKRGYGYTF

SEQ ID NO: 506033 - protein, 14 aa, Homo sapiens
  CDR3 for alpha chain variable domain of TCR clone 253017 (TRAV16, TRAJ40)
CALHESYYLRNLQI

SEQ ID NO: 506034 - protein, 12 aa, Homo sapiens
  CDR3 for beta chain variable domain of TCR clone 253017 (TRBV7-3, TRBJ2-3)
SASSSLTDTQYF

SEQ ID NO: 506035 - protein, 17 aa, Homo sapiens
  CDR3 for alpha chain variable domain of TCR clone 253018 (TRAV3, TRAJ6)
CAVRDGPRAGGSYLPTF

SEQ ID NO: 506036 - protein, 13 aa, Homo sapiens
  CDR3 for beta chain variable domain of TCR clone 253018 (TRBV7-9, TRBJ1-2)
CASSLKQNYGYTF

SEQ ID NO: 506037 - protein, 18 aa, Homo sapiens
  CDR3 for alpha chain variable domain of TCR clone 253019 (TRAV13-1, TRAJ52)
CAAKNPNAGGTSYGKLTF

SEQ ID NO: 506038 - protein, 15 aa, Homo sapiens
  CDR3 for beta chain variable domain of TCR clone 253019 (TRBV6-1, TRBJ2-3)
CASSERGGNTDTQYF

SEQ ID NO: 506039 - protein, 14 aa, Homo sapiens
  CDR3 for alpha chain variable domain of TCR clone 253020 (TRAV12-2, TRAJ40)
CAVKIPSGTYKYIF

SEQ ID NO: 506040 - protein, 13 aa, Homo sapiens
  CDR3 for beta chain variable domain of TCR clone 253020 (TRBV19, TRBJ2-1)
CASSMYRVNEQFF

SEQ ID NO: 506041 - protein, 13 aa, Homo sapiens
  CDR3 for alpha chain variable domain of TCR clone 253021 (TRAV12-1, TRAJ31)
CVVNMNNNARLMF

SEQ ID NO: 506042 - protein, 15 aa, Homo sapiens
  CDR3 for beta chain variable domain of TCR clone 253021 (TRBV4-1, TRBJ1-2)
CASSQGQEAAYGYTF

SEQ ID NO: 506043 - protein, 18 aa, Homo sapiens
  CDR3 for alpha chain variable domain of TCR clone 253022 (TRAV21, TRAJ52)
CAVRPSPAGGTSYGKLTF

SEQ ID NO: 506044 - protein, 19 aa, Homo sapiens
  CDR3 for beta chain variable domain of TCR clone 253022 (TRBV7-2, TRBJ2-3)
CASSFLSRNWGGGIDTQYF

SEQ ID NO: 506045 - protein, 18 aa, Homo sapiens
  CDR3 for alpha chain variable domain of TCR clone 253023 (TRAV16, TRAJ52)
CALSGVDAGGTSYGKLTF

SEQ ID NO: 506046 - protein, 16 aa, Homo sapiens
  CDR3 for beta chain variable domain of TCR clone 253023 (TRBV25-1, TRBJ2-7)
CASSELTGGGIYEQYF

SEQ ID NO: 506047 - protein, 17 aa, Homo sapiens
  CDR3 for alpha chain variable domain of TCR clone 253024 (TRAV8-1, TRAJ42)
CAVKWGNYGGSQGNLIF

SEQ ID NO: 506048 - protein, 15 aa, Homo sapiens
  CDR3 for beta chain variable domain of TCR clone 253024 (TRBV9, TRBJ1-6)
CASSVAGTGDSPRHF

SEQ ID NO: 506049 - protein, 12 aa, Homo sapiens
  CDR3 for alpha chain variable domain of TCR clone 253025 (TRAV12-3, TRAJ3)
CAIDSSASKLIF

SEQ ID NO: 506050 - protein, 15 aa, Homo sapiens
  CDR3 for beta chain variable domain of TCR clone 253025 (TRBV11-2, TRBJ2-1)
CASSLGTSGLNEQFF

SEQ ID NO: 506051 - protein, 14 aa, Homo sapiens
  CDR3 for alpha chain variable domain of TCR clone 253026 (TRAV13-1, TRAJ24)
CAASKADSWGKLQF

SEQ ID NO: 506052 - protein, 15 aa, Homo sapiens
  CDR3 for beta chain variable domain of TCR clone 253026 (TRBV7-9, TRBJ1-6)
CASSSPGRGNSPLHF

SEQ ID NO: 506053 - protein, 11 aa, Homo sapiens
  CDR3 for alpha chain variable domain of TCR clone 253027 (TRAV3, TRAJ17)
PRGAAGNKLTF

SEQ ID NO: 506054 - protein, 14 aa, Homo sapiens
  CDR3 for beta chain variable domain of TCR clone 253027 (TRBV5-1, TRBJ2-7)
CASSRGESLYEQYF

SEQ ID NO: 506055 - protein, 13 aa, Homo sapiens
  CDR3 for alpha chain variable domain of TCR clone 253028 (TRAV13-1, TRAJ43)
CAASKNNNNDMRF

SEQ ID NO: 506056 - protein, 16 aa, Homo sapiens
  CDR3 for beta chain variable domain of TCR clone 253028 (TRBV2, TRBJ1-1)
CASSPPNRGMNTEAFF

SEQ ID NO: 506057 - protein, 15 aa, Homo sapiens
  CDR3 for alpha chain variable domain of TCR clone 253029 (TRAV2, TRAJ15)
CAVEDRNQAGTALIF

SEQ ID NO: 506058 - protein, 13 aa, Homo sapiens
  CDR3 for beta chain variable domain of TCR clone 253029 (TRBV10-2, TRBJ2-1)
CASGASGDAKQFF

SEQ ID NO: 506059 - protein, 15 aa, Homo sapiens
  CDR3 for alpha chain variable domain of TCR clone 253030 (TRAV2, TRAJ24)
CAVEVLTDSWGQFQF

SEQ ID NO: 506060 - protein, 13 aa, Homo sapiens
  CDR3 for beta chain variable domain of TCR clone 253030 (TRBV10-2, TRBJ2-7)
CASGTSGGYEQYF

SEQ ID NO: 506061 - protein, 16 aa, Homo sapiens
  CDR3 for alpha chain variable domain of TCR clone 253031 (TRAV3, TRAJ10)
CAVRDMGAGGGNKPTF

SEQ ID NO: 506062 - protein, 13 aa, Homo sapiens
  CDR3 for beta chain variable domain of TCR clone 253031 (TRBV6-1, TRBJ1-1)
CASSRQGNTESFF

SEQ ID NO: 506063 - protein, 14 aa, Homo sapiens
  CDR3 for alpha chain variable domain of TCR clone 253032 (TRAV12-2, TRAJ17)
CTVLFKAAGNKLTF

SEQ ID NO: 506064 - protein, 17 aa, Homo sapiens
  CDR3 for beta chain variable domain of TCR clone 253032 (TRBV20-1, TRBJ2-2)
CSASGSGQGGLTGELFV

SEQ ID NO: 506065 - protein, 14 aa, Homo sapiens
  CDR3 for alpha chain variable domain of TCR clone 253033 (TRAV1-2, TRAJ16)
CAVSRFSDGQKLLF

SEQ ID NO: 506066 - protein, 15 aa, Homo sapiens
  CDR3 for beta chain variable domain of TCR clone 253033 (TRBV9, TRBJ1-6)
CASSVAGTGDSPLHI

SEQ ID NO: 506067 - protein, 15 aa, Homo sapiens
  CDR3 for alpha chain variable domain of TCR clone 253034 (TRAV8-6, TRAJ10)
CAVSSKGGGGNKLTF

SEQ ID NO: 506068 - protein, 18 aa, Homo sapiens
  CDR3 for beta chain variable domain of TCR clone 253034 (TRBV12-4, TRBJ2-4)
CASSRTWAVDVAKNIQYF

SEQ ID NO: 506069 - protein, 13 aa, Homo sapiens
  CDR3 for alpha chain variable domain of TCR clone 253035 (TRAV2, TRAJ40)
CAVVTSGTYKYIF

SEQ ID NO: 506070 - protein, 15 aa, Homo sapiens
  CDR3 for beta chain variable domain of TCR clone 253035 (TRBV5-5, TRBJ1-5)
CASSSTPGSNQPQHF

SEQ ID NO: 506071 - protein, 17 aa, Homo sapiens
  CDR3 for alpha chain variable domain of TCR clone 253036 (TRAV13-1, TRAJ28)
CAASPPYSGAGSYQLTF

SEQ ID NO: 506072 - protein, 14 aa, Homo sapiens
  CDR3 for beta chain variable domain of TCR clone 253036 (TRBV6-3, TRBJ2-2)
CQQFFSDTTGELFF

SEQ ID NO: 506073 - protein, 15 aa, Homo sapiens
  CDR3 for alpha chain variable domain of TCR clone 253037 (TRAV1-2, TRAJ8)
CAVRDRNTGFQKLVF

SEQ ID NO: 506074 - protein, 13 aa, Homo sapiens
  CDR3 for beta chain variable domain of TCR clone 253037 (TRBV5-7, TRBJ2-1)
CASSLVESGEQFF

SEQ ID NO: 506075 - protein, 14 aa, Homo sapiens
  CDR3 for alpha chain variable domain of TCR clone 253038 (TRAV12-3, TRAJ9)
CEMSPNTGGLKTIF

SEQ ID NO: 506076 - protein, 12 aa, Homo sapiens
  CDR3 for beta chain variable domain of TCR clone 253038 (TRBV19, TRBJ1-5)
CASSIAQQPQHF

SEQ ID NO: 506077 - protein, 13 aa, Homo sapiens
  CDR3 for alpha chain variable domain of TCR clone 253039 (TRAV13-1, TRAJ53)
CAASKGSNYKLTF

SEQ ID NO: 506078 - protein, 12 aa, Homo sapiens
  CDR3 for beta chain variable domain of TCR clone 253039 (TRBV7-8, TRBJ2-7)
CASSLGDREQYF

SEQ ID NO: 506079 - protein, 13 aa, Homo sapiens
  CDR3 for alpha chain variable domain of TCR clone 253040 (TRAV13-2, TRAJ11)
CAENYSGYSTLTF

SEQ ID NO: 506080 - protein, 13 aa, Homo sapiens
  CDR3 for beta chain variable domain of TCR clone 253040 (TRBV12-4, TRBJ1-4)
CASAKGHNEKLFF

SEQ ID NO: 506081 - protein, 13 aa, Homo sapiens
  CDR3 for alpha chain variable domain of TCR clone 253041 (TRAV12-3, TRAJ40)
CAMSDSGTYKYVF

SEQ ID NO: 506082 - protein, 22 aa, Homo sapiens
  CDR3 for beta chain variable domain of TCR clone 253041 (TRBV14, TRBJ1-5)
CASSQDGVTPYLPPIGNQPQHF

SEQ ID NO: 506083 - protein, 13 aa, Homo sapiens
  CDR3 for alpha chain variable domain of TCR clone 253042 (TRAV8-6, TRAJ40)
CAVSVTGTYKYIF

SEQ ID NO: 506084 - protein, 14 aa, Homo sapiens
  CDR3 for beta chain variable domain of TCR clone 253042 (TRBV4-1, TRBJ2-2)
CASSQAVNTGELFF

SEQ ID NO: 506085 - protein, 13 aa, Homo sapiens
  CDR3 for alpha chain variable domain of TCR clone 253043 (TRAV8-3, TRAJ28)
CAVGAVGSYQLTF

SEQ ID NO: 506086 - protein, 16 aa, Homo sapiens
  CDR3 for beta chain variable domain of TCR clone 253043 (TRBV19, TRBJ2-1)
CASSKAGPISYNEQFF

SEQ ID NO: 506087 - protein, 14 aa, Homo sapiens
  CDR3 for alpha chain variable domain of TCR clone 253044 (TRAV9-2, TRAJ39)
CALYIYNAGDMLTF

SEQ ID NO: 506088 - protein, 13 aa, Homo sapiens
  CDR3 for beta chain variable domain of TCR clone 253044 (TRBV20-1, TRBJ1-1)
CSARGGGNTEAFF

SEQ ID NO: 506089 - protein, 11 aa, Homo sapiens
  CDR3 for alpha chain variable domain of TCR clone 253045 (TRAV2, TRAJ13)
CASAGYQKVTF

SEQ ID NO: 506090 - protein, 13 aa, Homo sapiens
  CDR3 for beta chain variable domain of TCR clone 253045 (TRBV27, TRBJ1-4)
CASSLMGDEKLFF

SEQ ID NO: 506091 - protein, 13 aa, Homo sapiens
  CDR3 for alpha chain variable domain of TCR clone 253046 (TRAV13-2, TRAJ53)
CAENMGSNYKLTF

SEQ ID NO: 506092 - protein, 15 aa, Homo sapiens
  CDR3 for beta chain variable domain of TCR clone 253046 (TRBV19, TRBJ2-2)
CQPISRDRGHRGAVF

SEQ ID NO: 506093 - protein, 13 aa, Homo sapiens
  CDR3 for alpha chain variable domain of TCR clone 253047 (TRAV12-2, TRAJ9)
CAVKWAGGFKTIF

SEQ ID NO: 506094 - protein, 15 aa, Homo sapiens
  CDR3 for beta chain variable domain of TCR clone 253047 (TRBV5-1, TRBJ1-4)
CASSLTADSDDKLFF

SEQ ID NO: 506095 - protein, 12 aa, Homo sapiens
  CDR3 for alpha chain variable domain of TCR clone 253048 (TRAV12-3, TRAJ17)
CAMTLTGNKLTF

SEQ ID NO: 506096 - protein, 15 aa, Homo sapiens
  CDR3 for beta chain variable domain of TCR clone 253048 (TRBV20-1, TRBJ2-7)
CSARYRVTGMDEQYF

SEQ ID NO: 506097 - protein, 14 aa, Homo sapiens
  CDR3 for alpha chain variable domain of TCR clone 253049 (TRAV3, TRAJ33)
CAVRDMGSNYQLIW

SEQ ID NO: 506098 - protein, 17 aa, Homo sapiens
  CDR3 for beta chain variable domain of TCR clone 253049 (TRBV19, TRBJ2-1)
CSSSIWSAQPTHNEQFF

SEQ ID NO: 506099 - protein, 15 aa, Homo sapiens
  CDR3 for alpha chain variable domain of TCR clone 253050 (TRAV8-4, TRAJ36)
CAVRKSWTGANNLFF

SEQ ID NO: 506100 - protein, 11 aa, Homo sapiens
  CDR3 for beta chain variable domain of TCR clone 253050 (TRBV6-3, TRBJ2-3)
CATGQADTQYF

SEQ ID NO: 506101 - protein, 15 aa, Homo sapiens
  CDR3 for alpha chain variable domain of TCR clone 253051 (TRAV3, TRAJ5)
CAVRDLGTGRGALTF

SEQ ID NO: 506102 - protein, 13 aa, Homo sapiens
  CDR3 for beta chain variable domain of TCR clone 253051 (TRBV12-4, TRBJ2-7)
CASSPTETYEQYF

SEQ ID NO: 506103 - protein, 15 aa, Homo sapiens
  CDR3 for alpha chain variable domain of TCR clone 253052 (TRAV25, TRAJ52)
CAGRPGGTSYGKLTF

SEQ ID NO: 506104 - protein, 17 aa, Homo sapiens
  CDR3 for beta chain variable domain of TCR clone 253052 (TRBV7-3, TRBJ2-3)
CASSPRGQGYGTDTQYF

SEQ ID NO: 506105 - protein, 10 aa, Homo sapiens
  CDR3 for alpha chain variable domain of TCR clone 253053 (TRAV36/DV7, TRAJ31)
CAVGEARLMF

SEQ ID NO: 506106 - protein, 13 aa, Homo sapiens
  CDR3 for beta chain variable domain of TCR clone 253053 (TRBV27, TRBJ1-4)
CASSLMGDEKLFF

SEQ ID NO: 506107 - protein, 15 aa, Homo sapiens
  CDR3 for alpha chain variable domain of TCR clone 253054 (TRAV8-3, TRAJ21)
CAVGPTTSTNFTLDL

SEQ ID NO: 506108 - protein, 16 aa, Homo sapiens
  CDR3 for beta chain variable domain of TCR clone 253054 (TRBV19, TRBJ2-1)
CASSMGGGSSYNEQFF

SEQ ID NO: 506109 - protein, 14 aa, Homo sapiens
  CDR3 for alpha chain variable domain of TCR clone 253055 (TRAV20, TRAJ56)
CAVQFGGANSKLTF

SEQ ID NO: 506110 - protein, 13 aa, Homo sapiens
  CDR3 for beta chain variable domain of TCR clone 253055 (TRBV7-2, TRBJ2-2)
CASSSVRAGELFF

SEQ ID NO: 506111 - protein, 14 aa, Homo sapiens
  CDR3 for alpha chain variable domain of TCR clone 253056 (TRAV12-2, TRAJ13)
CAVKKTGGYQKVTF

SEQ ID NO: 506112 - protein, 16 aa, Homo sapiens
  CDR3 for beta chain variable domain of TCR clone 253056 (TRBV15, TRBJ2-5)
CATSSYLEAAQETQYF

SEQ ID NO: 506113 - protein, 16 aa, Homo sapiens
  CDR3 for alpha chain variable domain of TCR clone 253057 (TRAV16, TRAJ4)
CALSRMFSCGYNKLIF

SEQ ID NO: 506114 - protein, 16 aa, Homo sapiens
  CDR3 for beta chain variable domain of TCR clone 253057 (TRBV24-1, TRBJ2-3)
CATSDPGTGPTDTQYF

SEQ ID NO: 506115 - protein, 12 aa, Homo sapiens
  CDR3 for alpha chain variable domain of TCR clone 253058 (TRAV36/DV7, TRAJ50)
CAVEPENLLRQG

SEQ ID NO: 506116 - protein, 13 aa, Homo sapiens
  CDR3 for beta chain variable domain of TCR clone 253058 (TRBV20-1, TRBJ1-1)
CSARGGGNTEAFF

SEQ ID NO: 506117 - protein, 16 aa, Homo sapiens
  CDR3 for alpha chain variable domain of TCR clone 253059 (TRAV30, TRAJ24)
CGTEIVDAESWGKFQF

SEQ ID NO: 506118 - protein, 14 aa, Homo sapiens
  CDR3 for beta chain variable domain of TCR clone 253059 (TRBV7-2, TRBJ2-7)
CASRSQGAAYEQYF

SEQ ID NO: 506119 - protein, 14 aa, Homo sapiens
  CDR3 for alpha chain variable domain of TCR clone 253060 (TRAV12-2, TRAJ17)
CAVLFKAAGNKLTF

SEQ ID NO: 506120 - protein, 15 aa, Homo sapiens
  CDR3 for beta chain variable domain of TCR clone 253060 (TRBV20-1, TRBJ2-7)
GSARDRVSGMDEQYF

SEQ ID NO: 506121 - protein, 14 aa, Homo sapiens
  CDR3 for alpha chain variable domain of TCR clone 253061 (TRAV12-3, TRAJ10)
SHLPLTGGGNKLTF

SEQ ID NO: 506122 - protein, 15 aa, Homo sapiens
  CDR3 for beta chain variable domain of TCR clone 253061 (TRBV19, TRBJ2-1)
CASIKGRGPYNEQFF

SEQ ID NO: 506123 - protein, 14 aa, Homo sapiens
  CDR3 for alpha chain variable domain of TCR clone 253062 (TRAV14/DV4, TRAJ15)
CAMRRDQAGTALIF

SEQ ID NO: 506124 - protein, 11 aa, Homo sapiens
  CDR3 for beta chain variable domain of TCR clone 253062 (TRBV7-2, TRBJ2-7)
CASSLGLWQYF

SEQ ID NO: 506125 - protein, 13 aa, Homo sapiens
  CDR3 for alpha chain variable domain of TCR clone 253063 (TRAV13-1, TRAJ40)
CAARTSGTYKYIF

SEQ ID NO: 506126 - protein, 17 aa, Homo sapiens
  CDR3 for beta chain variable domain of TCR clone 253063 (TRBV4-1, TRBJ2-3)
CARSQGYVSGGTDTQYF

SEQ ID NO: 506127 - protein, 15 aa, Homo sapiens
  CDR3 for alpha chain variable domain of TCR clone 253064 (TRAV29/DV5, TRAJ53)
CAARYSGGSNYQLTF

SEQ ID NO: 506128 - protein, 15 aa, Homo sapiens
  CDR3 for beta chain variable domain of TCR clone 253064 (TRBV28, TRBJ2-1)
CASSLGTRLYNEQFF

SEQ ID NO: 506129 - protein, 16 aa, Homo sapiens
  CDR3 for alpha chain variable domain of TCR clone 253065 (TRAV12-2, TRAJ28)
CAVITDSGAGSYKLTF

SEQ ID NO: 506130 - protein, 12 aa, Homo sapiens
  CDR3 for beta chain variable domain of TCR clone 253065 (TRBV9, TRBJ2-2)
CASSLVTGELFF

SEQ ID NO: 506131 - protein, 15 aa, Homo sapiens
  CDR3 for alpha chain variable domain of TCR clone 253066 (TRAV26-1, TRAJ48)
CIVRVGDFGNEKLTF

SEQ ID NO: 506132 - protein, 16 aa, Homo sapiens
  CDR3 for beta chain variable domain of TCR clone 253066 (TRBV4-1, TRBJ2-3)
CTSSRRAGGLTDTQYF

SEQ ID NO: 506133 - protein, 11 aa, Homo sapiens
  CDR3 for alpha chain variable domain of TCR clone 253067 (TRAV3, TRAJ21)
CAVGNFNKFYF

SEQ ID NO: 506134 - protein, 16 aa, Homo sapiens
  CDR3 for beta chain variable domain of TCR clone 253067 (TRBV19, TRBJ1-3)
CASSMDRALPGNTIYF

SEQ ID NO: 506135 - protein, 15 aa, Homo sapiens
  CDR3 for alpha chain variable domain of TCR clone 253068 (TRAV8-2, TRAJ40)
CVVLGTTSGTYTYIF

SEQ ID NO: 506136 - protein, 16 aa, Homo sapiens
  CDR3 for beta chain variable domain of TCR clone 253068 (TRBV7-3, TRBJ2-1)
CASSLEGYRAYNEQFF

SEQ ID NO: 506137 - protein, 12 aa, Homo sapiens
  CDR3 for alpha chain variable domain of TCR clone 253069 (TRAV13-1, TRAJ48)
CAANFGNEKLTF

SEQ ID NO: 506138 - protein, 13 aa, Homo sapiens
  CDR3 for beta chain variable domain of TCR clone 253069 (TRBV28, TRBJ1-5)
CASSDRGNQPQHF

SEQ ID NO: 506139 - protein, 17 aa, Homo sapiens
  CDR3 for alpha chain variable domain of TCR clone 253070 (TRAV3, TRAJ6)
CAVRDGPRAGGSYIPTF

SEQ ID NO: 506140 - protein, 14 aa, Homo sapiens
  CDR3 for beta chain variable domain of TCR clone 253070 (TRBV7-2, TRBJ2-7)
CAKSPKTSFYEQYF

SEQ ID NO: 506141 - protein, 13 aa, Homo sapiens
  CDR3 for alpha chain variable domain of TCR clone 253071 (TRAV8-3, TRAJ28)
CAVGAVGSYQLTF

SEQ ID NO: 506142 - protein, 13 aa, Homo sapiens
  CDR3 for beta chain variable domain of TCR clone 253071 (TRBV12-4, TRBJ2-7)
CASSLSGVYEQYF

SEQ ID NO: 506143 - protein, 11 aa, Homo sapiens
  CDR3 for alpha chain variable domain of TCR clone 253072 (TRAV3, TRAJ21)
RSVGNFNKFYF

SEQ ID NO: 506144 - protein, 14 aa, Homo sapiens
  CDR3 for beta chain variable domain of TCR clone 253072 (TRBV29-1, TRBJ2-2)
CSGRGSGNTGELFF

SEQ ID NO: 506145 - protein, 12 aa, Homo sapiens
  CDR3 for alpha chain variable domain of TCR clone 253073 (TRAV8-3, TRAJ20)
CAVEFNDYKLSF

SEQ ID NO: 506146 - protein, 17 aa, Homo sapiens
  CDR3 for beta chain variable domain of TCR clone 253073 (TRBV7-8, TRBJ2-6)
CASSAGTGGAGANVLTF

SEQ ID NO: 506147 - protein, 15 aa, Homo sapiens
  CDR3 for alpha chain variable domain of TCR clone 253074 (TRAV4, TRAJ39)
CLVGPNNNAGNKLTF

SEQ ID NO: 506148 - protein, 14 aa, Homo sapiens
  CDR3 for beta chain variable domain of TCR clone 253074 (TRBV11-2, TRBJ2-5)
CASSRTGGIETQYF

SEQ ID NO: 506149 - protein, 14 aa, Homo sapiens
  CDR3 for alpha chain variable domain of TCR clone 253075 (TRAV26-2, TRAJ31)
CILIPGNNNARLMF

SEQ ID NO: 506150 - protein, 16 aa, Homo sapiens
  CDR3 for beta chain variable domain of TCR clone 253075 (TRBV19, TRBJ2-2)
CASSFPGQGLAGELFF

SEQ ID NO: 506151 - protein, 12 aa, Homo sapiens
  CDR3 for alpha chain variable domain of TCR clone 253076 (TRAV23/DV6, TRAJ32)
CSMPGATNTLIF

SEQ ID NO: 506152 - protein, 17 aa, Homo sapiens
  CDR3 for beta chain variable domain of TCR clone 253076 (TRBV13, TRBJ2-3)
CASSSLGTSGLTDTQYF

SEQ ID NO: 506153 - protein, 15 aa, Homo sapiens
  CDR3 for alpha chain variable domain of TCR clone 253077 (TRAV12-3, TRAJ49)
CAMAVTPNTGNQLYF

SEQ ID NO: 506154 - protein, 18 aa, Homo sapiens
  CDR3 for beta chain variable domain of TCR clone 253077 (TRBV4-1, TRBJ1-5)
CASSQGPRGQGLTQPQHF

SEQ ID NO: 506155 - protein, 10 aa, Homo sapiens
  CDR3 for alpha chain variable domain of TCR clone 253078 (TRAV36/DV7, TRAJ31)
CAVGEARLMF

SEQ ID NO: 506156 - protein, 17 aa, Homo sapiens
  CDR3 for beta chain variable domain of TCR clone 253078 (TRBV28, TRBJ2-1)
CASSSARQALTYNEQFF

SEQ ID NO: 506157 - protein, 15 aa, Homo sapiens
  CDR3 for alpha chain variable domain of TCR clone 253079 (TRAV13-2, TRAJ50)
CAEEPLTTSYDKVIF

SEQ ID NO: 506158 - protein, 15 aa, Homo sapiens
  CDR3 for beta chain variable domain of TCR clone 253079 (TRBV20-1, TRBJ1-5)
CSARGSVDSNQPQHF

SEQ ID NO: 506159 - protein, 17 aa, Homo sapiens
  CDR3 for alpha chain variable domain of TCR clone 253080 (TRAV3, TRAJ38)
CAVRDCLNAGNNRKLSW

SEQ ID NO: 506160 - protein, 13 aa, Homo sapiens
  CDR3 for beta chain variable domain of TCR clone 253080 (TRBV23-1, TRBJ1-4)
CASRGKFNEKLFF

SEQ ID NO: 506161 - protein, 14 aa, Homo sapiens
  CDR3 for alpha chain variable domain of TCR clone 253081 (TRAV8-1, TRAJ30)
CAVNGYQRDDKIIF

SEQ ID NO: 506162 - protein, 16 aa, Homo sapiens
  CDR3 for beta chain variable domain of TCR clone 253081 (TRBV7-3, TRBJ2-1)
CASSLVSGSSNNEQFF

SEQ ID NO: 506163 - protein, 14 aa, Homo sapiens
  CDR3 for alpha chain variable domain of TCR clone 253082 (TRAV26-1, TRAJ38)
GIADNAGNNRKLIL

SEQ ID NO: 506164 - protein, 13 aa, Homo sapiens
  CDR3 for beta chain variable domain of TCR clone 253082 (TRBV20-1, TRBJ1-1)
CSARGGGNTEAFF

SEQ ID NO: 506165 - protein, 13 aa, Homo sapiens
  CDR3 for alpha chain variable domain of TCR clone 253083 (TRAV17, TRAJ9)
CSTDGTGGFKTIF

SEQ ID NO: 506166 - protein, 17 aa, Homo sapiens
  CDR3 for beta chain variable domain of TCR clone 253083 (TRBV6-5, TRBJ2-7)
CASSYSFWGQGSYEQYF

SEQ ID NO: 506167 - protein, 15 aa, Homo sapiens
  CDR3 for alpha chain variable domain of TCR clone 253084 (TRAV8-1, TRAJ6)
CAVNTPPGGSYIPTF

SEQ ID NO: 506168 - protein, 14 aa, Homo sapiens
  CDR3 for beta chain variable domain of TCR clone 253084 (TRBV12-4, TRBJ2-1)
CASSLGQGACEQFF

SEQ ID NO: 506169 - protein, 14 aa, Homo sapiens
  CDR3 for alpha chain variable domain of TCR clone 253085 (TRAV20, TRAJ29)
CAVQAWVGNTPLVF

SEQ ID NO: 506170 - protein, 15 aa, Homo sapiens
  CDR3 for beta chain variable domain of TCR clone 253085 (TRBV29-1, TRBJ2-7)
CSVEFFDRGSYEQFF

SEQ ID NO: 506171 - protein, 14 aa, Homo sapiens
  CDR3 for alpha chain variable domain of TCR clone 253086 (TRAV2, TRAJ9)
CAVEDRSGGFKTIF

SEQ ID NO: 506172 - protein, 16 aa, Homo sapiens
  CDR3 for beta chain variable domain of TCR clone 253086 (TRBV11-2, TRBJ2-7)
CASSPLAGGPRYEQYF

SEQ ID NO: 506173 - protein, 23 aa, Homo sapiens
  CDR3 for alpha chain variable domain of TCR clone 253087 (TRAV26-1, )
CIADNTGNNHIQKPDPAVYQLRD

SEQ ID NO: 506174 - protein, 13 aa, Homo sapiens
  CDR3 for beta chain variable domain of TCR clone 253087 (TRBV5-4, TRBJ1-1)
CASSVDLGTEAFF

SEQ ID NO: 506175 - protein, 12 aa, Homo sapiens
  CDR3 for alpha chain variable domain of TCR clone 253088 (TRAV13-1, TRAJ21)
CAAKEGFNKFYF

SEQ ID NO: 506176 - protein, 15 aa, Homo sapiens
  CDR3 for beta chain variable domain of TCR clone 253088 (TRBV25-1, TRBJ1-4)
CASSPGDSANDKLFF

SEQ ID NO: 506177 - protein, 14 aa, Homo sapiens
  CDR3 for alpha chain variable domain of TCR clone 253089 (TRAV23/DV6, TRAJ40)
CAASLTSGTYKYIF

SEQ ID NO: 506178 - protein, 16 aa, Homo sapiens
  CDR3 for beta chain variable domain of TCR clone 253089 (TRBV11-2, TRBJ2-1)
CASSLASGTSYNEQFF

SEQ ID NO: 506179 - protein, 15 aa, Homo sapiens
  CDR3 for alpha chain variable domain of TCR clone 253090 (TRAV21, TRAJ24)
CAARSSTGSWGILQF

SEQ ID NO: 506180 - protein, 13 aa, Homo sapiens
  CDR3 for beta chain variable domain of TCR clone 253090 (TRBV10-3, TRBJ2-7)
CASKLAVNYEQYF

SEQ ID NO: 506181 - protein, 16 aa, Homo sapiens
  CDR3 for alpha chain variable domain of TCR clone 253091 (TRAV17, TRAJ9)
CATGEWGGTGGFKTIF

SEQ ID NO: 506182 - protein, 12 aa, Homo sapiens
  CDR3 for beta chain variable domain of TCR clone 253091 (TRBV11-2, TRBJ2-1)
CASSPGNNESSS

SEQ ID NO: 506183 - protein, 12 aa, Homo sapiens
  CDR3 for alpha chain variable domain of TCR clone 253092 (TRAV13-1, TRAJ21)
CAAFFNFNKFYF

SEQ ID NO: 506184 - protein, 16 aa, Homo sapiens
  CDR3 for beta chain variable domain of TCR clone 253092 (TRBV10-3, TRBJ1-6)
CAISERRGQGNSPLHF

SEQ ID NO: 506185 - protein, 15 aa, Homo sapiens
  CDR3 for alpha chain variable domain of TCR clone 253093 (TRAV8-4, TRAJ11)
CAVSRALSGYSTLTF

SEQ ID NO: 506186 - protein, 15 aa, Homo sapiens
  CDR3 for beta chain variable domain of TCR clone 253093 (TRBV3-1, TRBJ2-2)
CASSQDWTRAGELFF

SEQ ID NO: 506187 - protein, 13 aa, Homo sapiens
  CDR3 for alpha chain variable domain of TCR clone 253094 (TRAV12-3, TRAJ13)
CAMTSGGYQKVTF

SEQ ID NO: 506188 - protein, 20 aa, Homo sapiens
  CDR3 for beta chain variable domain of TCR clone 253094 (TRBV7-8, TRBJ2-2)
CASSHLFPGPTIHITGELFF

SEQ ID NO: 506189 - protein, 15 aa, Homo sapiens
  CDR3 for alpha chain variable domain of TCR clone 253095 (TRAV12-1, TRAJ44)
CVVFVNTGTASKLTF

SEQ ID NO: 506190 - protein, 16 aa, Homo sapiens
  CDR3 for beta chain variable domain of TCR clone 253095 (TRBV5-1, TRBJ2-1)
CASSGAGASDYNEQFF

SEQ ID NO: 506191 - protein, 13 aa, Homo sapiens
  CDR3 for alpha chain variable domain of TCR clone 253096 (TRAV16, TRAJ48)
FSPLNFGNEKLTL

SEQ ID NO: 506192 - protein, 11 aa, Homo sapiens
  CDR3 for beta chain variable domain of TCR clone 253096 (TRBV7-9, TRBJ2-3)
CASSPTDTQYF

SEQ ID NO: 506193 - protein, 11 aa, Homo sapiens
  CDR3 for alpha chain variable domain of TCR clone 253097 (TRAV8-4, TRAJ34)
CAVSWTDKLIF

SEQ ID NO: 506194 - protein, 14 aa, Homo sapiens
  CDR3 for beta chain variable domain of TCR clone 253097 (TRBV7-9, TRBJ2-3)
FASSLEDGTDTQYF

SEQ ID NO: 506195 - protein, 16 aa, Homo sapiens
  CDR3 for alpha chain variable domain of TCR clone 253098 (TRAV3, TRAJ22)
CAVRDMGSGSARQLTF

SEQ ID NO: 506196 - protein, 14 aa, Homo sapiens
  CDR3 for beta chain variable domain of TCR clone 253098 (TRBV25-1, TRBJ1-1)
CASTHLGGNTEAFF

SEQ ID NO: 506197 - protein, 13 aa, Homo sapiens
  CDR3 for alpha chain variable domain of TCR clone 253099 (TRAV13-1, TRAJ10)
CAPSREEETNSPL

SEQ ID NO: 506198 - protein, 11 aa, Homo sapiens
  CDR3 for beta chain variable domain of TCR clone 253099 (TRBV11-2, TRBJ2-2)
CASSLPGELFF

SEQ ID NO: 506199 - protein, 11 aa, Homo sapiens
  CDR3 for alpha chain variable domain of TCR clone 253100 (TRAV12-1, TRAJ21)
CVVYNFNKFYF

SEQ ID NO: 506200 - protein, 17 aa, Homo sapiens
  CDR3 for beta chain variable domain of TCR clone 253100 (TRBV11-2, TRBJ2-1)
CASSLYPPGVEYNEQFF

SEQ ID NO: 506201 - protein, 11 aa, Homo sapiens
  CDR3 for alpha chain variable domain of TCR clone 253101 (TRAV3, TRAJ17)
PRGAAGNKLTF

SEQ ID NO: 506202 - protein, 16 aa, Homo sapiens
  CDR3 for beta chain variable domain of TCR clone 253101 (TRBV7-6, TRBJ2-1)
CASSTPGPSSYNELFF

SEQ ID NO: 506203 - protein, 10 aa, Homo sapiens
  CDR3 for alpha chain variable domain of TCR clone 253102 (TRAV21, TRAJ31)
CAVDNARLMF

SEQ ID NO: 506204 - protein, 17 aa, Homo sapiens
  CDR3 for beta chain variable domain of TCR clone 253102 (TRBV20-1, TRBJ2-6)
CSARDRDRASGANVLTF

SEQ ID NO: 506205 - protein, 13 aa, Homo sapiens
  CDR3 for alpha chain variable domain of TCR clone 253103 (TRAV9-2, TRAJ53)
CALSGGSNFKMTF

SEQ ID NO: 506206 - protein, 17 aa, Homo sapiens
  CDR3 for beta chain variable domain of TCR clone 253103 (TRBV11-2, TRBJ2-1)
CASSLYPPGVEYNEQFF

SEQ ID NO: 506207 - protein, 16 aa, Homo sapiens
  CDR3 for alpha chain variable domain of TCR clone 253104 (TRAV21, TRAJ45)
CAVSWGSGGGADGLTF

SEQ ID NO: 506208 - protein, 14 aa, Homo sapiens
  CDR3 for beta chain variable domain of TCR clone 253104 (TRBV4-2, TRBJ1-2)
CASSPGGSKYGYTF

SEQ ID NO: 506209 - protein, 15 aa, Homo sapiens
  CDR3 for alpha chain variable domain of TCR clone 253105 (TRAV8-4, TRAJ47)
CAVSDPEEYGNKLVF

SEQ ID NO: 506210 - protein, 15 aa, Homo sapiens
  CDR3 for beta chain variable domain of TCR clone 253105 (TRBV11-2, TRBJ2-1)
CASSLVPDSYNEQFF

SEQ ID NO: 506211 - protein, 15 aa, Homo sapiens
  CDR3 for alpha chain variable domain of TCR clone 253106 (TRAV8-3, TRAJ27)
CAVCPSKTNAGKPTF

SEQ ID NO: 506212 - protein, 15 aa, Homo sapiens
  CDR3 for beta chain variable domain of TCR clone 253106 (TRBV7-2, TRBJ2-1)
CASSSGLAGGNEQFF

SEQ ID NO: 506213 - protein, 10 aa, Homo sapiens
  CDR3 for alpha chain variable domain of TCR clone 253107 (TRAV3, TRAJ30)
CAVREIEIIF

SEQ ID NO: 506214 - protein, 12 aa, Homo sapiens
  CDR3 for beta chain variable domain of TCR clone 253107 (TRBV7-8, TRBJ2-1)
CASSALAGRVFF

SEQ ID NO: 506215 - protein, 11 aa, Homo sapiens
  CDR3 for alpha chain variable domain of TCR clone 253108 (TRAV2, TRAJ13)
CASGGYQKVTF

SEQ ID NO: 506216 - protein, 14 aa, Homo sapiens
  CDR3 for beta chain variable domain of TCR clone 253108 (TRBV18, TRBJ1-2)
CSSSPDRVVYGYTF

SEQ ID NO: 506217 - protein, 11 aa, Homo sapiens
  CDR3 for alpha chain variable domain of TCR clone 253109 (TRAV2, TRAJ33)
CAVDSNYQLIW

SEQ ID NO: 506218 - protein, 12 aa, Homo sapiens
  CDR3 for beta chain variable domain of TCR clone 253109 (TRBV11-2, TRBJ2-1)
CASSPGNNEQFF

SEQ ID NO: 506219 - protein, 19 aa, Homo sapiens
  CDR3 for alpha chain variable domain of TCR clone 253110 (TRAV38-1, TRAJ53)
CAFMKHGLESGGSDYKLTF

SEQ ID NO: 506220 - protein, 13 aa, Homo sapiens
  CDR3 for beta chain variable domain of TCR clone 253110 (TRBV19, TRBJ2-7)
CASSPRQSYEQYF

SEQ ID NO: 506221 - protein, 12 aa, Homo sapiens
  CDR3 for alpha chain variable domain of TCR clone 253111 (TRAV1-2, TRAJ26)
CAVRYYGQNFVF

SEQ ID NO: 506222 - protein, 14 aa, Homo sapiens
  CDR3 for beta chain variable domain of TCR clone 253111 (TRBV11-1, TRBJ2-7)
CASSVRQGSYEQYF

SEQ ID NO: 506223 - protein, 12 aa, Homo sapiens
  CDR3 for alpha chain variable domain of TCR clone 253112 (TRAV21, TRAJ37)
CAVRGNTGKLIF

SEQ ID NO: 506224 - protein, 11 aa, Homo sapiens
  CDR3 for beta chain variable domain of TCR clone 253112 (TRBV2, TRBJ1-3)
CASSAGNTIYF

SEQ ID NO: 506225 - protein, 13 aa, Homo sapiens
  CDR3 for alpha chain variable domain of TCR clone 253113 (TRAV27, TRAJ41)
CAGEGNSGYALKF

SEQ ID NO: 506226 - protein, 14 aa, Homo sapiens
  CDR3 for beta chain variable domain of TCR clone 253113 (TRBV25-1, TRBJ1-1)
CASTHLGGNTEAFF

SEQ ID NO: 506227 - protein, 12 aa, Homo sapiens
  CDR3 for alpha chain variable domain of TCR clone 253114 (TRAV6, TRAJ4)
NMFSGGYNNLIF

SEQ ID NO: 506228 - protein, 13 aa, Homo sapiens
  CDR3 for beta chain variable domain of TCR clone 253114 (TRBV4-1, TRBJ2-1)
CASSQEVQYEQFV

SEQ ID NO: 506229 - protein, 13 aa, Homo sapiens
  CDR3 for alpha chain variable domain of TCR clone 253115 (TRAV21, TRAJ20)
CAVGLRVDYKLSF

SEQ ID NO: 506230 - protein, 15 aa, Homo sapiens
  CDR3 for beta chain variable domain of TCR clone 253115 (TRBV29-1, TRBJ2-7)
CSVEFFDRGSYEQYF

SEQ ID NO: 506231 - protein, 12 aa, Homo sapiens
  CDR3 for alpha chain variable domain of TCR clone 253116 (TRAV13-2, TRAJ23)
CAERHRGGKLIF

SEQ ID NO: 506232 - protein, 15 aa, Homo sapiens
  CDR3 for beta chain variable domain of TCR clone 253116 (TRBV7-9, TRBJ1-2)
CASSLDREPNYGYTF

SEQ ID NO: 506233 - protein, 14 aa, Homo sapiens
  CDR3 for alpha chain variable domain of TCR clone 253117 (TRAV12-3, TRAJ10)
SHLPLTGGGNKLTF

SEQ ID NO: 506234 - protein, 13 aa, Homo sapiens
  CDR3 for beta chain variable domain of TCR clone 253117 (TRBV18, TRBJ2-2)
CASSPTRGGELFF

SEQ ID NO: 506235 - protein, 11 aa, Homo sapiens
  CDR3 for alpha chain variable domain of TCR clone 253118 (TRAV17, TRAJ9)
CATTGGVKTIY

SEQ ID NO: 506236 - protein, 14 aa, Homo sapiens
  CDR3 for beta chain variable domain of TCR clone 253118 (TRBV7-9, TRBJ2-2)
CASSGLADTGELFF

SEQ ID NO: 506237 - protein, 14 aa, Homo sapiens
  CDR3 for alpha chain variable domain of TCR clone 253119 (TRAV12-1, TRAJ33)
CVVNPEDSNYQLIW

SEQ ID NO: 506238 - protein, 15 aa, Homo sapiens
  CDR3 for beta chain variable domain of TCR clone 253119 (TRBV10-3, TRBJ2-1)
CAIRNGTSGHNEQFF

SEQ ID NO: 506239 - protein, 12 aa, Homo sapiens
  CDR3 for alpha chain variable domain of TCR clone 253120 (TRAV13-1, TRAJ21)
CAAKEGFNKFYF

SEQ ID NO: 506240 - protein, 13 aa, Homo sapiens
  CDR3 for beta chain variable domain of TCR clone 253120 (TRBV2, TRBJ1-2)
CASSVRGNYGYTF

SEQ ID NO: 506241 - protein, 13 aa, Homo sapiens
  CDR3 for alpha chain variable domain of TCR clone 253121 (TRAV13-1, TRAJ20)
CAARVSKDYKLSF

SEQ ID NO: 506242 - protein, 12 aa, Homo sapiens
  CDR3 for beta chain variable domain of TCR clone 253121 (TRBV20-1, TRBJ2-1)
CSARLGTDEQFF

SEQ ID NO: 506243 - protein, 13 aa, Homo sapiens
  CDR3 for alpha chain variable domain of TCR clone 253122 (TRAV2, TRAJ35)
CAPRVGFGNVLHC

SEQ ID NO: 506244 - protein, 15 aa, Homo sapiens
  CDR3 for beta chain variable domain of TCR clone 253122 (TRBV6-5, TRBJ1-1)
CASSVLGQLNTEAFF

SEQ ID NO: 506245 - protein, 14 aa, Homo sapiens
  CDR3 for alpha chain variable domain of TCR clone 253123 (TRAV8-3, TRAJ39)
CAVGANNAGHMLTF

SEQ ID NO: 506246 - protein, 12 aa, Homo sapiens
  CDR3 for beta chain variable domain of TCR clone 253123 (TRBV11-3, TRBJ1-1)
CASSHRQGEAFF

SEQ ID NO: 506247 - protein, 13 aa, Homo sapiens
  CDR3 for alpha chain variable domain of TCR clone 253124 (TRAV25, TRAJ23)
CAGVNNQGGKLIF

SEQ ID NO: 506248 - protein, 12 aa, Homo sapiens
  CDR3 for beta chain variable domain of TCR clone 253124 (TRBV28, TRBJ2-7)
CASTGNHYEQYF

SEQ ID NO: 506249 - protein, 15 aa, Homo sapiens
  CDR3 for alpha chain variable domain of TCR clone 253125 (TRAV23/DV6, TRAJ30)
CAASSQESRDDKFIF

SEQ ID NO: 506250 - protein, 17 aa, Homo sapiens
  CDR3 for beta chain variable domain of TCR clone 253125 (TRBV4-3, TRBJ2-1)
CASSQFSSGRASGEQFF

SEQ ID NO: 506251 - protein, 11 aa, Homo sapiens
  CDR3 for alpha chain variable domain of TCR clone 253126 (TRAV13-1, TRAJ39)
CASHAGNMLTF

SEQ ID NO: 506252 - protein, 13 aa, Homo sapiens
  CDR3 for beta chain variable domain of TCR clone 253126 (TRBV20-1, TRBJ1-1)
CSARGGGNTEAFF

SEQ ID NO: 506253 - protein, 12 aa, Homo sapiens
  CDR3 for alpha chain variable domain of TCR clone 253127 (TRAV13-1, TRAJ21)
CAAKEGFNKFYF

SEQ ID NO: 506254 - protein, 16 aa, Homo sapiens
  CDR3 for beta chain variable domain of TCR clone 253127 (TRBV4-1, TRBJ2-5)
CASTHADRAGGETQYF

SEQ ID NO: 506255 - protein, 16 aa, Homo sapiens
  CDR3 for alpha chain variable domain of TCR clone 253128 (TRAV21, TRAJ37)
CAVRPRGSSNTGKLIF

SEQ ID NO: 506256 - protein, 13 aa, Homo sapiens
  CDR3 for beta chain variable domain of TCR clone 253128 (TRBV7-9, TRBJ2-5)
YASLSPGQETQYF

SEQ ID NO: 506257 - protein, 14 aa, Homo sapiens
  CDR3 for alpha chain variable domain of TCR clone 253129 (TRAV13-1, TRAJ35)
CAARKGGFGNVLHC

SEQ ID NO: 506258 - protein, 16 aa, Homo sapiens
  CDR3 for beta chain variable domain of TCR clone 253129 (TRBV2, TRBJ2-3)
CQHRGAPRRWTDTQYF

SEQ ID NO: 506259 - protein, 14 aa, Homo sapiens
  CDR3 for alpha chain variable domain of TCR clone 253130 (TRAV4, TRAJ6)
CLVGAAGGSYIPTF

SEQ ID NO: 506260 - protein, 15 aa, Homo sapiens
  CDR3 for beta chain variable domain of TCR clone 253130 (TRBV9, TRBJ2-1)
CASSLAGSSYNEQFF

SEQ ID NO: 506261 - protein, 14 aa, Homo sapiens
  CDR3 for alpha chain variable domain of TCR clone 253131 (TRAV17, TRAJ37)
CATDGSSNTGKLIF

SEQ ID NO: 506262 - protein, 13 aa, Homo sapiens
  CDR3 for beta chain variable domain of TCR clone 253131 (TRBV11-2, TRBJ2-1)
FASSLDLVNEQFF

SEQ ID NO: 506263 - protein, 12 aa, Homo sapiens
  CDR3 for alpha chain variable domain of TCR clone 253132 (TRAV12-3, TRAJ17)
CAMTLTGNKLTF

SEQ ID NO: 506264 - protein, 15 aa, Homo sapiens
  CDR3 for beta chain variable domain of TCR clone 253132 (TRBV20-1, TRBJ2-7)
CSARDRVARIGEQYV

SEQ ID NO: 506265 - protein, 14 aa, Homo sapiens
  CDR3 for alpha chain variable domain of TCR clone 253133 (TRAV8-3, TRAJ45)
CALNSGGGADGLTF

SEQ ID NO: 506266 - protein, 14 aa, Homo sapiens
  CDR3 for beta chain variable domain of TCR clone 253133 (TRBV7-2, TRBJ1-1)
CASSFLTGTTEAFF

SEQ ID NO: 506267 - protein, 13 aa, Homo sapiens
  CDR3 for alpha chain variable domain of TCR clone 253134 (TRAV13-2, TRAJ8)
CAFMNTGFQKLVF

SEQ ID NO: 506268 - protein, 17 aa, Homo sapiens
  CDR3 for beta chain variable domain of TCR clone 253134 (TRBV28, TRBJ2-1)
CASSSARQALTYYEQFF

SEQ ID NO: 506269 - protein, 16 aa, Homo sapiens
  CDR3 for alpha chain variable domain of TCR clone 253135 (TRAV35, TRAJ28)
CAGQKYSGAGSYQLTF

SEQ ID NO: 506270 - protein, 16 aa, Homo sapiens
  CDR3 for beta chain variable domain of TCR clone 253135 (TRBV7-3, TRBJ2-2)
CASSLKRGTVSGELFF

SEQ ID NO: 506271 - protein, 14 aa, Homo sapiens
  CDR3 for alpha chain variable domain of TCR clone 253136 (TRAV1-2, TRAJ16)
CAVSRFSDGQKLLF

SEQ ID NO: 506272 - protein, 17 aa, Homo sapiens
  CDR3 for beta chain variable domain of TCR clone 253136 (TRBV9, TRBJ1-6)
CASSVAGQGIHPSTLGT

SEQ ID NO: 506273 - protein, 12 aa, Homo sapiens
  CDR3 for alpha chain variable domain of TCR clone 253137 (TRAV12-3, TRAJ17)
CAMTLTGNKLTF

SEQ ID NO: 506274 - protein, 18 aa, Homo sapiens
  CDR3 for beta chain variable domain of TCR clone 253137 (TRBV5-1, TRBJ2-7)
CASSSAGGASGYSYEQYF

SEQ ID NO: 506275 - protein, 13 aa, Homo sapiens
  CDR3 for alpha chain variable domain of TCR clone 253138 (TRAV38-1, TRAJ49)
CAFMKYTGNQFYF

SEQ ID NO: 506276 - protein, 18 aa, Homo sapiens
  CDR3 for beta chain variable domain of TCR clone 253138 (TRBV7-9, TRBJ2-7)
CASSLTTSGSRTWYEQYF

SEQ ID NO: 506277 - protein, 13 aa, Homo sapiens
  CDR3 for alpha chain variable domain of TCR clone 253139 (TRAV2, TRAJ40)
CAVVTSGTYQYIF

SEQ ID NO: 506278 - protein, 14 aa, Homo sapiens
  CDR3 for beta chain variable domain of TCR clone 253139 (TRBV19, TRBJ2-1)
CAIPTFVLSGEQFF

SEQ ID NO: 506279 - protein, 12 aa, Homo sapiens
  CDR3 for alpha chain variable domain of TCR clone 253140 (TRAV12-3, TRAJ17)
CAMTLTGNKLTF

SEQ ID NO: 506280 - protein, 18 aa, Homo sapiens
  CDR3 for beta chain variable domain of TCR clone 253140 (TRBV25-1, TRBJ2-2)
CHPSFPGGQGRKTGELFF

SEQ ID NO: 506281 - protein, 13 aa, Homo sapiens
  CDR3 for alpha chain variable domain of TCR clone 253141 (TRAV13-1, TRAJ27)
CAASIHQGRQINL

SEQ ID NO: 506282 - protein, 14 aa, Homo sapiens
  CDR3 for beta chain variable domain of TCR clone 253141 (TRBV28, TRBJ2-5)
CASSRLAGGETQYF

SEQ ID NO: 506283 - protein, 15 aa, Homo sapiens
  CDR3 for alpha chain variable domain of TCR clone 253142 (TRAV12-2, TRAJ53)
CAVNGGGGSNYKLTC

SEQ ID NO: 506284 - protein, 14 aa, Homo sapiens
  CDR3 for beta chain variable domain of TCR clone 253142 (TRBV11-2, TRBJ2-5)
CASGRTGGIETQYF

SEQ ID NO: 506285 - protein, 14 aa, Homo sapiens
  CDR3 for alpha chain variable domain of TCR clone 253143 (TRAV16, TRAJ44)
CALSTTGTASKLTF

SEQ ID NO: 506286 - protein, 15 aa, Homo sapiens
  CDR3 for beta chain variable domain of TCR clone 253143 (TRBV10-3, TRBJ2-1)
CAISDVQDRAYEQFF

SEQ ID NO: 506287 - protein, 19 aa, Homo sapiens
  CDR3 for alpha chain variable domain of TCR clone 253144 (TRAV10, TRAJ45)
PTSVWCGGYSGGGADGLTF

SEQ ID NO: 506288 - protein, 13 aa, Homo sapiens
  CDR3 for beta chain variable domain of TCR clone 253144 (TRBV19, TRBJ2-1)
CATSRGVYNEQFF

SEQ ID NO: 506289 - protein, 16 aa, Homo sapiens
  CDR3 for alpha chain variable domain of TCR clone 253145 (TRAV27, TRAJ13)
CAGAKSDSGGYQKVTF

SEQ ID NO: 506290 - protein, 15 aa, Homo sapiens
  CDR3 for beta chain variable domain of TCR clone 253145 (TRBV29-1, TRBJ2-1)
CSVGRHALFNNEQFF

SEQ ID NO: 506291 - protein, 12 aa, Homo sapiens
  CDR3 for alpha chain variable domain of TCR clone 253146 (TRAV21, TRAJ34)
CAVRFNTDKLIF

SEQ ID NO: 506292 - protein, 13 aa, Homo sapiens
  CDR3 for beta chain variable domain of TCR clone 253146 (TRBV7-8, TRBJ2-7)
CASSLTGGREQYF

SEQ ID NO: 506293 - protein, 18 aa, Homo sapiens
  CDR3 for alpha chain variable domain of TCR clone 253147 (TRAV21, TRAJ52)
CAVRPSPTGGTSSGKLTF

SEQ ID NO: 506294 - protein, 13 aa, Homo sapiens
  CDR3 for beta chain variable domain of TCR clone 253147 (TRBV20-1, TRBJ2-5)
CSAREAFQETQYF

SEQ ID NO: 506295 - protein, 14 aa, Homo sapiens
  CDR3 for alpha chain variable domain of TCR clone 253148 (TRAV23/DV6, TRAJ45)
CAASWGGGADGLTF

SEQ ID NO: 506296 - protein, 14 aa, Homo sapiens
  CDR3 for beta chain variable domain of TCR clone 253148 (TRBV7-7, TRBJ2-2)
CATRQDSDTGELFF

SEQ ID NO: 506297 - protein, 14 aa, Homo sapiens
  CDR3 for alpha chain variable domain of TCR clone 253149 (TRAV29/DV5, TRAJ34)
CAASASRETDKLIF

SEQ ID NO: 506298 - protein, 16 aa, Homo sapiens
  CDR3 for beta chain variable domain of TCR clone 253149 (TRBV7-3, TRBJ2-2)
CASSLKRGTLSGELFF

SEQ ID NO: 506299 - protein, 13 aa, Homo sapiens
  CDR3 for alpha chain variable domain of TCR clone 253150 (TRAV3, TRAJ27)
CAVRRLGAGKSTF

SEQ ID NO: 506300 - protein, 12 aa, Homo sapiens
  CDR3 for beta chain variable domain of TCR clone 253150 (TRBV7-9, TRBJ2-7)
CATRTDAYEQYF

SEQ ID NO: 506301 - protein, 15 aa, Homo sapiens
  CDR3 for alpha chain variable domain of TCR clone 253151 (TRAV8-3, TRAJ27)
CAVGPSKTNAGKSTF

SEQ ID NO: 506302 - protein, 15 aa, Homo sapiens
  CDR3 for beta chain variable domain of TCR clone 253151 (TRBV7-2, TRBJ2-1)
CASSSVLAGGNEQFF

SEQ ID NO: 506303 - protein, 11 aa, Homo sapiens
  CDR3 for alpha chain variable domain of TCR clone 253152 (TRAV2, TRAJ13)
CASGGYQKVTF

SEQ ID NO: 506304 - protein, 14 aa, Homo sapiens
  CDR3 for beta chain variable domain of TCR clone 253152 (TRBV2, TRBJ2-7)
YASSLTSGGYEQYF

SEQ ID NO: 506305 - protein, 14 aa, Homo sapiens
  CDR3 for alpha chain variable domain of TCR clone 253153 (TRAV27, TRAJ22)
CAGLPSGSARQLTF

SEQ ID NO: 506306 - protein, 16 aa, Homo sapiens
  CDR3 for beta chain variable domain of TCR clone 253153 (TRBV7-3, TRBJ2-2)
CASSLKRGTLSGGLFF

SEQ ID NO: 506307 - protein, 13 aa, Homo sapiens
  CDR3 for alpha chain variable domain of TCR clone 253154 (TRAV8-3, TRAJ28)
CAVGAVGSYQLTF

SEQ ID NO: 506308 - protein, 17 aa, Homo sapiens
  CDR3 for beta chain variable domain of TCR clone 253154 (TRBV24-1, TRBJ2-4)
CATSDAEARGVRNIQYF

SEQ ID NO: 506309 - protein, 15 aa, Homo sapiens
  CDR3 for alpha chain variable domain of TCR clone 253155 (TRAV3, TRAJ22)
CAVRDRGGSARQLTF

SEQ ID NO: 506310 - protein, 16 aa, Homo sapiens
  CDR3 for beta chain variable domain of TCR clone 253155 (TRBV5-1, TRBJ2-1)
CASSPWTSGEYNEQFF

SEQ ID NO: 506311 - protein, 16 aa, Homo sapiens
  CDR3 for alpha chain variable domain of TCR clone 253156 (TRAV30, TRAJ24)
CGTEIVDADSWGKFQF

SEQ ID NO: 506312 - protein, 14 aa, Homo sapiens
  CDR3 for beta chain variable domain of TCR clone 253156 (TRBV19, TRBJ2-1)
CASPTFVLSGESSS

SEQ ID NO: 506313 - protein, 15 aa, Homo sapiens
  CDR3 for alpha chain variable domain of TCR clone 253157 (TRAV26-1, TRAJ29)
CIVRVEGSGNTPLVF

SEQ ID NO: 506314 - protein, 17 aa, Homo sapiens
  CDR3 for beta chain variable domain of TCR clone 253157 (TRBV4-1, TRBJ2-1)
CASSQGRGGGLYNKQFF

SEQ ID NO: 506315 - protein, 16 aa, Homo sapiens
  CDR3 for alpha chain variable domain of TCR clone 253158 (TRAV3, TRAJ5)
CAVRNLMDTGRRALTF

SEQ ID NO: 506316 - protein, 14 aa, Homo sapiens
  CDR3 for beta chain variable domain of TCR clone 253158 (TRBV4-1, TRBJ2-2)
CASSQAVNTGELFF

SEQ ID NO: 506317 - protein, 15 aa, Homo sapiens
  CDR3 for alpha chain variable domain of TCR clone 253159 (TRAV12-1, TRAJ10)
CVVNKLTGGGNKLTF

SEQ ID NO: 506318 - protein, 17 aa, Homo sapiens
  CDR3 for beta chain variable domain of TCR clone 253159 (TRBV5-1, TRBJ1-6)
CASNPSLQGSDNSPLHF

SEQ ID NO: 506319 - protein, 14 aa, Homo sapiens
  CDR3 for alpha chain variable domain of TCR clone 253160 (TRAV3, TRAJ40)
CAVRDRRGTYKHIF

SEQ ID NO: 506320 - protein, 15 aa, Homo sapiens
  CDR3 for beta chain variable domain of TCR clone 253160 (TRBV11-1, TRBJ1-3)
CASTDPRAFGNTMYF

SEQ ID NO: 506321 - protein, 14 aa, Homo sapiens
  CDR3 for alpha chain variable domain of TCR clone 253161 (TRAV12-3, TRAJ58)
CAMSTETSGTRLTF

SEQ ID NO: 506322 - protein, 13 aa, Homo sapiens
  CDR3 for beta chain variable domain of TCR clone 253161 (TRBV27, TRBJ2-3)
CASSWGRTDTRYF

SEQ ID NO: 506323 - protein, 15 aa, Homo sapiens
  CDR3 for alpha chain variable domain of TCR clone 253162 (TRAV36/DV7, TRAJ53)
WKGENSGGSNYKLTF

SEQ ID NO: 506324 - protein, 15 aa, Homo sapiens
  CDR3 for beta chain variable domain of TCR clone 253162 (TRBV6-1, TRBJ2-5)
CASSEGWGIQETQYF

SEQ ID NO: 506325 - protein, 16 aa, Homo sapiens
  CDR3 for alpha chain variable domain of TCR clone 253163 (TRAV23/DV6, )
CADIQNPDPAVYQLRE

SEQ ID NO: 506326 - protein, 13 aa, Homo sapiens
  CDR3 for beta chain variable domain of TCR clone 253163 (TRBV28, TRBJ2-7)
CASRSSGVYEQYF

SEQ ID NO: 506327 - protein, 11 aa, Homo sapiens
  CDR3 for alpha chain variable domain of TCR clone 253164 (TRAV2, TRAJ33)
CAVESNYQLIW

SEQ ID NO: 506328 - protein, 14 aa, Homo sapiens
  CDR3 for beta chain variable domain of TCR clone 253164 (TRBV6-1, TRBJ1-6)
CASSGTAYNSPLHF

SEQ ID NO: 506329 - protein, 11 aa, Homo sapiens
  CDR3 for alpha chain variable domain of TCR clone 253165 (TRAV2, TRAJ13)
CASGGYQKVTF

SEQ ID NO: 506330 - protein, 16 aa, Homo sapiens
  CDR3 for beta chain variable domain of TCR clone 253165 (TRBV2, TRBJ2-1)
CASSVGGSLSYNEQFS

SEQ ID NO: 506331 - protein, 14 aa, Homo sapiens
  CDR3 for alpha chain variable domain of TCR clone 253166 (TRAV20, TRAJ29)
CAVQAWGGNTPLVF

SEQ ID NO: 506332 - protein, 15 aa, Homo sapiens
  CDR3 for beta chain variable domain of TCR clone 253166 (TRBV29-1, TRBJ2-7)
CSVAFFDRGSYEQYF

SEQ ID NO: 506333 - protein, 12 aa, Homo sapiens
  CDR3 for alpha chain variable domain of TCR clone 253167 (TRAV12-3, TRAJ17)
CAMTLTGNKLTF

SEQ ID NO: 506334 - protein, 13 aa, Homo sapiens
  CDR3 for beta chain variable domain of TCR clone 253167 (TRBV11-3, TRBJ1-1)
CATEEGLNTEAFF

SEQ ID NO: 506335 - protein, 11 aa, Homo sapiens
  CDR3 for alpha chain variable domain of TCR clone 253168 (TRAV21, TRAJ11)
CAVNGYSTLTF

SEQ ID NO: 506336 - protein, 16 aa, Homo sapiens
  CDR3 for beta chain variable domain of TCR clone 253168 (TRBV19, TRBJ2-1)
CAGSKAGPSSYNEQLF

SEQ ID NO: 506337 - protein, 14 aa, Homo sapiens
  CDR3 for alpha chain variable domain of TCR clone 253169 (TRAV12-2, TRAJ13)
CAVKKTGGYQKVNF

SEQ ID NO: 506338 - protein, 18 aa, Homo sapiens
  CDR3 for beta chain variable domain of TCR clone 253169 (TRBV24-1, TRBJ2-2)
CATSDSGQGTANTGELFF

SEQ ID NO: 506339 - protein, 12 aa, Homo sapiens
  CDR3 for alpha chain variable domain of TCR clone 253170 (TRAV8-3, TRAJ26)
CAGDNYGQTFVF

SEQ ID NO: 506340 - protein, 13 aa, Homo sapiens
  CDR3 for beta chain variable domain of TCR clone 253170 (TRBV20-1, TRBJ1-1)
CSAPRGGGTEAFF

SEQ ID NO: 506341 - protein, 14 aa, Homo sapiens
  CDR3 for alpha chain variable domain of TCR clone 253171 (TRAV12-2, TRAJ13)
CAVKKTGGYQKVTF

SEQ ID NO: 506342 - protein, 15 aa, Homo sapiens
  CDR3 for beta chain variable domain of TCR clone 253171 (TRBV5-4, TRBJ2-7)
CASSRFGTGSYEQYF

SEQ ID NO: 506343 - protein, 15 aa, Homo sapiens
  CDR3 for alpha chain variable domain of TCR clone 253172 (TRAV3, TRAJ3)
CAVRDRDSSASKIIF

SEQ ID NO: 506344 - protein, 12 aa, Homo sapiens
  CDR3 for beta chain variable domain of TCR clone 253172 (TRBV29-1, TRBJ2-3)
CSVTGWADTQYF

SEQ ID NO: 506345 - protein, 17 aa, Homo sapiens
  CDR3 for alpha chain variable domain of TCR clone 253173 (TRAV9-2, TRAJ45)
CALSGYYSGGGADGLTF

SEQ ID NO: 506346 - protein, 15 aa, Homo sapiens
  CDR3 for beta chain variable domain of TCR clone 253173 (TRBV28, TRBJ2-1)
CASSIIAGGRSEQFF

SEQ ID NO: 506347 - protein, 15 aa, Homo sapiens
  CDR3 for alpha chain variable domain of TCR clone 253174 (TRAV27, TRAJ38)
CAARRNAGNNRKLIW

SEQ ID NO: 506348 - protein, 13 aa, Homo sapiens
  CDR3 for beta chain variable domain of TCR clone 253174 (TRBV4-1, TRBJ1-1)
CASSRKMNTEAFF

SEQ ID NO: 506349 - protein, 14 aa, Homo sapiens
  CDR3 for alpha chain variable domain of TCR clone 253175 (TRAV12-2, TRAJ40)
CAVKIPSGTYKYIF

SEQ ID NO: 506350 - protein, 17 aa, Homo sapiens
  CDR3 for beta chain variable domain of TCR clone 253175 (TRBV20-1, TRBJ2-1)
CSACSGTSGSLYNEQFF

SEQ ID NO: 506351 - protein, 15 aa, Homo sapiens
  CDR3 for alpha chain variable domain of TCR clone 253176 (TRAV38-2/DV8, TRAJ48)
CAYRSGGFGIEKLTF

SEQ ID NO: 506352 - protein, 16 aa, Homo sapiens
  CDR3 for beta chain variable domain of TCR clone 253176 (TRBV28, TRBJ2-7)
CASSPWVATGDLSQYF

SEQ ID NO: 506353 - protein, 14 aa, Homo sapiens
  CDR3 for alpha chain variable domain of TCR clone 253177 (TRAV12-1, TRAJ12)
CVVTRMDSSYKLIF

SEQ ID NO: 506354 - protein, 13 aa, Homo sapiens
  CDR3 for beta chain variable domain of TCR clone 253177 (TRBV12-4, TRBJ2-1)
CASSLVPGNEQFF

SEQ ID NO: 506355 - protein, 14 aa, Homo sapiens
  CDR3 for alpha chain variable domain of TCR clone 253178 (TRAV12-1, TRAJ4)
CVVPLKSGYNKLMF

SEQ ID NO: 506356 - protein, 13 aa, Homo sapiens
  CDR3 for beta chain variable domain of TCR clone 253178 (TRBV27, TRBJ2-7)
CASGRGGAYEQYF

SEQ ID NO: 506357 - protein, 12 aa, Homo sapiens
  CDR3 for alpha chain variable domain of TCR clone 253179 (TRAV1-1, TRAJ43)
CAPRVSSKDMRF

SEQ ID NO: 506358 - protein, 14 aa, Homo sapiens
  CDR3 for beta chain variable domain of TCR clone 253179 (TRBV6-1, TRBJ1-3)
CASVQGGGGNTIYF

SEQ ID NO: 506359 - protein, 14 aa, Homo sapiens
  CDR3 for alpha chain variable domain of TCR clone 253180 (TRAV17, TRAJ15)
CATTTNQAGTALIF

SEQ ID NO: 506360 - protein, 16 aa, Homo sapiens
  CDR3 for beta chain variable domain of TCR clone 253180 (TRBV4-1, TRBJ2-7)
CAISRGDILNSYEQYF

SEQ ID NO: 506361 - protein, 15 aa, Homo sapiens
  CDR3 for alpha chain variable domain of TCR clone 253181 (TRAV8-3, TRAJ44)
CAVVPGTAVNSPLGL

SEQ ID NO: 506362 - protein, 14 aa, Homo sapiens
  CDR3 for beta chain variable domain of TCR clone 253181 (TRBV11-2, TRBJ2-3)
CASSRLARTDTQYF

SEQ ID NO: 506363 - protein, 16 aa, Homo sapiens
  CDR3 for alpha chain variable domain of TCR clone 253182 (TRAV16, TRAJ4)
CARSRMFSGGYTKLIF

SEQ ID NO: 506364 - protein, 16 aa, Homo sapiens
  CDR3 for beta chain variable domain of TCR clone 253182 (TRBV24-1, TRBJ2-3)
CATSDPGTGATDTQYF

SEQ ID NO: 506365 - protein, 19 aa, Homo sapiens
  CDR3 for alpha chain variable domain of TCR clone 253183 (TRAV21, TRAJ52)
CAVKWPLGAGGTSYGKLTF

SEQ ID NO: 506366 - protein, 13 aa, Homo sapiens
  CDR3 for beta chain variable domain of TCR clone 253183 (TRBV10-3, TRBJ2-7)
CASKLAVNYEQYS

SEQ ID NO: 506367 - protein, 15 aa, Homo sapiens
  CDR3 for alpha chain variable domain of TCR clone 253184 (TRAV17, TRAJ45)
CATAELGGGADGLTF

SEQ ID NO: 506368 - protein, 14 aa, Homo sapiens
  CDR3 for beta chain variable domain of TCR clone 253184 (TRBV3-1, TRBJ2-5)
CASSQAVRQESQYF

SEQ ID NO: 506369 - protein, 16 aa, Homo sapiens
  CDR3 for alpha chain variable domain of TCR clone 253185 (TRAV3, TRAJ10)
CAVRDMRAGGGNKLTF

SEQ ID NO: 506370 - protein, 15 aa, Homo sapiens
  CDR3 for beta chain variable domain of TCR clone 253185 (TRBV6-1, TRBJ2-3)
CASSERGGITDTQYF

SEQ ID NO: 506371 - protein, 13 aa, Homo sapiens
  CDR3 for alpha chain variable domain of TCR clone 253186 (TRAV21, TRAJ57)
CAVTQGGTEKLVF

SEQ ID NO: 506372 - protein, 16 aa, Homo sapiens
  CDR3 for beta chain variable domain of TCR clone 253186 (TRBV29-1, TRBJ2-7)
CIVEDAEDGTAYEQYF

SEQ ID NO: 506373 - protein, 15 aa, Homo sapiens
  CDR3 for alpha chain variable domain of TCR clone 253187 (TRAV2, TRAJ9)
CAVEDRGTGGFKTIF

SEQ ID NO: 506374 - protein, 16 aa, Homo sapiens
  CDR3 for beta chain variable domain of TCR clone 253187 (TRBV28, TRBJ2-4)
CASSLIQGSLGNIQYF

SEQ ID NO: 506375 - protein, 12 aa, Homo sapiens
  CDR3 for alpha chain variable domain of TCR clone 253188 (TRAV13-1, TRAJ15)
FAASQAGTALIF

SEQ ID NO: 506376 - protein, 18 aa, Homo sapiens
  CDR3 for beta chain variable domain of TCR clone 253188 (TRBV7-9, TRBJ2-3)
CASSLPINGQISTDTQYF

SEQ ID NO: 506377 - protein, 18 aa, Homo sapiens
  CDR3 for alpha chain variable domain of TCR clone 253189 (TRAV21, TRAJ53)
CAVKGGENSGGSDYKLTF

SEQ ID NO: 506378 - protein, 13 aa, Homo sapiens
  CDR3 for beta chain variable domain of TCR clone 253189 (TRBV9, TRBJ2-1)
CASSPAGGSEQFF

SEQ ID NO: 506379 - protein, 15 aa, Homo sapiens
  CDR3 for alpha chain variable domain of TCR clone 253190 (TRAV16, TRAJ16)
CALQGGGSAGQKLLF

SEQ ID NO: 506380 - protein, 14 aa, Homo sapiens
  CDR3 for beta chain variable domain of TCR clone 253190 (TRBV6-1, TRBJ2-7)
CASSERVNPYEQYF

SEQ ID NO: 506381 - protein, 14 aa, Homo sapiens
  CDR3 for alpha chain variable domain of TCR clone 253191 (TRAV2, TRAJ9)
CAVEDRSGGFKTIF

SEQ ID NO: 506382 - protein, 15 aa, Homo sapiens
  CDR3 for beta chain variable domain of TCR clone 253191 (TRBV11-1, TRBJ2-3)
CASSLLAGRTDTQYF

SEQ ID NO: 506383 - protein, 15 aa, Homo sapiens
  CDR3 for alpha chain variable domain of TCR clone 253192 (TRAV35, TRAJ52)
CAGPRGGTSYGKLTF

SEQ ID NO: 506384 - protein, 14 aa, Homo sapiens
  CDR3 for beta chain variable domain of TCR clone 253192 (TRBV20-1, TRBJ2-7)
CSAWTALSSYEQCF

SEQ ID NO: 506385 - protein, 16 aa, Homo sapiens
  CDR3 for alpha chain variable domain of TCR clone 253193 (TRAV3, TRAJ10)
CAVRDMRAGGGNKLTF

SEQ ID NO: 506386 - protein, 17 aa, Homo sapiens
  CDR3 for beta chain variable domain of TCR clone 253193 (TRBV20-1, TRBJ2-2)
CSDSGSGQGGLTGELFF

SEQ ID NO: 506387 - protein, 15 aa, Homo sapiens
  CDR3 for alpha chain variable domain of TCR clone 253194 (TRAV8-3, TRAJ11)
CAVGLLNSGYSTLTF

SEQ ID NO: 506388 - protein, 16 aa, Homo sapiens
  CDR3 for beta chain variable domain of TCR clone 253194 (TRBV19, TRBJ2-3)
CASSPGAASRTDTQYF

SEQ ID NO: 506389 - protein, 12 aa, Homo sapiens
  CDR3 for alpha chain variable domain of TCR clone 253195 (TRAV13-1, TRAJ48)
CAANFGNEKLTF

SEQ ID NO: 506390 - protein, 14 aa, Homo sapiens
  CDR3 for beta chain variable domain of TCR clone 253195 (TRBV7-6, TRBJ2-6)
CASSLSGGANVLTF

SEQ ID NO: 506391 - protein, 13 aa, Homo sapiens
  CDR3 for alpha chain variable domain of TCR clone 253196 (TRAV39, TRAJ49)
CAVDRNTGNQFYF

SEQ ID NO: 506392 - protein, 13 aa, Homo sapiens
  CDR3 for beta chain variable domain of TCR clone 253196 (TRBV24-1, TRBJ2-1)
CATRQGAGNEQFF

SEQ ID NO: 506393 - protein, 13 aa, Homo sapiens
  CDR3 for alpha chain variable domain of TCR clone 253197 (TRAV13-1, TRAJ39)
SAASIWAGDMLTF

SEQ ID NO: 506394 - protein, 15 aa, Homo sapiens
  CDR3 for beta chain variable domain of TCR clone 253197 (TRBV7-9, TRBJ1-1)
CASSLLEQGGTEAFF

SEQ ID NO: 506395 - protein, 13 aa, Homo sapiens
  CDR3 for alpha chain variable domain of TCR clone 253198 (TRAV35, TRAJ42)
CAGFPGSQGNLIF

SEQ ID NO: 506396 - protein, 14 aa, Homo sapiens
  CDR3 for beta chain variable domain of TCR clone 253198 (TRBV4-1, TRBJ2-2)
CASSQALNTGELFF

SEQ ID NO: 506397 - protein, 13 aa, Homo sapiens
  CDR3 for alpha chain variable domain of TCR clone 253199 (TRAV4, TRAJ15)
CLVGPEAGTALIF

SEQ ID NO: 506398 - protein, 16 aa, Homo sapiens
  CDR3 for beta chain variable domain of TCR clone 253199 (TRBV11-2, TRBJ1-2)
CASSPSRREANYGYTF

SEQ ID NO: 506399 - protein, 11 aa, Homo sapiens
  CDR3 for alpha chain variable domain of TCR clone 253200 (TRAV12-1, TRAJ43)
CVEYDNNDMRL

SEQ ID NO: 506400 - protein, 16 aa, Homo sapiens
  CDR3 for beta chain variable domain of TCR clone 253200 (TRBV5-4, TRBJ2-1)
CASSLVGSGQDNEQFF

SEQ ID NO: 506401 - protein, 12 aa, Homo sapiens
  CDR3 for alpha chain variable domain of TCR clone 253201 (TRAV3, TRAJ27)
CAVRDGAGKSTF

SEQ ID NO: 506402 - protein, 15 aa, Homo sapiens
  CDR3 for beta chain variable domain of TCR clone 253201 (TRBV13, TRBJ2-2)
CAGGYRGRRTGELFF

SEQ ID NO: 506403 - protein, 16 aa, Homo sapiens
  CDR3 for alpha chain variable domain of TCR clone 253202 (TRAV8-3, TRAJ42)
CAVGEVNGGIQGNLIF

SEQ ID NO: 506404 - protein, 14 aa, Homo sapiens
  CDR3 for beta chain variable domain of TCR clone 253202 (TRBV7-2, TRBJ2-1)
CASSRGGARNEQFF

SEQ ID NO: 506405 - protein, 12 aa, Homo sapiens
  CDR3 for alpha chain variable domain of TCR clone 253203 (TRAV21, TRAJ39)
CAADNAGNMLPF

SEQ ID NO: 506406 - protein, 15 aa, Homo sapiens
  CDR3 for beta chain variable domain of TCR clone 253203 (TRBV27, TRBJ2-1)
CASSNGGGSSNEQFF

SEQ ID NO: 506407 - protein, 14 aa, Homo sapiens
  CDR3 for alpha chain variable domain of TCR clone 253204 (TRAV8-3, TRAJ4)
CAVGAAGGYNKLIF

SEQ ID NO: 506408 - protein, 14 aa, Homo sapiens
  CDR3 for beta chain variable domain of TCR clone 253204 (TRBV18, TRBJ1-4)
CASSPRPNGEKLFF

SEQ ID NO: 506409 - protein, 14 aa, Homo sapiens
  CDR3 for alpha chain variable domain of TCR clone 253205 (TRAV20, TRAJ36)
CAVQAGTGANNLFF

SEQ ID NO: 506410 - protein, 14 aa, Homo sapiens
  CDR3 for beta chain variable domain of TCR clone 253205 (TRBV11-2, TRBJ1-2)
CASSSGQAGDGYTF

SEQ ID NO: 506411 - protein, 14 aa, Homo sapiens
  CDR3 for alpha chain variable domain of TCR clone 253206 (TRAV8-3, TRAJ9)
CAVGYNIGGFKTIF

SEQ ID NO: 506412 - protein, 14 aa, Homo sapiens
  CDR3 for beta chain variable domain of TCR clone 253206 (TRBV7-3, TRBJ2-2)
CASSSGGYTGELFF

SEQ ID NO: 506413 - protein, 12 aa, Homo sapiens
  CDR3 for alpha chain variable domain of TCR clone 253207 (TRAV12-3, TRAJ13)
CAMGTGGYQKVT

SEQ ID NO: 506414 - protein, 14 aa, Homo sapiens
  CDR3 for beta chain variable domain of TCR clone 253207 (TRBV7-2, TRBJ2-5)
CASSTGGELKTQYF

SEQ ID NO: 506415 - protein, 16 aa, Homo sapiens
  CDR3 for alpha chain variable domain of TCR clone 253208 (TRAV12-2, TRAJ56)
CAVRRVNTGANSKLTF

SEQ ID NO: 506416 - protein, 11 aa, Homo sapiens
  CDR3 for beta chain variable domain of TCR clone 253208 (TRBV3-1, TRBJ2-7)
CASSQVREQYF

SEQ ID NO: 506417 - protein, 15 aa, Homo sapiens
  CDR3 for alpha chain variable domain of TCR clone 253209 (TRAV26-2, TRAJ13)
CILRDLSGGYQKVTF

SEQ ID NO: 506418 - protein, 14 aa, Homo sapiens
  CDR3 for beta chain variable domain of TCR clone 253209 (TRBV4-1, TRBJ2-3)
CASGQEGSTDTQYF

SEQ ID NO: 506419 - protein, 12 aa, Homo sapiens
  CDR3 for alpha chain variable domain of TCR clone 253210 (TRAV12-2, TRAJ3)
CAAWSSASKIFF

SEQ ID NO: 506420 - protein, 12 aa, Homo sapiens
  CDR3 for beta chain variable domain of TCR clone 253210 (TRBV11-2, TRBJ2-1)
CASSPGNNEQFF

SEQ ID NO: 506421 - protein, 18 aa, Homo sapiens
  CDR3 for alpha chain variable domain of TCR clone 253211 (TRAV26-2, TRAJ32)
CILRAPLNYGGATNKLIF

SEQ ID NO: 506422 - protein, 13 aa, Homo sapiens
  CDR3 for beta chain variable domain of TCR clone 253211 (TRBV7-2, TRBJ2-7)
CASSLGPNGEQYF

SEQ ID NO: 506423 - protein, 12 aa, Homo sapiens
  CDR3 for alpha chain variable domain of TCR clone 253212 (TRAV8-3, TRAJ20)
CAVGANDYKLSF

SEQ ID NO: 506424 - protein, 14 aa, Homo sapiens
  CDR3 for beta chain variable domain of TCR clone 253212 (TRBV28, TRBJ2-2)
CASRIRSGTGELFF

SEQ ID NO: 506425 - protein, 14 aa, Homo sapiens
  CDR3 for alpha chain variable domain of TCR clone 253213 (TRAV1-2, TRAJ8)
CAVREDTGFQKLVF

SEQ ID NO: 506426 - protein, 15 aa, Homo sapiens
  CDR3 for beta chain variable domain of TCR clone 253213 (TRBV3-1, TRBJ2-1)
CASSQQPSGGNEQFF

SEQ ID NO: 506427 - protein, 15 aa, Homo sapiens
  CDR3 for alpha chain variable domain of TCR clone 253214 (TRAV8-3, TRAJ40)
CAAPSLGSGTYKYIF

SEQ ID NO: 506428 - protein, 15 aa, Homo sapiens
  CDR3 for beta chain variable domain of TCR clone 253214 (TRBV12-4, TRBJ2-5)
CASSPPTGLQETQYF

SEQ ID NO: 506429 - protein, 13 aa, Homo sapiens
  CDR3 for alpha chain variable domain of TCR clone 253215 (TRAV8-2, TRAJ36)
CVVSHLPTNNLFF

SEQ ID NO: 506430 - protein, 16 aa, Homo sapiens
  CDR3 for beta chain variable domain of TCR clone 253215 (TRBV6-1, TRBJ2-5)
CASSETLDRGAETQYF

SEQ ID NO: 506431 - protein, 15 aa, Homo sapiens
  CDR3 for alpha chain variable domain of TCR clone 253216 (TRAV23/DV6, TRAJ30)
CAASSQESRADKIIF

SEQ ID NO: 506432 - protein, 12 aa, Homo sapiens
  CDR3 for beta chain variable domain of TCR clone 253216 (TRBV19, TRBJ1-1)
CASGTGWTEAFF

SEQ ID NO: 506433 - protein, 13 aa, Homo sapiens
  CDR3 for alpha chain variable domain of TCR clone 253217 (TRAV2, TRAJ15)
CAVEAQAGTALIF

SEQ ID NO: 506434 - protein, 12 aa, Homo sapiens
  CDR3 for beta chain variable domain of TCR clone 253217 (TRBV20-1, TRBJ2-7)
CSAITPTKEQYF

SEQ ID NO: 506435 - protein, 15 aa, Homo sapiens
  CDR3 for alpha chain variable domain of TCR clone 253218 (TRAV12-1, TRAJ4)
CVVNPFSGGYNKLIF

SEQ ID NO: 506436 - protein, 16 aa, Homo sapiens
  CDR3 for beta chain variable domain of TCR clone 253218 (TRBV5-1, TRBJ1-1)
CASSKTGTEVDTEAFF

SEQ ID NO: 506437 - protein, 15 aa, Homo sapiens
  CDR3 for alpha chain variable domain of TCR clone 253219 (TRAV17, TRAJ16)
CATALRFSYGQKLLF

SEQ ID NO: 506438 - protein, 12 aa, Homo sapiens
  CDR3 for beta chain variable domain of TCR clone 253219 (TRBV2, TRBJ2-7)
CASSDPDHEQYF

SEQ ID NO: 506439 - protein, 15 aa, Homo sapiens
  CDR3 for alpha chain variable domain of TCR clone 253220 (TRAV12-1, TRAJ44)
CVVFVNTGTASKLTF

SEQ ID NO: 506440 - protein, 17 aa, Homo sapiens
  CDR3 for beta chain variable domain of TCR clone 253220 (TRBV7-8, TRBJ2-6)
CASSAGTGGAGANDLTL

SEQ ID NO: 506441 - protein, 17 aa, Homo sapiens
  CDR3 for alpha chain variable domain of TCR clone 253221 (TRAV8-6, TRAJ58)
CAVSSWLGETSGSRLTF

SEQ ID NO: 506442 - protein, 13 aa, Homo sapiens
  CDR3 for beta chain variable domain of TCR clone 253221 (TRBV10-3, TRBJ2-7)
CASKLAVNYEQYF

SEQ ID NO: 506443 - protein, 12 aa, Homo sapiens
  CDR3 for alpha chain variable domain of TCR clone 253222 (TRAV3, TRAJ26)
CAGRDYGQNFVF

SEQ ID NO: 506444 - protein, 13 aa, Homo sapiens
  CDR3 for beta chain variable domain of TCR clone 253222 (TRBV19, TRBJ1-2)
CASSVPGQDGYTF

SEQ ID NO: 506445 - protein, 15 aa, Homo sapiens
  CDR3 for alpha chain variable domain of TCR clone 253223 (TRAV21, TRAJ56)
CAVTKYTGANSKLTF

SEQ ID NO: 506446 - protein, 14 aa, Homo sapiens
  CDR3 for beta chain variable domain of TCR clone 253223 (TRBV20-1, TRBJ2-3)
CSARVRGRTDTQYF

SEQ ID NO: 506447 - protein, 16 aa, Homo sapiens
  CDR3 for alpha chain variable domain of TCR clone 253224 (TRAV21, TRAJ45)
CAVSWGSGGGAVGLTF

SEQ ID NO: 506448 - protein, 14 aa, Homo sapiens
  CDR3 for beta chain variable domain of TCR clone 253224 (TRBV4-2, TRBJ1-2)
CASSPGGSNYGYTF

SEQ ID NO: 506449 - protein, 12 aa, Homo sapiens
  CDR3 for alpha chain variable domain of TCR clone 253225 (TRAV25, TRAJ5)
CAGGGAGEHLLL

SEQ ID NO: 506450 - protein, 15 aa, Homo sapiens
  CDR3 for beta chain variable domain of TCR clone 253225 (TRBV9, TRBJ1-2)
CASSVVGQANYGYTF

SEQ ID NO: 506451 - protein, 16 aa, Homo sapiens
  CDR3 for alpha chain variable domain of TCR clone 253226 (TRAV30, TRAJ24)
CGTEIVDADSWGKLQF

SEQ ID NO: 506452 - protein, 14 aa, Homo sapiens
  CDR3 for beta chain variable domain of TCR clone 253226 (TRBV6-1, TRBJ1-3)
CASVQGGGGNTIYF

SEQ ID NO: 506453 - protein, 13 aa, Homo sapiens
  CDR3 for alpha chain variable domain of TCR clone 253227 (TRAV21, TRAJ27)
CAARPGNAGKSIF

SEQ ID NO: 506454 - protein, 15 aa, Homo sapiens
  CDR3 for beta chain variable domain of TCR clone 253227 (TRBV11-3, TRBJ2-7)
CASSPGPASSYEQYF

SEQ ID NO: 506455 - protein, 16 aa, Homo sapiens
  CDR3 for alpha chain variable domain of TCR clone 253228 (TRAV2, TRAJ4)
CAVEDRFSGGYNKLIF

SEQ ID NO: 506456 - protein, 14 aa, Homo sapiens
  CDR3 for beta chain variable domain of TCR clone 253228 (TRBV2, TRBJ1-5)
CASSENRGGQPQHF

SEQ ID NO: 506457 - protein, 14 aa, Homo sapiens
  CDR3 for alpha chain variable domain of TCR clone 253229 (TRAV12-2, TRAJ3)
CAVSLYSSASKIIF

SEQ ID NO: 506458 - protein, 14 aa, Homo sapiens
  CDR3 for beta chain variable domain of TCR clone 253229 (TRBV27, TRBJ2-1)
CAGSIAETYNEQFL

SEQ ID NO: 506459 - protein, 12 aa, Homo sapiens
  CDR3 for alpha chain variable domain of TCR clone 253230 (TRAV1-2, TRAJ33)
CAALDSNYQLIW

SEQ ID NO: 506460 - protein, 13 aa, Homo sapiens
  CDR3 for beta chain variable domain of TCR clone 253230 (TRBV24-1, TRBJ2-2)
CATSDWSTGELFF

SEQ ID NO: 506461 - protein, 14 aa, Homo sapiens
  CDR3 for alpha chain variable domain of TCR clone 253231 (TRAV6, TRAJ6)
CALPTSGGSYIPTI

SEQ ID NO: 506462 - protein, 17 aa, Homo sapiens
  CDR3 for beta chain variable domain of TCR clone 253231 (TRBV5-1, TRBJ2-5)
CASSPVALGQNQETQYF

SEQ ID NO: 506463 - protein, 13 aa, Homo sapiens
  CDR3 for alpha chain variable domain of TCR clone 253232 (TRAV12-1, TRAJ34)
CVVTGFNTDKLIF

SEQ ID NO: 506464 - protein, 13 aa, Homo sapiens
  CDR3 for beta chain variable domain of TCR clone 253232 (TRBV28, TRBJ2-7)
CASKAGGVYEQYF

SEQ ID NO: 506465 - protein, 14 aa, Homo sapiens
  CDR3 for alpha chain variable domain of TCR clone 253233 (TRAV12-3, TRAJ10)
SHLPLTGGGNKLTF

SEQ ID NO: 506466 - protein, 13 aa, Homo sapiens
  CDR3 for beta chain variable domain of TCR clone 253233 (TRBV20-1, TRBJ1-1)
CSAPPGGHTEAFF

SEQ ID NO: 506467 - protein, 14 aa, Homo sapiens
  CDR3 for alpha chain variable domain of TCR clone 253234 (TRAV13-2, TRAJ17)
CAENSKAAGNKLTF

SEQ ID NO: 506468 - protein, 11 aa, Homo sapiens
  CDR3 for beta chain variable domain of TCR clone 253234 (TRBV6-3, TRBJ2-3)
CATRQADTQYF

SEQ ID NO: 506469 - protein, 15 aa, Homo sapiens
  CDR3 for alpha chain variable domain of TCR clone 253235 (TRAV13-1, TRAJ44)
CAASRGGGTASKLTF

SEQ ID NO: 506470 - protein, 14 aa, Homo sapiens
  CDR3 for beta chain variable domain of TCR clone 253235 (TRBV7-2, TRBJ2-5)
CASSPRGISETQYF

SEQ ID NO: 506471 - protein, 16 aa, Homo sapiens
  CDR3 for alpha chain variable domain of TCR clone 253236 (TRAV3, TRAJ37)
CAVRPHGSGNTGKLIY

SEQ ID NO: 506472 - protein, 17 aa, Homo sapiens
  CDR3 for beta chain variable domain of TCR clone 253236 (TRBV5-1, TRBJ2-5)
CASSPVALGQNQETQYF

SEQ ID NO: 506473 - protein, 11 aa, Homo sapiens
  CDR3 for alpha chain variable domain of TCR clone 253237 (TRAV2, TRAJ13)
CASGGYQKVTF

SEQ ID NO: 506474 - protein, 14 aa, Homo sapiens
  CDR3 for beta chain variable domain of TCR clone 253237 (TRBV5-7, TRBJ1-2)
CASSLVRGDYGYTC

SEQ ID NO: 506475 - protein, 13 aa, Homo sapiens
  CDR3 for alpha chain variable domain of TCR clone 253238 (TRAV8-4, TRAJ44)
CAVCTGTASKLTF

SEQ ID NO: 506476 - protein, 15 aa, Homo sapiens
  CDR3 for beta chain variable domain of TCR clone 253238 (TRBV14, TRBJ2-1)
CASSHMGLHFNEQFF

SEQ ID NO: 506477 - protein, 13 aa, Homo sapiens
  CDR3 for alpha chain variable domain of TCR clone 253239 (TRAV21, TRAJ20)
CAVVLRVDYKLSF

SEQ ID NO: 506478 - protein, 18 aa, Homo sapiens
  CDR3 for beta chain variable domain of TCR clone 253239 (TRBV20-1, TRBJ2-2)
CSARVQTARPSGTGELFF

SEQ ID NO: 506479 - protein, 13 aa, Homo sapiens
  CDR3 for alpha chain variable domain of TCR clone 253240 (TRAV12-3, TRAJ33)
CAMSVNSNYQLIW

SEQ ID NO: 506480 - protein, 15 aa, Homo sapiens
  CDR3 for beta chain variable domain of TCR clone 253240 (TRBV6-3, TRBJ2-2)
CASSFLATLTGELFF

SEQ ID NO: 506481 - protein, 14 aa, Homo sapiens
  CDR3 for alpha chain variable domain of TCR clone 253241 (TRAV14/DV4, TRAJ32)
SNVLPLTPTNKLIF

SEQ ID NO: 506482 - protein, 17 aa, Homo sapiens
  CDR3 for beta chain variable domain of TCR clone 253241 (TRBV20-1, TRBJ2-1)
CSASSSGLAGAYNEQFF

SEQ ID NO: 506483 - protein, 17 aa, Homo sapiens
  CDR3 for alpha chain variable domain of TCR clone 253242 (TRAV26-1, TRAJ56)
CIVRVARLAGANSKLTF

SEQ ID NO: 506484 - protein, 16 aa, Homo sapiens
  CDR3 for beta chain variable domain of TCR clone 253242 (TRBV7-7, TRBJ2-1)
CASSLASGTSYNEQFF

SEQ ID NO: 506485 - protein, 14 aa, Homo sapiens
  CDR3 for alpha chain variable domain of TCR clone 253243 (TRAV1-2, TRAJ16)
CAVNRFSDGQKRLF

SEQ ID NO: 506486 - protein, 16 aa, Homo sapiens
  CDR3 for beta chain variable domain of TCR clone 253243 (TRBV7-2, TRBJ2-7)
CASSLEAGGPWYEQYF

SEQ ID NO: 506487 - protein, 14 aa, Homo sapiens
  CDR3 for alpha chain variable domain of TCR clone 253244 (TRAV26-1, TRAJ38)
CIADNAGNNRKLIW

SEQ ID NO: 506488 - protein, 16 aa, Homo sapiens
  CDR3 for beta chain variable domain of TCR clone 253244 (TRBV12-5, TRBJ2-5)
CASGPRSSGNQETQYF

SEQ ID NO: 506489 - protein, 13 aa, Homo sapiens
  CDR3 for alpha chain variable domain of TCR clone 253245 (TRAV13-2, TRAJ53)
CAENMGSNYKLTF

SEQ ID NO: 506490 - protein, 18 aa, Homo sapiens
  CDR3 for beta chain variable domain of TCR clone 253245 (TRBV4-1, TRBJ1-5)
CASSQDPRGQGLNQPQHF

SEQ ID NO: 506491 - protein, 17 aa, Homo sapiens
  CDR3 for alpha chain variable domain of TCR clone 253246 (TRAV17, TRAJ52)
CATPPNAGGTSYGKLTF

SEQ ID NO: 506492 - protein, 13 aa, Homo sapiens
  CDR3 for beta chain variable domain of TCR clone 253246 (TRBV7-3, TRBJ1-1)
CASSQDWGAEAFF

SEQ ID NO: 506493 - protein, 12 aa, Homo sapiens
  CDR3 for alpha chain variable domain of TCR clone 253247 (TRAV12-3, TRAJ40)
CAMTSGTYKYIF

SEQ ID NO: 506494 - protein, 14 aa, Homo sapiens
  CDR3 for beta chain variable domain of TCR clone 253247 (TRBV19, TRBJ2-1)
CASPTFVLSGEQFF

SEQ ID NO: 506495 - protein, 11 aa, Homo sapiens
  CDR3 for alpha chain variable domain of TCR clone 253248 (TRAV21, TRAJ49)
CAVKDGNQFYF

SEQ ID NO: 506496 - protein, 14 aa, Homo sapiens
  CDR3 for beta chain variable domain of TCR clone 253248 (TRBV7-2, TRBJ2-5)
CASSPRGSLETQYF

SEQ ID NO: 506497 - protein, 18 aa, Homo sapiens
  CDR3 for alpha chain variable domain of TCR clone 253249 (TRAV12-2, )
WAVEDIQNPDPAVYQLID

SEQ ID NO: 506498 - protein, 18 aa, Homo sapiens
  CDR3 for beta chain variable domain of TCR clone 253249 (TRBV11-2, TRBJ2-3)
CASSLGGASRGAPNTQYF

SEQ ID NO: 506499 - protein, 11 aa, Homo sapiens
  CDR3 for alpha chain variable domain of TCR clone 253250 (TRAV1-2, TRAJ20)
CAVAHDYPLTF

SEQ ID NO: 506500 - protein, 18 aa, Homo sapiens
  CDR3 for beta chain variable domain of TCR clone 253250 (TRBV20-1, TRBJ2-6)
CSAETTPTHGSGANVLTF

SEQ ID NO: 506501 - protein, 14 aa, Homo sapiens
  CDR3 for alpha chain variable domain of TCR clone 253251 (TRAV1-2, TRAJ8)
CAVREDTGFQKLVF

SEQ ID NO: 506502 - protein, 13 aa, Homo sapiens
  CDR3 for beta chain variable domain of TCR clone 253251 (TRBV10-3, TRBJ2-7)
CDSKLAVNYEQYF

SEQ ID NO: 506503 - protein, 14 aa, Homo sapiens
  CDR3 for alpha chain variable domain of TCR clone 253252 (TRAV8-3, TRAJ4)
CAVGASGGYNKLIF

SEQ ID NO: 506504 - protein, 16 aa, Homo sapiens
  CDR3 for beta chain variable domain of TCR clone 253252 (TRBV7-3, TRBJ2-1)
CASSLSSGGGAKEQFF

SEQ ID NO: 506505 - protein, 18 aa, Homo sapiens
  CDR3 for alpha chain variable domain of TCR clone 253253 (TRAV21, TRAJ52)
CAVRPSPAGGTSYGKLAF

SEQ ID NO: 506506 - protein, 15 aa, Homo sapiens
  CDR3 for beta chain variable domain of TCR clone 253253 (TRBV5-5, TRBJ1-5)
CASSSTPGSNQPQHF

SEQ ID NO: 506507 - protein, 14 aa, Homo sapiens
  CDR3 for alpha chain variable domain of TCR clone 253254 (TRAV1-2, TRAJ16)
CAVNRFSDGQKLLF

SEQ ID NO: 506508 - protein, 12 aa, Homo sapiens
  CDR3 for beta chain variable domain of TCR clone 253254 (TRBV12-4, TRBJ2-1)
CASTYVLSEQFF

SEQ ID NO: 506509 - protein, 14 aa, Homo sapiens
  CDR3 for alpha chain variable domain of TCR clone 253255 (TRAV1-2, TRAJ8)
CAVREDPGFQKLVF

SEQ ID NO: 506510 - protein, 15 aa, Homo sapiens
  CDR3 for beta chain variable domain of TCR clone 253255 (TRBV5-5, TRBJ1-5)
CASSSTPGSNQPQHF

SEQ ID NO: 506511 - protein, 17 aa, Homo sapiens
  CDR3 for alpha chain variable domain of TCR clone 253256 (TRAV17, TRAJ52)
CATAPRAGGTSYGKLTF

SEQ ID NO: 506512 - protein, 15 aa, Homo sapiens
  CDR3 for beta chain variable domain of TCR clone 253256 (TRBV6-5, TRBJ2-1)
CASSYDAGAGNEQFF

SEQ ID NO: 506513 - protein, 11 aa, Homo sapiens
  CDR3 for alpha chain variable domain of TCR clone 253257 (TRAV35, TRAJ30)
CAGERDDKIIF

SEQ ID NO: 506514 - protein, 14 aa, Homo sapiens
  CDR3 for beta chain variable domain of TCR clone 253257 (TRBV15, TRBJ2-5)
CGTSGDRGQETQYF

SEQ ID NO: 506515 - protein, 12 aa, Homo sapiens
  CDR3 for alpha chain variable domain of TCR clone 253258 (TRAV25, TRAJ5)
CAGGGGRRALTF

SEQ ID NO: 506516 - protein, 15 aa, Homo sapiens
  CDR3 for beta chain variable domain of TCR clone 253258 (TRBV9, TRBJ1-2)
CASSVVGQANYGHTF

SEQ ID NO: 506517 - protein, 17 aa, Homo sapiens
  CDR3 for alpha chain variable domain of TCR clone 253259 (TRAV17, TRAJ28)
CATDPPRGGAGSYQLTF

SEQ ID NO: 506518 - protein, 16 aa, Homo sapiens
  CDR3 for beta chain variable domain of TCR clone 253259 (TRBV25-1, TRBJ1-1)
CASSGDRDRGRIEAFF

SEQ ID NO: 506519 - protein, 14 aa, Homo sapiens
  CDR3 for alpha chain variable domain of TCR clone 253260 (TRAV1-2, TRAJ16)
CAVNRLSDGQKLLF

SEQ ID NO: 506520 - protein, 16 aa, Homo sapiens
  CDR3 for beta chain variable domain of TCR clone 253260 (TRBV9, TRBJ2-1)
CASSALGGIGNNEQFF

SEQ ID NO: 506521 - protein, 18 aa, Homo sapiens
  CDR3 for alpha chain variable domain of TCR clone 253261 (TRAV13-1, TRAJ45)
CAANAVADSGGGADGLTF

SEQ ID NO: 506522 - protein, 15 aa, Homo sapiens
  CDR3 for beta chain variable domain of TCR clone 253261 (TRBV28, TRBJ2-4)
CAAGSGTLLMGIQYF

SEQ ID NO: 506523 - protein, 14 aa, Homo sapiens
  CDR3 for alpha chain variable domain of TCR clone 253262 (TRAV17, TRAJ16)
CATADFSDGQKLLF

SEQ ID NO: 506524 - protein, 15 aa, Homo sapiens
  CDR3 for beta chain variable domain of TCR clone 253262 (TRBV18, TRBJ2-1)
CASSPPSASYNEQCF

SEQ ID NO: 506525 - protein, 13 aa, Homo sapiens
  CDR3 for alpha chain variable domain of TCR clone 253263 (TRAV2, TRAJ29)
CAVYSSGNTPLVF

SEQ ID NO: 506526 - protein, 15 aa, Homo sapiens
  CDR3 for beta chain variable domain of TCR clone 253263 (TRBV10-3, TRBJ2-3)
CAIDTSGRRTDTQYF

SEQ ID NO: 506527 - protein, 14 aa, Homo sapiens
  CDR3 for alpha chain variable domain of TCR clone 253264 (TRAV1-1, TRAJ27)
CAVIYNTNAGKSPF

SEQ ID NO: 506528 - protein, 12 aa, Homo sapiens
  CDR3 for beta chain variable domain of TCR clone 253264 (TRBV11-2, TRBJ2-1)
CASSPGNNEQFF

SEQ ID NO: 506529 - protein, 13 aa, Homo sapiens
  CDR3 for alpha chain variable domain of TCR clone 253265 (TRAV8-3, TRAJ28)
CAVGAVGSYQLTF

SEQ ID NO: 506530 - protein, 17 aa, Homo sapiens
  CDR3 for beta chain variable domain of TCR clone 253265 (TRBV11-2, TRBJ2-1)
CASILYPPGVEYNEQFF

SEQ ID NO: 506531 - protein, 16 aa, Homo sapiens
  CDR3 for alpha chain variable domain of TCR clone 253266 (TRAV4, TRAJ22)
CLVGDLYSGSARQLTF

SEQ ID NO: 506532 - protein, 16 aa, Homo sapiens
  CDR3 for beta chain variable domain of TCR clone 253266 (TRBV7-9, TRBJ2-1)
CGSSDVAGGSYNERFF

SEQ ID NO: 506533 - protein, 16 aa, Homo sapiens
  CDR3 for alpha chain variable domain of TCR clone 253267 (TRAV8-3, TRAJ8)
CAVPRDGKTGFQKLLF

SEQ ID NO: 506534 - protein, 15 aa, Homo sapiens
  CDR3 for beta chain variable domain of TCR clone 253267 (TRBV6-1, TRBJ2-6)
CASSSRPSGANVLTF

SEQ ID NO: 506535 - protein, 21 aa, Homo sapiens
  CDR3 for alpha chain variable domain of TCR clone 253268 (TRAV1-1, TRAJ6)
CLLLLRCERLERTGGSYIPTF

SEQ ID NO: 506536 - protein, 15 aa, Homo sapiens
  CDR3 for beta chain variable domain of TCR clone 253268 (TRBV10-2, TRBJ2-6)
CASSEQGTGANVLTF

SEQ ID NO: 506537 - protein, 11 aa, Homo sapiens
  CDR3 for alpha chain variable domain of TCR clone 253269 (TRAV2, TRAJ21)
CAVFNVNKFYF

SEQ ID NO: 506538 - protein, 14 aa, Homo sapiens
  CDR3 for beta chain variable domain of TCR clone 253269 (TRBV15, TRBJ2-3)
CATRSGTSTDTQYF

SEQ ID NO: 506539 - protein, 19 aa, Homo sapiens
  CDR3 for alpha chain variable domain of TCR clone 253270 (TRAV17, TRAJ17)
CATDGRPGVIKAAGNKLTF

SEQ ID NO: 506540 - protein, 17 aa, Homo sapiens
  CDR3 for beta chain variable domain of TCR clone 253270 (TRBV12-4, TRBJ1-1)
CASSLSGFRIMNTEAFF

SEQ ID NO: 506541 - protein, 13 aa, Homo sapiens
  CDR3 for alpha chain variable domain of TCR clone 253271 (TRAV12-3, TRAJ33)
CAMSVNSNYQLIW

SEQ ID NO: 506542 - protein, 18 aa, Homo sapiens
  CDR3 for beta chain variable domain of TCR clone 253271 (TRBV18, TRBJ1-3)
CASSPRGGAGPSGNTIYF

SEQ ID NO: 506543 - protein, 13 aa, Homo sapiens
  CDR3 for alpha chain variable domain of TCR clone 253272 (TRAV21, TRAJ45)
CAVMGGGADGLTF

SEQ ID NO: 506544 - protein, 16 aa, Homo sapiens
  CDR3 for beta chain variable domain of TCR clone 253272 (TRBV20-1, TRBJ2-1)
CSARDHLAWGRGEQFF

SEQ ID NO: 506545 - protein, 14 aa, Homo sapiens
  CDR3 for alpha chain variable domain of TCR clone 253273 (TRAV12-3, TRAJ10)
RHLPLTGGGNKLTF

SEQ ID NO: 506546 - protein, 15 aa, Homo sapiens
  CDR3 for beta chain variable domain of TCR clone 253273 (TRBV25-1, TRBJ2-4)
CASSETESAKNIQYF

SEQ ID NO: 506547 - protein, 11 aa, Homo sapiens
  CDR3 for alpha chain variable domain of TCR clone 253274 (TRAV3, TRAJ21)
CAVGNFNKFYF

SEQ ID NO: 506548 - protein, 16 aa, Homo sapiens
  CDR3 for beta chain variable domain of TCR clone 253274 (TRBV19, TRBJ2-1)
CASSKAGPSPYNEQFS

SEQ ID NO: 506549 - protein, 15 aa, Homo sapiens
  CDR3 for alpha chain variable domain of TCR clone 253275 (TRAV13-1, TRAJ57)
CAASNTKGGSEKLVF

SEQ ID NO: 506550 - protein, 16 aa, Homo sapiens
  CDR3 for beta chain variable domain of TCR clone 253275 (TRBV19, TRBJ2-1)
CASSKAGPSSYNEQFF

SEQ ID NO: 506551 - protein, 15 aa, Homo sapiens
  CDR3 for alpha chain variable domain of TCR clone 253276 (TRAV17, TRAJ17)
CATDASIIRRQQANF

SEQ ID NO: 506552 - protein, 15 aa, Homo sapiens
  CDR3 for beta chain variable domain of TCR clone 253276 (TRBV6-3, TRBJ2-7)
CASSSPGTVFYEQYF

SEQ ID NO: 506553 - protein, 14 aa, Homo sapiens
  CDR3 for alpha chain variable domain of TCR clone 253277 (TRAV1-2, TRAJ12)
CVVSGTDSSYKLIF

SEQ ID NO: 506554 - protein, 15 aa, Homo sapiens
  CDR3 for beta chain variable domain of TCR clone 253277 (TRBV2, TRBJ2-4)
CASSGTNLAKNIQYF

SEQ ID NO: 506555 - protein, 22 aa, Homo sapiens
  CDR3 for alpha chain variable domain of TCR clone 253278 (TRAV3, )
CAVRVRGSGLLSHRRADVKVTQ

SEQ ID NO: 506556 - protein, 16 aa, Homo sapiens
  CDR3 for beta chain variable domain of TCR clone 253278 (TRBV24-1, TRBJ2-3)
CATSDPGTGATDTQYF

SEQ ID NO: 506557 - protein, 13 aa, Homo sapiens
  CDR3 for alpha chain variable domain of TCR clone 253279 (TRAV22, TRAJ12)
CAGRMDSSYKLIF

SEQ ID NO: 506558 - protein, 13 aa, Homo sapiens
  CDR3 for beta chain variable domain of TCR clone 253279 (TRBV3-1, TRBJ1-1)
CASSPGVITEAFF

SEQ ID NO: 506559 - protein, 13 aa, Homo sapiens
  CDR3 for alpha chain variable domain of TCR clone 253280 (TRAV12-1, TRAJ7)
CVVNMRGNNRLAF

SEQ ID NO: 506560 - protein, 15 aa, Homo sapiens
  CDR3 for beta chain variable domain of TCR clone 253280 (TRBV27, TRBJ2-3)
FASSLGLAATDTQYF

SEQ ID NO: 506561 - protein, 15 aa, Homo sapiens
  CDR3 for alpha chain variable domain of TCR clone 253281 (TRAV21, TRAJ24)
CAARSSTDSWGHLQF

SEQ ID NO: 506562 - protein, 13 aa, Homo sapiens
  CDR3 for beta chain variable domain of TCR clone 253281 (TRBV11-2, TRBJ2-5)
CASSSTGEETQYF

SEQ ID NO: 506563 - protein, 14 aa, Homo sapiens
  CDR3 for alpha chain variable domain of TCR clone 253282 (TRAV26-1, TRAJ38)
CIVMGAGNNRKLIG

SEQ ID NO: 506564 - protein, 14 aa, Homo sapiens
  CDR3 for beta chain variable domain of TCR clone 253282 (TRBV6-1, TRBJ1-3)
CASVQGGGGNTIYF

SEQ ID NO: 506565 - protein, 13 aa, Homo sapiens
  CDR3 for alpha chain variable domain of TCR clone 253283 (TRAV12-2, TRAJ37)
CAGGSGNTGKLSF

SEQ ID NO: 506566 - protein, 14 aa, Homo sapiens
  CDR3 for beta chain variable domain of TCR clone 253283 (TRBV6-1, TRBJ2-6)
CASQQGAGANVLTF

SEQ ID NO: 506567 - protein, 15 aa, Homo sapiens
  CDR3 for alpha chain variable domain of TCR clone 253284 (TRAV8-6, TRAJ38)
CAVSSNVGNNRKLIW

SEQ ID NO: 506568 - protein, 14 aa, Homo sapiens
  CDR3 for beta chain variable domain of TCR clone 253284 (TRBV14, TRBJ2-1)
CASSQVQGRGEKFF

SEQ ID NO: 506569 - protein, 13 aa, Homo sapiens
  CDR3 for alpha chain variable domain of TCR clone 253285 (TRAV13-1, TRAJ48)
CAAASFGNEKLTF

SEQ ID NO: 506570 - protein, 12 aa, Homo sapiens
  CDR3 for beta chain variable domain of TCR clone 253285 (TRBV24-1, TRBJ1-1)
CATLCPDTEAFF

SEQ ID NO: 506571 - protein, 14 aa, Homo sapiens
  CDR3 for alpha chain variable domain of TCR clone 253286 (TRAV12-3, TRAJ10)
SHLPLTGGGNKLTF

SEQ ID NO: 506572 - protein, 12 aa, Homo sapiens
  CDR3 for beta chain variable domain of TCR clone 253286 (TRBV7-8, TRBJ2-7)
RASSLGDREQYF

SEQ ID NO: 506573 - protein, 14 aa, Homo sapiens
  CDR3 for alpha chain variable domain of TCR clone 253287 (TRAV8-4, TRAJ9)
CAVRINTGGFKTSF

SEQ ID NO: 506574 - protein, 15 aa, Homo sapiens
  CDR3 for beta chain variable domain of TCR clone 253287 (TRBV10-2, TRBJ2-6)
CASSEQGTGTNVLTF

SEQ ID NO: 506575 - protein, 17 aa, Homo sapiens
  CDR3 for alpha chain variable domain of TCR clone 253288 (TRAV3, TRAJ6)
CAVKDGPRAGGSYIPTF

SEQ ID NO: 506576 - protein, 20 aa, Homo sapiens
  CDR3 for beta chain variable domain of TCR clone 253288 (TRBV28, TRBJ2-1)
CASTPIGRSPGLAGGNEQFF

SEQ ID NO: 506577 - protein, 14 aa, Homo sapiens
  CDR3 for alpha chain variable domain of TCR clone 253289 (TRAV26-1, TRAJ34)
CIVRVAYNTDKLIF

SEQ ID NO: 506578 - protein, 16 aa, Homo sapiens
  CDR3 for beta chain variable domain of TCR clone 253289 (TRBV2, TRBJ2-5)
CASSETQGVGEETQYF

SEQ ID NO: 506579 - protein, 17 aa, Homo sapiens
  CDR3 for alpha chain variable domain of TCR clone 253290 (TRAV9-2, TRAJ45)
CALSGYYSGGGADGLTF

SEQ ID NO: 506580 - protein, 16 aa, Homo sapiens
  CDR3 for beta chain variable domain of TCR clone 253290 (TRBV20-1, TRBJ1-4)
CSAPGQGLLTNEKLFF

SEQ ID NO: 506581 - protein, 13 aa, Homo sapiens
  CDR3 for alpha chain variable domain of TCR clone 253291 (TRAV8-3, TRAJ9)
CAVGITGGFKTIF

SEQ ID NO: 506582 - protein, 14 aa, Homo sapiens
  CDR3 for beta chain variable domain of TCR clone 253291 (TRBV18, TRBJ2-5)
CASSPGVSQETQYF

SEQ ID NO: 506583 - protein, 13 aa, Homo sapiens
  CDR3 for alpha chain variable domain of TCR clone 253292 (TRAV2, TRAJ16)
CAVEFGDGQKLLF

SEQ ID NO: 506584 - protein, 16 aa, Homo sapiens
  CDR3 for beta chain variable domain of TCR clone 253292 (TRBV7-3, TRBJ2-3)
CASSSLGGGSRDTQYF

SEQ ID NO: 506585 - protein, 14 aa, Homo sapiens
  CDR3 for alpha chain variable domain of TCR clone 253293 (TRAV2, TRAJ9)
CAVEDRSGGFKTIF

SEQ ID NO: 506586 - protein, 19 aa, Homo sapiens
  CDR3 for beta chain variable domain of TCR clone 253293 (TRBV25-1, TRBJ2-2)
CAILVYRVDRGRKTGELFL

SEQ ID NO: 506587 - protein, 13 aa, Homo sapiens
  CDR3 for alpha chain variable domain of TCR clone 253294 (TRAV12-2, TRAJ20)
CAVNRFDDYKLSF

SEQ ID NO: 506588 - protein, 12 aa, Homo sapiens
  CDR3 for beta chain variable domain of TCR clone 253294 (TRBV19, TRBJ2-1)
CASYQISNEQFF

SEQ ID NO: 506589 - protein, 23 aa, Homo sapiens
  CDR3 for alpha chain variable domain of TCR clone 253295 (TRAV26-1, TRAJ38)
CIADNAGNNHIQNPDPAVYQLRH

SEQ ID NO: 506590 - protein, 15 aa, Homo sapiens
  CDR3 for beta chain variable domain of TCR clone 253295 (TRBV7-9, TRBJ2-7)
CASSSSGLAVYEQYF

SEQ ID NO: 506591 - protein, 15 aa, Homo sapiens
  CDR3 for alpha chain variable domain of TCR clone 253296 (TRAV8-3, TRAJ7)
CAVGSISYGNNRLAF

SEQ ID NO: 506592 - protein, 14 aa, Homo sapiens
  CDR3 for beta chain variable domain of TCR clone 253296 (TRBV7-9, TRBJ2-2)
CASSLVQDTGELFF

SEQ ID NO: 506593 - protein, 14 aa, Homo sapiens
  CDR3 for alpha chain variable domain of TCR clone 253297 (TRAV36/DV7, TRAJ13)
WGSGGNGGYQKVTF

SEQ ID NO: 506594 - protein, 15 aa, Homo sapiens
  CDR3 for beta chain variable domain of TCR clone 253297 (TRBV19, TRBJ2-1)
CASSTGTSSYNEQFF

SEQ ID NO: 506595 - protein, 11 aa, Homo sapiens
  CDR3 for alpha chain variable domain of TCR clone 253298 (TRAV27, TRAJ37)
CRLWSTGKLIF

SEQ ID NO: 506596 - protein, 18 aa, Homo sapiens
  CDR3 for beta chain variable domain of TCR clone 253298 (TRBV7-9, TRBJ1-1)
CASSKPWDTMGMNTEAFF

SEQ ID NO: 506597 - protein, 12 aa, Homo sapiens
  CDR3 for alpha chain variable domain of TCR clone 253299 (TRAV3, TRAJ20)
CAVRDHDYKPSF

SEQ ID NO: 506598 - protein, 15 aa, Homo sapiens
  CDR3 for beta chain variable domain of TCR clone 253299 (TRBV7-9, TRBJ1-6)
CASSSPGRGNSPLHF

SEQ ID NO: 506599 - protein, 16 aa, Homo sapiens
  CDR3 for alpha chain variable domain of TCR clone 253300 (TRAV3, TRAJ10)
CAVRDMRAGGGNKLTF

SEQ ID NO: 506600 - protein, 14 aa, Homo sapiens
  CDR3 for beta chain variable domain of TCR clone 253300 (TRBV20-1, TRBJ2-1)
CSAMGQSSYNEQFF

SEQ ID NO: 506601 - protein, 18 aa, Homo sapiens
  CDR3 for alpha chain variable domain of TCR clone 253301 (TRAV20, TRAJ4)
CAVQPYYMFSGGYNKLIF

SEQ ID NO: 506602 - protein, 15 aa, Homo sapiens
  CDR3 for beta chain variable domain of TCR clone 253301 (TRBV12-4, TRBJ2-1)
CASSFWGEGTREQFF

SEQ ID NO: 506603 - protein, 10 aa, Homo sapiens
  CDR3 for alpha chain variable domain of TCR clone 253302 (TRAV1-2, TRAJ31)
CAFFDARLMF

SEQ ID NO: 506604 - protein, 17 aa, Homo sapiens
  CDR3 for beta chain variable domain of TCR clone 253302 (TRBV4-1, TRBJ2-7)
CASSPFLTSGGVVEQYF

SEQ ID NO: 506605 - protein, 15 aa, Homo sapiens
  CDR3 for alpha chain variable domain of TCR clone 253303 (TRAV10, TRAJ6)
CLVRPRTGGSYIPTF

SEQ ID NO: 506606 - protein, 14 aa, Homo sapiens
  CDR3 for beta chain variable domain of TCR clone 253303 (TRBV20-1, TRBJ2-4)
CSASGRVGENIQYF

SEQ ID NO: 506607 - protein, 12 aa, Homo sapiens
  CDR3 for alpha chain variable domain of TCR clone 253304 (TRAV20, TRAJ45)
CAVRGGADGLTF

SEQ ID NO: 506608 - protein, 16 aa, Homo sapiens
  CDR3 for beta chain variable domain of TCR clone 253304 (TRBV18, TRBJ1-1)
CASSPPVGDENTEAFF

SEQ ID NO: 506609 - protein, 15 aa, Homo sapiens
  CDR3 for alpha chain variable domain of TCR clone 253305 (TRAV13-2, TRAJ45)
FVPRVTGGGADGLTF

SEQ ID NO: 506610 - protein, 17 aa, Homo sapiens
  CDR3 for beta chain variable domain of TCR clone 253305 (TRBV19, TRBJ1-1)
CASSIAGRGLMNTEAFF

SEQ ID NO: 506611 - protein, 15 aa, Homo sapiens
  CDR3 for alpha chain variable domain of TCR clone 253306 (TRAV27, TRAJ38)
CAARRNAGNNRKLIW

SEQ ID NO: 506612 - protein, 17 aa, Homo sapiens
  CDR3 for beta chain variable domain of TCR clone 253306 (TRBV25-1, TRBJ2-7)
CASSDARVVFSYYEQYF

SEQ ID NO: 506613 - protein, 13 aa, Homo sapiens
  CDR3 for alpha chain variable domain of TCR clone 253307 (TRAV21, TRAJ57)
CAVTQGGYEKLVF

SEQ ID NO: 506614 - protein, 16 aa, Homo sapiens
  CDR3 for beta chain variable domain of TCR clone 253307 (TRBV29-1, TRBJ2-7)
CSVGDAEDGTAYEQYF

SEQ ID NO: 506615 - protein, 13 aa, Homo sapiens
  CDR3 for alpha chain variable domain of TCR clone 253308 (TRAV12-3, TRAJ6)
CANPSGGSYIPTF

SEQ ID NO: 506616 - protein, 14 aa, Homo sapiens
  CDR3 for beta chain variable domain of TCR clone 253308 (TRBV19, TRBJ1-1)
CASSMDRDATEAFF

SEQ ID NO: 506617 - protein, 13 aa, Homo sapiens
  CDR3 for alpha chain variable domain of TCR clone 253309 (TRAV36/DV7, TRAJ37)
CAVFSSNTGKLIF

SEQ ID NO: 506618 - protein, 15 aa, Homo sapiens
  CDR3 for beta chain variable domain of TCR clone 253309 (TRBV12-4, TRBJ2-5)
CQQFFVRGSQETQYF

SEQ ID NO: 506619 - protein, 12 aa, Homo sapiens
  CDR3 for alpha chain variable domain of TCR clone 253310 (TRAV2, TRAJ24)
CAATDSWGKFQF

SEQ ID NO: 506620 - protein, 13 aa, Homo sapiens
  CDR3 for beta chain variable domain of TCR clone 253310 (TRBV10-3, TRBJ2-7)
CASKLAVNYEQYF

SEQ ID NO: 506621 - protein, 16 aa, Homo sapiens
  CDR3 for alpha chain variable domain of TCR clone 253311 (TRAV3, TRAJ37)
CAVRGKGSGNTGKLIF

SEQ ID NO: 506622 - protein, 15 aa, Homo sapiens
  CDR3 for beta chain variable domain of TCR clone 253311 (TRBV6-5, TRBJ2-1)
CDSSYLGRSYNEQFF

SEQ ID NO: 506623 - protein, 13 aa, Homo sapiens
  CDR3 for alpha chain variable domain of TCR clone 253312 (TRAV17, TRAJ9)
CATDGTGGFKTIF

SEQ ID NO: 506624 - protein, 14 aa, Homo sapiens
  CDR3 for beta chain variable domain of TCR clone 253312 (TRBV28, TRBJ1-5)
CASSLGVLVKPQHF

SEQ ID NO: 506625 - protein, 16 aa, Homo sapiens
  CDR3 for alpha chain variable domain of TCR clone 253313 (TRAV8-3, TRAJ28)
CAVGATLGLGVPNSLS

SEQ ID NO: 506626 - protein, 14 aa, Homo sapiens
  CDR3 for beta chain variable domain of TCR clone 253313 (TRBV7-2, TRBJ2-1)
CASSLGVGYNEQFF

SEQ ID NO: 506627 - protein, 14 aa, Homo sapiens
  CDR3 for alpha chain variable domain of TCR clone 253314 (TRAV3, TRAJ7)
CAVREEEREQQIRF

SEQ ID NO: 506628 - protein, 12 aa, Homo sapiens
  CDR3 for beta chain variable domain of TCR clone 253314 (TRBV7-8, TRBJ2-7)
CASSLGDREQYF

SEQ ID NO: 506629 - protein, 16 aa, Homo sapiens
  CDR3 for alpha chain variable domain of TCR clone 253315 (TRAV3, TRAJ37)
CAVRGKGSGNTGKLIF

SEQ ID NO: 506630 - protein, 16 aa, Homo sapiens
  CDR3 for beta chain variable domain of TCR clone 253315 (TRBV12-5, TRBJ2-5)
CASCPRTSGNQETQYF

SEQ ID NO: 506631 - protein, 14 aa, Homo sapiens
  CDR3 for alpha chain variable domain of TCR clone 253316 (TRAV26-1, TRAJ39)
CIVRGSRVGKMLTF

SEQ ID NO: 506632 - protein, 15 aa, Homo sapiens
  CDR3 for beta chain variable domain of TCR clone 253316 (TRBV7-9, TRBJ1-5)
CASSQGHQPNQPQHF

SEQ ID NO: 506633 - protein, 13 aa, Homo sapiens
  CDR3 for alpha chain variable domain of TCR clone 253317 (TRAV21, TRAJ15)
CAVANQAGTALIF

SEQ ID NO: 506634 - protein, 18 aa, Homo sapiens
  CDR3 for beta chain variable domain of TCR clone 253317 (TRBV20-1, TRBJ2-3)
CSASGLAGGPGTTDTQYF

SEQ ID NO: 506635 - protein, 13 aa, Homo sapiens
  CDR3 for alpha chain variable domain of TCR clone 253318 (TRAV6, TRAJ45)
SPFSGGGADGLTF

SEQ ID NO: 506636 - protein, 13 aa, Homo sapiens
  CDR3 for beta chain variable domain of TCR clone 253318 (TRBV7-9, TRBJ1-2)
CASSLKQNYGYFF

SEQ ID NO: 506637 - protein, 14 aa, Homo sapiens
  CDR3 for alpha chain variable domain of TCR clone 253319 (TRAV12-2, TRAJ13)
CAVKKTGGYQKVTF

SEQ ID NO: 506638 - protein, 14 aa, Homo sapiens
  CDR3 for beta chain variable domain of TCR clone 253319 (TRBV7-9, TRBJ2-7)
CASSSRLVLHEQYF

SEQ ID NO: 506639 - protein, 16 aa, Homo sapiens
  CDR3 for alpha chain variable domain of TCR clone 253320 (TRAV4, TRAJ22)
CLVGDIYSGSARHLTF

SEQ ID NO: 506640 - protein, 16 aa, Homo sapiens
  CDR3 for beta chain variable domain of TCR clone 253320 (TRBV7-9, TRBJ2-1)
CASSDVAGGSYNEQFF

SEQ ID NO: 506641 - protein, 14 aa, Homo sapiens
  CDR3 for alpha chain variable domain of TCR clone 253321 (TRAV12-3, TRAJ10)
SHLPLTGGGNKLTF

SEQ ID NO: 506642 - protein, 19 aa, Homo sapiens
  CDR3 for beta chain variable domain of TCR clone 253321 (TRBV27, TRBJ1-4)
CASSLKAPFPGSTNEKLFF

SEQ ID NO: 506643 - protein, 14 aa, Homo sapiens
  CDR3 for alpha chain variable domain of TCR clone 253322 (TRAV12-2, TRAJ12)
CAVINRDSSYKLIF

SEQ ID NO: 506644 - protein, 15 aa, Homo sapiens
  CDR3 for beta chain variable domain of TCR clone 253322 (TRBV28, TRBJ2-1)
CASSLDTRSYNEQFF

SEQ ID NO: 506645 - protein, 15 aa, Homo sapiens
  CDR3 for alpha chain variable domain of TCR clone 253323 (TRAV26-1, TRAJ3)
CIVRSGYSSAYKIIF

SEQ ID NO: 506646 - protein, 14 aa, Homo sapiens
  CDR3 for beta chain variable domain of TCR clone 253323 (TRBV13, TRBJ2-5)
CASYRRLAEETQYF

SEQ ID NO: 506647 - protein, 12 aa, Homo sapiens
  CDR3 for alpha chain variable domain of TCR clone 253324 (TRAV26-1, TRAJ54)
CIGGWGAHKLVF

SEQ ID NO: 506648 - protein, 14 aa, Homo sapiens
  CDR3 for beta chain variable domain of TCR clone 253324 (TRBV11-2, TRBJ1-2)
CASSSGQAGDGYTF

SEQ ID NO: 506649 - protein, 15 aa, Homo sapiens
  CDR3 for alpha chain variable domain of TCR clone 253325 (TRAV27, TRAJ38)
CAASRNAGNNRKLIL

SEQ ID NO: 506650 - protein, 13 aa, Homo sapiens
  CDR3 for beta chain variable domain of TCR clone 253325 (TRBV12-5, TRBJ2-3)
CASGDRQSDTQYF

SEQ ID NO: 506651 - protein, 16 aa, Homo sapiens
  CDR3 for alpha chain variable domain of TCR clone 253326 (TRAV30, TRAJ24)
CGTEIVDADSWGKFQF

SEQ ID NO: 506652 - protein, 16 aa, Homo sapiens
  CDR3 for beta chain variable domain of TCR clone 253326 (TRBV6-1, TRBJ2-1)
CASILRQGSSYNEQFC

SEQ ID NO: 506653 - protein, 17 aa, Homo sapiens
  CDR3 for alpha chain variable domain of TCR clone 253327 (TRAV3, TRAJ42)
CAVRDMDYGGSQGNLIL

SEQ ID NO: 506654 - protein, 15 aa, Homo sapiens
  CDR3 for beta chain variable domain of TCR clone 253327 (TRBV2, TRBJ2-7)
CASSEGLARSYEQYF

SEQ ID NO: 506655 - protein, 14 aa, Homo sapiens
  CDR3 for alpha chain variable domain of TCR clone 253328 (TRAV12-2, TRAJ45)
CAVNIGGGADGLTF

SEQ ID NO: 506656 - protein, 12 aa, Homo sapiens
  CDR3 for beta chain variable domain of TCR clone 253328 (TRBV19, TRBJ2-2)
CQWYMEHRGAVF

SEQ ID NO: 506657 - protein, 13 aa, Homo sapiens
  CDR3 for alpha chain variable domain of TCR clone 253329 (TRAV8-3, TRAJ48)
CCGCNFGNDKLTF

SEQ ID NO: 506658 - protein, 12 aa, Homo sapiens
  CDR3 for beta chain variable domain of TCR clone 253329 (TRBV7-2, TRBJ2-5)
CASSQYQETQYF

SEQ ID NO: 506659 - protein, 14 aa, Homo sapiens
  CDR3 for alpha chain variable domain of TCR clone 253330 (TRAV12-2, TRAJ24)
CAVTPADSWGKLQF

SEQ ID NO: 506660 - protein, 15 aa, Homo sapiens
  CDR3 for beta chain variable domain of TCR clone 253330 (TRBV5-7, TRBJ1-5)
CASSYGKLWDQPQHF

SEQ ID NO: 506661 - protein, 11 aa, Homo sapiens
  CDR3 for alpha chain variable domain of TCR clone 253331 (TRAV12-3, TRAJ43)
CALSVSNDMRF

SEQ ID NO: 506662 - protein, 14 aa, Homo sapiens
  CDR3 for beta chain variable domain of TCR clone 253331 (TRBV4-2, TRBJ2-7)
CASSQDGRKGEQYF

SEQ ID NO: 506663 - protein, 12 aa, Homo sapiens
  CDR3 for alpha chain variable domain of TCR clone 253332 (TRAV8-3, TRAJ26)
CAGDNNGQNFVF

SEQ ID NO: 506664 - protein, 15 aa, Homo sapiens
  CDR3 for beta chain variable domain of TCR clone 253332 (TRBV9, TRBJ2-1)
CASSLAGSSYNEQFF

SEQ ID NO: 506665 - protein, 13 aa, Homo sapiens
  CDR3 for alpha chain variable domain of TCR clone 253333 (TRAV13-2, TRAJ48)
CAEMDFGNEKLTF

SEQ ID NO: 506666 - protein, 16 aa, Homo sapiens
  CDR3 for beta chain variable domain of TCR clone 253333 (TRBV7-8, TRBJ2-6)
CASRVGDSSGANVLTF

SEQ ID NO: 506667 - protein, 16 aa, Homo sapiens
  CDR3 for alpha chain variable domain of TCR clone 253334 (TRAV26-1, TRAJ31)
CIVRPPVLNNNPRLMF

SEQ ID NO: 506668 - protein, 17 aa, Homo sapiens
  CDR3 for beta chain variable domain of TCR clone 253334 (TRBV5-1, TRBJ1-5)
CASSLVGREEGNQPQHF

SEQ ID NO: 506669 - protein, 13 aa, Homo sapiens
  CDR3 for alpha chain variable domain of TCR clone 253335 (TRAV26-2, TRAJ54)
CIPRVGGAQKLVF

SEQ ID NO: 506670 - protein, 16 aa, Homo sapiens
  CDR3 for beta chain variable domain of TCR clone 253335 (TRBV4-1, TRBJ1-1)
CASSSMSERPNTEASF

SEQ ID NO: 506671 - protein, 13 aa, Homo sapiens
  CDR3 for alpha chain variable domain of TCR clone 253336 (TRAV9-2, TRAJ3)
CSDLYSSASKIIF

SEQ ID NO: 506672 - protein, 17 aa, Homo sapiens
  CDR3 for beta chain variable domain of TCR clone 253336 (TRBV11-2, TRBJ2-1)
CASSLYPPGVEYNEQFF

SEQ ID NO: 506673 - protein, 13 aa, Homo sapiens
  CDR3 for alpha chain variable domain of TCR clone 253337 (TRAV12-2, TRAJ37)
CAGGSGNTGNLIF

SEQ ID NO: 506674 - protein, 17 aa, Homo sapiens
  CDR3 for beta chain variable domain of TCR clone 253337 (TRBV11-2, TRBJ2-1)
CASSLYPPGVEYNEQFF

SEQ ID NO: 506675 - protein, 15 aa, Homo sapiens
  CDR3 for alpha chain variable domain of TCR clone 253338 (TRAV26-1, TRAJ44)
CIVRIGTGTASKLTF

SEQ ID NO: 506676 - protein, 15 aa, Homo sapiens
  CDR3 for beta chain variable domain of TCR clone 253338 (TRBV7-6, TRBJ2-1)
FASSSLAGEGNEQFF

SEQ ID NO: 506677 - protein, 13 aa, Homo sapiens
  CDR3 for alpha chain variable domain of TCR clone 253339 (TRAV4, TRAJ33)
CLVGDMNNYQLIW

SEQ ID NO: 506678 - protein, 14 aa, Homo sapiens
  CDR3 for beta chain variable domain of TCR clone 253339 (TRBV7-9, TRBJ1-1)
CASSLGGANTEAVF

SEQ ID NO: 506679 - protein, 13 aa, Homo sapiens
  CDR3 for alpha chain variable domain of TCR clone 253340 (TRAV2, TRAJ40)
CAVVTSGTYKYIF

SEQ ID NO: 506680 - protein, 13 aa, Homo sapiens
  CDR3 for beta chain variable domain of TCR clone 253340 (TRBV7-9, TRBJ2-5)
CASLPSVRETQYF

SEQ ID NO: 506681 - protein, 15 aa, Homo sapiens
  CDR3 for alpha chain variable domain of TCR clone 253341 (TRAV8-3, TRAJ7)
CAVGSISYGNTRLAF

SEQ ID NO: 506682 - protein, 15 aa, Homo sapiens
  CDR3 for beta chain variable domain of TCR clone 253341 (TRBV4-2, TRBJ1-1)
CASSQEDLPRTEAFF

SEQ ID NO: 506683 - protein, 14 aa, Homo sapiens
  CDR3 for alpha chain variable domain of TCR clone 253342 (TRAV12-2, TRAJ45)
CAVNNGGGADGLTF

SEQ ID NO: 506684 - protein, 19 aa, Homo sapiens
  CDR3 for beta chain variable domain of TCR clone 253342 (TRBV7-2, TRBJ2-3)
CASSLVLSAYISRPDTQYF

SEQ ID NO: 506685 - protein, 22 aa, Homo sapiens
  CDR3 for alpha chain variable domain of TCR clone 253343 (TRAV30, TRAJ48)
TASQLSYSGTYFGGIGNEKLTF

SEQ ID NO: 506686 - protein, 14 aa, Homo sapiens
  CDR3 for beta chain variable domain of TCR clone 253343 (TRBV7-6, TRBJ2-3)
CASSVAGGTDTQYF

SEQ ID NO: 506687 - protein, 14 aa, Homo sapiens
  CDR3 for alpha chain variable domain of TCR clone 253344 (TRAV12-3, TRAJ10)
SHLPLTEGGNKLTF

SEQ ID NO: 506688 - protein, 15 aa, Homo sapiens
  CDR3 for beta chain variable domain of TCR clone 253344 (TRBV28, TRBJ2-5)
CASSPPWSYQETQYF

SEQ ID NO: 506689 - protein, 16 aa, Homo sapiens
  CDR3 for alpha chain variable domain of TCR clone 253345 (TRAV22, TRAJ45)
CAVERGKRGGAGGLTF

SEQ ID NO: 506690 - protein, 15 aa, Homo sapiens
  CDR3 for beta chain variable domain of TCR clone 253345 (TRBV6-3, TRBJ2-7)
CASSSPGTVFYEQYF

SEQ ID NO: 506691 - protein, 14 aa, Homo sapiens
  CDR3 for alpha chain variable domain of TCR clone 253346 (TRAV2, TRAJ9)
CAVDPNTGGFKTIF

SEQ ID NO: 506692 - protein, 11 aa, Homo sapiens
  CDR3 for beta chain variable domain of TCR clone 253346 (TRBV11-2, TRBJ2-2)
CASSLPGEQFF

SEQ ID NO: 506693 - protein, 14 aa, Homo sapiens
  CDR3 for alpha chain variable domain of TCR clone 253347 (TRAV13-1, TRAJ53)
CAASISGSNYKLTF

SEQ ID NO: 506694 - protein, 14 aa, Homo sapiens
  CDR3 for beta chain variable domain of TCR clone 253347 (TRBV7-9, TRBJ2-2)
CASSGLADTGELFF

SEQ ID NO: 506695 - protein, 15 aa, Homo sapiens
  CDR3 for alpha chain variable domain of TCR clone 253348 (TRAV12-2, TRAJ53)
CAVNGGGGSNCKLTF

SEQ ID NO: 506696 - protein, 12 aa, Homo sapiens
  CDR3 for beta chain variable domain of TCR clone 253348 (TRBV7-6, TRBJ2-5)
CASSLSQETQYF

SEQ ID NO: 506697 - protein, 15 aa, Homo sapiens
  CDR3 for alpha chain variable domain of TCR clone 253349 (TRAV3, TRAJ22)
CAVRDRGGSARQLTF

SEQ ID NO: 506698 - protein, 14 aa, Homo sapiens
  CDR3 for beta chain variable domain of TCR clone 253349 (TRBV19, TRBJ1-6)
CASSSGTGYSPLHF

SEQ ID NO: 506699 - protein, 11 aa, Homo sapiens
  CDR3 for alpha chain variable domain of TCR clone 253350 (TRAV23/DV6, TRAJ17)
CKWAAGNKITF

SEQ ID NO: 506700 - protein, 14 aa, Homo sapiens
  CDR3 for beta chain variable domain of TCR clone 253350 (TRBV6-1, TRBJ2-7)
CASSCGSYLYEQYF

SEQ ID NO: 506701 - protein, 11 aa, Homo sapiens
  CDR3 for alpha chain variable domain of TCR clone 253351 (TRAV25, TRAJ21)
CAGTIFNKFYF

SEQ ID NO: 506702 - protein, 14 aa, Homo sapiens
  CDR3 for beta chain variable domain of TCR clone 253351 (TRBV13, TRBJ2-5)
CASSLGREQETQYF

SEQ ID NO: 506703 - protein, 19 aa, Homo sapiens
  CDR3 for alpha chain variable domain of TCR clone 253352 (TRAV1-2, TRAJ16)
LSYNVLDGLEEKDGQKLLF

SEQ ID NO: 506704 - protein, 19 aa, Homo sapiens
  CDR3 for beta chain variable domain of TCR clone 253352 (TRBV25-1, TRBJ2-2)
CAILVYRVDRGRKTGELLF

SEQ ID NO: 506705 - protein, 12 aa, Homo sapiens
  CDR3 for alpha chain variable domain of TCR clone 253353 (TRAV20, TRAJ54)
CAVQEGARKLVF

SEQ ID NO: 506706 - protein, 16 aa, Homo sapiens
  CDR3 for beta chain variable domain of TCR clone 253353 (TRBV12-4, TRBJ2-5)
CASSFFVRGRQETQYF

SEQ ID NO: 506707 - protein, 11 aa, Homo sapiens
  CDR3 for alpha chain variable domain of TCR clone 253354 (TRAV1-1, TRAJ23)
CAVRQGGKLIF

SEQ ID NO: 506708 - protein, 14 aa, Homo sapiens
  CDR3 for beta chain variable domain of TCR clone 253354 (TRBV11-2, TRBJ2-7)
CASSLVPGGDEQYF

SEQ ID NO: 506709 - protein, 14 aa, Homo sapiens
  CDR3 for alpha chain variable domain of TCR clone 253355 (TRAV1-2, TRAJ16)
CAVNRFSDGQKPLF

SEQ ID NO: 506710 - protein, 13 aa, Homo sapiens
  CDR3 for beta chain variable domain of TCR clone 253355 (TRBV19, TRBJ1-2)
CASSVPGQDGYTF

SEQ ID NO: 506711 - protein, 11 aa, Homo sapiens
  CDR3 for alpha chain variable domain of TCR clone 253356 (TRAV13-1, TRAJ39)
CASHAGTMLTF

SEQ ID NO: 506712 - protein, 15 aa, Homo sapiens
  CDR3 for beta chain variable domain of TCR clone 253356 (TRBV20-1, TRBJ2-7)
CSARDRVSGMDEQYF

SEQ ID NO: 506713 - protein, 15 aa, Homo sapiens
  CDR3 for alpha chain variable domain of TCR clone 253357 (TRAV8-3, TRAJ23)
CAVGDRYNQGGKLIF

SEQ ID NO: 506714 - protein, 17 aa, Homo sapiens
  CDR3 for beta chain variable domain of TCR clone 253357 (TRBV4-1, TRBJ1-4)
CASSQEGPWGVEEKLFF

SEQ ID NO: 506715 - protein, 13 aa, Homo sapiens
  CDR3 for alpha chain variable domain of TCR clone 253358 (TRAV8-3, TRAJ28)
RAVGAVRSYQLTF

SEQ ID NO: 506716 - protein, 14 aa, Homo sapiens
  CDR3 for beta chain variable domain of TCR clone 253358 (TRBV7-2, TRBJ2-7)
CASRSQGAAYEQYF

SEQ ID NO: 506717 - protein, 14 aa, Homo sapiens
  CDR3 for alpha chain variable domain of TCR clone 253359 (TRAV8-3, TRAJ39)
CAVGANNACNMLTF

SEQ ID NO: 506718 - protein, 13 aa, Homo sapiens
  CDR3 for beta chain variable domain of TCR clone 253359 (TRBV20-1, TRBJ1-1)
CSARGGGNTEAFF

SEQ ID NO: 506719 - protein, 15 aa, Homo sapiens
  CDR3 for alpha chain variable domain of TCR clone 253360 (TRAV12-1, TRAJ44)
CGADEYTGTASKLTF

SEQ ID NO: 506720 - protein, 14 aa, Homo sapiens
  CDR3 for beta chain variable domain of TCR clone 253360 (TRBV5-1, TRBJ1-2)
CASSLEPVNYGYTF

SEQ ID NO: 506721 - protein, 18 aa, Homo sapiens
  CDR3 for alpha chain variable domain of TCR clone 253361 (TRAV26-1, TRAJ27)
CIVRPSFNYNTNAGKSTF

SEQ ID NO: 506722 - protein, 14 aa, Homo sapiens
  CDR3 for beta chain variable domain of TCR clone 253361 (TRBV10-3, TRBJ1-6)
CAISVDGDESPLNL

SEQ ID NO: 506723 - protein, 14 aa, Homo sapiens
  CDR3 for alpha chain variable domain of TCR clone 253362 (TRAV1-2, TRAJ16)
CAVNRFSDGQKLLY

SEQ ID NO: 506724 - protein, 12 aa, Homo sapiens
  CDR3 for beta chain variable domain of TCR clone 253362 (TRBV5-1, TRBJ2-5)
CASSWDQETQYF

SEQ ID NO: 506725 - protein, 14 aa, Homo sapiens
  CDR3 for alpha chain variable domain of TCR clone 253363 (TRAV12-2, TRAJ40)
CAVKIPSGTYKYIF

SEQ ID NO: 506726 - protein, 20 aa, Homo sapiens
  CDR3 for beta chain variable domain of TCR clone 253363 (TRBV28, TRBJ2-1)
CASTPIGRSPGLAGGNEQFC

SEQ ID NO: 506727 - protein, 14 aa, Homo sapiens
  CDR3 for alpha chain variable domain of TCR clone 253364 (TRAV29/DV5, TRAJ12)
CAATRMDSSYKLIF

SEQ ID NO: 506728 - protein, 13 aa, Homo sapiens
  CDR3 for beta chain variable domain of TCR clone 253364 (TRBV7-2, TRBJ2-5)
CASSYWTVETQYF

SEQ ID NO: 506729 - protein, 16 aa, Homo sapiens
  CDR3 for alpha chain variable domain of TCR clone 253365 (TRAV30, TRAJ24)
CGTEIVDADSWGTFQF

SEQ ID NO: 506730 - protein, 18 aa, Homo sapiens
  CDR3 for beta chain variable domain of TCR clone 253365 (TRBV7-9, TRBJ2-7)
CASSLTTSGSRTWYEQYF

SEQ ID NO: 506731 - protein, 15 aa, Homo sapiens
  CDR3 for alpha chain variable domain of TCR clone 253366 (TRAV4, TRAJ32)
CLVGEDGGATNKLIF

SEQ ID NO: 506732 - protein, 15 aa, Homo sapiens
  CDR3 for beta chain variable domain of TCR clone 253366 (TRBV9, TRBJ1-6)
CASSVAGTGDSPLHF

SEQ ID NO: 506733 - protein, 17 aa, Homo sapiens
  CDR3 for alpha chain variable domain of TCR clone 253367 (TRAV13-1, TRAJ31)
CAPRDRLMFGEGTKLVV

SEQ ID NO: 506734 - protein, 12 aa, Homo sapiens
  CDR3 for beta chain variable domain of TCR clone 253367 (TRBV7-9, TRBJ2-7)
CASSLEGYEQYF

SEQ ID NO: 506735 - protein, 14 aa, Homo sapiens
  CDR3 for alpha chain variable domain of TCR clone 253368 (TRAV3, TRAJ6)
CAVRDWGGSSIPTF

SEQ ID NO: 506736 - protein, 17 aa, Homo sapiens
  CDR3 for beta chain variable domain of TCR clone 253368 (TRBV6-5, TRBJ2-1)
CASRLSGRFESYNEQFF

SEQ ID NO: 506737 - protein, 13 aa, Homo sapiens
  CDR3 for alpha chain variable domain of TCR clone 253369 (TRAV2, TRAJ40)
CAVVTSGTYKYIF

SEQ ID NO: 506738 - protein, 14 aa, Homo sapiens
  CDR3 for beta chain variable domain of TCR clone 253369 (TRBV19, TRBJ2-1)
CESKNLVLRGEKFF

SEQ ID NO: 506739 - protein, 14 aa, Homo sapiens
  CDR3 for alpha chain variable domain of TCR clone 253370 (TRAV12-3, TRAJ42)
CAMNYGGSQGNLIF

SEQ ID NO: 506740 - protein, 15 aa, Homo sapiens
  CDR3 for beta chain variable domain of TCR clone 253370 (TRBV5-7, TRBJ1-5)
CASSYGTLWDQPQHF

SEQ ID NO: 506741 - protein, 16 aa, Homo sapiens
  CDR3 for alpha chain variable domain of TCR clone 253371 (TRAV22, TRAJ45)
CAVERGKRGGADGLTF

SEQ ID NO: 506742 - protein, 15 aa, Homo sapiens
  CDR3 for beta chain variable domain of TCR clone 253371 (TRBV20-1, TRBJ2-1)
CSARGIGGTYNEQFF

SEQ ID NO: 506743 - protein, 16 aa, Homo sapiens
  CDR3 for alpha chain variable domain of TCR clone 253372 (TRAV13-1, TRAJ31)
CAPRDRLMFGDGTQLL

SEQ ID NO: 506744 - protein, 12 aa, Homo sapiens
  CDR3 for beta chain variable domain of TCR clone 253372 (TRBV7-9, TRBJ2-7)
CASSLEGYEQYF

SEQ ID NO: 506745 - protein, 13 aa, Homo sapiens
  CDR3 for alpha chain variable domain of TCR clone 253373 (TRAV12-1, TRAJ11)
CVVNRAGYSTLTF

SEQ ID NO: 506746 - protein, 11 aa, Homo sapiens
  CDR3 for beta chain variable domain of TCR clone 253373 (TRBV7-8, TRBJ2-7)
CASSLSLEQYF

SEQ ID NO: 506747 - protein, 14 aa, Homo sapiens
  CDR3 for alpha chain variable domain of TCR clone 253374 (TRAV12-2, TRAJ9)
CAVSALEGGFKTIF

SEQ ID NO: 506748 - protein, 16 aa, Homo sapiens
  CDR3 for beta chain variable domain of TCR clone 253374 (TRBV19, TRBJ1-6)
CASSVAPVAGNSPLHF

SEQ ID NO: 506749 - protein, 10 aa, Homo sapiens
  CDR3 for alpha chain variable domain of TCR clone 253375 (TRAV1-2, TRAJ20)
CALNDYKLSV

SEQ ID NO: 506750 - protein, 14 aa, Homo sapiens
  CDR3 for beta chain variable domain of TCR clone 253375 (TRBV19, TRBJ2-1)
CASPTFVLSGEQFF

SEQ ID NO: 506751 - protein, 15 aa, Homo sapiens
  CDR3 for alpha chain variable domain of TCR clone 253376 (TRAV8-6, TRAJ37)
CAVIFSSGNTVKLIF

SEQ ID NO: 506752 - protein, 15 aa, Homo sapiens
  CDR3 for beta chain variable domain of TCR clone 253376 (TRBV25-1, TRBJ2-4)
CASSETESAKNIQYF

SEQ ID NO: 506753 - protein, 17 aa, Homo sapiens
  CDR3 for alpha chain variable domain of TCR clone 253377 (TRAV3, TRAJ6)
RAVRDGPRAGGSDIPTF

SEQ ID NO: 506754 - protein, 20 aa, Homo sapiens
  CDR3 for beta chain variable domain of TCR clone 253377 (TRBV28, TRBJ2-1)
CASTPIGRSPGLAGGNEQFF

SEQ ID NO: 506755 - protein, 14 aa, Homo sapiens
  CDR3 for alpha chain variable domain of TCR clone 253378 (TRAV8-4, TRAJ15)
CAVTIREAGTALIF

SEQ ID NO: 506756 - protein, 20 aa, Homo sapiens
  CDR3 for beta chain variable domain of TCR clone 253378 (TRBV7-8, TRBJ2-2)
CASSHLFPGPTIHITGELFF

SEQ ID NO: 506757 - protein, 12 aa, Homo sapiens
  CDR3 for alpha chain variable domain of TCR clone 253379 (TRAV8-3, TRAJ20)
CAVGANDYKLSF

SEQ ID NO: 506758 - protein, 12 aa, Homo sapiens
  CDR3 for beta chain variable domain of TCR clone 253379 (TRBV5-4, TRBJ1-1)
CASSFGQTEAFF

SEQ ID NO: 506759 - protein, 12 aa, Homo sapiens
  CDR3 for alpha chain variable domain of TCR clone 253380 (TRAV17, TRAJ12)
CATLRSSYKMIF

SEQ ID NO: 506760 - protein, 16 aa, Homo sapiens
  CDR3 for beta chain variable domain of TCR clone 253380 (TRBV28, TRBJ2-7)
CASSLFFETGGPEQYF

SEQ ID NO: 506761 - protein, 22 aa, Homo sapiens
  CDR3 for alpha chain variable domain of TCR clone 253381 (TRAV21, )
CAVRQDAGNNHIQNPDPAVYQL

SEQ ID NO: 506762 - protein, 10 aa, Homo sapiens
  CDR3 for beta chain variable domain of TCR clone 253381 (TRBV24-1, TRBJ2-2)
CATSEADLER

SEQ ID NO: 506763 - protein, 12 aa, Homo sapiens
  CDR3 for alpha chain variable domain of TCR clone 253382 (TRAV12-2, TRAJ10)
WGVTGGGNKLTF

SEQ ID NO: 506764 - protein, 15 aa, Homo sapiens
  CDR3 for beta chain variable domain of TCR clone 253382 (TRBV20-1, TRBJ2-7)
CGARDRVSGVDEQYF

SEQ ID NO: 506765 - protein, 12 aa, Homo sapiens
  CDR3 for alpha chain variable domain of TCR clone 253383 (TRAV12-1, TRAJ40)
CVVYAGTYKYIF

SEQ ID NO: 506766 - protein, 16 aa, Homo sapiens
  CDR3 for beta chain variable domain of TCR clone 253383 (TRBV3-1, TRBJ2-5)
CASSPGQFNGFGTQYF

SEQ ID NO: 506767 - protein, 10 aa, Homo sapiens
  CDR3 for alpha chain variable domain of TCR clone 253384 (TRAV1-2, TRAJ31)
CAFFDARLMF

SEQ ID NO: 506768 - protein, 17 aa, Homo sapiens
  CDR3 for beta chain variable domain of TCR clone 253384 (TRBV7-2, TRBJ2-2)
CASSPRGAGEGTGELFF

SEQ ID NO: 506769 - protein, 14 aa, Homo sapiens
  CDR3 for alpha chain variable domain of TCR clone 253385 (TRAV30, TRAJ33)
CGTERRFSNYQLIW

SEQ ID NO: 506770 - protein, 16 aa, Homo sapiens
  CDR3 for beta chain variable domain of TCR clone 253385 (TRBV7-3, TRBJ2-2)
CASSLKRGILSGELFF

SEQ ID NO: 506771 - protein, 11 aa, Homo sapiens
  CDR3 for alpha chain variable domain of TCR clone 253386 (TRAV12-3, TRAJ17)
CNDAYRQKLTF

SEQ ID NO: 506772 - protein, 12 aa, Homo sapiens
  CDR3 for beta chain variable domain of TCR clone 253386 (TRBV2, TRBJ2-1)
CAYGPPGNEQFF

SEQ ID NO: 506773 - protein, 15 aa, Homo sapiens
  CDR3 for alpha chain variable domain of TCR clone 253387 (TRAV21, TRAJ24)
CAARSSTDSWGKLQF

SEQ ID NO: 506774 - protein, 15 aa, Homo sapiens
  CDR3 for beta chain variable domain of TCR clone 253387 (TRBV4-1, TRBJ2-7)
CASSQNTGSLYEQYF

SEQ ID NO: 506775 - protein, 16 aa, Homo sapiens
  CDR3 for alpha chain variable domain of TCR clone 253388 (TRAV26-1, TRAJ53)
CIVRVARGGNNYKLTF

SEQ ID NO: 506776 - protein, 14 aa, Homo sapiens
  CDR3 for beta chain variable domain of TCR clone 253388 (TRBV12-4, TRBJ1-1)
CASSLGTGGTEAFF

SEQ ID NO: 506777 - protein, 12 aa, Homo sapiens
  CDR3 for alpha chain variable domain of TCR clone 253389 (TRAV13-2, TRAJ8)
CAPWLGFQKLVF

SEQ ID NO: 506778 - protein, 15 aa, Homo sapiens
  CDR3 for beta chain variable domain of TCR clone 253389 (TRBV12-4, TRBJ2-5)
CSSSLSGAFQETQYF

SEQ ID NO: 506779 - protein, 13 aa, Homo sapiens
  CDR3 for alpha chain variable domain of TCR clone 253390 (TRAV21, TRAJ15)
CAVANQAGTDLIF

SEQ ID NO: 506780 - protein, 14 aa, Homo sapiens
  CDR3 for beta chain variable domain of TCR clone 253390 (TRBV27, TRBJ2-2)
CASSLGAATGELFF

SEQ ID NO: 506781 - protein, 14 aa, Homo sapiens
  CDR3 for alpha chain variable domain of TCR clone 253391 (TRAV20, TRAJ49)
GAVQAVVAGNQFYF

SEQ ID NO: 506782 - protein, 17 aa, Homo sapiens
  CDR3 for beta chain variable domain of TCR clone 253391 (TRBV11-2, TRBJ2-1)
CASSLYPPGVEYNEQFF

SEQ ID NO: 506783 - protein, 12 aa, Homo sapiens
  CDR3 for alpha chain variable domain of TCR clone 253392 (TRAV16, TRAJ26)
CALRSYGQNFVF

SEQ ID NO: 506784 - protein, 14 aa, Homo sapiens
  CDR3 for beta chain variable domain of TCR clone 253392 (TRBV7-2, TRBJ2-7)
CASRSQGAAYEQYF

SEQ ID NO: 506785 - protein, 15 aa, Homo sapiens
  CDR3 for alpha chain variable domain of TCR clone 253393 (TRAV3, TRAJ22)
CAVRDRGGSARQLSF

SEQ ID NO: 506786 - protein, 13 aa, Homo sapiens
  CDR3 for beta chain variable domain of TCR clone 253393 (TRBV2, TRBJ1-5)
CATAGPGNQPQHF

SEQ ID NO: 506787 - protein, 16 aa, Homo sapiens
  CDR3 for alpha chain variable domain of TCR clone 253394 (TRAV23/DV6, )
CADIQNPDPAVYRLRD

SEQ ID NO: 506788 - protein, 13 aa, Homo sapiens
  CDR3 for beta chain variable domain of TCR clone 253394 (TRBV28, TRBJ2-7)
CASRSSGVYEQYF

SEQ ID NO: 506789 - protein, 16 aa, Homo sapiens
  CDR3 for alpha chain variable domain of TCR clone 253395 (TRAV17, TRAJ22)
CATDAISSGSARQLTF

SEQ ID NO: 506790 - protein, 15 aa, Homo sapiens
  CDR3 for beta chain variable domain of TCR clone 253395 (TRBV5-1, TRBJ2-1)
CASSPPGPPTMSSSS

SEQ ID NO: 506791 - protein, 14 aa, Homo sapiens
  CDR3 for alpha chain variable domain of TCR clone 253396 (TRAV13-1, TRAJ33)
CAASSRDSNYQLIW

SEQ ID NO: 506792 - protein, 13 aa, Homo sapiens
  CDR3 for beta chain variable domain of TCR clone 253396 (TRBV12-4, TRBJ1-2)
CASSLRQGKGYTF

SEQ ID NO: 506793 - protein, 12 aa, Homo sapiens
  CDR3 for alpha chain variable domain of TCR clone 253397 (TRAV12-3, TRAJ17)
CAMTLTGTKLSF

SEQ ID NO: 506794 - protein, 15 aa, Homo sapiens
  CDR3 for beta chain variable domain of TCR clone 253397 (TRBV20-1, TRBJ2-7)
CSARDRVSGMDEQYF

SEQ ID NO: 506795 - protein, 14 aa, Homo sapiens
  CDR3 for alpha chain variable domain of TCR clone 253398 (TRAV21, TRAJ35)
CAVMSIGFGNVLHC

SEQ ID NO: 506796 - protein, 15 aa, Homo sapiens
  CDR3 for beta chain variable domain of TCR clone 253398 (TRBV2, TRBJ2-1)
CASSELAGSYNEQFF

SEQ ID NO: 506797 - protein, 15 aa, Homo sapiens
  CDR3 for alpha chain variable domain of TCR clone 253399 (TRAV8-2, TRAJ16)
CVVSDGFSDGQMLLF

SEQ ID NO: 506798 - protein, 15 aa, Homo sapiens
  CDR3 for beta chain variable domain of TCR clone 253399 (TRBV5-1, TRBJ2-4)
CASSLGGGGSYIQYF

SEQ ID NO: 506799 - protein, 11 aa, Homo sapiens
  CDR3 for alpha chain variable domain of TCR clone 253400 (TRAV17, TRAJ43)
CATPRSNDMRF

SEQ ID NO: 506800 - protein, 15 aa, Homo sapiens
  CDR3 for beta chain variable domain of TCR clone 253400 (TRBV20-1, TRBJ2-7)
CSARDQVSGMDEQYF

SEQ ID NO: 506801 - protein, 14 aa, Homo sapiens
  CDR3 for alpha chain variable domain of TCR clone 253401 (TRAV2, TRAJ22)
CAVEDSGSARQLTL

SEQ ID NO: 506802 - protein, 15 aa, Homo sapiens
  CDR3 for beta chain variable domain of TCR clone 253401 (TRBV28, TRBJ1-2)
CASSLPVGHGDGYTF

SEQ ID NO: 506803 - protein, 13 aa, Homo sapiens
  CDR3 for alpha chain variable domain of TCR clone 253402 (TRAV2, TRAJ15)
CAVASQAGTALIF

SEQ ID NO: 506804 - protein, 16 aa, Homo sapiens
  CDR3 for beta chain variable domain of TCR clone 253402 (TRBV5-1, TRBJ1-1)
CASSSGGNSLNNEAFF

SEQ ID NO: 506805 - protein, 11 aa, Homo sapiens
  CDR3 for alpha chain variable domain of TCR clone 253403 (TRAV8-3, TRAJ18)
CAVGGRQRLNP

SEQ ID NO: 506806 - protein, 12 aa, Homo sapiens
  CDR3 for beta chain variable domain of TCR clone 253403 (TRBV28, TRBJ2-6)
CAIQAGANVLAF

SEQ ID NO: 506807 - protein, 14 aa, Homo sapiens
  CDR3 for alpha chain variable domain of TCR clone 253404 (TRAV12-2, TRAJ40)
CAVKIPSGTYKNIS

SEQ ID NO: 506808 - protein, 14 aa, Homo sapiens
  CDR3 for beta chain variable domain of TCR clone 253404 (TRBV20-1, TRBJ1-1)
CSAQTRIGGTEAFF

SEQ ID NO: 506809 - protein, 16 aa, Homo sapiens
  CDR3 for alpha chain variable domain of TCR clone 253405 (TRAV4, TRAJ22)
CLVGDLYSGSARPLTF

SEQ ID NO: 506810 - protein, 16 aa, Homo sapiens
  CDR3 for beta chain variable domain of TCR clone 253405 (TRBV7-9, TRBJ2-3)
CASSPWREVGTDTQYF

SEQ ID NO: 506811 - protein, 18 aa, Homo sapiens
  CDR3 for alpha chain variable domain of TCR clone 253406 (TRAV29/DV5, TRAJ52)
CAAGFRGAGGTSYGKLTF

SEQ ID NO: 506812 - protein, 16 aa, Homo sapiens
  CDR3 for beta chain variable domain of TCR clone 253406 (TRBV7-6, TRBJ2-3)
CASSLWREMGPDTQYF

SEQ ID NO: 506813 - protein, 19 aa, Homo sapiens
  CDR3 for alpha chain variable domain of TCR clone 253407 (TRAV1-1, TRAJ37)
CLLLLRCERSCSNTGKLIF

SEQ ID NO: 506814 - protein, 14 aa, Homo sapiens
  CDR3 for beta chain variable domain of TCR clone 253407 (TRBV29-1, TRBJ2-2)
CSALGGVGAGELFF

SEQ ID NO: 506815 - protein, 14 aa, Homo sapiens
  CDR3 for alpha chain variable domain of TCR clone 253408 (TRAV29/DV5, TRAJ36)
CAARRKTGANNLFF

SEQ ID NO: 506816 - protein, 17 aa, Homo sapiens
  CDR3 for beta chain variable domain of TCR clone 253408 (TRBV7-3, TRBJ2-3)
RASSLMKRMRGADTQYF

SEQ ID NO: 506817 - protein, 13 aa, Homo sapiens
  CDR3 for alpha chain variable domain of TCR clone 253409 (TRAV13-1, TRAJ21)
CAASIYNFNKFYF

SEQ ID NO: 506818 - protein, 16 aa, Homo sapiens
  CDR3 for beta chain variable domain of TCR clone 253409 (TRBV20-1, TRBJ1-1)
CSARDSRLSGDTEAFF

SEQ ID NO: 506819 - protein, 12 aa, Homo sapiens
  CDR3 for alpha chain variable domain of TCR clone 253410 (TRAV25, TRAJ38)
CAGPGNNRKLIW

SEQ ID NO: 506820 - protein, 14 aa, Homo sapiens
  CDR3 for beta chain variable domain of TCR clone 253410 (TRBV19, TRBJ1-5)
CASSKMTGPQPQHF

SEQ ID NO: 506821 - protein, 15 aa, Homo sapiens
  CDR3 for alpha chain variable domain of TCR clone 253411 (TRAV12-1, TRAJ9)
CVVSFGDTVGFKTIF

SEQ ID NO: 506822 - protein, 13 aa, Homo sapiens
  CDR3 for beta chain variable domain of TCR clone 253411 (TRBV2, TRBJ1-4)
CASSERAGEKLLF

SEQ ID NO: 506823 - protein, 12 aa, Homo sapiens
  CDR3 for alpha chain variable domain of TCR clone 253412 (TRAV12-3, TRAJ17)
CAMTLTGNKLTF

SEQ ID NO: 506824 - protein, 16 aa, Homo sapiens
  CDR3 for beta chain variable domain of TCR clone 253412 (TRBV12-4, TRBJ2-5)
CASSWRPSGDLETQYF

SEQ ID NO: 506825 - protein, 16 aa, Homo sapiens
  CDR3 for alpha chain variable domain of TCR clone 253413 (TRAV3, TRAJ18)
CAVRDGRGSTLGRLYC

SEQ ID NO: 506826 - protein, 16 aa, Homo sapiens
  CDR3 for beta chain variable domain of TCR clone 253413 (TRBV19, TRBJ2-1)
CASSKAGPSSYNEQFF

SEQ ID NO: 506827 - protein, 13 aa, Homo sapiens
  CDR3 for alpha chain variable domain of TCR clone 253414 (TRAV12-2, TRAJ26)
CAVTNNYGQNFVF

SEQ ID NO: 506828 - protein, 18 aa, Homo sapiens
  CDR3 for beta chain variable domain of TCR clone 253414 (TRBV7-9, TRBJ1-1)
CASSPRVGTRILRAEAFF

SEQ ID NO: 506829 - protein, 13 aa, Homo sapiens
  CDR3 for alpha chain variable domain of TCR clone 253415 (TRAV8-3, TRAJ28)
CAVGAVGSYQLTF

SEQ ID NO: 506830 - protein, 13 aa, Homo sapiens
  CDR3 for beta chain variable domain of TCR clone 253415 (TRBV12-4, TRBJ1-2)
CASSSGLTVICTF

SEQ ID NO: 506831 - protein, 14 aa, Homo sapiens
  CDR3 for alpha chain variable domain of TCR clone 253416 (TRAV8-3, TRAJ4)
CAVGASGGYNKLIF

SEQ ID NO: 506832 - protein, 16 aa, Homo sapiens
  CDR3 for beta chain variable domain of TCR clone 253416 (TRBV4-3, TRBJ2-2)
CASSHLQGSWTGELFF

SEQ ID NO: 506833 - protein, 15 aa, Homo sapiens
  CDR3 for alpha chain variable domain of TCR clone 253417 (TRAV21, TRAJ53)
CAVRQSGGSNYKLTF

SEQ ID NO: 506834 - protein, 14 aa, Homo sapiens
  CDR3 for beta chain variable domain of TCR clone 253417 (TRBV7-9, TRBJ2-5)
CASSLAFGQETQYF

SEQ ID NO: 506835 - protein, 15 aa, Homo sapiens
  CDR3 for alpha chain variable domain of TCR clone 253418 (TRAV3, TRAJ20)
CAVREIKLSDYKPSF

SEQ ID NO: 506836 - protein, 15 aa, Homo sapiens
  CDR3 for beta chain variable domain of TCR clone 253418 (TRBV7-9, TRBJ1-6)
CASSSPGRGNSPLHF

SEQ ID NO: 506837 - protein, 12 aa, Homo sapiens
  CDR3 for alpha chain variable domain of TCR clone 253419 (TRAV16, TRAJ10)
CSRTGGGNKLTF

SEQ ID NO: 506838 - protein, 15 aa, Homo sapiens
  CDR3 for beta chain variable domain of TCR clone 253419 (TRBV6-3, TRBJ2-7)
CASSSPGPVFYEQYF

SEQ ID NO: 506839 - protein, 14 aa, Homo sapiens
  CDR3 for alpha chain variable domain of TCR clone 253420 (TRAV13-2, TRAJ43)
CAEIPTYNNNDMRF

SEQ ID NO: 506840 - protein, 14 aa, Homo sapiens
  CDR3 for beta chain variable domain of TCR clone 253420 (TRBV19, TRBJ2-7)
CASSMGQGAIEQYF

SEQ ID NO: 506841 - protein, 12 aa, Homo sapiens
  CDR3 for alpha chain variable domain of TCR clone 253421 (TRAV12-3, TRAJ17)
CAMTLTVNKLTF

SEQ ID NO: 506842 - protein, 12 aa, Homo sapiens
  CDR3 for beta chain variable domain of TCR clone 253421 (TRBV11-2, TRBJ2-7)
CASSLPTYEQYF

SEQ ID NO: 506843 - protein, 15 aa, Homo sapiens
  CDR3 for alpha chain variable domain of TCR clone 253422 (TRAV8-4, TRAJ3)
CAVTGENLVQQCFQD

SEQ ID NO: 506844 - protein, 15 aa, Homo sapiens
  CDR3 for beta chain variable domain of TCR clone 253422 (TRBV4-2, TRBJ1-1)
CQQQAGFGMNTEAFF

SEQ ID NO: 506845 - protein, 17 aa, Homo sapiens
  CDR3 for alpha chain variable domain of TCR clone 253423 (TRAV8-2, )
CVVNIQHPDPAVYQLRD

SEQ ID NO: 506846 - protein, 14 aa, Homo sapiens
  CDR3 for beta chain variable domain of TCR clone 253423 (TRBV7-9, TRBJ2-5)
CASSLVGGEETQYF

SEQ ID NO: 506847 - protein, 15 aa, Homo sapiens
  CDR3 for alpha chain variable domain of TCR clone 253424 (TRAV13-1, TRAJ32)
CAASIYGGATNKLIF

SEQ ID NO: 506848 - protein, 12 aa, Homo sapiens
  CDR3 for beta chain variable domain of TCR clone 253424 (TRBV7-6, TRBJ2-3)
CASSTGTDTQNF

SEQ ID NO: 506849 - protein, 16 aa, Homo sapiens
  CDR3 for alpha chain variable domain of TCR clone 253425 (TRAV16, TRAJ4)
CALSRMFSGGYNKLIF

SEQ ID NO: 506850 - protein, 15 aa, Homo sapiens
  CDR3 for beta chain variable domain of TCR clone 253425 (TRBV7-2, TRBJ2-2)
CASSTRTGYTGELFF

SEQ ID NO: 506851 - protein, 14 aa, Homo sapiens
  CDR3 for alpha chain variable domain of TCR clone 253426 (TRAV17, TRAJ33)
CATEARRSNYQLIG

SEQ ID NO: 506852 - protein, 14 aa, Homo sapiens
  CDR3 for beta chain variable domain of TCR clone 253426 (TRBV25-1, TRBJ1-4)
CASSGGGQPENLFF

SEQ ID NO: 506853 - protein, 15 aa, Homo sapiens
  CDR3 for alpha chain variable domain of TCR clone 253427 (TRAV1-2, TRAJ30)
CAVRPHGNRDDKIIF

SEQ ID NO: 506854 - protein, 14 aa, Homo sapiens
  CDR3 for beta chain variable domain of TCR clone 253427 (TRBV6-3, TRBJ1-1)
CASSSNRLNTEAFF

SEQ ID NO: 506855 - protein, 16 aa, Homo sapiens
  CDR3 for alpha chain variable domain of TCR clone 253428 (TRAV23/DV6, TRAJ9)
CAASIGGNTGGFKNIF

SEQ ID NO: 506856 - protein, 15 aa, Homo sapiens
  CDR3 for beta chain variable domain of TCR clone 253428 (TRBV6-3, TRBJ2-7)
CASSSPGTVLYEQYF

SEQ ID NO: 506857 - protein, 15 aa, Homo sapiens
  CDR3 for alpha chain variable domain of TCR clone 253429 (TRAV17, TRAJ23)
CATDAEDKQGGKLSF

SEQ ID NO: 506858 - protein, 12 aa, Homo sapiens
  CDR3 for beta chain variable domain of TCR clone 253429 (TRBV2, TRBJ2-1)
CAKREGYNEQFF

SEQ ID NO: 506859 - protein, 17 aa, Homo sapiens
  CDR3 for alpha chain variable domain of TCR clone 253430 (TRAV26-2, TRAJ42)
CVLRDVGYGGSQGNLIF

SEQ ID NO: 506860 - protein, 16 aa, Homo sapiens
  CDR3 for beta chain variable domain of TCR clone 253430 (TRBV19, TRBJ2-2)
CASRSPGTGATGELFF

SEQ ID NO: 506861 - protein, 13 aa, Homo sapiens
  CDR3 for alpha chain variable domain of TCR clone 253431 (TRAV8-2, TRAJ47)
CVVSEREGNKLVL

SEQ ID NO: 506862 - protein, 15 aa, Homo sapiens
  CDR3 for beta chain variable domain of TCR clone 253431 (TRBV6-3, TRBJ2-7)
CASSSPGTVFYEQYF

SEQ ID NO: 506863 - protein, 14 aa, Homo sapiens
  CDR3 for alpha chain variable domain of TCR clone 253432 (TRAV3, TRAJ6)
CAVRDSRRKLHTYI

SEQ ID NO: 506864 - protein, 13 aa, Homo sapiens
  CDR3 for beta chain variable domain of TCR clone 253432 (TRBV24-1, TRBJ2-2)
CATSDWSTGELFF

SEQ ID NO: 506865 - protein, 13 aa, Homo sapiens
  CDR3 for alpha chain variable domain of TCR clone 253433 (TRAV12-1, TRAJ22)
CVVYSGSARQLTF

SEQ ID NO: 506866 - protein, 10 aa, Homo sapiens
  CDR3 for beta chain variable domain of TCR clone 253433 (TRBV6-3, TRBJ2-2)
CASSDGELFF

SEQ ID NO: 506867 - protein, 15 aa, Homo sapiens
  CDR3 for alpha chain variable domain of TCR clone 253434 (TRAV38-1, TRAJ37)
CAFIHGSANPGKLIF

SEQ ID NO: 506868 - protein, 14 aa, Homo sapiens
  CDR3 for beta chain variable domain of TCR clone 253434 (TRBV29-1, TRBJ2-7)
CSVETSGSGETQYF

SEQ ID NO: 506869 - protein, 14 aa, Homo sapiens
  CDR3 for alpha chain variable domain of TCR clone 253435 (TRAV17, TRAJ6)
CATNPAGGSCIPTF

SEQ ID NO: 506870 - protein, 15 aa, Homo sapiens
  CDR3 for beta chain variable domain of TCR clone 253435 (TRBV2, TRBJ2-5)
CASSGTVAAGETQYF

SEQ ID NO: 506871 - protein, 13 aa, Homo sapiens
  CDR3 for alpha chain variable domain of TCR clone 253436 (TRAV27, TRAJ57)
CRSAQGGSEKLVF

SEQ ID NO: 506872 - protein, 15 aa, Homo sapiens
  CDR3 for beta chain variable domain of TCR clone 253436 (TRBV20-1, TRBJ2-7)
CSARDRVSGMDEQYF

SEQ ID NO: 506873 - protein, 16 aa, Homo sapiens
  CDR3 for alpha chain variable domain of TCR clone 253437 (TRAV14/DV4, TRAJ53)
CAMREGGGGSNYKLTF

SEQ ID NO: 506874 - protein, 17 aa, Homo sapiens
  CDR3 for beta chain variable domain of TCR clone 253437 (TRBV20-1, TRBJ2-2)
CSASGSGQGGLTGELFF

SEQ ID NO: 506875 - protein, 11 aa, Homo sapiens
  CDR3 for alpha chain variable domain of TCR clone 253438 (TRAV3, TRAJ20)
CAVANDYKLSF

SEQ ID NO: 506876 - protein, 14 aa, Homo sapiens
  CDR3 for beta chain variable domain of TCR clone 253438 (TRBV12-5, TRBJ2-5)
CASGSRTHQETQYF

SEQ ID NO: 506877 - protein, 11 aa, Homo sapiens
  CDR3 for alpha chain variable domain of TCR clone 253439 (TRAV12-1, TRAJ30)
CVVNGQDKIIF

SEQ ID NO: 506878 - protein, 15 aa, Homo sapiens
  CDR3 for beta chain variable domain of TCR clone 253439 (TRBV2, TRBJ2-4)
CASRTQGAAKNIQYF

SEQ ID NO: 506879 - protein, 14 aa, Homo sapiens
  CDR3 for alpha chain variable domain of TCR clone 253440 (TRAV1-2, TRAJ8)
CAVREYTGFQKLVF

SEQ ID NO: 506880 - protein, 16 aa, Homo sapiens
  CDR3 for beta chain variable domain of TCR clone 253440 (TRBV12-4, TRBJ1-5)
CASSRPVGGSNQPQHF

SEQ ID NO: 506881 - protein, 20 aa, Homo sapiens
  CDR3 for alpha chain variable domain of TCR clone 253441 (TRAV12-2, TRAJ52)
SPVIQPPARAGGTSYGKLTF

SEQ ID NO: 506882 - protein, 13 aa, Homo sapiens
  CDR3 for beta chain variable domain of TCR clone 253441 (TRBV20-1, TRBJ1-1)
CSARGGGNTEAFF

SEQ ID NO: 506883 - protein, 15 aa, Homo sapiens
  CDR3 for alpha chain variable domain of TCR clone 253442 (TRAV29/DV5, TRAJ24)
CATSGATDSWGKFQF

SEQ ID NO: 506884 - protein, 12 aa, Homo sapiens
  CDR3 for beta chain variable domain of TCR clone 253442 (TRBV11-2, TRBJ2-2)
CASSLPTGELFF

SEQ ID NO: 506885 - protein, 14 aa, Homo sapiens
  CDR3 for alpha chain variable domain of TCR clone 253443 (TRAV12-3, TRAJ8)
CAVREDTGFQKLVF

SEQ ID NO: 506886 - protein, 14 aa, Homo sapiens
  CDR3 for beta chain variable domain of TCR clone 253443 (TRBV7-8, TRBJ2-3)
CASSLEAGTDTQYF

SEQ ID NO: 506887 - protein, 13 aa, Homo sapiens
  CDR3 for alpha chain variable domain of TCR clone 253444 (TRAV12-3, TRAJ33)
CAMSVNSNYQLIW

SEQ ID NO: 506888 - protein, 15 aa, Homo sapiens
  CDR3 for beta chain variable domain of TCR clone 253444 (TRBV11-3, TRBJ2-2)
CASSLGGRPTGELFF

SEQ ID NO: 506889 - protein, 13 aa, Homo sapiens
  CDR3 for alpha chain variable domain of TCR clone 253445 (TRAV13-2, TRAJ48)
CAEMDFGNEKLTF

SEQ ID NO: 506890 - protein, 14 aa, Homo sapiens
  CDR3 for beta chain variable domain of TCR clone 253445 (TRBV2, TRBJ1-1)
CASRSGTMNTEAFF

SEQ ID NO: 506891 - protein, 14 aa, Homo sapiens
  CDR3 for alpha chain variable domain of TCR clone 253446 (TRAV26-1, TRAJ38)
CIADNAGNKRELIW

SEQ ID NO: 506892 - protein, 13 aa, Homo sapiens
  CDR3 for beta chain variable domain of TCR clone 253446 (TRBV20-1, TRBJ1-1)
CSARGGGNTEAFF

SEQ ID NO: 506893 - protein, 13 aa, Homo sapiens
  CDR3 for alpha chain variable domain of TCR clone 253447 (TRAV12-1, TRAJ40)
CVVNSSGTYKYIF

SEQ ID NO: 506894 - protein, 14 aa, Homo sapiens
  CDR3 for beta chain variable domain of TCR clone 253447 (TRBV2, TRBJ1-6)
CASEVSSYTSPLHF

SEQ ID NO: 506895 - protein, 15 aa, Homo sapiens
  CDR3 for alpha chain variable domain of TCR clone 253448 (TRAV3, TRAJ29)
CAVRDLYSGNTPLVF

SEQ ID NO: 506896 - protein, 15 aa, Homo sapiens
  CDR3 for beta chain variable domain of TCR clone 253448 (TRBV18, TRBJ2-7)
CASSPRSGTAYEQYF

SEQ ID NO: 506897 - protein, 18 aa, Homo sapiens
  CDR3 for alpha chain variable domain of TCR clone 253449 (TRAV12-3, TRAJ52)
CAMSVGGAGGTSYGKLTF

SEQ ID NO: 506898 - protein, 15 aa, Homo sapiens
  CDR3 for beta chain variable domain of TCR clone 253449 (TRBV24-1, TRBJ2-1)
CATRASGGQYNEQFF

SEQ ID NO: 506899 - protein, 14 aa, Homo sapiens
  CDR3 for alpha chain variable domain of TCR clone 253450 (TRAV2, TRAJ9)
CAVADRSGGFKTIF

SEQ ID NO: 506900 - protein, 15 aa, Homo sapiens
  CDR3 for beta chain variable domain of TCR clone 253450 (TRBV6-5, TRBJ2-1)
CASSYDAGAGNEQFF

SEQ ID NO: 506901 - protein, 14 aa, Homo sapiens
  CDR3 for alpha chain variable domain of TCR clone 253451 (TRAV13-1, TRAJ44)
CAAKATGTASKLTF

SEQ ID NO: 506902 - protein, 17 aa, Homo sapiens
  CDR3 for beta chain variable domain of TCR clone 253451 (TRBV7-3, TRBJ2-3)
CSSSLMKRMRGADTQYF

SEQ ID NO: 506903 - protein, 11 aa, Homo sapiens
  CDR3 for alpha chain variable domain of TCR clone 253452 (TRAV2, TRAJ13)
CASGGCQKVTF

SEQ ID NO: 506904 - protein, 16 aa, Homo sapiens
  CDR3 for beta chain variable domain of TCR clone 253452 (TRBV19, TRBJ2-1)
CASSKAGPSSYNEQFF

SEQ ID NO: 506905 - protein, 16 aa, Homo sapiens
  CDR3 for alpha chain variable domain of TCR clone 253453 (TRAV29/DV5, TRAJ36)
CAASAGVETGANNLFF

SEQ ID NO: 506906 - protein, 13 aa, Homo sapiens
  CDR3 for beta chain variable domain of TCR clone 253453 (TRBV10-3, TRBJ2-7)
CASKLAVNYEQYF

SEQ ID NO: 506907 - protein, 13 aa, Homo sapiens
  CDR3 for alpha chain variable domain of TCR clone 253454 (TRAV3, TRAJ21)
CAVREPDFNKFYF

SEQ ID NO: 506908 - protein, 13 aa, Homo sapiens
  CDR3 for beta chain variable domain of TCR clone 253454 (TRBV9, TRBJ2-1)
CASSPSGGNERFF

SEQ ID NO: 506909 - protein, 14 aa, Homo sapiens
  CDR3 for alpha chain variable domain of TCR clone 253455 (TRAV13-1, TRAJ50)
CAARSKASYDKVIF

SEQ ID NO: 506910 - protein, 17 aa, Homo sapiens
  CDR3 for beta chain variable domain of TCR clone 253455 (TRBV13, TRBJ2-3)
CASSLSRVAGARNTQYF

SEQ ID NO: 506911 - protein, 15 aa, Homo sapiens
  CDR3 for alpha chain variable domain of TCR clone 253456 (TRAV12-3, TRAJ24)
CAMSSLTDSWGKLQF

SEQ ID NO: 506912 - protein, 15 aa, Homo sapiens
  CDR3 for beta chain variable domain of TCR clone 253456 (TRBV20-1, TRBJ2-7)
CSARDRVSGMDEQYF

SEQ ID NO: 506913 - protein, 15 aa, Homo sapiens
  CDR3 for alpha chain variable domain of TCR clone 253457 (TRAV8-3, TRAJ27)
CAVGPSKTNAGKSTF

SEQ ID NO: 506914 - protein, 13 aa, Homo sapiens
  CDR3 for beta chain variable domain of TCR clone 253457 (TRBV11-2, TRBJ2-5)
CASSRGPSETQYF

SEQ ID NO: 506915 - protein, 18 aa, Homo sapiens
  CDR3 for alpha chain variable domain of TCR clone 253458 (TRAV12-3, TRAJ52)
CAMSVGGAGGTSYGKLTF

SEQ ID NO: 506916 - protein, 15 aa, Homo sapiens
  CDR3 for beta chain variable domain of TCR clone 253458 (TRBV7-9, TRBJ1-5)
CASSQGHQPNQPQHF

SEQ ID NO: 506917 - protein, 17 aa, Homo sapiens
  CDR3 for alpha chain variable domain of TCR clone 253459 (TRAV3, TRAJ6)
CAVRDVPRAAGSYIPTF

SEQ ID NO: 506918 - protein, 14 aa, Homo sapiens
  CDR3 for beta chain variable domain of TCR clone 253459 (TRBV7-2, TRBJ2-7)
CASSPKTSFYEQYF

SEQ ID NO: 506919 - protein, 13 aa, Homo sapiens
  CDR3 for alpha chain variable domain of TCR clone 253460 (TRAV8-6, TRAJ49)
CAVSGPTGNQFYF

SEQ ID NO: 506920 - protein, 13 aa, Homo sapiens
  CDR3 for beta chain variable domain of TCR clone 253460 (TRBV10-2, TRBJ2-7)
CASSAESPYEQYF

SEQ ID NO: 506921 - protein, 13 aa, Homo sapiens
  CDR3 for alpha chain variable domain of TCR clone 253461 (TRAV8-3, TRAJ5)
CAVGPGAGEHLLL

SEQ ID NO: 506922 - protein, 16 aa, Homo sapiens
  CDR3 for beta chain variable domain of TCR clone 253461 (TRBV11-3, TRBJ2-3)
CASSPGGLLGTDTQYF

SEQ ID NO: 506923 - protein, 14 aa, Homo sapiens
  CDR3 for alpha chain variable domain of TCR clone 253462 (TRAV1-2, TRAJ16)
CAVNRFSDGQKLLF

SEQ ID NO: 506924 - protein, 13 aa, Homo sapiens
  CDR3 for beta chain variable domain of TCR clone 253462 (TRBV7-9, TRBJ1-2)
CASSLKQNDGYTF

SEQ ID NO: 506925 - protein, 11 aa, Homo sapiens
  CDR3 for alpha chain variable domain of TCR clone 253463 (TRAV1-2, TRAJ34)
CAGYNTDKLIF

SEQ ID NO: 506926 - protein, 16 aa, Homo sapiens
  CDR3 for beta chain variable domain of TCR clone 253463 (TRBV4-3, TRBJ2-1)
CASSPALDRGVNEQFF

SEQ ID NO: 506927 - protein, 15 aa, Homo sapiens
  CDR3 for alpha chain variable domain of TCR clone 253464 (TRAV17, TRAJ56)
CATEPFTGANSKLTF

SEQ ID NO: 506928 - protein, 14 aa, Homo sapiens
  CDR3 for beta chain variable domain of TCR clone 253464 (TRBV19, TRBJ2-1)
CASPTFALSGEQFF

SEQ ID NO: 506929 - protein, 11 aa, Homo sapiens
  CDR3 for alpha chain variable domain of TCR clone 253465 (TRAV1-2, TRAJ13)
GRSGGYQKVTF

SEQ ID NO: 506930 - protein, 14 aa, Homo sapiens
  CDR3 for beta chain variable domain of TCR clone 253465 (TRBV19, TRBJ2-7)
CASNFRDTFTGMYF

SEQ ID NO: 506931 - protein, 15 aa, Homo sapiens
  CDR3 for alpha chain variable domain of TCR clone 253466 (TRAV21, TRAJ40)
CAVRPQTSGTFKYIF

SEQ ID NO: 506932 - protein, 13 aa, Homo sapiens
  CDR3 for beta chain variable domain of TCR clone 253466 (TRBV7-2, TRBJ2-2)
CASSSVRAGELFF

SEQ ID NO: 506933 - protein, 19 aa, Homo sapiens
  CDR3 for alpha chain variable domain of TCR clone 253467 (TRAV26-1, TRAJ52)
CIVRAHRNAGGTSYGKLTF

SEQ ID NO: 506934 - protein, 15 aa, Homo sapiens
  CDR3 for beta chain variable domain of TCR clone 253467 (TRBV29-1, TRBJ2-1)
CSGRDRKSSYNSSSS

SEQ ID NO: 506935 - protein, 17 aa, Homo sapiens
  CDR3 for alpha chain variable domain of TCR clone 253468 (TRAV13-2, TRAJ5)
CAESVVIVGHGQRALTF

SEQ ID NO: 506936 - protein, 18 aa, Homo sapiens
  CDR3 for beta chain variable domain of TCR clone 253468 (TRBV4-1, TRBJ2-3)
CASSHQLAGGRSTDTQYF

SEQ ID NO: 506937 - protein, 11 aa, Homo sapiens
  CDR3 for alpha chain variable domain of TCR clone 253469 (TRAV27, TRAJ47)
CRSNQGNKLVF

SEQ ID NO: 506938 - protein, 16 aa, Homo sapiens
  CDR3 for beta chain variable domain of TCR clone 253469 (TRBV7-9, TRBJ2-1)
CARSDVAGGSYNEQFF

SEQ ID NO: 506939 - protein, 16 aa, Homo sapiens
  CDR3 for alpha chain variable domain of TCR clone 253470 (TRAV21, TRAJ37)
CAVRPRGASNTGKLLF

SEQ ID NO: 506940 - protein, 13 aa, Homo sapiens
  CDR3 for beta chain variable domain of TCR clone 253470 (TRBV7-9, TRBJ2-5)
CASLSPGQETQYF

SEQ ID NO: 506941 - protein, 10 aa, Homo sapiens
  CDR3 for alpha chain variable domain of TCR clone 253471 (TRAV25, TRAJ20)
CAVNDYKLSS

SEQ ID NO: 506942 - protein, 16 aa, Homo sapiens
  CDR3 for beta chain variable domain of TCR clone 253471 (TRBV10-3, TRBJ2-2)
CAISGTGAAGTGELFF

SEQ ID NO: 506943 - protein, 11 aa, Homo sapiens
  CDR3 for alpha chain variable domain of TCR clone 253472 (TRAV35, TRAJ30)
CAGPGDNKIIF

SEQ ID NO: 506944 - protein, 18 aa, Homo sapiens
  CDR3 for beta chain variable domain of TCR clone 253472 (TRBV7-6, TRBJ2-1)
CASSPRTSGMSSYNEQFF

SEQ ID NO: 506945 - protein, 14 aa, Homo sapiens
  CDR3 for alpha chain variable domain of TCR clone 253473 (TRAV25, TRAJ22)
CAVRSSGSARQLTF

SEQ ID NO: 506946 - protein, 15 aa, Homo sapiens
  CDR3 for beta chain variable domain of TCR clone 253473 (TRBV7-2, TRBJ2-2)
CASRRPGQNTGELFF

SEQ ID NO: 506947 - protein, 14 aa, Homo sapiens
  CDR3 for alpha chain variable domain of TCR clone 253474 (TRAV21, TRAJ32)
CCGEYGGATNKLIF

SEQ ID NO: 506948 - protein, 13 aa, Homo sapiens
  CDR3 for beta chain variable domain of TCR clone 253474 (TRBV2, TRBJ1-6)
CASGRGGISPLHF

SEQ ID NO: 506949 - protein, 14 aa, Homo sapiens
  CDR3 for alpha chain variable domain of TCR clone 253475 (TRAV26-1, TRAJ34)
CIVRVAYNTDKLLF

SEQ ID NO: 506950 - protein, 16 aa, Homo sapiens
  CDR3 for beta chain variable domain of TCR clone 253475 (TRBV7-3, TRBJ2-2)
CASSLKRGTLSGELFF

SEQ ID NO: 506951 - protein, 18 aa, Homo sapiens
  CDR3 for alpha chain variable domain of TCR clone 253476 (TRAV21, TRAJ52)
CAVRPSPAGGTSYGKLTF

SEQ ID NO: 506952 - protein, 17 aa, Homo sapiens
  CDR3 for beta chain variable domain of TCR clone 253476 (TRBV13, TRBJ2-3)
CASSLARGAGGRNTQYF

SEQ ID NO: 506953 - protein, 13 aa, Homo sapiens
  CDR3 for alpha chain variable domain of TCR clone 253477 (TRAV12-3, TRAJ13)
CAMGTGGYQKVTL

SEQ ID NO: 506954 - protein, 14 aa, Homo sapiens
  CDR3 for beta chain variable domain of TCR clone 253477 (TRBV7-2, TRBJ2-5)
CASSTGGELKTQYF

SEQ ID NO: 506955 - protein, 15 aa, Homo sapiens
  CDR3 for alpha chain variable domain of TCR clone 253478 (TRAV13-1, TRAJ11)
CAASNRNSGYSTLTF

SEQ ID NO: 506956 - protein, 16 aa, Homo sapiens
  CDR3 for beta chain variable domain of TCR clone 253478 (TRBV7-3, TRBJ2-2)
CASSLKRGTLSGELFF

SEQ ID NO: 506957 - protein, 14 aa, Homo sapiens
  CDR3 for alpha chain variable domain of TCR clone 253479 (TRAV17, TRAJ15)
CATAPNQAGTALTF

SEQ ID NO: 506958 - protein, 14 aa, Homo sapiens
  CDR3 for beta chain variable domain of TCR clone 253479 (TRBV19, TRBJ2-7)
CASSMGQGAIEQYF

SEQ ID NO: 506959 - protein, 14 aa, Homo sapiens
  CDR3 for alpha chain variable domain of TCR clone 253480 (TRAV26-1, TRAJ34)
CIVRESYNTDKLIF

SEQ ID NO: 506960 - protein, 12 aa, Homo sapiens
  CDR3 for beta chain variable domain of TCR clone 253480 (TRBV19, TRBJ2-1)
CHLQGGINEQFF

SEQ ID NO: 506961 - protein, 17 aa, Homo sapiens
  CDR3 for alpha chain variable domain of TCR clone 253481 (TRAV3, TRAJ6)
CAVRDGPRAGGGYIPTF

SEQ ID NO: 506962 - protein, 13 aa, Homo sapiens
  CDR3 for beta chain variable domain of TCR clone 253481 (TRBV12-5, TRBJ2-3)
CASGDRQSDTQYF

SEQ ID NO: 506963 - protein, 16 aa, Homo sapiens
  CDR3 for alpha chain variable domain of TCR clone 253482 (TRAV12-3, TRAJ10)
CAMKKGITGGGNNLTF

SEQ ID NO: 506964 - protein, 12 aa, Homo sapiens
  CDR3 for beta chain variable domain of TCR clone 253482 (TRBV20-1, TRBJ2-7)
CSAITPTKEQYF

SEQ ID NO: 506965 - protein, 12 aa, Homo sapiens
  CDR3 for alpha chain variable domain of TCR clone 253483 (TRAV12-1, TRAJ40)
CVVSAGTYKYIF

SEQ ID NO: 506966 - protein, 14 aa, Homo sapiens
  CDR3 for beta chain variable domain of TCR clone 253483 (TRBV20-1, TRBJ2-2)
CSAPDTANTGELFF

SEQ ID NO: 506967 - protein, 11 aa, Homo sapiens
  CDR3 for alpha chain variable domain of TCR clone 253484 (TRAV23/DV6, TRAJ49)
CAVAPVTSSIL

SEQ ID NO: 506968 - protein, 15 aa, Homo sapiens
  CDR3 for beta chain variable domain of TCR clone 253484 (TRBV2, TRBJ2-2)
CASSRETVGTGELFF

SEQ ID NO: 506969 - protein, 13 aa, Homo sapiens
  CDR3 for alpha chain variable domain of TCR clone 253485 (TRAV12-2, TRAJ50)
CAVIVTSYDKVIF

SEQ ID NO: 506970 - protein, 16 aa, Homo sapiens
  CDR3 for beta chain variable domain of TCR clone 253485 (TRBV6-5, TRBJ2-7)
CASSSDPASGFYEQYF

SEQ ID NO: 506971 - protein, 12 aa, Homo sapiens
  CDR3 for alpha chain variable domain of TCR clone 253486 (TRAV21, TRAJ33)
CAKMDSNYQLIW

SEQ ID NO: 506972 - protein, 13 aa, Homo sapiens
  CDR3 for beta chain variable domain of TCR clone 253486 (TRBV12-4, TRBJ2-5)
CASSTGTEETQYF

SEQ ID NO: 506973 - protein, 14 aa, Homo sapiens
  CDR3 for alpha chain variable domain of TCR clone 253487 (TRAV35, TRAJ22)
CAGLRPGSARQLTF

SEQ ID NO: 506974 - protein, 12 aa, Homo sapiens
  CDR3 for beta chain variable domain of TCR clone 253487 (TRBV7-3, TRBJ1-1)
CQQPGLGAEAFF

SEQ ID NO: 506975 - protein, 14 aa, Homo sapiens
  CDR3 for alpha chain variable domain of TCR clone 253488 (TRAV12-2, TRAJ13)
CAVKKTGGYQKVTF

SEQ ID NO: 506976 - protein, 16 aa, Homo sapiens
  CDR3 for beta chain variable domain of TCR clone 253488 (TRBV4-2, TRBJ2-4)
CASSQELRRAENIQYF

SEQ ID NO: 506977 - protein, 16 aa, Homo sapiens
  CDR3 for alpha chain variable domain of TCR clone 253489 (TRAV23/DV6, TRAJ32)
CAATPGGGGATNKLIF

SEQ ID NO: 506978 - protein, 13 aa, Homo sapiens
  CDR3 for beta chain variable domain of TCR clone 253489 (TRBV18, TRBJ1-1)
CASSGGRNTEAFF

SEQ ID NO: 506979 - protein, 17 aa, Homo sapiens
  CDR3 for alpha chain variable domain of TCR clone 253490 (TRAV3, TRAJ6)
CAVRDGPRAGGSYIPKL

SEQ ID NO: 506980 - protein, 20 aa, Homo sapiens
  CDR3 for beta chain variable domain of TCR clone 253490 (TRBV28, TRBJ2-1)
CASTPIGRSPGLAGGNEQFF

SEQ ID NO: 506981 - protein, 17 aa, Homo sapiens
  CDR3 for alpha chain variable domain of TCR clone 253491 (TRAV3, TRAJ6)
CAVRDGPRAGGSYIPTF

SEQ ID NO: 506982 - protein, 16 aa, Homo sapiens
  CDR3 for beta chain variable domain of TCR clone 253491 (TRBV7-9, TRBJ2-6)
CASSLKGPLRANVLTF

SEQ ID NO: 506983 - protein, 13 aa, Homo sapiens
  CDR3 for alpha chain variable domain of TCR clone 253492 (TRAV13-1, TRAJ21)
CAASIYNFNKFYF

SEQ ID NO: 506984 - protein, 15 aa, Homo sapiens
  CDR3 for beta chain variable domain of TCR clone 253492 (TRBV20-1, TRBJ1-1)
CSASRGVTGNTEAFF

SEQ ID NO: 506985 - protein, 13 aa, Homo sapiens
  CDR3 for alpha chain variable domain of TCR clone 253493 (TRAV12-1, TRAJ13)
CVVTSGGYQKATF

SEQ ID NO: 506986 - protein, 14 aa, Homo sapiens
  CDR3 for beta chain variable domain of TCR clone 253493 (TRBV27, TRBJ2-7)
CASSLAGLSYEQYF

SEQ ID NO: 506987 - protein, 21 aa, Homo sapiens
  CDR3 for alpha chain variable domain of TCR clone 253494 (TRAV12-1, TRAJ32)
SSVIQPPTSMNYGGAANKLIF

SEQ ID NO: 506988 - protein, 18 aa, Homo sapiens
  CDR3 for beta chain variable domain of TCR clone 253494 (TRBV20-1, TRBJ2-3)
CGASGLAGGPGTTDTQYF

SEQ ID NO: 506989 - protein, 15 aa, Homo sapiens
  CDR3 for alpha chain variable domain of TCR clone 253495 (TRAV26-1, TRAJ29)
CIVRVEGSGNAPLVF

SEQ ID NO: 506990 - protein, 15 aa, Homo sapiens
  CDR3 for beta chain variable domain of TCR clone 253495 (TRBV7-9, TRBJ1-5)
CASSQGHGPNQPQHF

SEQ ID NO: 506991 - protein, 14 aa, Homo sapiens
  CDR3 for alpha chain variable domain of TCR clone 253496 (TRAV8-3, TRAJ30)
CAVGDMNRDDKIIF

SEQ ID NO: 506992 - protein, 17 aa, Homo sapiens
  CDR3 for beta chain variable domain of TCR clone 253496 (TRBV19, TRBJ2-2)
CASSRNPGGFGTGELFL

SEQ ID NO: 506993 - protein, 13 aa, Homo sapiens
  CDR3 for alpha chain variable domain of TCR clone 253497 (TRAV3, TRAJ36)
CAVRDTGANNLVF

SEQ ID NO: 506994 - protein, 15 aa, Homo sapiens
  CDR3 for beta chain variable domain of TCR clone 253497 (TRBV24-1, TRBJ2-1)
CATSGSGGFYNEQFF

SEQ ID NO: 506995 - protein, 11 aa, Homo sapiens
  CDR3 for alpha chain variable domain of TCR clone 253498 (TRAV12-1, TRAJ30)
CVVNGQDKIIF

SEQ ID NO: 506996 - protein, 15 aa, Homo sapiens
  CDR3 for beta chain variable domain of TCR clone 253498 (TRBV6-3, TRBJ2-7)
CASSSPGTVFYEQYF

SEQ ID NO: 506997 - protein, 12 aa, Homo sapiens
  CDR3 for alpha chain variable domain of TCR clone 253499 (TRAV13-1, TRAJ15)
CAASQAGTALIF

SEQ ID NO: 506998 - protein, 18 aa, Homo sapiens
  CDR3 for beta chain variable domain of TCR clone 253499 (TRBV7-9, TRBJ2-3)
CASRLPINGQVSTDTQYF

SEQ ID NO: 506999 - protein, 11 aa, Homo sapiens
  CDR3 for alpha chain variable domain of TCR clone 253500 (TRAV13-2, TRAJ26)
CAEIPGQNFVF

SEQ ID NO: 507000 - protein, 10 aa, Homo sapiens
  CDR3 for beta chain variable domain of TCR clone 253500 (TRBV19, TRBJ2-2)
CASTRPGLAG

SEQ ID NO: 507001 - protein, 17 aa, Homo sapiens
  CDR3 for alpha chain variable domain of TCR clone 253501 (TRAV3, TRAJ6)
SAVRDGPRAEGSYIPTF

SEQ ID NO: 507002 - protein, 19 aa, Homo sapiens
  CDR3 for beta chain variable domain of TCR clone 253501 (TRBV25-1, TRBJ2-2)
CAILVYRVDRGRKTGELFF

SEQ ID NO: 507003 - protein, 14 aa, Homo sapiens
  CDR3 for alpha chain variable domain of TCR clone 253502 (TRAV21, TRAJ45)
CAVVSGGGADGLTF

SEQ ID NO: 507004 - protein, 14 aa, Homo sapiens
  CDR3 for beta chain variable domain of TCR clone 253502 (TRBV20-1, TRBJ2-3)
CSALGLEGAYTQYF

SEQ ID NO: 507005 - protein, 14 aa, Homo sapiens
  CDR3 for alpha chain variable domain of TCR clone 253503 (TRAV12-2, TRAJ13)
CAVKKNGGYQKVTL

SEQ ID NO: 507006 - protein, 15 aa, Homo sapiens
  CDR3 for beta chain variable domain of TCR clone 253503 (TRBV27, TRBJ2-1)
CASSNGGGSSNEQFF

SEQ ID NO: 507007 - protein, 15 aa, Homo sapiens
  CDR3 for alpha chain variable domain of TCR clone 253504 (TRAV16, TRAJ4)
CALEDPSGGYNKLIF

SEQ ID NO: 507008 - protein, 14 aa, Homo sapiens
  CDR3 for beta chain variable domain of TCR clone 253504 (TRBV7-2, TRBJ2-7)
CASSPKTSFYEQYF

SEQ ID NO: 507009 - protein, 11 aa, Homo sapiens
  CDR3 for alpha chain variable domain of TCR clone 253505 (TRAV1-1, TRAJ23)
CALRQGGKLIF

SEQ ID NO: 507010 - protein, 20 aa, Homo sapiens
  CDR3 for beta chain variable domain of TCR clone 253505 (TRBV7-8, TRBJ2-2)
CASSHLFPGPTIRITGELFF

SEQ ID NO: 507011 - protein, 12 aa, Homo sapiens
  CDR3 for alpha chain variable domain of TCR clone 253506 (TRAV13-2, TRAJ23)
CAERHRGGKLIF

SEQ ID NO: 507012 - protein, 16 aa, Homo sapiens
  CDR3 for beta chain variable domain of TCR clone 253506 (TRBV20-1, TRBJ2-7)
CSARGSVVADIYEQYF

SEQ ID NO: 507013 - protein, 14 aa, Homo sapiens
  CDR3 for alpha chain variable domain of TCR clone 253507 (TRAV8-4, TRAJ9)
CAVRINTGGFKTIF

SEQ ID NO: 507014 - protein, 14 aa, Homo sapiens
  CDR3 for beta chain variable domain of TCR clone 253507 (TRBV19, TRBJ1-5)
CASGTEVYNQPQHF

SEQ ID NO: 507015 - protein, 14 aa, Homo sapiens
  CDR3 for alpha chain variable domain of TCR clone 253508 (TRAV8-3, TRAJ10)
CAVGNAGGGNKLTF

SEQ ID NO: 507016 - protein, 15 aa, Homo sapiens
  CDR3 for beta chain variable domain of TCR clone 253508 (TRBV7-9, TRBJ1-4)
CASSRTGGFNEKLFF

SEQ ID NO: 507017 - protein, 13 aa, Homo sapiens
  CDR3 for alpha chain variable domain of TCR clone 253509 (TRAV26-1, TRAJ33)
CIVRVDSNYQLIW

SEQ ID NO: 507018 - protein, 18 aa, Homo sapiens
  CDR3 for beta chain variable domain of TCR clone 253509 (TRBV7-9, TRBJ2-1)
CASSTGLAEGSSYNEQFF

SEQ ID NO: 507019 - protein, 13 aa, Homo sapiens
  CDR3 for alpha chain variable domain of TCR clone 253510 (TRAV2, TRAJ21)
CAVEDLNFNKFYF

SEQ ID NO: 507020 - protein, 14 aa, Homo sapiens
  CDR3 for beta chain variable domain of TCR clone 253510 (TRBV7-9, TRBJ2-7)
CASSLDRPTDEQYF

SEQ ID NO: 507021 - protein, 15 aa, Homo sapiens
  CDR3 for alpha chain variable domain of TCR clone 253511 (TRAV3, TRAJ9)
CAVRDSNSGGFKTIF

SEQ ID NO: 507022 - protein, 16 aa, Homo sapiens
  CDR3 for beta chain variable domain of TCR clone 253511 (TRBV15, TRBJ2-5)
CATSPTTGQGMETQYF

SEQ ID NO: 507023 - protein, 15 aa, Homo sapiens
  CDR3 for alpha chain variable domain of TCR clone 253512 (TRAV17, TRAJ57)
CATGPSQGGSEKLVF

SEQ ID NO: 507024 - protein, 14 aa, Homo sapiens
  CDR3 for beta chain variable domain of TCR clone 253512 (TRBV5-1, TRBJ2-2)
CASSLGGGSGELFF

SEQ ID NO: 507025 - protein, 12 aa, Homo sapiens
  CDR3 for alpha chain variable domain of TCR clone 253513 (TRAV17, TRAJ39)
CATGAAGNMLTF

SEQ ID NO: 507026 - protein, 15 aa, Homo sapiens
  CDR3 for beta chain variable domain of TCR clone 253513 (TRBV24-1, TRBJ2-1)
CATSGSGGFYNEQFF

SEQ ID NO: 507027 - protein, 14 aa, Homo sapiens
  CDR3 for alpha chain variable domain of TCR clone 253514 (TRAV8-3, TRAJ4)
CAVGASGGYNKLIF

SEQ ID NO: 507028 - protein, 17 aa, Homo sapiens
  CDR3 for beta chain variable domain of TCR clone 253514 (TRBV11-2, TRBJ2-1)
CASSLYSPGVEYNEQFF

SEQ ID NO: 507029 - protein, 12 aa, Homo sapiens
  CDR3 for alpha chain variable domain of TCR clone 253515 (TRAV8-2, TRAJ45)
CVQGGGADGLTF

SEQ ID NO: 507030 - protein, 15 aa, Homo sapiens
  CDR3 for beta chain variable domain of TCR clone 253515 (TRBV19, TRBJ1-1)
CASSIRREMNTEAFF

SEQ ID NO: 507031 - protein, 14 aa, Homo sapiens
  CDR3 for alpha chain variable domain of TCR clone 253516 (TRAV1-2, TRAJ8)
CAVREDTGFQKLVF

SEQ ID NO: 507032 - protein, 16 aa, Homo sapiens
  CDR3 for beta chain variable domain of TCR clone 253516 (TRBV2, TRBJ1-1)
CASSPTLGGASTEAFF

SEQ ID NO: 507033 - protein, 11 aa, Homo sapiens
  CDR3 for alpha chain variable domain of TCR clone 253517 (TRAV1-2, TRAJ20)
CAVSNDYKLSF

SEQ ID NO: 507034 - protein, 11 aa, Homo sapiens
  CDR3 for beta chain variable domain of TCR clone 253517 (TRBV19, TRBJ1-1)
CASSIGSEAFF

SEQ ID NO: 507035 - protein, 12 aa, Homo sapiens
  CDR3 for alpha chain variable domain of TCR clone 253518 (TRAV1-1, TRAJ30)
CAVRGSDDKIIF

SEQ ID NO: 507036 - protein, 13 aa, Homo sapiens
  CDR3 for beta chain variable domain of TCR clone 253518 (TRBV11-3, TRBJ2-7)
CASSLDKLYEQYF

SEQ ID NO: 507037 - protein, 13 aa, Homo sapiens
  CDR3 for alpha chain variable domain of TCR clone 253519 (TRAV8-6, TRAJ13)
CAVSSGGYQKVTF

SEQ ID NO: 507038 - protein, 13 aa, Homo sapiens
  CDR3 for beta chain variable domain of TCR clone 253519 (TRBV5-1, TRBJ2-5)
CASSWEGEETQYF

SEQ ID NO: 507039 - protein, 14 aa, Homo sapiens
  CDR3 for alpha chain variable domain of TCR clone 253520 (TRAV12-2, TRAJ5)
CAVNRSTGTRALTF

SEQ ID NO: 507040 - protein, 12 aa, Homo sapiens
  CDR3 for beta chain variable domain of TCR clone 253520 (TRBV19, TRBJ1-5)
CASSIAQQPQHF

SEQ ID NO: 507041 - protein, 15 aa, Homo sapiens
  CDR3 for alpha chain variable domain of TCR clone 253521 (TRAV8-3, TRAJ27)
CAVGPSKTNAGKSTF

SEQ ID NO: 507042 - protein, 14 aa, Homo sapiens
  CDR3 for beta chain variable domain of TCR clone 253521 (TRBV18, TRBJ1-2)
CASSPDRVVYGYTF

SEQ ID NO: 507043 - protein, 14 aa, Homo sapiens
  CDR3 for alpha chain variable domain of TCR clone 253522 (TRAV23/DV6, TRAJ49)
CAASKSFVGNQFYF

SEQ ID NO: 507044 - protein, 15 aa, Homo sapiens
  CDR3 for beta chain variable domain of TCR clone 253522 (TRBV20-1, TRBJ2-7)
CSARVPAAYFYEQYF

SEQ ID NO: 507045 - protein, 12 aa, Homo sapiens
  CDR3 for alpha chain variable domain of TCR clone 253523 (TRAV13-2, TRAJ58)
CAERRLDSRLPL

SEQ ID NO: 507046 - protein, 15 aa, Homo sapiens
  CDR3 for beta chain variable domain of TCR clone 253523 (TRBV5-1, TRBJ2-5)
CASSSGREMVETQYF

SEQ ID NO: 507047 - protein, 17 aa, Homo sapiens
  CDR3 for alpha chain variable domain of TCR clone 253524 (TRAV26-1, TRAJ10)
CIVSFRGLTGGGNKLPF

SEQ ID NO: 507048 - protein, 13 aa, Homo sapiens
  CDR3 for beta chain variable domain of TCR clone 253524 (TRBV20-1, TRBJ2-3)
CSASRQAADTQYF

SEQ ID NO: 507049 - protein, 15 aa, Homo sapiens
  CDR3 for alpha chain variable domain of TCR clone 253525 (TRAV21, TRAJ53)
CATLNSGGSNYKLTF

SEQ ID NO: 507050 - protein, 13 aa, Homo sapiens
  CDR3 for beta chain variable domain of TCR clone 253525 (TRBV5-1, TRBJ2-1)
CASSLGSYNEQFF

SEQ ID NO: 507051 - protein, 13 aa, Homo sapiens
  CDR3 for alpha chain variable domain of TCR clone 253526 (TRAV17, TRAJ5)
CAPMDTGRIALTF

SEQ ID NO: 507052 - protein, 14 aa, Homo sapiens
  CDR3 for beta chain variable domain of TCR clone 253526 (TRBV12-5, TRBJ2-5)
CASGSRTHQETQYF

SEQ ID NO: 507053 - protein, 15 aa, Homo sapiens
  CDR3 for alpha chain variable domain of TCR clone 253527 (TRAV26-2, TRAJ45)
CILRDRGDQEEELTD

SEQ ID NO: 507054 - protein, 15 aa, Homo sapiens
  CDR3 for beta chain variable domain of TCR clone 253527 (TRBV7-6, TRBJ2-5)
CASSKPTGPQETQYF

SEQ ID NO: 507055 - protein, 16 aa, Homo sapiens
  CDR3 for alpha chain variable domain of TCR clone 253528 (TRAV16, TRAJ4)
CALSRMFSGGYNKLIF

SEQ ID NO: 507056 - protein, 16 aa, Homo sapiens
  CDR3 for beta chain variable domain of TCR clone 253528 (TRBV2, TRBJ2-3)
CASSGGGLTSTDTQYF

SEQ ID NO: 507057 - protein, 17 aa, Homo sapiens
  CDR3 for alpha chain variable domain of TCR clone 253529 (TRAV14/DV4, TRAJ57)
CAMRESKGQGGSEKLVF

SEQ ID NO: 507058 - protein, 15 aa, Homo sapiens
  CDR3 for beta chain variable domain of TCR clone 253529 (TRBV20-1, TRBJ1-1)
CSASWDRFLNTEAFF

SEQ ID NO: 507059 - protein, 18 aa, Homo sapiens
  CDR3 for alpha chain variable domain of TCR clone 253530 (TRAV26-1, TRAJ30)
CCVLLHRQSTNRDDKIIF

SEQ ID NO: 507060 - protein, 18 aa, Homo sapiens
  CDR3 for beta chain variable domain of TCR clone 253530 (TRBV4-1, TRBJ1-5)
CASSQDPRGQGLNQTQHF

SEQ ID NO: 507061 - protein, 12 aa, Homo sapiens
  CDR3 for alpha chain variable domain of TCR clone 253531 (TRAV12-3, TRAJ17)
CAMTLTGNKLTF

SEQ ID NO: 507062 - protein, 12 aa, Homo sapiens
  CDR3 for beta chain variable domain of TCR clone 253531 (TRBV11-3, TRBJ2-1)
CASSPGNNEQFF

SEQ ID NO: 507063 - protein, 14 aa, Homo sapiens
  CDR3 for alpha chain variable domain of TCR clone 253532 (TRAV38-1, TRAJ29)
CAFITPSGNTPLVF

SEQ ID NO: 507064 - protein, 15 aa, Homo sapiens
  CDR3 for beta chain variable domain of TCR clone 253532 (TRBV7-3, TRBJ2-1)
CASSPTGGGEVEQFF

SEQ ID NO: 507065 - protein, 12 aa, Homo sapiens
  CDR3 for alpha chain variable domain of TCR clone 253533 (TRAV35, TRAJ31)
CAAASNNARLMF

SEQ ID NO: 507066 - protein, 14 aa, Homo sapiens
  CDR3 for beta chain variable domain of TCR clone 253533 (TRBV20-1, TRBJ2-7)
CSAKRGRSSYEQYF

SEQ ID NO: 507067 - protein, 14 aa, Homo sapiens
  CDR3 for alpha chain variable domain of TCR clone 253534 (TRAV26-2, TRAJ32)
CCVGYGGATTKLIF

SEQ ID NO: 507068 - protein, 14 aa, Homo sapiens
  CDR3 for beta chain variable domain of TCR clone 253534 (TRBV4-2, TRBJ2-1)
CASGLDRAYNEQFF

SEQ ID NO: 507069 - protein, 15 aa, Homo sapiens
  CDR3 for alpha chain variable domain of TCR clone 253535 (TRAV3, TRAJ22)
CAVRDRGGFARQLTF

SEQ ID NO: 507070 - protein, 18 aa, Homo sapiens
  CDR3 for beta chain variable domain of TCR clone 253535 (TRBV28, TRBJ2-1)
CASSSTSGRANSYNEQFF

SEQ ID NO: 507071 - protein, 17 aa, Homo sapiens
  CDR3 for alpha chain variable domain of TCR clone 253536 (TRAV3, TRAJ42)
CAVRDRDYGGSQGNLIF

SEQ ID NO: 507072 - protein, 18 aa, Homo sapiens
  CDR3 for beta chain variable domain of TCR clone 253536 (TRBV7-8, TRBJ2-1)
CASSPYLGQRGSNNEQFF

SEQ ID NO: 507073 - protein, 13 aa, Homo sapiens
  CDR3 for alpha chain variable domain of TCR clone 253537 (TRAV21, TRAJ49)
CAVRQSTGNQFYF

SEQ ID NO: 507074 - protein, 13 aa, Homo sapiens
  CDR3 for beta chain variable domain of TCR clone 253537 (TRBV19, TRBJ1-5)
CASSIGGEQPQHF

SEQ ID NO: 507075 - protein, 15 aa, Homo sapiens
  CDR3 for alpha chain variable domain of TCR clone 253538 (TRAV26-1, TRAJ13)
CIVRVLSGGYQKVTF

SEQ ID NO: 507076 - protein, 13 aa, Homo sapiens
  CDR3 for beta chain variable domain of TCR clone 253538 (TRBV7-9, TRBJ1-2)
RASSLKQNYGYTF

SEQ ID NO: 507077 - protein, 12 aa, Homo sapiens
  CDR3 for alpha chain variable domain of TCR clone 253539 (TRAV3, TRAJ20)
CAVRDHDCKLSF

SEQ ID NO: 507078 - protein, 13 aa, Homo sapiens
  CDR3 for beta chain variable domain of TCR clone 253539 (TRBV9, TRBJ2-7)
CASSVGQGGEQYF

SEQ ID NO: 507079 - protein, 14 aa, Homo sapiens
  CDR3 for alpha chain variable domain of TCR clone 253540 (TRAV36/DV7, TRAJ37)
CAVDGSSNTAKLIF

SEQ ID NO: 507080 - protein, 17 aa, Homo sapiens
  CDR3 for beta chain variable domain of TCR clone 253540 (TRBV19, TRBJ2-6)
CASSATRDYSGANVLTF

SEQ ID NO: 507081 - protein, 18 aa, Homo sapiens
  CDR3 for alpha chain variable domain of TCR clone 253541 (TRAV26-1, TRAJ52)
CIVRVEGAGGTSYGKMTF

SEQ ID NO: 507082 - protein, 13 aa, Homo sapiens
  CDR3 for beta chain variable domain of TCR clone 253541 (TRBV7-3, TRBJ1-2)
CASSVKRGYGYTF

SEQ ID NO: 507083 - protein, 14 aa, Homo sapiens
  CDR3 for alpha chain variable domain of TCR clone 253542 (TRAV13-1, TRAJ9)
CAASALTGGFKTIS

SEQ ID NO: 507084 - protein, 13 aa, Homo sapiens
  CDR3 for beta chain variable domain of TCR clone 253542 (TRBV20-1, TRBJ1-1)
CSAGTVGNAEAFF

SEQ ID NO: 507085 - protein, 14 aa, Homo sapiens
  CDR3 for alpha chain variable domain of TCR clone 253543 (TRAV1-2, TRAJ8)
CAVREDTGFQKLVF

SEQ ID NO: 507086 - protein, 18 aa, Homo sapiens
  CDR3 for beta chain variable domain of TCR clone 253543 (TRBV7-9, TRBJ2-1)
CASSTGLAEGSSYNEQFF

SEQ ID NO: 507087 - protein, 23 aa, Homo sapiens
  CDR3 for alpha chain variable domain of TCR clone 253544 (TRAV26-1, TRAJ38)
CITDNAGNNHIQNPDPAAYQLRD

SEQ ID NO: 507088 - protein, 13 aa, Homo sapiens
  CDR3 for beta chain variable domain of TCR clone 253544 (TRBV20-1, TRBJ1-1)
CSARGGGNTEAFF

SEQ ID NO: 507089 - protein, 16 aa, Homo sapiens
  CDR3 for alpha chain variable domain of TCR clone 253545 (TRAV21, TRAJ37)
CAVRTAGSSNTGQPIF

SEQ ID NO: 507090 - protein, 13 aa, Homo sapiens
  CDR3 for beta chain variable domain of TCR clone 253545 (TRBV7-9, TRBJ2-5)
CASLPSGRETQYF

SEQ ID NO: 507091 - protein, 18 aa, Homo sapiens
  CDR3 for alpha chain variable domain of TCR clone 253546 (TRAV21, TRAJ52)
CSVRPSPAGGTSYGKLTF

SEQ ID NO: 507092 - protein, 17 aa, Homo sapiens
  CDR3 for beta chain variable domain of TCR clone 253546 (TRBV13, TRBJ2-3)
CASSLSRVAGERNTQYF

SEQ ID NO: 507093 - protein, 15 aa, Homo sapiens
  CDR3 for alpha chain variable domain of TCR clone 253547 (TRAV13-1, TRAJ5)
CAASKADTGRRAITF

SEQ ID NO: 507094 - protein, 15 aa, Homo sapiens
  CDR3 for beta chain variable domain of TCR clone 253547 (TRBV19, TRBJ2-1)
CASSMGWNSNNEQFF

SEQ ID NO: 507095 - protein, 11 aa, Homo sapiens
  CDR3 for alpha chain variable domain of TCR clone 253548 (TRAV21, TRAJ34)
CAHYNTDKLIF

SEQ ID NO: 507096 - protein, 16 aa, Homo sapiens
  CDR3 for beta chain variable domain of TCR clone 253548 (TRBV7-3, TRBJ2-2)
CAGGLKRGTLSGELFF

SEQ ID NO: 507097 - protein, 14 aa, Homo sapiens
  CDR3 for alpha chain variable domain of TCR clone 253549 (TRAV12-2, TRAJ53)
CDVKGGGSNYKLTF

SEQ ID NO: 507098 - protein, 14 aa, Homo sapiens
  CDR3 for beta chain variable domain of TCR clone 253549 (TRBV7-7, TRBJ2-2)
CATRQDSDTGELFF

SEQ ID NO: 507099 - protein, 10 aa, Homo sapiens
  CDR3 for alpha chain variable domain of TCR clone 253550 (TRAV8-1, TRAJ28)
CAVSGAGVTN

SEQ ID NO: 507100 - protein, 14 aa, Homo sapiens
  CDR3 for beta chain variable domain of TCR clone 253550 (TRBV7-2, TRBJ2-2)
CASRGQGAAGELFF

SEQ ID NO: 507101 - protein, 14 aa, Homo sapiens
  CDR3 for alpha chain variable domain of TCR clone 253551 (TRAV12-3, TRAJ9)
CAMSPNTGSFKTLF

SEQ ID NO: 507102 - protein, 12 aa, Homo sapiens
  CDR3 for beta chain variable domain of TCR clone 253551 (TRBV19, TRBJ1-5)
CASSIAQQPQHF

SEQ ID NO: 507103 - protein, 12 aa, Homo sapiens
  CDR3 for alpha chain variable domain of TCR clone 253552 (TRAV12-1, TRAJ40)
CVVYSGTYKYIF

SEQ ID NO: 507104 - protein, 13 aa, Homo sapiens
  CDR3 for beta chain variable domain of TCR clone 253552 (TRBV12-4, TRBJ2-7)
CASSPTETYEQYF

SEQ ID NO: 507105 - protein, 13 aa, Homo sapiens
  CDR3 for alpha chain variable domain of TCR clone 253553 (TRAV29/DV5, TRAJ29)
CAASAAGNTPLFL

SEQ ID NO: 507106 - protein, 14 aa, Homo sapiens
  CDR3 for beta chain variable domain of TCR clone 253553 (TRBV19, TRBJ2-3)
CASSAPRGTDTQYF

SEQ ID NO: 507107 - protein, 13 aa, Homo sapiens
  CDR3 for alpha chain variable domain of TCR clone 253554 (TRAV16, TRAJ22)
SAMLAGSARQLTF

SEQ ID NO: 507108 - protein, 18 aa, Homo sapiens
  CDR3 for beta chain variable domain of TCR clone 253554 (TRBV7-2, TRBJ2-3)
CDSSLETSRGRKADTQYF

SEQ ID NO: 507109 - protein, 11 aa, Homo sapiens
  CDR3 for alpha chain variable domain of TCR clone 253555 (TRAV21, TRAJ41)
CAVRFGYALNF

SEQ ID NO: 507110 - protein, 13 aa, Homo sapiens
  CDR3 for beta chain variable domain of TCR clone 253555 (TRBV7-9, TRBJ1-2)
CASSLKQNYGYTF

SEQ ID NO: 507111 - protein, 16 aa, Homo sapiens
  CDR3 for alpha chain variable domain of TCR clone 253556 (TRAV3, TRAJ10)
CAVRDMRAGGGNKLTF

SEQ ID NO: 507112 - protein, 13 aa, Homo sapiens
  CDR3 for beta chain variable domain of TCR clone 253556 (TRBV11-2, TRBJ2-1)
CASSLDLVNEQFF

SEQ ID NO: 507113 - protein, 15 aa, Homo sapiens
  CDR3 for alpha chain variable domain of TCR clone 253557 (TRAV17, TRAJ16)
CATDLRFSDGQKLLF

SEQ ID NO: 507114 - protein, 15 aa, Homo sapiens
  CDR3 for beta chain variable domain of TCR clone 253557 (TRBV20-1, TRBJ1-1)
CSASRGVTGNTEAFF

SEQ ID NO: 507115 - protein, 19 aa, Homo sapiens
  CDR3 for alpha chain variable domain of TCR clone 253558 (TRAV29/DV5, TRAJ49)
CSVLLCSKLTLDTGNQFYF

SEQ ID NO: 507116 - protein, 17 aa, Homo sapiens
  CDR3 for beta chain variable domain of TCR clone 253558 (TRBV13, TRBJ2-3)
CASSLSRVAGGRNTQYF

SEQ ID NO: 507117 - protein, 16 aa, Homo sapiens
  CDR3 for alpha chain variable domain of TCR clone 253559 (TRAV30, TRAJ24)
CGPEIVDADSWGKFQF

SEQ ID NO: 507118 - protein, 13 aa, Homo sapiens
  CDR3 for beta chain variable domain of TCR clone 253559 (TRBV7-9, TRBJ2-3)
CASSPGSTDTQYF

SEQ ID NO: 507119 - protein, 13 aa, Homo sapiens
  CDR3 for alpha chain variable domain of TCR clone 253560 (TRAV41, TRAJ54)
CAVRIQGAQKLVF

SEQ ID NO: 507120 - protein, 14 aa, Homo sapiens
  CDR3 for beta chain variable domain of TCR clone 253560 (TRBV2, TRBJ2-1)
CASRTGSSYNEQFL

SEQ ID NO: 507121 - protein, 14 aa, Homo sapiens
  CDR3 for alpha chain variable domain of TCR clone 253561 (TRAV1-2, TRAJ8)
CAVREDTGFQKLVF

SEQ ID NO: 507122 - protein, 15 aa, Homo sapiens
  CDR3 for beta chain variable domain of TCR clone 253561 (TRBV18, TRBJ2-7)
CASSPTVTPNYEQYF

SEQ ID NO: 507123 - protein, 13 aa, Homo sapiens
  CDR3 for alpha chain variable domain of TCR clone 253562 (TRAV21, TRAJ20)
CAVGLRVDYKLSF

SEQ ID NO: 507124 - protein, 14 aa, Homo sapiens
  CDR3 for beta chain variable domain of TCR clone 253562 (TRBV11-2, TRBJ1-3)
CASSLTQGRNTIYF

SEQ ID NO: 507125 - protein, 23 aa, Homo sapiens
  CDR3 for alpha chain variable domain of TCR clone 253563 (TRAV26-1, TRAJ38)
CIADNAGNNRIQNPDPAVYQLID

SEQ ID NO: 507126 - protein, 13 aa, Homo sapiens
  CDR3 for beta chain variable domain of TCR clone 253563 (TRBV20-1, TRBJ1-1)
CSARGGGNTEAFF

SEQ ID NO: 507127 - protein, 15 aa, Homo sapiens
  CDR3 for alpha chain variable domain of TCR clone 253564 (TRAV36/DV7, TRAJ53)
WEGENSGGSNYKLTF

SEQ ID NO: 507128 - protein, 16 aa, Homo sapiens
  CDR3 for beta chain variable domain of TCR clone 253564 (TRBV9, TRBJ2-2)
CASSAMGKGNTGELFF

SEQ ID NO: 507129 - protein, 10 aa, Homo sapiens
  CDR3 for alpha chain variable domain of TCR clone 253565 (TRAV36/DV7, TRAJ31)
CAVGEARLMF

SEQ ID NO: 507130 - protein, 15 aa, Homo sapiens
  CDR3 for beta chain variable domain of TCR clone 253565 (TRBV10-2, TRBJ2-6)
CASSEQGTGANVLTF

SEQ ID NO: 507131 - protein, 11 aa, Homo sapiens
  CDR3 for alpha chain variable domain of TCR clone 253566 (TRAV35, TRAJ22)
CAGPGVGQLTF

SEQ ID NO: 507132 - protein, 14 aa, Homo sapiens
  CDR3 for beta chain variable domain of TCR clone 253566 (TRBV19, TRBJ2-2)
CASSTLHRSGELFF

SEQ ID NO: 507133 - protein, 11 aa, Homo sapiens
  CDR3 for alpha chain variable domain of TCR clone 253567 (TRAV35, TRAJ30)
CAGLRDDKIIF

SEQ ID NO: 507134 - protein, 15 aa, Homo sapiens
  CDR3 for beta chain variable domain of TCR clone 253567 (TRBV27, TRBJ2-3)
CASSLGLAATDTQYF

SEQ ID NO: 507135 - protein, 16 aa, Homo sapiens
  CDR3 for alpha chain variable domain of TCR clone 253568 (TRAV4, TRAJ22)
CLVGDLYSGSARQLTF

SEQ ID NO: 507136 - protein, 13 aa, Homo sapiens
  CDR3 for beta chain variable domain of TCR clone 253568 (TRBV7-6, TRBJ1-2)
CASSLVADYGYTF

SEQ ID NO: 507137 - protein, 11 aa, Homo sapiens
  CDR3 for alpha chain variable domain of TCR clone 253569 (TRAV13-2, TRAJ45)
HSGGGADGLTF

SEQ ID NO: 507138 - protein, 11 aa, Homo sapiens
  CDR3 for beta chain variable domain of TCR clone 253569 (TRBV20-1, TRBJ2-7)
CSARLSYEQYF

SEQ ID NO: 507139 - protein, 16 aa, Homo sapiens
  CDR3 for alpha chain variable domain of TCR clone 253570 (TRAV12-2, TRAJ32)
CAVNLGQGGATNKLIF

SEQ ID NO: 507140 - protein, 15 aa, Homo sapiens
  CDR3 for beta chain variable domain of TCR clone 253570 (TRBV20-1, TRBJ2-7)
CSARGPPAGGREQYF

SEQ ID NO: 507141 - protein, 15 aa, Homo sapiens
  CDR3 for alpha chain variable domain of TCR clone 253571 (TRAV34, TRAJ38)
CGADFTPGNNRKLIW

SEQ ID NO: 507142 - protein, 15 aa, Homo sapiens
  CDR3 for beta chain variable domain of TCR clone 253571 (TRBV18, TRBJ2-6)
CASSPSYAGANVLTF

SEQ ID NO: 507143 - protein, 14 aa, Homo sapiens
  CDR3 for alpha chain variable domain of TCR clone 253572 (TRAV12-3, TRAJ30)
CAMSLLNRDDKIIF

SEQ ID NO: 507144 - protein, 12 aa, Homo sapiens
  CDR3 for beta chain variable domain of TCR clone 253572 (TRBV11-2, TRBJ2-2)
CASRLGGGELFF

SEQ ID NO: 507145 - protein, 11 aa, Homo sapiens
  CDR3 for alpha chain variable domain of TCR clone 253573 (TRAV13-2, TRAJ54)
RAVQGAQKLVF

SEQ ID NO: 507146 - protein, 15 aa, Homo sapiens
  CDR3 for beta chain variable domain of TCR clone 253573 (TRBV5-1, TRBJ1-4)
FAPAAWKDGNEKLFF

SEQ ID NO: 507147 - protein, 15 aa, Homo sapiens
  CDR3 for alpha chain variable domain of TCR clone 253574 (TRAV12-2, TRAJ50)
CAVNGLETSYDKVIF

SEQ ID NO: 507148 - protein, 13 aa, Homo sapiens
  CDR3 for beta chain variable domain of TCR clone 253574 (TRBV5-7, TRBJ2-6)
CASTSSGANVLTF

SEQ ID NO: 507149 - protein, 13 aa, Homo sapiens
  CDR3 for alpha chain variable domain of TCR clone 253575 (TRAV38-2/DV8, TRAJ34)
CAYRNYNTDKLIF

SEQ ID NO: 507150 - protein, 15 aa, Homo sapiens
  CDR3 for beta chain variable domain of TCR clone 253575 (TRBV7-9, TRBJ1-6)
CASSSPGRGNSPLHF

SEQ ID NO: 507151 - protein, 15 aa, Homo sapiens
  CDR3 for alpha chain variable domain of TCR clone 253576 (TRAV3, TRAJ30)
CAVRDRVERGDKIIF

SEQ ID NO: 507152 - protein, 13 aa, Homo sapiens
  CDR3 for beta chain variable domain of TCR clone 253576 (TRBV29-1, TRBJ2-5)
CSACSARRETQYF

SEQ ID NO: 507153 - protein, 14 aa, Homo sapiens
  CDR3 for alpha chain variable domain of TCR clone 253577 (TRAV13-1, TRAJ32)
CAARGSGATNKLIF

SEQ ID NO: 507154 - protein, 15 aa, Homo sapiens
  CDR3 for beta chain variable domain of TCR clone 253577 (TRBV2, TRBJ2-7)
CASSGDGRGRYEQYF

SEQ ID NO: 507155 - protein, 16 aa, Homo sapiens
  CDR3 for alpha chain variable domain of TCR clone 253578 (TRAV16, TRAJ4)
CALSRMFSGGYNKLIF

SEQ ID NO: 507156 - protein, 15 aa, Homo sapiens
  CDR3 for beta chain variable domain of TCR clone 253578 (TRBV20-1, TRBJ2-7)
CSAESGTSGAYEQYF

SEQ ID NO: 507157 - protein, 14 aa, Homo sapiens
  CDR3 for alpha chain variable domain of TCR clone 253579 (TRAV16, TRAJ57)
CALSGQGGSEKQVF

SEQ ID NO: 507158 - protein, 13 aa, Homo sapiens
  CDR3 for beta chain variable domain of TCR clone 253579 (TRBV5-4, TRBJ2-1)
CASSLQGPREQFF

SEQ ID NO: 507159 - protein, 14 aa, Homo sapiens
  CDR3 for alpha chain variable domain of TCR clone 253580 (TRAV35, TRAJ22)
CAGHLSGSARQLTF

SEQ ID NO: 507160 - protein, 15 aa, Homo sapiens
  CDR3 for beta chain variable domain of TCR clone 253580 (TRBV9, TRBJ1-6)
CASSVAGTGDSPLHF

SEQ ID NO: 507161 - protein, 12 aa, Homo sapiens
  CDR3 for alpha chain variable domain of TCR clone 253581 (TRAV13-1, TRAJ27)
CAAHTTAGKSTF

SEQ ID NO: 507162 - protein, 14 aa, Homo sapiens
  CDR3 for beta chain variable domain of TCR clone 253581 (TRBV19, TRBJ2-2)
CASRGQGIAGELFF

SEQ ID NO: 507163 - protein, 11 aa, Homo sapiens
  CDR3 for alpha chain variable domain of TCR clone 253582 (TRAV21, TRAJ31)
CAVRNNARLMF

SEQ ID NO: 507164 - protein, 12 aa, Homo sapiens
  CDR3 for beta chain variable domain of TCR clone 253582 (TRBV7-2, TRBJ2-2)
CASSLGGGELFF

SEQ ID NO: 507165 - protein, 17 aa, Homo sapiens
  CDR3 for alpha chain variable domain of TCR clone 253583 (TRAV22, TRAJ53)
CAVEFSNSGGSNYKLTF

SEQ ID NO: 507166 - protein, 15 aa, Homo sapiens
  CDR3 for beta chain variable domain of TCR clone 253583 (TRBV29-1, TRBJ2-1)
RSVPTGLALYNEQFF

SEQ ID NO: 507167 - protein, 17 aa, Homo sapiens
  CDR3 for alpha chain variable domain of TCR clone 253584 (TRAV8-6, TRAJ52)
CAVSEGAGGTSYGKLTF

SEQ ID NO: 507168 - protein, 14 aa, Homo sapiens
  CDR3 for beta chain variable domain of TCR clone 253584 (TRBV7-2, TRBJ2-7)
CASSPKTSFYEQYF

SEQ ID NO: 507169 - protein, 15 aa, Homo sapiens
  CDR3 for alpha chain variable domain of TCR clone 253585 (TRAV12-3, TRAJ10)
CASYILTGGGYKLTF

SEQ ID NO: 507170 - protein, 15 aa, Homo sapiens
  CDR3 for beta chain variable domain of TCR clone 253585 (TRBV7-2, TRBJ1-6)
CASSLGPDRGMPLHF

SEQ ID NO: 507171 - protein, 13 aa, Homo sapiens
  CDR3 for alpha chain variable domain of TCR clone 253586 (TRAV12-1, TRAJ3)
CVVNPRGASKIIF

SEQ ID NO: 507172 - protein, 12 aa, Homo sapiens
  CDR3 for beta chain variable domain of TCR clone 253586 (TRBV11-2, TRBJ2-2)
CASSLPTGELFF

SEQ ID NO: 507173 - protein, 16 aa, Homo sapiens
  CDR3 for alpha chain variable domain of TCR clone 253587 (TRAV20, TRAJ22)
CAVQASSSGSARQLTF

SEQ ID NO: 507174 - protein, 13 aa, Homo sapiens
  CDR3 for beta chain variable domain of TCR clone 253587 (TRBV11-2, TRBJ2-7)
CASSGARPYEQYF

SEQ ID NO: 507175 - protein, 13 aa, Homo sapiens
  CDR3 for alpha chain variable domain of TCR clone 253588 (TRAV3, TRAJ27)
CAVRPLGAGKSTF

SEQ ID NO: 507176 - protein, 16 aa, Homo sapiens
  CDR3 for beta chain variable domain of TCR clone 253588 (TRBV10-3, TRBJ2-1)
CAISWTSGNSYNEQFF

SEQ ID NO: 507177 - protein, 14 aa, Homo sapiens
  CDR3 for alpha chain variable domain of TCR clone 253589 (TRAV13-1, TRAJ10)
CAAKEPGGGNKLTF

SEQ ID NO: 507178 - protein, 12 aa, Homo sapiens
  CDR3 for beta chain variable domain of TCR clone 253589 (TRBV7-9, TRBJ2-7)
CATRTDAYEQYF

SEQ ID NO: 507179 - protein, 15 aa, Homo sapiens
  CDR3 for alpha chain variable domain of TCR clone 253590 (TRAV27, TRAJ38)
CAARRNAGNNRKLVW

SEQ ID NO: 507180 - protein, 13 aa, Homo sapiens
  CDR3 for beta chain variable domain of TCR clone 253590 (TRBV7-3, TRBJ2-1)
CASSVDSYNEQFF

SEQ ID NO: 507181 - protein, 16 aa, Homo sapiens
  CDR3 for alpha chain variable domain of TCR clone 253591 (TRAV20, TRAJ38)
CAVQARNAGNNRKLIW

SEQ ID NO: 507182 - protein, 16 aa, Homo sapiens
  CDR3 for beta chain variable domain of TCR clone 253591 (TRBV7-8, TRBJ2-6)
CASRVGDSSGANVLTF

SEQ ID NO: 507183 - protein, 12 aa, Homo sapiens
  CDR3 for alpha chain variable domain of TCR clone 253592 (TRAV12-3, TRAJ17)
CAMTLTGNKLTF

SEQ ID NO: 507184 - protein, 15 aa, Homo sapiens
  CDR3 for beta chain variable domain of TCR clone 253592 (TRBV20-1, TRBJ2-7)
CSARDRVSGMDEQYY

SEQ ID NO: 507185 - protein, 14 aa, Homo sapiens
  CDR3 for alpha chain variable domain of TCR clone 253593 (TRAV13-1, TRAJ35)
CAASKRGFGNVLHC

SEQ ID NO: 507186 - protein, 13 aa, Homo sapiens
  CDR3 for beta chain variable domain of TCR clone 253593 (TRBV7-3, TRBJ1-1)
CVISQDWGAEAFF

SEQ ID NO: 507187 - protein, 13 aa, Homo sapiens
  CDR3 for alpha chain variable domain of TCR clone 253594 (TRAV13-1, TRAJ5)
CAASDTGRRALTF

SEQ ID NO: 507188 - protein, 13 aa, Homo sapiens
  CDR3 for beta chain variable domain of TCR clone 253594 (TRBV10-3, TRBJ2-7)
CASKLAVNYEQYF

SEQ ID NO: 507189 - protein, 12 aa, Homo sapiens
  CDR3 for alpha chain variable domain of TCR clone 253595 (TRAV13-1, TRAJ21)
CAAKEGFNKFYF

SEQ ID NO: 507190 - protein, 14 aa, Homo sapiens
  CDR3 for beta chain variable domain of TCR clone 253595 (TRBV28, TRBJ1-2)
CASRIQGANYGYTF

SEQ ID NO: 507191 - protein, 16 aa, Homo sapiens
  CDR3 for alpha chain variable domain of TCR clone 253596 (TRAV3, TRAJ28)
CAVLPRSGAGSYQLTF

SEQ ID NO: 507192 - protein, 13 aa, Homo sapiens
  CDR3 for beta chain variable domain of TCR clone 253596 (TRBV12-3, TRBJ2-5)
CASRLAVQETQYF

SEQ ID NO: 507193 - protein, 10 aa, Homo sapiens
  CDR3 for alpha chain variable domain of TCR clone 253597 (TRAV12-3, TRAJ49)
CAMNDDQFYF

SEQ ID NO: 507194 - protein, 12 aa, Homo sapiens
  CDR3 for beta chain variable domain of TCR clone 253597 (TRBV7-9, TRBJ2-7)
CASSIKREEQYF

SEQ ID NO: 507195 - protein, 13 aa, Homo sapiens
  CDR3 for alpha chain variable domain of TCR clone 253598 (TRAV13-2, TRAJ45)
QRVTRGGADGLTF

SEQ ID NO: 507196 - protein, 17 aa, Homo sapiens
  CDR3 for beta chain variable domain of TCR clone 253598 (TRBV19, TRBJ1-1)
CASSIAGRGLMNTEAFF

SEQ ID NO: 507197 - protein, 15 aa, Homo sapiens
  CDR3 for alpha chain variable domain of TCR clone 253599 (TRAV26-1, TRAJ29)
RIVRALNSGNTPLVF

SEQ ID NO: 507198 - protein, 14 aa, Homo sapiens
  CDR3 for beta chain variable domain of TCR clone 253599 (TRBV5-4, TRBJ1-2)
CASSLLGVTYGYTF

SEQ ID NO: 507199 - protein, 22 aa, Homo sapiens
  CDR3 for alpha chain variable domain of TCR clone 253600 (TRAV30, TRAJ26)
PAQLLRNLLLWHRDSLGQNFVF

SEQ ID NO: 507200 - protein, 16 aa, Homo sapiens
  CDR3 for beta chain variable domain of TCR clone 253600 (TRBV7-2, TRBJ2-3)
CASSLVALYSTDTQYF

SEQ ID NO: 507201 - protein, 15 aa, Homo sapiens
  CDR3 for alpha chain variable domain of TCR clone 253601 (TRAV17, TRAJ57)
CATGPSQGGSEKLVF

SEQ ID NO: 507202 - protein, 13 aa, Homo sapiens
  CDR3 for beta chain variable domain of TCR clone 253601 (TRBV7-9, TRBJ1-2)
CASSLTQNYGYTF

SEQ ID NO: 507203 - protein, 17 aa, Homo sapiens
  CDR3 for alpha chain variable domain of TCR clone 253602 (TRAV3, TRAJ6)
CAVRDGPRAGGSYIPTF

SEQ ID NO: 507204 - protein, 15 aa, Homo sapiens
  CDR3 for beta chain variable domain of TCR clone 253602 (TRBV7-6, TRBJ2-5)
CASSKPTGPQETQYF

SEQ ID NO: 507205 - protein, 13 aa, Homo sapiens
  CDR3 for alpha chain variable domain of TCR clone 253603 (TRAV17, TRAJ26)
CATVDNYGQNFVF

SEQ ID NO: 507206 - protein, 14 aa, Homo sapiens
  CDR3 for beta chain variable domain of TCR clone 253603 (TRBV6-1, TRBJ1-3)
CASVQGEGGNTIYF

SEQ ID NO: 507207 - protein, 18 aa, Homo sapiens
  CDR3 for alpha chain variable domain of TCR clone 253604 (TRAV13-1, TRAJ52)
CAAKNPNAGGTSYGKLTF

SEQ ID NO: 507208 - protein, 15 aa, Homo sapiens
  CDR3 for beta chain variable domain of TCR clone 253604 (TRBV20-1, TRBJ2-7)
CSAIDRVSGMDEQYF

SEQ ID NO: 507209 - protein, 14 aa, Homo sapiens
  CDR3 for alpha chain variable domain of TCR clone 253605 (TRAV1-2, TRAJ16)
CAVIRFSDGQKLLF

SEQ ID NO: 507210 - protein, 20 aa, Homo sapiens
  CDR3 for beta chain variable domain of TCR clone 253605 (TRBV7-8, TRBJ2-2)
CASSHLFPGPTIHITGELFF

SEQ ID NO: 507211 - protein, 14 aa, Homo sapiens
  CDR3 for alpha chain variable domain of TCR clone 253606 (TRAV9-2, TRAJ39)
CVLYIYNAGNMLTF

SEQ ID NO: 507212 - protein, 16 aa, Homo sapiens
  CDR3 for beta chain variable domain of TCR clone 253606 (TRBV12-5, TRBJ2-5)
CASGPRTSGNQETQYF

SEQ ID NO: 507213 - protein, 15 aa, Homo sapiens
  CDR3 for alpha chain variable domain of TCR clone 253607 (TRAV17, TRAJ22)
CATVAPSGYARQLTF

SEQ ID NO: 507214 - protein, 16 aa, Homo sapiens
  CDR3 for beta chain variable domain of TCR clone 253607 (TRBV10-3, TRBJ2-7)
CAISADFADRPYEQYF

SEQ ID NO: 507215 - protein, 11 aa, Homo sapiens
  CDR3 for alpha chain variable domain of TCR clone 253608 (TRAV12-2, TRAJ49)
CAVNTGNQFYF

SEQ ID NO: 507216 - protein, 14 aa, Homo sapiens
  CDR3 for beta chain variable domain of TCR clone 253608 (TRBV19, TRBJ2-1)
CASPTFVLSGEQFF

SEQ ID NO: 507217 - protein, 11 aa, Homo sapiens
  CDR3 for alpha chain variable domain of TCR clone 253609 (TRAV1-2, TRAJ20)
CAVSNDYKLSF

SEQ ID NO: 507218 - protein, 16 aa, Homo sapiens
  CDR3 for beta chain variable domain of TCR clone 253609 (TRBV29-1, TRBJ2-6)
CSVEDITYAGANGLTF

SEQ ID NO: 507219 - protein, 15 aa, Homo sapiens
  CDR3 for alpha chain variable domain of TCR clone 253610 (TRAV3, TRAJ22)
CAVRDRGGSARQLTF

SEQ ID NO: 507220 - protein, 15 aa, Homo sapiens
  CDR3 for beta chain variable domain of TCR clone 253610 (TRBV5-8, TRBJ1-1)
CASSFSGTSLKGAFF

SEQ ID NO: 507221 - protein, 11 aa, Homo sapiens
  CDR3 for alpha chain variable domain of TCR clone 253611 (TRAV3, TRAJ21)
FAVGNFNKFYF

SEQ ID NO: 507222 - protein, 14 aa, Homo sapiens
  CDR3 for beta chain variable domain of TCR clone 253611 (TRBV20-1, TRBJ2-2)
CSAPDTANTGELFF

SEQ ID NO: 507223 - protein, 17 aa, Homo sapiens
  CDR3 for alpha chain variable domain of TCR clone 253612 (TRAV3, TRAJ6)
CAVRDGPRAGGSYIPTF

SEQ ID NO: 507224 - protein, 14 aa, Homo sapiens
  CDR3 for beta chain variable domain of TCR clone 253612 (TRBV12-4, TRBJ1-1)
CASSSARGYTEAFF

SEQ ID NO: 507225 - protein, 18 aa, Homo sapiens
  CDR3 for alpha chain variable domain of TCR clone 253613 (TRAV26-1, TRAJ23)
CIVRVGLEVRNQGGKPIF

SEQ ID NO: 507226 - protein, 16 aa, Homo sapiens
  CDR3 for beta chain variable domain of TCR clone 253613 (TRBV12-4, TRBJ2-5)
CASSFFVRGRQETQYF

SEQ ID NO: 507227 - protein, 14 aa, Homo sapiens
  CDR3 for alpha chain variable domain of TCR clone 253614 (TRAV13-1, TRAJ53)
CASSIIGSNYKLTF

SEQ ID NO: 507228 - protein, 15 aa, Homo sapiens
  CDR3 for beta chain variable domain of TCR clone 253614 (TRBV4-1, TRBJ1-4)
CASSDTGGTNEKLFF

SEQ ID NO: 507229 - protein, 10 aa, Homo sapiens
  CDR3 for alpha chain variable domain of TCR clone 253615 (TRAV36/DV7, TRAJ49)
CALTGNQFYF

SEQ ID NO: 507230 - protein, 14 aa, Homo sapiens
  CDR3 for beta chain variable domain of TCR clone 253615 (TRBV7-7, TRBJ2-7)
CASSLGRGVGEQYF

SEQ ID NO: 507231 - protein, 13 aa, Homo sapiens
  CDR3 for alpha chain variable domain of TCR clone 253616 (TRAV29/DV5, TRAJ33)
CAASVESNYQLIW

SEQ ID NO: 507232 - protein, 13 aa, Homo sapiens
  CDR3 for beta chain variable domain of TCR clone 253616 (TRBV5-1, TRBJ1-5)
CASSLGSNQPQHL

SEQ ID NO: 507233 - protein, 21 aa, Homo sapiens
  CDR3 for alpha chain variable domain of TCR clone 253617 (TRAV26-1, TRAJ38)
CIADNAGNNHIQNPDPAVYQR

SEQ ID NO: 507234 - protein, 13 aa, Homo sapiens
  CDR3 for beta chain variable domain of TCR clone 253617 (TRBV20-1, TRBJ1-1)
CSARGGGNTEAFF

SEQ ID NO: 507235 - protein, 16 aa, Homo sapiens
  CDR3 for alpha chain variable domain of TCR clone 253618 (TRAV3, TRAJ3)
CAVRDRAKSSASKIIF

SEQ ID NO: 507236 - protein, 13 aa, Homo sapiens
  CDR3 for beta chain variable domain of TCR clone 253618 (TRBV10-3, TRBJ2-7)
CDSKLAVNYEQYF

SEQ ID NO: 507237 - protein, 12 aa, Homo sapiens
  CDR3 for alpha chain variable domain of TCR clone 253619 (TRAV12-3, TRAJ17)
CAMTLTGNKLTF

SEQ ID NO: 507238 - protein, 11 aa, Homo sapiens
  CDR3 for beta chain variable domain of TCR clone 253619 (TRBV28, TRBJ2-1)
CASRRVNEQFL

SEQ ID NO: 507239 - protein, 16 aa, Homo sapiens
  CDR3 for alpha chain variable domain of TCR clone 253620 (TRAV3, TRAJ10)
CAVRDMRAGGGNKLTF

SEQ ID NO: 507240 - protein, 14 aa, Homo sapiens
  CDR3 for beta chain variable domain of TCR clone 253620 (TRBV6-3, TRBJ2-2)
CASTYAPDTGELFF

SEQ ID NO: 507241 - protein, 14 aa, Homo sapiens
  CDR3 for alpha chain variable domain of TCR clone 253621 (TRAV12-3, TRAJ57)
CARALEGGSEKLVF

SEQ ID NO: 507242 - protein, 16 aa, Homo sapiens
  CDR3 for beta chain variable domain of TCR clone 253621 (TRBV7-9, TRBJ1-2)
CASSLGFSSGEDGYTF

SEQ ID NO: 507243 - protein, 14 aa, Homo sapiens
  CDR3 for alpha chain variable domain of TCR clone 253622 (TRAV1-2, TRAJ16)
CAVNRFSDGQKLLF

SEQ ID NO: 507244 - protein, 15 aa, Homo sapiens
  CDR3 for beta chain variable domain of TCR clone 253622 (TRBV12-3, TRBJ2-5)
CASSPPTGLQETQYF

SEQ ID NO: 507245 - protein, 14 aa, Homo sapiens
  CDR3 for alpha chain variable domain of TCR clone 253623 (TRAV3, TRAJ9)
CAVRLNTGCFKTIF

SEQ ID NO: 507246 - protein, 16 aa, Homo sapiens
  CDR3 for beta chain variable domain of TCR clone 253623 (TRBV12-5, TRBJ2-5)
CASGPRTSGNQETQYF

SEQ ID NO: 507247 - protein, 14 aa, Homo sapiens
  CDR3 for alpha chain variable domain of TCR clone 253624 (TRAV14/DV4, TRAJ34)
CAMREGRPHRQAHL

SEQ ID NO: 507248 - protein, 14 aa, Homo sapiens
  CDR3 for beta chain variable domain of TCR clone 253624 (TRBV19, TRBJ2-1)
CARPTFVLSGEQFF

SEQ ID NO: 507249 - protein, 11 aa, Homo sapiens
  CDR3 for alpha chain variable domain of TCR clone 253625 (TRAV12-3, TRAJ49)
CAANTGIQFYF

SEQ ID NO: 507250 - protein, 12 aa, Homo sapiens
  CDR3 for beta chain variable domain of TCR clone 253625 (TRBV6-3, TRBJ2-7)
CASSEPGFEQYF

SEQ ID NO: 507251 - protein, 18 aa, Homo sapiens
  CDR3 for alpha chain variable domain of TCR clone 253626 (TRAV21, TRAJ52)
CAVSPSPAGGTSYGKLTF

SEQ ID NO: 507252 - protein, 15 aa, Homo sapiens
  CDR3 for beta chain variable domain of TCR clone 253626 (TRBV10-3, TRBJ2-3)
CAISLTSGGTDTQYF

SEQ ID NO: 507253 - protein, 15 aa, Homo sapiens
  CDR3 for alpha chain variable domain of TCR clone 253627 (TRAV2, TRAJ28)
CAIPYSGAGSYQLTF

SEQ ID NO: 507254 - protein, 10 aa, Homo sapiens
  CDR3 for beta chain variable domain of TCR clone 253627 (TRBV23-1, TRBJ2-1)
KWSSYNEQFF

SEQ ID NO: 507255 - protein, 14 aa, Homo sapiens
  CDR3 for alpha chain variable domain of TCR clone 253628 (TRAV12-1, TRAJ6)
CVVARIRRKLHTYI

SEQ ID NO: 507256 - protein, 15 aa, Homo sapiens
  CDR3 for beta chain variable domain of TCR clone 253628 (TRBV7-3, TRBJ2-1)
CASSLKASEYNEGSS

SEQ ID NO: 507257 - protein, 14 aa, Homo sapiens
  CDR3 for alpha chain variable domain of TCR clone 253629 (TRAV29/DV5, TRAJ36)
CAARRKTGANNLFF

SEQ ID NO: 507258 - protein, 14 aa, Homo sapiens
  CDR3 for beta chain variable domain of TCR clone 253629 (TRBV19, TRBJ2-7)
CASSTGQGAIEQYF

SEQ ID NO: 507259 - protein, 14 aa, Homo sapiens
  CDR3 for alpha chain variable domain of TCR clone 253630 (TRAV12-2, TRAJ53)
CAVKGGVSNYKLTF

SEQ ID NO: 507260 - protein, 14 aa, Homo sapiens
  CDR3 for beta chain variable domain of TCR clone 253630 (TRBV7-7, TRBJ2-2)
CATRQDSDTGELFF

SEQ ID NO: 507261 - protein, 12 aa, Homo sapiens
  CDR3 for alpha chain variable domain of TCR clone 253631 (TRAV13-1, TRAJ21)
CAAQEGFNNFYF

SEQ ID NO: 507262 - protein, 14 aa, Homo sapiens
  CDR3 for beta chain variable domain of TCR clone 253631 (TRBV18, TRBJ2-7)
CASSPRGGAYEQYF

SEQ ID NO: 507263 - protein, 12 aa, Homo sapiens
  CDR3 for alpha chain variable domain of TCR clone 253632 (TRAV13-1, TRAJ48)
CAANFGNEKLTF

SEQ ID NO: 507264 - protein, 15 aa, Homo sapiens
  CDR3 for beta chain variable domain of TCR clone 253632 (TRBV5-1, TRBJ2-6)
CASSLDPSGANVLTF

SEQ ID NO: 507265 - protein, 12 aa, Homo sapiens
  CDR3 for alpha chain variable domain of TCR clone 253633 (TRAV12-2, TRAJ10)
WGVTGGGNNLTF

SEQ ID NO: 507266 - protein, 15 aa, Homo sapiens
  CDR3 for beta chain variable domain of TCR clone 253633 (TRBV20-1, TRBJ2-7)
CSARDRVSGMDEQYF

SEQ ID NO: 507267 - protein, 14 aa, Homo sapiens
  CDR3 for alpha chain variable domain of TCR clone 253634 (TRAV12-3, TRAJ11)
CALTTNSGYSTLTF

SEQ ID NO: 507268 - protein, 16 aa, Homo sapiens
  CDR3 for beta chain variable domain of TCR clone 253634 (TRBV20-1, TRBJ1-1)
CSARALTQGMNTEAFF

SEQ ID NO: 507269 - protein, 17 aa, Homo sapiens
  CDR3 for alpha chain variable domain of TCR clone 253635 (TRAV14/DV4, TRAJ4)
CAMREASGGGGYNKLIF

SEQ ID NO: 507270 - protein, 14 aa, Homo sapiens
  CDR3 for beta chain variable domain of TCR clone 253635 (TRBV19, TRBJ2-7)
CASSMGQGAIEQYF

SEQ ID NO: 507271 - protein, 11 aa, Homo sapiens
  CDR3 for alpha chain variable domain of TCR clone 253636 (TRAV21, TRAJ34)
CAHYNTDKLIF

SEQ ID NO: 507272 - protein, 16 aa, Homo sapiens
  CDR3 for beta chain variable domain of TCR clone 253636 (TRBV4-2, TRBJ2-1)
CASSQGEGRTVNEQFF

SEQ ID NO: 507273 - protein, 11 aa, Homo sapiens
  CDR3 for alpha chain variable domain of TCR clone 253637 (TRAV2, TRAJ33)
CAVDSNYQLIW

SEQ ID NO: 507274 - protein, 14 aa, Homo sapiens
  CDR3 for beta chain variable domain of TCR clone 253637 (TRBV7-9, TRBJ1-2)
CASSRQGANYGYTF

SEQ ID NO: 507275 - protein, 14 aa, Homo sapiens
  CDR3 for alpha chain variable domain of TCR clone 253638 (TRAV9-2, TRAJ39)
CALYIYNAGNMLTF

SEQ ID NO: 507276 - protein, 17 aa, Homo sapiens
  CDR3 for beta chain variable domain of TCR clone 253638 (TRBV19, TRBJ1-5)
CASSRDRVLSRFQPQHF

SEQ ID NO: 507277 - protein, 16 aa, Homo sapiens
  CDR3 for alpha chain variable domain of TCR clone 253639 (TRAV30, TRAJ24)
CGTEIVDADSWGKFLF

SEQ ID NO: 507278 - protein, 12 aa, Homo sapiens
  CDR3 for beta chain variable domain of TCR clone 253639 (TRBV11-2, TRBJ2-1)
CASSPGNNEQFF

SEQ ID NO: 507279 - protein, 17 aa, Homo sapiens
  CDR3 for alpha chain variable domain of TCR clone 253640 (TRAV3, TRAJ6)
CAVRDGPRAGGSYLPTF

SEQ ID NO: 507280 - protein, 15 aa, Homo sapiens
  CDR3 for beta chain variable domain of TCR clone 253640 (TRBV9, TRBJ1-6)
CASSVAGTGDSPLHF

SEQ ID NO: 507281 - protein, 14 aa, Homo sapiens
  CDR3 for alpha chain variable domain of TCR clone 253641 (TRAV8-1, TRAJ16)
CAVNPGPDGQKLLF

SEQ ID NO: 507282 - protein, 11 aa, Homo sapiens
  CDR3 for beta chain variable domain of TCR clone 253641 (TRBV7-9, TRBJ2-3)
CASSPTDTQYF

SEQ ID NO: 507283 - protein, 13 aa, Homo sapiens
  CDR3 for alpha chain variable domain of TCR clone 253642 (TRAV17, TRAJ9)
CATDGTGGFKTIF

SEQ ID NO: 507284 - protein, 13 aa, Homo sapiens
  CDR3 for beta chain variable domain of TCR clone 253642 (TRBV7-2, TRBJ2-2)
CASSLAVTGELFF

SEQ ID NO: 507285 - protein, 16 aa, Homo sapiens
  CDR3 for alpha chain variable domain of TCR clone 253643 (TRAV14/DV4, TRAJ54)
CAMREGRIQGAQKLVF

SEQ ID NO: 507286 - protein, 10 aa, Homo sapiens
  CDR3 for beta chain variable domain of TCR clone 253643 (TRBV5-1, TRBJ2-2)
CASSLAGLSG

SEQ ID NO: 507287 - protein, 19 aa, Homo sapiens
  CDR3 for alpha chain variable domain of TCR clone 253644 (TRAV38-1, TRAJ53)
CAFMKHGLESGGSNYKLPF

SEQ ID NO: 507288 - protein, 16 aa, Homo sapiens
  CDR3 for beta chain variable domain of TCR clone 253644 (TRBV7-8, TRBJ2-4)
CASSAERTLAKNIQYF

SEQ ID NO: 507289 - protein, 14 aa, Homo sapiens
  CDR3 for alpha chain variable domain of TCR clone 253645 (TRAV5, TRAJ21)
CAESILDNFNKFYF

SEQ ID NO: 507290 - protein, 13 aa, Homo sapiens
  CDR3 for beta chain variable domain of TCR clone 253645 (TRBV24-1, TRBJ2-2)
CATSDWSTGELFF

SEQ ID NO: 507291 - protein, 14 aa, Homo sapiens
  CDR3 for alpha chain variable domain of TCR clone 253646 (TRAV35, TRAJ42)
CAGRYGGSQGNLIF

SEQ ID NO: 507292 - protein, 14 aa, Homo sapiens
  CDR3 for beta chain variable domain of TCR clone 253646 (TRBV7-9, TRBJ2-3)
CASSLGTVTDTQYF

SEQ ID NO: 507293 - protein, 14 aa, Homo sapiens
  CDR3 for alpha chain variable domain of TCR clone 253647 (TRAV8-1, TRAJ34)
CAVNPSYNTDNLIF

SEQ ID NO: 507294 - protein, 16 aa, Homo sapiens
  CDR3 for beta chain variable domain of TCR clone 253647 (TRBV7-2, TRBJ2-6)
CASSLAGRSGANVLTF

SEQ ID NO: 507295 - protein, 14 aa, Homo sapiens
  CDR3 for alpha chain variable domain of TCR clone 253648 (TRAV13-1, TRAJ44)
CAAKATGTASKLTL

SEQ ID NO: 507296 - protein, 12 aa, Homo sapiens
  CDR3 for beta chain variable domain of TCR clone 253648 (TRBV7-8, TRBJ2-7)
CASSLGDREQYF

SEQ ID NO: 507297 - protein, 12 aa, Homo sapiens
  CDR3 for alpha chain variable domain of TCR clone 253649 (TRAV21, TRAJ56)
CAVGVNRSKLTF

SEQ ID NO: 507298 - protein, 15 aa, Homo sapiens
  CDR3 for beta chain variable domain of TCR clone 253649 (TRBV28, TRBJ2-1)
CASSIIAGGRSEQFF

SEQ ID NO: 507299 - protein, 14 aa, Homo sapiens
  CDR3 for alpha chain variable domain of TCR clone 253650 (TRAV26-1, TRAJ45)
CIVRVFGGADGLTF

SEQ ID NO: 507300 - protein, 16 aa, Homo sapiens
  CDR3 for beta chain variable domain of TCR clone 253650 (TRBV7-9, TRBJ1-1)
CASSLTQVRSNTEAFF

SEQ ID NO: 507301 - protein, 14 aa, Homo sapiens
  CDR3 for alpha chain variable domain of TCR clone 253651 (TRAV12-1, TRAJ34)
CVVNLDHNTDKLIF

SEQ ID NO: 507302 - protein, 17 aa, Homo sapiens
  CDR3 for beta chain variable domain of TCR clone 253651 (TRBV20-1, TRBJ2-7)
CSAAGTSGGGSSYEQYF

SEQ ID NO: 507303 - protein, 15 aa, Homo sapiens
  CDR3 for alpha chain variable domain of TCR clone 253652 (TRAV3, TRAJ4)
CAVRDGTGGYNKLIF

SEQ ID NO: 507304 - protein, 16 aa, Homo sapiens
  CDR3 for beta chain variable domain of TCR clone 253652 (TRBV28, TRBJ2-7)
CASSLFVETGGPEQYF

SEQ ID NO: 507305 - protein, 16 aa, Homo sapiens
  CDR3 for alpha chain variable domain of TCR clone 253653 (TRAV30, TRAJ24)
CGTEIVDADSWGKFQC

SEQ ID NO: 507306 - protein, 15 aa, Homo sapiens
  CDR3 for beta chain variable domain of TCR clone 253653 (TRBV19, TRBJ1-1)
CASTSGQIQNTEAFF

SEQ ID NO: 507307 - protein, 13 aa, Homo sapiens
  CDR3 for alpha chain variable domain of TCR clone 253654 (TRAV13-2, TRAJ15)
CAESNQAGTALIF

SEQ ID NO: 507308 - protein, 16 aa, Homo sapiens
  CDR3 for beta chain variable domain of TCR clone 253654 (TRBV19, TRBJ2-2)
CASRSPGAGATGELFF

SEQ ID NO: 507309 - protein, 15 aa, Homo sapiens
  CDR3 for alpha chain variable domain of TCR clone 253655 (TRAV12-3, TRAJ6)
CALSATSGGSYIPTF

SEQ ID NO: 507310 - protein, 13 aa, Homo sapiens
  CDR3 for beta chain variable domain of TCR clone 253655 (TRBV7-9, TRBJ1-2)
CASSLKQNYGYTF

SEQ ID NO: 507311 - protein, 15 aa, Homo sapiens
  CDR3 for alpha chain variable domain of TCR clone 253656 (TRAV12-2, TRAJ50)
CAVNGLETSYDKVIF

SEQ ID NO: 507312 - protein, 15 aa, Homo sapiens
  CDR3 for beta chain variable domain of TCR clone 253656 (TRBV7-2, TRBJ1-2)
CASSPRAGWNYGYTF

SEQ ID NO: 507313 - protein, 13 aa, Homo sapiens
  CDR3 for alpha chain variable domain of TCR clone 253657 (TRAV12-1, TRAJ6)
GVVFPGGSYIPTF

SEQ ID NO: 507314 - protein, 14 aa, Homo sapiens
  CDR3 for beta chain variable domain of TCR clone 253657 (TRBV20-1, TRBJ1-3)
CSASPTGAGNTIYF

SEQ ID NO: 507315 - protein, 15 aa, Homo sapiens
  CDR3 for alpha chain variable domain of TCR clone 253658 (TRAV4, TRAJ32)
CLVGNYGGATNKLIF

SEQ ID NO: 507316 - protein, 12 aa, Homo sapiens
  CDR3 for beta chain variable domain of TCR clone 253658 (TRBV11-2, TRBJ2-2)
CASSLGGGELFF

SEQ ID NO: 507317 - protein, 15 aa, Homo sapiens
  CDR3 for alpha chain variable domain of TCR clone 253659 (TRAV3, TRAJ13)
CAVRVYSGGYQKVTF

SEQ ID NO: 507318 - protein, 15 aa, Homo sapiens
  CDR3 for beta chain variable domain of TCR clone 253659 (TRBV5-7, TRBJ1-2)
CASSLGVAAKYGYTF

SEQ ID NO: 507319 - protein, 16 aa, Homo sapiens
  CDR3 for alpha chain variable domain of TCR clone 253660 (TRAV1-1, TRAJ29)
CAVRSTRNSGNTPLVF

SEQ ID NO: 507320 - protein, 16 aa, Homo sapiens
  CDR3 for beta chain variable domain of TCR clone 253660 (TRBV7-2, TRBJ1-2)
CASSSNQDGRGHGYTF

SEQ ID NO: 507321 - protein, 12 aa, Homo sapiens
  CDR3 for alpha chain variable domain of TCR clone 253661 (TRAV13-2, TRAJ23)
CAERHRGGKLIF

SEQ ID NO: 507322 - protein, 12 aa, Homo sapiens
  CDR3 for beta chain variable domain of TCR clone 253661 (TRBV29-1, TRBJ2-3)
CRVTGGADTQYF

SEQ ID NO: 507323 - protein, 16 aa, Homo sapiens
  CDR3 for alpha chain variable domain of TCR clone 253662 (TRAV30, TRAJ24)
CGTEIVDADSWGKFQL

SEQ ID NO: 507324 - protein, 13 aa, Homo sapiens
  CDR3 for beta chain variable domain of TCR clone 253662 (TRBV20-1, TRBJ1-1)
CSAPPGGHTEAFF

SEQ ID NO: 507325 - protein, 13 aa, Homo sapiens
  CDR3 for alpha chain variable domain of TCR clone 253663 (TRAV13-2, TRAJ13)
CAERPGGYQKVTF

SEQ ID NO: 507326 - protein, 13 aa, Homo sapiens
  CDR3 for beta chain variable domain of TCR clone 253663 (TRBV28, TRBJ1-2)
CAGRDRVNYGYTF

SEQ ID NO: 507327 - protein, 18 aa, Homo sapiens
  CDR3 for alpha chain variable domain of TCR clone 253664 (TRAV21, TRAJ52)
CAVRPSPAGGTNYGKLTF

SEQ ID NO: 507328 - protein, 15 aa, Homo sapiens
  CDR3 for beta chain variable domain of TCR clone 253664 (TRBV2, TRBJ2-4)
CASSGTNLAKNIQYF

SEQ ID NO: 507329 - protein, 11 aa, Homo sapiens
  CDR3 for alpha chain variable domain of TCR clone 253665 (TRAV39, TRAJ49)
CAVEISTQFYF

SEQ ID NO: 507330 - protein, 11 aa, Homo sapiens
  CDR3 for beta chain variable domain of TCR clone 253665 (TRBV7-8, TRBJ2-7)
CASSLSLEQYF

SEQ ID NO: 507331 - protein, 15 aa, Homo sapiens
  CDR3 for alpha chain variable domain of TCR clone 253666 (TRAV8-4, TRAJ6)
CAVSAPSGGSYIPKF

SEQ ID NO: 507332 - protein, 15 aa, Homo sapiens
  CDR3 for beta chain variable domain of TCR clone 253666 (TRBV7-3, TRBJ2-2)
CASKANGANTGELFF

SEQ ID NO: 507333 - protein, 13 aa, Homo sapiens
  CDR3 for alpha chain variable domain of TCR clone 253667 (TRAV2, TRAJ40)
CAVVTSGTYKYIF

SEQ ID NO: 507334 - protein, 14 aa, Homo sapiens
  CDR3 for beta chain variable domain of TCR clone 253667 (TRBV7-2, TRBJ1-1)
CASSFFTGTTEAFF

SEQ ID NO: 507335 - protein, 14 aa, Homo sapiens
  CDR3 for alpha chain variable domain of TCR clone 253668 (TRAV23/DV6, TRAJ6)
CAASRSGGSYIPTF

SEQ ID NO: 507336 - protein, 17 aa, Homo sapiens
  CDR3 for beta chain variable domain of TCR clone 253668 (TRBV20-1, TRBJ2-1)
CSASASGLAGSYNERFF

SEQ ID NO: 507337 - protein, 14 aa, Homo sapiens
  CDR3 for alpha chain variable domain of TCR clone 253669 (TRAV16, TRAJ17)
CALSGRAAGNKLTF

SEQ ID NO: 507338 - protein, 12 aa, Homo sapiens
  CDR3 for beta chain variable domain of TCR clone 253669 (TRBV7-3, TRBJ2-5)
CASSSPGGTQYF

SEQ ID NO: 507339 - protein, 13 aa, Homo sapiens
  CDR3 for alpha chain variable domain of TCR clone 253670 (TRAV23/DV6, )
CAATALIPDIQNH

SEQ ID NO: 507340 - protein, 16 aa, Homo sapiens
  CDR3 for beta chain variable domain of TCR clone 253670 (TRBV10-3, TRBJ2-7)
CAISPRGQEQTYEQYF

SEQ ID NO: 507341 - protein, 12 aa, Homo sapiens
  CDR3 for alpha chain variable domain of TCR clone 253671 (TRAV8-3, TRAJ40)
CAVTSGTYKYIF

SEQ ID NO: 507342 - protein, 14 aa, Homo sapiens
  CDR3 for beta chain variable domain of TCR clone 253671 (TRBV12-4, TRBJ2-3)
RASSGQGSTDTQYF

SEQ ID NO: 507343 - protein, 17 aa, Homo sapiens
  CDR3 for alpha chain variable domain of TCR clone 253672 (TRAV8-6, TRAJ58)
CAVSSWVGGTSGSRLTF

SEQ ID NO: 507344 - protein, 14 aa, Homo sapiens
  CDR3 for beta chain variable domain of TCR clone 253672 (TRBV12-5, TRBJ2-5)
CASGSRTHQETQYF

SEQ ID NO: 507345 - protein, 14 aa, Homo sapiens
  CDR3 for alpha chain variable domain of TCR clone 253673 (TRAV12-2, TRAJ13)
CAVKKTGGYYKVTF

SEQ ID NO: 507346 - protein, 14 aa, Homo sapiens
  CDR3 for beta chain variable domain of TCR clone 253673 (TRBV7-6, TRBJ2-3)
CASSLGTVTDTQYF

SEQ ID NO: 507347 - protein, 12 aa, Homo sapiens
  CDR3 for alpha chain variable domain of TCR clone 253674 (TRAV12-3, TRAJ17)
RAMTLTGNKLTF

SEQ ID NO: 507348 - protein, 14 aa, Homo sapiens
  CDR3 for beta chain variable domain of TCR clone 253674 (TRBV2, TRBJ2-7)
CASSLTSGGYEQYF

SEQ ID NO: 507349 - protein, 14 aa, Homo sapiens
  CDR3 for alpha chain variable domain of TCR clone 253675 (TRAV29/DV5, TRAJ44)
CAAFLVGTASKLTF

SEQ ID NO: 507350 - protein, 15 aa, Homo sapiens
  CDR3 for beta chain variable domain of TCR clone 253675 (TRBV7-3, TRBJ2-2)
CASSETGQGTGELFL

SEQ ID NO: 507351 - protein, 14 aa, Homo sapiens
  CDR3 for alpha chain variable domain of TCR clone 253676 (TRAV12-2, TRAJ17)
CAVLFKAAGKQLTF

SEQ ID NO: 507352 - protein, 17 aa, Homo sapiens
  CDR3 for beta chain variable domain of TCR clone 253676 (TRBV20-1, TRBJ2-2)
CSASGSGQGGLTGELFF

SEQ ID NO: 507353 - protein, 13 aa, Homo sapiens
  CDR3 for alpha chain variable domain of TCR clone 253677 (TRAV39, TRAJ58)
CAGEETSGSRLTF

SEQ ID NO: 507354 - protein, 19 aa, Homo sapiens
  CDR3 for beta chain variable domain of TCR clone 253677 (TRBV7-3, TRBJ2-2)
CASSLRAGGSGPNTGELFF

SEQ ID NO: 507355 - protein, 15 aa, Homo sapiens
  CDR3 for alpha chain variable domain of TCR clone 253678 (TRAV3, TRAJ20)
CAVRDIKLSDYRLSF

SEQ ID NO: 507356 - protein, 15 aa, Homo sapiens
  CDR3 for beta chain variable domain of TCR clone 253678 (TRBV7-9, TRBJ1-6)
CASSSPGRGNSTLHC

SEQ ID NO: 507357 - protein, 13 aa, Homo sapiens
  CDR3 for alpha chain variable domain of TCR clone 253679 (TRAV17, TRAJ26)
CATVDNYGQNFVF

SEQ ID NO: 507358 - protein, 12 aa, Homo sapiens
  CDR3 for beta chain variable domain of TCR clone 253679 (TRBV10-3, TRBJ1-1)
CATMDRPPEAFF

SEQ ID NO: 507359 - protein, 14 aa, Homo sapiens
  CDR3 for alpha chain variable domain of TCR clone 253680 (TRAV8-3, TRAJ4)
CAVGASVGYNKLIF

SEQ ID NO: 507360 - protein, 16 aa, Homo sapiens
  CDR3 for beta chain variable domain of TCR clone 253680 (TRBV4-3, TRBJ2-2)
CASSLLQGSGTGELFF

SEQ ID NO: 507361 - protein, 13 aa, Homo sapiens
  CDR3 for alpha chain variable domain of TCR clone 253681 (TRAV12-3, TRAJ58)
CNEHRNQWLRLTF

SEQ ID NO: 507362 - protein, 12 aa, Homo sapiens
  CDR3 for beta chain variable domain of TCR clone 253681 (TRBV7-8, TRBJ2-7)
CTSSLGDREQYF

SEQ ID NO: 507363 - protein, 13 aa, Homo sapiens
  CDR3 for alpha chain variable domain of TCR clone 253682 (TRAV13-1, TRAJ6)
CAASKGGGYIPTF

SEQ ID NO: 507364 - protein, 13 aa, Homo sapiens
  CDR3 for beta chain variable domain of TCR clone 253682 (TRBV7-9, TRBJ2-5)
CASLPSGRETQYF

SEQ ID NO: 507365 - protein, 15 aa, Homo sapiens
  CDR3 for alpha chain variable domain of TCR clone 253683 (TRAV27, TRAJ38)
RAARRNAGNNRKLIW

SEQ ID NO: 507366 - protein, 16 aa, Homo sapiens
  CDR3 for beta chain variable domain of TCR clone 253683 (TRBV13, TRBJ2-7)
CASSLDRRRGFYEQYF

SEQ ID NO: 507367 - protein, 12 aa, Homo sapiens
  CDR3 for alpha chain variable domain of TCR clone 253684 (TRAV12-3, TRAJ17)
CAMTLTGNKQTF

SEQ ID NO: 507368 - protein, 13 aa, Homo sapiens
  CDR3 for beta chain variable domain of TCR clone 253684 (TRBV12-4, TRBJ1-1)
CASSPGTGFEAFF

SEQ ID NO: 507369 - protein, 15 aa, Homo sapiens
  CDR3 for alpha chain variable domain of TCR clone 253685 (TRAV8-3, TRAJ27)
CAVGPSKTNAGKSTF

SEQ ID NO: 507370 - protein, 13 aa, Homo sapiens
  CDR3 for beta chain variable domain of TCR clone 253685 (TRBV15, TRBJ1-6)
CATSGGLNSPLHS

SEQ ID NO: 507371 - protein, 13 aa, Homo sapiens
  CDR3 for alpha chain variable domain of TCR clone 253686 (TRAV30, TRAJ24)
CGTVTDSWGKLQF

SEQ ID NO: 507372 - protein, 14 aa, Homo sapiens
  CDR3 for beta chain variable domain of TCR clone 253686 (TRBV19, TRBJ2-1)
CASGRAGPGNEQFF

SEQ ID NO: 507373 - protein, 13 aa, Homo sapiens
  CDR3 for alpha chain variable domain of TCR clone 253687 (TRAV36/DV7, TRAJ37)
CAVFSSNTGKLIF

SEQ ID NO: 507374 - protein, 15 aa, Homo sapiens
  CDR3 for beta chain variable domain of TCR clone 253687 (TRBV12-4, TRBJ2-5)
CQQFFVRGRQETRYF

SEQ ID NO: 507375 - protein, 14 aa, Homo sapiens
  CDR3 for alpha chain variable domain of TCR clone 253688 (TRAV13-2, TRAJ10)
CAETFTGGGNKLTF

SEQ ID NO: 507376 - protein, 16 aa, Homo sapiens
  CDR3 for beta chain variable domain of TCR clone 253688 (TRBV18, TRBJ2-7)
CASSPRSQGSSYEQYF

SEQ ID NO: 507377 - protein, 14 aa, Homo sapiens
  CDR3 for alpha chain variable domain of TCR clone 253689 (TRAV12-1, TRAJ17)
CVVNYKAAGNKLTF

SEQ ID NO: 507378 - protein, 17 aa, Homo sapiens
  CDR3 for beta chain variable domain of TCR clone 253689 (TRBV20-1, TRBJ2-1)
CSASSSGLAGSYNEEFF

SEQ ID NO: 507379 - protein, 13 aa, Homo sapiens
  CDR3 for alpha chain variable domain of TCR clone 253690 (TRAV12-1, TRAJ40)
CVVNSSGTYKYIF

SEQ ID NO: 507380 - protein, 14 aa, Homo sapiens
  CDR3 for beta chain variable domain of TCR clone 253690 (TRBV2, TRBJ1-6)
CASEVSSYNSPLYF

SEQ ID NO: 507381 - protein, 14 aa, Homo sapiens
  CDR3 for alpha chain variable domain of TCR clone 253691 (TRAV12-2, TRAJ40)
CAVKIPSGTYKYIF

SEQ ID NO: 507382 - protein, 12 aa, Homo sapiens
  CDR3 for beta chain variable domain of TCR clone 253691 (TRBV7-8, TRBJ2-1)
CASSALAGRVFF

SEQ ID NO: 507383 - protein, 14 aa, Homo sapiens
  CDR3 for alpha chain variable domain of TCR clone 253692 (TRAV12-1, TRAJ38)
CGELKAGNNRKLIW

SEQ ID NO: 507384 - protein, 12 aa, Homo sapiens
  CDR3 for beta chain variable domain of TCR clone 253692 (TRBV24-1, TRBJ1-1)
CATLYPDTEAYF

SEQ ID NO: 507385 - protein, 11 aa, Homo sapiens
  CDR3 for alpha chain variable domain of TCR clone 253693 (TRAV27, TRAJ20)
CAGADDYKPSF

SEQ ID NO: 507386 - protein, 12 aa, Homo sapiens
  CDR3 for beta chain variable domain of TCR clone 253693 (TRBV2, TRBJ1-1)
CATPSRGTESFF

SEQ ID NO: 507387 - protein, 16 aa, Homo sapiens
  CDR3 for alpha chain variable domain of TCR clone 253694 (TRAV30, TRAJ24)
CGTEIVDAASWGKFQF

SEQ ID NO: 507388 - protein, 14 aa, Homo sapiens
  CDR3 for beta chain variable domain of TCR clone 253694 (TRBV12-5, TRBJ2-5)
CASGSRTHQETQYV

SEQ ID NO: 507389 - protein, 14 aa, Homo sapiens
  CDR3 for alpha chain variable domain of TCR clone 253695 (TRAV4, TRAJ9)
CLVGSGTGGFKTIF

SEQ ID NO: 507390 - protein, 15 aa, Homo sapiens
  CDR3 for beta chain variable domain of TCR clone 253695 (TRBV19, TRBJ1-6)
CASSTQGAVGSPLHF

SEQ ID NO: 507391 - protein, 14 aa, Homo sapiens
  CDR3 for alpha chain variable domain of TCR clone 253696 (TRAV21, TRAJ13)
CAVKKTGGYQKVTF

SEQ ID NO: 507392 - protein, 14 aa, Homo sapiens
  CDR3 for beta chain variable domain of TCR clone 253696 (TRBV7-2, TRBJ2-7)
CASRSQGAAYEQYF

SEQ ID NO: 507393 - protein, 12 aa, Homo sapiens
  CDR3 for alpha chain variable domain of TCR clone 253697 (TRAV26-1, TRAJ43)
CIVRGTNNDMRF

SEQ ID NO: 507394 - protein, 13 aa, Homo sapiens
  CDR3 for beta chain variable domain of TCR clone 253697 (TRBV20-1, TRBJ2-3)
CSAIYPGADTQYF

SEQ ID NO: 507395 - protein, 13 aa, Homo sapiens
  CDR3 for alpha chain variable domain of TCR clone 253698 (TRAV8-6, TRAJ49)
CAVITNTGNQFYF

SEQ ID NO: 507396 - protein, 11 aa, Homo sapiens
  CDR3 for beta chain variable domain of TCR clone 253698 (TRBV11-2, TRBJ2-2)
CASSLPGELFF

SEQ ID NO: 507397 - protein, 13 aa, Homo sapiens
  CDR3 for alpha chain variable domain of TCR clone 253699 (TRAV21, TRAJ20)
CAVGLRVDYKLSF

SEQ ID NO: 507398 - protein, 17 aa, Homo sapiens
  CDR3 for beta chain variable domain of TCR clone 253699 (TRBV20-1, TRBJ2-1)
CSARDPLAGVWDNEQFF

SEQ ID NO: 507399 - protein, 13 aa, Homo sapiens
  CDR3 for alpha chain variable domain of TCR clone 253700 (TRAV27, TRAJ29)
CAGAHSGNTPLVF

SEQ ID NO: 507400 - protein, 14 aa, Homo sapiens
  CDR3 for beta chain variable domain of TCR clone 253700 (TRBV7-9, TRBJ2-7)
CASGIGQGAGEQYF

SEQ ID NO: 507401 - protein, 13 aa, Homo sapiens
  CDR3 for alpha chain variable domain of TCR clone 253701 (TRAV27, TRAJ41)
CAGEGNAGYALNF

SEQ ID NO: 507402 - protein, 13 aa, Homo sapiens
  CDR3 for beta chain variable domain of TCR clone 253701 (TRBV7-6, TRBJ2-3)
CASSLRSDNTQYF

SEQ ID NO: 507403 - protein, 17 aa, Homo sapiens
  CDR3 for alpha chain variable domain of TCR clone 253702 (TRAV3, TRAJ6)
CAVRDGPRAGGSYIPTL

SEQ ID NO: 507404 - protein, 15 aa, Homo sapiens
  CDR3 for beta chain variable domain of TCR clone 253702 (TRBV20-1, TRBJ2-7)
CSARDRVSGMDEQYF

SEQ ID NO: 507405 - protein, 13 aa, Homo sapiens
  CDR3 for alpha chain variable domain of TCR clone 253703 (TRAV13-1, TRAJ39)
CATSIVMHATCSP

SEQ ID NO: 507406 - protein, 16 aa, Homo sapiens
  CDR3 for beta chain variable domain of TCR clone 253703 (TRBV20-1, TRBJ1-4)
CSAPGQGLLTNEKLFF

SEQ ID NO: 507407 - protein, 16 aa, Homo sapiens
  CDR3 for alpha chain variable domain of TCR clone 253704 (TRAV3, TRAJ37)
CAVRPHGSGNTGKLIF

SEQ ID NO: 507408 - protein, 16 aa, Homo sapiens
  CDR3 for beta chain variable domain of TCR clone 253704 (TRBV28, TRBJ2-1)
CASSSPEYPRDNEQFF

SEQ ID NO: 507409 - protein, 13 aa, Homo sapiens
  CDR3 for alpha chain variable domain of TCR clone 253705 (TRAV17, TRAJ54)
CATVIQGAQKLAF

SEQ ID NO: 507410 - protein, 15 aa, Homo sapiens
  CDR3 for beta chain variable domain of TCR clone 253705 (TRBV13, TRBJ2-1)
CASSLLSGLNNEQFF

SEQ ID NO: 507411 - protein, 15 aa, Homo sapiens
  CDR3 for alpha chain variable domain of TCR clone 253706 (TRAV3, TRAJ29)
CAVRDSISGNTPLVF

SEQ ID NO: 507412 - protein, 15 aa, Homo sapiens
  CDR3 for beta chain variable domain of TCR clone 253706 (TRBV20-1, TRBJ2-7)
CSARDRVSGMDEQYF

SEQ ID NO: 507413 - protein, 13 aa, Homo sapiens
  CDR3 for alpha chain variable domain of TCR clone 253707 (TRAV36/DV7, TRAJ7)
CAGTRYGNNRLAP

SEQ ID NO: 507414 - protein, 15 aa, Homo sapiens
  CDR3 for beta chain variable domain of TCR clone 253707 (TRBV11-3, TRBJ2-7)
CASSPGPASSYEQYF

SEQ ID NO: 507415 - protein, 18 aa, Homo sapiens
  CDR3 for alpha chain variable domain of TCR clone 253708 (TRAV1-2, TRAJ18)
CAVRDMGDRGSTLGRLYF

SEQ ID NO: 507416 - protein, 13 aa, Homo sapiens
  CDR3 for beta chain variable domain of TCR clone 253708 (TRBV6-4, TRBJ2-1)
CASSASVNNEQFF

SEQ ID NO: 507417 - protein, 13 aa, Homo sapiens
  CDR3 for alpha chain variable domain of TCR clone 253709 (TRAV1-2, TRAJ12)
CAVSMDSSYKLIV

SEQ ID NO: 507418 - protein, 17 aa, Homo sapiens
  CDR3 for beta chain variable domain of TCR clone 253709 (TRBV11-3, TRBJ2-1)
CASSLYPPGVEYNEQFF

SEQ ID NO: 507419 - protein, 16 aa, Homo sapiens
  CDR3 for alpha chain variable domain of TCR clone 253710 (TRAV26-1, TRAJ53)
CIVRVAMGGSNYKLTF

SEQ ID NO: 507420 - protein, 14 aa, Homo sapiens
  CDR3 for beta chain variable domain of TCR clone 253710 (TRBV7-9, TRBJ1-5)
CASSPQGQPSILVM

SEQ ID NO: 507421 - protein, 15 aa, Homo sapiens
  CDR3 for alpha chain variable domain of TCR clone 253711 (TRAV8-3, TRAJ45)
CAPSYSGGGADGITF

SEQ ID NO: 507422 - protein, 17 aa, Homo sapiens
  CDR3 for beta chain variable domain of TCR clone 253711 (TRBV7-8, TRBJ1-2)
CASSLRPLQGHLYGYTF

SEQ ID NO: 507423 - protein, 15 aa, Homo sapiens
  CDR3 for alpha chain variable domain of TCR clone 253712 (TRAV8-3, TRAJ11)
CAVGLLNSGYSTLTF

SEQ ID NO: 507424 - protein, 12 aa, Homo sapiens
  CDR3 for beta chain variable domain of TCR clone 253712 (TRBV19, TRBJ1-5)
CASSIAQQPQHF

SEQ ID NO: 507425 - protein, 15 aa, Homo sapiens
  CDR3 for alpha chain variable domain of TCR clone 253713 (TRAV2, TRAJ9)
CAVEDRGTGGYKTIF

SEQ ID NO: 507426 - protein, 16 aa, Homo sapiens
  CDR3 for beta chain variable domain of TCR clone 253713 (TRBV24-1, TRBJ2-3)
CATSDPGTGATDTQYF

SEQ ID NO: 507427 - protein, 15 aa, Homo sapiens
  CDR3 for alpha chain variable domain of TCR clone 253714 (TRAV3, TRAJ5)
CAVRDLDTGRRAFTF

SEQ ID NO: 507428 - protein, 13 aa, Homo sapiens
  CDR3 for beta chain variable domain of TCR clone 253714 (TRBV12-4, TRBJ2-7)
CASSPTETYEQCF

SEQ ID NO: 507429 - protein, 13 aa, Homo sapiens
  CDR3 for alpha chain variable domain of TCR clone 253715 (TRAV21, TRAJ27)
CAARPGNAGQSTF

SEQ ID NO: 507430 - protein, 13 aa, Homo sapiens
  CDR3 for beta chain variable domain of TCR clone 253715 (TRBV7-6, TRBJ2-1)
CQQLGGGADEQFF

SEQ ID NO: 507431 - protein, 12 aa, Homo sapiens
  CDR3 for alpha chain variable domain of TCR clone 253716 (TRAV38-1, TRAJ34)
YAFMKETDKLIF

SEQ ID NO: 507432 - protein, 17 aa, Homo sapiens
  CDR3 for beta chain variable domain of TCR clone 253716 (TRBV7-8, TRBJ2-6)
CASSAGTGGAGANVLTF

SEQ ID NO: 507433 - protein, 13 aa, Homo sapiens
  CDR3 for alpha chain variable domain of TCR clone 253717 (TRAV17, TRAJ54)
CAAGIQGAQKLGF

SEQ ID NO: 507434 - protein, 14 aa, Homo sapiens
  CDR3 for beta chain variable domain of TCR clone 253717 (TRBV12-4, TRBJ1-1)
CASSPIRRTGEAFF

SEQ ID NO: 507435 - protein, 13 aa, Homo sapiens
  CDR3 for alpha chain variable domain of TCR clone 253718 (TRAV8-4, TRAJ49)
CAVSDSTGNQFYF

SEQ ID NO: 507436 - protein, 17 aa, Homo sapiens
  CDR3 for beta chain variable domain of TCR clone 253718 (TRBV13, TRBJ2-3)
CASSLSRVAGGRNTQYF

SEQ ID NO: 507437 - protein, 12 aa, Homo sapiens
  CDR3 for alpha chain variable domain of TCR clone 253719 (TRAV12-3, TRAJ17)
CAMTLTGNKLTF

SEQ ID NO: 507438 - protein, 16 aa, Homo sapiens
  CDR3 for beta chain variable domain of TCR clone 253719 (TRBV20-1, TRBJ2-2)
CSASASGSPGAGELFF

SEQ ID NO: 507439 - protein, 16 aa, Homo sapiens
  CDR3 for alpha chain variable domain of TCR clone 253720 (TRAV1-2, TRAJ15)
CAVRDEVSQAGTALIF

SEQ ID NO: 507440 - protein, 12 aa, Homo sapiens
  CDR3 for beta chain variable domain of TCR clone 253720 (TRBV11-2, TRBJ2-2)
CASSLGGGELFF

SEQ ID NO: 507441 - protein, 13 aa, Homo sapiens
  CDR3 for alpha chain variable domain of TCR clone 253721 (TRAV17, TRAJ5)
CALRGTGRRALTF

SEQ ID NO: 507442 - protein, 11 aa, Homo sapiens
  CDR3 for beta chain variable domain of TCR clone 253721 (TRBV6-3, TRBJ2-3)
CATGQAYTQYF

SEQ ID NO: 507443 - protein, 15 aa, Homo sapiens
  CDR3 for alpha chain variable domain of TCR clone 253722 (TRAV3, TRAJ7)
GAGRDKDNGNNRLAL

SEQ ID NO: 507444 - protein, 19 aa, Homo sapiens
  CDR3 for beta chain variable domain of TCR clone 253722 (TRBV5-8, TRBJ2-3)
CARSFLGTSGSHRTDTQYF

SEQ ID NO: 507445 - protein, 12 aa, Homo sapiens
  CDR3 for alpha chain variable domain of TCR clone 253723 (TRAV38-2/DV8, TRAJ29)
CAYLRGNTPLVF

SEQ ID NO: 507446 - protein, 15 aa, Homo sapiens
  CDR3 for beta chain variable domain of TCR clone 253723 (TRBV28, TRBJ1-4)
CASSLMKGSGDKLFF

SEQ ID NO: 507447 - protein, 12 aa, Homo sapiens
  CDR3 for alpha chain variable domain of TCR clone 253724 (TRAV26-1, TRAJ13)
CIVSRGYQQVTF

SEQ ID NO: 507448 - protein, 16 aa, Homo sapiens
  CDR3 for beta chain variable domain of TCR clone 253724 (TRBV27, TRBJ2-1)
CASSLSKGFGLDEQFF

SEQ ID NO: 507449 - protein, 16 aa, Homo sapiens
  CDR3 for alpha chain variable domain of TCR clone 253725 (TRAV17, TRAJ28)
CATASVSGAGSYQLTF

SEQ ID NO: 507450 - protein, 11 aa, Homo sapiens
  CDR3 for beta chain variable domain of TCR clone 253725 (TRBV7-9, TRBJ2-5)
CGSSLGETQYF

SEQ ID NO: 507451 - protein, 15 aa, Homo sapiens
  CDR3 for alpha chain variable domain of TCR clone 253726 (TRAV16, TRAJ12)
CSKWPLRDSSYKLIF

SEQ ID NO: 507452 - protein, 13 aa, Homo sapiens
  CDR3 for beta chain variable domain of TCR clone 253726 (TRBV4-2, TRBJ1-1)
CASSQAGNTESFF

SEQ ID NO: 507453 - protein, 14 aa, Homo sapiens
  CDR3 for alpha chain variable domain of TCR clone 253727 (TRAV1-2, TRAJ8)
CAVREDTGFQKRVF

SEQ ID NO: 507454 - protein, 12 aa, Homo sapiens
  CDR3 for beta chain variable domain of TCR clone 253727 (TRBV11-2, TRBJ2-2)
CASSLPTGELFF

SEQ ID NO: 507455 - protein, 15 aa, Homo sapiens
  CDR3 for alpha chain variable domain of TCR clone 253728 (TRAV21, TRAJ24)
SAARSSTNSWGKLQF

SEQ ID NO: 507456 - protein, 13 aa, Homo sapiens
  CDR3 for beta chain variable domain of TCR clone 253728 (TRBV11-2, TRBJ2-5)
CASSSTGEETQYF

SEQ ID NO: 507457 - protein, 16 aa, Homo sapiens
  CDR3 for alpha chain variable domain of TCR clone 253729 (TRAV13-2, TRAJ37)
CAENIRGSSNTGKLIF

SEQ ID NO: 507458 - protein, 16 aa, Homo sapiens
  CDR3 for beta chain variable domain of TCR clone 253729 (TRBV12-5, TRBJ2-5)
CASGPRTSGNQETQYF

SEQ ID NO: 507459 - protein, 13 aa, Homo sapiens
  CDR3 for alpha chain variable domain of TCR clone 253730 (TRAV30, TRAJ20)
CVTEDRSDYKLSF

SEQ ID NO: 507460 - protein, 15 aa, Homo sapiens
  CDR3 for beta chain variable domain of TCR clone 253730 (TRBV2, TRBJ1-2)
CASTQVQDSNYGYTF

SEQ ID NO: 507461 - protein, 15 aa, Homo sapiens
  CDR3 for alpha chain variable domain of TCR clone 253731 (TRAV23/DV6, TRAJ53)
CAASFGGGSNYNLTF

SEQ ID NO: 507462 - protein, 16 aa, Homo sapiens
  CDR3 for beta chain variable domain of TCR clone 253731 (TRBV19, TRBJ2-2)
CASRSPGTGATGELFF

SEQ ID NO: 507463 - protein, 15 aa, Homo sapiens
  CDR3 for alpha chain variable domain of TCR clone 253732 (TRAV26-1, TRAJ44)
CIVRANTGTASNFTF

SEQ ID NO: 507464 - protein, 16 aa, Homo sapiens
  CDR3 for beta chain variable domain of TCR clone 253732 (TRBV7-7, TRBJ2-1)
CASNLASGTSYNEQFF

SEQ ID NO: 507465 - protein, 14 aa, Homo sapiens
  CDR3 for alpha chain variable domain of TCR clone 253733 (TRAV29/DV5, TRAJ36)
CAARRKTGANNLFF

SEQ ID NO: 507466 - protein, 13 aa, Homo sapiens
  CDR3 for beta chain variable domain of TCR clone 253733 (TRBV7-2, TRBJ1-5)
CASSTQGSQPQHF

SEQ ID NO: 507467 - protein, 13 aa, Homo sapiens
  CDR3 for alpha chain variable domain of TCR clone 253734 (TRAV8-1, TRAJ39)
CAGLNNAGNMLTF

SEQ ID NO: 507468 - protein, 17 aa, Homo sapiens
  CDR3 for beta chain variable domain of TCR clone 253734 (TRBV19, TRBJ2-3)
CASSIDPAGGGKDTQYF

SEQ ID NO: 507469 - protein, 18 aa, Homo sapiens
  CDR3 for alpha chain variable domain of TCR clone 253735 (TRAV21, TRAJ53)
CAVKGGENSGGSNYKLNF

SEQ ID NO: 507470 - protein, 13 aa, Homo sapiens
  CDR3 for beta chain variable domain of TCR clone 253735 (TRBV6-1, TRBJ1-1)
CASSRQGNTEAFF

SEQ ID NO: 507471 - protein, 12 aa, Homo sapiens
  CDR3 for alpha chain variable domain of TCR clone 253736 (TRAV3, TRAJ39)
CAVIEWSNMLTF

SEQ ID NO: 507472 - protein, 14 aa, Homo sapiens
  CDR3 for beta chain variable domain of TCR clone 253736 (TRBV7-8, TRBJ2-3)
CASGLPDGQDTQYF

SEQ ID NO: 507473 - protein, 12 aa, Homo sapiens
  CDR3 for alpha chain variable domain of TCR clone 253737 (TRAV3, TRAJ20)
CAVRDPDYKLSF

SEQ ID NO: 507474 - protein, 14 aa, Homo sapiens
  CDR3 for beta chain variable domain of TCR clone 253737 (TRBV12-5, TRBJ2-5)
CASGSRTHQETQYF

SEQ ID NO: 507475 - protein, 11 aa, Homo sapiens
  CDR3 for alpha chain variable domain of TCR clone 253738 (TRAV13-1, TRAJ6)
CATLGSFIPTF

SEQ ID NO: 507476 - protein, 13 aa, Homo sapiens
  CDR3 for beta chain variable domain of TCR clone 253738 (TRBV6-6, TRBJ2-1)
CASSLHQGDEQFF

SEQ ID NO: 507477 - protein, 15 aa, Homo sapiens
  CDR3 for alpha chain variable domain of TCR clone 253739 (TRAV21, TRAJ37)
CAVRPTLSNTGKLIF

SEQ ID NO: 507478 - protein, 12 aa, Homo sapiens
  CDR3 for beta chain variable domain of TCR clone 253739 (TRBV11-2, TRBJ2-1)
CASSPGNNEQFF

SEQ ID NO: 507479 - protein, 16 aa, Homo sapiens
  CDR3 for alpha chain variable domain of TCR clone 253740 (TRAV3, TRAJ10)
CAVRDMRTGGGNKLTF

SEQ ID NO: 507480 - protein, 14 aa, Homo sapiens
  CDR3 for beta chain variable domain of TCR clone 253740 (TRBV25-1, TRBJ1-1)
CASTHLGGNTEAFF

SEQ ID NO: 507481 - protein, 12 aa, Homo sapiens
  CDR3 for alpha chain variable domain of TCR clone 253741 (TRAV22, TRAJ22)
CAPGGSARQLTF

SEQ ID NO: 507482 - protein, 13 aa, Homo sapiens
  CDR3 for beta chain variable domain of TCR clone 253741 (TRBV15, TRBJ1-6)
CATSGGLNPPLHF

SEQ ID NO: 507483 - protein, 17 aa, Homo sapiens
  CDR3 for alpha chain variable domain of TCR clone 253742 (TRAV38-1, TRAJ45)
CAFMKHYMGGGAHGLPF

SEQ ID NO: 507484 - protein, 19 aa, Homo sapiens
  CDR3 for beta chain variable domain of TCR clone 253742 (TRBV6-1, TRBJ2-5)
CASSEQGLAGGLYQETQYF

SEQ ID NO: 507485 - protein, 12 aa, Homo sapiens
  CDR3 for alpha chain variable domain of TCR clone 253743 (TRAV12-3, TRAJ17)
CAMTLTGNKLTF

SEQ ID NO: 507486 - protein, 16 aa, Homo sapiens
  CDR3 for beta chain variable domain of TCR clone 253743 (TRBV7-3, TRBJ2-2)
CASSLKRGTLSGELLF

SEQ ID NO: 507487 - protein, 15 aa, Homo sapiens
  CDR3 for alpha chain variable domain of TCR clone 253744 (TRAV12-3, TRAJ6)
CAMSATTGGSYIPTF

SEQ ID NO: 507488 - protein, 16 aa, Homo sapiens
  CDR3 for beta chain variable domain of TCR clone 253744 (TRBV20-1, TRBJ1-2)
CSASMGQGVADYVYTF

SEQ ID NO: 507489 - protein, 14 aa, Homo sapiens
  CDR3 for alpha chain variable domain of TCR clone 253745 (TRAV12-3, TRAJ29)
CAAREGNTPLSLER

SEQ ID NO: 507490 - protein, 17 aa, Homo sapiens
  CDR3 for beta chain variable domain of TCR clone 253745 (TRBV18, TRBJ2-1)
CASSPLAAGAGDNEQFF

SEQ ID NO: 507491 - protein, 14 aa, Homo sapiens
  CDR3 for alpha chain variable domain of TCR clone 253746 (TRAV12-1, TRAJ17)
CVVNYKDAGNKLTF

SEQ ID NO: 507492 - protein, 15 aa, Homo sapiens
  CDR3 for beta chain variable domain of TCR clone 253746 (TRBV18, TRBJ2-7)
CASSPTFMDSYEQYF

SEQ ID NO: 507493 - protein, 13 aa, Homo sapiens
  CDR3 for alpha chain variable domain of TCR clone 253747 (TRAV1-2, TRAJ9)
CAVLDTGGFKTIF

SEQ ID NO: 507494 - protein, 14 aa, Homo sapiens
  CDR3 for beta chain variable domain of TCR clone 253747 (TRBV20-1, TRBJ2-3)
CSARGGTSTDTQYV

SEQ ID NO: 507495 - protein, 14 aa, Homo sapiens
  CDR3 for alpha chain variable domain of TCR clone 253748 (TRAV12-3, TRAJ9)
CAMSPNTGGFKTIF

SEQ ID NO: 507496 - protein, 14 aa, Homo sapiens
  CDR3 for beta chain variable domain of TCR clone 253748 (TRBV25-1, TRBJ1-2)
CASSEATGPYGYTF

SEQ ID NO: 507497 - protein, 14 aa, Homo sapiens
  CDR3 for alpha chain variable domain of TCR clone 253749 (TRAV26-1, TRAJ38)
CIADNAGNKRKLIL

SEQ ID NO: 507498 - protein, 13 aa, Homo sapiens
  CDR3 for beta chain variable domain of TCR clone 253749 (TRBV20-1, TRBJ1-1)
CSARGGGNTEAFF

SEQ ID NO: 507499 - protein, 16 aa, Homo sapiens
  CDR3 for alpha chain variable domain of TCR clone 253750 (TRAV3, TRAJ37)
CAVRGQGSGNTGKLIF

SEQ ID NO: 507500 - protein, 15 aa, Homo sapiens
  CDR3 for beta chain variable domain of TCR clone 253750 (TRBV5-1, TRBJ2-7)
CASSLNGGPAREQYF

SEQ ID NO: 507501 - protein, 12 aa, Homo sapiens
  CDR3 for alpha chain variable domain of TCR clone 253751 (TRAV16, TRAJ56)
CAPTGANIKLTF

SEQ ID NO: 507502 - protein, 17 aa, Homo sapiens
  CDR3 for beta chain variable domain of TCR clone 253751 (TRBV27, TRBJ2-6)
CASSLTGFASGANVLTF

SEQ ID NO: 507503 - protein, 18 aa, Homo sapiens
  CDR3 for alpha chain variable domain of TCR clone 253752 (TRAV21, TRAJ52)
CAVRPSPAGGTSYGKLTF

SEQ ID NO: 507504 - protein, 14 aa, Homo sapiens
  CDR3 for beta chain variable domain of TCR clone 253752 (TRBV10-3, TRBJ2-1)
CAISSDLAYNEQFF

SEQ ID NO: 507505 - protein, 14 aa, Homo sapiens
  CDR3 for alpha chain variable domain of TCR clone 253753 (TRAV36/DV7, TRAJ32)
CAVGHVGATNKLIF

SEQ ID NO: 507506 - protein, 14 aa, Homo sapiens
  CDR3 for beta chain variable domain of TCR clone 253753 (TRBV7-2, TRBJ2-7)
CASRSQGAAYEQYF

SEQ ID NO: 507507 - protein, 14 aa, Homo sapiens
  CDR3 for alpha chain variable domain of TCR clone 253754 (TRAV9-2, TRAJ39)
CALYIYNAGNMLTF

SEQ ID NO: 507508 - protein, 12 aa, Homo sapiens
  CDR3 for beta chain variable domain of TCR clone 253754 (TRBV11-3, TRBJ1-1)
CASSHRQGEAFF

SEQ ID NO: 507509 - protein, 18 aa, Homo sapiens
  CDR3 for alpha chain variable domain of TCR clone 253755 (TRAV26-2, TRAJ45)
CILRVDKYSGGGADGLTF

SEQ ID NO: 507510 - protein, 18 aa, Homo sapiens
  CDR3 for beta chain variable domain of TCR clone 253755 (TRBV18, TRBJ2-3)
CASSYTSGAAGGTDTQYF

SEQ ID NO: 507511 - protein, 14 aa, Homo sapiens
  CDR3 for alpha chain variable domain of TCR clone 253756 (TRAV17, TRAJ57)
CATAPQGGSEKLVF

SEQ ID NO: 507512 - protein, 16 aa, Homo sapiens
  CDR3 for beta chain variable domain of TCR clone 253756 (TRBV27, TRBJ2-2)
CASSFRGVVRTGELFF

SEQ ID NO: 507513 - protein, 14 aa, Homo sapiens
  CDR3 for alpha chain variable domain of TCR clone 253757 (TRAV17, TRAJ53)
CALNSGGSNYKLTF

SEQ ID NO: 507514 - protein, 15 aa, Homo sapiens
  CDR3 for beta chain variable domain of TCR clone 253757 (TRBV11-2, TRBJ2-5)
CASSPSTGGYETQYF

SEQ ID NO: 507515 - protein, 13 aa, Homo sapiens
  CDR3 for alpha chain variable domain of TCR clone 253758 (TRAV8-3, TRAJ6)
CAVGSGGSYIPTF

SEQ ID NO: 507516 - protein, 14 aa, Homo sapiens
  CDR3 for beta chain variable domain of TCR clone 253758 (TRBV11-2, TRBJ1-1)
CASSTQRGRTEAFL

SEQ ID NO: 507517 - protein, 13 aa, Homo sapiens
  CDR3 for alpha chain variable domain of TCR clone 253759 (TRAV26-1, TRAJ33)
CIVRVEGNYQLIW

SEQ ID NO: 507518 - protein, 15 aa, Homo sapiens
  CDR3 for beta chain variable domain of TCR clone 253759 (TRBV15, TRBJ2-7)
CHQRDRGRRRGEQYF

SEQ ID NO: 507519 - protein, 15 aa, Homo sapiens
  CDR3 for alpha chain variable domain of TCR clone 253760 (TRAV4, TRAJ26)
CLVGGLDNYGQNFVF

SEQ ID NO: 507520 - protein, 12 aa, Homo sapiens
  CDR3 for beta chain variable domain of TCR clone 253760 (TRBV18, TRBJ2-1)
CASSSDEDEQFF

SEQ ID NO: 507521 - protein, 16 aa, Homo sapiens
  CDR3 for alpha chain variable domain of TCR clone 253761 (TRAV30, TRAJ24)
CGTEIVDADSWGKFQF

SEQ ID NO: 507522 - protein, 15 aa, Homo sapiens
  CDR3 for beta chain variable domain of TCR clone 253761 (TRBV9, TRBJ2-3)
CASSVAGGRSDTQYF

SEQ ID NO: 507523 - protein, 14 aa, Homo sapiens
  CDR3 for alpha chain variable domain of TCR clone 253762 (TRAV12-3, TRAJ10)
SHLPLTGGGNKLTF

SEQ ID NO: 507524 - protein, 13 aa, Homo sapiens
  CDR3 for beta chain variable domain of TCR clone 253762 (TRBV6-1, TRBJ1-3)
CRRARGGWKHIYF

SEQ ID NO: 507525 - protein, 15 aa, Homo sapiens
  CDR3 for alpha chain variable domain of TCR clone 253763 (TRAV12-2, TRAJ53)
CAVNGGGGSNYKLTF

SEQ ID NO: 507526 - protein, 13 aa, Homo sapiens
  CDR3 for beta chain variable domain of TCR clone 253763 (TRBV7-8, TRBJ2-7)
CASSLTGGREQYF

SEQ ID NO: 507527 - protein, 14 aa, Homo sapiens
  CDR3 for alpha chain variable domain of TCR clone 253764 (TRAV12-1, TRAJ26)
CVVKGSNYGQNFVF

SEQ ID NO: 507528 - protein, 17 aa, Homo sapiens
  CDR3 for beta chain variable domain of TCR clone 253764 (TRBV11-2, TRBJ2-6)
CASSQRDIFSGANLLTF

SEQ ID NO: 507529 - protein, 14 aa, Homo sapiens
  CDR3 for alpha chain variable domain of TCR clone 253765 (TRAV35, TRAJ33)
CAGSSQDSNYQLIW

SEQ ID NO: 507530 - protein, 15 aa, Homo sapiens
  CDR3 for beta chain variable domain of TCR clone 253765 (TRBV20-1, TRBJ2-7)
CSAESGTSGAYQQYF

SEQ ID NO: 507531 - protein, 11 aa, Homo sapiens
  CDR3 for alpha chain variable domain of TCR clone 253766 (TRAV12-1, TRAJ35)
SGEGFGNVLDC

SEQ ID NO: 507532 - protein, 12 aa, Homo sapiens
  CDR3 for beta chain variable domain of TCR clone 253766 (TRBV19, TRBJ1-5)
CASSIAQQPQHF

SEQ ID NO: 507533 - protein, 12 aa, Homo sapiens
  CDR3 for alpha chain variable domain of TCR clone 253767 (TRAV3, TRAJ31)
CAERDGNARLMF

SEQ ID NO: 507534 - protein, 18 aa, Homo sapiens
  CDR3 for beta chain variable domain of TCR clone 253767 (TRBV7-2, TRBJ2-3)
CASSLKREGSGITDTQHF

SEQ ID NO: 507535 - protein, 12 aa, Homo sapiens
  CDR3 for alpha chain variable domain of TCR clone 253768 (TRAV21, TRAJ33)
CAKMDSNYQLIW

SEQ ID NO: 507536 - protein, 15 aa, Homo sapiens
  CDR3 for beta chain variable domain of TCR clone 253768 (TRBV10-3, TRBJ2-3)
CAISLTSGGTDTQYF

SEQ ID NO: 507537 - protein, 13 aa, Homo sapiens
  CDR3 for alpha chain variable domain of TCR clone 253769 (TRAV12-3, TRAJ56)
CAMSFGANSKLTF

SEQ ID NO: 507538 - protein, 13 aa, Homo sapiens
  CDR3 for beta chain variable domain of TCR clone 253769 (TRBV7-7, TRBJ1-1)
CASSLGANTEAFF

SEQ ID NO: 507539 - protein, 16 aa, Homo sapiens
  CDR3 for alpha chain variable domain of TCR clone 253770 (TRAV30, TRAJ24)
CGTDIVDADSWGKFQF

SEQ ID NO: 507540 - protein, 15 aa, Homo sapiens
  CDR3 for beta chain variable domain of TCR clone 253770 (TRBV18, TRBJ2-1)
CASLPDRGRDNEQFF

SEQ ID NO: 507541 - protein, 15 aa, Homo sapiens
  CDR3 for alpha chain variable domain of TCR clone 253771 (TRAV8-3, TRAJ11)
CAVGLSNSGYSTLTF

SEQ ID NO: 507542 - protein, 23 aa, Homo sapiens
  CDR3 for beta chain variable domain of TCR clone 253771 (TRBV7-9, TRBJ1-2)
EAQLEKSRLLSGRFSSGEDGYTF

SEQ ID NO: 507543 - protein, 15 aa, Homo sapiens
  CDR3 for alpha chain variable domain of TCR clone 253772 (TRAV16, TRAJ16)
CALQGGESDGQKLLF

SEQ ID NO: 507544 - protein, 15 aa, Homo sapiens
  CDR3 for beta chain variable domain of TCR clone 253772 (TRBV20-1, TRBJ2-7)
CSARDRVSGMDEQYF

SEQ ID NO: 507545 - protein, 12 aa, Homo sapiens
  CDR3 for alpha chain variable domain of TCR clone 253773 (TRAV12-3, TRAJ17)
CAMKLTGNKLTF

SEQ ID NO: 507546 - protein, 15 aa, Homo sapiens
  CDR3 for beta chain variable domain of TCR clone 253773 (TRBV20-1, TRBJ2-7)
CSARDRVCGMDEQYF

SEQ ID NO: 507547 - protein, 15 aa, Homo sapiens
  CDR3 for alpha chain variable domain of TCR clone 253774 (TRAV17, TRAJ57)
CATGPSQGGSEKLAF

SEQ ID NO: 507548 - protein, 11 aa, Homo sapiens
  CDR3 for beta chain variable domain of TCR clone 253774 (TRBV29-1, TRBJ2-5)
CSEDRTGTQYF

SEQ ID NO: 507549 - protein, 12 aa, Homo sapiens
  CDR3 for alpha chain variable domain of TCR clone 253775 (TRAV12-2, TRAJ10)
WGATGGGNKLTF

SEQ ID NO: 507550 - protein, 14 aa, Homo sapiens
  CDR3 for beta chain variable domain of TCR clone 253775 (TRBV19, TRBJ2-3)
CASSAPRGTDTQYF

SEQ ID NO: 507551 - protein, 18 aa, Homo sapiens
  CDR3 for alpha chain variable domain of TCR clone 253776 (TRAV8-4, TRAJ52)
CAVTRATAGGTSYGNLTF

SEQ ID NO: 507552 - protein, 13 aa, Homo sapiens
  CDR3 for beta chain variable domain of TCR clone 253776 (TRBV7-3, TRBJ2-1)
CASSPVAYNEQFF

SEQ ID NO: 507553 - protein, 14 aa, Homo sapiens
  CDR3 for alpha chain variable domain of TCR clone 253777 (TRAV1-2, TRAJ16)
CAVNRFSDGQKLLF

SEQ ID NO: 507554 - protein, 12 aa, Homo sapiens
  CDR3 for beta chain variable domain of TCR clone 253777 (TRBV7-9, TRBJ2-7)
CASSLEGCEQYF

SEQ ID NO: 507555 - protein, 14 aa, Homo sapiens
  CDR3 for alpha chain variable domain of TCR clone 253778 (TRAV29/DV5, TRAJ44)
CAAFLVGTASKLTW

SEQ ID NO: 507556 - protein, 15 aa, Homo sapiens
  CDR3 for beta chain variable domain of TCR clone 253778 (TRBV7-3, TRBJ2-2)
CASSETGQGTGELFF

SEQ ID NO: 507557 - protein, 15 aa, Homo sapiens
  CDR3 for alpha chain variable domain of TCR clone 253779 (TRAV1-2, TRAJ3)
CAVRGGYSSASKIIF

SEQ ID NO: 507558 - protein, 20 aa, Homo sapiens
  CDR3 for beta chain variable domain of TCR clone 253779 (TRBV28, TRBJ2-1)
CASTPIGRSPGLAGGNEQFF

SEQ ID NO: 507559 - protein, 13 aa, Homo sapiens
  CDR3 for alpha chain variable domain of TCR clone 253780 (TRAV13-1, TRAJ5)
CAARVTGRRGLTF

SEQ ID NO: 507560 - protein, 15 aa, Homo sapiens
  CDR3 for beta chain variable domain of TCR clone 253780 (TRBV7-9, TRBJ2-7)
CASSPGGGLTYEQYF

SEQ ID NO: 507561 - protein, 12 aa, Homo sapiens
  CDR3 for alpha chain variable domain of TCR clone 253781 (TRAV12-3, TRAJ34)
CAMGYNTDKLIF

SEQ ID NO: 507562 - protein, 17 aa, Homo sapiens
  CDR3 for beta chain variable domain of TCR clone 253781 (TRBV15, TRBJ1-2)
CATSGREIDVVNYGETF

SEQ ID NO: 507563 - protein, 15 aa, Homo sapiens
  CDR3 for alpha chain variable domain of TCR clone 253782 (TRAV12-2, TRAJ43)
CAFDMRFGAGTRLTV

SEQ ID NO: 507564 - protein, 14 aa, Homo sapiens
  CDR3 for beta chain variable domain of TCR clone 253782 (TRBV7-9, TRBJ1-1)
CASTPLQSYTEAFF

SEQ ID NO: 507565 - protein, 17 aa, Homo sapiens
  CDR3 for alpha chain variable domain of TCR clone 253783 (TRAV12-2, TRAJ22)
CAVNRIPFSGSARQLTF

SEQ ID NO: 507566 - protein, 13 aa, Homo sapiens
  CDR3 for beta chain variable domain of TCR clone 253783 (TRBV11-3, TRBJ1-1)
CASSSNRDTAAFF

SEQ ID NO: 507567 - protein, 14 aa, Homo sapiens
  CDR3 for alpha chain variable domain of TCR clone 253784 (TRAV17, TRAJ35)
CATDRPGFRNVLHC

SEQ ID NO: 507568 - protein, 19 aa, Homo sapiens
  CDR3 for beta chain variable domain of TCR clone 253784 (TRBV11-3, TRBJ2-2)
CASSTRPGAKTTNTGELFF

SEQ ID NO: 507569 - protein, 14 aa, Homo sapiens
  CDR3 for alpha chain variable domain of TCR clone 253785 (TRAV3, TRAJ33)
CAVRDMGSNYQLIW

SEQ ID NO: 507570 - protein, 14 aa, Homo sapiens
  CDR3 for beta chain variable domain of TCR clone 253785 (TRBV7-6, TRBJ2-3)
CASSLGTVTDTQYF

SEQ ID NO: 507571 - protein, 13 aa, Homo sapiens
  CDR3 for alpha chain variable domain of TCR clone 253786 (TRAV17, TRAJ26)
CATADNYGQNFVF

SEQ ID NO: 507572 - protein, 16 aa, Homo sapiens
  CDR3 for beta chain variable domain of TCR clone 253786 (TRBV2, TRBJ2-1)
CASSVGGSLSYNEQFF

SEQ ID NO: 507573 - protein, 13 aa, Homo sapiens
  CDR3 for alpha chain variable domain of TCR clone 253787 (TRAV35, TRAJ43)
CAGYPYNNNDMRV

SEQ ID NO: 507574 - protein, 15 aa, Homo sapiens
  CDR3 for beta chain variable domain of TCR clone 253787 (TRBV25-1, TRBJ1-4)
CASSKRIATNEKLFF

SEQ ID NO: 507575 - protein, 11 aa, Homo sapiens
  CDR3 for alpha chain variable domain of TCR clone 253788 (TRAV12-2, TRAJ54)
CAVEGAQKLVF

SEQ ID NO: 507576 - protein, 17 aa, Homo sapiens
  CDR3 for beta chain variable domain of TCR clone 253788 (TRBV18, TRBJ1-3)
CASSPNPTGPSGNTIYF

SEQ ID NO: 507577 - protein, 15 aa, Homo sapiens
  CDR3 for alpha chain variable domain of TCR clone 253789 (TRAV8-4, TRAJ37)
CAVSRGSRNTGKLIF

SEQ ID NO: 507578 - protein, 16 aa, Homo sapiens
  CDR3 for beta chain variable domain of TCR clone 253789 (TRBV7-3, TRBJ2-3)
CASSLSGYRPEDTQYF

SEQ ID NO: 507579 - protein, 15 aa, Homo sapiens
  CDR3 for alpha chain variable domain of TCR clone 253790 (TRAV12-3, TRAJ6)
CAMSATTGGSYIPTF

SEQ ID NO: 507580 - protein, 19 aa, Homo sapiens
  CDR3 for beta chain variable domain of TCR clone 253790 (TRBV20-1, TRBJ2-1)
CSARRPSGGPPTMSSSSGH

SEQ ID NO: 507581 - protein, 14 aa, Homo sapiens
  CDR3 for alpha chain variable domain of TCR clone 253791 (TRAV1-2, TRAJ16)
CAVNRFSDCQKLLF

SEQ ID NO: 507582 - protein, 15 aa, Homo sapiens
  CDR3 for beta chain variable domain of TCR clone 253791 (TRBV5-1, TRBJ2-2)
CASSSQGGNTGELFF

SEQ ID NO: 507583 - protein, 14 aa, Homo sapiens
  CDR3 for alpha chain variable domain of TCR clone 253792 (TRAV1-2, TRAJ8)
CAVREDTGFQKLVF

SEQ ID NO: 507584 - protein, 14 aa, Homo sapiens
  CDR3 for beta chain variable domain of TCR clone 253792 (TRBV7-9, TRBJ2-5)
CASSLAFGQEAQYF

SEQ ID NO: 507585 - protein, 13 aa, Homo sapiens
  CDR3 for alpha chain variable domain of TCR clone 253793 (TRAV30, TRAJ49)
CGTESQPVTSSIL

SEQ ID NO: 507586 - protein, 13 aa, Homo sapiens
  CDR3 for beta chain variable domain of TCR clone 253793 (TRBV19, TRBJ1-4)
CASPTQGNEKLFF

SEQ ID NO: 507587 - protein, 14 aa, Homo sapiens
  CDR3 for alpha chain variable domain of TCR clone 253794 (TRAV16, TRAJ39)
CALSKNNAGNMLTF

SEQ ID NO: 507588 - protein, 19 aa, Homo sapiens
  CDR3 for beta chain variable domain of TCR clone 253794 (TRBV6-6, TRBJ2-1)
AAPSQTTVYFCASSYEQFF

SEQ ID NO: 507589 - protein, 11 aa, Homo sapiens
  CDR3 for alpha chain variable domain of TCR clone 253795 (TRAV12-2, TRAJ11)
CAVIGYSTLTF

SEQ ID NO: 507590 - protein, 13 aa, Homo sapiens
  CDR3 for beta chain variable domain of TCR clone 253795 (TRBV7-3, TRBJ1-1)
CASSQDWGAEAFF

SEQ ID NO: 507591 - protein, 18 aa, Homo sapiens
  CDR3 for alpha chain variable domain of TCR clone 253796 (TRAV14/DV4, TRAJ3)
CAMREGRGGYSSASKIIF

SEQ ID NO: 507592 - protein, 15 aa, Homo sapiens
  CDR3 for beta chain variable domain of TCR clone 253796 (TRBV6-6, TRBJ2-5)
CASSPGGGLEETQYF

SEQ ID NO: 507593 - protein, 13 aa, Homo sapiens
  CDR3 for alpha chain variable domain of TCR clone 253797 (TRAV13-2, TRAJ13)
CAERPGGYQKVTF

SEQ ID NO: 507594 - protein, 15 aa, Homo sapiens
  CDR3 for beta chain variable domain of TCR clone 253797 (TRBV11-3, TRBJ2-7)
CASSPVPASSYEQYF

SEQ ID NO: 507595 - protein, 14 aa, Homo sapiens
  CDR3 for alpha chain variable domain of TCR clone 253798 (TRAV1-2, TRAJ6)
CAVRSSGGSNIPTF

SEQ ID NO: 507596 - protein, 16 aa, Homo sapiens
  CDR3 for beta chain variable domain of TCR clone 253798 (TRBV7-3, TRBJ2-2)
CASSLKRGTLSGELFF

SEQ ID NO: 507597 - protein, 19 aa, Homo sapiens
  CDR3 for alpha chain variable domain of TCR clone 253799 (TRAV13-1, TRAJ52)
CAASPYQNAGGTSYGKLTF

SEQ ID NO: 507598 - protein, 17 aa, Homo sapiens
  CDR3 for beta chain variable domain of TCR clone 253799 (TRBV19, TRBJ2-2)
CASSRNPGGFGTGELFF

SEQ ID NO: 507599 - protein, 14 aa, Homo sapiens
  CDR3 for alpha chain variable domain of TCR clone 253800 (TRAV12-3, TRAJ9)
CAMSRNTGGFKTIF

SEQ ID NO: 507600 - protein, 12 aa, Homo sapiens
  CDR3 for beta chain variable domain of TCR clone 253800 (TRBV19, TRBJ1-5)
CASSIAQQPQHF

SEQ ID NO: 507601 - protein, 13 aa, Homo sapiens
  CDR3 for alpha chain variable domain of TCR clone 253801 (TRAV12-3, TRAJ29)
CAMTLSGNTPLVF

SEQ ID NO: 507602 - protein, 22 aa, Homo sapiens
  CDR3 for beta chain variable domain of TCR clone 253801 (TRBV11-2, TRBJ1-4)
CASSLDITRRGIPRKDNEKLFF

SEQ ID NO: 507603 - protein, 14 aa, Homo sapiens
  CDR3 for alpha chain variable domain of TCR clone 253802 (TRAV12-1, TRAJ13)
CVVIDSGGYQKVTF

SEQ ID NO: 507604 - protein, 15 aa, Homo sapiens
  CDR3 for beta chain variable domain of TCR clone 253802 (TRBV2, TRBJ1-5)
CASSVNRPSNQPQHF

SEQ ID NO: 507605 - protein, 15 aa, Homo sapiens
  CDR3 for alpha chain variable domain of TCR clone 253803 (TRAV3, TRAJ22)
CAVRDRGGSARQLTF

SEQ ID NO: 507606 - protein, 16 aa, Homo sapiens
  CDR3 for beta chain variable domain of TCR clone 253803 (TRBV5-4, TRBJ2-3)
CASQQPGVGGSDTQYF

SEQ ID NO: 507607 - protein, 15 aa, Homo sapiens
  CDR3 for alpha chain variable domain of TCR clone 253804 (TRAV8-2, TRAJ16)
CVVSDGFSDGQQLLF

SEQ ID NO: 507608 - protein, 14 aa, Homo sapiens
  CDR3 for beta chain variable domain of TCR clone 253804 (TRBV7-3, TRBJ1-1)
CASSLGTGYTEAFF

SEQ ID NO: 507609 - protein, 17 aa, Homo sapiens
  CDR3 for alpha chain variable domain of TCR clone 253805 (TRAV26-1, TRAJ22)
TIPSSEYRSGSARQLTF

SEQ ID NO: 507610 - protein, 16 aa, Homo sapiens
  CDR3 for beta chain variable domain of TCR clone 253805 (TRBV24-1, TRBJ2-3)
CATSDPGTGATDTQYF

SEQ ID NO: 507611 - protein, 13 aa, Homo sapiens
  CDR3 for alpha chain variable domain of TCR clone 253806 (TRAV8-3, TRAJ37)
CAVGSGNTVKLIF

SEQ ID NO: 507612 - protein, 11 aa, Homo sapiens
  CDR3 for beta chain variable domain of TCR clone 253806 (TRBV29-1, TRBJ1-1)
CSLQQNTEAFF

SEQ ID NO: 507613 - protein, 14 aa, Homo sapiens
  CDR3 for alpha chain variable domain of TCR clone 253807 (TRAV8-3, TRAJ36)
CAVGPITGANNLSF

SEQ ID NO: 507614 - protein, 15 aa, Homo sapiens
  CDR3 for beta chain variable domain of TCR clone 253807 (TRBV4-1, TRBJ2-1)
CASSQDPGNYNEQFF

SEQ ID NO: 507615 - protein, 18 aa, Homo sapiens
  CDR3 for alpha chain variable domain of TCR clone 253808 (TRAV8-4, TRAJ52)
CAVTRANAGGTRYGKLTF

SEQ ID NO: 507616 - protein, 20 aa, Homo sapiens
  CDR3 for beta chain variable domain of TCR clone 253808 (TRBV19, TRBJ2-1)
CASSISRTVTSTRLNNEQFF

SEQ ID NO: 507617 - protein, 11 aa, Homo sapiens
  CDR3 for alpha chain variable domain of TCR clone 253809 (TRAV2, TRAJ13)
CASGGYQKVTF

SEQ ID NO: 507618 - protein, 14 aa, Homo sapiens
  CDR3 for beta chain variable domain of TCR clone 253809 (TRBV5-7, TRBJ1-2)
CASSLVRVDYGYTF

SEQ ID NO: 507619 - protein, 16 aa, Homo sapiens
  CDR3 for alpha chain variable domain of TCR clone 253810 (TRAV29/DV5, TRAJ36)
CAASAGVETGANNLVF

SEQ ID NO: 507620 - protein, 16 aa, Homo sapiens
  CDR3 for beta chain variable domain of TCR clone 253810 (TRBV5-1, TRBJ2-3)
CASSLGLAVYTDTQYF

SEQ ID NO: 507621 - protein, 12 aa, Homo sapiens
  CDR3 for alpha chain variable domain of TCR clone 253811 (TRAV12-3, TRAJ17)
CAMTLTGNKPTF

SEQ ID NO: 507622 - protein, 15 aa, Homo sapiens
  CDR3 for beta chain variable domain of TCR clone 253811 (TRBV20-1, TRBJ2-7)
CSARDRVSGMNEQYF

SEQ ID NO: 507623 - protein, 14 aa, Homo sapiens
  CDR3 for alpha chain variable domain of TCR clone 253812 (TRAV1-2, TRAJ16)
CAVNRFSDGQKLLF

SEQ ID NO: 507624 - protein, 16 aa, Homo sapiens
  CDR3 for beta chain variable domain of TCR clone 253812 (TRBV29-1, TRBJ2-2)
CSVEKTSEGNTGELFF

SEQ ID NO: 507625 - protein, 17 aa, Homo sapiens
  CDR3 for alpha chain variable domain of TCR clone 253813 (TRAV3, TRAJ13)
CAVRDMRRTGGYQKGTF

SEQ ID NO: 507626 - protein, 13 aa, Homo sapiens
  CDR3 for beta chain variable domain of TCR clone 253813 (TRBV12-4, TRBJ1-2)
CASSLRQGKGYTF

SEQ ID NO: 507627 - protein, 13 aa, Homo sapiens
  CDR3 for alpha chain variable domain of TCR clone 253814 (TRAV23/DV6, TRAJ22)
CAPYSGSARQLTF

SEQ ID NO: 507628 - protein, 22 aa, Homo sapiens
  CDR3 for beta chain variable domain of TCR clone 253814 (TRBV11-2, TRBJ1-6)
CASSLDPCRVTPPLWERDRAHC

SEQ ID NO: 507629 - protein, 15 aa, Homo sapiens
  CDR3 for alpha chain variable domain of TCR clone 253815 (TRAV35, TRAJ40)
CAEQLGTSVTYKYIF

SEQ ID NO: 507630 - protein, 14 aa, Homo sapiens
  CDR3 for beta chain variable domain of TCR clone 253815 (TRBV7-3, TRBJ2-1)
CASSLAGGTNEQFF

SEQ ID NO: 507631 - protein, 12 aa, Homo sapiens
  CDR3 for alpha chain variable domain of TCR clone 253816 (TRAV12-3, TRAJ17)
CAMTLTVNKLTF

SEQ ID NO: 507632 - protein, 15 aa, Homo sapiens
  CDR3 for beta chain variable domain of TCR clone 253816 (TRBV20-1, TRBJ2-7)
CSARDRVSGMDDQYF

SEQ ID NO: 507633 - protein, 14 aa, Homo sapiens
  CDR3 for alpha chain variable domain of TCR clone 253817 (TRAV1-2, TRAJ8)
CAVREDTGFQKLVF

SEQ ID NO: 507634 - protein, 12 aa, Homo sapiens
  CDR3 for beta chain variable domain of TCR clone 253817 (TRBV29-1, TRBJ2-3)
CSVTGGADTQYC

SEQ ID NO: 507635 - protein, 13 aa, Homo sapiens
  CDR3 for alpha chain variable domain of TCR clone 253818 (TRAV3, TRAJ21)
CAVREPDFNKFYF

SEQ ID NO: 507636 - protein, 15 aa, Homo sapiens
  CDR3 for beta chain variable domain of TCR clone 253818 (TRBV19, TRBJ1-2)
CASSVGQVLNYGYTF

SEQ ID NO: 507637 - protein, 15 aa, Homo sapiens
  CDR3 for alpha chain variable domain of TCR clone 253819 (TRAV13-1, TRAJ5)
CAASPRGHGQESTYF

SEQ ID NO: 507638 - protein, 15 aa, Homo sapiens
  CDR3 for beta chain variable domain of TCR clone 253819 (TRBV6-1, TRBJ2-3)
CASSERGGSTDTQYF

SEQ ID NO: 507639 - protein, 14 aa, Homo sapiens
  CDR3 for alpha chain variable domain of TCR clone 253820 (TRAV29/DV5, TRAJ36)
CAARRKTGANTLFF

SEQ ID NO: 507640 - protein, 15 aa, Homo sapiens
  CDR3 for beta chain variable domain of TCR clone 253820 (TRBV7-9, TRBJ2-7)
CASSLDLDRGYEQYF

SEQ ID NO: 507641 - protein, 12 aa, Homo sapiens
  CDR3 for alpha chain variable domain of TCR clone 253821 (TRAV21, TRAJ33)
CAKMDSNYQLIW

SEQ ID NO: 507642 - protein, 16 aa, Homo sapiens
  CDR3 for beta chain variable domain of TCR clone 253821 (TRBV7-2, TRBJ2-5)
CQQPRQGRKSRETQYF

SEQ ID NO: 507643 - protein, 14 aa, Homo sapiens
  CDR3 for alpha chain variable domain of TCR clone 253822 (TRAV23/DV6, TRAJ6)
CAASRSGGSYIPKF

SEQ ID NO: 507644 - protein, 17 aa, Homo sapiens
  CDR3 for beta chain variable domain of TCR clone 253822 (TRBV20-1, TRBJ2-1)
CSASASGLAGSYNEQFF

SEQ ID NO: 507645 - protein, 15 aa, Homo sapiens
  CDR3 for alpha chain variable domain of TCR clone 253823 (TRAV39, TRAJ42)
CAVVNSGGSQGNLIF

SEQ ID NO: 507646 - protein, 15 aa, Homo sapiens
  CDR3 for beta chain variable domain of TCR clone 253823 (TRBV10-3, TRBJ1-1)
CAISDLGRANTEAFF

SEQ ID NO: 507647 - protein, 15 aa, Homo sapiens
  CDR3 for alpha chain variable domain of TCR clone 253824 (TRAV8-3, TRAJ45)
CASSYSVGGADGLTF

SEQ ID NO: 507648 - protein, 17 aa, Homo sapiens
  CDR3 for beta chain variable domain of TCR clone 253824 (TRBV7-8, TRBJ1-2)
CASSLRPLQGHLYGYTF

SEQ ID NO: 507649 - protein, 14 aa, Homo sapiens
  CDR3 for alpha chain variable domain of TCR clone 253825 (TRAV12-2, TRAJ3)
CAVSLYSSASKIIF

SEQ ID NO: 507650 - protein, 14 aa, Homo sapiens
  CDR3 for beta chain variable domain of TCR clone 253825 (TRBV27, TRBJ2-1)
CAGSVAETYNEQFF

SEQ ID NO: 507651 - protein, 14 aa, Homo sapiens
  CDR3 for alpha chain variable domain of TCR clone 253826 (TRAV8-3, TRAJ22)
CSVVVSGSARQLTF

SEQ ID NO: 507652 - protein, 13 aa, Homo sapiens
  CDR3 for beta chain variable domain of TCR clone 253826 (TRBV4-2, TRBJ2-5)
CASSQGGWQTQYF

SEQ ID NO: 507653 - protein, 15 aa, Homo sapiens
  CDR3 for alpha chain variable domain of TCR clone 253827 (TRAV12-2, TRAJ8)
CAGREENTGFQKLVF

SEQ ID NO: 507654 - protein, 15 aa, Homo sapiens
  CDR3 for beta chain variable domain of TCR clone 253827 (TRBV28, TRBJ2-4)
CAAGSGTLLMGIQYF

SEQ ID NO: 507655 - protein, 13 aa, Homo sapiens
  CDR3 for alpha chain variable domain of TCR clone 253828 (TRAV20, TRAJ24)
CAVRTDSWGKLQF

SEQ ID NO: 507656 - protein, 16 aa, Homo sapiens
  CDR3 for beta chain variable domain of TCR clone 253828 (TRBV12-5, TRBJ2-5)
CASGPRTSGNQETQYF

SEQ ID NO: 507657 - protein, 11 aa, Homo sapiens
  CDR3 for alpha chain variable domain of TCR clone 253829 (TRAV17, TRAJ36)
CAPTGANNLFF

SEQ ID NO: 507658 - protein, 12 aa, Homo sapiens
  CDR3 for beta chain variable domain of TCR clone 253829 (TRBV29-1, TRBJ2-3)
CSVMLGADTQYF

SEQ ID NO: 507659 - protein, 11 aa, Homo sapiens
  CDR3 for alpha chain variable domain of TCR clone 253830 (TRAV21, TRAJ34)
CAVTNTDKLIF

SEQ ID NO: 507660 - protein, 12 aa, Homo sapiens
  CDR3 for beta chain variable domain of TCR clone 253830 (TRBV29-1, TRBJ2-3)
CSVTGGADTQYF

SEQ ID NO: 507661 - protein, 15 aa, Homo sapiens
  CDR3 for alpha chain variable domain of TCR clone 253831 (TRAV26-1, TRAJ44)
CIARVPFGTARTLTF

SEQ ID NO: 507662 - protein, 17 aa, Homo sapiens
  CDR3 for beta chain variable domain of TCR clone 253831 (TRBV24-1, TRBJ2-4)
CATSDAEARGVRNMQYF

SEQ ID NO: 507663 - protein, 14 aa, Homo sapiens
  CDR3 for alpha chain variable domain of TCR clone 253832 (TRAV17, TRAJ39)
CATDPVRAGNMLTF

SEQ ID NO: 507664 - protein, 20 aa, Homo sapiens
  CDR3 for beta chain variable domain of TCR clone 253832 (TRBV28, TRBJ2-1)
CASTPIGRSPGLAGGNEQFF

SEQ ID NO: 507665 - protein, 15 aa, Homo sapiens
  CDR3 for alpha chain variable domain of TCR clone 253833 (TRAV17, TRAJ16)
CATALRFSDGQKLSF

SEQ ID NO: 507666 - protein, 15 aa, Homo sapiens
  CDR3 for beta chain variable domain of TCR clone 253833 (TRBV20-1, TRBJ1-1)
CSASRGVTGNTEAFF

SEQ ID NO: 507667 - protein, 14 aa, Homo sapiens
  CDR3 for alpha chain variable domain of TCR clone 253834 (TRAV1-2, TRAJ16)
CAVNRFSDGQELLF

SEQ ID NO: 507668 - protein, 15 aa, Homo sapiens
  CDR3 for beta chain variable domain of TCR clone 253834 (TRBV19, TRBJ1-5)
CASSIVWADNQPQHF

SEQ ID NO: 507669 - protein, 15 aa, Homo sapiens
  CDR3 for alpha chain variable domain of TCR clone 253835 (TRAV3, TRAJ20)
CAVRDIKLSDYKLSF

SEQ ID NO: 507670 - protein, 16 aa, Homo sapiens
  CDR3 for beta chain variable domain of TCR clone 253835 (TRBV5-1, TRBJ2-3)
CASSLGLETSTDTQYF

SEQ ID NO: 507671 - protein, 14 aa, Homo sapiens
  CDR3 for alpha chain variable domain of TCR clone 253836 (TRAV12-3, TRAJ10)
SHLPLTGGGNKLTF

SEQ ID NO: 507672 - protein, 17 aa, Homo sapiens
  CDR3 for beta chain variable domain of TCR clone 253836 (TRBV28, TRBJ2-3)
RASSPTPAGGREDTQYF

SEQ ID NO: 507673 - protein, 12 aa, Homo sapiens
  CDR3 for alpha chain variable domain of TCR clone 253837 (TRAV38-2/DV8, TRAJ48)
CALLSGNEKLTF

SEQ ID NO: 507674 - protein, 14 aa, Homo sapiens
  CDR3 for beta chain variable domain of TCR clone 253837 (TRBV15, TRBJ2-1)
CATNHGGRHNEQFF

SEQ ID NO: 507675 - protein, 17 aa, Homo sapiens
  CDR3 for alpha chain variable domain of TCR clone 253838 (TRAV38-2/DV8, TRAJ23)
CSLSRKLIFGQGTELSV

SEQ ID NO: 507676 - protein, 17 aa, Homo sapiens
  CDR3 for beta chain variable domain of TCR clone 253838 (TRBV5-4, TRBJ2-1)
CASSSAGGRGPYNEQFF

SEQ ID NO: 507677 - protein, 14 aa, Homo sapiens
  CDR3 for alpha chain variable domain of TCR clone 253839 (TRAV4, TRAJ26)
CLVGPPNYGQNFVF

SEQ ID NO: 507678 - protein, 17 aa, Homo sapiens
  CDR3 for beta chain variable domain of TCR clone 253839 (TRBV20-1, TRBJ2-1)
CSASSSGLAGSYNEQFF

SEQ ID NO: 507679 - protein, 15 aa, Homo sapiens
  CDR3 for alpha chain variable domain of TCR clone 253840 (TRAV21, TRAJ53)
CATLNSGGSNYKLTF

SEQ ID NO: 507680 - protein, 15 aa, Homo sapiens
  CDR3 for beta chain variable domain of TCR clone 253840 (TRBV27, TRBJ2-1)
CASSNEGGSSNEQFF

SEQ ID NO: 507681 - protein, 14 aa, Homo sapiens
  CDR3 for alpha chain variable domain of TCR clone 253841 (TRAV1-1, TRAJ27)
CAFSETPMQANQPL

SEQ ID NO: 507682 - protein, 17 aa, Homo sapiens
  CDR3 for beta chain variable domain of TCR clone 253841 (TRBV2, TRBJ1-6)
CASSLRSGGLMTSPLHF

SEQ ID NO: 507683 - protein, 15 aa, Homo sapiens
  CDR3 for alpha chain variable domain of TCR clone 253842 (TRAV13-1, TRAJ52)
SYYNAGGTSSGKLTF

SEQ ID NO: 507684 - protein, 11 aa, Homo sapiens
  CDR3 for beta chain variable domain of TCR clone 253842 (TRBV12-4, TRBJ2-2)
CASSSAGELFF

SEQ ID NO: 507685 - protein, 15 aa, Homo sapiens
  CDR3 for alpha chain variable domain of TCR clone 253843 (TRAV38-1, TRAJ37)
CAFIFGSGNTGKLIF

SEQ ID NO: 507686 - protein, 13 aa, Homo sapiens
  CDR3 for beta chain variable domain of TCR clone 253843 (TRBV7-8, TRBJ2-2)
CASSSSRTGELFF

SEQ ID NO: 507687 - protein, 17 aa, Homo sapiens
  CDR3 for alpha chain variable domain of TCR clone 253844 (TRAV3, TRAJ42)
CAVRDRDYGGSQGNLIF

SEQ ID NO: 507688 - protein, 15 aa, Homo sapiens
  CDR3 for beta chain variable domain of TCR clone 253844 (TRBV6-1, TRBJ2-2)
CASSAGQGYTGELFF

SEQ ID NO: 507689 - protein, 17 aa, Homo sapiens
  CDR3 for alpha chain variable domain of TCR clone 253845 (TRAV3, TRAJ28)
CAVREAYSGAGSYRLTF

SEQ ID NO: 507690 - protein, 15 aa, Homo sapiens
  CDR3 for beta chain variable domain of TCR clone 253845 (TRBV28, TRBJ2-1)
CSSSIIAGGRSEQFF

SEQ ID NO: 507691 - protein, 13 aa, Homo sapiens
  CDR3 for alpha chain variable domain of TCR clone 253846 (TRAV12-3, TRAJ9)
CAMRNTGGFTTIF

SEQ ID NO: 507692 - protein, 14 aa, Homo sapiens
  CDR3 for beta chain variable domain of TCR clone 253846 (TRBV11-2, TRBJ2-7)
CASSSTGEGYEQYF

SEQ ID NO: 507693 - protein, 12 aa, Homo sapiens
  CDR3 for alpha chain variable domain of TCR clone 253847 (TRAV21, TRAJ11)
CAATSGYSTLTF

SEQ ID NO: 507694 - protein, 12 aa, Homo sapiens
  CDR3 for beta chain variable domain of TCR clone 253847 (TRBV7-9, TRBJ1-4)
CASSTDREKLFF

SEQ ID NO: 507695 - protein, 15 aa, Homo sapiens
  CDR3 for alpha chain variable domain of TCR clone 253848 (TRAV2, TRAJ22)
CAVPSRGGSARQLTF

SEQ ID NO: 507696 - protein, 16 aa, Homo sapiens
  CDR3 for beta chain variable domain of TCR clone 253848 (TRBV12-4, TRBJ1-5)
CASSRTRTLSNQPQHF

SEQ ID NO: 507697 - protein, 10 aa, Homo sapiens
  CDR3 for alpha chain variable domain of TCR clone 253849 (TRAV30, TRAJ48)
CGIGNEKLTF

SEQ ID NO: 507698 - protein, 14 aa, Homo sapiens
  CDR3 for beta chain variable domain of TCR clone 253849 (TRBV7-6, TRBJ2-3)
CASSVAGGTHTQYF

SEQ ID NO: 507699 - protein, 16 aa, Homo sapiens
  CDR3 for alpha chain variable domain of TCR clone 253850 (TRAV3, TRAJ10)
CAVRDMRAGGGNKLNF

SEQ ID NO: 507700 - protein, 15 aa, Homo sapiens
  CDR3 for beta chain variable domain of TCR clone 253850 (TRBV15, TRBJ1-5)
CATSTTGVVNQPQHF

SEQ ID NO: 507701 - protein, 11 aa, Homo sapiens
  CDR3 for alpha chain variable domain of TCR clone 253851 (TRAV1-2, TRAJ20)
CAVANDYKLSF

SEQ ID NO: 507702 - protein, 16 aa, Homo sapiens
  CDR3 for beta chain variable domain of TCR clone 253851 (TRBV28, TRBJ2-7)
CASSSGTSGREYEQYF

SEQ ID NO: 507703 - protein, 11 aa, Homo sapiens
  CDR3 for alpha chain variable domain of TCR clone 253852 (TRAV3, TRAJ21)
CAVGNFNKFYF

SEQ ID NO: 507704 - protein, 15 aa, Homo sapiens
  CDR3 for beta chain variable domain of TCR clone 253852 (TRBV28, TRBJ1-5)
CASSRTGGYVQPQHF

SEQ ID NO: 507705 - protein, 15 aa, Homo sapiens
  CDR3 for alpha chain variable domain of TCR clone 253853 (TRAV26-1, TRAJ15)
CIVRMANQAGTALLF

SEQ ID NO: 507706 - protein, 15 aa, Homo sapiens
  CDR3 for beta chain variable domain of TCR clone 253853 (TRBV20-1, TRBJ1-1)
CSARKAETSNTEAFF

SEQ ID NO: 507707 - protein, 15 aa, Homo sapiens
  CDR3 for alpha chain variable domain of TCR clone 253854 (TRAV8-1, TRAJ6)
CAVNANPGGSYIPTF

SEQ ID NO: 507708 - protein, 14 aa, Homo sapiens
  CDR3 for beta chain variable domain of TCR clone 253854 (TRBV19, TRBJ1-2)
CASEGTGVTYGYAF

SEQ ID NO: 507709 - protein, 13 aa, Homo sapiens
  CDR3 for alpha chain variable domain of TCR clone 253855 (TRAV12-3, TRAJ54)
CAMFAQGAQKLVF

SEQ ID NO: 507710 - protein, 16 aa, Homo sapiens
  CDR3 for beta chain variable domain of TCR clone 253855 (TRBV7-6, TRBJ2-3)
CASRPRRGGLGDTQYF

SEQ ID NO: 507711 - protein, 10 aa, Homo sapiens
  CDR3 for alpha chain variable domain of TCR clone 253856 (TRAV36/DV7, TRAJ48)
CAVGNEKLTF

SEQ ID NO: 507712 - protein, 12 aa, Homo sapiens
  CDR3 for beta chain variable domain of TCR clone 253856 (TRBV20-1, TRBJ2-5)
CSAGGAGETQYV

SEQ ID NO: 507713 - protein, 15 aa, Homo sapiens
  CDR3 for alpha chain variable domain of TCR clone 253857 (TRAV2, TRAJ20)
CAVDLRGSNDYKPSL

SEQ ID NO: 507714 - protein, 13 aa, Homo sapiens
  CDR3 for beta chain variable domain of TCR clone 253857 (TRBV2, TRBJ2-7)
CANGLAGDYEQYF

SEQ ID NO: 507715 - protein, 13 aa, Homo sapiens
  CDR3 for alpha chain variable domain of TCR clone 253858 (TRAV3, TRAJ43)
CAVKARNNNDMRF

SEQ ID NO: 507716 - protein, 14 aa, Homo sapiens
  CDR3 for beta chain variable domain of TCR clone 253858 (TRBV7-8, TRBJ2-3)
CASSLEAGTDTQYF

SEQ ID NO: 507717 - protein, 14 aa, Homo sapiens
  CDR3 for alpha chain variable domain of TCR clone 253859 (TRAV1-1, TRAJ23)
CAVSIYNQGGKLIF

SEQ ID NO: 507718 - protein, 14 aa, Homo sapiens
  CDR3 for beta chain variable domain of TCR clone 253859 (TRBV27, TRBJ2-2)
CASRPGANTGELFF

SEQ ID NO: 507719 - protein, 14 aa, Homo sapiens
  CDR3 for alpha chain variable domain of TCR clone 253860 (TRAV1-2, TRAJ16)
CAVNRFSDGKQLLF

SEQ ID NO: 507720 - protein, 13 aa, Homo sapiens
  CDR3 for beta chain variable domain of TCR clone 253860 (TRBV19, TRBJ1-2)
CASSVPGQDGYTF

SEQ ID NO: 507721 - protein, 12 aa, Homo sapiens
  CDR3 for alpha chain variable domain of TCR clone 253861 (TRAV13-1, TRAJ33)
CAARDSNYQLIW

SEQ ID NO: 507722 - protein, 16 aa, Homo sapiens
  CDR3 for beta chain variable domain of TCR clone 253861 (TRBV7-3, TRBJ2-3)
CASSVSGYRPEDTQYF

SEQ ID NO: 507723 - protein, 13 aa, Homo sapiens
  CDR3 for alpha chain variable domain of TCR clone 253862 (TRAV27, TRAJ6)
CAGGTRGSYIPTF

SEQ ID NO: 507724 - protein, 14 aa, Homo sapiens
  CDR3 for beta chain variable domain of TCR clone 253862 (TRBV20-1, TRBJ2-4)
CSASGGVGENIQYF

SEQ ID NO: 507725 - protein, 13 aa, Homo sapiens
  CDR3 for alpha chain variable domain of TCR clone 253863 (TRAV12-2, TRAJ15)
CAVFNQAGTALIF

SEQ ID NO: 507726 - protein, 15 aa, Homo sapiens
  CDR3 for beta chain variable domain of TCR clone 253863 (TRBV7-8, TRBJ1-5)
SASSRGGGADQPQHF

SEQ ID NO: 507727 - protein, 11 aa, Homo sapiens
  CDR3 for alpha chain variable domain of TCR clone 253864 (TRAV12-2, TRAJ54)
CAVEGAQKLEF

SEQ ID NO: 507728 - protein, 17 aa, Homo sapiens
  CDR3 for beta chain variable domain of TCR clone 253864 (TRBV18, TRBJ1-3)
CASSPYPTGPSGNTIYF

SEQ ID NO: 507729 - protein, 16 aa, Homo sapiens
  CDR3 for alpha chain variable domain of TCR clone 253865 (TRAV3, TRAJ10)
CAVRDMRAGGGNNLTF

SEQ ID NO: 507730 - protein, 15 aa, Homo sapiens
  CDR3 for beta chain variable domain of TCR clone 253865 (TRBV9, TRBJ1-6)
CASSVAGTGDSPLHF

SEQ ID NO: 507731 - protein, 15 aa, Homo sapiens
  CDR3 for alpha chain variable domain of TCR clone 253866 (TRAV17, TRAJ57)
CATGPSQGGSEKLVF

SEQ ID NO: 507732 - protein, 14 aa, Homo sapiens
  CDR3 for beta chain variable domain of TCR clone 253866 (TRBV12-5, TRBJ2-5)
CASGSRTHQETQHF

SEQ ID NO: 507733 - protein, 16 aa, Homo sapiens
  CDR3 for alpha chain variable domain of TCR clone 253867 (TRAV30, TRAJ24)
CGTEIVDADSWGKFQF

SEQ ID NO: 507734 - protein, 14 aa, Homo sapiens
  CDR3 for beta chain variable domain of TCR clone 253867 (TRBV15, TRBJ2-5)
CATSGDRGQETQYF

SEQ ID NO: 507735 - protein, 14 aa, Homo sapiens
  CDR3 for alpha chain variable domain of TCR clone 253868 (TRAV12-2, TRAJ40)
CAVKIPSGTYKYIF

SEQ ID NO: 507736 - protein, 15 aa, Homo sapiens
  CDR3 for beta chain variable domain of TCR clone 253868 (TRBV20-1, TRBJ1-4)
CSARRKWGVNEKLFF

SEQ ID NO: 507737 - protein, 14 aa, Homo sapiens
  CDR3 for alpha chain variable domain of TCR clone 253869 (TRAV14/DV4, TRAJ32)
SNVLPLTPTNKLIF

SEQ ID NO: 507738 - protein, 13 aa, Homo sapiens
  CDR3 for beta chain variable domain of TCR clone 253869 (TRBV10-3, TRBJ2-7)
CASKLAVNYEQYF

SEQ ID NO: 507739 - protein, 23 aa, Homo sapiens
  CDR3 for alpha chain variable domain of TCR clone 253870 (TRAV1-1, TRAJ29)
LLQEPQMKDSASYFLGGNTPLVF

SEQ ID NO: 507740 - protein, 13 aa, Homo sapiens
  CDR3 for beta chain variable domain of TCR clone 253870 (TRBV25-1, TRBJ2-7)
CASSEDGDYEQYF

SEQ ID NO: 507741 - protein, 11 aa, Homo sapiens
  CDR3 for alpha chain variable domain of TCR clone 253871 (TRAV12-1, TRAJ30)
CVVNGQDKIIF

SEQ ID NO: 507742 - protein, 14 aa, Homo sapiens
  CDR3 for beta chain variable domain of TCR clone 253871 (TRBV9, TRBJ2-1)
CASSVVAAYNEQFF

SEQ ID NO: 507743 - protein, 14 aa, Homo sapiens
  CDR3 for alpha chain variable domain of TCR clone 253872 (TRAV20, TRAJ22)
CAVALGGFARQLTF

SEQ ID NO: 507744 - protein, 15 aa, Homo sapiens
  CDR3 for beta chain variable domain of TCR clone 253872 (TRBV7-2, TRBJ1-1)
CASSFAGDRDTEAFF

SEQ ID NO: 507745 - protein, 15 aa, Homo sapiens
  CDR3 for alpha chain variable domain of TCR clone 253873 (TRAV12-2, TRAJ50)
CAVNGLETPYDKVIF

SEQ ID NO: 507746 - protein, 16 aa, Homo sapiens
  CDR3 for beta chain variable domain of TCR clone 253873 (TRBV5-4, TRBJ2-3)
CASQQPGAGGADTQYF

SEQ ID NO: 507747 - protein, 14 aa, Homo sapiens
  CDR3 for alpha chain variable domain of TCR clone 253874 (TRAV13-1, TRAJ44)
CAAKATGTASKLTF

SEQ ID NO: 507748 - protein, 14 aa, Homo sapiens
  CDR3 for beta chain variable domain of TCR clone 253874 (TRBV19, TRBJ2-7)
CASSDRDRSYEQYF

SEQ ID NO: 507749 - protein, 15 aa, Homo sapiens
  CDR3 for alpha chain variable domain of TCR clone 253875 (TRAV26-1, TRAJ47)
CFVRVGWGYGNKLVF

SEQ ID NO: 507750 - protein, 13 aa, Homo sapiens
  CDR3 for beta chain variable domain of TCR clone 253875 (TRBV20-1, TRBJ2-7)
CSARGDTQDEQYF

SEQ ID NO: 507751 - protein, 12 aa, Homo sapiens
  CDR3 for alpha chain variable domain of TCR clone 253876 (TRAV8-3, TRAJ40)
CAVTSGTYKYIF

SEQ ID NO: 507752 - protein, 14 aa, Homo sapiens
  CDR3 for beta chain variable domain of TCR clone 253876 (TRBV19, TRBJ1-1)
CASSITGWETEAFF

SEQ ID NO: 507753 - protein, 18 aa, Homo sapiens
  CDR3 for alpha chain variable domain of TCR clone 253877 (TRAV13-1, TRAJ52)
CAASKRSAGGTSYGKLTF

SEQ ID NO: 507754 - protein, 19 aa, Homo sapiens
  CDR3 for beta chain variable domain of TCR clone 253877 (TRBV25-1, TRBJ2-2)
CAILVYRVDRGRKSGELFF

SEQ ID NO: 507755 - protein, 21 aa, Homo sapiens
  CDR3 for alpha chain variable domain of TCR clone 253878 (TRAV1-1, TRAJ6)
CLLLLRCERLERTGGSYIPAF

SEQ ID NO: 507756 - protein, 13 aa, Homo sapiens
  CDR3 for beta chain variable domain of TCR clone 253878 (TRBV10-2, TRBJ2-7)
CASGASGGYEQYF

SEQ ID NO: 507757 - protein, 14 aa, Homo sapiens
  CDR3 for alpha chain variable domain of TCR clone 253879 (TRAV12-1, TRAJ12)
CVVTRMDSSYKLIF

SEQ ID NO: 507758 - protein, 14 aa, Homo sapiens
  CDR3 for beta chain variable domain of TCR clone 253879 (TRBV7-2, TRBJ2-2)
CASSLGQHTGELFF

SEQ ID NO: 507759 - protein, 14 aa, Homo sapiens
  CDR3 for alpha chain variable domain of TCR clone 253880 (TRAV8-4, TRAJ13)
CAVTLSRGYQQVTF

SEQ ID NO: 507760 - protein, 14 aa, Homo sapiens
  CDR3 for beta chain variable domain of TCR clone 253880 (TRBV7-2, TRBJ1-2)
CASSQTGSTYGYTF

SEQ ID NO: 507761 - protein, 15 aa, Homo sapiens
  CDR3 for alpha chain variable domain of TCR clone 253881 (TRAV8-3, TRAJ45)
CASSYSGGGADGVTF

SEQ ID NO: 507762 - protein, 13 aa, Homo sapiens
  CDR3 for beta chain variable domain of TCR clone 253881 (TRBV10-3, TRBJ2-7)
CASELAVNYEQYF

SEQ ID NO: 507763 - protein, 19 aa, Homo sapiens
  CDR3 for alpha chain variable domain of TCR clone 253882 (TRAV38-1, TRAJ53)
CAFMKHGLESGGSNYKLTF

SEQ ID NO: 507764 - protein, 13 aa, Homo sapiens
  CDR3 for beta chain variable domain of TCR clone 253882 (TRBV19, TRBJ2-7)
CASSPRPSYEQYF

SEQ ID NO: 507765 - protein, 16 aa, Homo sapiens
  CDR3 for alpha chain variable domain of TCR clone 253883 (TRAV8-2, TRAJ7)
CVVSEGPYYGNNRLAF

SEQ ID NO: 507766 - protein, 13 aa, Homo sapiens
  CDR3 for beta chain variable domain of TCR clone 253883 (TRBV12-5, TRBJ2-3)
CASQNRGTDTQYF

SEQ ID NO: 507767 - protein, 12 aa, Homo sapiens
  CDR3 for alpha chain variable domain of TCR clone 253884 (TRAV21, TRAJ33)
CAKMDSDYQLIW

SEQ ID NO: 507768 - protein, 15 aa, Homo sapiens
  CDR3 for beta chain variable domain of TCR clone 253884 (TRBV12-4, TRBJ2-5)
CASSPPTGLQETQYF

SEQ ID NO: 507769 - protein, 14 aa, Homo sapiens
  CDR3 for alpha chain variable domain of TCR clone 253885 (TRAV1-2, TRAJ16)
CAVNRFSDGQKLLF

SEQ ID NO: 507770 - protein, 14 aa, Homo sapiens
  CDR3 for beta chain variable domain of TCR clone 253885 (TRBV5-1, TRBJ2-3)
CASSASGGQDTQYF

SEQ ID NO: 507771 - protein, 13 aa, Homo sapiens
  CDR3 for alpha chain variable domain of TCR clone 253886 (TRAV16, TRAJ10)
CALLTGGGSKLTF

SEQ ID NO: 507772 - protein, 12 aa, Homo sapiens
  CDR3 for beta chain variable domain of TCR clone 253886 (TRBV28, TRBJ2-7)
CASTGNHYEQYF

SEQ ID NO: 507773 - protein, 16 aa, Homo sapiens
  CDR3 for alpha chain variable domain of TCR clone 253887 (TRAV30, TRAJ24)
CGTEIVDADRWGRFQF

SEQ ID NO: 507774 - protein, 14 aa, Homo sapiens
  CDR3 for beta chain variable domain of TCR clone 253887 (TRBV12-5, TRBJ2-5)
CAGGSRTHQETQYF

SEQ ID NO: 507775 - protein, 16 aa, Homo sapiens
  CDR3 for alpha chain variable domain of TCR clone 253888 (TRAV3, TRAJ42)
CAVRRNYGGSQGNLIF

SEQ ID NO: 507776 - protein, 16 aa, Homo sapiens
  CDR3 for beta chain variable domain of TCR clone 253888 (TRBV6-1, TRBJ2-5)
CASSETLDRGAETQYF

SEQ ID NO: 507777 - protein, 17 aa, Homo sapiens
  CDR3 for alpha chain variable domain of TCR clone 253889 (TRAV3, TRAJ6)
CAVRDGPRAGGSYIPTC

SEQ ID NO: 507778 - protein, 16 aa, Homo sapiens
  CDR3 for beta chain variable domain of TCR clone 253889 (TRBV4-1, TRBJ2-7)
CASSLTAGQATYEQYF

SEQ ID NO: 507779 - protein, 14 aa, Homo sapiens
  CDR3 for alpha chain variable domain of TCR clone 253890 (TRAV1-2, TRAJ16)
CTVNRFSDGQKLLF

SEQ ID NO: 507780 - protein, 14 aa, Homo sapiens
  CDR3 for beta chain variable domain of TCR clone 253890 (TRBV7-8, TRBJ2-3)
CASSLEAGTDTQYF

SEQ ID NO: 507781 - protein, 13 aa, Homo sapiens
  CDR3 for alpha chain variable domain of TCR clone 253891 (TRAV3, TRAJ15)
CAVRDQAGTALIF

SEQ ID NO: 507782 - protein, 15 aa, Homo sapiens
  CDR3 for beta chain variable domain of TCR clone 253891 (TRBV11-1, TRBJ2-7)
CDSSLNYGASYEQYF

SEQ ID NO: 507783 - protein, 14 aa, Homo sapiens
  CDR3 for alpha chain variable domain of TCR clone 253892 (TRAV20, TRAJ13)
CAVLNSGGYQKVTF

SEQ ID NO: 507784 - protein, 15 aa, Homo sapiens
  CDR3 for beta chain variable domain of TCR clone 253892 (TRBV5-1, TRBJ1-4)
FAPAAWKDGNEKLFF

SEQ ID NO: 507785 - protein, 22 aa, Homo sapiens
  CDR3 for alpha chain variable domain of TCR clone 253893 (TRAV27, )
CAARRNVGNNHIQNPDPAVYQL

SEQ ID NO: 507786 - protein, 13 aa, Homo sapiens
  CDR3 for beta chain variable domain of TCR clone 253893 (TRBV7-9, TRBJ1-2)
CASSLKQNYGYTF

SEQ ID NO: 507787 - protein, 12 aa, Homo sapiens
  CDR3 for alpha chain variable domain of TCR clone 253894 (TRAV13-1, TRAJ21)
CAAKEGFNQFYF

SEQ ID NO: 507788 - protein, 14 aa, Homo sapiens
  CDR3 for beta chain variable domain of TCR clone 253894 (TRBV5-4, TRBJ1-1)
CASSLDSRRDEAFF

SEQ ID NO: 507789 - protein, 17 aa, Homo sapiens
  CDR3 for alpha chain variable domain of TCR clone 253895 (TRAV13-1, TRAJ52)
CAAGRNAGGTSYGKLTF

SEQ ID NO: 507790 - protein, 16 aa, Homo sapiens
  CDR3 for beta chain variable domain of TCR clone 253895 (TRBV7-2, TRBJ2-7)
CASSLEAGGPWYEQYF

SEQ ID NO: 507791 - protein, 13 aa, Homo sapiens
  CDR3 for alpha chain variable domain of TCR clone 253896 (TRAV2, TRAJ15)
CAVASQAGTALIF

SEQ ID NO: 507792 - protein, 14 aa, Homo sapiens
  CDR3 for beta chain variable domain of TCR clone 253896 (TRBV4-3, TRBJ1-5)
CASSQGGQGWPQHF

SEQ ID NO: 507793 - protein, 13 aa, Homo sapiens
  CDR3 for alpha chain variable domain of TCR clone 253897 (TRAV6, TRAJ20)
CALAVSNDYKLSS

SEQ ID NO: 507794 - protein, 16 aa, Homo sapiens
  CDR3 for beta chain variable domain of TCR clone 253897 (TRBV7-9, TRBJ2-1)
CASSDVAGGSYNEQFF

SEQ ID NO: 507795 - protein, 14 aa, Homo sapiens
  CDR3 for alpha chain variable domain of TCR clone 253898 (TRAV1-2, TRAJ37)
CAVRSKSNRGKLIF

SEQ ID NO: 507796 - protein, 14 aa, Homo sapiens
  CDR3 for beta chain variable domain of TCR clone 253898 (TRBV6-3, TRBJ1-2)
CASSEGGGSYGYTF

SEQ ID NO: 507797 - protein, 11 aa, Homo sapiens
  CDR3 for alpha chain variable domain of TCR clone 253899 (TRAV3, TRAJ21)
CAVGNFNKFYF

SEQ ID NO: 507798 - protein, 15 aa, Homo sapiens
  CDR3 for beta chain variable domain of TCR clone 253899 (TRBV7-3, TRBJ2-1)
CASSLSSGSFDEQFF

SEQ ID NO: 507799 - protein, 15 aa, Homo sapiens
  CDR3 for alpha chain variable domain of TCR clone 253900 (TRAV3, TRAJ22)
CAVRDRGCSARQLTF

SEQ ID NO: 507800 - protein, 12 aa, Homo sapiens
  CDR3 for beta chain variable domain of TCR clone 253900 (TRBV12-4, TRBJ1-2)
CASSFIWLHLRF

SEQ ID NO: 507801 - protein, 18 aa, Homo sapiens
  CDR3 for alpha chain variable domain of TCR clone 253901 (TRAV13-1, TRAJ52)
CAARKRSAGGASYGKLTF

SEQ ID NO: 507802 - protein, 13 aa, Homo sapiens
  CDR3 for beta chain variable domain of TCR clone 253901 (TRBV12-4, TRBJ1-2)
CASSLRQGKGYTF

SEQ ID NO: 507803 - protein, 15 aa, Homo sapiens
  CDR3 for alpha chain variable domain of TCR clone 253902 (TRAV8-4, TRAJ9)
CAVSDRETGGFKTIF

SEQ ID NO: 507804 - protein, 15 aa, Homo sapiens
  CDR3 for beta chain variable domain of TCR clone 253902 (TRBV27, TRBJ2-1)
CASSNGGGSSNEQFF

SEQ ID NO: 507805 - protein, 12 aa, Homo sapiens
  CDR3 for alpha chain variable domain of TCR clone 253903 (TRAV16, TRAJ26)
CALRSYGQNFVF

SEQ ID NO: 507806 - protein, 14 aa, Homo sapiens
  CDR3 for beta chain variable domain of TCR clone 253903 (TRBV10-3, TRBJ2-1)
CAISSDLAYNEKFF

SEQ ID NO: 507807 - protein, 13 aa, Homo sapiens
  CDR3 for alpha chain variable domain of TCR clone 253904 (TRAV17, TRAJ9)
CATDYTGGLKTIF

SEQ ID NO: 507808 - protein, 14 aa, Homo sapiens
  CDR3 for beta chain variable domain of TCR clone 253904 (TRBV19, TRBJ2-5)
CASNMTGQQETQYF

SEQ ID NO: 507809 - protein, 12 aa, Homo sapiens
  CDR3 for alpha chain variable domain of TCR clone 253905 (TRAV3, TRAJ39)
CAVIDWSNMLTF

SEQ ID NO: 507810 - protein, 14 aa, Homo sapiens
  CDR3 for beta chain variable domain of TCR clone 253905 (TRBV7-8, TRBJ2-3)
CASSFPEGQDTQYF

SEQ ID NO: 507811 - protein, 13 aa, Homo sapiens
  CDR3 for alpha chain variable domain of TCR clone 253906 (TRAV13-1, TRAJ6)
CAARRGGSYIPTF

SEQ ID NO: 507812 - protein, 16 aa, Homo sapiens
  CDR3 for beta chain variable domain of TCR clone 253906 (TRBV5-1, TRBJ2-3)
CASSLALAVVSDTQYF

SEQ ID NO: 507813 - protein, 16 aa, Homo sapiens
  CDR3 for alpha chain variable domain of TCR clone 253907 (TRAV21, TRAJ37)
CAVRTAGSSNTRKLIL

SEQ ID NO: 507814 - protein, 13 aa, Homo sapiens
  CDR3 for beta chain variable domain of TCR clone 253907 (TRBV7-9, TRBJ2-5)
CASLPSGRETQYF

SEQ ID NO: 507815 - protein, 15 aa, Homo sapiens
  CDR3 for alpha chain variable domain of TCR clone 253908 (TRAV12-2, TRAJ43)
CAFDMRFGAGTRLTV

SEQ ID NO: 507816 - protein, 15 aa, Homo sapiens
  CDR3 for beta chain variable domain of TCR clone 253908 (TRBV2, TRBJ1-2)
CASSESRTVNYGYTF

SEQ ID NO: 507817 - protein, 11 aa, Homo sapiens
  CDR3 for alpha chain variable domain of TCR clone 253909 (TRAV21, TRAJ41)
CAVRSGYALNF

SEQ ID NO: 507818 - protein, 14 aa, Homo sapiens
  CDR3 for beta chain variable domain of TCR clone 253909 (TRBV7-2, TRBJ2-5)
CASSPRGSSETQYF

SEQ ID NO: 507819 - protein, 16 aa, Homo sapiens
  CDR3 for alpha chain variable domain of TCR clone 253910 (TRAV8-1, TRAJ42)
CAVTSRCGGSQGNLIF

SEQ ID NO: 507820 - protein, 12 aa, Homo sapiens
  CDR3 for beta chain variable domain of TCR clone 253910 (TRBV6-3, TRBJ2-7)
CASSLGRRGLYF

SEQ ID NO: 507821 - protein, 12 aa, Homo sapiens
  CDR3 for alpha chain variable domain of TCR clone 253911 (TRAV12-3, TRAJ17)
CAMTLTGNKLTF

SEQ ID NO: 507822 - protein, 17 aa, Homo sapiens
  CDR3 for beta chain variable domain of TCR clone 253911 (TRBV13, TRBJ2-3)
CASSLSRVAGRRNTQYF

SEQ ID NO: 507823 - protein, 17 aa, Homo sapiens
  CDR3 for alpha chain variable domain of TCR clone 253912 (TRAV21, TRAJ52)
CAVGTNAGGTSYGKLTF

SEQ ID NO: 507824 - protein, 16 aa, Homo sapiens
  CDR3 for beta chain variable domain of TCR clone 253912 (TRBV29-1, TRBJ2-7)
CSVEDAEDGTAYEQYF

SEQ ID NO: 507825 - protein, 15 aa, Homo sapiens
  CDR3 for alpha chain variable domain of TCR clone 253913 (TRAV2, TRAJ24)
CAVEVLTDSWGNFRF

SEQ ID NO: 507826 - protein, 14 aa, Homo sapiens
  CDR3 for beta chain variable domain of TCR clone 253913 (TRBV19, TRBJ2-1)
CASSMGSGRRSSSS

SEQ ID NO: 507827 - protein, 12 aa, Homo sapiens
  CDR3 for alpha chain variable domain of TCR clone 253914 (TRAV12-1, TRAJ40)
CVVYSGTYKYIF

SEQ ID NO: 507828 - protein, 18 aa, Homo sapiens
  CDR3 for beta chain variable domain of TCR clone 253914 (TRBV11-2, TRBJ2-3)
CASSLGGATRGAPNTQYF

SEQ ID NO: 507829 - protein, 15 aa, Homo sapiens
  CDR3 for alpha chain variable domain of TCR clone 253915 (TRAV8-2, TRAJ28)
CYVSESGAGSYQLTF

SEQ ID NO: 507830 - protein, 16 aa, Homo sapiens
  CDR3 for beta chain variable domain of TCR clone 253915 (TRBV10-3, TRBJ2-1)
CAISLTSGNSYNEQFF

SEQ ID NO: 507831 - protein, 12 aa, Homo sapiens
  CDR3 for alpha chain variable domain of TCR clone 253916 (TRAV27, TRAJ13)
CAGVRGYQKVTF

SEQ ID NO: 507832 - protein, 12 aa, Homo sapiens
  CDR3 for beta chain variable domain of TCR clone 253916 (TRBV14, TRBJ2-5)
CASSHLKETQYF

SEQ ID NO: 507833 - protein, 14 aa, Homo sapiens
  CDR3 for alpha chain variable domain of TCR clone 253917 (TRAV13-1, TRAJ44)
CAATATGTASKLTF

SEQ ID NO: 507834 - protein, 22 aa, Homo sapiens
  CDR3 for beta chain variable domain of TCR clone 253917 (TRBV19, TRBJ2-1)
CASSVRDRVTGTSGRIYNEQFF

SEQ ID NO: 507835 - protein, 14 aa, Homo sapiens
  CDR3 for alpha chain variable domain of TCR clone 253918 (TRAV35, TRAJ22)
CAGLRPGSARQLTF

SEQ ID NO: 507836 - protein, 14 aa, Homo sapiens
  CDR3 for beta chain variable domain of TCR clone 253918 (TRBV19, TRBJ2-2)
CASSTLHRSGELFF

SEQ ID NO: 507837 - protein, 11 aa, Homo sapiens
  CDR3 for alpha chain variable domain of TCR clone 253919 (TRAV1-1, TRAJ30)
CAVSRDDKIIF

SEQ ID NO: 507838 - protein, 13 aa, Homo sapiens
  CDR3 for beta chain variable domain of TCR clone 253919 (TRBV7-9, TRBJ1-2)
CASSLKQNYGYTF

SEQ ID NO: 507839 - protein, 11 aa, Homo sapiens
  CDR3 for alpha chain variable domain of TCR clone 253920 (TRAV13-2, TRAJ20)
CADSNDYELSF

SEQ ID NO: 507840 - protein, 14 aa, Homo sapiens
  CDR3 for beta chain variable domain of TCR clone 253920 (TRBV11-2, TRBJ1-5)
CASSLDRGRQPQHF

SEQ ID NO: 507841 - protein, 13 aa, Homo sapiens
  CDR3 for alpha chain variable domain of TCR clone 253921 (TRAV8-3, TRAJ28)
CAVGAVGSYQLTF

SEQ ID NO: 507842 - protein, 15 aa, Homo sapiens
  CDR3 for beta chain variable domain of TCR clone 253921 (TRBV7-2, TRBJ2-7)
CASSTPGLTRGEQYF

SEQ ID NO: 507843 - protein, 19 aa, Homo sapiens
  CDR3 for alpha chain variable domain of TCR clone 253922 (TRAV17, TRAJ57)
CFLLLCYGPSQGGSEKLVF

SEQ ID NO: 507844 - protein, 15 aa, Homo sapiens
  CDR3 for beta chain variable domain of TCR clone 253922 (TRBV12-4, TRBJ1-5)
CQQPTGRGSNQPQHF

SEQ ID NO: 507845 - protein, 14 aa, Homo sapiens
  CDR3 for alpha chain variable domain of TCR clone 253923 (TRAV26-1, TRAJ34)
CIVRVAYNNDKHIF

SEQ ID NO: 507846 - protein, 15 aa, Homo sapiens
  CDR3 for beta chain variable domain of TCR clone 253923 (TRBV20-1, TRBJ2-7)
CSARVPAAYFYEQYF

SEQ ID NO: 507847 - protein, 13 aa, Homo sapiens
  CDR3 for alpha chain variable domain of TCR clone 253924 (TRAV38-2/DV8, TRAJ34)
CAYRTWNTDTLIF

SEQ ID NO: 507848 - protein, 16 aa, Homo sapiens
  CDR3 for beta chain variable domain of TCR clone 253924 (TRBV19, TRBJ2-1)
CASSKAGPSSYNEQFF

SEQ ID NO: 507849 - protein, 13 aa, Homo sapiens
  CDR3 for alpha chain variable domain of TCR clone 253925 (TRAV27, TRAJ45)
CRSSGGGADGLTF

SEQ ID NO: 507850 - protein, 15 aa, Homo sapiens
  CDR3 for beta chain variable domain of TCR clone 253925 (TRBV4-2, TRBJ2-7)
CASSQDRQGPYEQYF

SEQ ID NO: 507851 - protein, 14 aa, Homo sapiens
  CDR3 for alpha chain variable domain of TCR clone 253926 (TRAV12-2, TRAJ13)
CAVKNTGGYQKVTF

SEQ ID NO: 507852 - protein, 12 aa, Homo sapiens
  CDR3 for beta chain variable domain of TCR clone 253926 (TRBV12-4, TRBJ1-2)
CASSFIWLHLRF

SEQ ID NO: 507853 - protein, 12 aa, Homo sapiens
  CDR3 for alpha chain variable domain of TCR clone 253927 (TRAV1-2, TRAJ33)
CAALDSNYQLIW

SEQ ID NO: 507854 - protein, 14 aa, Homo sapiens
  CDR3 for beta chain variable domain of TCR clone 253927 (TRBV7-8, TRBJ2-3)
CASSSRDSTDTQYF

SEQ ID NO: 507855 - protein, 13 aa, Homo sapiens
  CDR3 for alpha chain variable domain of TCR clone 253928 (TRAV8-4, TRAJ9)
CAVSETGGCKTIF

SEQ ID NO: 507856 - protein, 14 aa, Homo sapiens
  CDR3 for beta chain variable domain of TCR clone 253928 (TRBV18, TRBJ2-3)
CASSGLADTDTQYF

SEQ ID NO: 507857 - protein, 13 aa, Homo sapiens
  CDR3 for alpha chain variable domain of TCR clone 253929 (TRAV38-2/DV8, TRAJ34)
CAYRNYNTYKLIF

SEQ ID NO: 507858 - protein, 15 aa, Homo sapiens
  CDR3 for beta chain variable domain of TCR clone 253929 (TRBV20-1, TRBJ2-5)
CSAEGTGGLQETQYF

SEQ ID NO: 507859 - protein, 12 aa, Homo sapiens
  CDR3 for alpha chain variable domain of TCR clone 253930 (TRAV30, TRAJ43)
CGTEERGNDKRF

SEQ ID NO: 507860 - protein, 11 aa, Homo sapiens
  CDR3 for beta chain variable domain of TCR clone 253930 (TRBV29-1, TRBJ2-5)
CSEDRTGTQYF

SEQ ID NO: 507861 - protein, 20 aa, Homo sapiens
  CDR3 for alpha chain variable domain of TCR clone 253931 (TRAV26-1, TRAJ42)
CCVLLHRQTYYGGSQGNLIF

SEQ ID NO: 507862 - protein, 16 aa, Homo sapiens
  CDR3 for beta chain variable domain of TCR clone 253931 (TRBV7-3, TRBJ2-2)
CGSSLKRGTLSGELFF

SEQ ID NO: 507863 - protein, 12 aa, Homo sapiens
  CDR3 for alpha chain variable domain of TCR clone 253932 (TRAV38-1, TRAJ32)
CAPLGATNKLIF

SEQ ID NO: 507864 - protein, 14 aa, Homo sapiens
  CDR3 for beta chain variable domain of TCR clone 253932 (TRBV29-1, TRBJ2-5)
SAALKLAGVETQYF

SEQ ID NO: 507865 - protein, 14 aa, Homo sapiens
  CDR3 for alpha chain variable domain of TCR clone 253933 (TRAV16, TRAJ32)
CSKRYGGATNKLLF

SEQ ID NO: 507866 - protein, 12 aa, Homo sapiens
  CDR3 for beta chain variable domain of TCR clone 253933 (TRBV7-9, TRBJ2-7)
CATRTDAYEQYF

SEQ ID NO: 507867 - protein, 13 aa, Homo sapiens
  CDR3 for alpha chain variable domain of TCR clone 253934 (TRAV23/DV6, TRAJ15)
CAALPAGRNCSDL

SEQ ID NO: 507868 - protein, 14 aa, Homo sapiens
  CDR3 for beta chain variable domain of TCR clone 253934 (TRBV7-9, TRBJ1-2)
CDSSRQGANYGYTF

SEQ ID NO: 507869 - protein, 12 aa, Homo sapiens
  CDR3 for alpha chain variable domain of TCR clone 253935 (TRAV13-2, TRAJ30)
CAENFGDDKIIF

SEQ ID NO: 507870 - protein, 17 aa, Homo sapiens
  CDR3 for beta chain variable domain of TCR clone 253935 (TRBV19, TRBJ2-7)
CASSISFYDSYPYEQYF

SEQ ID NO: 507871 - protein, 19 aa, Homo sapiens
  CDR3 for alpha chain variable domain of TCR clone 253936 (TRAV2, TRAJ20)
ILQVREADAAVYRDCKLGF

SEQ ID NO: 507872 - protein, 16 aa, Homo sapiens
  CDR3 for beta chain variable domain of TCR clone 253936 (TRBV5-1, TRBJ2-5)
CASSLALLRAGETQYF

SEQ ID NO: 507873 - protein, 18 aa, Homo sapiens
  CDR3 for alpha chain variable domain of TCR clone 253937 (TRAV21, TRAJ13)
CAVPRSFWGLPESYRWNW

SEQ ID NO: 507874 - protein, 15 aa, Homo sapiens
  CDR3 for beta chain variable domain of TCR clone 253937 (TRBV7-9, TRBJ1-6)
CASSSPGRGNSPLHF

SEQ ID NO: 507875 - protein, 10 aa, Homo sapiens
  CDR3 for alpha chain variable domain of TCR clone 253938 (TRAV21, TRAJ34)
CAAATDKLIF

SEQ ID NO: 507876 - protein, 16 aa, Homo sapiens
  CDR3 for beta chain variable domain of TCR clone 253938 (TRBV7-3, TRBJ2-1)
CASSLVSGSSNNEQFF

SEQ ID NO: 507877 - protein, 15 aa, Homo sapiens
  CDR3 for alpha chain variable domain of TCR clone 253939 (TRAV2, TRAJ9)
CAVEDRGTGGFKTPF

SEQ ID NO: 507878 - protein, 13 aa, Homo sapiens
  CDR3 for beta chain variable domain of TCR clone 253939 (TRBV20-1, TRBJ1-1)
CSARGGGNTEAVF

SEQ ID NO: 507879 - protein, 18 aa, Homo sapiens
  CDR3 for alpha chain variable domain of TCR clone 253940 (TRAV13-1, TRAJ52)
CAVKNPNAGGTSYGKLTF

SEQ ID NO: 507880 - protein, 14 aa, Homo sapiens
  CDR3 for beta chain variable domain of TCR clone 253940 (TRBV7-3, TRBJ2-1)
CASSLAGGTNEQFF

SEQ ID NO: 507881 - protein, 14 aa, Homo sapiens
  CDR3 for alpha chain variable domain of TCR clone 253941 (TRAV12-2, TRAJ40)
CAVKIPSGTYNYIF

SEQ ID NO: 507882 - protein, 12 aa, Homo sapiens
  CDR3 for beta chain variable domain of TCR clone 253941 (TRBV11-2, TRBJ2-1)
CASSPGNNEQFF

SEQ ID NO: 507883 - protein, 12 aa, Homo sapiens
  CDR3 for alpha chain variable domain of TCR clone 253942 (TRAV36/DV7, TRAJ54)
CAVVRGAQKLVF

SEQ ID NO: 507884 - protein, 17 aa, Homo sapiens
  CDR3 for beta chain variable domain of TCR clone 253942 (TRBV7-2, TRBJ2-2)
CASSPRGAGEGTGELFF

SEQ ID NO: 507885 - protein, 13 aa, Homo sapiens
  CDR3 for alpha chain variable domain of TCR clone 253943 (TRAV12-1, TRAJ31)
CVVNMNNNARLMF

SEQ ID NO: 507886 - protein, 15 aa, Homo sapiens
  CDR3 for beta chain variable domain of TCR clone 253943 (TRBV4-1, TRBJ1-2)
CASSQGQGAAYGYTV

SEQ ID NO: 507887 - protein, 14 aa, Homo sapiens
  CDR3 for alpha chain variable domain of TCR clone 253944 (TRAV12-2, TRAJ13)
CAVKKTGGYQKVTF

SEQ ID NO: 507888 - protein, 13 aa, Homo sapiens
  CDR3 for beta chain variable domain of TCR clone 253944 (TRBV2, TRBJ2-5)
CASGTPYQETQYF

SEQ ID NO: 507889 - protein, 14 aa, Homo sapiens
  CDR3 for alpha chain variable domain of TCR clone 253945 (TRAV9-2, TRAJ39)
CALYIYTAGNMLTF

SEQ ID NO: 507890 - protein, 15 aa, Homo sapiens
  CDR3 for beta chain variable domain of TCR clone 253945 (TRBV28, TRBJ1-3)
CASSMSWASGNTIYF

SEQ ID NO: 507891 - protein, 12 aa, Homo sapiens
  CDR3 for alpha chain variable domain of TCR clone 253946 (TRAV12-3, TRAJ17)
CAMTLTGNKLTF

SEQ ID NO: 507892 - protein, 15 aa, Homo sapiens
  CDR3 for beta chain variable domain of TCR clone 253946 (TRBV20-1, TRBJ2-7)
CSARDRVSRMDEQYV

SEQ ID NO: 507893 - protein, 12 aa, Homo sapiens
  CDR3 for alpha chain variable domain of TCR clone 253947 (TRAV21, TRAJ11)
CAATSGYSTHTF

SEQ ID NO: 507894 - protein, 14 aa, Homo sapiens
  CDR3 for beta chain variable domain of TCR clone 253947 (TRBV20-1, TRBJ2-7)
CSAPELAGVGEQYF

SEQ ID NO: 507895 - protein, 11 aa, Homo sapiens
  CDR3 for alpha chain variable domain of TCR clone 253948 (TRAV13-1, TRAJ39)
CASHAGNMLTF

SEQ ID NO: 507896 - protein, 14 aa, Homo sapiens
  CDR3 for beta chain variable domain of TCR clone 253948 (TRBV11-2, TRBJ1-5)
CASSLDSGRQPQHF

SEQ ID NO: 507897 - protein, 13 aa, Homo sapiens
  CDR3 for alpha chain variable domain of TCR clone 253949 (TRAV27, TRAJ18)
CAGRGSTLGRLYF

SEQ ID NO: 507898 - protein, 14 aa, Homo sapiens
  CDR3 for beta chain variable domain of TCR clone 253949 (TRBV27, TRBJ2-5)
CASSSLKGWETQYF

SEQ ID NO: 507899 - protein, 18 aa, Homo sapiens
  CDR3 for alpha chain variable domain of TCR clone 253950 (TRAV3, TRAJ32)
CAVRDIRGYGDAKNKLIF

SEQ ID NO: 507900 - protein, 15 aa, Homo sapiens
  CDR3 for beta chain variable domain of TCR clone 253950 (TRBV12-4, TRBJ2-2)
CASSLGVRHTGELFF

SEQ ID NO: 507901 - protein, 13 aa, Homo sapiens
  CDR3 for alpha chain variable domain of TCR clone 253951 (TRAV3, TRAJ27)
CAVRPLGAGKSTF

SEQ ID NO: 507902 - protein, 17 aa, Homo sapiens
  CDR3 for beta chain variable domain of TCR clone 253951 (TRBV19, TRBJ2-7)
CASSISFYDSYPYEQYF

SEQ ID NO: 507903 - protein, 11 aa, Homo sapiens
  CDR3 for alpha chain variable domain of TCR clone 253952 (TRAV2, TRAJ13)
CASGGYQKVTF

SEQ ID NO: 507904 - protein, 15 aa, Homo sapiens
  CDR3 for beta chain variable domain of TCR clone 253952 (TRBV4-2, TRBJ1-1)
CASSQRSSGRTEAFF

SEQ ID NO: 507905 - protein, 12 aa, Homo sapiens
  CDR3 for alpha chain variable domain of TCR clone 253953 (TRAV2, TRAJ9)
CAVGAGGFKTIF

SEQ ID NO: 507906 - protein, 16 aa, Homo sapiens
  CDR3 for beta chain variable domain of TCR clone 253953 (TRBV13, TRBJ2-2)
CASRPRTGERTGELFF

SEQ ID NO: 507907 - protein, 14 aa, Homo sapiens
  CDR3 for alpha chain variable domain of TCR clone 253954 (TRAV12-1, TRAJ12)
CVVNGRDSSYKLIF

SEQ ID NO: 507908 - protein, 15 aa, Homo sapiens
  CDR3 for beta chain variable domain of TCR clone 253954 (TRBV7-2, TRBJ2-1)
CASSLVAGRYNEQFF

SEQ ID NO: 507909 - protein, 15 aa, Homo sapiens
  CDR3 for alpha chain variable domain of TCR clone 253955 (TRAV3, TRAJ5)
CSVRDRTTGRRALTF

SEQ ID NO: 507910 - protein, 15 aa, Homo sapiens
  CDR3 for beta chain variable domain of TCR clone 253955 (TRBV7-8, TRBJ2-1)
CASSLADSLYNEQFF

SEQ ID NO: 507911 - protein, 22 aa, Homo sapiens
  CDR3 for alpha chain variable domain of TCR clone 253956 (TRAV2, )
CAVEDFPKAGNNHIQNPDPAVY

SEQ ID NO: 507912 - protein, 14 aa, Homo sapiens
  CDR3 for beta chain variable domain of TCR clone 253956 (TRBV29-1, TRBJ1-4)
CSVSGRQGGEKLFF

SEQ ID NO: 507913 - protein, 12 aa, Homo sapiens
  CDR3 for alpha chain variable domain of TCR clone 253957 (TRAV13-1, TRAJ21)
CASKEGFNKFYF

SEQ ID NO: 507914 - protein, 14 aa, Homo sapiens
  CDR3 for beta chain variable domain of TCR clone 253957 (TRBV23-1, TRBJ2-5)
CASSFLRSQETQYF

SEQ ID NO: 507915 - protein, 14 aa, Homo sapiens
  CDR3 for alpha chain variable domain of TCR clone 253958 (TRAV17, TRAJ32)
CATDPGGATNKLIF

SEQ ID NO: 507916 - protein, 14 aa, Homo sapiens
  CDR3 for beta chain variable domain of TCR clone 253958 (TRBV2, TRBJ1-5)
YASSENRGGQPQHF

SEQ ID NO: 507917 - protein, 11 aa, Homo sapiens
  CDR3 for alpha chain variable domain of TCR clone 253959 (TRAV2, TRAJ33)
CAVDSNYQLIW

SEQ ID NO: 507918 - protein, 16 aa, Homo sapiens
  CDR3 for beta chain variable domain of TCR clone 253959 (TRBV7-2, TRBJ2-3)
CASSLVGDASTDTQYF

SEQ ID NO: 507919 - protein, 11 aa, Homo sapiens
  CDR3 for alpha chain variable domain of TCR clone 253960 (TRAV1-1, TRAJ23)
CAVRQGEKLIF

SEQ ID NO: 507920 - protein, 12 aa, Homo sapiens
  CDR3 for beta chain variable domain of TCR clone 253960 (TRBV19, TRBJ1-5)
CASSIAQQPQHF

SEQ ID NO: 507921 - protein, 16 aa, Homo sapiens
  CDR3 for alpha chain variable domain of TCR clone 253961 (TRAV4, TRAJ9)
CLVGDPNRPGGFKTIF

SEQ ID NO: 507922 - protein, 16 aa, Homo sapiens
  CDR3 for beta chain variable domain of TCR clone 253961 (TRBV28, TRBJ1-4)
CGSSPPYRGRSEKLFF

SEQ ID NO: 507923 - protein, 14 aa, Homo sapiens
  CDR3 for alpha chain variable domain of TCR clone 253962 (TRAV34, TRAJ44)
CGADGTGTASKLTF

SEQ ID NO: 507924 - protein, 12 aa, Homo sapiens
  CDR3 for beta chain variable domain of TCR clone 253962 (TRBV14, TRBJ2-7)
CASSRLKGEQYF

SEQ ID NO: 507925 - protein, 14 aa, Homo sapiens
  CDR3 for alpha chain variable domain of TCR clone 253963 (TRAV26-1, TRAJ11)
CIVPLYSGYSTLTF

SEQ ID NO: 507926 - protein, 12 aa, Homo sapiens
  CDR3 for beta chain variable domain of TCR clone 253963 (TRBV11-2, TRBJ2-1)
CASSPGNNEQFF

SEQ ID NO: 507927 - protein, 19 aa, Homo sapiens
  CDR3 for alpha chain variable domain of TCR clone 253964 (TRAV1-2, TRAJ26)
CLLPLCCERPDNYGQNFVF

SEQ ID NO: 507928 - protein, 13 aa, Homo sapiens
  CDR3 for beta chain variable domain of TCR clone 253964 (TRBV12-4, TRBJ2-7)
CASSPTETYEQYF

SEQ ID NO: 507929 - protein, 14 aa, Homo sapiens
  CDR3 for alpha chain variable domain of TCR clone 253965 (TRAV13-1, TRAJ20)
CAARPGSTDYKLSF

SEQ ID NO: 507930 - protein, 14 aa, Homo sapiens
  CDR3 for beta chain variable domain of TCR clone 253965 (TRBV4-1, TRBJ2-2)
CASSQAVNTGELFF

SEQ ID NO: 507931 - protein, 12 aa, Homo sapiens
  CDR3 for alpha chain variable domain of TCR clone 253966 (TRAV13-1, TRAJ21)
CAAKEGFNKFYF

SEQ ID NO: 507932 - protein, 16 aa, Homo sapiens
  CDR3 for beta chain variable domain of TCR clone 253966 (TRBV4-2, TRBJ2-3)
CASSQELAGDTDTQYF

SEQ ID NO: 507933 - protein, 15 aa, Homo sapiens
  CDR3 for alpha chain variable domain of TCR clone 253967 (TRAV3, TRAJ3)
CAVRDRDSSASKIIF

SEQ ID NO: 507934 - protein, 12 aa, Homo sapiens
  CDR3 for beta chain variable domain of TCR clone 253967 (TRBV12-4, TRBJ2-7)
CASSLGGYEQYF

SEQ ID NO: 507935 - protein, 16 aa, Homo sapiens
  CDR3 for alpha chain variable domain of TCR clone 253968 (TRAV8-3, TRAJ13)
CAVGAYPSGGFQKVTS

SEQ ID NO: 507936 - protein, 15 aa, Homo sapiens
  CDR3 for beta chain variable domain of TCR clone 253968 (TRBV19, TRBJ1-5)
CASSIVWADNQPQHF

SEQ ID NO: 507937 - protein, 16 aa, Homo sapiens
  CDR3 for alpha chain variable domain of TCR clone 253969 (TRAV30, TRAJ24)
CGTEIVDADSWGKFQF

SEQ ID NO: 507938 - protein, 12 aa, Homo sapiens
  CDR3 for beta chain variable domain of TCR clone 253969 (TRBV27, TRBJ2-1)
CARRGFYNEQFF

SEQ ID NO: 507939 - protein, 18 aa, Homo sapiens
  CDR3 for alpha chain variable domain of TCR clone 253970 (TRAV21, TRAJ52)
CAVRPSPAGGTSYGKLTF

SEQ ID NO: 507940 - protein, 12 aa, Homo sapiens
  CDR3 for beta chain variable domain of TCR clone 253970 (TRBV4-1, TRBJ2-3)
CASSQGTDTQYF

SEQ ID NO: 507941 - protein, 10 aa, Homo sapiens
  CDR3 for alpha chain variable domain of TCR clone 253971 (TRAV16, TRAJ26)
CAPEELWSEF

SEQ ID NO: 507942 - protein, 15 aa, Homo sapiens
  CDR3 for beta chain variable domain of TCR clone 253971 (TRBV2, TRBJ2-7)
CASSEGLARSYEQYF

SEQ ID NO: 507943 - protein, 12 aa, Homo sapiens
  CDR3 for alpha chain variable domain of TCR clone 253972 (TRAV3, TRAJ20)
CAVRDPDYKLSF

SEQ ID NO: 507944 - protein, 16 aa, Homo sapiens
  CDR3 for beta chain variable domain of TCR clone 253972 (TRBV5-5, TRBJ1-2)
CASSPTWGRGLYGYTF

SEQ ID NO: 507945 - protein, 12 aa, Homo sapiens
  CDR3 for alpha chain variable domain of TCR clone 253973 (TRAV13-2, TRAJ8)
CAPWLGFQKLVF

SEQ ID NO: 507946 - protein, 13 aa, Homo sapiens
  CDR3 for beta chain variable domain of TCR clone 253973 (TRBV4-1, TRBJ2-1)
CASSQEVQYEQFF

SEQ ID NO: 507947 - protein, 15 aa, Homo sapiens
  CDR3 for alpha chain variable domain of TCR clone 253974 (TRAV8-3, TRAJ27)
CAVGPSKTNAGKSTF

SEQ ID NO: 507948 - protein, 14 aa, Homo sapiens
  CDR3 for beta chain variable domain of TCR clone 253974 (TRBV9, TRBJ2-1)
CASSVDPRGKEQFF

SEQ ID NO: 507949 - protein, 16 aa, Homo sapiens
  CDR3 for alpha chain variable domain of TCR clone 253975 (TRAV3, TRAJ37)
CAVRPHGSGNTGKLIF

SEQ ID NO: 507950 - protein, 11 aa, Homo sapiens
  CDR3 for beta chain variable domain of TCR clone 253975 (TRBV19, TRBJ1-1)
CASSIGSEAFF

SEQ ID NO: 507951 - protein, 12 aa, Homo sapiens
  CDR3 for alpha chain variable domain of TCR clone 253976 (TRAV12-3, TRAJ17)
CAMTLTGKKLTF

SEQ ID NO: 507952 - protein, 14 aa, Homo sapiens
  CDR3 for beta chain variable domain of TCR clone 253976 (TRBV7-3, TRBJ2-1)
CASSLAGGTNEQFF

SEQ ID NO: 507953 - protein, 12 aa, Homo sapiens
  CDR3 for alpha chain variable domain of TCR clone 253977 (TRAV17, TRAJ4)
CATDGGFNKLIF

SEQ ID NO: 507954 - protein, 13 aa, Homo sapiens
  CDR3 for beta chain variable domain of TCR clone 253977 (TRBV29-1, TRBJ2-2)
CSTTGVNTGELFS

SEQ ID NO: 507955 - protein, 16 aa, Homo sapiens
  CDR3 for alpha chain variable domain of TCR clone 253978 (TRAV30, TRAJ24)
CGTEIVDAYSWGKFQF

SEQ ID NO: 507956 - protein, 14 aa, Homo sapiens
  CDR3 for beta chain variable domain of TCR clone 253978 (TRBV12-5, TRBJ2-5)
RASGSRTHQETQYF

SEQ ID NO: 507957 - protein, 14 aa, Homo sapiens
  CDR3 for alpha chain variable domain of TCR clone 253979 (TRAV36/DV7, TRAJ33)
CAVLPRDSNYQLIW

SEQ ID NO: 507958 - protein, 17 aa, Homo sapiens
  CDR3 for beta chain variable domain of TCR clone 253979 (TRBV23-1, TRBJ2-5)
CASSPALNVIGVETQYF

SEQ ID NO: 507959 - protein, 11 aa, Homo sapiens
  CDR3 for alpha chain variable domain of TCR clone 253980 (TRAV2, TRAJ13)
CASGGYQKVTF

SEQ ID NO: 507960 - protein, 14 aa, Homo sapiens
  CDR3 for beta chain variable domain of TCR clone 253980 (TRBV5-1, TRBJ2-5)
CASSPAFSEETQYF

SEQ ID NO: 507961 - protein, 17 aa, Homo sapiens
  CDR3 for alpha chain variable domain of TCR clone 253981 (TRAV3, TRAJ6)
CAVRDGPRAGGSHIPTF

SEQ ID NO: 507962 - protein, 17 aa, Homo sapiens
  CDR3 for beta chain variable domain of TCR clone 253981 (TRBV11-2, TRBJ2-1)
CASSLYPPGVEYNEQFF

SEQ ID NO: 507963 - protein, 16 aa, Homo sapiens
  CDR3 for alpha chain variable domain of TCR clone 253982 (TRAV30, TRAJ24)
CGTEIVDADSWGKFQF

SEQ ID NO: 507964 - protein, 16 aa, Homo sapiens
  CDR3 for beta chain variable domain of TCR clone 253982 (TRBV4-3, TRBJ2-2)
CASSRLQGSGTGELFF

SEQ ID NO: 507965 - protein, 16 aa, Homo sapiens
  CDR3 for alpha chain variable domain of TCR clone 253983 (TRAV4, TRAJ9)
CLMGDPNRPGGFKTIF

SEQ ID NO: 507966 - protein, 16 aa, Homo sapiens
  CDR3 for beta chain variable domain of TCR clone 253983 (TRBV28, TRBJ1-4)
CASSPPYRGRSEKLFF

SEQ ID NO: 507967 - protein, 12 aa, Homo sapiens
  CDR3 for alpha chain variable domain of TCR clone 253984 (TRAV12-2, TRAJ7)
CAVMRGNNRLVL

SEQ ID NO: 507968 - protein, 12 aa, Homo sapiens
  CDR3 for beta chain variable domain of TCR clone 253984 (TRBV7-8, TRBJ2-7)
CASSLGDREQYF

SEQ ID NO: 507969 - protein, 13 aa, Homo sapiens
  CDR3 for alpha chain variable domain of TCR clone 253985 (TRAV36/DV7, TRAJ49)
CAVEANTGNQFYF

SEQ ID NO: 507970 - protein, 13 aa, Homo sapiens
  CDR3 for beta chain variable domain of TCR clone 253985 (TRBV10-3, TRBJ2-7)
CASKLPVNYEQYF

SEQ ID NO: 507971 - protein, 12 aa, Homo sapiens
  CDR3 for alpha chain variable domain of TCR clone 253986 (TRAV4, TRAJ43)
CLVGVFNNDMRF

SEQ ID NO: 507972 - protein, 14 aa, Homo sapiens
  CDR3 for beta chain variable domain of TCR clone 253986 (TRBV7-3, TRBJ2-1)
CASSLSGSYNEQFF

SEQ ID NO: 507973 - protein, 12 aa, Homo sapiens
  CDR3 for alpha chain variable domain of TCR clone 253987 (TRAV12-3, TRAJ17)
CAMTLAGNKLTF

SEQ ID NO: 507974 - protein, 17 aa, Homo sapiens
  CDR3 for beta chain variable domain of TCR clone 253987 (TRBV13, TRBJ2-3)
CASSLSRVAGGRNTQYF

SEQ ID NO: 507975 - protein, 14 aa, Homo sapiens
  CDR3 for alpha chain variable domain of TCR clone 253988 (TRAV12-2, TRAJ13)
CAVKKTGGYQQVIF

SEQ ID NO: 507976 - protein, 15 aa, Homo sapiens
  CDR3 for beta chain variable domain of TCR clone 253988 (TRBV27, TRBJ2-1)
CASSNGGGSSNEQFF

SEQ ID NO: 507977 - protein, 15 aa, Homo sapiens
  CDR3 for alpha chain variable domain of TCR clone 253989 (TRAV26-1, TRAJ53)
CIVRVEGGSNYKLAF

SEQ ID NO: 507978 - protein, 14 aa, Homo sapiens
  CDR3 for beta chain variable domain of TCR clone 253989 (TRBV4-3, TRBJ2-1)
CASSKDRWRGEQFF

SEQ ID NO: 507979 - protein, 16 aa, Homo sapiens
  CDR3 for alpha chain variable domain of TCR clone 253990 (TRAV3, TRAJ37)
CAVRGRGSGNTGKLIF

SEQ ID NO: 507980 - protein, 13 aa, Homo sapiens
  CDR3 for beta chain variable domain of TCR clone 253990 (TRBV14, TRBJ2-7)
CASSQDRRGEQHF

SEQ ID NO: 507981 - protein, 18 aa, Homo sapiens
  CDR3 for alpha chain variable domain of TCR clone 253991 (TRAV29/DV5, TRAJ52)
CAAGFRGAGGASYGKLTF

SEQ ID NO: 507982 - protein, 16 aa, Homo sapiens
  CDR3 for beta chain variable domain of TCR clone 253991 (TRBV7-3, TRBJ2-2)
CASSLKRGTLSGELFF

SEQ ID NO: 507983 - protein, 12 aa, Homo sapiens
  CDR3 for alpha chain variable domain of TCR clone 253992 (TRAV12-3, TRAJ17)
CAMTLTGNKLTF

SEQ ID NO: 507984 - protein, 14 aa, Homo sapiens
  CDR3 for beta chain variable domain of TCR clone 253992 (TRBV6-3, TRBJ2-2)
CASSSTSNTGELFF

SEQ ID NO: 507985 - protein, 14 aa, Homo sapiens
  CDR3 for alpha chain variable domain of TCR clone 253993 (TRAV38-1, TRAJ40)
CALRPTSGTYKYIF

SEQ ID NO: 507986 - protein, 14 aa, Homo sapiens
  CDR3 for beta chain variable domain of TCR clone 253993 (TRBV18, TRBJ2-7)
CASSPRGGAYEQYF

SEQ ID NO: 507987 - protein, 15 aa, Homo sapiens
  CDR3 for alpha chain variable domain of TCR clone 253994 (TRAV23/DV6, TRAJ45)
CAASARGGGADGLTF

SEQ ID NO: 507988 - protein, 14 aa, Homo sapiens
  CDR3 for beta chain variable domain of TCR clone 253994 (TRBV7-3, TRBJ2-2)
CASSSGGYTGELFF

SEQ ID NO: 507989 - protein, 13 aa, Homo sapiens
  CDR3 for alpha chain variable domain of TCR clone 253995 (TRAV12-2, TRAJ6)
CAVNVSRKLHTYI

SEQ ID NO: 507990 - protein, 14 aa, Homo sapiens
  CDR3 for beta chain variable domain of TCR clone 253995 (TRBV19, TRBJ2-1)
CASGKSTQYNEQFF

SEQ ID NO: 507991 - protein, 14 aa, Homo sapiens
  CDR3 for alpha chain variable domain of TCR clone 253996 (TRAV8-3, TRAJ44)
CAVGNTGTASKLTF

SEQ ID NO: 507992 - protein, 15 aa, Homo sapiens
  CDR3 for beta chain variable domain of TCR clone 253996 (TRBV28, TRBJ2-7)
CASSVRGQGRYEQYF

SEQ ID NO: 507993 - protein, 13 aa, Homo sapiens
  CDR3 for alpha chain variable domain of TCR clone 253997 (TRAV20, TRAJ54)
CAVQAGGAQKLVF

SEQ ID NO: 507994 - protein, 14 aa, Homo sapiens
  CDR3 for beta chain variable domain of TCR clone 253997 (TRBV20-1, TRBJ2-7)
CSAKTGTGGYEQFF

SEQ ID NO: 507995 - protein, 12 aa, Homo sapiens
  CDR3 for alpha chain variable domain of TCR clone 253998 (TRAV2, TRAJ31)
CAVEDNNSRLMF

SEQ ID NO: 507996 - protein, 16 aa, Homo sapiens
  CDR3 for beta chain variable domain of TCR clone 253998 (TRBV6-1, TRBJ2-5)
CASSETLDRGAETQYF

SEQ ID NO: 507997 - protein, 13 aa, Homo sapiens
  CDR3 for alpha chain variable domain of TCR clone 253999 (TRAV3, TRAJ27)
CAVRPLGAGKSTF

SEQ ID NO: 507998 - protein, 12 aa, Homo sapiens
  CDR3 for beta chain variable domain of TCR clone 253999 (TRBV7-9, TRBJ2-7)
GATRTDAYEQYF

SEQ ID NO: 507999 - protein, 14 aa, Homo sapiens
  CDR3 for alpha chain variable domain of TCR clone 254000 (TRAV29/DV5, TRAJ34)
CAASASRETDKLIF

SEQ ID NO: 508000 - protein, 16 aa, Homo sapiens
  CDR3 for beta chain variable domain of TCR clone 254000 (TRBV29-1, TRBJ2-7)
CSVEVVGTSGSYEQYF

SEQ ID NO: 508001 - protein, 15 aa, Homo sapiens
  CDR3 for alpha chain variable domain of TCR clone 254001 (TRAV26-1, TRAJ23)
CIVRVAGYQGGKLIF

SEQ ID NO: 508002 - protein, 15 aa, Homo sapiens
  CDR3 for beta chain variable domain of TCR clone 254001 (TRBV4-1, TRBJ1-4)
CASSDTGGTNEKLFF

SEQ ID NO: 508003 - protein, 12 aa, Homo sapiens
  CDR3 for alpha chain variable domain of TCR clone 254002 (TRAV3, TRAJ43)
CAVRDPNNDMRF

SEQ ID NO: 508004 - protein, 16 aa, Homo sapiens
  CDR3 for beta chain variable domain of TCR clone 254002 (TRBV20-1, TRBJ2-1)
CSARGLAESSYNEQFF

SEQ ID NO: 508005 - protein, 12 aa, Homo sapiens
  CDR3 for alpha chain variable domain of TCR clone 254003 (TRAV12-3, TRAJ17)
CAMTLTGNKLNF

SEQ ID NO: 508006 - protein, 15 aa, Homo sapiens
  CDR3 for beta chain variable domain of TCR clone 254003 (TRBV6-6, TRBJ2-5)
CASSPGGGLEETQYF

SEQ ID NO: 508007 - protein, 14 aa, Homo sapiens
  CDR3 for alpha chain variable domain of TCR clone 254004 (TRAV20, TRAJ36)
CAVQAGTGANNLFF

SEQ ID NO: 508008 - protein, 17 aa, Homo sapiens
  CDR3 for beta chain variable domain of TCR clone 254004 (TRBV15, TRBJ1-5)
CATSRAPPGTRNQPQHF

SEQ ID NO: 508009 - protein, 15 aa, Homo sapiens
  CDR3 for alpha chain variable domain of TCR clone 254005 (TRAV17, TRAJ23)
CATDAEDNQGGKLIF

SEQ ID NO: 508010 - protein, 13 aa, Homo sapiens
  CDR3 for beta chain variable domain of TCR clone 254005 (TRBV12-4, TRBJ1-2)
CASSLRQGKGYTF

SEQ ID NO: 508011 - protein, 16 aa, Homo sapiens
  CDR3 for alpha chain variable domain of TCR clone 254006 (TRAV30, TRAJ24)
CGTEIVDADSWGKFQF

SEQ ID NO: 508012 - protein, 17 aa, Homo sapiens
  CDR3 for beta chain variable domain of TCR clone 254006 (TRBV20-1, TRBJ2-1)
CGASSSGLAGSYNEQFF

SEQ ID NO: 508013 - protein, 16 aa, Homo sapiens
  CDR3 for alpha chain variable domain of TCR clone 254007 (TRAV3, TRAJ37)
CAVRGKWSGNTGKLIF

SEQ ID NO: 508014 - protein, 16 aa, Homo sapiens
  CDR3 for beta chain variable domain of TCR clone 254007 (TRBV12-5, TRBJ2-5)
CASGPRTSGSQETQYF

SEQ ID NO: 508015 - protein, 15 aa, Homo sapiens
  CDR3 for alpha chain variable domain of TCR clone 254008 (TRAV38-2/DV8, TRAJ47)
CAYRSAKGYGNKLVF

SEQ ID NO: 508016 - protein, 18 aa, Homo sapiens
  CDR3 for beta chain variable domain of TCR clone 254008 (TRBV25-1, TRBJ1-2)
CASSGLQNGQGLIFGYTF

SEQ ID NO: 508017 - protein, 15 aa, Homo sapiens
  CDR3 for alpha chain variable domain of TCR clone 254009 (TRAV17, TRAJ23)
CATDAEDNQGGKLIF

SEQ ID NO: 508018 - protein, 15 aa, Homo sapiens
  CDR3 for beta chain variable domain of TCR clone 254009 (TRBV2, TRBJ2-4)
CASSLKTGSSNIQYF

SEQ ID NO: 508019 - protein, 14 aa, Homo sapiens
  CDR3 for alpha chain variable domain of TCR clone 254010 (TRAV8-4, TRAJ4)
CCEPFSGGYNKLIF

SEQ ID NO: 508020 - protein, 12 aa, Homo sapiens
  CDR3 for beta chain variable domain of TCR clone 254010 (TRBV11-2, TRBJ2-2)
CASSLGGGELFF

SEQ ID NO: 508021 - protein, 15 aa, Homo sapiens
  CDR3 for alpha chain variable domain of TCR clone 254011 (TRAV29/DV5, TRAJ42)
CAAKTDGGSQGNLIF

SEQ ID NO: 508022 - protein, 16 aa, Homo sapiens
  CDR3 for beta chain variable domain of TCR clone 254011 (TRBV19, TRBJ2-2)
CASRSPGTGATGELFF

SEQ ID NO: 508023 - protein, 15 aa, Homo sapiens
  CDR3 for alpha chain variable domain of TCR clone 254012 (TRAV16, TRAJ10)
CALEGLTGGGNKLTF

SEQ ID NO: 508024 - protein, 14 aa, Homo sapiens
  CDR3 for beta chain variable domain of TCR clone 254012 (TRBV7-6, TRBJ2-3)
CASSLGTVTDTHYF

SEQ ID NO: 508025 - protein, 13 aa, Homo sapiens
  CDR3 for alpha chain variable domain of TCR clone 254013 (TRAV12-2, TRAJ4)
CAVFSGGFNKLIF

SEQ ID NO: 508026 - protein, 13 aa, Homo sapiens
  CDR3 for beta chain variable domain of TCR clone 254013 (TRBV19, TRBJ1-5)
CASSIDRDQPQHF

SEQ ID NO: 508027 - protein, 12 aa, Homo sapiens
  CDR3 for alpha chain variable domain of TCR clone 254014 (TRAV12-1, TRAJ40)
CVVPSGTYKYIF

SEQ ID NO: 508028 - protein, 15 aa, Homo sapiens
  CDR3 for beta chain variable domain of TCR clone 254014 (TRBV12-4, TRBJ2-1)
CGSSPLSGRNNEQFF

SEQ ID NO: 508029 - protein, 14 aa, Homo sapiens
  CDR3 for alpha chain variable domain of TCR clone 254015 (TRAV20, TRAJ10)
CAVRVEGGGNKLTF

SEQ ID NO: 508030 - protein, 13 aa, Homo sapiens
  CDR3 for beta chain variable domain of TCR clone 254015 (TRBV11-2, TRBJ2-7)
CASSFQGVYEQYF

SEQ ID NO: 508031 - protein, 15 aa, Homo sapiens
  CDR3 for alpha chain variable domain of TCR clone 254016 (TRAV12-2, TRAJ53)
CAVNGGGGSNYKLTF

SEQ ID NO: 508032 - protein, 14 aa, Homo sapiens
  CDR3 for beta chain variable domain of TCR clone 254016 (TRBV15, TRBJ2-5)
CATSMGGSSETQYF

SEQ ID NO: 508033 - protein, 14 aa, Homo sapiens
  CDR3 for alpha chain variable domain of TCR clone 254017 (TRAV12-2, TRAJ44)
CAVNPAGTASKLTF

SEQ ID NO: 508034 - protein, 13 aa, Homo sapiens
  CDR3 for beta chain variable domain of TCR clone 254017 (TRBV20-1, TRBJ1-6)
CNAPLGVGSPLHF

SEQ ID NO: 508035 - protein, 14 aa, Homo sapiens
  CDR3 for alpha chain variable domain of TCR clone 254018 (TRAV8-2, TRAJ4)
CVVSPSGGYNKLIF

SEQ ID NO: 508036 - protein, 13 aa, Homo sapiens
  CDR3 for beta chain variable domain of TCR clone 254018 (TRBV19, TRBJ2-5)
CASSSSGIQTQYF

SEQ ID NO: 508037 - protein, 13 aa, Homo sapiens
  CDR3 for alpha chain variable domain of TCR clone 254019 (TRAV12-2, TRAJ31)
CAVKADNNARLMF

SEQ ID NO: 508038 - protein, 13 aa, Homo sapiens
  CDR3 for beta chain variable domain of TCR clone 254019 (TRBV20-1, TRBJ2-7)
CSAPGLADYEQYF

SEQ ID NO: 508039 - protein, 11 aa, Homo sapiens
  CDR3 for alpha chain variable domain of TCR clone 254020 (TRAV1-2, TRAJ20)
CAVANDYKLGF

SEQ ID NO: 508040 - protein, 13 aa, Homo sapiens
  CDR3 for beta chain variable domain of TCR clone 254020 (TRBV7-3, TRBJ1-1)
CASSQDWGAEAFF

SEQ ID NO: 508041 - protein, 13 aa, Homo sapiens
  CDR3 for alpha chain variable domain of TCR clone 254021 (TRAV20, TRAJ20)
CAVRWVRDYKLSF

SEQ ID NO: 508042 - protein, 11 aa, Homo sapiens
  CDR3 for beta chain variable domain of TCR clone 254021 (TRBV28, TRBJ2-1)
CASRRVNEQFF

SEQ ID NO: 508043 - protein, 17 aa, Homo sapiens
  CDR3 for alpha chain variable domain of TCR clone 254022 (TRAV3, TRAJ6)
CAVRDGPREGGSYIPTF

SEQ ID NO: 508044 - protein, 14 aa, Homo sapiens
  CDR3 for beta chain variable domain of TCR clone 254022 (TRBV20-1, TRBJ2-2)
CSAPDTANTGELFF

SEQ ID NO: 508045 - protein, 16 aa, Homo sapiens
  CDR3 for alpha chain variable domain of TCR clone 254023 (TRAV26-2, TRAJ57)
CILRAVGSGGSEKLVF

SEQ ID NO: 508046 - protein, 13 aa, Homo sapiens
  CDR3 for beta chain variable domain of TCR clone 254023 (TRBV18, TRBJ2-3)
CASSPGVTDTQYF

SEQ ID NO: 508047 - protein, 14 aa, Homo sapiens
  CDR3 for alpha chain variable domain of TCR clone 254024 (TRAV8-1, TRAJ49)
CASSIAYTGNQFYF

SEQ ID NO: 508048 - protein, 19 aa, Homo sapiens
  CDR3 for beta chain variable domain of TCR clone 254024 (TRBV23-1, TRBJ2-3)
TVSLRQQPRSTGSTDTQYF

SEQ ID NO: 508049 - protein, 13 aa, Homo sapiens
  CDR3 for alpha chain variable domain of TCR clone 254025 (TRAV13-2, TRAJ48)
CAEMDFGNEKLTF

SEQ ID NO: 508050 - protein, 16 aa, Homo sapiens
  CDR3 for beta chain variable domain of TCR clone 254025 (TRBV19, TRBJ2-2)
CASRSPGTGATGELFF

SEQ ID NO: 508051 - protein, 14 aa, Homo sapiens
  CDR3 for alpha chain variable domain of TCR clone 254026 (TRAV12-2, TRAJ40)
CAVKIPSGTYKYIF

SEQ ID NO: 508052 - protein, 17 aa, Homo sapiens
  CDR3 for beta chain variable domain of TCR clone 254026 (TRBV7-2, TRBJ2-2)
CASSLALGGWNTGELFF

SEQ ID NO: 508053 - protein, 13 aa, Homo sapiens
  CDR3 for alpha chain variable domain of TCR clone 254027 (TRAV12-3, TRAJ53)
CAMRGGSNYKLTF

SEQ ID NO: 508054 - protein, 15 aa, Homo sapiens
  CDR3 for beta chain variable domain of TCR clone 254027 (TRBV2, TRBJ2-1)
CATQTRLVMIGEQFF

SEQ ID NO: 508055 - protein, 15 aa, Homo sapiens
  CDR3 for alpha chain variable domain of TCR clone 254028 (TRAV25, TRAJ53)
CPTSNSGGSNYKLTF

SEQ ID NO: 508056 - protein, 16 aa, Homo sapiens
  CDR3 for beta chain variable domain of TCR clone 254028 (TRBV12-5, TRBJ2-5)
CASGPRTSENQETQYF

SEQ ID NO: 508057 - protein, 13 aa, Homo sapiens
  CDR3 for alpha chain variable domain of TCR clone 254029 (TRAV13-2, TRAJ5)
CAVMDTGRRALTF

SEQ ID NO: 508058 - protein, 14 aa, Homo sapiens
  CDR3 for beta chain variable domain of TCR clone 254029 (TRBV7-9, TRBJ2-1)
CASSDNSGYNEQFF

SEQ ID NO: 508059 - protein, 16 aa, Homo sapiens
  CDR3 for alpha chain variable domain of TCR clone 254030 (TRAV26-1, TRAJ52)
CIVSNAGDTSYGKLTF

SEQ ID NO: 508060 - protein, 16 aa, Homo sapiens
  CDR3 for beta chain variable domain of TCR clone 254030 (TRBV5-1, TRBJ2-1)
CASSLEGRGLYNEQFF

SEQ ID NO: 508061 - protein, 16 aa, Homo sapiens
  CDR3 for alpha chain variable domain of TCR clone 254031 (TRAV16, TRAJ42)
CALSGLLGGSQGNIIL

SEQ ID NO: 508062 - protein, 15 aa, Homo sapiens
  CDR3 for beta chain variable domain of TCR clone 254031 (TRBV5-1, TRBJ2-1)
CASSPGGLAGNEQFF

SEQ ID NO: 508063 - protein, 14 aa, Homo sapiens
  CDR3 for alpha chain variable domain of TCR clone 254032 (TRAV1-2, TRAJ16)
CAVNRFSDGQKLLF

SEQ ID NO: 508064 - protein, 14 aa, Homo sapiens
  CDR3 for beta chain variable domain of TCR clone 254032 (TRBV7-8, TRBJ2-3)
CASSVEAGTDTQYF

SEQ ID NO: 508065 - protein, 13 aa, Homo sapiens
  CDR3 for alpha chain variable domain of TCR clone 254033 (TRAV16, TRAJ4)
CAPFSGGYNKMIF

SEQ ID NO: 508066 - protein, 14 aa, Homo sapiens
  CDR3 for beta chain variable domain of TCR clone 254033 (TRBV19, TRBJ2-7)
CASSMGQGAIEQYF

SEQ ID NO: 508067 - protein, 15 aa, Homo sapiens
  CDR3 for alpha chain variable domain of TCR clone 254034 (TRAV23/DV6, TRAJ45)
CAAKNGGGGADGLTF

SEQ ID NO: 508068 - protein, 13 aa, Homo sapiens
  CDR3 for beta chain variable domain of TCR clone 254034 (TRBV20-1, TRBJ1-1)
CSARGGGNTEACF

SEQ ID NO: 508069 - protein, 11 aa, Homo sapiens
  CDR3 for alpha chain variable domain of TCR clone 254035 (TRAV21, TRAJ11)
CAVNGYSTLTF

SEQ ID NO: 508070 - protein, 15 aa, Homo sapiens
  CDR3 for beta chain variable domain of TCR clone 254035 (TRBV11-2, TRBJ2-1)
CASSLGTSGLNEQFF

SEQ ID NO: 508071 - protein, 13 aa, Homo sapiens
  CDR3 for alpha chain variable domain of TCR clone 254036 (TRAV12-2, TRAJ10)
CAVPTGGGNKLTF

SEQ ID NO: 508072 - protein, 15 aa, Homo sapiens
  CDR3 for beta chain variable domain of TCR clone 254036 (TRBV7-2, TRBJ2-7)
CASSLKGALTYEQYF

SEQ ID NO: 508073 - protein, 11 aa, Homo sapiens
  CDR3 for alpha chain variable domain of TCR clone 254037 (TRAV23/DV6, TRAJ58)
CAARLLRGETS

SEQ ID NO: 508074 - protein, 12 aa, Homo sapiens
  CDR3 for beta chain variable domain of TCR clone 254037 (TRBV19, TRBJ1-1)
CASSLSDTEAFF

SEQ ID NO: 508075 - protein, 13 aa, Homo sapiens
  CDR3 for alpha chain variable domain of TCR clone 254038 (TRAV17, TRAJ5)
CALRGTGRRALTF

SEQ ID NO: 508076 - protein, 16 aa, Homo sapiens
  CDR3 for beta chain variable domain of TCR clone 254038 (TRBV19, TRBJ2-2)
CASRSPGTGATGELFF

SEQ ID NO: 508077 - protein, 16 aa, Homo sapiens
  CDR3 for alpha chain variable domain of TCR clone 254039 (TRAV20, TRAJ10)
CAVLRGLTGCGNKLTF

SEQ ID NO: 508078 - protein, 14 aa, Homo sapiens
  CDR3 for beta chain variable domain of TCR clone 254039 (TRBV19, TRBJ1-5)
CASRAPDSFLSQHF

SEQ ID NO: 508079 - protein, 14 aa, Homo sapiens
  CDR3 for alpha chain variable domain of TCR clone 254040 (TRAV23/DV6, TRAJ13)
CATSETGGYQKVTF

SEQ ID NO: 508080 - protein, 13 aa, Homo sapiens
  CDR3 for beta chain variable domain of TCR clone 254040 (TRBV29-1, TRBJ2-1)
CSVEGGRVNEQFF

SEQ ID NO: 508081 - protein, 15 aa, Homo sapiens
  CDR3 for alpha chain variable domain of TCR clone 254041 (TRAV26-1, TRAJ29)
CIVRVEGSGNTPLVC

SEQ ID NO: 508082 - protein, 15 aa, Homo sapiens
  CDR3 for beta chain variable domain of TCR clone 254041 (TRBV7-9, TRBJ1-5)
CASSQGHQPIQPQHF

SEQ ID NO: 508083 - protein, 16 aa, Homo sapiens
  CDR3 for alpha chain variable domain of TCR clone 254042 (TRAV30, TRAJ24)
CGTEIVDADSWGKFQF

SEQ ID NO: 508084 - protein, 13 aa, Homo sapiens
  CDR3 for beta chain variable domain of TCR clone 254042 (TRBV2, TRBJ1-1)
CASSVSGYTEAFF

SEQ ID NO: 508085 - protein, 13 aa, Homo sapiens
  CDR3 for alpha chain variable domain of TCR clone 254043 (TRAV30, TRAJ49)
CGTESQPVTSTIL

SEQ ID NO: 508086 - protein, 11 aa, Homo sapiens
  CDR3 for beta chain variable domain of TCR clone 254043 (TRBV2, TRBJ1-1)
CASREGTEAFF

SEQ ID NO: 508087 - protein, 18 aa, Homo sapiens
  CDR3 for alpha chain variable domain of TCR clone 254044 (TRAV8-6, TRAJ52)
CAVSRANAGGTSYGKLTF

SEQ ID NO: 508088 - protein, 16 aa, Homo sapiens
  CDR3 for beta chain variable domain of TCR clone 254044 (TRBV4-2, TRBJ2-1)
CASSQETATPYNEQFF

SEQ ID NO: 508089 - protein, 13 aa, Homo sapiens
  CDR3 for alpha chain variable domain of TCR clone 254045 (TRAV16, TRAJ28)
CALTGAGSYQLTF

SEQ ID NO: 508090 - protein, 13 aa, Homo sapiens
  CDR3 for beta chain variable domain of TCR clone 254045 (TRBV12-5, TRBJ2-3)
CASGDRQSDTQYF

SEQ ID NO: 508091 - protein, 14 aa, Homo sapiens
  CDR3 for alpha chain variable domain of TCR clone 254046 (TRAV1-2, TRAJ8)
CAVREDTGFQKLVF

SEQ ID NO: 508092 - protein, 10 aa, Homo sapiens
  CDR3 for beta chain variable domain of TCR clone 254046 (TRBV29-1, TRBJ2-3)
TRGGRDTQYF

SEQ ID NO: 508093 - protein, 11 aa, Homo sapiens
  CDR3 for alpha chain variable domain of TCR clone 254047 (TRAV39, TRAJ33)
CAVDPWIATIR

SEQ ID NO: 508094 - protein, 16 aa, Homo sapiens
  CDR3 for beta chain variable domain of TCR clone 254047 (TRBV18, TRBJ1-4)
CASSPLVGDRAEKLFF

SEQ ID NO: 508095 - protein, 10 aa, Homo sapiens
  CDR3 for alpha chain variable domain of TCR clone 254048 (TRAV29/DV5, TRAJ48)
CAAGGEKLTF

SEQ ID NO: 508096 - protein, 15 aa, Homo sapiens
  CDR3 for beta chain variable domain of TCR clone 254048 (TRBV20-1, TRBJ2-7)
CSARDRVSGMDEQYF

SEQ ID NO: 508097 - protein, 11 aa, Homo sapiens
  CDR3 for alpha chain variable domain of TCR clone 254049 (TRAV2, TRAJ13)
CASGGYQKVTF

SEQ ID NO: 508098 - protein, 16 aa, Homo sapiens
  CDR3 for beta chain variable domain of TCR clone 254049 (TRBV19, TRBJ2-1)
CASSKAGPSSYNEQFF

SEQ ID NO: 508099 - protein, 12 aa, Homo sapiens
  CDR3 for alpha chain variable domain of TCR clone 254050 (TRAV27, TRAJ35)
CAGADFGNVLHC

SEQ ID NO: 508100 - protein, 14 aa, Homo sapiens
  CDR3 for beta chain variable domain of TCR clone 254050 (TRBV6-1, TRBJ1-3)
CASVQGVGGNTIYF

SEQ ID NO: 508101 - protein, 14 aa, Homo sapiens
  CDR3 for alpha chain variable domain of TCR clone 254051 (TRAV14/DV4, TRAJ32)
SNVLPLTPPNKLIF

SEQ ID NO: 508102 - protein, 17 aa, Homo sapiens
  CDR3 for beta chain variable domain of TCR clone 254051 (TRBV20-1, TRBJ2-1)
CSASSSGLAGSYNEQFF

SEQ ID NO: 508103 - protein, 11 aa, Homo sapiens
  CDR3 for alpha chain variable domain of TCR clone 254052 (TRAV21, TRAJ11)
CAVNGYSTLTF

SEQ ID NO: 508104 - protein, 17 aa, Homo sapiens
  CDR3 for beta chain variable domain of TCR clone 254052 (TRBV6-3, TRBJ2-7)
CTSVPAVPPGQFYEQYF

SEQ ID NO: 508105 - protein, 14 aa, Homo sapiens
  CDR3 for alpha chain variable domain of TCR clone 254053 (TRAV17, TRAJ53)
CATDAGGSNYKLPF

SEQ ID NO: 508106 - protein, 16 aa, Homo sapiens
  CDR3 for beta chain variable domain of TCR clone 254053 (TRBV4-1, TRBJ1-1)
CASSQDAGMGNTEAFF

SEQ ID NO: 508107 - protein, 15 aa, Homo sapiens
  CDR3 for alpha chain variable domain of TCR clone 254054 (TRAV12-1, TRAJ45)
CVVLSGGGGADGLTF

SEQ ID NO: 508108 - protein, 15 aa, Homo sapiens
  CDR3 for beta chain variable domain of TCR clone 254054 (TRBV15, TRBJ2-3)
CATSRDPRGTDTQYF

SEQ ID NO: 508109 - protein, 16 aa, Homo sapiens
  CDR3 for alpha chain variable domain of TCR clone 254055 (TRAV20, TRAJ10)
CAVLRGLTGGGNKLTF

SEQ ID NO: 508110 - protein, 13 aa, Homo sapiens
  CDR3 for beta chain variable domain of TCR clone 254055 (TRBV7-2, TRBJ2-2)
CASSSVRAGELFF

SEQ ID NO: 508111 - protein, 16 aa, Homo sapiens
  CDR3 for alpha chain variable domain of TCR clone 254056 (TRAV4, TRAJ8)
CLVGDSGNTGFQKLVC

SEQ ID NO: 508112 - protein, 15 aa, Homo sapiens
  CDR3 for beta chain variable domain of TCR clone 254056 (TRBV15, TRBJ1-2)
CATSRVRASGSGYTF

SEQ ID NO: 508113 - protein, 16 aa, Homo sapiens
  CDR3 for alpha chain variable domain of TCR clone 254057 (TRAV3, TRAJ10)
CAVRDMRAGGGNKLTF

SEQ ID NO: 508114 - protein, 15 aa, Homo sapiens
  CDR3 for beta chain variable domain of TCR clone 254057 (TRBV7-8, TRBJ2-7)
CASSLERAGSYEQYF

SEQ ID NO: 508115 - protein, 14 aa, Homo sapiens
  CDR3 for alpha chain variable domain of TCR clone 254058 (TRAV29/DV5, TRAJ44)
CAASALGTASKLTC

SEQ ID NO: 508116 - protein, 13 aa, Homo sapiens
  CDR3 for beta chain variable domain of TCR clone 254058 (TRBV29-1, TRBJ2-7)
CSVKRGGNYEQYF

SEQ ID NO: 508117 - protein, 16 aa, Homo sapiens
  CDR3 for alpha chain variable domain of TCR clone 254059 (TRAV30, TRAJ24)
CGTEIVDADSWGKFPF

SEQ ID NO: 508118 - protein, 14 aa, Homo sapiens
  CDR3 for beta chain variable domain of TCR clone 254059 (TRBV7-2, TRBJ1-1)
CASSFLTGTTEAFF

SEQ ID NO: 508119 - protein, 17 aa, Homo sapiens
  CDR3 for alpha chain variable domain of TCR clone 254060 (TRAV13-1, TRAJ28)
CAAIPPYSGAGSYQLPF

SEQ ID NO: 508120 - protein, 12 aa, Homo sapiens
  CDR3 for beta chain variable domain of TCR clone 254060 (TRBV11-2, TRBJ2-2)
CASSLPTGELFF

SEQ ID NO: 508121 - protein, 14 aa, Homo sapiens
  CDR3 for alpha chain variable domain of TCR clone 254061 (TRAV12-2, TRAJ5)
CAVNRSKGRRALTC

SEQ ID NO: 508122 - protein, 15 aa, Homo sapiens
  CDR3 for beta chain variable domain of TCR clone 254061 (TRBV20-1, TRBJ2-7)
CSARDRVSGMDEQYF

SEQ ID NO: 508123 - protein, 14 aa, Homo sapiens
  CDR3 for alpha chain variable domain of TCR clone 254062 (TRAV13-1, TRAJ44)
CAAKATGTAGKLTF

SEQ ID NO: 508124 - protein, 16 aa, Homo sapiens
  CDR3 for beta chain variable domain of TCR clone 254062 (TRBV11-1, TRBJ2-1)
CASSFWGGSSYNEQFF

SEQ ID NO: 508125 - protein, 15 aa, Homo sapiens
  CDR3 for alpha chain variable domain of TCR clone 254063 (TRAV17, TRAJ37)
CATDGGSSTTGKLTF

SEQ ID NO: 508126 - protein, 15 aa, Homo sapiens
  CDR3 for beta chain variable domain of TCR clone 254063 (TRBV28, TRBJ2-5)
CASSSGRTIQETQYF

SEQ ID NO: 508127 - protein, 12 aa, Homo sapiens
  CDR3 for alpha chain variable domain of TCR clone 254064 (TRAV21, TRAJ11)
CAATSGYSTLTF

SEQ ID NO: 508128 - protein, 15 aa, Homo sapiens
  CDR3 for beta chain variable domain of TCR clone 254064 (TRBV11-3, TRBJ2-2)
CASSSDRVNAGELFF

SEQ ID NO: 508129 - protein, 12 aa, Homo sapiens
  CDR3 for alpha chain variable domain of TCR clone 254065 (TRAV8-3, TRAJ26)
CAGDNYGQNFVF

SEQ ID NO: 508130 - protein, 15 aa, Homo sapiens
  CDR3 for beta chain variable domain of TCR clone 254065 (TRBV9, TRBJ2-1)
CASSLAGSSYYEQFF

SEQ ID NO: 508131 - protein, 14 aa, Homo sapiens
  CDR3 for alpha chain variable domain of TCR clone 254066 (TRAV39, TRAJ32)
CVDMEGGATNKLIF

SEQ ID NO: 508132 - protein, 17 aa, Homo sapiens
  CDR3 for beta chain variable domain of TCR clone 254066 (TRBV7-2, TRBJ1-4)
CASSFKAGPTTNEKLFF

SEQ ID NO: 508133 - protein, 15 aa, Homo sapiens
  CDR3 for alpha chain variable domain of TCR clone 254067 (TRAV2, TRAJ32)
CAVADYGGATNKLIF

SEQ ID NO: 508134 - protein, 15 aa, Homo sapiens
  CDR3 for beta chain variable domain of TCR clone 254067 (TRBV7-7, TRBJ2-5)
CASSQLERAEETQYF

SEQ ID NO: 508135 - protein, 14 aa, Homo sapiens
  CDR3 for alpha chain variable domain of TCR clone 254068 (TRAV12-2, TRAJ13)
CAVKKTGGYQKVTF

SEQ ID NO: 508136 - protein, 16 aa, Homo sapiens
  CDR3 for beta chain variable domain of TCR clone 254068 (TRBV4-2, TRBJ2-1)
CASSQDGTGGYNEQFF

SEQ ID NO: 508137 - protein, 11 aa, Homo sapiens
  CDR3 for alpha chain variable domain of TCR clone 254069 (TRAV13-2, TRAJ20)
CADSNDYNLSF

SEQ ID NO: 508138 - protein, 12 aa, Homo sapiens
  CDR3 for beta chain variable domain of TCR clone 254069 (TRBV11-2, TRBJ2-2)
CASSLGGGELFF

SEQ ID NO: 508139 - protein, 15 aa, Homo sapiens
  CDR3 for alpha chain variable domain of TCR clone 254070 (TRAV1-2, TRAJ30)
CDVRPHGNRDDKIIF

SEQ ID NO: 508140 - protein, 13 aa, Homo sapiens
  CDR3 for beta chain variable domain of TCR clone 254070 (TRBV4-1, TRBJ2-7)
CASSQGQAYEQYF

SEQ ID NO: 508141 - protein, 11 aa, Homo sapiens
  CDR3 for alpha chain variable domain of TCR clone 254071 (TRAV21, TRAJ9)
CAVPGGFKTIF

SEQ ID NO: 508142 - protein, 12 aa, Homo sapiens
  CDR3 for beta chain variable domain of TCR clone 254071 (TRBV20-1, TRBJ2-3)
CSARVSTDTQYF

SEQ ID NO: 508143 - protein, 12 aa, Homo sapiens
  CDR3 for alpha chain variable domain of TCR clone 254072 (TRAV21, TRAJ33)
CAKMDSNYELIW

SEQ ID NO: 508144 - protein, 14 aa, Homo sapiens
  CDR3 for beta chain variable domain of TCR clone 254072 (TRBV2, TRBJ2-7)
CASSLTSGGYEQYF

SEQ ID NO: 508145 - protein, 15 aa, Homo sapiens
  CDR3 for alpha chain variable domain of TCR clone 254073 (TRAV20, TRAJ53)
CAVQASGGSNYKLTF

SEQ ID NO: 508146 - protein, 12 aa, Homo sapiens
  CDR3 for beta chain variable domain of TCR clone 254073 (TRBV7-6, TRBJ2-5)
CASSLSQETQYF

SEQ ID NO: 508147 - protein, 14 aa, Homo sapiens
  CDR3 for alpha chain variable domain of TCR clone 254074 (TRAV3, TRAJ9)
CAVRGNTEGFKTIF

SEQ ID NO: 508148 - protein, 14 aa, Homo sapiens
  CDR3 for beta chain variable domain of TCR clone 254074 (TRBV15, TRBJ2-1)
CATSGVEDYNEQFF

SEQ ID NO: 508149 - protein, 12 aa, Homo sapiens
  CDR3 for alpha chain variable domain of TCR clone 254075 (TRAV8-3, TRAJ40)
CAVTSGTYKYIF

SEQ ID NO: 508150 - protein, 15 aa, Homo sapiens
  CDR3 for beta chain variable domain of TCR clone 254075 (TRBV7-2, TRBJ2-1)
CASSSGLAGGNEQFF

SEQ ID NO: 508151 - protein, 13 aa, Homo sapiens
  CDR3 for alpha chain variable domain of TCR clone 254076 (TRAV21, TRAJ27)
CAARPGTAGKSTF

SEQ ID NO: 508152 - protein, 14 aa, Homo sapiens
  CDR3 for beta chain variable domain of TCR clone 254076 (TRBV7-6, TRBJ2-3)
CASSLGTVTDTQYC

SEQ ID NO: 508153 - protein, 13 aa, Homo sapiens
  CDR3 for alpha chain variable domain of TCR clone 254077 (TRAV17, TRAJ26)
CATVDNYGQNFVF

SEQ ID NO: 508154 - protein, 16 aa, Homo sapiens
  CDR3 for beta chain variable domain of TCR clone 254077 (TRBV2, TRBJ2-1)
CVSSVGGSLSYNEQFF

SEQ ID NO: 508155 - protein, 15 aa, Homo sapiens
  CDR3 for alpha chain variable domain of TCR clone 254078 (TRAV2, TRAJ9)
RAVEDRGTGGFKTIF

SEQ ID NO: 508156 - protein, 13 aa, Homo sapiens
  CDR3 for beta chain variable domain of TCR clone 254078 (TRBV19, TRBJ1-2)
CASSVPGQDGYTF

SEQ ID NO: 508157 - protein, 14 aa, Homo sapiens
  CDR3 for alpha chain variable domain of TCR clone 254079 (TRAV29/DV5, TRAJ49)
CAASAQNTGNQFYF

SEQ ID NO: 508158 - protein, 16 aa, Homo sapiens
  CDR3 for beta chain variable domain of TCR clone 254079 (TRBV2, TRBJ1-1)
CASSPPNRGMNTEAFF

SEQ ID NO: 508159 - protein, 14 aa, Homo sapiens
  CDR3 for alpha chain variable domain of TCR clone 254080 (TRAV1-2, TRAJ8)
CAVREDTGFQKLLF

SEQ ID NO: 508160 - protein, 15 aa, Homo sapiens
  CDR3 for beta chain variable domain of TCR clone 254080 (TRBV7-2, TRBJ2-1)
CASSSGLAGGNEQFF

SEQ ID NO: 508161 - protein, 16 aa, Homo sapiens
  CDR3 for alpha chain variable domain of TCR clone 254081 (TRAV8-3, TRAJ42)
CDVGEGNGGSQGNLIF

SEQ ID NO: 508162 - protein, 14 aa, Homo sapiens
  CDR3 for beta chain variable domain of TCR clone 254081 (TRBV7-2, TRBJ2-1)
CASSRGGARNEQFF

SEQ ID NO: 508163 - protein, 13 aa, Homo sapiens
  CDR3 for alpha chain variable domain of TCR clone 254082 (TRAV21, TRAJ27)
CAARPGNAGKSTF

SEQ ID NO: 508164 - protein, 15 aa, Homo sapiens
  CDR3 for beta chain variable domain of TCR clone 254082 (TRBV11-3, TRBJ2-7)
CVSSPGPASSYEQYF

SEQ ID NO: 508165 - protein, 14 aa, Homo sapiens
  CDR3 for alpha chain variable domain of TCR clone 254083 (TRAV3, TRAJ9)
CAVRGNTGGFKTIF

SEQ ID NO: 508166 - protein, 14 aa, Homo sapiens
  CDR3 for beta chain variable domain of TCR clone 254083 (TRBV15, TRBJ2-1)
CAASGVEDYNEQFF

SEQ ID NO: 508167 - protein, 17 aa, Homo sapiens
  CDR3 for alpha chain variable domain of TCR clone 254084 (TRAV12-3, TRAJ6)
CAMSARGGAGGSYIPTF

SEQ ID NO: 508168 - protein, 12 aa, Homo sapiens
  CDR3 for beta chain variable domain of TCR clone 254084 (TRBV12-4, TRBJ2-3)
CASTTLPDTQYF

SEQ ID NO: 508169 - protein, 13 aa, Homo sapiens
  CDR3 for alpha chain variable domain of TCR clone 254085 (TRAV21, TRAJ37)
CAVSSGNTCKLIF

SEQ ID NO: 508170 - protein, 13 aa, Homo sapiens
  CDR3 for beta chain variable domain of TCR clone 254085 (TRBV7-6, TRBJ2-3)
CASSLRSDNTQYF

SEQ ID NO: 508171 - protein, 15 aa, Homo sapiens
  CDR3 for alpha chain variable domain of TCR clone 254086 (TRAV25, TRAJ52)
SAGRPGGTSYGKLTF

SEQ ID NO: 508172 - protein, 17 aa, Homo sapiens
  CDR3 for beta chain variable domain of TCR clone 254086 (TRBV7-8, TRBJ2-6)
CASSAGTGGAGSNVLTF

SEQ ID NO: 508173 - protein, 12 aa, Homo sapiens
  CDR3 for alpha chain variable domain of TCR clone 254087 (TRAV17, TRAJ4)
CATDGGYNKLIF

SEQ ID NO: 508174 - protein, 13 aa, Homo sapiens
  CDR3 for beta chain variable domain of TCR clone 254087 (TRBV29-1, TRBJ2-2)
CSTTGVITGELFF

SEQ ID NO: 508175 - protein, 14 aa, Homo sapiens
  CDR3 for alpha chain variable domain of TCR clone 254088 (TRAV13-1, TRAJ35)
CAANKGGFGNVLHC

SEQ ID NO: 508176 - protein, 14 aa, Homo sapiens
  CDR3 for beta chain variable domain of TCR clone 254088 (TRBV25-1, TRBJ1-1)
CASTHLGGNTEAFF

SEQ ID NO: 508177 - protein, 22 aa, Homo sapiens
  CDR3 for alpha chain variable domain of TCR clone 254089 (TRAV2, TRAJ38)
CAVEDFPNAGNNHIQNPDPAVY

SEQ ID NO: 508178 - protein, 14 aa, Homo sapiens
  CDR3 for beta chain variable domain of TCR clone 254089 (TRBV29-1, TRBJ1-4)
CSVSGRQGGEKMFF

SEQ ID NO: 508179 - protein, 15 aa, Homo sapiens
  CDR3 for alpha chain variable domain of TCR clone 254090 (TRAV26-2, TRAJ13)
CILRDLSGGYQKVTF

SEQ ID NO: 508180 - protein, 11 aa, Homo sapiens
  CDR3 for beta chain variable domain of TCR clone 254090 (TRBV7-9, TRBJ2-5)
CASSLSATQYC

SEQ ID NO: 508181 - protein, 14 aa, Homo sapiens
  CDR3 for alpha chain variable domain of TCR clone 254091 (TRAV30, TRAJ26)
CGTEIVSYGQNFVF

SEQ ID NO: 508182 - protein, 15 aa, Homo sapiens
  CDR3 for beta chain variable domain of TCR clone 254091 (TRBV5-4, TRBJ2-7)
CASSPSGSASYEQYF

SEQ ID NO: 508183 - protein, 14 aa, Homo sapiens
  CDR3 for alpha chain variable domain of TCR clone 254092 (TRAV30, TRAJ33)
CGTVAPRSNYQLIW

SEQ ID NO: 508184 - protein, 18 aa, Homo sapiens
  CDR3 for beta chain variable domain of TCR clone 254092 (TRBV11-2, TRBJ2-3)
CASSLGGASRVAPNTQYF

SEQ ID NO: 508185 - protein, 12 aa, Homo sapiens
  CDR3 for alpha chain variable domain of TCR clone 254093 (TRAV17, TRAJ39)
CATGAAGNMLTF

SEQ ID NO: 508186 - protein, 16 aa, Homo sapiens
  CDR3 for beta chain variable domain of TCR clone 254093 (TRBV13, TRBJ2-2)
CASSPRTGEHTGELFF

SEQ ID NO: 508187 - protein, 16 aa, Homo sapiens
  CDR3 for alpha chain variable domain of TCR clone 254094 (TRAV21, TRAJ52)
CAVTSAGGTSYGKLTF

SEQ ID NO: 508188 - protein, 13 aa, Homo sapiens
  CDR3 for beta chain variable domain of TCR clone 254094 (TRBV20-1, TRBJ2-3)
CSARLAGADTQYF

SEQ ID NO: 508189 - protein, 13 aa, Homo sapiens
  CDR3 for alpha chain variable domain of TCR clone 254095 (TRAV21, TRAJ3)
CCEPYSSASKIIF

SEQ ID NO: 508190 - protein, 15 aa, Homo sapiens
  CDR3 for beta chain variable domain of TCR clone 254095 (TRBV20-1, TRBJ2-7)
CSARDRVSGMDEQYF

SEQ ID NO: 508191 - protein, 10 aa, Homo sapiens
  CDR3 for alpha chain variable domain of TCR clone 254096 (TRAV36/DV7, TRAJ48)
CAVGNEKLTF

SEQ ID NO: 508192 - protein, 16 aa, Homo sapiens
  CDR3 for beta chain variable domain of TCR clone 254096 (TRBV15, TRBJ2-3)
CATRLSGGRGADTQYF

SEQ ID NO: 508193 - protein, 16 aa, Homo sapiens
  CDR3 for alpha chain variable domain of TCR clone 254097 (TRAV21, TRAJ37)
CAVRPRGSSNTGQLIF

SEQ ID NO: 508194 - protein, 13 aa, Homo sapiens
  CDR3 for beta chain variable domain of TCR clone 254097 (TRBV20-1, TRBJ2-2)
CSALSGGAGELFF

SEQ ID NO: 508195 - protein, 14 aa, Homo sapiens
  CDR3 for alpha chain variable domain of TCR clone 254098 (TRAV12-3, TRAJ10)
SHLPLTGGGNKLTF

SEQ ID NO: 508196 - protein, 17 aa, Homo sapiens
  CDR3 for beta chain variable domain of TCR clone 254098 (TRBV4-2, TRBJ2-2)
CASSQEPGGINTGELFF

SEQ ID NO: 508197 - protein, 14 aa, Homo sapiens
  CDR3 for alpha chain variable domain of TCR clone 254099 (TRAV8-3, TRAJ4)
CAVGAAGGYNKLIF

SEQ ID NO: 508198 - protein, 16 aa, Homo sapiens
  CDR3 for beta chain variable domain of TCR clone 254099 (TRBV5-1, TRBJ2-7)
CASSLEGLAGLYEQYF

SEQ ID NO: 508199 - protein, 16 aa, Homo sapiens
  CDR3 for alpha chain variable domain of TCR clone 254100 (TRAV12-3, TRAJ10)
CAMKKGITGGGNKLTF

SEQ ID NO: 508200 - protein, 16 aa, Homo sapiens
  CDR3 for beta chain variable domain of TCR clone 254100 (TRBV20-1, TRBJ1-4)
CSAPGQGLLTNEKLFF

SEQ ID NO: 508201 - protein, 12 aa, Homo sapiens
  CDR3 for alpha chain variable domain of TCR clone 254101 (TRAV26-1, TRAJ43)
CIVRPRGDDMRF

SEQ ID NO: 508202 - protein, 16 aa, Homo sapiens
  CDR3 for beta chain variable domain of TCR clone 254101 (TRBV3-1, TRBJ2-1)
CASSRGGRRSFDEQFF

SEQ ID NO: 508203 - protein, 12 aa, Homo sapiens
  CDR3 for alpha chain variable domain of TCR clone 254102 (TRAV1-2, TRAJ9)
CAGYTGGFKTIF

SEQ ID NO: 508204 - protein, 15 aa, Homo sapiens
  CDR3 for beta chain variable domain of TCR clone 254102 (TRBV11-2, TRBJ2-1)
CASSPAGQSLNEPFF

SEQ ID NO: 508205 - protein, 11 aa, Homo sapiens
  CDR3 for alpha chain variable domain of TCR clone 254103 (TRAV2, TRAJ4)
CAAGVYNKLIF

SEQ ID NO: 508206 - protein, 13 aa, Homo sapiens
  CDR3 for beta chain variable domain of TCR clone 254103 (TRBV20-1, TRBJ1-1)
CSARVGGNTEAFF

SEQ ID NO: 508207 - protein, 12 aa, Homo sapiens
  CDR3 for alpha chain variable domain of TCR clone 254104 (TRAV1-2, TRAJ33)
CAALDSNYQLIW

SEQ ID NO: 508208 - protein, 14 aa, Homo sapiens
  CDR3 for beta chain variable domain of TCR clone 254104 (TRBV15, TRBJ2-3)
CATRSGTSTDTQYF

SEQ ID NO: 508209 - protein, 16 aa, Homo sapiens
  CDR3 for alpha chain variable domain of TCR clone 254105 (TRAV3, TRAJ37)
CAVRGKGSGNTGKLIF

SEQ ID NO: 508210 - protein, 13 aa, Homo sapiens
  CDR3 for beta chain variable domain of TCR clone 254105 (TRBV14, TRBJ2-7)
CASSQAGRYEQYF

SEQ ID NO: 508211 - protein, 16 aa, Homo sapiens
  CDR3 for alpha chain variable domain of TCR clone 254106 (TRAV8-2, TRAJ7)
CVVSEGPYYGNNRFAF

SEQ ID NO: 508212 - protein, 13 aa, Homo sapiens
  CDR3 for beta chain variable domain of TCR clone 254106 (TRBV19, TRBJ2-1)
CASSMYRVNEQFF

SEQ ID NO: 508213 - protein, 15 aa, Homo sapiens
  CDR3 for alpha chain variable domain of TCR clone 254107 (TRAV12-1, TRAJ42)
CVVTRDGGSQGNLIF

SEQ ID NO: 508214 - protein, 11 aa, Homo sapiens
  CDR3 for beta chain variable domain of TCR clone 254107 (TRBV12-4, TRBJ2-3)
CASTATDTQYF

SEQ ID NO: 508215 - protein, 13 aa, Homo sapiens
  CDR3 for alpha chain variable domain of TCR clone 254108 (TRAV12-2, TRAJ50)
CAVIVTSYDKVIF

SEQ ID NO: 508216 - protein, 15 aa, Homo sapiens
  CDR3 for beta chain variable domain of TCR clone 254108 (TRBV3-1, TRBJ2-5)
CASSANLGGPETQYF

SEQ ID NO: 508217 - protein, 14 aa, Homo sapiens
  CDR3 for alpha chain variable domain of TCR clone 254109 (TRAV8-4, TRAJ54)
CAVSEVLGAQKLVC

SEQ ID NO: 508218 - protein, 15 aa, Homo sapiens
  CDR3 for beta chain variable domain of TCR clone 254109 (TRBV6-1, TRBJ2-6)
CASSSRPSGANVLTF

SEQ ID NO: 508219 - protein, 15 aa, Homo sapiens
  CDR3 for alpha chain variable domain of TCR clone 254110 (TRAV27, TRAJ38)
CAGRFNAGNNRKLIW

SEQ ID NO: 508220 - protein, 13 aa, Homo sapiens
  CDR3 for beta chain variable domain of TCR clone 254110 (TRBV5-1, TRBJ2-1)
CASSLGSYNEQFF

SEQ ID NO: 508221 - protein, 11 aa, Homo sapiens
  CDR3 for alpha chain variable domain of TCR clone 254111 (TRAV27, TRAJ20)
CAGADDYKLSF

SEQ ID NO: 508222 - protein, 12 aa, Homo sapiens
  CDR3 for beta chain variable domain of TCR clone 254111 (TRBV2, TRBJ1-1)
CATQSRGTEAFF

SEQ ID NO: 508223 - protein, 15 aa, Homo sapiens
  CDR3 for alpha chain variable domain of TCR clone 254112 (TRAV34, TRAJ38)
CGADFTPGNNRKLIW

SEQ ID NO: 508224 - protein, 15 aa, Homo sapiens
  CDR3 for beta chain variable domain of TCR clone 254112 (TRBV20-1, TRBJ2-5)
CSATPLTGDQETQYF

SEQ ID NO: 508225 - protein, 12 aa, Homo sapiens
  CDR3 for alpha chain variable domain of TCR clone 254113 (TRAV12-3, TRAJ17)
CAITLTGNKLTF

SEQ ID NO: 508226 - protein, 14 aa, Homo sapiens
  CDR3 for beta chain variable domain of TCR clone 254113 (TRBV7-8, TRBJ2-3)
CASSLEAGTDTQYF

SEQ ID NO: 508227 - protein, 16 aa, Homo sapiens
  CDR3 for alpha chain variable domain of TCR clone 254114 (TRAV12-3, TRAJ53)
CAMSPGSGGSNYKLTF

SEQ ID NO: 508228 - protein, 12 aa, Homo sapiens
  CDR3 for beta chain variable domain of TCR clone 254114 (TRBV7-3, TRBJ1-2)
CASSKKGVPVTF

SEQ ID NO: 508229 - protein, 13 aa, Homo sapiens
  CDR3 for alpha chain variable domain of TCR clone 254115 (TRAV38-2/DV8, TRAJ57)
CAYTQGGSEKLVF

SEQ ID NO: 508230 - protein, 18 aa, Homo sapiens
  CDR3 for beta chain variable domain of TCR clone 254115 (TRBV5-5, TRBJ1-5)
RASSLRQVKGSSNQPQHF

SEQ ID NO: 508231 - protein, 14 aa, Homo sapiens
  CDR3 for alpha chain variable domain of TCR clone 254116 (TRAV14/DV4, TRAJ23)
CAMRENNQGGKLIF

SEQ ID NO: 508232 - protein, 15 aa, Homo sapiens
  CDR3 for beta chain variable domain of TCR clone 254116 (TRBV11-2, TRBJ1-2)
CASSLEGVQRNGYTF

SEQ ID NO: 508233 - protein, 14 aa, Homo sapiens
  CDR3 for alpha chain variable domain of TCR clone 254117 (TRAV1-2, TRAJ8)
CAVRADTGFQKLVF

SEQ ID NO: 508234 - protein, 15 aa, Homo sapiens
  CDR3 for beta chain variable domain of TCR clone 254117 (TRBV6-3, TRBJ2-7)
CASSSPGTVFYEQYV

SEQ ID NO: 508235 - protein, 19 aa, Homo sapiens
  CDR3 for alpha chain variable domain of TCR clone 254118 (TRAV26-1, TRAJ52)
CIVRVANNAGGTSYGKLTF

SEQ ID NO: 508236 - protein, 14 aa, Homo sapiens
  CDR3 for beta chain variable domain of TCR clone 254118 (TRBV19, TRBJ1-2)
CASSMGAGSYGYTF

SEQ ID NO: 508237 - protein, 16 aa, Homo sapiens
  CDR3 for alpha chain variable domain of TCR clone 254119 (TRAV30, TRAJ24)
CGTEIVGADSWGKFQF

SEQ ID NO: 508238 - protein, 14 aa, Homo sapiens
  CDR3 for beta chain variable domain of TCR clone 254119 (TRBV7-9, TRBJ2-1)
CASSLASGSNEQFF

SEQ ID NO: 508239 - protein, 20 aa, Homo sapiens
  CDR3 for alpha chain variable domain of TCR clone 254120 (TRAV25, TRAJ21)
TATQTTDVGTYPLSFNKFYF

SEQ ID NO: 508240 - protein, 15 aa, Homo sapiens
  CDR3 for beta chain variable domain of TCR clone 254120 (TRBV27, TRBJ2-1)
CASSNGGGSSNEQFF

SEQ ID NO: 508241 - protein, 12 aa, Homo sapiens
  CDR3 for alpha chain variable domain of TCR clone 254121 (TRAV12-3, TRAJ17)
CAMTLTGNKLTF

SEQ ID NO: 508242 - protein, 14 aa, Homo sapiens
  CDR3 for beta chain variable domain of TCR clone 254121 (TRBV18, TRBJ1-2)
CASSPPGQAYGYTF

SEQ ID NO: 508243 - protein, 17 aa, Homo sapiens
  CDR3 for alpha chain variable domain of TCR clone 254122 (TRAV17, TRAJ7)
CATLGRLAFGKGTQVVV

SEQ ID NO: 508244 - protein, 13 aa, Homo sapiens
  CDR3 for beta chain variable domain of TCR clone 254122 (TRBV12-4, TRBJ2-7)
CASSLERVREQYF

SEQ ID NO: 508245 - protein, 14 aa, Homo sapiens
  CDR3 for alpha chain variable domain of TCR clone 254123 (TRAV17, TRAJ22)
CATSPSRSARQLTF

SEQ ID NO: 508246 - protein, 15 aa, Homo sapiens
  CDR3 for beta chain variable domain of TCR clone 254123 (TRBV4-1, TRBJ2-5)
CASSQWDLYQETQYF

SEQ ID NO: 508247 - protein, 13 aa, Homo sapiens
  CDR3 for alpha chain variable domain of TCR clone 254124 (TRAV21, TRAJ27)
CAALNTNAGKSTC

SEQ ID NO: 508248 - protein, 14 aa, Homo sapiens
  CDR3 for beta chain variable domain of TCR clone 254124 (TRBV27, TRBJ1-1)
CASSLLSGLSEAFF

SEQ ID NO: 508249 - protein, 15 aa, Homo sapiens
  CDR3 for alpha chain variable domain of TCR clone 254125 (TRAV16, TRAJ16)
CALQGGGPDGKKLLF

SEQ ID NO: 508250 - protein, 13 aa, Homo sapiens
  CDR3 for beta chain variable domain of TCR clone 254125 (TRBV12-5, TRBJ2-3)
CASGDRQSDTQYF

SEQ ID NO: 508251 - protein, 15 aa, Homo sapiens
  CDR3 for alpha chain variable domain of TCR clone 254126 (TRAV27, TRAJ38)
CAGRFNAGNNRKLIW

SEQ ID NO: 508252 - protein, 13 aa, Homo sapiens
  CDR3 for beta chain variable domain of TCR clone 254126 (TRBV7-9, TRBJ2-1)
RASSLDVGNEQFF

SEQ ID NO: 508253 - protein, 17 aa, Homo sapiens
  CDR3 for alpha chain variable domain of TCR clone 254127 (TRAV3, TRAJ6)
CAVRDGPRAEGSYRPTF

SEQ ID NO: 508254 - protein, 14 aa, Homo sapiens
  CDR3 for beta chain variable domain of TCR clone 254127 (TRBV7-2, TRBJ2-7)
CASSPKTSFYEQYF

SEQ ID NO: 508255 - protein, 14 aa, Homo sapiens
  CDR3 for alpha chain variable domain of TCR clone 254128 (TRAV12-3, TRAJ57)
CAMTAWGGSEKLVF

SEQ ID NO: 508256 - protein, 14 aa, Homo sapiens
  CDR3 for beta chain variable domain of TCR clone 254128 (TRBV18, TRBJ2-5)
CASSPGVSQETQYF

SEQ ID NO: 508257 - protein, 14 aa, Homo sapiens
  CDR3 for alpha chain variable domain of TCR clone 254129 (TRAV1-2, TRAJ24)
CAVLTTDSWGKFPF

SEQ ID NO: 508258 - protein, 15 aa, Homo sapiens
  CDR3 for beta chain variable domain of TCR clone 254129 (TRBV6-6, TRBJ2-7)
CASSYSYGGSYEQYF

SEQ ID NO: 508259 - protein, 14 aa, Homo sapiens
  CDR3 for alpha chain variable domain of TCR clone 254130 (TRAV12-3, TRAJ6)
CAMSAPGGSYIPTF

SEQ ID NO: 508260 - protein, 13 aa, Homo sapiens
  CDR3 for beta chain variable domain of TCR clone 254130 (TRBV2, TRBJ2-5)
CASSDGIQETQYF

SEQ ID NO: 508261 - protein, 11 aa, Homo sapiens
  CDR3 for alpha chain variable domain of TCR clone 254131 (TRAV12-3, TRAJ27)
CAMANAGKSTF

SEQ ID NO: 508262 - protein, 14 aa, Homo sapiens
  CDR3 for beta chain variable domain of TCR clone 254131 (TRBV20-1, TRBJ2-2)
CSARDRGSTGELFF

SEQ ID NO: 508263 - protein, 13 aa, Homo sapiens
  CDR3 for alpha chain variable domain of TCR clone 254132 (TRAV23/DV6, TRAJ34)
CAAIENNTDKLIF

SEQ ID NO: 508264 - protein, 16 aa, Homo sapiens
  CDR3 for beta chain variable domain of TCR clone 254132 (TRBV28, TRBJ2-1)
CASSSRVRDSYNEQFF

SEQ ID NO: 508265 - protein, 15 aa, Homo sapiens
  CDR3 for alpha chain variable domain of TCR clone 254133 (TRAV12-2, TRAJ53)
CAVNTGGGSNYKLTF

SEQ ID NO: 508266 - protein, 15 aa, Homo sapiens
  CDR3 for beta chain variable domain of TCR clone 254133 (TRBV5-1, TRBJ2-5)
CDSSLGLGEIKTQYF

SEQ ID NO: 508267 - protein, 13 aa, Homo sapiens
  CDR3 for alpha chain variable domain of TCR clone 254134 (TRAV2, TRAJ40)
CAVVTSGTYTYIF

SEQ ID NO: 508268 - protein, 13 aa, Homo sapiens
  CDR3 for beta chain variable domain of TCR clone 254134 (TRBV7-9, TRBJ2-5)
CASLPSGRETQYF

SEQ ID NO: 508269 - protein, 14 aa, Homo sapiens
  CDR3 for alpha chain variable domain of TCR clone 254135 (TRAV13-1, TRAJ3)
CAASKSSSASKIIF

SEQ ID NO: 508270 - protein, 13 aa, Homo sapiens
  CDR3 for beta chain variable domain of TCR clone 254135 (TRBV7-9, TRBJ2-7)
CASSFAGAYEQYF

SEQ ID NO: 508271 - protein, 11 aa, Homo sapiens
  CDR3 for alpha chain variable domain of TCR clone 254136 (TRAV12-2, TRAJ30)
CAVGRDDKIIF

SEQ ID NO: 508272 - protein, 18 aa, Homo sapiens
  CDR3 for beta chain variable domain of TCR clone 254136 (TRBV7-8, TRBJ2-1)
CASSPAEGLAGGLNEQFF

SEQ ID NO: 508273 - protein, 13 aa, Homo sapiens
  CDR3 for alpha chain variable domain of TCR clone 254137 (TRAV30, TRAJ24)
CGTVTDSWGKLQF

SEQ ID NO: 508274 - protein, 15 aa, Homo sapiens
  CDR3 for beta chain variable domain of TCR clone 254137 (TRBV25-1, TRBJ1-4)
CASRPGDSTNEKLFF

SEQ ID NO: 508275 - protein, 14 aa, Homo sapiens
  CDR3 for alpha chain variable domain of TCR clone 254138 (TRAV27, TRAJ40)
CAGSLLRGTYKYSF

SEQ ID NO: 508276 - protein, 15 aa, Homo sapiens
  CDR3 for beta chain variable domain of TCR clone 254138 (TRBV6-3, TRBJ1-4)
CASSSPGQENEKLFF

SEQ ID NO: 508277 - protein, 14 aa, Homo sapiens
  CDR3 for alpha chain variable domain of TCR clone 254139 (TRAV8-3, TRAJ39)
CAVGANNAGNMLTF

SEQ ID NO: 508278 - protein, 12 aa, Homo sapiens
  CDR3 for beta chain variable domain of TCR clone 254139 (TRBV28, TRBJ1-2)
CAGLTLAEGYTF

SEQ ID NO: 508279 - protein, 12 aa, Homo sapiens
  CDR3 for alpha chain variable domain of TCR clone 254140 (TRAV12-1, TRAJ40)
CVVYSGTYKYIF

SEQ ID NO: 508280 - protein, 18 aa, Homo sapiens
  CDR3 for beta chain variable domain of TCR clone 254140 (TRBV11-2, TRBJ2-3)
CASSLGGAARGAPNKQYF

SEQ ID NO: 508281 - protein, 13 aa, Homo sapiens
  CDR3 for alpha chain variable domain of TCR clone 254141 (TRAV21, TRAJ20)
CAVGLRVDYKLSF

SEQ ID NO: 508282 - protein, 17 aa, Homo sapiens
  CDR3 for beta chain variable domain of TCR clone 254141 (TRBV10-3, TRBJ1-2)
CAISETRDRGLEYGYTF

SEQ ID NO: 508283 - protein, 13 aa, Homo sapiens
  CDR3 for alpha chain variable domain of TCR clone 254142 (TRAV26-2, TRAJ43)
CILRAVNNNDMRF

SEQ ID NO: 508284 - protein, 16 aa, Homo sapiens
  CDR3 for beta chain variable domain of TCR clone 254142 (TRBV7-6, TRBJ1-6)
CASSLSSRVGDSPLHF

SEQ ID NO: 508285 - protein, 14 aa, Homo sapiens
  CDR3 for alpha chain variable domain of TCR clone 254143 (TRAV8-3, TRAJ4)
CAVGAAGGYNKLIF

SEQ ID NO: 508286 - protein, 14 aa, Homo sapiens
  CDR3 for beta chain variable domain of TCR clone 254143 (TRBV2, TRBJ2-5)
CASTWGRAQETQYF

SEQ ID NO: 508287 - protein, 11 aa, Homo sapiens
  CDR3 for alpha chain variable domain of TCR clone 254144 (TRAV2, TRAJ20)
AAVYRDCKLSF

SEQ ID NO: 508288 - protein, 17 aa, Homo sapiens
  CDR3 for beta chain variable domain of TCR clone 254144 (TRBV11-2, TRBJ2-1)
CASSLYPPGVEYNEQFF

SEQ ID NO: 508289 - protein, 15 aa, Homo sapiens
  CDR3 for alpha chain variable domain of TCR clone 254145 (TRAV38-1, TRAJ57)
CAFMDSQGGSEKLVF

SEQ ID NO: 508290 - protein, 14 aa, Homo sapiens
  CDR3 for beta chain variable domain of TCR clone 254145 (TRBV7-2, TRBJ2-2)
CASSLNSNTGELFF

SEQ ID NO: 508291 - protein, 11 aa, Homo sapiens
  CDR3 for alpha chain variable domain of TCR clone 254146 (TRAV1-1, TRAJ23)
CAVRQGGKLIF

SEQ ID NO: 508292 - protein, 13 aa, Homo sapiens
  CDR3 for beta chain variable domain of TCR clone 254146 (TRBV7-8, TRBJ2-7)
CASSPGPGSEQYF

SEQ ID NO: 508293 - protein, 11 aa, Homo sapiens
  CDR3 for alpha chain variable domain of TCR clone 254147 (TRAV23/DV6, TRAJ9)
CFHTGGFKTIF

SEQ ID NO: 508294 - protein, 18 aa, Homo sapiens
  CDR3 for beta chain variable domain of TCR clone 254147 (TRBV12-4, TRBJ2-2)
CASSLVAGTRGRTGELFF

SEQ ID NO: 508295 - protein, 15 aa, Homo sapiens
  CDR3 for alpha chain variable domain of TCR clone 254148 (TRAV8-6, TRAJ10)
CAVSSNGGGGNKLHF

SEQ ID NO: 508296 - protein, 15 aa, Homo sapiens
  CDR3 for beta chain variable domain of TCR clone 254148 (TRBV28, TRBJ1-2)
CASSSHSIANYGYTF

SEQ ID NO: 508297 - protein, 14 aa, Homo sapiens
  CDR3 for alpha chain variable domain of TCR clone 254149 (TRAV12-2, TRAJ40)
CAVKIPSGTYKYIY

SEQ ID NO: 508298 - protein, 16 aa, Homo sapiens
  CDR3 for beta chain variable domain of TCR clone 254149 (TRBV28, TRBJ2-5)
CASSFSPAGGWETQYF

SEQ ID NO: 508299 - protein, 14 aa, Homo sapiens
  CDR3 for alpha chain variable domain of TCR clone 254150 (TRAV8-3, TRAJ37)
CAVGSSGNTGRLIF

SEQ ID NO: 508300 - protein, 18 aa, Homo sapiens
  CDR3 for beta chain variable domain of TCR clone 254150 (TRBV12-4, TRBJ2-2)
CASSLVAGTRGRTGELFF

SEQ ID NO: 508301 - protein, 12 aa, Homo sapiens
  CDR3 for alpha chain variable domain of TCR clone 254151 (TRAV12-3, TRAJ34)
CAMGYNTDKLIF

SEQ ID NO: 508302 - protein, 14 aa, Homo sapiens
  CDR3 for beta chain variable domain of TCR clone 254151 (TRBV4-1, TRBJ2-2)
CASSQAVNNGELFF

SEQ ID NO: 508303 - protein, 13 aa, Homo sapiens
  CDR3 for alpha chain variable domain of TCR clone 254152 (TRAV10, TRAJ16)
CGEIPSDGQKLLF

SEQ ID NO: 508304 - protein, 16 aa, Homo sapiens
  CDR3 for beta chain variable domain of TCR clone 254152 (TRBV5-1, TRBJ1-1)
CASSSGGNSLNTEAFF

SEQ ID NO: 508305 - protein, 14 aa, Homo sapiens
  CDR3 for alpha chain variable domain of TCR clone 254153 (TRAV41, TRAJ48)
CAVRPHFGNEKLTF

SEQ ID NO: 508306 - protein, 16 aa, Homo sapiens
  CDR3 for beta chain variable domain of TCR clone 254153 (TRBV2, TRBJ2-1)
CASSVGGSLSYNEQFF

SEQ ID NO: 508307 - protein, 14 aa, Homo sapiens
  CDR3 for alpha chain variable domain of TCR clone 254154 (TRAV12-2, TRAJ13)
CAVKKTGGYQKVTF

SEQ ID NO: 508308 - protein, 15 aa, Homo sapiens
  CDR3 for beta chain variable domain of TCR clone 254154 (TRBV5-1, TRBJ2-1)
CDSSPPRAPYNEQFF

SEQ ID NO: 508309 - protein, 15 aa, Homo sapiens
  CDR3 for alpha chain variable domain of TCR clone 254155 (TRAV8-3, TRAJ45)
CGSSYSGGGADGRTF

SEQ ID NO: 508310 - protein, 13 aa, Homo sapiens
  CDR3 for beta chain variable domain of TCR clone 254155 (TRBV10-3, TRBJ2-7)
CASKLAVNYEQYF

SEQ ID NO: 508311 - protein, 13 aa, Homo sapiens
  CDR3 for alpha chain variable domain of TCR clone 254156 (TRAV8-4, TRAJ21)
CAVSEYNFNKFYF

SEQ ID NO: 508312 - protein, 12 aa, Homo sapiens
  CDR3 for beta chain variable domain of TCR clone 254156 (TRBV7-9, TRBJ1-5)
CDSSSDQAPQHF

SEQ ID NO: 508313 - protein, 11 aa, Homo sapiens
  CDR3 for alpha chain variable domain of TCR clone 254157 (TRAV1-1, TRAJ23)
CAVRQGGKLIF

SEQ ID NO: 508314 - protein, 12 aa, Homo sapiens
  CDR3 for beta chain variable domain of TCR clone 254157 (TRBV19, TRBJ1-5)
CASSIAQRPHHF

SEQ ID NO: 508315 - protein, 13 aa, Homo sapiens
  CDR3 for alpha chain variable domain of TCR clone 254158 (TRAV26-1, TRAJ30)
CIVNMNSDDKIIF

SEQ ID NO: 508316 - protein, 16 aa, Homo sapiens
  CDR3 for beta chain variable domain of TCR clone 254158 (TRBV16, TRBJ2-7)
CASSRPAGGSSYEQYF

SEQ ID NO: 508317 - protein, 16 aa, Homo sapiens
  CDR3 for alpha chain variable domain of TCR clone 254159 (TRAV30, TRAJ24)
CGTEIVDADSWGKFQF

SEQ ID NO: 508318 - protein, 14 aa, Homo sapiens
  CDR3 for beta chain variable domain of TCR clone 254159 (TRBV7-2, TRBJ2-7)
CASSPNTSFYEQYF

SEQ ID NO: 508319 - protein, 17 aa, Homo sapiens
  CDR3 for alpha chain variable domain of TCR clone 254160 (TRAV3, TRAJ6)
CAVRDGPRAGGSYIPTI

SEQ ID NO: 508320 - protein, 14 aa, Homo sapiens
  CDR3 for beta chain variable domain of TCR clone 254160 (TRBV7-2, TRBJ2-7)
CASSPKASFYEQYF

SEQ ID NO: 508321 - protein, 16 aa, Homo sapiens
  CDR3 for alpha chain variable domain of TCR clone 254161 (TRAV12-2, TRAJ45)
FAGKRNPGGGADGLTF

SEQ ID NO: 508322 - protein, 12 aa, Homo sapiens
  CDR3 for beta chain variable domain of TCR clone 254161 (TRBV6-1, TRBJ2-5)
CASSEGRETQYF

SEQ ID NO: 508323 - protein, 14 aa, Homo sapiens
  CDR3 for alpha chain variable domain of TCR clone 254162 (TRAV35, TRAJ33)
CAGSSQDSNYQLIW

SEQ ID NO: 508324 - protein, 18 aa, Homo sapiens
  CDR3 for beta chain variable domain of TCR clone 254162 (TRBV11-2, TRBJ2-3)
CASSLGGASRGAPNTQYF

SEQ ID NO: 508325 - protein, 14 aa, Homo sapiens
  CDR3 for alpha chain variable domain of TCR clone 254163 (TRAV38-1, TRAJ33)
CAFMKPYSNYQLIW

SEQ ID NO: 508326 - protein, 16 aa, Homo sapiens
  CDR3 for beta chain variable domain of TCR clone 254163 (TRBV7-3, TRBJ2-2)
CASSLKRGTLSGELFF

SEQ ID NO: 508327 - protein, 11 aa, Homo sapiens
  CDR3 for alpha chain variable domain of TCR clone 254164 (TRAV23/DV6, TRAJ49)
CAALTGNQFYF

SEQ ID NO: 508328 - protein, 13 aa, Homo sapiens
  CDR3 for beta chain variable domain of TCR clone 254164 (TRBV19, TRBJ2-7)
CASRKAGGSEQYF

SEQ ID NO: 508329 - protein, 15 aa, Homo sapiens
  CDR3 for alpha chain variable domain of TCR clone 254165 (TRAV27, TRAJ38)
CAARRNAGNNRKLIW

SEQ ID NO: 508330 - protein, 17 aa, Homo sapiens
  CDR3 for beta chain variable domain of TCR clone 254165 (TRBV20-1, TRBJ2-2)
CSASGSGQCGLTGELFF

SEQ ID NO: 508331 - protein, 14 aa, Homo sapiens
  CDR3 for alpha chain variable domain of TCR clone 254166 (TRAV13-1, TRAJ44)
CAAKATGTASKRTF

SEQ ID NO: 508332 - protein, 17 aa, Homo sapiens
  CDR3 for beta chain variable domain of TCR clone 254166 (TRBV7-3, TRBJ2-3)
CACSLMKRMRGADTQYF

SEQ ID NO: 508333 - protein, 13 aa, Homo sapiens
  CDR3 for alpha chain variable domain of TCR clone 254167 (TRAV17, TRAJ9)
CATDYTGGFKTIF

SEQ ID NO: 508334 - protein, 14 aa, Homo sapiens
  CDR3 for beta chain variable domain of TCR clone 254167 (TRBV13, TRBJ2-1)
CASSMIAGGYEQFF

SEQ ID NO: 508335 - protein, 14 aa, Homo sapiens
  CDR3 for alpha chain variable domain of TCR clone 254168 (TRAV8-4, TRAJ9)
CAIRINTGGFKTIF

SEQ ID NO: 508336 - protein, 15 aa, Homo sapiens
  CDR3 for beta chain variable domain of TCR clone 254168 (TRBV10-2, TRBJ2-6)
CASSEQGTGANVLTF

SEQ ID NO: 508337 - protein, 14 aa, Homo sapiens
  CDR3 for alpha chain variable domain of TCR clone 254169 (TRAV12-1, TRAJ12)
CVLTRMDSSYKLIF

SEQ ID NO: 508338 - protein, 18 aa, Homo sapiens
  CDR3 for beta chain variable domain of TCR clone 254169 (TRBV20-1, TRBJ2-6)
CSAETTPTHGSGANVLTF

SEQ ID NO: 508339 - protein, 13 aa, Homo sapiens
  CDR3 for alpha chain variable domain of TCR clone 254170 (TRAV21, TRAJ27)
CAARPGNAGKSTF

SEQ ID NO: 508340 - protein, 13 aa, Homo sapiens
  CDR3 for beta chain variable domain of TCR clone 254170 (TRBV7-6, TRBJ2-3)
CQSLGTATDTQYF

SEQ ID NO: 508341 - protein, 15 aa, Homo sapiens
  CDR3 for alpha chain variable domain of TCR clone 254171 (TRAV26-1, TRAJ23)
CIVRVAGYHGGKLIF

SEQ ID NO: 508342 - protein, 18 aa, Homo sapiens
  CDR3 for beta chain variable domain of TCR clone 254171 (TRBV28, TRBJ2-1)
CASSSTSGRANSYNEQFF

SEQ ID NO: 508343 - protein, 15 aa, Homo sapiens
  CDR3 for alpha chain variable domain of TCR clone 254172 (TRAV3, TRAJ5)
CAGRDLDTGRRALTF

SEQ ID NO: 508344 - protein, 14 aa, Homo sapiens
  CDR3 for beta chain variable domain of TCR clone 254172 (TRBV25-1, TRBJ1-4)
CASSGGGQPEKLFF

SEQ ID NO: 508345 - protein, 14 aa, Homo sapiens
  CDR3 for alpha chain variable domain of TCR clone 254173 (TRAV2, TRAJ9)
CAVEDRSGGFKTIF

SEQ ID NO: 508346 - protein, 15 aa, Homo sapiens
  CDR3 for beta chain variable domain of TCR clone 254173 (TRBV19, TRBJ2-1)
CASSHRDRGPNEQSF

SEQ ID NO: 508347 - protein, 15 aa, Homo sapiens
  CDR3 for alpha chain variable domain of TCR clone 254174 (TRAV3, TRAJ4)
CAVRDGTGGYNKLIF

SEQ ID NO: 508348 - protein, 13 aa, Homo sapiens
  CDR3 for beta chain variable domain of TCR clone 254174 (TRBV12-4, TRBJ1-2)
CASTMTSNYGYTF

SEQ ID NO: 508349 - protein, 14 aa, Homo sapiens
  CDR3 for alpha chain variable domain of TCR clone 254175 (TRAV1-2, TRAJ16)
CAVSRFSDVQKLLF

SEQ ID NO: 508350 - protein, 15 aa, Homo sapiens
  CDR3 for beta chain variable domain of TCR clone 254175 (TRBV6-3, TRBJ2-7)
CASSSPGTVFYEQYF

SEQ ID NO: 508351 - protein, 13 aa, Homo sapiens
  CDR3 for alpha chain variable domain of TCR clone 254176 (TRAV20, TRAJ20)
CAVQAGSGYKLSF

SEQ ID NO: 508352 - protein, 15 aa, Homo sapiens
  CDR3 for beta chain variable domain of TCR clone 254176 (TRBV4-1, TRBJ2-5)
CASSQWDLYQETQYF

SEQ ID NO: 508353 - protein, 14 aa, Homo sapiens
  CDR3 for alpha chain variable domain of TCR clone 254177 (TRAV13-1, TRAJ9)
CAASALTGGFKTIL

SEQ ID NO: 508354 - protein, 16 aa, Homo sapiens
  CDR3 for beta chain variable domain of TCR clone 254177 (TRBV12-4, TRBJ1-5)
CASSRPVGGSNQPQHF

SEQ ID NO: 508355 - protein, 14 aa, Homo sapiens
  CDR3 for alpha chain variable domain of TCR clone 254178 (TRAV4, TRAJ6)
CLVGEAGGSYRPTF

SEQ ID NO: 508356 - protein, 16 aa, Homo sapiens
  CDR3 for beta chain variable domain of TCR clone 254178 (TRBV7-6, TRBJ2-1)
CASSLNEGPSYNEQFF

SEQ ID NO: 508357 - protein, 13 aa, Homo sapiens
  CDR3 for alpha chain variable domain of TCR clone 254179 (TRAV26-1, TRAJ23)
CIDLRIRGGKLSF

SEQ ID NO: 508358 - protein, 14 aa, Homo sapiens
  CDR3 for beta chain variable domain of TCR clone 254179 (TRBV2, TRBJ2-7)
CASSRDRSSYEQYF

SEQ ID NO: 508359 - protein, 11 aa, Homo sapiens
  CDR3 for alpha chain variable domain of TCR clone 254180 (TRAV1-2, TRAJ40)
CAVPGTYKYIF

SEQ ID NO: 508360 - protein, 13 aa, Homo sapiens
  CDR3 for beta chain variable domain of TCR clone 254180 (TRBV19, TRBJ2-7)
CASSPRQSYEQYF

SEQ ID NO: 508361 - protein, 16 aa, Homo sapiens
  CDR3 for alpha chain variable domain of TCR clone 254181 (TRAV4, TRAJ22)
CLVGDLYSGSARQLTF

SEQ ID NO: 508362 - protein, 14 aa, Homo sapiens
  CDR3 for beta chain variable domain of TCR clone 254181 (TRBV28, TRBJ2-3)
FASSWRGRADTQYF

SEQ ID NO: 508363 - protein, 13 aa, Homo sapiens
  CDR3 for alpha chain variable domain of TCR clone 254182 (TRAV1-2, TRAJ9)
CAALNTRGFKTIF

SEQ ID NO: 508364 - protein, 20 aa, Homo sapiens
  CDR3 for beta chain variable domain of TCR clone 254182 (TRBV28, TRBJ2-1)
CASTPIGRSPGLAGGNEQFF

SEQ ID NO: 508365 - protein, 13 aa, Homo sapiens
  CDR3 for alpha chain variable domain of TCR clone 254183 (TRAV8-6, TRAJ13)
CAVSSGGYQKVTF

SEQ ID NO: 508366 - protein, 15 aa, Homo sapiens
  CDR3 for beta chain variable domain of TCR clone 254183 (TRBV7-9, TRBJ2-7)
CASSLPMGQASEQYF

SEQ ID NO: 508367 - protein, 12 aa, Homo sapiens
  CDR3 for alpha chain variable domain of TCR clone 254184 (TRAV4, TRAJ9)
CLAPTGGFKTIF

SEQ ID NO: 508368 - protein, 14 aa, Homo sapiens
  CDR3 for beta chain variable domain of TCR clone 254184 (TRBV7-2, TRBJ2-7)
CASRSQGAAYEQYF

SEQ ID NO: 508369 - protein, 14 aa, Homo sapiens
  CDR3 for alpha chain variable domain of TCR clone 254185 (TRAV20, TRAJ42)
CAVQAGGSNGNLIF

SEQ ID NO: 508370 - protein, 14 aa, Homo sapiens
  CDR3 for beta chain variable domain of TCR clone 254185 (TRBV28, TRBJ1-2)
CASRIQGANYGYTF

SEQ ID NO: 508371 - protein, 13 aa, Homo sapiens
  CDR3 for alpha chain variable domain of TCR clone 254186 (TRAV8-2, TRAJ44)
CSRGAGTASKLTF

SEQ ID NO: 508372 - protein, 13 aa, Homo sapiens
  CDR3 for beta chain variable domain of TCR clone 254186 (TRBV12-4, TRBJ2-7)
CASSRQASYEQYL

SEQ ID NO: 508373 - protein, 21 aa, Homo sapiens
  CDR3 for alpha chain variable domain of TCR clone 254187 (TRAV25, TRAJ53)
TATQTTDVGTGSGGSNYKLTF

SEQ ID NO: 508374 - protein, 16 aa, Homo sapiens
  CDR3 for beta chain variable domain of TCR clone 254187 (TRBV4-2, TRBJ2-3)
CVSSLSSGGHTDTQYV

SEQ ID NO: 508375 - protein, 14 aa, Homo sapiens
  CDR3 for alpha chain variable domain of TCR clone 254188 (TRAV13-2, TRAJ39)
CAENHNNAGNMLTF

SEQ ID NO: 508376 - protein, 15 aa, Homo sapiens
  CDR3 for beta chain variable domain of TCR clone 254188 (TRBV11-3, TRBJ2-7)
CASSPGPASSYEQYF

SEQ ID NO: 508377 - protein, 10 aa, Homo sapiens
  CDR3 for alpha chain variable domain of TCR clone 254189 (TRAV12-1, TRAJ43)
CVVHNNDMRF

SEQ ID NO: 508378 - protein, 13 aa, Homo sapiens
  CDR3 for beta chain variable domain of TCR clone 254189 (TRBV10-3, TRBJ2-7)
CASKLAVNYEQYF

SEQ ID NO: 508379 - protein, 14 aa, Homo sapiens
  CDR3 for alpha chain variable domain of TCR clone 254190 (TRAV3, TRAJ33)
CAERDMDSNYQLIW

SEQ ID NO: 508380 - protein, 19 aa, Homo sapiens
  CDR3 for beta chain variable domain of TCR clone 254190 (TRBV7-3, TRBJ1-2)
CARSFPQGNDGELWLHLRF

SEQ ID NO: 508381 - protein, 11 aa, Homo sapiens
  CDR3 for alpha chain variable domain of TCR clone 254191 (TRAV13-1, TRAJ15)
CAATPGTALIF

SEQ ID NO: 508382 - protein, 17 aa, Homo sapiens
  CDR3 for beta chain variable domain of TCR clone 254191 (TRBV13, TRBJ2-3)
CVSSLSRVAGGRNTQYF

SEQ ID NO: 508383 - protein, 14 aa, Homo sapiens
  CDR3 for alpha chain variable domain of TCR clone 254192 (TRAV17, TRAJ6)
CATPAMGGSYIPTF

SEQ ID NO: 508384 - protein, 12 aa, Homo sapiens
  CDR3 for beta chain variable domain of TCR clone 254192 (TRBV6-3, TRBJ2-7)
CARSLTPYEQYF

SEQ ID NO: 508385 - protein, 14 aa, Homo sapiens
  CDR3 for alpha chain variable domain of TCR clone 254193 (TRAV35, TRAJ22)
CAGLRPGSARQLTF

SEQ ID NO: 508386 - protein, 13 aa, Homo sapiens
  CDR3 for beta chain variable domain of TCR clone 254193 (TRBV19, TRBJ1-5)
CASSIGGEQPQHF

SEQ ID NO: 508387 - protein, 15 aa, Homo sapiens
  CDR3 for alpha chain variable domain of TCR clone 254194 (TRAV12-2, TRAJ57)
CAVSRGQGGSEKRVF

SEQ ID NO: 508388 - protein, 14 aa, Homo sapiens
  CDR3 for beta chain variable domain of TCR clone 254194 (TRBV20-1, TRBJ2-1)
CSAHPGLPYNEQFF

SEQ ID NO: 508389 - protein, 16 aa, Homo sapiens
  CDR3 for alpha chain variable domain of TCR clone 254195 (TRAV12-2, TRAJ45)
CAVKRNPGGGADGLTF

SEQ ID NO: 508390 - protein, 12 aa, Homo sapiens
  CDR3 for beta chain variable domain of TCR clone 254195 (TRBV11-2, TRBJ2-1)
CASSPGNNEQFF

SEQ ID NO: 508391 - protein, 13 aa, Homo sapiens
  CDR3 for alpha chain variable domain of TCR clone 254196 (TRAV12-3, TRAJ7)
CAMTPYGNNRLAF

SEQ ID NO: 508392 - protein, 16 aa, Homo sapiens
  CDR3 for beta chain variable domain of TCR clone 254196 (TRBV20-1, TRBJ1-4)
CSARPCGGELNENLFF

SEQ ID NO: 508393 - protein, 13 aa, Homo sapiens
  CDR3 for alpha chain variable domain of TCR clone 254197 (TRAV21, TRAJ56)
CAVRTGGNSKLTF

SEQ ID NO: 508394 - protein, 15 aa, Homo sapiens
  CDR3 for beta chain variable domain of TCR clone 254197 (TRBV7-9, TRBJ1-1)
CASSHRGTVNTEAFF

SEQ ID NO: 508395 - protein, 13 aa, Homo sapiens
  CDR3 for alpha chain variable domain of TCR clone 254198 (TRAV6, TRAJ5)
CAPADTGRRALTF

SEQ ID NO: 508396 - protein, 15 aa, Homo sapiens
  CDR3 for beta chain variable domain of TCR clone 254198 (TRBV7-6, TRBJ2-7)
CASSLVPLLDGEQYF

SEQ ID NO: 508397 - protein, 14 aa, Homo sapiens
  CDR3 for alpha chain variable domain of TCR clone 254199 (TRAV3, TRAJ16)
CCERLKSDGQKLLF

SEQ ID NO: 508398 - protein, 15 aa, Homo sapiens
  CDR3 for beta chain variable domain of TCR clone 254199 (TRBV28, TRBJ2-7)
CASSPGGRGFYEHYF

SEQ ID NO: 508399 - protein, 14 aa, Homo sapiens
  CDR3 for alpha chain variable domain of TCR clone 254200 (TRAV12-3, TRAJ10)
SHLPLTGGGDKLTF

SEQ ID NO: 508400 - protein, 15 aa, Homo sapiens
  CDR3 for beta chain variable domain of TCR clone 254200 (TRBV11-2, TRBJ1-3)
CASSLDGTVGNTIYF

SEQ ID NO: 508401 - protein, 14 aa, Homo sapiens
  CDR3 for alpha chain variable domain of TCR clone 254201 (TRAV26-1, TRAJ38)
CIADNAGNNRKLIW

SEQ ID NO: 508402 - protein, 22 aa, Homo sapiens
  CDR3 for beta chain variable domain of TCR clone 254201 (TRBV6-1, TRBJ1-3)
CASVQGGGWKHHIFWRGKLAHR

SEQ ID NO: 508403 - protein, 15 aa, Homo sapiens
  CDR3 for alpha chain variable domain of TCR clone 254202 (TRAV26-1, TRAJ22)
CIVRVSFWFCKATDL

SEQ ID NO: 508404 - protein, 13 aa, Homo sapiens
  CDR3 for beta chain variable domain of TCR clone 254202 (TRBV7-9, TRBJ2-2)
CASSLAVTGELFF

SEQ ID NO: 508405 - protein, 14 aa, Homo sapiens
  CDR3 for alpha chain variable domain of TCR clone 254203 (TRAV12-2, TRAJ44)
CAVNPAGTASNLTS

SEQ ID NO: 508406 - protein, 15 aa, Homo sapiens
  CDR3 for beta chain variable domain of TCR clone 254203 (TRBV28, TRBJ2-7)
CASSVRQVSSYEQYF

SEQ ID NO: 508407 - protein, 14 aa, Homo sapiens
  CDR3 for alpha chain variable domain of TCR clone 254204 (TRAV12-2, TRAJ40)
CAVKIPPGTYKYIF

SEQ ID NO: 508408 - protein, 14 aa, Homo sapiens
  CDR3 for beta chain variable domain of TCR clone 254204 (TRBV20-1, TRBJ1-1)
RSAQTRIGGTEAFF

SEQ ID NO: 508409 - protein, 12 aa, Homo sapiens
  CDR3 for alpha chain variable domain of TCR clone 254205 (TRAV12-3, TRAJ17)
CAMTLTGTKLTF

SEQ ID NO: 508410 - protein, 15 aa, Homo sapiens
  CDR3 for beta chain variable domain of TCR clone 254205 (TRBV20-1, TRBJ2-7)
RSARDRVSGMDEQYF

SEQ ID NO: 508411 - protein, 14 aa, Homo sapiens
  CDR3 for alpha chain variable domain of TCR clone 254206 (TRAV13-2, TRAJ11)
CRESSYSGYSTLTF

SEQ ID NO: 508412 - protein, 12 aa, Homo sapiens
  CDR3 for beta chain variable domain of TCR clone 254206 (TRBV11-2, TRBJ2-2)
CASSLGGGELFF

SEQ ID NO: 508413 - protein, 14 aa, Homo sapiens
  CDR3 for alpha chain variable domain of TCR clone 254207 (TRAV12-2, TRAJ3)
CAVKGYSSASKIIF

SEQ ID NO: 508414 - protein, 15 aa, Homo sapiens
  CDR3 for beta chain variable domain of TCR clone 254207 (TRBV28, TRBJ2-5)
CASSSGRTIQETQYF

SEQ ID NO: 508415 - protein, 16 aa, Homo sapiens
  CDR3 for alpha chain variable domain of TCR clone 254208 (TRAV3, TRAJ21)
CAVRDIERGNFNKFYF

SEQ ID NO: 508416 - protein, 13 aa, Homo sapiens
  CDR3 for beta chain variable domain of TCR clone 254208 (TRBV7-3, TRBJ2-1)
CASSLWPYNEQFF

SEQ ID NO: 508417 - protein, 14 aa, Homo sapiens
  CDR3 for alpha chain variable domain of TCR clone 254209 (TRAV3, TRAJ36)
RAVRDGTGANKPFF

SEQ ID NO: 508418 - protein, 16 aa, Homo sapiens
  CDR3 for beta chain variable domain of TCR clone 254209 (TRBV20-1, TRBJ2-6)
CSAREGPGVGANVLTF

SEQ ID NO: 508419 - protein, 14 aa, Homo sapiens
  CDR3 for alpha chain variable domain of TCR clone 254210 (TRAV8-3, TRAJ4)
CAVVLTGCYNKLIF

SEQ ID NO: 508420 - protein, 16 aa, Homo sapiens
  CDR3 for beta chain variable domain of TCR clone 254210 (TRBV2, TRBJ2-7)
CASSPHPWTGDYEQYF

SEQ ID NO: 508421 - protein, 19 aa, Homo sapiens
  CDR3 for alpha chain variable domain of TCR clone 254211 (TRAV1-2, TRAJ26)
CLLPLCCERPDNYGQNFVF

SEQ ID NO: 508422 - protein, 13 aa, Homo sapiens
  CDR3 for beta chain variable domain of TCR clone 254211 (TRBV19, TRBJ1-2)
CASSQGQVSGYTV

SEQ ID NO: 508423 - protein, 16 aa, Homo sapiens
  CDR3 for alpha chain variable domain of TCR clone 254212 (TRAV13-1, TRAJ48)
CAASIFGNFGNEKLTF

SEQ ID NO: 508424 - protein, 13 aa, Homo sapiens
  CDR3 for beta chain variable domain of TCR clone 254212 (TRBV7-3, TRBJ1-1)
CQQLKGGNTEAFF

SEQ ID NO: 508425 - protein, 14 aa, Homo sapiens
  CDR3 for alpha chain variable domain of TCR clone 254213 (TRAV8-4, TRAJ8)
CAVSEDTGFQKLVF

SEQ ID NO: 508426 - protein, 17 aa, Homo sapiens
  CDR3 for beta chain variable domain of TCR clone 254213 (TRBV11-2, TRBJ2-1)
CASSLYPPGVEYNEQFF

SEQ ID NO: 508427 - protein, 12 aa, Homo sapiens
  CDR3 for alpha chain variable domain of TCR clone 254214 (TRAV12-1, TRAJ40)
CVFYSGTYKYII

SEQ ID NO: 508428 - protein, 18 aa, Homo sapiens
  CDR3 for beta chain variable domain of TCR clone 254214 (TRBV12-4, TRBJ2-2)
CSGSLVAGTRGRTGELFF

SEQ ID NO: 508429 - protein, 16 aa, Homo sapiens
  CDR3 for alpha chain variable domain of TCR clone 254215 (TRAV8-3, TRAJ42)
CAVAGDYGGSQGNLIF

SEQ ID NO: 508430 - protein, 16 aa, Homo sapiens
  CDR3 for beta chain variable domain of TCR clone 254215 (TRBV12-5, TRBJ2-5)
CASGPRTSGNQETQYF

SEQ ID NO: 508431 - protein, 12 aa, Homo sapiens
  CDR3 for alpha chain variable domain of TCR clone 254216 (TRAV1-2, TRAJ24)
CAVGGSRGKVQF

SEQ ID NO: 508432 - protein, 14 aa, Homo sapiens
  CDR3 for beta chain variable domain of TCR clone 254216 (TRBV7-2, TRBJ1-2)
CASSQTGSTYGYTF

SEQ ID NO: 508433 - protein, 13 aa, Homo sapiens
  CDR3 for alpha chain variable domain of TCR clone 254217 (TRAV13-2, TRAJ48)
FAEMDFGNEKLTF

SEQ ID NO: 508434 - protein, 13 aa, Homo sapiens
  CDR3 for beta chain variable domain of TCR clone 254217 (TRBV27, TRBJ1-4)
CASSLMGDEKLFF

SEQ ID NO: 508435 - protein, 16 aa, Homo sapiens
  CDR3 for alpha chain variable domain of TCR clone 254218 (TRAV26-1, TRAJ37)
CIYARHGSSNTGNLIF

SEQ ID NO: 508436 - protein, 13 aa, Homo sapiens
  CDR3 for beta chain variable domain of TCR clone 254218 (TRBV20-1, TRBJ1-1)
CSARGWGNTEAFF

SEQ ID NO: 508437 - protein, 17 aa, Homo sapiens
  CDR3 for alpha chain variable domain of TCR clone 254219 (TRAV3, TRAJ42)
CAVRDRDYGGSQGNRIF

SEQ ID NO: 508438 - protein, 15 aa, Homo sapiens
  CDR3 for beta chain variable domain of TCR clone 254219 (TRBV6-6, TRBJ2-7)
CASSYSYGGSYKQYF

SEQ ID NO: 508439 - protein, 12 aa, Homo sapiens
  CDR3 for alpha chain variable domain of TCR clone 254220 (TRAV12-3, TRAJ40)
CAMSSGTYKYIF

SEQ ID NO: 508440 - protein, 15 aa, Homo sapiens
  CDR3 for beta chain variable domain of TCR clone 254220 (TRBV11-3, TRBJ2-3)
CASLKDGREGDTQYF

SEQ ID NO: 508441 - protein, 14 aa, Homo sapiens
  CDR3 for alpha chain variable domain of TCR clone 254221 (TRAV1-2, TRAJ8)
CAVREDTGFQKLVF

SEQ ID NO: 508442 - protein, 14 aa, Homo sapiens
  CDR3 for beta chain variable domain of TCR clone 254221 (TRBV29-1, TRBJ1-4)
CSVTGTAGNEKLFF

SEQ ID NO: 508443 - protein, 11 aa, Homo sapiens
  CDR3 for alpha chain variable domain of TCR clone 254222 (TRAV21, TRAJ11)
CAVNGYSTLTF

SEQ ID NO: 508444 - protein, 16 aa, Homo sapiens
  CDR3 for beta chain variable domain of TCR clone 254222 (TRBV19, TRBJ2-1)
CASSKAGPSAYNEQFF

SEQ ID NO: 508445 - protein, 16 aa, Homo sapiens
  CDR3 for alpha chain variable domain of TCR clone 254223 (TRAV26-2, TRAJ45)
CTTASPIRGGADGLTF

SEQ ID NO: 508446 - protein, 13 aa, Homo sapiens
  CDR3 for beta chain variable domain of TCR clone 254223 (TRBV10-3, TRBJ2-7)
CASKLAVNYEQYF

SEQ ID NO: 508447 - protein, 14 aa, Homo sapiens
  CDR3 for alpha chain variable domain of TCR clone 254224 (TRAV12-2, TRAJ13)
CAVKKTGGYQKVTF

SEQ ID NO: 508448 - protein, 12 aa, Homo sapiens
  CDR3 for beta chain variable domain of TCR clone 254224 (TRBV7-3, TRBJ2-1)
CASSFINNEQFF

SEQ ID NO: 508449 - protein, 11 aa, Homo sapiens
  CDR3 for alpha chain variable domain of TCR clone 254225 (TRAV1-2, TRAJ34)
CAVQNTAKLIF

SEQ ID NO: 508450 - protein, 16 aa, Homo sapiens
  CDR3 for beta chain variable domain of TCR clone 254225 (TRBV4-1, TRBJ2-7)
CASSQVGGRGNYEQYF

SEQ ID NO: 508451 - protein, 11 aa, Homo sapiens
  CDR3 for alpha chain variable domain of TCR clone 254226 (TRAV21, TRAJ34)
CAHYNTDKLIF

SEQ ID NO: 508452 - protein, 12 aa, Homo sapiens
  CDR3 for beta chain variable domain of TCR clone 254226 (TRBV5-5, TRBJ2-5)
CASSYFGETQYF

SEQ ID NO: 508453 - protein, 14 aa, Homo sapiens
  CDR3 for alpha chain variable domain of TCR clone 254227 (TRAV26-1, TRAJ39)
CIVRGSRAGNMLTF

SEQ ID NO: 508454 - protein, 13 aa, Homo sapiens
  CDR3 for beta chain variable domain of TCR clone 254227 (TRBV14, TRBJ2-7)
CASSQDRRYEQYF

SEQ ID NO: 508455 - protein, 16 aa, Homo sapiens
  CDR3 for alpha chain variable domain of TCR clone 254228 (TRAV12-3, TRAJ53)
CAMSPGSGGSNYKLTF

SEQ ID NO: 508456 - protein, 16 aa, Homo sapiens
  CDR3 for beta chain variable domain of TCR clone 254228 (TRBV12-4, TRBJ2-5)
CASSFFVRGRQETQYL

SEQ ID NO: 508457 - protein, 14 aa, Homo sapiens
  CDR3 for alpha chain variable domain of TCR clone 254229 (TRAV12-1, TRAJ17)
CVVNYKAAGNKLTF

SEQ ID NO: 508458 - protein, 13 aa, Homo sapiens
  CDR3 for beta chain variable domain of TCR clone 254229 (TRBV7-7, TRBJ2-2)
CASSLTSAGELFF

SEQ ID NO: 508459 - protein, 14 aa, Homo sapiens
  CDR3 for alpha chain variable domain of TCR clone 254230 (TRAV16, TRAJ15)
CALSGPPAGTALIF

SEQ ID NO: 508460 - protein, 12 aa, Homo sapiens
  CDR3 for beta chain variable domain of TCR clone 254230 (TRBV18, TRBJ2-5)
CASSPPKETQYF

SEQ ID NO: 508461 - protein, 17 aa, Homo sapiens
  CDR3 for alpha chain variable domain of TCR clone 254231 (TRAV13-1, TRAJ52)
CAAGRNAGGTSYGKLTF

SEQ ID NO: 508462 - protein, 13 aa, Homo sapiens
  CDR3 for beta chain variable domain of TCR clone 254231 (TRBV7-2, TRBJ1-1)
YASNLKGAKVAFF

SEQ ID NO: 508463 - protein, 17 aa, Homo sapiens
  CDR3 for alpha chain variable domain of TCR clone 254232 (TRAV8-3, TRAJ52)
CAVGAEAGGTSYGKMKF

SEQ ID NO: 508464 - protein, 15 aa, Homo sapiens
  CDR3 for beta chain variable domain of TCR clone 254232 (TRBV5-1, TRBJ2-5)
CASSRQGLGQETQYF

SEQ ID NO: 508465 - protein, 14 aa, Homo sapiens
  CDR3 for alpha chain variable domain of TCR clone 254233 (TRAV12-2, TRAJ5)
CAVNRSTGRRALTF

SEQ ID NO: 508466 - protein, 11 aa, Homo sapiens
  CDR3 for beta chain variable domain of TCR clone 254233 (TRBV5-5, TRBJ1-1)
CASSLGVEAFF

SEQ ID NO: 508467 - protein, 16 aa, Homo sapiens
  CDR3 for alpha chain variable domain of TCR clone 254234 (TRAV12-3, TRAJ53)
CAMSPGSGGSNYKLTF

SEQ ID NO: 508468 - protein, 14 aa, Homo sapiens
  CDR3 for beta chain variable domain of TCR clone 254234 (TRBV20-1, TRBJ1-2)
CSASEQGAVYGYTF

SEQ ID NO: 508469 - protein, 15 aa, Homo sapiens
  CDR3 for alpha chain variable domain of TCR clone 254235 (TRAV34, TRAJ38)
CGADFTPGNNRKLIW

SEQ ID NO: 508470 - protein, 13 aa, Homo sapiens
  CDR3 for beta chain variable domain of TCR clone 254235 (TRBV15, TRBJ1-6)
CATSGGLNSPLHF

SEQ ID NO: 508471 - protein, 14 aa, Homo sapiens
  CDR3 for alpha chain variable domain of TCR clone 254236 (TRAV12-3, TRAJ10)
SHLPLTGGGNKLTF

SEQ ID NO: 508472 - protein, 16 aa, Homo sapiens
  CDR3 for beta chain variable domain of TCR clone 254236 (TRBV2, TRBJ1-5)
CASSESPQGLNQPQHF

SEQ ID NO: 508473 - protein, 13 aa, Homo sapiens
  CDR3 for alpha chain variable domain of TCR clone 254237 (TRAV30, TRAJ6)
CGFIDGGSYIPTF

SEQ ID NO: 508474 - protein, 13 aa, Homo sapiens
  CDR3 for beta chain variable domain of TCR clone 254237 (TRBV5-4, TRBJ2-5)
CASSPVSQETQYF

SEQ ID NO: 508475 - protein, 15 aa, Homo sapiens
  CDR3 for alpha chain variable domain of TCR clone 254238 (TRAV21, TRAJ24)
CAARSSTDSWGKLQF

SEQ ID NO: 508476 - protein, 15 aa, Homo sapiens
  CDR3 for beta chain variable domain of TCR clone 254238 (TRBV5-1, TRBJ1-5)
CASSLGETRNQPQHF

SEQ ID NO: 508477 - protein, 14 aa, Homo sapiens
  CDR3 for alpha chain variable domain of TCR clone 254239 (TRAV17, TRAJ57)
CATDPQGGSEKLVF

SEQ ID NO: 508478 - protein, 18 aa, Homo sapiens
  CDR3 for beta chain variable domain of TCR clone 254239 (TRBV6-6, TRBJ1-3)
CASCYSKWDSISGNTIYF

SEQ ID NO: 508479 - protein, 14 aa, Homo sapiens
  CDR3 for alpha chain variable domain of TCR clone 254240 (TRAV1-2, TRAJ8)
CAVREDTGFEKLVF

SEQ ID NO: 508480 - protein, 16 aa, Homo sapiens
  CDR3 for beta chain variable domain of TCR clone 254240 (TRBV12-5, TRBJ2-5)
CASGPRTSGNQETQYF

SEQ ID NO: 508481 - protein, 16 aa, Homo sapiens
  CDR3 for alpha chain variable domain of TCR clone 254241 (TRAV8-1, TRAJ18)
CAVNAGRGSTLGRLYF

SEQ ID NO: 508482 - protein, 16 aa, Homo sapiens
  CDR3 for beta chain variable domain of TCR clone 254241 (TRBV19, TRBJ2-3)
CASSPVWDRGTDTQYF

SEQ ID NO: 508483 - protein, 15 aa, Homo sapiens
  CDR3 for alpha chain variable domain of TCR clone 254242 (TRAV8-3, TRAJ6)
CAVGSAGGGSYIPTF

SEQ ID NO: 508484 - protein, 14 aa, Homo sapiens
  CDR3 for beta chain variable domain of TCR clone 254242 (TRBV7-3, TRBJ2-1)
CASSLGTSANEQFF

SEQ ID NO: 508485 - protein, 14 aa, Homo sapiens
  CDR3 for alpha chain variable domain of TCR clone 254243 (TRAV17, TRAJ54)
CATDANQGAQKPVF

SEQ ID NO: 508486 - protein, 16 aa, Homo sapiens
  CDR3 for beta chain variable domain of TCR clone 254243 (TRBV27, TRBJ2-5)
CASSFGPGGTKETQYF

SEQ ID NO: 508487 - protein, 16 aa, Homo sapiens
  CDR3 for alpha chain variable domain of TCR clone 254244 (TRAV3, TRAJ23)
CAVKIGIYNQGGKLSF

SEQ ID NO: 508488 - protein, 17 aa, Homo sapiens
  CDR3 for beta chain variable domain of TCR clone 254244 (TRBV10-3, TRBJ2-6)
CAISGSTAPSGANVLTF

SEQ ID NO: 508489 - protein, 15 aa, Homo sapiens
  CDR3 for alpha chain variable domain of TCR clone 254245 (TRAV26-1, TRAJ29)
CIVRDEGSGNTPLVF

SEQ ID NO: 508490 - protein, 15 aa, Homo sapiens
  CDR3 for beta chain variable domain of TCR clone 254245 (TRBV7-9, TRBJ1-5)
CASSQGHQPNQAQHF

SEQ ID NO: 508491 - protein, 13 aa, Homo sapiens
  CDR3 for alpha chain variable domain of TCR clone 254246 (TRAV9-2, TRAJ53)
CALSGGSHYKLTF

SEQ ID NO: 508492 - protein, 17 aa, Homo sapiens
  CDR3 for beta chain variable domain of TCR clone 254246 (TRBV11-2, TRBJ2-1)
CASSLYPPGVEYNEQFF

SEQ ID NO: 508493 - protein, 13 aa, Homo sapiens
  CDR3 for alpha chain variable domain of TCR clone 254247 (TRAV12-1, TRAJ16)
CVVNGPDGQKLLF

SEQ ID NO: 508494 - protein, 13 aa, Homo sapiens
  CDR3 for beta chain variable domain of TCR clone 254247 (TRBV29-1, TRBJ1-1)
CSVESGFGTEAFF

SEQ ID NO: 508495 - protein, 12 aa, Homo sapiens
  CDR3 for alpha chain variable domain of TCR clone 254248 (TRAV12-3, TRAJ29)
CAAREGNTPLVF

SEQ ID NO: 508496 - protein, 17 aa, Homo sapiens
  CDR3 for beta chain variable domain of TCR clone 254248 (TRBV18, TRBJ2-1)
CTSSPLAAGAGDNEQFF

SEQ ID NO: 508497 - protein, 12 aa, Homo sapiens
  CDR3 for alpha chain variable domain of TCR clone 254249 (TRAV16, TRAJ21)
FALLGNFNKFYF

SEQ ID NO: 508498 - protein, 13 aa, Homo sapiens
  CDR3 for beta chain variable domain of TCR clone 254249 (TRBV28, TRBJ2-7)
CASKAGGVYEQYF

SEQ ID NO: 508499 - protein, 13 aa, Homo sapiens
  CDR3 for alpha chain variable domain of TCR clone 254250 (TRAV21, TRAJ20)
CAVGLRVDYKLSF

SEQ ID NO: 508500 - protein, 13 aa, Homo sapiens
  CDR3 for beta chain variable domain of TCR clone 254250 (TRBV7-8, TRBJ1-5)
CASSLGGDQPQHF

SEQ ID NO: 508501 - protein, 10 aa, Homo sapiens
  CDR3 for alpha chain variable domain of TCR clone 254251 (TRAV1-2, TRAJ23)
CAGQGGKLIF

SEQ ID NO: 508502 - protein, 15 aa, Homo sapiens
  CDR3 for beta chain variable domain of TCR clone 254251 (TRBV29-1, TRBJ2-7)
CSVEFFDRGSYEQYF

SEQ ID NO: 508503 - protein, 16 aa, Homo sapiens
  CDR3 for alpha chain variable domain of TCR clone 254252 (TRAV35, TRAJ28)
CAGQRYSGAGSYQLTF

SEQ ID NO: 508504 - protein, 13 aa, Homo sapiens
  CDR3 for beta chain variable domain of TCR clone 254252 (TRBV19, TRBJ1-2)
CASSQGQLYGYTF

SEQ ID NO: 508505 - protein, 13 aa, Homo sapiens
  CDR3 for alpha chain variable domain of TCR clone 254253 (TRAV13-1, TRAJ37)
CAARSGNTGKLIF

SEQ ID NO: 508506 - protein, 14 aa, Homo sapiens
  CDR3 for beta chain variable domain of TCR clone 254253 (TRBV12-4, TRBJ2-3)
CATSVGQGTDTQYF

SEQ ID NO: 508507 - protein, 12 aa, Homo sapiens
  CDR3 for alpha chain variable domain of TCR clone 254254 (TRAV21, TRAJ49)
CAVSWTGNQFYF

SEQ ID NO: 508508 - protein, 14 aa, Homo sapiens
  CDR3 for beta chain variable domain of TCR clone 254254 (TRBV19, TRBJ2-1)
CARGARSFQWEQFF

SEQ ID NO: 508509 - protein, 16 aa, Homo sapiens
  CDR3 for alpha chain variable domain of TCR clone 254255 (TRAV8-3, TRAJ44)
CAVGASNTGTASKLTF

SEQ ID NO: 508510 - protein, 14 aa, Homo sapiens
  CDR3 for beta chain variable domain of TCR clone 254255 (TRBV18, TRBJ2-7)
CASSPRGGAYEQYF

SEQ ID NO: 508511 - protein, 13 aa, Homo sapiens
  CDR3 for alpha chain variable domain of TCR clone 254256 (TRAV8-1, TRAJ32)
CAADGGATHKLIF

SEQ ID NO: 508512 - protein, 18 aa, Homo sapiens
  CDR3 for beta chain variable domain of TCR clone 254256 (TRBV18, TRBJ2-3)
CASSYTSGAAGGTDTQYF

SEQ ID NO: 508513 - protein, 11 aa, Homo sapiens
  CDR3 for alpha chain variable domain of TCR clone 254257 (TRAV1-1, TRAJ23)
CAVRQGGKRIF

SEQ ID NO: 508514 - protein, 14 aa, Homo sapiens
  CDR3 for beta chain variable domain of TCR clone 254257 (TRBV5-4, TRBJ1-1)
CASSLDSRRDEAFF

SEQ ID NO: 508515 - protein, 11 aa, Homo sapiens
  CDR3 for alpha chain variable domain of TCR clone 254258 (TRAV12-2, TRAJ30)
CCEATDDKIIF

SEQ ID NO: 508516 - protein, 15 aa, Homo sapiens
  CDR3 for beta chain variable domain of TCR clone 254258 (TRBV6-6, TRBJ2-7)
CASSYSYGGSYEQYF

SEQ ID NO: 508517 - protein, 14 aa, Homo sapiens
  CDR3 for alpha chain variable domain of TCR clone 254259 (TRAV12-1, TRAJ17)
CVVNYKASGNKLTF

SEQ ID NO: 508518 - protein, 12 aa, Homo sapiens
  CDR3 for beta chain variable domain of TCR clone 254259 (TRBV20-1, TRBJ2-7)
CSAITPTKEHYF

SEQ ID NO: 508519 - protein, 13 aa, Homo sapiens
  CDR3 for alpha chain variable domain of TCR clone 254260 (TRAV13-1, TRAJ39)
CSKYSNAGNMLTF

SEQ ID NO: 508520 - protein, 20 aa, Homo sapiens
  CDR3 for beta chain variable domain of TCR clone 254260 (TRBV7-8, TRBJ2-2)
CASSHLFPGPTIHITGELFF

SEQ ID NO: 508521 - protein, 15 aa, Homo sapiens
  CDR3 for alpha chain variable domain of TCR clone 254261 (TRAV13-1, TRAJ32)
CAASNGWWCYKQSHL

SEQ ID NO: 508522 - protein, 15 aa, Homo sapiens
  CDR3 for beta chain variable domain of TCR clone 254261 (TRBV20-1, TRBJ1-2)
CSAIRTGAFNYGYTF

SEQ ID NO: 508523 - protein, 11 aa, Homo sapiens
  CDR3 for alpha chain variable domain of TCR clone 254262 (TRAV1-2, TRAJ31)
CAVNNSARLMF

SEQ ID NO: 508524 - protein, 15 aa, Homo sapiens
  CDR3 for beta chain variable domain of TCR clone 254262 (TRBV28, TRBJ2-1)
CASSIIAGGRSEHFF

SEQ ID NO: 508525 - protein, 12 aa, Homo sapiens
  CDR3 for alpha chain variable domain of TCR clone 254263 (TRAV3, TRAJ39)
CAVIEWSNMLTF

SEQ ID NO: 508526 - protein, 14 aa, Homo sapiens
  CDR3 for beta chain variable domain of TCR clone 254263 (TRBV12-5, TRBJ2-5)
CASGSRTHQETQYF

SEQ ID NO: 508527 - protein, 14 aa, Homo sapiens
  CDR3 for alpha chain variable domain of TCR clone 254264 (TRAV1-1, TRAJ27)
CAVIYNTNAGKSTF

SEQ ID NO: 508528 - protein, 15 aa, Homo sapiens
  CDR3 for beta chain variable domain of TCR clone 254264 (TRBV7-2, TRBJ2-1)
CASSSELAGGNAQFF

SEQ ID NO: 508529 - protein, 12 aa, Homo sapiens
  CDR3 for alpha chain variable domain of TCR clone 254265 (TRAV4, TRAJ26)
CLVGDYGQNFVF

SEQ ID NO: 508530 - protein, 19 aa, Homo sapiens
  CDR3 for beta chain variable domain of TCR clone 254265 (TRBV11-2, TRBJ2-3)
CASSLTSGTRFRVTDTQYF

SEQ ID NO: 508531 - protein, 15 aa, Homo sapiens
  CDR3 for alpha chain variable domain of TCR clone 254266 (TRAV2, TRAJ13)
CAVEPGFWGLPESYL

SEQ ID NO: 508532 - protein, 14 aa, Homo sapiens
  CDR3 for beta chain variable domain of TCR clone 254266 (TRBV28, TRBJ1-5)
CASSGQTLYQPQHF

SEQ ID NO: 508533 - protein, 15 aa, Homo sapiens
  CDR3 for alpha chain variable domain of TCR clone 254267 (TRAV26-1, TRAJ29)
CIVRVEGSGNTPLVF

SEQ ID NO: 508534 - protein, 14 aa, Homo sapiens
  CDR3 for beta chain variable domain of TCR clone 254267 (TRBV19, TRBJ2-1)
CASSRLASINEQFF

SEQ ID NO: 508535 - protein, 11 aa, Homo sapiens
  CDR3 for alpha chain variable domain of TCR clone 254268 (TRAV21, TRAJ34)
CAVTNTDKLIF

SEQ ID NO: 508536 - protein, 16 aa, Homo sapiens
  CDR3 for beta chain variable domain of TCR clone 254268 (TRBV20-1, TRBJ1-4)
CSAPGQGLLTNENLFF

SEQ ID NO: 508537 - protein, 15 aa, Homo sapiens
  CDR3 for alpha chain variable domain of TCR clone 254269 (TRAV26-1, TRAJ28)
CIVRVAGAGSYQLTF

SEQ ID NO: 508538 - protein, 19 aa, Homo sapiens
  CDR3 for beta chain variable domain of TCR clone 254269 (TRBV7-3, TRBJ2-7)
CAGSLTGVAGGWPSYEQYF

SEQ ID NO: 508539 - protein, 13 aa, Homo sapiens
  CDR3 for alpha chain variable domain of TCR clone 254270 (TRAV21, TRAJ27)
CAARPGNAGKSTF

SEQ ID NO: 508540 - protein, 16 aa, Homo sapiens
  CDR3 for beta chain variable domain of TCR clone 254270 (TRBV20-1, TRBJ1-2)
CGASMGQGVANYGYTF

SEQ ID NO: 508541 - protein, 11 aa, Homo sapiens
  CDR3 for alpha chain variable domain of TCR clone 254271 (TRAV2, TRAJ13)
CASGGYQKVTF

SEQ ID NO: 508542 - protein, 19 aa, Homo sapiens
  CDR3 for beta chain variable domain of TCR clone 254271 (TRBV6-1, TRBJ1-3)
CASVQGGGWKHHIFWRGKL

SEQ ID NO: 508543 - protein, 10 aa, Homo sapiens
  CDR3 for alpha chain variable domain of TCR clone 254272 (TRAV23/DV6, TRAJ57)
CAASSTLSQG

SEQ ID NO: 508544 - protein, 16 aa, Homo sapiens
  CDR3 for beta chain variable domain of TCR clone 254272 (TRBV20-1, TRBJ2-2)
CSASASGIPGAGELFF

SEQ ID NO: 508545 - protein, 16 aa, Homo sapiens
  CDR3 for alpha chain variable domain of TCR clone 254273 (TRAV21, TRAJ37)
CAVRTAGSSNTSKLTF

SEQ ID NO: 508546 - protein, 13 aa, Homo sapiens
  CDR3 for beta chain variable domain of TCR clone 254273 (TRBV7-9, TRBJ2-5)
CASLPSGRETQYF

SEQ ID NO: 508547 - protein, 17 aa, Homo sapiens
  CDR3 for alpha chain variable domain of TCR clone 254274 (TRAV3, TRAJ42)
CAVRDRGYGGSQGNIIF

SEQ ID NO: 508548 - protein, 15 aa, Homo sapiens
  CDR3 for beta chain variable domain of TCR clone 254274 (TRBV2, TRBJ2-7)
CASSEGLARSYEQYF

SEQ ID NO: 508549 - protein, 14 aa, Homo sapiens
  CDR3 for alpha chain variable domain of TCR clone 254275 (TRAV8-1, TRAJ39)
CAVNASNAGNMLTF

SEQ ID NO: 508550 - protein, 17 aa, Homo sapiens
  CDR3 for beta chain variable domain of TCR clone 254275 (TRBV13, TRBJ2-3)
CASSLSRVAGGRNTQYF

SEQ ID NO: 508551 - protein, 12 aa, Homo sapiens
  CDR3 for alpha chain variable domain of TCR clone 254276 (TRAV1-1, TRAJ39)
CAVPVVGNMLTF

SEQ ID NO: 508552 - protein, 16 aa, Homo sapiens
  CDR3 for beta chain variable domain of TCR clone 254276 (TRBV13, TRBJ2-3)
CQQPLQGSGGRNTQYF

SEQ ID NO: 508553 - protein, 18 aa, Homo sapiens
  CDR3 for alpha chain variable domain of TCR clone 254277 (TRAV38-1, TRAJ40)
CDVFLCLRPTSGTYKYIF

SEQ ID NO: 508554 - protein, 14 aa, Homo sapiens
  CDR3 for beta chain variable domain of TCR clone 254277 (TRBV19, TRBJ2-1)
CASPTFVLSGEQFF

SEQ ID NO: 508555 - protein, 15 aa, Homo sapiens
  CDR3 for alpha chain variable domain of TCR clone 254278 (TRAV3, TRAJ22)
CAVRDRGGSARQLTF

SEQ ID NO: 508556 - protein, 13 aa, Homo sapiens
  CDR3 for beta chain variable domain of TCR clone 254278 (TRBV7-3, TRBJ2-1)
CASSSVAYNEQFF

SEQ ID NO: 508557 - protein, 14 aa, Homo sapiens
  CDR3 for alpha chain variable domain of TCR clone 254279 (TRAV4, TRAJ30)
CLVGDTNRDDKIIF

SEQ ID NO: 508558 - protein, 14 aa, Homo sapiens
  CDR3 for beta chain variable domain of TCR clone 254279 (TRBV19, TRBJ2-7)
CASSIQEWSYEQYF

SEQ ID NO: 508559 - protein, 14 aa, Homo sapiens
  CDR3 for alpha chain variable domain of TCR clone 254280 (TRAV1-2, TRAJ16)
CAVNRFSDGQKLLF

SEQ ID NO: 508560 - protein, 17 aa, Homo sapiens
  CDR3 for beta chain variable domain of TCR clone 254280 (TRBV5-8, TRBJ2-3)
CASSLRSGRFGTDTQYF

SEQ ID NO: 508561 - protein, 13 aa, Homo sapiens
  CDR3 for alpha chain variable domain of TCR clone 254281 (TRAV8-3, TRAJ36)
CAVGATGANNLFF

SEQ ID NO: 508562 - protein, 11 aa, Homo sapiens
  CDR3 for beta chain variable domain of TCR clone 254281 (TRBV19, TRBJ1-1)
CASSIGSEAFF

SEQ ID NO: 508563 - protein, 13 aa, Homo sapiens
  CDR3 for alpha chain variable domain of TCR clone 254282 (TRAV6, TRAJ23)
CALDQNQGGKLIL

SEQ ID NO: 508564 - protein, 15 aa, Homo sapiens
  CDR3 for beta chain variable domain of TCR clone 254282 (TRBV28, TRBJ1-2)
CASSGSEQRAFGYTF

SEQ ID NO: 508565 - protein, 14 aa, Homo sapiens
  CDR3 for alpha chain variable domain of TCR clone 254283 (TRAV2, TRAJ37)
CAVDFTSNTGKLIF

SEQ ID NO: 508566 - protein, 14 aa, Homo sapiens
  CDR3 for beta chain variable domain of TCR clone 254283 (TRBV20-1, TRBJ1-1)
CSARDRGQGSEAFF

SEQ ID NO: 508567 - protein, 15 aa, Homo sapiens
  CDR3 for alpha chain variable domain of TCR clone 254284 (TRAV3, TRAJ17)
CAVRDTGAAGNKLTF

SEQ ID NO: 508568 - protein, 14 aa, Homo sapiens
  CDR3 for beta chain variable domain of TCR clone 254284 (TRBV6-1, TRBJ1-3)
CASVQGGGGNTIYF

SEQ ID NO: 508569 - protein, 18 aa, Homo sapiens
  CDR3 for alpha chain variable domain of TCR clone 254285 (TRAV21, TRAJ52)
CAVRPSPAGGTSYGKMKF

SEQ ID NO: 508570 - protein, 17 aa, Homo sapiens
  CDR3 for beta chain variable domain of TCR clone 254285 (TRBV13, TRBJ2-3)
CASSLSRVAGGRNTQYF

SEQ ID NO: 508571 - protein, 17 aa, Homo sapiens
  CDR3 for alpha chain variable domain of TCR clone 254286 (TRAV16, TRAJ42)
CALSPKLYGGSQGNLIF

SEQ ID NO: 508572 - protein, 16 aa, Homo sapiens
  CDR3 for beta chain variable domain of TCR clone 254286 (TRBV7-3, TRBJ2-1)
CASSLSSGGGAKEQFF

SEQ ID NO: 508573 - protein, 13 aa, Homo sapiens
  CDR3 for alpha chain variable domain of TCR clone 254287 (TRAV12-2, TRAJ7)
RSVNLYGNNRLAF

SEQ ID NO: 508574 - protein, 14 aa, Homo sapiens
  CDR3 for beta chain variable domain of TCR clone 254287 (TRBV25-1, TRBJ1-2)
CASSEATGPYGYTF

SEQ ID NO: 508575 - protein, 14 aa, Homo sapiens
  CDR3 for alpha chain variable domain of TCR clone 254288 (TRAV12-3, TRAJ10)
SHLPLTGGGNKLTF

SEQ ID NO: 508576 - protein, 13 aa, Homo sapiens
  CDR3 for beta chain variable domain of TCR clone 254288 (TRBV28, TRBJ2-7)
CASSLPSRYEQYF

SEQ ID NO: 508577 - protein, 13 aa, Homo sapiens
  CDR3 for alpha chain variable domain of TCR clone 254289 (TRAV1-2, TRAJ20)
CAVRDGNDYKLSF

SEQ ID NO: 508578 - protein, 14 aa, Homo sapiens
  CDR3 for beta chain variable domain of TCR clone 254289 (TRBV7-2, TRBJ2-3)
CRQLRGGGRDTQYF

SEQ ID NO: 508579 - protein, 18 aa, Homo sapiens
  CDR3 for alpha chain variable domain of TCR clone 254290 (TRAV21, TRAJ52)
CAVRPSSAGGTSYGKLTF

SEQ ID NO: 508580 - protein, 12 aa, Homo sapiens
  CDR3 for beta chain variable domain of TCR clone 254290 (TRBV7-9, TRBJ2-7)
CASSFGSYEQYF

SEQ ID NO: 508581 - protein, 13 aa, Homo sapiens
  CDR3 for alpha chain variable domain of TCR clone 254291 (TRAV13-1, TRAJ6)
CAASKGGSYIPTF

SEQ ID NO: 508582 - protein, 13 aa, Homo sapiens
  CDR3 for beta chain variable domain of TCR clone 254291 (TRBV7-9, TRBJ2-5)
CASLPSGRETQFF

SEQ ID NO: 508583 - protein, 13 aa, Homo sapiens
  CDR3 for alpha chain variable domain of TCR clone 254292 (TRAV12-2, TRAJ20)
CAVYPSNDYKLSF

SEQ ID NO: 508584 - protein, 13 aa, Homo sapiens
  CDR3 for beta chain variable domain of TCR clone 254292 (TRBV5-1, TRBJ1-2)
CASSFQDGYGYTF

SEQ ID NO: 508585 - protein, 20 aa, Homo sapiens
  CDR3 for alpha chain variable domain of TCR clone 254293 (TRAV26-1, TRAJ42)
CCVLLHRQTYYGGSQGNLIF

SEQ ID NO: 508586 - protein, 17 aa, Homo sapiens
  CDR3 for beta chain variable domain of TCR clone 254293 (TRBV11-2, TRBJ2-1)
CASSLYPPGVEYNEQFF

SEQ ID NO: 508587 - protein, 17 aa, Homo sapiens
  CDR3 for alpha chain variable domain of TCR clone 254294 (TRAV3, TRAJ13)
CAVRDMRRTGGSQKVTF

SEQ ID NO: 508588 - protein, 14 aa, Homo sapiens
  CDR3 for beta chain variable domain of TCR clone 254294 (TRBV5-1, TRBJ2-7)
CASSLTGSGYEQYF

SEQ ID NO: 508589 - protein, 13 aa, Homo sapiens
  CDR3 for alpha chain variable domain of TCR clone 254295 (TRAV30, TRAJ39)
CGTEKNAGNMLTF

SEQ ID NO: 508590 - protein, 14 aa, Homo sapiens
  CDR3 for beta chain variable domain of TCR clone 254295 (TRBV25-1, TRBJ1-1)
CASTHLGGNTEAFF

SEQ ID NO: 508591 - protein, 13 aa, Homo sapiens
  CDR3 for alpha chain variable domain of TCR clone 254296 (TRAV12-2, TRAJ6)
CAVNVSRKLHTYI

SEQ ID NO: 508592 - protein, 14 aa, Homo sapiens
  CDR3 for beta chain variable domain of TCR clone 254296 (TRBV5-1, TRBJ2-7)
CASSRGESLYEQYF

SEQ ID NO: 508593 - protein, 11 aa, Homo sapiens
  CDR3 for alpha chain variable domain of TCR clone 254297 (TRAV3, TRAJ21)
CAVGNFNKFYF

SEQ ID NO: 508594 - protein, 16 aa, Homo sapiens
  CDR3 for beta chain variable domain of TCR clone 254297 (TRBV19, TRBJ2-1)
CASSTAGPSSYDEQFF

SEQ ID NO: 508595 - protein, 13 aa, Homo sapiens
  CDR3 for alpha chain variable domain of TCR clone 254298 (TRAV20, TRAJ31)
SAVQAWNNARLMF

SEQ ID NO: 508596 - protein, 16 aa, Homo sapiens
  CDR3 for beta chain variable domain of TCR clone 254298 (TRBV6-6, TRBJ2-1)
CASSWGGQGPYNEQFF

SEQ ID NO: 508597 - protein, 14 aa, Homo sapiens
  CDR3 for alpha chain variable domain of TCR clone 254299 (TRAV12-3, TRAJ10)
SHLPLTGGGNKLTF

SEQ ID NO: 508598 - protein, 13 aa, Homo sapiens
  CDR3 for beta chain variable domain of TCR clone 254299 (TRBV15, TRBJ1-6)
CATSGGLKSPLHF

SEQ ID NO: 508599 - protein, 13 aa, Homo sapiens
  CDR3 for alpha chain variable domain of TCR clone 254300 (TRAV8-3, TRAJ36)
CAVGATGANNLFF

SEQ ID NO: 508600 - protein, 13 aa, Homo sapiens
  CDR3 for beta chain variable domain of TCR clone 254300 (TRBV2, TRBJ1-4)
CASSERAGEKLFF

SEQ ID NO: 508601 - protein, 14 aa, Homo sapiens
  CDR3 for alpha chain variable domain of TCR clone 254301 (TRAV12-1, TRAJ8)
CVVNMNTGFQKLVF

SEQ ID NO: 508602 - protein, 16 aa, Homo sapiens
  CDR3 for beta chain variable domain of TCR clone 254301 (TRBV7-3, TRBJ2-2)
CASSLKRGTLSGELFF

SEQ ID NO: 508603 - protein, 14 aa, Homo sapiens
  CDR3 for alpha chain variable domain of TCR clone 254302 (TRAV14/DV4, TRAJ49)
CAMREGVNGNQFYF

SEQ ID NO: 508604 - protein, 17 aa, Homo sapiens
  CDR3 for beta chain variable domain of TCR clone 254302 (TRBV15, TRBJ2-4)
CATSRDNPQTGLDIQYF

SEQ ID NO: 508605 - protein, 14 aa, Homo sapiens
  CDR3 for alpha chain variable domain of TCR clone 254303 (TRAV26-1, TRAJ38)
CIADNAGNNRKLIW

SEQ ID NO: 508606 - protein, 13 aa, Homo sapiens
  CDR3 for beta chain variable domain of TCR clone 254303 (TRBV15, TRBJ1-6)
CATSGVLNSPLHF

SEQ ID NO: 508607 - protein, 16 aa, Homo sapiens
  CDR3 for alpha chain variable domain of TCR clone 254304 (TRAV12-1, TRAJ42)
CVVTPYYGGSQGNLIF

SEQ ID NO: 508608 - protein, 13 aa, Homo sapiens
  CDR3 for beta chain variable domain of TCR clone 254304 (TRBV19, TRBJ1-2)
CASSVPGQDGYTF

SEQ ID NO: 508609 - protein, 15 aa, Homo sapiens
  CDR3 for alpha chain variable domain of TCR clone 254305 (TRAV13-1, TRAJ17)
CAASIERTAGNKLTF

SEQ ID NO: 508610 - protein, 12 aa, Homo sapiens
  CDR3 for beta chain variable domain of TCR clone 254305 (TRBV5-7, TRBJ1-1)
CASSLGRGKAFF

SEQ ID NO: 508611 - protein, 15 aa, Homo sapiens
  CDR3 for alpha chain variable domain of TCR clone 254306 (TRAV3, TRAJ5)
CAVRDLDTGMRALTF

SEQ ID NO: 508612 - protein, 13 aa, Homo sapiens
  CDR3 for beta chain variable domain of TCR clone 254306 (TRBV12-4, TRBJ2-7)
CASSPTGTYEQYF

SEQ ID NO: 508613 - protein, 11 aa, Homo sapiens
  CDR3 for alpha chain variable domain of TCR clone 254307 (TRAV38-2/DV8, TRAJ24)
CALDSWGKFQV

SEQ ID NO: 508614 - protein, 14 aa, Homo sapiens
  CDR3 for beta chain variable domain of TCR clone 254307 (TRBV25-1, TRBJ2-1)
CASSPRGPYNEQFF

SEQ ID NO: 508615 - protein, 12 aa, Homo sapiens
  CDR3 for alpha chain variable domain of TCR clone 254308 (TRAV8-3, TRAJ26)
FAGDNYGQNFVF

SEQ ID NO: 508616 - protein, 14 aa, Homo sapiens
  CDR3 for beta chain variable domain of TCR clone 254308 (TRBV6-1, TRBJ1-3)
CASVQGGGGNTIYF

SEQ ID NO: 508617 - protein, 12 aa, Homo sapiens
  CDR3 for alpha chain variable domain of TCR clone 254309 (TRAV21, TRAJ39)
CAADNAGNMLTF

SEQ ID NO: 508618 - protein, 12 aa, Homo sapiens
  CDR3 for beta chain variable domain of TCR clone 254309 (TRBV5-4, TRBJ2-7)
CVSSWAGQGENF

SEQ ID NO: 508619 - protein, 15 aa, Homo sapiens
  CDR3 for alpha chain variable domain of TCR clone 254310 (TRAV8-3, TRAJ45)
CASSYSGGGADGLTF

SEQ ID NO: 508620 - protein, 12 aa, Homo sapiens
  CDR3 for beta chain variable domain of TCR clone 254310 (TRBV10-3, TRBJ2-7)
CLQTSVNYEQYF

SEQ ID NO: 508621 - protein, 10 aa, Homo sapiens
  CDR3 for alpha chain variable domain of TCR clone 254311 (TRAV26-1, TRAJ22)
CIVSLNFFWF

SEQ ID NO: 508622 - protein, 16 aa, Homo sapiens
  CDR3 for beta chain variable domain of TCR clone 254311 (TRBV4-3, TRBJ2-1)
CASSPALDRGVNEQFF

SEQ ID NO: 508623 - protein, 13 aa, Homo sapiens
  CDR3 for alpha chain variable domain of TCR clone 254312 (TRAV26-1, TRAJ36)
CIVVGTGANNLFL

SEQ ID NO: 508624 - protein, 15 aa, Homo sapiens
  CDR3 for beta chain variable domain of TCR clone 254312 (TRBV27, TRBJ2-1)
CASSNGGGSSNEQFF

SEQ ID NO: 508625 - protein, 16 aa, Homo sapiens
  CDR3 for alpha chain variable domain of TCR clone 254313 (TRAV30, TRAJ24)
CGTEIVDAASWGKFQF

SEQ ID NO: 508626 - protein, 14 aa, Homo sapiens
  CDR3 for beta chain variable domain of TCR clone 254313 (TRBV12-5, TRBJ2-5)
CASGSRTHQETQYC

SEQ ID NO: 508627 - protein, 13 aa, Homo sapiens
  CDR3 for alpha chain variable domain of TCR clone 254314 (TRAV2, TRAJ40)
CAVVTSGTYKYIL

SEQ ID NO: 508628 - protein, 16 aa, Homo sapiens
  CDR3 for beta chain variable domain of TCR clone 254314 (TRBV29-1, TRBJ2-6)
CSVEDITYSGANVLTF

SEQ ID NO: 508629 - protein, 13 aa, Homo sapiens
  CDR3 for alpha chain variable domain of TCR clone 254315 (TRAV8-3, TRAJ6)
CAVGSGGSYIPTY

SEQ ID NO: 508630 - protein, 14 aa, Homo sapiens
  CDR3 for beta chain variable domain of TCR clone 254315 (TRBV11-2, TRBJ1-1)
CASSTQRGRTEAFF

SEQ ID NO: 508631 - protein, 15 aa, Homo sapiens
  CDR3 for alpha chain variable domain of TCR clone 254316 (TRAV25, TRAJ52)
CAGRTGGTSYGKLTF

SEQ ID NO: 508632 - protein, 14 aa, Homo sapiens
  CDR3 for beta chain variable domain of TCR clone 254316 (TRBV4-3, TRBJ1-4)
CASSPLQRNEKLFF

SEQ ID NO: 508633 - protein, 11 aa, Homo sapiens
  CDR3 for alpha chain variable domain of TCR clone 254317 (TRAV2, TRAJ20)
CAVEYDYKLSF

SEQ ID NO: 508634 - protein, 13 aa, Homo sapiens
  CDR3 for beta chain variable domain of TCR clone 254317 (TRBV15, TRBJ1-6)
CATSGGLNSPLHF

SEQ ID NO: 508635 - protein, 14 aa, Homo sapiens
  CDR3 for alpha chain variable domain of TCR clone 254318 (TRAV1-1, TRAJ27)
CAVIYNTNAGKSTF

SEQ ID NO: 508636 - protein, 15 aa, Homo sapiens
  CDR3 for beta chain variable domain of TCR clone 254318 (TRBV7-2, TRBJ2-1)
CASGSGLAGGNEQFL

SEQ ID NO: 508637 - protein, 15 aa, Homo sapiens
  CDR3 for alpha chain variable domain of TCR clone 254319 (TRAV3, TRAJ22)
CAVRDRGGSARQLTF

SEQ ID NO: 508638 - protein, 18 aa, Homo sapiens
  CDR3 for beta chain variable domain of TCR clone 254319 (TRBV28, TRBJ2-1)
CASSSTSGRANSYDEQFF

SEQ ID NO: 508639 - protein, 12 aa, Homo sapiens
  CDR3 for alpha chain variable domain of TCR clone 254320 (TRAV12-1, TRAJ31)
CVSWNNNARLMF

SEQ ID NO: 508640 - protein, 15 aa, Homo sapiens
  CDR3 for beta chain variable domain of TCR clone 254320 (TRBV7-2, TRBJ1-5)
CASSLARGKEKPQHF

SEQ ID NO: 508641 - protein, 13 aa, Homo sapiens
  CDR3 for alpha chain variable domain of TCR clone 254321 (TRAV12-3, TRAJ7)
CAMTPYGNNRLAF

SEQ ID NO: 508642 - protein, 13 aa, Homo sapiens
  CDR3 for beta chain variable domain of TCR clone 254321 (TRBV10-2, TRBJ2-3)
CASSESGDHTQYF

SEQ ID NO: 508643 - protein, 14 aa, Homo sapiens
  CDR3 for alpha chain variable domain of TCR clone 254322 (TRAV26-1, TRAJ45)
CIGRVVGGADGLTF

SEQ ID NO: 508644 - protein, 16 aa, Homo sapiens
  CDR3 for beta chain variable domain of TCR clone 254322 (TRBV7-9, TRBJ1-1)
CASSLTQVRSNTEDFF

SEQ ID NO: 508645 - protein, 13 aa, Homo sapiens
  CDR3 for alpha chain variable domain of TCR clone 254323 (TRAV8-3, TRAJ37)
SAVPSSNTGKLII

SEQ ID NO: 508646 - protein, 12 aa, Homo sapiens
  CDR3 for beta chain variable domain of TCR clone 254323 (TRBV11-2, TRBJ2-1)
CASSPGNNEQFF

SEQ ID NO: 508647 - protein, 13 aa, Homo sapiens
  CDR3 for alpha chain variable domain of TCR clone 254324 (TRAV8-3, TRAJ28)
CSVGAVGSYQLTF

SEQ ID NO: 508648 - protein, 17 aa, Homo sapiens
  CDR3 for beta chain variable domain of TCR clone 254324 (TRBV11-2, TRBJ2-1)
CASSLYPPGVEYNEQFF

SEQ ID NO: 508649 - protein, 13 aa, Homo sapiens
  CDR3 for alpha chain variable domain of TCR clone 254325 (TRAV21, TRAJ27)
CAALNTNAGKSTF

SEQ ID NO: 508650 - protein, 15 aa, Homo sapiens
  CDR3 for beta chain variable domain of TCR clone 254325 (TRBV20-1, TRBJ2-7)
CSARKGLAESYEHYF

SEQ ID NO: 508651 - protein, 12 aa, Homo sapiens
  CDR3 for alpha chain variable domain of TCR clone 254326 (TRAV17, TRAJ4)
CATRGGYNKLIF

SEQ ID NO: 508652 - protein, 15 aa, Homo sapiens
  CDR3 for beta chain variable domain of TCR clone 254326 (TRBV6-1, TRBJ2-6)
CASSSRPSGANVLTF

SEQ ID NO: 508653 - protein, 11 aa, Homo sapiens
  CDR3 for alpha chain variable domain of TCR clone 254327 (TRAV1-1, TRAJ23)
CAVRQGGKLIF

SEQ ID NO: 508654 - protein, 14 aa, Homo sapiens
  CDR3 for beta chain variable domain of TCR clone 254327 (TRBV19, TRBJ2-1)
CASPTFVLNGEQFF

SEQ ID NO: 508655 - protein, 17 aa, Homo sapiens
  CDR3 for alpha chain variable domain of TCR clone 254328 (TRAV23/DV6, TRAJ28)
CAALLAYSGAGSYQLPF

SEQ ID NO: 508656 - protein, 13 aa, Homo sapiens
  CDR3 for beta chain variable domain of TCR clone 254328 (TRBV4-2, TRBJ2-3)
CASSQVNTDTQYF

SEQ ID NO: 508657 - protein, 13 aa, Homo sapiens
  CDR3 for alpha chain variable domain of TCR clone 254329 (TRAV8-3, TRAJ28)
CAVGSVGSYPLTF

SEQ ID NO: 508658 - protein, 14 aa, Homo sapiens
  CDR3 for beta chain variable domain of TCR clone 254329 (TRBV7-2, TRBJ2-7)
CASRSQGAAYEQYF

SEQ ID NO: 508659 - protein, 14 aa, Homo sapiens
  CDR3 for alpha chain variable domain of TCR clone 254330 (TRAV13-1, TRAJ31)
CAASSRPNNDRLMF

SEQ ID NO: 508660 - protein, 15 aa, Homo sapiens
  CDR3 for beta chain variable domain of TCR clone 254330 (TRBV4-2, TRBJ2-4)
CASSPLGAAKNIQYF

SEQ ID NO: 508661 - protein, 13 aa, Homo sapiens
  CDR3 for alpha chain variable domain of TCR clone 254331 (TRAV8-6, TRAJ8)
CAVSNTGFQKPVF

SEQ ID NO: 508662 - protein, 15 aa, Homo sapiens
  CDR3 for beta chain variable domain of TCR clone 254331 (TRBV28, TRBJ2-5)
CASSSGRTIQETQYF

SEQ ID NO: 508663 - protein, 14 aa, Homo sapiens
  CDR3 for alpha chain variable domain of TCR clone 254332 (TRAV3, TRAJ17)
CAVRDAAAGNKRTF

SEQ ID NO: 508664 - protein, 13 aa, Homo sapiens
  CDR3 for beta chain variable domain of TCR clone 254332 (TRBV2, TRBJ1-1)
CASSVSGYTEAFF

SEQ ID NO: 508665 - protein, 15 aa, Homo sapiens
  CDR3 for alpha chain variable domain of TCR clone 254333 (TRAV34, TRAJ38)
CGADFTPGNNRKLIS

SEQ ID NO: 508666 - protein, 15 aa, Homo sapiens
  CDR3 for beta chain variable domain of TCR clone 254333 (TRBV7-9, TRBJ1-4)
CASSARTGGNEKLFF

SEQ ID NO: 508667 - protein, 12 aa, Homo sapiens
  CDR3 for alpha chain variable domain of TCR clone 254334 (TRAV27, TRAJ41)
CAGRNFGYALNF

SEQ ID NO: 508668 - protein, 15 aa, Homo sapiens
  CDR3 for beta chain variable domain of TCR clone 254334 (TRBV6-3, TRBJ2-7)
CASSSPGTVFYEQYF

SEQ ID NO: 508669 - protein, 15 aa, Homo sapiens
  CDR3 for alpha chain variable domain of TCR clone 254335 (TRAV16, TRAJ16)
CALQGGGSDGQKLLF

SEQ ID NO: 508670 - protein, 16 aa, Homo sapiens
  CDR3 for beta chain variable domain of TCR clone 254335 (TRBV7-7, TRBJ2-1)
CASSLASGTSYNEQFF

SEQ ID NO: 508671 - protein, 15 aa, Homo sapiens
  CDR3 for alpha chain variable domain of TCR clone 254336 (TRAV27, TRAJ45)
CRSPQSGGGADGLTF

SEQ ID NO: 508672 - protein, 20 aa, Homo sapiens
  CDR3 for beta chain variable domain of TCR clone 254336 (TRBV7-8, TRBJ2-2)
CASSHLFPGPTIHITGELFF

SEQ ID NO: 508673 - protein, 15 aa, Homo sapiens
  CDR3 for alpha chain variable domain of TCR clone 254337 (TRAV3, TRAJ11)
CAVRDRGSGYSTLTF

SEQ ID NO: 508674 - protein, 13 aa, Homo sapiens
  CDR3 for beta chain variable domain of TCR clone 254337 (TRBV9, TRBJ2-1)
CASSPSGGNEQFF

SEQ ID NO: 508675 - protein, 10 aa, Homo sapiens
  CDR3 for alpha chain variable domain of TCR clone 254338 (TRAV5, TRAJ34)
CAEDTDKLIF

SEQ ID NO: 508676 - protein, 14 aa, Homo sapiens
  CDR3 for beta chain variable domain of TCR clone 254338 (TRBV7-6, TRBJ2-1)
CASSLGGGADEQFF

SEQ ID NO: 508677 - protein, 11 aa, Homo sapiens
  CDR3 for alpha chain variable domain of TCR clone 254339 (TRAV3, TRAJ21)
CAVGNFNKFYF

SEQ ID NO: 508678 - protein, 14 aa, Homo sapiens
  CDR3 for beta chain variable domain of TCR clone 254339 (TRBV28, TRBJ1-2)
CASRIQGANYGYTF

SEQ ID NO: 508679 - protein, 12 aa, Homo sapiens
  CDR3 for alpha chain variable domain of TCR clone 254340 (TRAV13-2, TRAJ39)
CAENNEGNMLTF

SEQ ID NO: 508680 - protein, 13 aa, Homo sapiens
  CDR3 for beta chain variable domain of TCR clone 254340 (TRBV19, TRBJ1-1)
CASSPSNGGEAFF

SEQ ID NO: 508681 - protein, 11 aa, Homo sapiens
  CDR3 for alpha chain variable domain of TCR clone 254341 (TRAV2, TRAJ33)
CAVESNYQLIW

SEQ ID NO: 508682 - protein, 15 aa, Homo sapiens
  CDR3 for beta chain variable domain of TCR clone 254341 (TRBV4-3, TRBJ2-7)
CASSQGGRGIYEQYF

SEQ ID NO: 508683 - protein, 16 aa, Homo sapiens
  CDR3 for alpha chain variable domain of TCR clone 254342 (TRAV12-2, TRAJ32)
CAVNLGQGGATNKLIF

SEQ ID NO: 508684 - protein, 15 aa, Homo sapiens
  CDR3 for beta chain variable domain of TCR clone 254342 (TRBV20-1, TRBJ2-7)
CSARGPLAGGMEQYF

SEQ ID NO: 508685 - protein, 11 aa, Homo sapiens
  CDR3 for alpha chain variable domain of TCR clone 254343 (TRAV2, TRAJ13)
CASGGYQKVTF

SEQ ID NO: 508686 - protein, 15 aa, Homo sapiens
  CDR3 for beta chain variable domain of TCR clone 254343 (TRBV7-8, TRBJ1-2)
CASSLVRDGGLGYTF

SEQ ID NO: 508687 - protein, 17 aa, Homo sapiens
  CDR3 for alpha chain variable domain of TCR clone 254344 (TRAV12-1, TRAJ8)
CVVNPKRVNTGFQKLVF

SEQ ID NO: 508688 - protein, 14 aa, Homo sapiens
  CDR3 for beta chain variable domain of TCR clone 254344 (TRBV3-1, TRBJ2-7)
CASSRSSGKEEQYF

SEQ ID NO: 508689 - protein, 12 aa, Homo sapiens
  CDR3 for alpha chain variable domain of TCR clone 254345 (TRAV2, TRAJ31)
CAVEDNNARLIF

SEQ ID NO: 508690 - protein, 18 aa, Homo sapiens
  CDR3 for beta chain variable domain of TCR clone 254345 (TRBV7-2, TRBJ2-3)
CASSLKREGSGITDTQYF

SEQ ID NO: 508691 - protein, 16 aa, Homo sapiens
  CDR3 for alpha chain variable domain of TCR clone 254346 (TRAV8-3, TRAJ8)
CAVPRDGNTGFQKLVF

SEQ ID NO: 508692 - protein, 15 aa, Homo sapiens
  CDR3 for beta chain variable domain of TCR clone 254346 (TRBV19, TRBJ1-5)
CASSIVRADNQPQHF

SEQ ID NO: 508693 - protein, 16 aa, Homo sapiens
  CDR3 for alpha chain variable domain of TCR clone 254347 (TRAV12-3, TRAJ53)
CAMSPGSGGSNYKLTF

SEQ ID NO: 508694 - protein, 15 aa, Homo sapiens
  CDR3 for beta chain variable domain of TCR clone 254347 (TRBV6-5, TRBJ2-1)
CASSYDAGAGNEQFF

SEQ ID NO: 508695 - protein, 14 aa, Homo sapiens
  CDR3 for alpha chain variable domain of TCR clone 254348 (TRAV2, TRAJ9)
CAVEDRSGGFETIF

SEQ ID NO: 508696 - protein, 16 aa, Homo sapiens
  CDR3 for beta chain variable domain of TCR clone 254348 (TRBV28, TRBJ1-5)
CASSLTGQGWNQPQHF

SEQ ID NO: 508697 - protein, 13 aa, Homo sapiens
  CDR3 for alpha chain variable domain of TCR clone 254349 (TRAV8-3, TRAJ48)
CAGVPFGNEKLTF

SEQ ID NO: 508698 - protein, 13 aa, Homo sapiens
  CDR3 for beta chain variable domain of TCR clone 254349 (TRBV28, TRBJ2-7)
CASSNSGNYEQYF

SEQ ID NO: 508699 - protein, 15 aa, Homo sapiens
  CDR3 for alpha chain variable domain of TCR clone 254350 (TRAV3, TRAJ9)
CAVRARNTGGFKPIF

SEQ ID NO: 508700 - protein, 11 aa, Homo sapiens
  CDR3 for beta chain variable domain of TCR clone 254350 (TRBV11-2, TRBJ1-1)
CASSINTEAFF

SEQ ID NO: 508701 - protein, 16 aa, Homo sapiens
  CDR3 for alpha chain variable domain of TCR clone 254351 (TRAV12-3, TRAJ53)
CAMSPGSGGSNYKLPF

SEQ ID NO: 508702 - protein, 11 aa, Homo sapiens
  CDR3 for beta chain variable domain of TCR clone 254351 (TRBV29-1, TRBJ2-5)
CSEDRTGTQYC

SEQ ID NO: 508703 - protein, 16 aa, Homo sapiens
  CDR3 for alpha chain variable domain of TCR clone 254352 (TRAV12-3, TRAJ53)
CAMSPGSGGGNDKLTF

SEQ ID NO: 508704 - protein, 11 aa, Homo sapiens
  CDR3 for beta chain variable domain of TCR clone 254352 (TRBV29-1, TRBJ2-5)
CSEDRTGTQYF

SEQ ID NO: 508705 - protein, 16 aa, Homo sapiens
  CDR3 for alpha chain variable domain of TCR clone 254353 (TRAV3, TRAJ37)
CAVRPHGSGHTGKLIF

SEQ ID NO: 508706 - protein, 17 aa, Homo sapiens
  CDR3 for beta chain variable domain of TCR clone 254353 (TRBV20-1, TRBJ2-1)
CSASSSGLAGSYNEQFF

SEQ ID NO: 508707 - protein, 19 aa, Homo sapiens
  CDR3 for alpha chain variable domain of TCR clone 254354 (TRAV4, TRAJ37)
CTTASWVTGGSGNTGKLIF

SEQ ID NO: 508708 - protein, 15 aa, Homo sapiens
  CDR3 for beta chain variable domain of TCR clone 254354 (TRBV6-6, TRBJ1-1)
CASSYASGAGTEAFF

SEQ ID NO: 508709 - protein, 19 aa, Homo sapiens
  CDR3 for alpha chain variable domain of TCR clone 254355 (TRAV12-1, TRAJ31)
CVVNDNNNADSCLEMELSW

SEQ ID NO: 508710 - protein, 14 aa, Homo sapiens
  CDR3 for beta chain variable domain of TCR clone 254355 (TRBV7-2, TRBJ2-1)
CASSFGTSYGEQFL

SEQ ID NO: 508711 - protein, 11 aa, Homo sapiens
  CDR3 for alpha chain variable domain of TCR clone 254356 (TRAV38-1, TRAJ35)
CAFMSLDRLWE

SEQ ID NO: 508712 - protein, 13 aa, Homo sapiens
  CDR3 for beta chain variable domain of TCR clone 254356 (TRBV7-9, TRBJ1-2)
CASSLKQNYGYTF

SEQ ID NO: 508713 - protein, 15 aa, Homo sapiens
  CDR3 for alpha chain variable domain of TCR clone 254357 (TRAV3, TRAJ5)
CAVRDIDTGRRALTF

SEQ ID NO: 508714 - protein, 13 aa, Homo sapiens
  CDR3 for beta chain variable domain of TCR clone 254357 (TRBV12-4, TRBJ2-7)
CASRPTETYEQYF

SEQ ID NO: 508715 - protein, 13 aa, Homo sapiens
  CDR3 for alpha chain variable domain of TCR clone 254358 (TRAV12-1, TRAJ3)
CVVNPRGASKIIF

SEQ ID NO: 508716 - protein, 13 aa, Homo sapiens
  CDR3 for beta chain variable domain of TCR clone 254358 (TRBV28, TRBJ1-5)
CASNDRGNQPQHF

SEQ ID NO: 508717 - protein, 13 aa, Homo sapiens
  CDR3 for alpha chain variable domain of TCR clone 254359 (TRAV19, TRAJ34)
CALSTPNTDKLIF

SEQ ID NO: 508718 - protein, 12 aa, Homo sapiens
  CDR3 for beta chain variable domain of TCR clone 254359 (TRBV5-7, TRBJ2-5)
CASEGRGETQYC

SEQ ID NO: 508719 - protein, 12 aa, Homo sapiens
  CDR3 for alpha chain variable domain of TCR clone 254360 (TRAV13-2, TRAJ23)
CAERYRGGQLIF

SEQ ID NO: 508720 - protein, 16 aa, Homo sapiens
  CDR3 for beta chain variable domain of TCR clone 254360 (TRBV20-1, TRBJ1-4)
CSAPGQGLLTNEKLFF

SEQ ID NO: 508721 - protein, 20 aa, Homo sapiens
  CDR3 for alpha chain variable domain of TCR clone 254361 (TRAV12-1, TRAJ42)
SSVIQPPTSVKGGSQGNLIF

SEQ ID NO: 508722 - protein, 14 aa, Homo sapiens
  CDR3 for beta chain variable domain of TCR clone 254361 (TRBV11-2, TRBJ2-3)
CASSRLARTDTQYF

SEQ ID NO: 508723 - protein, 11 aa, Homo sapiens
  CDR3 for alpha chain variable domain of TCR clone 254362 (TRAV2, TRAJ13)
CASVGYQKVTF

SEQ ID NO: 508724 - protein, 17 aa, Homo sapiens
  CDR3 for beta chain variable domain of TCR clone 254362 (TRBV4-1, TRBJ1-5)
CASSQQPPTVANQPQHF

SEQ ID NO: 508725 - protein, 12 aa, Homo sapiens
  CDR3 for alpha chain variable domain of TCR clone 254363 (TRAV13-1, TRAJ49)
CAAPNTGNQFYF

SEQ ID NO: 508726 - protein, 17 aa, Homo sapiens
  CDR3 for beta chain variable domain of TCR clone 254363 (TRBV25-1, TRBJ2-7)
CASSDARVVFTSYEQYF

SEQ ID NO: 508727 - protein, 12 aa, Homo sapiens
  CDR3 for alpha chain variable domain of TCR clone 254364 (TRAV12-2, TRAJ31)
CAVNTPDARLMF

SEQ ID NO: 508728 - protein, 17 aa, Homo sapiens
  CDR3 for beta chain variable domain of TCR clone 254364 (TRBV20-1, TRBJ1-6)
CGARGGYTFSYNSPLHF

SEQ ID NO: 508729 - protein, 16 aa, Homo sapiens
  CDR3 for alpha chain variable domain of TCR clone 254365 (TRAV30, TRAJ24)
CGTEIVDADSWGKFQF

SEQ ID NO: 508730 - protein, 14 aa, Homo sapiens
  CDR3 for beta chain variable domain of TCR clone 254365 (TRBV2, TRBJ2-1)
CASRPGSSYNEQFF

SEQ ID NO: 508731 - protein, 12 aa, Homo sapiens
  CDR3 for alpha chain variable domain of TCR clone 254366 (TRAV12-1, TRAJ40)
CVVYSGTYKYIF

SEQ ID NO: 508732 - protein, 14 aa, Homo sapiens
  CDR3 for beta chain variable domain of TCR clone 254366 (TRBV4-3, TRBJ1-4)
CASSPLQRNEKLFF

SEQ ID NO: 508733 - protein, 17 aa, Homo sapiens
  CDR3 for alpha chain variable domain of TCR clone 254367 (TRAV4, TRAJ13)
CLVGVQGSSGGYQKVTF

SEQ ID NO: 508734 - protein, 13 aa, Homo sapiens
  CDR3 for beta chain variable domain of TCR clone 254367 (TRBV10-3, TRBJ2-7)
CASKLAVNYEQDF

SEQ ID NO: 508735 - protein, 13 aa, Homo sapiens
  CDR3 for alpha chain variable domain of TCR clone 254368 (TRAV12-3, TRAJ53)
CAMRGGSNYKLTF

SEQ ID NO: 508736 - protein, 15 aa, Homo sapiens
  CDR3 for beta chain variable domain of TCR clone 254368 (TRBV2, TRBJ2-1)
CATQARRVRIGEQFF

SEQ ID NO: 508737 - protein, 14 aa, Homo sapiens
  CDR3 for alpha chain variable domain of TCR clone 254369 (TRAV23/DV6, TRAJ40)
RAARKNSGTYKYIF

SEQ ID NO: 508738 - protein, 14 aa, Homo sapiens
  CDR3 for beta chain variable domain of TCR clone 254369 (TRBV10-3, TRBJ2-5)
CAISERDYQETQYF

SEQ ID NO: 508739 - protein, 15 aa, Homo sapiens
  CDR3 for alpha chain variable domain of TCR clone 254370 (TRAV12-1, TRAJ44)
CVVDNPQGTASKLNF

SEQ ID NO: 508740 - protein, 14 aa, Homo sapiens
  CDR3 for beta chain variable domain of TCR clone 254370 (TRBV7-9, TRBJ2-1)
CASSPRDSLYEQFF

SEQ ID NO: 508741 - protein, 15 aa, Homo sapiens
  CDR3 for alpha chain variable domain of TCR clone 254371 (TRAV12-1, TRAJ44)
CVVDTPQGTASKLTF

SEQ ID NO: 508742 - protein, 14 aa, Homo sapiens
  CDR3 for beta chain variable domain of TCR clone 254371 (TRBV7-9, TRBJ2-1)
CASSPRGSLYEQFF

SEQ ID NO: 508743 - protein, 16 aa, Homo sapiens
  CDR3 for alpha chain variable domain of TCR clone 254372 (TRAV30, TRAJ24)
GGTEIVDADSWGKFQF

SEQ ID NO: 508744 - protein, 15 aa, Homo sapiens
  CDR3 for beta chain variable domain of TCR clone 254372 (TRBV19, TRBJ2-1)
CASSPPGQGPNEQFS

SEQ ID NO: 508745 - protein, 15 aa, Homo sapiens
  CDR3 for alpha chain variable domain of TCR clone 254373 (TRAV12-2, TRAJ53)
CAVNGGGGSTYKLTF

SEQ ID NO: 508746 - protein, 14 aa, Homo sapiens
  CDR3 for beta chain variable domain of TCR clone 254373 (TRBV11-2, TRBJ2-5)
CASSRTGGIETQYF

SEQ ID NO: 508747 - protein, 11 aa, Homo sapiens
  CDR3 for alpha chain variable domain of TCR clone 254374 (TRAV2, TRAJ13)
CASGGYQKVTF

SEQ ID NO: 508748 - protein, 10 aa, Homo sapiens
  CDR3 for beta chain variable domain of TCR clone 254374 (TRBV15, TRBJ2-7)
AETGGYEQYF

SEQ ID NO: 508749 - protein, 14 aa, Homo sapiens
  CDR3 for alpha chain variable domain of TCR clone 254375 (TRAV1-2, TRAJ8)
CAVREDTGFQKLVS

SEQ ID NO: 508750 - protein, 13 aa, Homo sapiens
  CDR3 for beta chain variable domain of TCR clone 254375 (TRBV15, TRBJ2-7)
CATSTTGHYEQYF

SEQ ID NO: 508751 - protein, 13 aa, Homo sapiens
  CDR3 for alpha chain variable domain of TCR clone 254376 (TRAV27, TRAJ6)
CAGGTRGSYIPTF

SEQ ID NO: 508752 - protein, 13 aa, Homo sapiens
  CDR3 for beta chain variable domain of TCR clone 254376 (TRBV7-2, TRBJ2-2)
CASSLAVTGELFF

SEQ ID NO: 508753 - protein, 14 aa, Homo sapiens
  CDR3 for alpha chain variable domain of TCR clone 254377 (TRAV12-2, TRAJ45)
CAVYSGGGADGLTF

SEQ ID NO: 508754 - protein, 11 aa, Homo sapiens
  CDR3 for beta chain variable domain of TCR clone 254377 (TRBV7-2, TRBJ2-7)
CASSSGLWQYF

SEQ ID NO: 508755 - protein, 10 aa, Homo sapiens
  CDR3 for alpha chain variable domain of TCR clone 254378 (TRAV26-1, TRAJ40)
CIAGTYNYIF

SEQ ID NO: 508756 - protein, 15 aa, Homo sapiens
  CDR3 for beta chain variable domain of TCR clone 254378 (TRBV19, TRBJ2-1)
CASSSPGVPLDEQFF

SEQ ID NO: 508757 - protein, 16 aa, Homo sapiens
  CDR3 for alpha chain variable domain of TCR clone 254379 (TRAV3, TRAJ10)
CAVRDMRAGGGNKLTF

SEQ ID NO: 508758 - protein, 19 aa, Homo sapiens
  CDR3 for beta chain variable domain of TCR clone 254379 (TRBV6-3, TRBJ1-2)
CASSYSKGRTGPPNYGYTI

SEQ ID NO: 508759 - protein, 17 aa, Homo sapiens
  CDR3 for alpha chain variable domain of TCR clone 254380 (TRAV3, TRAJ42)
CAVRDRDYGGSQGNLMF

SEQ ID NO: 508760 - protein, 15 aa, Homo sapiens
  CDR3 for beta chain variable domain of TCR clone 254380 (TRBV2, TRBJ2-7)
CASSEGLARSYEQYF

SEQ ID NO: 508761 - protein, 13 aa, Homo sapiens
  CDR3 for alpha chain variable domain of TCR clone 254381 (TRAV20, TRAJ21)
CAVEGYNFNKFYF

SEQ ID NO: 508762 - protein, 14 aa, Homo sapiens
  CDR3 for beta chain variable domain of TCR clone 254381 (TRBV3-1, TRBJ2-5)
CASSQGPDQETQDF

SEQ ID NO: 508763 - protein, 16 aa, Homo sapiens
  CDR3 for alpha chain variable domain of TCR clone 254382 (TRAV12-3, TRAJ53)
CAMSPGSGGSNYKLTF

SEQ ID NO: 508764 - protein, 13 aa, Homo sapiens
  CDR3 for beta chain variable domain of TCR clone 254382 (TRBV4-3, TRBJ1-1)
CASGPTGNTEAFF

SEQ ID NO: 508765 - protein, 13 aa, Homo sapiens
  CDR3 for alpha chain variable domain of TCR clone 254383 (TRAV1-2, TRAJ9)
CAVLNTGGFKSIF

SEQ ID NO: 508766 - protein, 14 aa, Homo sapiens
  CDR3 for beta chain variable domain of TCR clone 254383 (TRBV20-1, TRBJ2-3)
CSARGGTSTDTQYF

SEQ ID NO: 508767 - protein, 14 aa, Homo sapiens
  CDR3 for alpha chain variable domain of TCR clone 254384 (TRAV2, TRAJ9)
CAVENRSGGFKTIF

SEQ ID NO: 508768 - protein, 12 aa, Homo sapiens
  CDR3 for beta chain variable domain of TCR clone 254384 (TRBV11-2, TRBJ2-1)
CASSPGNNEQFF

SEQ ID NO: 508769 - protein, 12 aa, Homo sapiens
  CDR3 for alpha chain variable domain of TCR clone 254385 (TRAV13-1, TRAJ8)
CAALTGFQKLVF

SEQ ID NO: 508770 - protein, 17 aa, Homo sapiens
  CDR3 for beta chain variable domain of TCR clone 254385 (TRBV7-3, TRBJ2-3)
RASSLMKRMRGADTQYF

SEQ ID NO: 508771 - protein, 16 aa, Homo sapiens
  CDR3 for alpha chain variable domain of TCR clone 254386 (TRAV3, TRAJ10)
CAVRDMRAGGGNKLTF

SEQ ID NO: 508772 - protein, 15 aa, Homo sapiens
  CDR3 for beta chain variable domain of TCR clone 254386 (TRBV10-3, TRBJ2-1)
CATNGGPGQGDEQFF

SEQ ID NO: 508773 - protein, 14 aa, Homo sapiens
  CDR3 for alpha chain variable domain of TCR clone 254387 (TRAV12-3, TRAJ57)
CARALEGGSEELVF

SEQ ID NO: 508774 - protein, 16 aa, Homo sapiens
  CDR3 for beta chain variable domain of TCR clone 254387 (TRBV11-3, TRBJ2-3)
CQQLGTDRGGTDTQYF

SEQ ID NO: 508775 - protein, 12 aa, Homo sapiens
  CDR3 for alpha chain variable domain of TCR clone 254388 (TRAV16, TRAJ10)
CSRTGGGNKLAF

SEQ ID NO: 508776 - protein, 15 aa, Homo sapiens
  CDR3 for beta chain variable domain of TCR clone 254388 (TRBV6-3, TRBJ2-7)
CASSFPGTVFYEQYF

SEQ ID NO: 508777 - protein, 13 aa, Homo sapiens
  CDR3 for alpha chain variable domain of TCR clone 254389 (TRAV2, TRAJ40)
CAVVTSGTYKYIF

SEQ ID NO: 508778 - protein, 14 aa, Homo sapiens
  CDR3 for beta chain variable domain of TCR clone 254389 (TRBV12-4, TRBJ1-4)
CASSRQGANEKLFF

SEQ ID NO: 508779 - protein, 13 aa, Homo sapiens
  CDR3 for alpha chain variable domain of TCR clone 254390 (TRAV16, TRAJ27)
CALRRTNAGKSNF

SEQ ID NO: 508780 - protein, 15 aa, Homo sapiens
  CDR3 for beta chain variable domain of TCR clone 254390 (TRBV18, TRBJ2-1)
CASSPPSASYNEQFF

SEQ ID NO: 508781 - protein, 13 aa, Homo sapiens
  CDR3 for alpha chain variable domain of TCR clone 254391 (TRAV12-2, TRAJ20)
CAVNRFDDYKLSF

SEQ ID NO: 508782 - protein, 14 aa, Homo sapiens
  CDR3 for beta chain variable domain of TCR clone 254391 (TRBV13, TRBJ2-7)
CASSLKGASYEQYF

SEQ ID NO: 508783 - protein, 10 aa, Homo sapiens
  CDR3 for alpha chain variable domain of TCR clone 254392 (TRAV9-2, TRAJ49)
FALTGNQFYF

SEQ ID NO: 508784 - protein, 16 aa, Homo sapiens
  CDR3 for beta chain variable domain of TCR clone 254392 (TRBV19, TRBJ2-3)
CASSPGAASRTDTQYF

SEQ ID NO: 508785 - protein, 11 aa, Homo sapiens
  CDR3 for alpha chain variable domain of TCR clone 254393 (TRAV12-1, TRAJ33)
CVVNSNYQSIW

SEQ ID NO: 508786 - protein, 16 aa, Homo sapiens
  CDR3 for beta chain variable domain of TCR clone 254393 (TRBV4-1, TRBJ2-1)
CASSQDWADTLNEQFF

SEQ ID NO: 508787 - protein, 11 aa, Homo sapiens
  CDR3 for alpha chain variable domain of TCR clone 254394 (TRAV12-1, TRAJ39)
CVVSAGNMLTF

SEQ ID NO: 508788 - protein, 13 aa, Homo sapiens
  CDR3 for beta chain variable domain of TCR clone 254394 (TRBV7-2, TRBJ2-2)
CASSLAVTGELFF

SEQ ID NO: 508789 - protein, 10 aa, Homo sapiens
  CDR3 for alpha chain variable domain of TCR clone 254395 (TRAV26-1, TRAJ22)
CIVSLNFFWF

SEQ ID NO: 508790 - protein, 16 aa, Homo sapiens
  CDR3 for beta chain variable domain of TCR clone 254395 (TRBV19, TRBJ2-2)
CASSTARASNTGELFF

SEQ ID NO: 508791 - protein, 17 aa, Homo sapiens
  CDR3 for alpha chain variable domain of TCR clone 254396 (TRAV3, TRAJ13)
CAVRDMRRTGGYKKVTF

SEQ ID NO: 508792 - protein, 14 aa, Homo sapiens
  CDR3 for beta chain variable domain of TCR clone 254396 (TRBV5-1, TRBJ2-7)
CASSLTGSGYEQYF

SEQ ID NO: 508793 - protein, 15 aa, Homo sapiens
  CDR3 for alpha chain variable domain of TCR clone 254397 (TRAV27, TRAJ38)
CAARRNAGNNRKLIW

SEQ ID NO: 508794 - protein, 15 aa, Homo sapiens
  CDR3 for beta chain variable domain of TCR clone 254397 (TRBV7-3, TRBJ2-3)
CQQLLRGGSRDTQYF

SEQ ID NO: 508795 - protein, 15 aa, Homo sapiens
  CDR3 for alpha chain variable domain of TCR clone 254398 (TRAV30, TRAJ32)
CGTEILSGATNKLIF

SEQ ID NO: 508796 - protein, 13 aa, Homo sapiens
  CDR3 for beta chain variable domain of TCR clone 254398 (TRBV6-3, TRBJ2-7)
CASSFSGGYEQYF

SEQ ID NO: 508797 - protein, 12 aa, Homo sapiens
  CDR3 for alpha chain variable domain of TCR clone 254399 (TRAV3, TRAJ39)
CAVIEWSNMLTF

SEQ ID NO: 508798 - protein, 14 aa, Homo sapiens
  CDR3 for beta chain variable domain of TCR clone 254399 (TRBV7-8, TRBJ2-3)
CASSFPDGQDQQYF

SEQ ID NO: 508799 - protein, 12 aa, Homo sapiens
  CDR3 for alpha chain variable domain of TCR clone 254400 (TRAV3, TRAJ20)
CVVRDPDYKLSF

SEQ ID NO: 508800 - protein, 15 aa, Homo sapiens
  CDR3 for beta chain variable domain of TCR clone 254400 (TRBV6-3, TRBJ2-7)
CASSSPGTVFYEQYF

SEQ ID NO: 508801 - protein, 12 aa, Homo sapiens
  CDR3 for alpha chain variable domain of TCR clone 254401 (TRAV3, TRAJ43)
CAVRDPNNDMRV

SEQ ID NO: 508802 - protein, 15 aa, Homo sapiens
  CDR3 for beta chain variable domain of TCR clone 254401 (TRBV27, TRBJ1-5)
CASSLGTGFDQPQHF

SEQ ID NO: 508803 - protein, 16 aa, Homo sapiens
  CDR3 for alpha chain variable domain of TCR clone 254402 (TRAV12-3, TRAJ53)
CAMSPGSGGSNYKLTF

SEQ ID NO: 508804 - protein, 14 aa, Homo sapiens
  CDR3 for beta chain variable domain of TCR clone 254402 (TRBV25-1, TRBJ1-1)
CASTQLGGNTEAFF

SEQ ID NO: 508805 - protein, 16 aa, Homo sapiens
  CDR3 for alpha chain variable domain of TCR clone 254403 (TRAV30, TRAJ24)
CGTEIVDADSWGKYQF

SEQ ID NO: 508806 - protein, 11 aa, Homo sapiens
  CDR3 for beta chain variable domain of TCR clone 254403 (TRBV29-1, TRBJ2-5)
CSEDRTGTQYF

SEQ ID NO: 508807 - protein, 13 aa, Homo sapiens
  CDR3 for alpha chain variable domain of TCR clone 254404 (TRAV21, TRAJ57)
CAVIEGGSEKLVF

SEQ ID NO: 508808 - protein, 15 aa, Homo sapiens
  CDR3 for beta chain variable domain of TCR clone 254404 (TRBV10-3, TRBJ2-5)
CAISEFGRGKETQYF

SEQ ID NO: 508809 - protein, 11 aa, Homo sapiens
  CDR3 for alpha chain variable domain of TCR clone 254405 (TRAV3, TRAJ21)
CAVGNFNKFYF

SEQ ID NO: 508810 - protein, 16 aa, Homo sapiens
  CDR3 for beta chain variable domain of TCR clone 254405 (TRBV7-2, TRBJ2-3)
CASSLVALYSTDTQYF

SEQ ID NO: 508811 - protein, 13 aa, Homo sapiens
  CDR3 for alpha chain variable domain of TCR clone 254406 (TRAV12-1, TRAJ34)
CVVTGYNTDKLIF

SEQ ID NO: 508812 - protein, 14 aa, Homo sapiens
  CDR3 for beta chain variable domain of TCR clone 254406 (TRBV4-2, TRBJ2-1)
CASGLDRAYNEQFF

SEQ ID NO: 508813 - protein, 13 aa, Homo sapiens
  CDR3 for alpha chain variable domain of TCR clone 254407 (TRAV13-2, TRAJ48)
CAEMDLGNEKLTF

SEQ ID NO: 508814 - protein, 15 aa, Homo sapiens
  CDR3 for beta chain variable domain of TCR clone 254407 (TRBV7-9, TRBJ1-6)
CASSSPGRGNSHLHF

SEQ ID NO: 508815 - protein, 14 aa, Homo sapiens
  CDR3 for alpha chain variable domain of TCR clone 254408 (TRAV27, TRAJ12)
CAGARMDSSYKLIF

SEQ ID NO: 508816 - protein, 18 aa, Homo sapiens
  CDR3 for beta chain variable domain of TCR clone 254408 (TRBV10-3, TRBJ2-7)
CAISESGRPSGGRVEQYS

SEQ ID NO: 508817 - protein, 15 aa, Homo sapiens
  CDR3 for alpha chain variable domain of TCR clone 254409 (TRAV23/DV6, TRAJ18)
CAARYRGSTLGKLYF

SEQ ID NO: 508818 - protein, 16 aa, Homo sapiens
  CDR3 for beta chain variable domain of TCR clone 254409 (TRBV20-1, TRBJ1-2)
CSASMGQGVANYGYTF

SEQ ID NO: 508819 - protein, 14 aa, Homo sapiens
  CDR3 for alpha chain variable domain of TCR clone 254410 (TRAV26-1, TRAJ22)
CIVRVYGSARQLTF

SEQ ID NO: 508820 - protein, 17 aa, Homo sapiens
  CDR3 for beta chain variable domain of TCR clone 254410 (TRBV7-3, TRBJ2-3)
SDSSPGGLAGFGDTQYF

SEQ ID NO: 508821 - protein, 14 aa, Homo sapiens
  CDR3 for alpha chain variable domain of TCR clone 254411 (TRAV17, TRAJ57)
CATDPQGGSEKLVF

SEQ ID NO: 508822 - protein, 16 aa, Homo sapiens
  CDR3 for beta chain variable domain of TCR clone 254411 (TRBV12-4, TRBJ1-5)
CASRQPVEGSNQPQHF

SEQ ID NO: 508823 - protein, 13 aa, Homo sapiens
  CDR3 for alpha chain variable domain of TCR clone 254412 (TRAV27, TRAJ43)
CAGAGNNNHDMRF

SEQ ID NO: 508824 - protein, 14 aa, Homo sapiens
  CDR3 for beta chain variable domain of TCR clone 254412 (TRBV7-2, TRBJ2-7)
CASRSQGAAYEQYF

SEQ ID NO: 508825 - protein, 10 aa, Homo sapiens
  CDR3 for alpha chain variable domain of TCR clone 254413 (TRAV38-1, TRAJ53)
CAFMKHVLES

SEQ ID NO: 508826 - protein, 13 aa, Homo sapiens
  CDR3 for beta chain variable domain of TCR clone 254413 (TRBV19, TRBJ2-7)
CASSPRQSYEQYF

SEQ ID NO: 508827 - protein, 10 aa, Homo sapiens
  CDR3 for alpha chain variable domain of TCR clone 254414 (TRAV3, TRAJ32)
CAVREGIMVV

SEQ ID NO: 508828 - protein, 13 aa, Homo sapiens
  CDR3 for beta chain variable domain of TCR clone 254414 (TRBV2, TRBJ1-1)
CASSEGGNTEAFF

SEQ ID NO: 508829 - protein, 15 aa, Homo sapiens
  CDR3 for alpha chain variable domain of TCR clone 254415 (TRAV2, TRAJ15)
CAVGDRGQAGTALIF

SEQ ID NO: 508830 - protein, 15 aa, Homo sapiens
  CDR3 for beta chain variable domain of TCR clone 254415 (TRBV7-2, TRBJ2-2)
CASRRPGQNTGELFF

SEQ ID NO: 508831 - protein, 10 aa, Homo sapiens
  CDR3 for alpha chain variable domain of TCR clone 254416 (TRAV2, TRAJ26)
CAVVGLWSEF

SEQ ID NO: 508832 - protein, 12 aa, Homo sapiens
  CDR3 for beta chain variable domain of TCR clone 254416 (TRBV18, TRBJ2-1)
CASSSDEDEQFF

SEQ ID NO: 508833 - protein, 14 aa, Homo sapiens
  CDR3 for alpha chain variable domain of TCR clone 254417 (TRAV35, TRAJ33)
CAGSSQDSNYQLIW

SEQ ID NO: 508834 - protein, 15 aa, Homo sapiens
  CDR3 for beta chain variable domain of TCR clone 254417 (TRBV7-3, TRBJ2-2)
CASSLEVLPTGELFF

SEQ ID NO: 508835 - protein, 14 aa, Homo sapiens
  CDR3 for alpha chain variable domain of TCR clone 254418 (TRAV38-2/DV8, TRAJ54)
AAMYQIQVAQKLVF

SEQ ID NO: 508836 - protein, 17 aa, Homo sapiens
  CDR3 for beta chain variable domain of TCR clone 254418 (TRBV6-1, TRBJ2-3)
CASSEALRLISTDTQYF

SEQ ID NO: 508837 - protein, 14 aa, Homo sapiens
  CDR3 for alpha chain variable domain of TCR clone 254419 (TRAV35, TRAJ29)
CAGRGGSGNTPLVF

SEQ ID NO: 508838 - protein, 14 aa, Homo sapiens
  CDR3 for beta chain variable domain of TCR clone 254419 (TRBV11-2, TRBJ1-2)
CASSLGTANYGYTF

SEQ ID NO: 508839 - protein, 15 aa, Homo sapiens
  CDR3 for alpha chain variable domain of TCR clone 254420 (TRAV2, TRAJ15)
CAVEDRGQAGTALIF

SEQ ID NO: 508840 - protein, 17 aa, Homo sapiens
  CDR3 for beta chain variable domain of TCR clone 254420 (TRBV11-2, TRBJ2-1)
CASSLYPTGVEYNEQFF

SEQ ID NO: 508841 - protein, 15 aa, Homo sapiens
  CDR3 for alpha chain variable domain of TCR clone 254421 (TRAV8-4, TRAJ13)
CDVSDWGGGYQKVTF

SEQ ID NO: 508842 - protein, 15 aa, Homo sapiens
  CDR3 for beta chain variable domain of TCR clone 254421 (TRBV25-1, TRBJ1-4)
CASSPGDSTNEKLFF

SEQ ID NO: 508843 - protein, 16 aa, Homo sapiens
  CDR3 for alpha chain variable domain of TCR clone 254422 (TRAV12-1, TRAJ43)
CVVNPHRFGEGTRLTV

SEQ ID NO: 508844 - protein, 13 aa, Homo sapiens
  CDR3 for beta chain variable domain of TCR clone 254422 (TRBV20-1, TRBJ1-1)
CSARGGGNTEAFF

SEQ ID NO: 508845 - protein, 18 aa, Homo sapiens
  CDR3 for alpha chain variable domain of TCR clone 254423 (TRAV21, TRAJ52)
CAVRPSPAGGTSYGKLTF

SEQ ID NO: 508846 - protein, 17 aa, Homo sapiens
  CDR3 for beta chain variable domain of TCR clone 254423 (TRBV13, TRBJ2-3)
CASILSRVAGGRNTQYF

SEQ ID NO: 508847 - protein, 13 aa, Homo sapiens
  CDR3 for alpha chain variable domain of TCR clone 254424 (TRAV2, TRAJ9)
CAVESTGGFITIF

SEQ ID NO: 508848 - protein, 15 aa, Homo sapiens
  CDR3 for beta chain variable domain of TCR clone 254424 (TRBV10-3, TRBJ2-1)
CAITFGGGTDNEQFF

SEQ ID NO: 508849 - protein, 13 aa, Homo sapiens
  CDR3 for alpha chain variable domain of TCR clone 254425 (TRAV34, TRAJ22)
CGAGAGSARQLTF

SEQ ID NO: 508850 - protein, 16 aa, Homo sapiens
  CDR3 for beta chain variable domain of TCR clone 254425 (TRBV2, TRBJ2-1)
CASSANPRDWQAEQFF

SEQ ID NO: 508851 - protein, 13 aa, Homo sapiens
  CDR3 for alpha chain variable domain of TCR clone 254426 (TRAV21, TRAJ27)
CAALNTNAGKSTF

SEQ ID NO: 508852 - protein, 13 aa, Homo sapiens
  CDR3 for beta chain variable domain of TCR clone 254426 (TRBV7-2, TRBJ2-2)
CASSLAVTGELFF

SEQ ID NO: 508853 - protein, 13 aa, Homo sapiens
  CDR3 for alpha chain variable domain of TCR clone 254427 (TRAV30, TRAJ49)
CGTESQPVTSSIL

SEQ ID NO: 508854 - protein, 14 aa, Homo sapiens
  CDR3 for beta chain variable domain of TCR clone 254427 (TRBV4-2, TRBJ2-5)
CSSSQDRGRETQYF

SEQ ID NO: 508855 - protein, 12 aa, Homo sapiens
  CDR3 for alpha chain variable domain of TCR clone 254428 (TRAV13-2, TRAJ23)
CAERHRGGQLIF

SEQ ID NO: 508856 - protein, 16 aa, Homo sapiens
  CDR3 for beta chain variable domain of TCR clone 254428 (TRBV20-1, TRBJ1-4)
CSAPGQGLLTNERLFF

SEQ ID NO: 508857 - protein, 14 aa, Homo sapiens
  CDR3 for alpha chain variable domain of TCR clone 254429 (TRAV13-1, TRAJ35)
CAASKGGFGNVLQC

SEQ ID NO: 508858 - protein, 17 aa, Homo sapiens
  CDR3 for beta chain variable domain of TCR clone 254429 (TRBV5-1, TRBJ2-5)
CASSLLGLAANQETQYF

SEQ ID NO: 508859 - protein, 18 aa, Homo sapiens
  CDR3 for alpha chain variable domain of TCR clone 254430 (TRAV21, TRAJ52)
CAVRPSPAGGTSYGNLTF

SEQ ID NO: 508860 - protein, 15 aa, Homo sapiens
  CDR3 for beta chain variable domain of TCR clone 254430 (TRBV20-1, TRBJ2-5)
CSATPLTGDQETQYF

SEQ ID NO: 508861 - protein, 14 aa, Homo sapiens
  CDR3 for alpha chain variable domain of TCR clone 254431 (TRAV12-2, TRAJ17)
CAVLFKAAGNKLTF

SEQ ID NO: 508862 - protein, 14 aa, Homo sapiens
  CDR3 for beta chain variable domain of TCR clone 254431 (TRBV11-2, TRBJ2-7)
CASSSLADGYEQYF

SEQ ID NO: 508863 - protein, 16 aa, Homo sapiens
  CDR3 for alpha chain variable domain of TCR clone 254432 (TRAV12-1, TRAJ53)
CVVTSVAGGSNYKLTF

SEQ ID NO: 508864 - protein, 17 aa, Homo sapiens
  CDR3 for beta chain variable domain of TCR clone 254432 (TRBV7-3, TRBJ2-3)
CASSPRGQGYGTDTQYC

SEQ ID NO: 508865 - protein, 17 aa, Homo sapiens
  CDR3 for alpha chain variable domain of TCR clone 254433 (TRAV3, TRAJ42)
CAVRDRDYGGSQGNLMF

SEQ ID NO: 508866 - protein, 12 aa, Homo sapiens
  CDR3 for beta chain variable domain of TCR clone 254433 (TRBV29-1, TRBJ2-2)
CSVDKYTGELFF

SEQ ID NO: 508867 - protein, 14 aa, Homo sapiens
  CDR3 for alpha chain variable domain of TCR clone 254434 (TRAV12-1, TRAJ17)
CVVNYKAAGNKLTF

SEQ ID NO: 508868 - protein, 15 aa, Homo sapiens
  CDR3 for beta chain variable domain of TCR clone 254434 (TRBV7-2, TRBJ2-1)
CASTHGTGIYNERFF

SEQ ID NO: 508869 - protein, 12 aa, Homo sapiens
  CDR3 for alpha chain variable domain of TCR clone 254435 (TRAV8-3, TRAJ41)
CAVGALGYALNF

SEQ ID NO: 508870 - protein, 16 aa, Homo sapiens
  CDR3 for beta chain variable domain of TCR clone 254435 (TRBV7-6, TRBJ2-3)
CGSSDSRGEGTDTQYF

SEQ ID NO: 508871 - protein, 16 aa, Homo sapiens
  CDR3 for alpha chain variable domain of TCR clone 254436 (TRAV12-2, TRAJ52)
CAVNNRGGTSYGKLTF

SEQ ID NO: 508872 - protein, 15 aa, Homo sapiens
  CDR3 for beta chain variable domain of TCR clone 254436 (TRBV5-1, TRBJ1-1)
CASSSTTGTNTEAFF

SEQ ID NO: 508873 - protein, 13 aa, Homo sapiens
  CDR3 for alpha chain variable domain of TCR clone 254437 (TRAV29/DV5, TRAJ29)
CAASAAGNTPIVF

SEQ ID NO: 508874 - protein, 16 aa, Homo sapiens
  CDR3 for beta chain variable domain of TCR clone 254437 (TRBV12-4, TRBJ2-5)
CASSFFVRGRQETQYF

SEQ ID NO: 508875 - protein, 14 aa, Homo sapiens
  CDR3 for alpha chain variable domain of TCR clone 254438 (TRAV1-2, TRAJ16)
CAVNRFSDGQKLLF

SEQ ID NO: 508876 - protein, 15 aa, Homo sapiens
  CDR3 for beta chain variable domain of TCR clone 254438 (TRBV9, TRBJ1-6)
CASSVAGTGDSPLNC

SEQ ID NO: 508877 - protein, 12 aa, Homo sapiens
  CDR3 for alpha chain variable domain of TCR clone 254439 (TRAV12-1, )
CVVNSWISRTLT

SEQ ID NO: 508878 - protein, 15 aa, Homo sapiens
  CDR3 for beta chain variable domain of TCR clone 254439 (TRBV11-2, TRBJ1-6)
CASSLDPWAVSPLHF

SEQ ID NO: 508879 - protein, 13 aa, Homo sapiens
  CDR3 for alpha chain variable domain of TCR clone 254440 (TRAV12-3, TRAJ5)
CAMIYTGRRALTF

SEQ ID NO: 508880 - protein, 14 aa, Homo sapiens
  CDR3 for beta chain variable domain of TCR clone 254440 (TRBV19, TRBJ2-1)
CASPTFVLSGEQFF

SEQ ID NO: 508881 - protein, 13 aa, Homo sapiens
  CDR3 for alpha chain variable domain of TCR clone 254441 (TRAV13-1, TRAJ6)
CAASKGGSYIPTF

SEQ ID NO: 508882 - protein, 13 aa, Homo sapiens
  CDR3 for beta chain variable domain of TCR clone 254441 (TRBV7-9, TRBJ2-5)
CASLRSGRETQYF

SEQ ID NO: 508883 - protein, 16 aa, Homo sapiens
  CDR3 for alpha chain variable domain of TCR clone 254442 (TRAV3, TRAJ10)
CAVRDMRAGGGNKLTF

SEQ ID NO: 508884 - protein, 15 aa, Homo sapiens
  CDR3 for beta chain variable domain of TCR clone 254442 (TRBV20-1, TRBJ2-7)
CSARDPVKGEGEQYF

SEQ ID NO: 508885 - protein, 14 aa, Homo sapiens
  CDR3 for alpha chain variable domain of TCR clone 254443 (TRAV8-4, TRAJ34)
CAVSDPGDTDKLIF

SEQ ID NO: 508886 - protein, 13 aa, Homo sapiens
  CDR3 for beta chain variable domain of TCR clone 254443 (TRBV2, TRBJ1-4)
CASSERAGEKLFF

SEQ ID NO: 508887 - protein, 14 aa, Homo sapiens
  CDR3 for alpha chain variable domain of TCR clone 254444 (TRAV12-3, TRAJ42)
CAMNYGGSQGNLIF

SEQ ID NO: 508888 - protein, 15 aa, Homo sapiens
  CDR3 for beta chain variable domain of TCR clone 254444 (TRBV7-2, TRBJ2-2)
CASRRPGQNTGELFF

SEQ ID NO: 508889 - protein, 14 aa, Homo sapiens
  CDR3 for alpha chain variable domain of TCR clone 254445 (TRAV12-3, TRAJ9)
CAMSPNTGGFKTIF

SEQ ID NO: 508890 - protein, 14 aa, Homo sapiens
  CDR3 for beta chain variable domain of TCR clone 254445 (TRBV7-2, TRBJ1-1)
CASSFLTGTTEAFF

SEQ ID NO: 508891 - protein, 12 aa, Homo sapiens
  CDR3 for alpha chain variable domain of TCR clone 254446 (TRAV12-3, TRAJ17)
CAMTLTGNKLTF

SEQ ID NO: 508892 - protein, 13 aa, Homo sapiens
  CDR3 for beta chain variable domain of TCR clone 254446 (TRBV28, TRBJ2-5)
CAGVSRGEETQYF

SEQ ID NO: 508893 - protein, 13 aa, Homo sapiens
  CDR3 for alpha chain variable domain of TCR clone 254447 (TRAV12-3, TRAJ13)
CAMTSGGHQEVTF

SEQ ID NO: 508894 - protein, 13 aa, Homo sapiens
  CDR3 for beta chain variable domain of TCR clone 254447 (TRBV20-1, TRBJ2-2)
CSALSGGAGELFF

SEQ ID NO: 508895 - protein, 11 aa, Homo sapiens
  CDR3 for alpha chain variable domain of TCR clone 254448 (TRAV1-1, TRAJ23)
FAVRQGGKLIF

SEQ ID NO: 508896 - protein, 14 aa, Homo sapiens
  CDR3 for beta chain variable domain of TCR clone 254448 (TRBV12-4, TRBJ1-4)
CASRMTGRSEKLFF

SEQ ID NO: 508897 - protein, 16 aa, Homo sapiens
  CDR3 for alpha chain variable domain of TCR clone 254449 (TRAV30, TRAJ24)
CGTEIVDADSWGKFQF

SEQ ID NO: 508898 - protein, 14 aa, Homo sapiens
  CDR3 for beta chain variable domain of TCR clone 254449 (TRBV28, TRBJ2-7)
CASSLLRTSYEQYF

SEQ ID NO: 508899 - protein, 16 aa, Homo sapiens
  CDR3 for alpha chain variable domain of TCR clone 254450 (TRAV4, TRAJ22)
FLVGDLYSGSARQLTF

SEQ ID NO: 508900 - protein, 16 aa, Homo sapiens
  CDR3 for beta chain variable domain of TCR clone 254450 (TRBV20-1, TRBJ1-2)
CSASTFGGAENYGYTF

SEQ ID NO: 508901 - protein, 13 aa, Homo sapiens
  CDR3 for alpha chain variable domain of TCR clone 254451 (TRAV21, TRAJ47)
CAVSGLYGNKLVF

SEQ ID NO: 508902 - protein, 17 aa, Homo sapiens
  CDR3 for beta chain variable domain of TCR clone 254451 (TRBV15, TRBJ2-3)
CASSGTTSEEGTDTQYF

SEQ ID NO: 508903 - protein, 15 aa, Homo sapiens
  CDR3 for alpha chain variable domain of TCR clone 254452 (TRAV1-2, TRAJ30)
CAVRPHGNRDDKIIF

SEQ ID NO: 508904 - protein, 15 aa, Homo sapiens
  CDR3 for beta chain variable domain of TCR clone 254452 (TRBV28, TRBJ1-3)
CASSMGWASGNTIYF

SEQ ID NO: 508905 - protein, 11 aa, Homo sapiens
  CDR3 for alpha chain variable domain of TCR clone 254453 (TRAV29/DV5, TRAJ49)
CTAVPGNQFYF

SEQ ID NO: 508906 - protein, 17 aa, Homo sapiens
  CDR3 for beta chain variable domain of TCR clone 254453 (TRBV4-2, TRBJ1-1)
CASTQFGGGSGNTEAFF

SEQ ID NO: 508907 - protein, 13 aa, Homo sapiens
  CDR3 for alpha chain variable domain of TCR clone 254454 (TRAV2, TRAJ40)
CAVVTSGTYKYIF

SEQ ID NO: 508908 - protein, 14 aa, Homo sapiens
  CDR3 for beta chain variable domain of TCR clone 254454 (TRBV12-4, TRBJ1-1)
CASSLDGLNTESFF

SEQ ID NO: 508909 - protein, 16 aa, Homo sapiens
  CDR3 for alpha chain variable domain of TCR clone 254455 (TRAV3, TRAJ37)
CAVRGKGSGNTGNLIF

SEQ ID NO: 508910 - protein, 13 aa, Homo sapiens
  CDR3 for beta chain variable domain of TCR clone 254455 (TRBV7-3, TRBJ1-1)
CASSQDWGAEAFF

SEQ ID NO: 508911 - protein, 13 aa, Homo sapiens
  CDR3 for alpha chain variable domain of TCR clone 254456 (TRAV8-6, TRAJ16)
CAVSRWVGQKLLF

SEQ ID NO: 508912 - protein, 13 aa, Homo sapiens
  CDR3 for beta chain variable domain of TCR clone 254456 (TRBV19, TRBJ2-5)
CASSGRAGETQYF

SEQ ID NO: 508913 - protein, 12 aa, Homo sapiens
  CDR3 for alpha chain variable domain of TCR clone 254457 (TRAV12-3, TRAJ17)
CAMTLTGNKLTF

SEQ ID NO: 508914 - protein, 13 aa, Homo sapiens
  CDR3 for beta chain variable domain of TCR clone 254457 (TRBV7-3, TRBJ2-1)
CQQLSGGTNEQFF

SEQ ID NO: 508915 - protein, 15 aa, Homo sapiens
  CDR3 for alpha chain variable domain of TCR clone 254458 (TRAV27, TRAJ38)
CAARRNAGNNRQLIW

SEQ ID NO: 508916 - protein, 13 aa, Homo sapiens
  CDR3 for beta chain variable domain of TCR clone 254458 (TRBV10-3, TRBJ2-7)
CASKLAVNYEQYF

SEQ ID NO: 508917 - protein, 14 aa, Homo sapiens
  CDR3 for alpha chain variable domain of TCR clone 254459 (TRAV38-1, TRAJ31)
CAFIKHDNNARLMF

SEQ ID NO: 508918 - protein, 16 aa, Homo sapiens
  CDR3 for beta chain variable domain of TCR clone 254459 (TRBV23-1, TRBJ2-1)
CISAPATGPTYNEQFF

SEQ ID NO: 508919 - protein, 16 aa, Homo sapiens
  CDR3 for alpha chain variable domain of TCR clone 254460 (TRAV23/DV6, TRAJ52)
CAARPSGGISYGKLTF

SEQ ID NO: 508920 - protein, 13 aa, Homo sapiens
  CDR3 for beta chain variable domain of TCR clone 254460 (TRBV7-9, TRBJ1-1)
CASSLSGETEAFF

SEQ ID NO: 508921 - protein, 15 aa, Homo sapiens
  CDR3 for alpha chain variable domain of TCR clone 254461 (TRAV13-1, TRAJ6)
CAASRGAGGSYIPTF

SEQ ID NO: 508922 - protein, 17 aa, Homo sapiens
  CDR3 for beta chain variable domain of TCR clone 254461 (TRBV7-3, TRBJ2-3)
CASSFMKRMRGADTQYF

SEQ ID NO: 508923 - protein, 14 aa, Homo sapiens
  CDR3 for alpha chain variable domain of TCR clone 254462 (TRAV1-2, TRAJ8)
CAVREDTGFQKLVF

SEQ ID NO: 508924 - protein, 15 aa, Homo sapiens
  CDR3 for beta chain variable domain of TCR clone 254462 (TRBV12-4, TRBJ2-1)
CASSNGGGSSNEQFF

SEQ ID NO: 508925 - protein, 12 aa, Homo sapiens
  CDR3 for alpha chain variable domain of TCR clone 254463 (TRAV13-2, TRAJ17)
IRGGTEVNKLTF

SEQ ID NO: 508926 - protein, 12 aa, Homo sapiens
  CDR3 for beta chain variable domain of TCR clone 254463 (TRBV11-2, TRBJ2-1)
CASSPGNNEQFF

SEQ ID NO: 508927 - protein, 11 aa, Homo sapiens
  CDR3 for alpha chain variable domain of TCR clone 254464 (TRAV12-1, TRAJ30)
CVVNGQDKIIF

SEQ ID NO: 508928 - protein, 12 aa, Homo sapiens
  CDR3 for beta chain variable domain of TCR clone 254464 (TRBV29-1, TRBJ1-3)
CSTRDSGNTIYF

SEQ ID NO: 508929 - protein, 16 aa, Homo sapiens
  CDR3 for alpha chain variable domain of TCR clone 254465 (TRAV12-2, TRAJ40)
CAVIRGGTSGTYKYIF

SEQ ID NO: 508930 - protein, 16 aa, Homo sapiens
  CDR3 for beta chain variable domain of TCR clone 254465 (TRBV7-9, TRBJ2-1)
CASSDVAGGSYNERFF

SEQ ID NO: 508931 - protein, 10 aa, Homo sapiens
  CDR3 for alpha chain variable domain of TCR clone 254466 (TRAV26-2, TRAJ45)
IGGGSDGLTF

SEQ ID NO: 508932 - protein, 20 aa, Homo sapiens
  CDR3 for beta chain variable domain of TCR clone 254466 (TRBV28, TRBJ2-1)
CASTPIGRSPGLAGGNEQFF

SEQ ID NO: 508933 - protein, 15 aa, Homo sapiens
  CDR3 for alpha chain variable domain of TCR clone 254467 (TRAV35, TRAJ58)
CAGRRQETSGSRLTL

SEQ ID NO: 508934 - protein, 14 aa, Homo sapiens
  CDR3 for beta chain variable domain of TCR clone 254467 (TRBV6-1, TRBJ1-3)
CASVQGGGGNTIYF

SEQ ID NO: 508935 - protein, 16 aa, Homo sapiens
  CDR3 for alpha chain variable domain of TCR clone 254468 (TRAV21, TRAJ52)
CAVTNAGGTSYGKLAF

SEQ ID NO: 508936 - protein, 11 aa, Homo sapiens
  CDR3 for beta chain variable domain of TCR clone 254468 (TRBV2, TRBJ1-1)
CASREGTEAFF

SEQ ID NO: 508937 - protein, 15 aa, Homo sapiens
  CDR3 for alpha chain variable domain of TCR clone 254469 (TRAV26-1, TRAJ15)
CIVRAANQAGTALVF

SEQ ID NO: 508938 - protein, 15 aa, Homo sapiens
  CDR3 for beta chain variable domain of TCR clone 254469 (TRBV20-1, TRBJ1-1)
CSARSAATSNTGAFF

SEQ ID NO: 508939 - protein, 18 aa, Homo sapiens
  CDR3 for alpha chain variable domain of TCR clone 254470 (TRAV29/DV5, TRAJ52)
CAAGFRGAGGPSYGNLTF

SEQ ID NO: 508940 - protein, 16 aa, Homo sapiens
  CDR3 for beta chain variable domain of TCR clone 254470 (TRBV7-3, TRBJ2-2)
CASSLKRGTLSGELFF

SEQ ID NO: 508941 - protein, 13 aa, Homo sapiens
  CDR3 for alpha chain variable domain of TCR clone 254471 (TRAV13-1, TRAJ33)
CAASRAGHYQLIW

SEQ ID NO: 508942 - protein, 15 aa, Homo sapiens
  CDR3 for beta chain variable domain of TCR clone 254471 (TRBV2, TRBJ2-7)
EDSAMYFCASSEQYF

SEQ ID NO: 508943 - protein, 13 aa, Homo sapiens
  CDR3 for alpha chain variable domain of TCR clone 254472 (TRAV8-4, TRAJ34)
CAVTLYNTDKLIF

SEQ ID NO: 508944 - protein, 12 aa, Homo sapiens
  CDR3 for beta chain variable domain of TCR clone 254472 (TRBV7-2, TRBJ2-7)
CASSIKREEQYF

SEQ ID NO: 508945 - protein, 13 aa, Homo sapiens
  CDR3 for alpha chain variable domain of TCR clone 254473 (TRAV12-3, TRAJ7)
CAMTPYGNNRLAF

SEQ ID NO: 508946 - protein, 16 aa, Homo sapiens
  CDR3 for beta chain variable domain of TCR clone 254473 (TRBV7-8, TRBJ2-4)
CASSAERTLAKNIQYF

SEQ ID NO: 508947 - protein, 14 aa, Homo sapiens
  CDR3 for alpha chain variable domain of TCR clone 254474 (TRAV1-2, TRAJ8)
CAVREDTGFQKLVF

SEQ ID NO: 508948 - protein, 17 aa, Homo sapiens
  CDR3 for beta chain variable domain of TCR clone 254474 (TRBV28, TRBJ2-5)
CASSSQGGLAGAETQYF

SEQ ID NO: 508949 - protein, 12 aa, Homo sapiens
  CDR3 for alpha chain variable domain of TCR clone 254475 (TRAV22, TRAJ22)
CAPGGSARHLTF

SEQ ID NO: 508950 - protein, 13 aa, Homo sapiens
  CDR3 for beta chain variable domain of TCR clone 254475 (TRBV15, TRBJ1-6)
CATSGGLNSPLHF

SEQ ID NO: 508951 - protein, 19 aa, Homo sapiens
  CDR3 for alpha chain variable domain of TCR clone 254476 (TRAV2, TRAJ20)
ILQVREADAAVYRDCKLSF

SEQ ID NO: 508952 - protein, 15 aa, Homo sapiens
  CDR3 for beta chain variable domain of TCR clone 254476 (TRBV6-1, TRBJ2-3)
CASSERGGITDTQYF

SEQ ID NO: 508953 - protein, 12 aa, Homo sapiens
  CDR3 for alpha chain variable domain of TCR clone 254477 (TRAV3, TRAJ20)
CAVRDPAYKLSF

SEQ ID NO: 508954 - protein, 15 aa, Homo sapiens
  CDR3 for beta chain variable domain of TCR clone 254477 (TRBV7-9, TRBJ1-1)
CASSLLEQGGTEAFF

SEQ ID NO: 508955 - protein, 17 aa, Homo sapiens
  CDR3 for alpha chain variable domain of TCR clone 254478 (TRAV3, TRAJ6)
CAVRDGPRAGGSYIPKF

SEQ ID NO: 508956 - protein, 13 aa, Homo sapiens
  CDR3 for beta chain variable domain of TCR clone 254478 (TRBV19, TRBJ2-7)
CASSIDRTYEQYF

SEQ ID NO: 508957 - protein, 12 aa, Homo sapiens
  CDR3 for alpha chain variable domain of TCR clone 254479 (TRAV8-6, TRAJ43)
CAVSNNNKDMRF

SEQ ID NO: 508958 - protein, 15 aa, Homo sapiens
  CDR3 for beta chain variable domain of TCR clone 254479 (TRBV7-3, TRBJ2-6)
CASSLGGSGANVLTF

SEQ ID NO: 508959 - protein, 12 aa, Homo sapiens
  CDR3 for alpha chain variable domain of TCR clone 254480 (TRAV27, TRAJ13)
CAGVRGYQKVTF

SEQ ID NO: 508960 - protein, 16 aa, Homo sapiens
  CDR3 for beta chain variable domain of TCR clone 254480 (TRBV28, TRBJ2-1)
CASSSSYSGSLNEHFF

SEQ ID NO: 508961 - protein, 16 aa, Homo sapiens
  CDR3 for alpha chain variable domain of TCR clone 254481 (TRAV4, TRAJ18)
CCVLLIGGSTLGRLYF

SEQ ID NO: 508962 - protein, 13 aa, Homo sapiens
  CDR3 for beta chain variable domain of TCR clone 254481 (TRBV12-4, TRBJ1-2)
CASSLRQGKGYTF

SEQ ID NO: 508963 - protein, 12 aa, Homo sapiens
  CDR3 for alpha chain variable domain of TCR clone 254482 (TRAV17, TRAJ39)
CATGAAGHMLTF

SEQ ID NO: 508964 - protein, 14 aa, Homo sapiens
  CDR3 for beta chain variable domain of TCR clone 254482 (TRBV7-9, TRBJ1-2)
CASSRQDANYGYTF

SEQ ID NO: 508965 - protein, 11 aa, Homo sapiens
  CDR3 for alpha chain variable domain of TCR clone 254483 (TRAV12-3, TRAJ49)
CAANTGNQIYF

SEQ ID NO: 508966 - protein, 16 aa, Homo sapiens
  CDR3 for beta chain variable domain of TCR clone 254483 (TRBV7-9, TRBJ2-3)
CASSPWREVGTDTQYF

SEQ ID NO: 508967 - protein, 14 aa, Homo sapiens
  CDR3 for alpha chain variable domain of TCR clone 254484 (TRAV1-2, TRAJ17)
CAVRDMTAGNKLTF

SEQ ID NO: 508968 - protein, 15 aa, Homo sapiens
  CDR3 for beta chain variable domain of TCR clone 254484 (TRBV20-1, TRBJ2-7)
CSARDRVSGMDEQSF

SEQ ID NO: 508969 - protein, 12 aa, Homo sapiens
  CDR3 for alpha chain variable domain of TCR clone 254485 (TRAV20, TRAJ57)
CAVQAGGEKLVF

SEQ ID NO: 508970 - protein, 14 aa, Homo sapiens
  CDR3 for beta chain variable domain of TCR clone 254485 (TRBV5-1, TRBJ2-5)
CASSFGESKETQYF

SEQ ID NO: 508971 - protein, 11 aa, Homo sapiens
  CDR3 for alpha chain variable domain of TCR clone 254486 (TRAV21, )
CAVRQDAGNNH

SEQ ID NO: 508972 - protein, 16 aa, Homo sapiens
  CDR3 for beta chain variable domain of TCR clone 254486 (TRBV4-2, TRBJ1-1)
CASRPLDGGGDTEAFF

SEQ ID NO: 508973 - protein, 12 aa, Homo sapiens
  CDR3 for alpha chain variable domain of TCR clone 254487 (TRAV4, TRAJ26)
CLVGDYGQNFVF

SEQ ID NO: 508974 - protein, 16 aa, Homo sapiens
  CDR3 for beta chain variable domain of TCR clone 254487 (TRBV7-2, TRBJ1-2)
CASSSNEDRRGHGYTF

SEQ ID NO: 508975 - protein, 11 aa, Homo sapiens
  CDR3 for alpha chain variable domain of TCR clone 254488 (TRAV8-6, TRAJ13)
CALGIYQKVTF

SEQ ID NO: 508976 - protein, 16 aa, Homo sapiens
  CDR3 for beta chain variable domain of TCR clone 254488 (TRBV5-4, TRBJ2-3)
CASQQPGAGGADTQYF

SEQ ID NO: 508977 - protein, 16 aa, Homo sapiens
  CDR3 for alpha chain variable domain of TCR clone 254489 (TRAV3, TRAJ37)
CAVRGKGSGNTGKLIF

SEQ ID NO: 508978 - protein, 15 aa, Homo sapiens
  CDR3 for beta chain variable domain of TCR clone 254489 (TRBV3-1, TRBJ2-5)
CASSANLGGPETQYF

SEQ ID NO: 508979 - protein, 15 aa, Homo sapiens
  CDR3 for alpha chain variable domain of TCR clone 254490 (TRAV3, TRAJ5)
CAVRDRKTGRRALTF

SEQ ID NO: 508980 - protein, 15 aa, Homo sapiens
  CDR3 for beta chain variable domain of TCR clone 254490 (TRBV7-9, TRBJ2-2)
CASGPLDTLPGELFF

SEQ ID NO: 508981 - protein, 16 aa, Homo sapiens
  CDR3 for alpha chain variable domain of TCR clone 254491 (TRAV1-1, TRAJ28)
CAVRDDSGAVSYQLTF

SEQ ID NO: 508982 - protein, 12 aa, Homo sapiens
  CDR3 for beta chain variable domain of TCR clone 254491 (TRBV11-2, TRBJ2-5)
CASSLDTQTQYF

SEQ ID NO: 508983 - protein, 12 aa, Homo sapiens
  CDR3 for alpha chain variable domain of TCR clone 254492 (TRAV2, TRAJ9)
CAVGAGGFKTIF

SEQ ID NO: 508984 - protein, 17 aa, Homo sapiens
  CDR3 for beta chain variable domain of TCR clone 254492 (TRBV28, TRBJ2-7)
CASSPLHRASGVYEQYF

SEQ ID NO: 508985 - protein, 14 aa, Homo sapiens
  CDR3 for alpha chain variable domain of TCR clone 254493 (TRAV12-2, TRAJ45)
CAVYSGGGADGLTF

SEQ ID NO: 508986 - protein, 14 aa, Homo sapiens
  CDR3 for beta chain variable domain of TCR clone 254493 (TRBV6-5, TRBJ1-2)
CGSTRGGGSDGYTF

SEQ ID NO: 508987 - protein, 14 aa, Homo sapiens
  CDR3 for alpha chain variable domain of TCR clone 254494 (TRAV17, TRAJ53)
CATDAGGSNDRLTF

SEQ ID NO: 508988 - protein, 16 aa, Homo sapiens
  CDR3 for beta chain variable domain of TCR clone 254494 (TRBV4-1, TRBJ1-1)
CASSQDAGMGNTEAFF

SEQ ID NO: 508989 - protein, 21 aa, Homo sapiens
  CDR3 for alpha chain variable domain of TCR clone 254495 (TRAV1-1, TRAJ6)
CLLLLRCERLERTGGSYIPTF

SEQ ID NO: 508990 - protein, 13 aa, Homo sapiens
  CDR3 for beta chain variable domain of TCR clone 254495 (TRBV10-2, TRBJ2-7)
CASGASGGYKQYF

SEQ ID NO: 508991 - protein, 14 aa, Homo sapiens
  CDR3 for alpha chain variable domain of TCR clone 254496 (TRAV12-2, TRAJ53)
CAVDDGGSNYKLTF

SEQ ID NO: 508992 - protein, 13 aa, Homo sapiens
  CDR3 for beta chain variable domain of TCR clone 254496 (TRBV20-1, TRBJ1-1)
CSARGGGNTEAFF

SEQ ID NO: 508993 - protein, 17 aa, Homo sapiens
  CDR3 for alpha chain variable domain of TCR clone 254497 (TRAV3, TRAJ6)
CAVRDGPRAGGSYIPTF

SEQ ID NO: 508994 - protein, 14 aa, Homo sapiens
  CDR3 for beta chain variable domain of TCR clone 254497 (TRBV20-1, TRBJ2-7)
CSASPRGDTYEQYF

SEQ ID NO: 508995 - protein, 12 aa, Homo sapiens
  CDR3 for alpha chain variable domain of TCR clone 254498 (TRAV12-3, TRAJ17)
CAMTLTGNKLTF

SEQ ID NO: 508996 - protein, 13 aa, Homo sapiens
  CDR3 for beta chain variable domain of TCR clone 254498 (TRBV7-2, TRBJ1-2)
CASSFLGSYGYTF

SEQ ID NO: 508997 - protein, 16 aa, Homo sapiens
  CDR3 for alpha chain variable domain of TCR clone 254499 (TRAV16, TRAJ4)
CALSRMFSGGYNKLIF

SEQ ID NO: 508998 - protein, 14 aa, Homo sapiens
  CDR3 for beta chain variable domain of TCR clone 254499 (TRBV7-7, TRBJ2-2)
CATRQDSDTGELFF

SEQ ID NO: 508999 - protein, 21 aa, Homo sapiens
  CDR3 for alpha chain variable domain of TCR clone 254500 (TRAV1-1, TRAJ6)
CLLLLRCERLEKTGGSYIPTF

SEQ ID NO: 509000 - protein, 14 aa, Homo sapiens
  CDR3 for beta chain variable domain of TCR clone 254500 (TRBV7-2, TRBJ2-5)
CASSLSGGGETQYF

SEQ ID NO: 509001 - protein, 13 aa, Homo sapiens
  CDR3 for alpha chain variable domain of TCR clone 254501 (TRAV8-3, TRAJ48)
CAVVPSGNEKLTF

SEQ ID NO: 509002 - protein, 15 aa, Homo sapiens
  CDR3 for beta chain variable domain of TCR clone 254501 (TRBV11-2, TRBJ2-1)
CASSSPSTRYNEQLF

SEQ ID NO: 509003 - protein, 15 aa, Homo sapiens
  CDR3 for alpha chain variable domain of TCR clone 254502 (TRAV27, TRAJ38)
CAARRDAGNNRKPIW

SEQ ID NO: 509004 - protein, 13 aa, Homo sapiens
  CDR3 for beta chain variable domain of TCR clone 254502 (TRBV12-5, TRBJ2-3)
CASGDRQSDTQYF

SEQ ID NO: 509005 - protein, 17 aa, Homo sapiens
  CDR3 for alpha chain variable domain of TCR clone 254503 (TRAV29/DV5, TRAJ45)
CAAAGPFSGGGADGLTF

SEQ ID NO: 509006 - protein, 14 aa, Homo sapiens
  CDR3 for beta chain variable domain of TCR clone 254503 (TRBV7-2, TRBJ2-7)
CASSPKTSFYEQYF

SEQ ID NO: 509007 - protein, 14 aa, Homo sapiens
  CDR3 for alpha chain variable domain of TCR clone 254504 (TRAV1-2, TRAJ16)
CAVNRFSDGQKLLF

SEQ ID NO: 509008 - protein, 13 aa, Homo sapiens
  CDR3 for beta chain variable domain of TCR clone 254504 (TRBV7-3, TRBJ1-1)
CASSQDWGAKAFF

SEQ ID NO: 509009 - protein, 12 aa, Homo sapiens
  CDR3 for alpha chain variable domain of TCR clone 254505 (TRAV8-4, TRAJ31)
CAVSDSNARLMF

SEQ ID NO: 509010 - protein, 15 aa, Homo sapiens
  CDR3 for beta chain variable domain of TCR clone 254505 (TRBV12-4, TRBJ2-7)
CASRCWGQGADEQYF

SEQ ID NO: 509011 - protein, 11 aa, Homo sapiens
  CDR3 for alpha chain variable domain of TCR clone 254506 (TRAV23/DV6, TRAJ9)
CFHTGGFKTIF

SEQ ID NO: 509012 - protein, 14 aa, Homo sapiens
  CDR3 for beta chain variable domain of TCR clone 254506 (TRBV7-9, TRBJ2-5)
CASSLDTAQETQYF

SEQ ID NO: 509013 - protein, 17 aa, Homo sapiens
  CDR3 for alpha chain variable domain of TCR clone 254507 (TRAV3, TRAJ6)
CAVRDGPRAGGSYIPTF

SEQ ID NO: 509014 - protein, 15 aa, Homo sapiens
  CDR3 for beta chain variable domain of TCR clone 254507 (TRBV6-5, TRBJ2-1)
CASSRGGTSYNEQFF

SEQ ID NO: 509015 - protein, 11 aa, Homo sapiens
  CDR3 for alpha chain variable domain of TCR clone 254508 (TRAV2, TRAJ13)
CASGGYQKVTF

SEQ ID NO: 509016 - protein, 12 aa, Homo sapiens
  CDR3 for beta chain variable domain of TCR clone 254508 (TRBV12-4, TRBJ1-4)
CASSETNEKLFF

SEQ ID NO: 509017 - protein, 12 aa, Homo sapiens
  CDR3 for alpha chain variable domain of TCR clone 254509 (TRAV21, TRAJ33)
CAVQDSNYQLIW

SEQ ID NO: 509018 - protein, 15 aa, Homo sapiens
  CDR3 for beta chain variable domain of TCR clone 254509 (TRBV28, TRBJ2-4)
CAAGSGTLLMGIQYF

SEQ ID NO: 509019 - protein, 15 aa, Homo sapiens
  CDR3 for alpha chain variable domain of TCR clone 254510 (TRAV16, TRAJ10)
CALEGLTGGGDKLTF

SEQ ID NO: 509020 - protein, 16 aa, Homo sapiens
  CDR3 for beta chain variable domain of TCR clone 254510 (TRBV5-6, TRBJ1-1)
CASSLVGPRGNTEAFF

SEQ ID NO: 509021 - protein, 16 aa, Homo sapiens
  CDR3 for alpha chain variable domain of TCR clone 254511 (TRAV20, TRAJ10)
CSVLRGLTGGGSKLTF

SEQ ID NO: 509022 - protein, 14 aa, Homo sapiens
  CDR3 for beta chain variable domain of TCR clone 254511 (TRBV19, TRBJ1-5)
CASRAPDSFLSQHF

SEQ ID NO: 509023 - protein, 14 aa, Homo sapiens
  CDR3 for alpha chain variable domain of TCR clone 254512 (TRAV8-6, TRAJ8)
CAVNENTGFQKLVF

SEQ ID NO: 509024 - protein, 11 aa, Homo sapiens
  CDR3 for beta chain variable domain of TCR clone 254512 (TRBV29-1, TRBJ2-5)
CSEDRTGTQDF

SEQ ID NO: 509025 - protein, 12 aa, Homo sapiens
  CDR3 for alpha chain variable domain of TCR clone 254513 (TRAV12-3, TRAJ20)
CAMVRGDYKLSF

SEQ ID NO: 509026 - protein, 16 aa, Homo sapiens
  CDR3 for beta chain variable domain of TCR clone 254513 (TRBV5-1, TRBJ2-3)
CASSLGRAVYTDTQYF

SEQ ID NO: 509027 - protein, 13 aa, Homo sapiens
  CDR3 for alpha chain variable domain of TCR clone 254514 (TRAV2, TRAJ16)
CAVEFGDGQKLLF

SEQ ID NO: 509028 - protein, 15 aa, Homo sapiens
  CDR3 for beta chain variable domain of TCR clone 254514 (TRBV7-3, TRBJ2-2)
CASSETGQGTGELFF

SEQ ID NO: 509029 - protein, 16 aa, Homo sapiens
  CDR3 for alpha chain variable domain of TCR clone 254515 (TRAV8-2, TRAJ45)
CVVSEGTGGGADGLTF

SEQ ID NO: 509030 - protein, 16 aa, Homo sapiens
  CDR3 for beta chain variable domain of TCR clone 254515 (TRBV7-3, TRBJ2-2)
CASSLKRGTLSGELFF

SEQ ID NO: 509031 - protein, 12 aa, Homo sapiens
  CDR3 for alpha chain variable domain of TCR clone 254516 (TRAV1-2, TRAJ26)
CAGRYYGQNFVF

SEQ ID NO: 509032 - protein, 14 aa, Homo sapiens
  CDR3 for beta chain variable domain of TCR clone 254516 (TRBV11-1, TRBJ2-7)
CASSFRQGSYEQYF

SEQ ID NO: 509033 - protein, 12 aa, Homo sapiens
  CDR3 for alpha chain variable domain of TCR clone 254517 (TRAV12-3, TRAJ17)
CAMTLTGNKLTY

SEQ ID NO: 509034 - protein, 13 aa, Homo sapiens
  CDR3 for beta chain variable domain of TCR clone 254517 (TRBV7-3, TRBJ1-1)
CASSQDWGAEDFF

SEQ ID NO: 509035 - protein, 15 aa, Homo sapiens
  CDR3 for alpha chain variable domain of TCR clone 254518 (TRAV8-3, TRAJ11)
CAVGLLNSGYSTLTF

SEQ ID NO: 509036 - protein, 16 aa, Homo sapiens
  CDR3 for beta chain variable domain of TCR clone 254518 (TRBV19, TRBJ2-2)
CASRSPGTGATGELFF

SEQ ID NO: 509037 - protein, 15 aa, Homo sapiens
  CDR3 for alpha chain variable domain of TCR clone 254519 (TRAV17, TRAJ13)
CATVPNSGGYQKVTF

SEQ ID NO: 509038 - protein, 17 aa, Homo sapiens
  CDR3 for beta chain variable domain of TCR clone 254519 (TRBV28, TRBJ2-5)
CASSRQGGLAGAETQYF

SEQ ID NO: 509039 - protein, 14 aa, Homo sapiens
  CDR3 for alpha chain variable domain of TCR clone 254520 (TRAV4, TRAJ26)
CLVGPHNYGQNFVF

SEQ ID NO: 509040 - protein, 17 aa, Homo sapiens
  CDR3 for beta chain variable domain of TCR clone 254520 (TRBV24-1, TRBJ2-1)
CATSDVSTSGTDNEQFF

SEQ ID NO: 509041 - protein, 15 aa, Homo sapiens
  CDR3 for alpha chain variable domain of TCR clone 254521 (TRAV8-4, TRAJ12)
CAMSDRVDSSYKLIF

SEQ ID NO: 509042 - protein, 15 aa, Homo sapiens
  CDR3 for beta chain variable domain of TCR clone 254521 (TRBV11-3, TRBJ2-1)
CASSLAGQTYNEQFF

SEQ ID NO: 509043 - protein, 13 aa, Homo sapiens
  CDR3 for alpha chain variable domain of TCR clone 254522 (TRAV12-2, TRAJ48)
CAVRDFGNEKLTF

SEQ ID NO: 509044 - protein, 13 aa, Homo sapiens
  CDR3 for beta chain variable domain of TCR clone 254522 (TRBV13, TRBJ2-5)
CASSPEVGETQYF

SEQ ID NO: 509045 - protein, 13 aa, Homo sapiens
  CDR3 for alpha chain variable domain of TCR clone 254523 (TRAV12-3, TRAJ13)
CAMTSGGYQKVTF

SEQ ID NO: 509046 - protein, 13 aa, Homo sapiens
  CDR3 for beta chain variable domain of TCR clone 254523 (TRBV20-1, TRBJ2-2)
GSALSGGAGELFF

SEQ ID NO: 509047 - protein, 14 aa, Homo sapiens
  CDR3 for alpha chain variable domain of TCR clone 254524 (TRAV8-6, TRAJ8)
CAVNENTGFQKLVF

SEQ ID NO: 509048 - protein, 12 aa, Homo sapiens
  CDR3 for beta chain variable domain of TCR clone 254524 (TRBV28, TRBJ2-3)
CASSLYRDTQYF

SEQ ID NO: 509049 - protein, 15 aa, Homo sapiens
  CDR3 for alpha chain variable domain of TCR clone 254525 (TRAV25, TRAJ53)
CAATGGGGSNYKLPF

SEQ ID NO: 509050 - protein, 11 aa, Homo sapiens
  CDR3 for beta chain variable domain of TCR clone 254525 (TRBV11-3, TRBJ2-2)
CASSSGGELFF

SEQ ID NO: 509051 - protein, 16 aa, Homo sapiens
  CDR3 for alpha chain variable domain of TCR clone 254526 (TRAV12-2, TRAJ28)
CAVITDSGAGSHQLTF

SEQ ID NO: 509052 - protein, 12 aa, Homo sapiens
  CDR3 for beta chain variable domain of TCR clone 254526 (TRBV9, TRBJ2-2)
CASSLVTGELFF

SEQ ID NO: 509053 - protein, 11 aa, Homo sapiens
  CDR3 for alpha chain variable domain of TCR clone 254527 (TRAV23/DV6, TRAJ47)
CAAGYGNKLVF

SEQ ID NO: 509054 - protein, 16 aa, Homo sapiens
  CDR3 for beta chain variable domain of TCR clone 254527 (TRBV19, TRBJ2-3)
CASSPGAASRTDTQYF

SEQ ID NO: 509055 - protein, 15 aa, Homo sapiens
  CDR3 for alpha chain variable domain of TCR clone 254528 (TRAV13-1, TRAJ6)
CAAIHPSGGSYIPTF

SEQ ID NO: 509056 - protein, 14 aa, Homo sapiens
  CDR3 for beta chain variable domain of TCR clone 254528 (TRBV4-2, TRBJ2-1)
CASGLDRAYNEQFF

SEQ ID NO: 509057 - protein, 11 aa, Homo sapiens
  CDR3 for alpha chain variable domain of TCR clone 254529 (TRAV17, TRAJ9)
CATTGGFKTIF

SEQ ID NO: 509058 - protein, 14 aa, Homo sapiens
  CDR3 for beta chain variable domain of TCR clone 254529 (TRBV7-9, TRBJ2-2)
CAGSGLADTGELFS

SEQ ID NO: 509059 - protein, 18 aa, Homo sapiens
  CDR3 for alpha chain variable domain of TCR clone 254530 (TRAV26-2, TRAJ45)
CILRLWGYSGGGADVLTF

SEQ ID NO: 509060 - protein, 17 aa, Homo sapiens
  CDR3 for beta chain variable domain of TCR clone 254530 (TRBV28, TRBJ2-3)
CASSPTPAGGRVDTQYF

SEQ ID NO: 509061 - protein, 14 aa, Homo sapiens
  CDR3 for alpha chain variable domain of TCR clone 254531 (TRAV22, TRAJ6)
CAGVGPGGSYIPTF

SEQ ID NO: 509062 - protein, 14 aa, Homo sapiens
  CDR3 for beta chain variable domain of TCR clone 254531 (TRBV28, TRBJ2-7)
CASTRQGAPYEQYF

SEQ ID NO: 509063 - protein, 12 aa, Homo sapiens
  CDR3 for alpha chain variable domain of TCR clone 254532 (TRAV12-3, TRAJ4)
CAMTGAGTRLAV

SEQ ID NO: 509064 - protein, 14 aa, Homo sapiens
  CDR3 for beta chain variable domain of TCR clone 254532 (TRBV7-3, TRBJ2-1)
CASSLAGGTNEQFF

SEQ ID NO: 509065 - protein, 14 aa, Homo sapiens
  CDR3 for alpha chain variable domain of TCR clone 254533 (TRAV36/DV7, TRAJ13)
RGSGENGGYQKVTF

SEQ ID NO: 509066 - protein, 15 aa, Homo sapiens
  CDR3 for beta chain variable domain of TCR clone 254533 (TRBV19, TRBJ2-1)
CASSTGTSSYNEQFF

SEQ ID NO: 509067 - protein, 13 aa, Homo sapiens
  CDR3 for alpha chain variable domain of TCR clone 254534 (TRAV27, TRAJ53)
CAGQGGSNYKLTF

SEQ ID NO: 509068 - protein, 14 aa, Homo sapiens
  CDR3 for beta chain variable domain of TCR clone 254534 (TRBV7-2, TRBJ2-7)
CASRSQGAAYEQYF

SEQ ID NO: 509069 - protein, 15 aa, Homo sapiens
  CDR3 for alpha chain variable domain of TCR clone 254535 (TRAV21, TRAJ37)
CAVRPTLSNTGKLIF

SEQ ID NO: 509070 - protein, 12 aa, Homo sapiens
  CDR3 for beta chain variable domain of TCR clone 254535 (TRBV6-3, TRBJ2-7)
CASLGSYYEQYF

SEQ ID NO: 509071 - protein, 13 aa, Homo sapiens
  CDR3 for alpha chain variable domain of TCR clone 254536 (TRAV29/DV5, TRAJ31)
CAASRNNNTRLMF

SEQ ID NO: 509072 - protein, 13 aa, Homo sapiens
  CDR3 for beta chain variable domain of TCR clone 254536 (TRBV7-2, TRBJ2-4)
CASSREHANIQYF

SEQ ID NO: 509073 - protein, 14 aa, Homo sapiens
  CDR3 for alpha chain variable domain of TCR clone 254537 (TRAV12-2, TRAJ40)
YAVKIPSGTYKYIF

SEQ ID NO: 509074 - protein, 13 aa, Homo sapiens
  CDR3 for beta chain variable domain of TCR clone 254537 (TRBV7-9, TRBJ1-2)
CASSFKQNYGYTF

SEQ ID NO: 509075 - protein, 16 aa, Homo sapiens
  CDR3 for alpha chain variable domain of TCR clone 254538 (TRAV26-1, )
CIDIQNPDPAVYRLRD

SEQ ID NO: 509076 - protein, 19 aa, Homo sapiens
  CDR3 for beta chain variable domain of TCR clone 254538 (TRBV19, TRBJ2-5)
CASSIGQVTDFFLGETQYF

SEQ ID NO: 509077 - protein, 14 aa, Homo sapiens
  CDR3 for alpha chain variable domain of TCR clone 254539 (TRAV9-2, TRAJ39)
CALYIYNASNMLTF

SEQ ID NO: 509078 - protein, 12 aa, Homo sapiens
  CDR3 for beta chain variable domain of TCR clone 254539 (TRBV29-1, TRBJ2-2)
CSVDKYTGELFF

SEQ ID NO: 509079 - protein, 13 aa, Homo sapiens
  CDR3 for alpha chain variable domain of TCR clone 254540 (TRAV8-2, TRAJ43)
GVVSDQGDNDMRF

SEQ ID NO: 509080 - protein, 19 aa, Homo sapiens
  CDR3 for beta chain variable domain of TCR clone 254540 (TRBV7-2, TRBJ2-3)
CASSFLSRNWGGGTDTQYF

SEQ ID NO: 509081 - protein, 14 aa, Homo sapiens
  CDR3 for alpha chain variable domain of TCR clone 254541 (TRAV12-2, TRAJ40)
CAVKIPSGTYKYIF

SEQ ID NO: 509082 - protein, 14 aa, Homo sapiens
  CDR3 for beta chain variable domain of TCR clone 254541 (TRBV7-8, TRBJ2-7)
CASSPRDRVYAQYF

SEQ ID NO: 509083 - protein, 14 aa, Homo sapiens
  CDR3 for alpha chain variable domain of TCR clone 254542 (TRAV8-3, TRAJ4)
CAVGAAGGYNNLIF

SEQ ID NO: 509084 - protein, 17 aa, Homo sapiens
  CDR3 for beta chain variable domain of TCR clone 254542 (TRBV13, TRBJ2-3)
CASSLSRVAGGRNTQYF

SEQ ID NO: 509085 - protein, 13 aa, Homo sapiens
  CDR3 for alpha chain variable domain of TCR clone 254543 (TRAV20, TRAJ37)
CAGCSSNAGRLIF

SEQ ID NO: 509086 - protein, 15 aa, Homo sapiens
  CDR3 for beta chain variable domain of TCR clone 254543 (TRBV20-1, TRBJ1-2)
CSAAGEGARIYGYTF

SEQ ID NO: 509087 - protein, 10 aa, Homo sapiens
  CDR3 for alpha chain variable domain of TCR clone 254544 (TRAV25, TRAJ20)
CAVNDYKLSF

SEQ ID NO: 509088 - protein, 18 aa, Homo sapiens
  CDR3 for beta chain variable domain of TCR clone 254544 (TRBV20-1, TRBJ2-6)
CSAETTPTHGSGANILTF

SEQ ID NO: 509089 - protein, 11 aa, Homo sapiens
  CDR3 for alpha chain variable domain of TCR clone 254545 (TRAV8-6, TRAJ20)
CAVSYDYKFSF

SEQ ID NO: 509090 - protein, 14 aa, Homo sapiens
  CDR3 for beta chain variable domain of TCR clone 254545 (TRBV13, TRBJ2-7)
CASSLKGASYEQYF

SEQ ID NO: 509091 - protein, 12 aa, Homo sapiens
  CDR3 for alpha chain variable domain of TCR clone 254546 (TRAV2, TRAJ24)
CAATDSWGKFQF

SEQ ID NO: 509092 - protein, 13 aa, Homo sapiens
  CDR3 for beta chain variable domain of TCR clone 254546 (TRBV5-8, TRBJ1-1)
CASSLGGGTEAVF

SEQ ID NO: 509093 - protein, 17 aa, Homo sapiens
  CDR3 for alpha chain variable domain of TCR clone 254547 (TRAV3, TRAJ42)
CAVRDRDYGGSQGNLIF

SEQ ID NO: 509094 - protein, 16 aa, Homo sapiens
  CDR3 for beta chain variable domain of TCR clone 254547 (TRBV11-3, TRBJ2-5)
CASSSVVAGSTETQYF

SEQ ID NO: 509095 - protein, 12 aa, Homo sapiens
  CDR3 for alpha chain variable domain of TCR clone 254548 (TRAV26-2, TRAJ21)
CILRGNFNKFYF

SEQ ID NO: 509096 - protein, 14 aa, Homo sapiens
  CDR3 for beta chain variable domain of TCR clone 254548 (TRBV12-4, TRBJ1-1)
CASSLGTGGTEAFF

SEQ ID NO: 509097 - protein, 11 aa, Homo sapiens
  CDR3 for alpha chain variable domain of TCR clone 254549 (TRAV12-3, TRAJ27)
CAMANEGKSTF

SEQ ID NO: 509098 - protein, 14 aa, Homo sapiens
  CDR3 for beta chain variable domain of TCR clone 254549 (TRBV12-5, TRBJ2-5)
CASGSRTHQETQYF

SEQ ID NO: 509099 - protein, 14 aa, Homo sapiens
  CDR3 for alpha chain variable domain of TCR clone 254550 (TRAV12-1, TRAJ12)
CVVTRMDSSYKLIF

SEQ ID NO: 509100 - protein, 13 aa, Homo sapiens
  CDR3 for beta chain variable domain of TCR clone 254550 (TRBV20-1, TRBJ1-1)
CSARGGGNTEAFC

SEQ ID NO: 509101 - protein, 13 aa, Homo sapiens
  CDR3 for alpha chain variable domain of TCR clone 254551 (TRAV17, TRAJ15)
CATDAREGTALIF

SEQ ID NO: 509102 - protein, 14 aa, Homo sapiens
  CDR3 for beta chain variable domain of TCR clone 254551 (TRBV7-2, TRBJ2-5)
CASSIRLTQETQYF

SEQ ID NO: 509103 - protein, 14 aa, Homo sapiens
  CDR3 for alpha chain variable domain of TCR clone 254552 (TRAV3, TRAJ9)
CTVRLNTGGFKTIF

SEQ ID NO: 509104 - protein, 12 aa, Homo sapiens
  CDR3 for beta chain variable domain of TCR clone 254552 (TRBV11-2, TRBJ2-2)
CASSLGGGELFF

SEQ ID NO: 509105 - protein, 14 aa, Homo sapiens
  CDR3 for alpha chain variable domain of TCR clone 254553 (TRAV12-3, TRAJ22)
CAMSLFGPARQLTF

SEQ ID NO: 509106 - protein, 11 aa, Homo sapiens
  CDR3 for beta chain variable domain of TCR clone 254553 (TRBV19, TRBJ2-2)
CASRYSGELFF

SEQ ID NO: 509107 - protein, 14 aa, Homo sapiens
  CDR3 for alpha chain variable domain of TCR clone 254554 (TRAV12-2, TRAJ17)
CAVLFKAAGNKLTF

SEQ ID NO: 509108 - protein, 15 aa, Homo sapiens
  CDR3 for beta chain variable domain of TCR clone 254554 (TRBV2, TRBJ2-5)
CASSEQGLIGETQYF

SEQ ID NO: 509109 - protein, 12 aa, Homo sapiens
  CDR3 for alpha chain variable domain of TCR clone 254555 (TRAV21, TRAJ13)
PGPSGGDQKVTF

SEQ ID NO: 509110 - protein, 15 aa, Homo sapiens
  CDR3 for beta chain variable domain of TCR clone 254555 (TRBV20-1, TRBJ2-7)
CSARARVSGMDEQYF

SEQ ID NO: 509111 - protein, 13 aa, Homo sapiens
  CDR3 for alpha chain variable domain of TCR clone 254556 (TRAV12-2, TRAJ37)
CAVSSGNTGKPIF

SEQ ID NO: 509112 - protein, 17 aa, Homo sapiens
  CDR3 for beta chain variable domain of TCR clone 254556 (TRBV5-1, TRBJ2-5)
CASSLLGVAANQETQYF

SEQ ID NO: 509113 - protein, 14 aa, Homo sapiens
  CDR3 for alpha chain variable domain of TCR clone 254557 (TRAV8-4, TRAJ13)
CAVTLSGGYPKVTF

SEQ ID NO: 509114 - protein, 16 aa, Homo sapiens
  CDR3 for beta chain variable domain of TCR clone 254557 (TRBV5-7, TRBJ1-4)
CASSPSGGLKTEKLFF

SEQ ID NO: 509115 - protein, 13 aa, Homo sapiens
  CDR3 for alpha chain variable domain of TCR clone 254558 (TRAV2, TRAJ21)
CAVEDLNFNKFYF

SEQ ID NO: 509116 - protein, 15 aa, Homo sapiens
  CDR3 for beta chain variable domain of TCR clone 254558 (TRBV28, TRBJ2-5)
CASSSGRTIQETQYF

SEQ ID NO: 509117 - protein, 14 aa, Homo sapiens
  CDR3 for alpha chain variable domain of TCR clone 254559 (TRAV35, TRAJ22)
CAGLRPGSARQLTF

SEQ ID NO: 509118 - protein, 13 aa, Homo sapiens
  CDR3 for beta chain variable domain of TCR clone 254559 (TRBV20-1, TRBJ2-7)
CSATHTGGYEQSF

SEQ ID NO: 509119 - protein, 13 aa, Homo sapiens
  CDR3 for alpha chain variable domain of TCR clone 254560 (TRAV13-1, TRAJ43)
CAASKNNNNDMRF

SEQ ID NO: 509120 - protein, 15 aa, Homo sapiens
  CDR3 for beta chain variable domain of TCR clone 254560 (TRBV19, TRBJ1-1)
CASTSGQIENTEAFF

SEQ ID NO: 509121 - protein, 16 aa, Homo sapiens
  CDR3 for alpha chain variable domain of TCR clone 254561 (TRAV22, TRAJ45)
CAVERGKRGGADGLTF

SEQ ID NO: 509122 - protein, 11 aa, Homo sapiens
  CDR3 for beta chain variable domain of TCR clone 254561 (TRBV29-1, TRBJ2-5)
CSEDRTGTQYF

SEQ ID NO: 509123 - protein, 14 aa, Homo sapiens
  CDR3 for alpha chain variable domain of TCR clone 254562 (TRAV8-4, TRAJ9)
CAVRINTGGFKTIF

SEQ ID NO: 509124 - protein, 16 aa, Homo sapiens
  CDR3 for beta chain variable domain of TCR clone 254562 (TRBV4-3, TRBJ2-7)
CASSPRTSGRSYEQYF

SEQ ID NO: 509125 - protein, 14 aa, Homo sapiens
  CDR3 for alpha chain variable domain of TCR clone 254563 (TRAV4, TRAJ17)
CLVGPQAAGNKLTF

SEQ ID NO: 509126 - protein, 16 aa, Homo sapiens
  CDR3 for beta chain variable domain of TCR clone 254563 (TRBV3-1, TRBJ2-7)
CASSQGATGVAFEQYF

SEQ ID NO: 509127 - protein, 14 aa, Homo sapiens
  CDR3 for alpha chain variable domain of TCR clone 254564 (TRAV12-2, TRAJ17)
CAVNIKAAGNKLTF

SEQ ID NO: 509128 - protein, 16 aa, Homo sapiens
  CDR3 for beta chain variable domain of TCR clone 254564 (TRBV20-1, TRBJ2-6)
CSASSQGYDGANVPTF

SEQ ID NO: 509129 - protein, 13 aa, Homo sapiens
  CDR3 for alpha chain variable domain of TCR clone 254565 (TRAV3, TRAJ8)
CAVRFTGFQKLVF

SEQ ID NO: 509130 - protein, 15 aa, Homo sapiens
  CDR3 for beta chain variable domain of TCR clone 254565 (TRBV20-1, TRBJ2-7)
CSSRDRVSGMDEQYF

SEQ ID NO: 509131 - protein, 18 aa, Homo sapiens
  CDR3 for alpha chain variable domain of TCR clone 254566 (TRAV26-1, TRAJ37)
CIVRVDMHGSSNTGKLIF

SEQ ID NO: 509132 - protein, 15 aa, Homo sapiens
  CDR3 for beta chain variable domain of TCR clone 254566 (TRBV2, TRBJ2-7)
CASSEGLARSYEQYF

SEQ ID NO: 509133 - protein, 13 aa, Homo sapiens
  CDR3 for alpha chain variable domain of TCR clone 254567 (TRAV13-1, TRAJ5)
CAASDTGRIALTF

SEQ ID NO: 509134 - protein, 12 aa, Homo sapiens
  CDR3 for beta chain variable domain of TCR clone 254567 (TRBV28, TRBJ2-3)
CDSSLYRDTQYF

SEQ ID NO: 509135 - protein, 17 aa, Homo sapiens
  CDR3 for alpha chain variable domain of TCR clone 254568 (TRAV3, TRAJ6)
CSVRDGPRAGGSYITTF

SEQ ID NO: 509136 - protein, 14 aa, Homo sapiens
  CDR3 for beta chain variable domain of TCR clone 254568 (TRBV7-2, TRBJ2-7)
CASSPKTSFYEQYF

SEQ ID NO: 509137 - protein, 16 aa, Homo sapiens
  CDR3 for alpha chain variable domain of TCR clone 254569 (TRAV13-1, TRAJ22)
YAAKGGRSGSARQLTF

SEQ ID NO: 509138 - protein, 15 aa, Homo sapiens
  CDR3 for beta chain variable domain of TCR clone 254569 (TRBV9, TRBJ1-6)
CASSVAGTGESPLHF

SEQ ID NO: 509139 - protein, 16 aa, Homo sapiens
  CDR3 for alpha chain variable domain of TCR clone 254570 (TRAV3, TRAJ28)
CAVLPRTGAGSYQLTF

SEQ ID NO: 509140 - protein, 13 aa, Homo sapiens
  CDR3 for beta chain variable domain of TCR clone 254570 (TRBV12-4, TRBJ2-5)
CASRLAVQETQYF

SEQ ID NO: 509141 - protein, 13 aa, Homo sapiens
  CDR3 for alpha chain variable domain of TCR clone 254571 (TRAV6, TRAJ20)
CALAVSNGYKLSF

SEQ ID NO: 509142 - protein, 16 aa, Homo sapiens
  CDR3 for beta chain variable domain of TCR clone 254571 (TRBV7-9, TRBJ2-1)
CASSDVAGGSYNEQFF

SEQ ID NO: 509143 - protein, 14 aa, Homo sapiens
  CDR3 for alpha chain variable domain of TCR clone 254572 (TRAV16, TRAJ32)
CALKSGGATNKLIF

SEQ ID NO: 509144 - protein, 13 aa, Homo sapiens
  CDR3 for beta chain variable domain of TCR clone 254572 (TRBV6-3, TRBJ1-1)
CASSYGRGSGAFF

SEQ ID NO: 509145 - protein, 13 aa, Homo sapiens
  CDR3 for alpha chain variable domain of TCR clone 254573 (TRAV8-6, TRAJ8)
GAVSNTGFQKLVF

SEQ ID NO: 509146 - protein, 15 aa, Homo sapiens
  CDR3 for beta chain variable domain of TCR clone 254573 (TRBV28, TRBJ2-5)
CASSSGRTIQETQYF

SEQ ID NO: 509147 - protein, 14 aa, Homo sapiens
  CDR3 for alpha chain variable domain of TCR clone 254574 (TRAV12-2, TRAJ13)
CAVKKTGGYQKVTF

SEQ ID NO: 509148 - protein, 14 aa, Homo sapiens
  CDR3 for beta chain variable domain of TCR clone 254574 (TRBV6-5, TRBJ2-2)
CAITEGQETGELFF

SEQ ID NO: 509149 - protein, 11 aa, Homo sapiens
  CDR3 for alpha chain variable domain of TCR clone 254575 (TRAV17, TRAJ31)
CATDRTSRLMF

SEQ ID NO: 509150 - protein, 12 aa, Homo sapiens
  CDR3 for beta chain variable domain of TCR clone 254575 (TRBV29-1, TRBJ2-3)
CSVTGGADTQYF

SEQ ID NO: 509151 - protein, 14 aa, Homo sapiens
  CDR3 for alpha chain variable domain of TCR clone 254576 (TRAV20, TRAJ29)
CAVQAWVGNTPLVF

SEQ ID NO: 509152 - protein, 15 aa, Homo sapiens
  CDR3 for beta chain variable domain of TCR clone 254576 (TRBV29-1, TRBJ2-7)
CSVEFFDRVSYEQYF

SEQ ID NO: 509153 - protein, 15 aa, Homo sapiens
  CDR3 for alpha chain variable domain of TCR clone 254577 (TRAV20, TRAJ53)
CAVQASGGSNYKLTF

SEQ ID NO: 509154 - protein, 12 aa, Homo sapiens
  CDR3 for beta chain variable domain of TCR clone 254577 (TRBV7-6, TRBJ2-5)
CASSLSQETKYF

SEQ ID NO: 509155 - protein, 15 aa, Homo sapiens
  CDR3 for alpha chain variable domain of TCR clone 254578 (TRAV3, TRAJ5)
CAVRDLDTGRRALTF

SEQ ID NO: 509156 - protein, 12 aa, Homo sapiens
  CDR3 for beta chain variable domain of TCR clone 254578 (TRBV12-4, TRBJ2-1)
CASSPGRNEQFF

SEQ ID NO: 509157 - protein, 15 aa, Homo sapiens
  CDR3 for alpha chain variable domain of TCR clone 254579 (TRAV8-4, TRAJ36)
WAVRKSWTGANNLFF

SEQ ID NO: 509158 - protein, 17 aa, Homo sapiens
  CDR3 for beta chain variable domain of TCR clone 254579 (TRBV3-1, TRBJ2-2)
CASSQDSQGPNTGELFF

SEQ ID NO: 509159 - protein, 10 aa, Homo sapiens
  CDR3 for alpha chain variable domain of TCR clone 254580 (TRAV13-2, TRAJ43)
CAECRNDMRF

SEQ ID NO: 509160 - protein, 18 aa, Homo sapiens
  CDR3 for beta chain variable domain of TCR clone 254580 (TRBV11-2, TRBJ1-3)
CASSPGGGQPTADKTIYF

SEQ ID NO: 509161 - protein, 16 aa, Homo sapiens
  CDR3 for alpha chain variable domain of TCR clone 254581 (TRAV3, TRAJ10)
CAVRDMRAGGGNKFTF

SEQ ID NO: 509162 - protein, 19 aa, Homo sapiens
  CDR3 for beta chain variable domain of TCR clone 254581 (TRBV6-3, TRBJ1-2)
CASSYSKGRTGPPNYGYTF

SEQ ID NO: 509163 - protein, 11 aa, Homo sapiens
  CDR3 for alpha chain variable domain of TCR clone 254582 (TRAV2, TRAJ13)
CASGGYQKVTF

SEQ ID NO: 509164 - protein, 15 aa, Homo sapiens
  CDR3 for beta chain variable domain of TCR clone 254582 (TRBV11-2, TRBJ2-5)
CASSPRSGGLETQYF

SEQ ID NO: 509165 - protein, 13 aa, Homo sapiens
  CDR3 for alpha chain variable domain of TCR clone 254583 (TRAV12-3, TRAJ13)
CEMTSGGYQNVTF

SEQ ID NO: 509166 - protein, 13 aa, Homo sapiens
  CDR3 for beta chain variable domain of TCR clone 254583 (TRBV7-9, TRBJ1-2)
CASSLKQNYGYTF

SEQ ID NO: 509167 - protein, 14 aa, Homo sapiens
  CDR3 for alpha chain variable domain of TCR clone 254584 (TRAV12-3, TRAJ22)
CAMSLFGSARQLTF

SEQ ID NO: 509168 - protein, 13 aa, Homo sapiens
  CDR3 for beta chain variable domain of TCR clone 254584 (TRBV7-9, TRBJ2-7)
CASSFAGAYEQYF

SEQ ID NO: 509169 - protein, 16 aa, Homo sapiens
  CDR3 for alpha chain variable domain of TCR clone 254585 (TRAV3, TRAJ21)
CAVRDIERGNFNKFYF

SEQ ID NO: 509170 - protein, 13 aa, Homo sapiens
  CDR3 for beta chain variable domain of TCR clone 254585 (TRBV12-4, TRBJ2-7)
CASSLERVREQYF

SEQ ID NO: 509171 - protein, 15 aa, Homo sapiens
  CDR3 for alpha chain variable domain of TCR clone 254586 (TRAV35, TRAJ52)
CAWPRGGTSYGKLTF

SEQ ID NO: 509172 - protein, 14 aa, Homo sapiens
  CDR3 for beta chain variable domain of TCR clone 254586 (TRBV20-1, TRBJ2-7)
CSAWTALSSYEQYF

SEQ ID NO: 509173 - protein, 15 aa, Homo sapiens
  CDR3 for alpha chain variable domain of TCR clone 254587 (TRAV12-2, TRAJ43)
CAFDMRFGAGTRLTV

SEQ ID NO: 509174 - protein, 20 aa, Homo sapiens
  CDR3 for beta chain variable domain of TCR clone 254587 (TRBV7-8, TRBJ2-2)
WASSHLFPGPTIHITGELFF

SEQ ID NO: 509175 - protein, 16 aa, Homo sapiens
  CDR3 for alpha chain variable domain of TCR clone 254588 (TRAV30, TRAJ24)
CGTEIVDVDSWGKFQF

SEQ ID NO: 509176 - protein, 14 aa, Homo sapiens
  CDR3 for beta chain variable domain of TCR clone 254588 (TRBV12-5, TRBJ2-5)
CVSGSRTHQETQYF

SEQ ID NO: 509177 - protein, 14 aa, Homo sapiens
  CDR3 for alpha chain variable domain of TCR clone 254589 (TRAV2, TRAJ9)
CAVADRSGGFKTIF

SEQ ID NO: 509178 - protein, 14 aa, Homo sapiens
  CDR3 for beta chain variable domain of TCR clone 254589 (TRBV3-1, TRBJ2-5)
CASSQGPDQETQYF

SEQ ID NO: 509179 - protein, 14 aa, Homo sapiens
  CDR3 for alpha chain variable domain of TCR clone 254590 (TRAV13-1, TRAJ35)
CAASKGGLGNVLHC

SEQ ID NO: 509180 - protein, 13 aa, Homo sapiens
  CDR3 for beta chain variable domain of TCR clone 254590 (TRBV7-3, TRBJ1-1)
CASSQDWGAEDFF

SEQ ID NO: 509181 - protein, 11 aa, Homo sapiens
  CDR3 for alpha chain variable domain of TCR clone 254591 (TRAV35, TRAJ30)
CAPGGDDKIIF

SEQ ID NO: 509182 - protein, 14 aa, Homo sapiens
  CDR3 for beta chain variable domain of TCR clone 254591 (TRBV7-6, TRBJ2-1)
CASSLGGGQMSSSS

SEQ ID NO: 509183 - protein, 13 aa, Homo sapiens
  CDR3 for alpha chain variable domain of TCR clone 254592 (TRAV2, TRAJ16)
CAGEFGGGQKRLF

SEQ ID NO: 509184 - protein, 14 aa, Homo sapiens
  CDR3 for beta chain variable domain of TCR clone 254592 (TRBV6-3, TRBJ2-5)
CASSYSLREKTQYF

SEQ ID NO: 509185 - protein, 14 aa, Homo sapiens
  CDR3 for alpha chain variable domain of TCR clone 254593 (TRAV8-3, TRAJ4)
CAVGAAGGYNKLIF

SEQ ID NO: 509186 - protein, 15 aa, Homo sapiens
  CDR3 for beta chain variable domain of TCR clone 254593 (TRBV6-5, TRBJ2-1)
CASSYDAEAGNEQFF

SEQ ID NO: 509187 - protein, 11 aa, Homo sapiens
  CDR3 for alpha chain variable domain of TCR clone 254594 (TRAV1-1, TRAJ23)
CAVRQGGRLIF

SEQ ID NO: 509188 - protein, 13 aa, Homo sapiens
  CDR3 for beta chain variable domain of TCR clone 254594 (TRBV15, TRBJ1-6)
CATSGGLNSPLHF

SEQ ID NO: 509189 - protein, 16 aa, Homo sapiens
  CDR3 for alpha chain variable domain of TCR clone 254595 (TRAV26-1, TRAJ32)
CIVRPNYGGATNKLIF

SEQ ID NO: 509190 - protein, 20 aa, Homo sapiens
  CDR3 for beta chain variable domain of TCR clone 254595 (TRBV7-8, TRBJ2-2)
CASSHLFPGPTIHITGELFF

SEQ ID NO: 509191 - protein, 13 aa, Homo sapiens
  CDR3 for alpha chain variable domain of TCR clone 254596 (TRAV8-6, TRAJ20)
CAVRTADDYKLSF

SEQ ID NO: 509192 - protein, 13 aa, Homo sapiens
  CDR3 for beta chain variable domain of TCR clone 254596 (TRBV4-1, TRBJ2-7)
CASSQGQAYEQYF

SEQ ID NO: 509193 - protein, 11 aa, Homo sapiens
  CDR3 for alpha chain variable domain of TCR clone 254597 (TRAV1-1, TRAJ23)
CAVRQGGKLIF

SEQ ID NO: 509194 - protein, 15 aa, Homo sapiens
  CDR3 for beta chain variable domain of TCR clone 254597 (TRBV4-1, TRBJ2-5)
CASSQWDLYQETQYF

SEQ ID NO: 509195 - protein, 15 aa, Homo sapiens
  CDR3 for alpha chain variable domain of TCR clone 254598 (TRAV8-3, TRAJ45)
CASSYSGGGADGLIF

SEQ ID NO: 509196 - protein, 15 aa, Homo sapiens
  CDR3 for beta chain variable domain of TCR clone 254598 (TRBV18, TRBJ1-1)
CASSPRQGENTEAFF

SEQ ID NO: 509197 - protein, 14 aa, Homo sapiens
  CDR3 for alpha chain variable domain of TCR clone 254599 (TRAV8-3, TRAJ4)
CAVGASCGYNKLIF

SEQ ID NO: 509198 - protein, 13 aa, Homo sapiens
  CDR3 for beta chain variable domain of TCR clone 254599 (TRBV18, TRBJ2-5)
CASSLQGQETQYF

SEQ ID NO: 509199 - protein, 13 aa, Homo sapiens
  CDR3 for alpha chain variable domain of TCR clone 254600 (TRAV16, TRAJ31)
CALSAHNNARLMF

SEQ ID NO: 509200 - protein, 13 aa, Homo sapiens
  CDR3 for beta chain variable domain of TCR clone 254600 (TRBV4-2, TRBJ1-1)
CASSQAGNTEAFF

SEQ ID NO: 509201 - protein, 14 aa, Homo sapiens
  CDR3 for alpha chain variable domain of TCR clone 254601 (TRAV16, TRAJ8)
CALLLYTGFQKLVF

SEQ ID NO: 509202 - protein, 15 aa, Homo sapiens
  CDR3 for beta chain variable domain of TCR clone 254601 (TRBV7-7, TRBJ2-2)
CATSKLAKNTGELFF

SEQ ID NO: 509203 - protein, 15 aa, Homo sapiens
  CDR3 for alpha chain variable domain of TCR clone 254602 (TRAV12-1, TRAJ36)
CVVNEHQTGANNPCF

SEQ ID NO: 509204 - protein, 12 aa, Homo sapiens
  CDR3 for beta chain variable domain of TCR clone 254602 (TRBV29-1, TRBJ2-3)
CSVTGGADTQYF

SEQ ID NO: 509205 - protein, 13 aa, Homo sapiens
  CDR3 for alpha chain variable domain of TCR clone 254603 (TRAV1-2, TRAJ9)
CAALTTGGFKTIF

SEQ ID NO: 509206 - protein, 17 aa, Homo sapiens
  CDR3 for beta chain variable domain of TCR clone 254603 (TRBV28, TRBJ2-5)
CASSRQGGLAGAETQYF

SEQ ID NO: 509207 - protein, 13 aa, Homo sapiens
  CDR3 for alpha chain variable domain of TCR clone 254604 (TRAV21, TRAJ15)
CAVANQAGTVLIF

SEQ ID NO: 509208 - protein, 15 aa, Homo sapiens
  CDR3 for beta chain variable domain of TCR clone 254604 (TRBV11-2, TRBJ2-1)
CASSSPSTRYNEQFF

SEQ ID NO: 509209 - protein, 14 aa, Homo sapiens
  CDR3 for alpha chain variable domain of TCR clone 254605 (TRAV26-1, TRAJ38)
CIADNAGNNRKLIW

SEQ ID NO: 509210 - protein, 14 aa, Homo sapiens
  CDR3 for beta chain variable domain of TCR clone 254605 (TRBV7-2, TRBJ2-7)
CASSLRWEVNEQYF

SEQ ID NO: 509211 - protein, 15 aa, Homo sapiens
  CDR3 for alpha chain variable domain of TCR clone 254606 (TRAV12-2, TRAJ53)
CAVEPGPGSNYKLTF

SEQ ID NO: 509212 - protein, 18 aa, Homo sapiens
  CDR3 for beta chain variable domain of TCR clone 254606 (TRBV11-2, TRBJ2-3)
CASSLGGASRGAPNTQYF

SEQ ID NO: 509213 - protein, 18 aa, Homo sapiens
  CDR3 for alpha chain variable domain of TCR clone 254607 (TRAV12-3, TRAJ52)
CAMSVGGAGGTSYGKLTF

SEQ ID NO: 509214 - protein, 12 aa, Homo sapiens
  CDR3 for beta chain variable domain of TCR clone 254607 (TRBV28, TRBJ2-3)
CASSLYRDTQYF

SEQ ID NO: 509215 - protein, 13 aa, Homo sapiens
  CDR3 for alpha chain variable domain of TCR clone 254608 (TRAV1-2, TRAJ12)
CAVSMDSSYKLIF

SEQ ID NO: 509216 - protein, 11 aa, Homo sapiens
  CDR3 for beta chain variable domain of TCR clone 254608 (TRBV29-1, TRBJ2-5)
CSEDRTGTQYF

SEQ ID NO: 509217 - protein, 12 aa, Homo sapiens
  CDR3 for alpha chain variable domain of TCR clone 254609 (TRAV13-2, TRAJ31)
CAESYNNARLMF

SEQ ID NO: 509218 - protein, 13 aa, Homo sapiens
  CDR3 for beta chain variable domain of TCR clone 254609 (TRBV24-1, TRBJ1-3)
CATMADSGDTIYF

SEQ ID NO: 509219 - protein, 13 aa, Homo sapiens
  CDR3 for alpha chain variable domain of TCR clone 254610 (TRAV36/DV7, TRAJ7)
CAGTRYGNKRLAF

SEQ ID NO: 509220 - protein, 15 aa, Homo sapiens
  CDR3 for beta chain variable domain of TCR clone 254610 (TRBV11-3, TRBJ2-7)
CASSPGPASSYEQYF

SEQ ID NO: 509221 - protein, 16 aa, Homo sapiens
  CDR3 for alpha chain variable domain of TCR clone 254611 (TRAV1-2, TRAJ10)
CAVRGVLTGGGNKLTF

SEQ ID NO: 509222 - protein, 15 aa, Homo sapiens
  CDR3 for beta chain variable domain of TCR clone 254611 (TRBV25-1, TRBJ2-5)
CASTLMGQNQETQYF

SEQ ID NO: 509223 - protein, 21 aa, Homo sapiens
  CDR3 for alpha chain variable domain of TCR clone 254612 (TRAV12-3, TRAJ35)
CAMAIGFGNVLHCGSGPPVIV

SEQ ID NO: 509224 - protein, 15 aa, Homo sapiens
  CDR3 for beta chain variable domain of TCR clone 254612 (TRBV20-1, TRBJ2-1)
CSTRGSGTYYNEQFF

SEQ ID NO: 509225 - protein, 13 aa, Homo sapiens
  CDR3 for alpha chain variable domain of TCR clone 254613 (TRAV2, TRAJ40)
CAVVTSGTYKYIF

SEQ ID NO: 509226 - protein, 16 aa, Homo sapiens
  CDR3 for beta chain variable domain of TCR clone 254613 (TRBV19, TRBJ2-2)
CASRSPGTGPTGELFF

SEQ ID NO: 509227 - protein, 16 aa, Homo sapiens
  CDR3 for alpha chain variable domain of TCR clone 254614 (TRAV12-1, TRAJ34)
CVVNPLETPTSSSLGL

SEQ ID NO: 509228 - protein, 15 aa, Homo sapiens
  CDR3 for beta chain variable domain of TCR clone 254614 (TRBV3-1, TRBJ2-2)
CTSSQDWTRAGELFF

SEQ ID NO: 509229 - protein, 13 aa, Homo sapiens
  CDR3 for alpha chain variable domain of TCR clone 254615 (TRAV30, TRAJ44)
CGSNTGTASKLTF

SEQ ID NO: 509230 - protein, 16 aa, Homo sapiens
  CDR3 for beta chain variable domain of TCR clone 254615 (TRBV2, TRBJ2-4)
CASSEAPGGEQNIQYF

SEQ ID NO: 509231 - protein, 12 aa, Homo sapiens
  CDR3 for alpha chain variable domain of TCR clone 254616 (TRAV1-1, TRAJ8)
CAWGTGFQKLVF

SEQ ID NO: 509232 - protein, 16 aa, Homo sapiens
  CDR3 for beta chain variable domain of TCR clone 254616 (TRBV12-5, TRBJ2-5)
CASGPRTSGNQETQYF

SEQ ID NO: 509233 - protein, 15 aa, Homo sapiens
  CDR3 for alpha chain variable domain of TCR clone 254617 (TRAV26-2, TRAJ54)
CILRDVGQGAQKLVF

SEQ ID NO: 509234 - protein, 15 aa, Homo sapiens
  CDR3 for beta chain variable domain of TCR clone 254617 (TRBV7-9, TRBJ1-5)
CASSQGHQPNQPQHF

SEQ ID NO: 509235 - protein, 11 aa, Homo sapiens
  CDR3 for alpha chain variable domain of TCR clone 254618 (TRAV1-1, TRAJ5)
CAVRVRRALTF

SEQ ID NO: 509236 - protein, 13 aa, Homo sapiens
  CDR3 for beta chain variable domain of TCR clone 254618 (TRBV28, TRBJ2-7)
CASSLGGAYEQYF

SEQ ID NO: 509237 - protein, 13 aa, Homo sapiens
  CDR3 for alpha chain variable domain of TCR clone 254619 (TRAV21, TRAJ32)
CAVSGGATNKLIF

SEQ ID NO: 509238 - protein, 16 aa, Homo sapiens
  CDR3 for beta chain variable domain of TCR clone 254619 (TRBV6-5, TRBJ2-1)
CASSETLAGHYNEQFF

SEQ ID NO: 509239 - protein, 16 aa, Homo sapiens
  CDR3 for alpha chain variable domain of TCR clone 254620 (TRAV12-1, TRAJ42)
CVVTPYYGGSQGNLII

SEQ ID NO: 509240 - protein, 13 aa, Homo sapiens
  CDR3 for beta chain variable domain of TCR clone 254620 (TRBV10-3, TRBJ2-7)
CASKLAVNYEQYF

SEQ ID NO: 509241 - protein, 15 aa, Homo sapiens
  CDR3 for alpha chain variable domain of TCR clone 254621 (TRAV8-3, TRAJ45)
CASSYSGGGADGLTF

SEQ ID NO: 509242 - protein, 12 aa, Homo sapiens
  CDR3 for beta chain variable domain of TCR clone 254621 (TRBV7-2, TRBJ2-5)
CASSLYGETQYF

SEQ ID NO: 509243 - protein, 13 aa, Homo sapiens
  CDR3 for alpha chain variable domain of TCR clone 254622 (TRAV3, TRAJ21)
CAVREPDFNKFYF

SEQ ID NO: 509244 - protein, 11 aa, Homo sapiens
  CDR3 for beta chain variable domain of TCR clone 254622 (TRBV20-1, TRBJ2-7)
CSARLSYEQYF

SEQ ID NO: 509245 - protein, 13 aa, Homo sapiens
  CDR3 for alpha chain variable domain of TCR clone 254623 (TRAV23/DV6, TRAJ34)
CAAIENNTDKLIF

SEQ ID NO: 509246 - protein, 13 aa, Homo sapiens
  CDR3 for beta chain variable domain of TCR clone 254623 (TRBV29-1, TRBJ2-7)
CSIGPSGGYEQYF

SEQ ID NO: 509247 - protein, 13 aa, Homo sapiens
  CDR3 for alpha chain variable domain of TCR clone 254624 (TRAV1-1, TRAJ28)
CVTSGAGSYQLTF

SEQ ID NO: 509248 - protein, 17 aa, Homo sapiens
  CDR3 for beta chain variable domain of TCR clone 254624 (TRBV18, TRBJ2-2)
CASSQRSSGQGPGELIF

SEQ ID NO: 509249 - protein, 12 aa, Homo sapiens
  CDR3 for alpha chain variable domain of TCR clone 254625 (TRAV12-3, TRAJ17)
CAMTLTGNKLTF

SEQ ID NO: 509250 - protein, 13 aa, Homo sapiens
  CDR3 for beta chain variable domain of TCR clone 254625 (TRBV5-1, TRBJ1-2)
CACSSTGVYGYTF

SEQ ID NO: 509251 - protein, 13 aa, Homo sapiens
  CDR3 for alpha chain variable domain of TCR clone 254626 (TRAV2, TRAJ40)
CAVVTSGTYKYIF

SEQ ID NO: 509252 - protein, 13 aa, Homo sapiens
  CDR3 for beta chain variable domain of TCR clone 254626 (TRBV28, TRBJ2-1)
CASSPLPSSEQFF

SEQ ID NO: 509253 - protein, 14 aa, Homo sapiens
  CDR3 for alpha chain variable domain of TCR clone 254627 (TRAV2, TRAJ24)
CCVRLKNSWGKLQF

SEQ ID NO: 509254 - protein, 17 aa, Homo sapiens
  CDR3 for beta chain variable domain of TCR clone 254627 (TRBV13, TRBJ2-3)
CASSLSRVAGGRNTQYF

SEQ ID NO: 509255 - protein, 20 aa, Homo sapiens
  CDR3 for alpha chain variable domain of TCR clone 254628 (TRAV12-3, TRAJ41)
SLFIRDSQPSDSATPEALNF

SEQ ID NO: 509256 - protein, 15 aa, Homo sapiens
  CDR3 for beta chain variable domain of TCR clone 254628 (TRBV5-1, TRBJ2-7)
CSSSLDLTSSYEQYF

SEQ ID NO: 509257 - protein, 17 aa, Homo sapiens
  CDR3 for alpha chain variable domain of TCR clone 254629 (TRAV12-2, TRAJ52)
CAVNKGAGGTSYGKLTI

SEQ ID NO: 509258 - protein, 16 aa, Homo sapiens
  CDR3 for beta chain variable domain of TCR clone 254629 (TRBV2, TRBJ1-5)
CASGSTGSNFGQPQHF

SEQ ID NO: 509259 - protein, 14 aa, Homo sapiens
  CDR3 for alpha chain variable domain of TCR clone 254630 (TRAV20, TRDJ1)
CAVQAGGSQGKLIF

SEQ ID NO: 509260 - protein, 14 aa, Homo sapiens
  CDR3 for beta chain variable domain of TCR clone 254630 (TRBV28, TRBJ1-2)
CASRIQGANYGYTF

SEQ ID NO: 509261 - protein, 14 aa, Homo sapiens
  CDR3 for alpha chain variable domain of TCR clone 254631 (TRAV38-1, TRAJ45)
CAYYSGGGADGLTF

SEQ ID NO: 509262 - protein, 13 aa, Homo sapiens
  CDR3 for beta chain variable domain of TCR clone 254631 (TRBV7-6, TRBJ1-2)
CASSLVADYGYTF

SEQ ID NO: 509263 - protein, 14 aa, Homo sapiens
  CDR3 for alpha chain variable domain of TCR clone 254632 (TRAV12-2, TRAJ45)
CAAPSGGGADGLTF

SEQ ID NO: 509264 - protein, 12 aa, Homo sapiens
  CDR3 for beta chain variable domain of TCR clone 254632 (TRBV11-2, TRBJ2-2)
CASSLGGGELFF

SEQ ID NO: 509265 - protein, 14 aa, Homo sapiens
  CDR3 for alpha chain variable domain of TCR clone 254633 (TRAV1-2, TRAJ16)
CAVNRFSDGQKLLF

SEQ ID NO: 509266 - protein, 16 aa, Homo sapiens
  CDR3 for beta chain variable domain of TCR clone 254633 (TRBV6-1, TRBJ1-3)
CASVQGGGETPYILER

SEQ ID NO: 509267 - protein, 15 aa, Homo sapiens
  CDR3 for alpha chain variable domain of TCR clone 254634 (TRAV19, TRAJ9)
CALSEARTGGFKTIF

SEQ ID NO: 509268 - protein, 13 aa, Homo sapiens
  CDR3 for beta chain variable domain of TCR clone 254634 (TRBV12-4, TRBJ1-2)
SASSLRQGKGYTF

SEQ ID NO: 509269 - protein, 12 aa, Homo sapiens
  CDR3 for alpha chain variable domain of TCR clone 254635 (TRAV13-2, TRAJ23)
CAERHRGGKLIF

SEQ ID NO: 509270 - protein, 11 aa, Homo sapiens
  CDR3 for beta chain variable domain of TCR clone 254635 (TRBV7-8, TRBJ2-7)
CASSLSLEQYF

SEQ ID NO: 509271 - protein, 15 aa, Homo sapiens
  CDR3 for alpha chain variable domain of TCR clone 254636 (TRAV14/DV4, TRAJ10)
CAMRELTGGGNKLTF

SEQ ID NO: 509272 - protein, 14 aa, Homo sapiens
  CDR3 for beta chain variable domain of TCR clone 254636 (TRBV12-5, TRBJ2-5)
CASGSRTHQETQYF

SEQ ID NO: 509273 - protein, 15 aa, Homo sapiens
  CDR3 for alpha chain variable domain of TCR clone 254637 (TRAV38-1, TRAJ37)
CAFIFGSGNTGKLIF

SEQ ID NO: 509274 - protein, 15 aa, Homo sapiens
  CDR3 for beta chain variable domain of TCR clone 254637 (TRBV2, TRBJ2-2)
CASSRETVGTGELFF

SEQ ID NO: 509275 - protein, 14 aa, Homo sapiens
  CDR3 for alpha chain variable domain of TCR clone 254638 (TRAV9-2, TRAJ39)
CALYIYNAGNMLPF

SEQ ID NO: 509276 - protein, 16 aa, Homo sapiens
  CDR3 for beta chain variable domain of TCR clone 254638 (TRBV5-1, TRBJ2-2)
CASSSRTGGRTGELFF

SEQ ID NO: 509277 - protein, 14 aa, Homo sapiens
  CDR3 for alpha chain variable domain of TCR clone 254639 (TRAV12-1, TRAJ12)
CVVTRMDSSYKLIF

SEQ ID NO: 509278 - protein, 14 aa, Homo sapiens
  CDR3 for beta chain variable domain of TCR clone 254639 (TRBV4-1, TRBJ2-7)
CASSPVAGGDKQYF

SEQ ID NO: 509279 - protein, 14 aa, Homo sapiens
  CDR3 for alpha chain variable domain of TCR clone 254640 (TRAV12-1, TRAJ4)
CGEQRSGGYNKLIF

SEQ ID NO: 509280 - protein, 14 aa, Homo sapiens
  CDR3 for beta chain variable domain of TCR clone 254640 (TRBV18, TRBJ2-5)
CASSPGVSQETQYF

SEQ ID NO: 509281 - protein, 13 aa, Homo sapiens
  CDR3 for alpha chain variable domain of TCR clone 254641 (TRAV3, TRAJ20)
CAVRDISDYKLSF

SEQ ID NO: 509282 - protein, 12 aa, Homo sapiens
  CDR3 for beta chain variable domain of TCR clone 254641 (TRBV3-1, TRBJ1-2)
CASTSGLYGYTF

SEQ ID NO: 509283 - protein, 14 aa, Homo sapiens
  CDR3 for alpha chain variable domain of TCR clone 254642 (TRAV8-1, TRAJ5)
CAVRTDTGRRARTF

SEQ ID NO: 509284 - protein, 14 aa, Homo sapiens
  CDR3 for beta chain variable domain of TCR clone 254642 (TRBV7-8, TRBJ2-3)
CTSSFPDGQDTQYF

SEQ ID NO: 509285 - protein, 13 aa, Homo sapiens
  CDR3 for alpha chain variable domain of TCR clone 254643 (TRAV27, TRAJ41)
CAGEGNSGYALNF

SEQ ID NO: 509286 - protein, 16 aa, Homo sapiens
  CDR3 for beta chain variable domain of TCR clone 254643 (TRBV7-2, TRBJ2-2)
CASSLYRGPNTGELFF

SEQ ID NO: 509287 - protein, 13 aa, Homo sapiens
  CDR3 for alpha chain variable domain of TCR clone 254644 (TRAV3, TRAJ31)
CAVREGNNARLMF

SEQ ID NO: 509288 - protein, 15 aa, Homo sapiens
  CDR3 for beta chain variable domain of TCR clone 254644 (TRBV7-9, TRBJ1-1)
CASSPELGGGTEAFF

SEQ ID NO: 509289 - protein, 13 aa, Homo sapiens
  CDR3 for alpha chain variable domain of TCR clone 254645 (TRAV3, TRAJ21)
CAVREPDFNKFYF

SEQ ID NO: 509290 - protein, 16 aa, Homo sapiens
  CDR3 for beta chain variable domain of TCR clone 254645 (TRBV12-4, TRBJ2-7)
CASSLIGGTGTYEQYF

SEQ ID NO: 509291 - protein, 12 aa, Homo sapiens
  CDR3 for alpha chain variable domain of TCR clone 254646 (TRAV13-1, TRAJ21)
CAAKEGFYKFYF

SEQ ID NO: 509292 - protein, 14 aa, Homo sapiens
  CDR3 for beta chain variable domain of TCR clone 254646 (TRBV7-2, TRBJ2-7)
CASSPKTSFYEQYF

SEQ ID NO: 509293 - protein, 13 aa, Homo sapiens
  CDR3 for alpha chain variable domain of TCR clone 254647 (TRAV1-2, TRAJ9)
CAALNTGGFKTIF

SEQ ID NO: 509294 - protein, 15 aa, Homo sapiens
  CDR3 for beta chain variable domain of TCR clone 254647 (TRBV28, TRBJ2-7)
CASSPGGRGFYEQYF

SEQ ID NO: 509295 - protein, 15 aa, Homo sapiens
  CDR3 for alpha chain variable domain of TCR clone 254648 (TRAV26-1, TRAJ29)
CIVRVEGSGNTPLVF

SEQ ID NO: 509296 - protein, 14 aa, Homo sapiens
  CDR3 for beta chain variable domain of TCR clone 254648 (TRBV18, TRBJ2-2)
CASSPGQNTGELFF

SEQ ID NO: 509297 - protein, 14 aa, Homo sapiens
  CDR3 for alpha chain variable domain of TCR clone 254649 (TRAV1-2, TRAJ8)
CAVREDTGFQKLVF

SEQ ID NO: 509298 - protein, 14 aa, Homo sapiens
  CDR3 for beta chain variable domain of TCR clone 254649 (TRBV5-7, TRBJ1-1)
CASSLAGDWTEAFF

SEQ ID NO: 509299 - protein, 10 aa, Homo sapiens
  CDR3 for alpha chain variable domain of TCR clone 254650 (TRAV23/DV6, TRAJ57)
CAASSTLSQG

SEQ ID NO: 509300 - protein, 12 aa, Homo sapiens
  CDR3 for beta chain variable domain of TCR clone 254650 (TRBV14, TRBJ2-5)
CASSQLKETQYF

SEQ ID NO: 509301 - protein, 11 aa, Homo sapiens
  CDR3 for alpha chain variable domain of TCR clone 254651 (TRAV12-2, TRAJ43)
CASPTGNDMRF

SEQ ID NO: 509302 - protein, 13 aa, Homo sapiens
  CDR3 for beta chain variable domain of TCR clone 254651 (TRBV7-3, TRBJ1-2)
CASSLKRGYGYTF

SEQ ID NO: 509303 - protein, 16 aa, Homo sapiens
  CDR3 for alpha chain variable domain of TCR clone 254652 (TRAV30, TRAJ24)
CGTEIVDADSWGKFQF

SEQ ID NO: 509304 - protein, 15 aa, Homo sapiens
  CDR3 for beta chain variable domain of TCR clone 254652 (TRBV28, TRBJ2-1)
CASSIIAGGGSEQFF

SEQ ID NO: 509305 - protein, 12 aa, Homo sapiens
  CDR3 for alpha chain variable domain of TCR clone 254653 (TRAV21, TRAJ30)
CAVMNRDDKIIF

SEQ ID NO: 509306 - protein, 17 aa, Homo sapiens
  CDR3 for beta chain variable domain of TCR clone 254653 (TRBV5-1, TRBJ1-1)
GASRPIRTGGVNTEAFF

SEQ ID NO: 509307 - protein, 13 aa, Homo sapiens
  CDR3 for alpha chain variable domain of TCR clone 254654 (TRAV1-2, TRAJ11)
CAVRDSGYSTLTF

SEQ ID NO: 509308 - protein, 14 aa, Homo sapiens
  CDR3 for beta chain variable domain of TCR clone 254654 (TRBV12-4, TRBJ1-1)
CASSLGTGGTEAFF

SEQ ID NO: 509309 - protein, 14 aa, Homo sapiens
  CDR3 for alpha chain variable domain of TCR clone 254655 (TRAV8-2, TRAJ4)
CVVSPSGGYDKLIF

SEQ ID NO: 509310 - protein, 15 aa, Homo sapiens
  CDR3 for beta chain variable domain of TCR clone 254655 (TRBV4-1, TRBJ1-4)
CASSDTGGTNEKLFF

SEQ ID NO: 509311 - protein, 18 aa, Homo sapiens
  CDR3 for alpha chain variable domain of TCR clone 254656 (TRAV26-1, TRAJ22)
CIVRVALMSSGSARQLTF

SEQ ID NO: 509312 - protein, 13 aa, Homo sapiens
  CDR3 for beta chain variable domain of TCR clone 254656 (TRBV13, TRBJ2-5)
CASSPEVGETQYF

SEQ ID NO: 509313 - protein, 15 aa, Homo sapiens
  CDR3 for alpha chain variable domain of TCR clone 254657 (TRAV25, TRAJ48)
CAGGYTNFGNEKLTF

SEQ ID NO: 509314 - protein, 14 aa, Homo sapiens
  CDR3 for beta chain variable domain of TCR clone 254657 (TRBV5-1, TRBJ2-1)
CASSQRDIYNEQFF

SEQ ID NO: 509315 - protein, 13 aa, Homo sapiens
  CDR3 for alpha chain variable domain of TCR clone 254658 (TRAV2, TRAJ40)
CAVVTSGTYKYIF

SEQ ID NO: 509316 - protein, 13 aa, Homo sapiens
  CDR3 for beta chain variable domain of TCR clone 254658 (TRBV7-9, TRBJ2-7)
CASSFAGAYEQYF

SEQ ID NO: 509317 - protein, 14 aa, Homo sapiens
  CDR3 for alpha chain variable domain of TCR clone 254659 (TRAV12-1, TRAJ4)
CVVPLKSGYNKLIF

SEQ ID NO: 509318 - protein, 16 aa, Homo sapiens
  CDR3 for beta chain variable domain of TCR clone 254659 (TRBV7-9, TRBJ1-3)
CASSQTSGLRMGTIYF

SEQ ID NO: 509319 - protein, 13 aa, Homo sapiens
  CDR3 for alpha chain variable domain of TCR clone 254660 (TRAV26-2, TRAJ43)
CILRAVNNNDMRF

SEQ ID NO: 509320 - protein, 15 aa, Homo sapiens
  CDR3 for beta chain variable domain of TCR clone 254660 (TRBV7-2, TRBJ2-7)
CASTHGTGIYNEQFF

SEQ ID NO: 509321 - protein, 14 aa, Homo sapiens
  CDR3 for alpha chain variable domain of TCR clone 254661 (TRAV38-1, TRAJ45)
CASHSGGGADGLTF

SEQ ID NO: 509322 - protein, 12 aa, Homo sapiens
  CDR3 for beta chain variable domain of TCR clone 254661 (TRBV28, TRBJ2-1)
CASSVQINEQFF

SEQ ID NO: 509323 - protein, 12 aa, Homo sapiens
  CDR3 for alpha chain variable domain of TCR clone 254662 (TRAV8-3, TRAJ26)
CAGDNYGQNFVF

SEQ ID NO: 509324 - protein, 15 aa, Homo sapiens
  CDR3 for beta chain variable domain of TCR clone 254662 (TRBV9, TRBJ2-1)
CATSLAGSSYNEQFF

SEQ ID NO: 509325 - protein, 13 aa, Homo sapiens
  CDR3 for alpha chain variable domain of TCR clone 254663 (TRAV1-2, TRAJ24)
CAVRADSWGKFQF

SEQ ID NO: 509326 - protein, 13 aa, Homo sapiens
  CDR3 for beta chain variable domain of TCR clone 254663 (TRBV20-1, TRBJ2-1)
CSATGLVGDEQFF

SEQ ID NO: 509327 - protein, 13 aa, Homo sapiens
  CDR3 for alpha chain variable domain of TCR clone 254664 (TRAV2, TRAJ29)
WAEQNSGNTPLVF

SEQ ID NO: 509328 - protein, 13 aa, Homo sapiens
  CDR3 for beta chain variable domain of TCR clone 254664 (TRBV28, TRBJ1-2)
CASSPGSRNGYTF

SEQ ID NO: 509329 - protein, 12 aa, Homo sapiens
  CDR3 for alpha chain variable domain of TCR clone 254665 (TRAV16, TRAJ12)
CALEDSSYKLIF

SEQ ID NO: 509330 - protein, 15 aa, Homo sapiens
  CDR3 for beta chain variable domain of TCR clone 254665 (TRBV20-1, TRBJ1-6)
CSARAASSYNSPLHF

SEQ ID NO: 509331 - protein, 16 aa, Homo sapiens
  CDR3 for alpha chain variable domain of TCR clone 254666 (TRAV16, TRAJ4)
CVLSRMFSGGYNKLIF

SEQ ID NO: 509332 - protein, 16 aa, Homo sapiens
  CDR3 for beta chain variable domain of TCR clone 254666 (TRBV12-4, TRBJ1-5)
CASSRPVGGSNQPQHF

SEQ ID NO: 509333 - protein, 14 aa, Homo sapiens
  CDR3 for alpha chain variable domain of TCR clone 254667 (TRAV23/DV6, TRAJ58)
CAGMRETSGSWLTF

SEQ ID NO: 509334 - protein, 13 aa, Homo sapiens
  CDR3 for beta chain variable domain of TCR clone 254667 (TRBV28, TRBJ2-7)
CASRSSGVYEQYF

SEQ ID NO: 509335 - protein, 13 aa, Homo sapiens
  CDR3 for alpha chain variable domain of TCR clone 254668 (TRAV16, TRAJ20)
FPLGPSNDYKLSF

SEQ ID NO: 509336 - protein, 15 aa, Homo sapiens
  CDR3 for beta chain variable domain of TCR clone 254668 (TRBV5-1, TRBJ2-2)
CASSRVGSDTGELFF

SEQ ID NO: 509337 - protein, 11 aa, Homo sapiens
  CDR3 for alpha chain variable domain of TCR clone 254669 (TRAV21, TRAJ39)
LLVNAGNLLTF

SEQ ID NO: 509338 - protein, 18 aa, Homo sapiens
  CDR3 for beta chain variable domain of TCR clone 254669 (TRBV7-2, TRBJ2-7)
CASSLSGRGLAGGYEQYF

SEQ ID NO: 509339 - protein, 14 aa, Homo sapiens
  CDR3 for alpha chain variable domain of TCR clone 254670 (TRAV12-2, TRAJ13)
CSVKKTGGYQKVTF

SEQ ID NO: 509340 - protein, 16 aa, Homo sapiens
  CDR3 for beta chain variable domain of TCR clone 254670 (TRBV4-1, TRBJ2-3)
CASSQSTSGAEDTQYF

SEQ ID NO: 509341 - protein, 16 aa, Homo sapiens
  CDR3 for alpha chain variable domain of TCR clone 254671 (TRAV6, TRAJ37)
CSLAFHGSGNTGKLIF

SEQ ID NO: 509342 - protein, 18 aa, Homo sapiens
  CDR3 for beta chain variable domain of TCR clone 254671 (TRBV4-3, TRBJ1-2)
CPSSQDGQSAPSDYGYTF

SEQ ID NO: 509343 - protein, 12 aa, Homo sapiens
  CDR3 for alpha chain variable domain of TCR clone 254672 (TRAV12-1, TRAJ40)
CVFYSGAYKYIF

SEQ ID NO: 509344 - protein, 18 aa, Homo sapiens
  CDR3 for beta chain variable domain of TCR clone 254672 (TRBV12-4, TRBJ2-2)
CASSLVAGTRGRTGELLF

SEQ ID NO: 509345 - protein, 13 aa, Homo sapiens
  CDR3 for alpha chain variable domain of TCR clone 254673 (TRAV21, TRAJ27)
CAARPGNAGKSTF

SEQ ID NO: 509346 - protein, 14 aa, Homo sapiens
  CDR3 for beta chain variable domain of TCR clone 254673 (TRBV7-6, TRBJ2-3)
CASGLWTVTDTQYF

SEQ ID NO: 509347 - protein, 13 aa, Homo sapiens
  CDR3 for alpha chain variable domain of TCR clone 254674 (TRAV21, TRAJ27)
CAARPGNAGKSTF

SEQ ID NO: 509348 - protein, 13 aa, Homo sapiens
  CDR3 for beta chain variable domain of TCR clone 254674 (TRBV11-2, TRBJ2-7)
YASSGTRPYEQYF

SEQ ID NO: 509349 - protein, 11 aa, Homo sapiens
  CDR3 for alpha chain variable domain of TCR clone 254675 (TRAV23/DV6, TRAJ58)
CAARFLRGETS

SEQ ID NO: 509350 - protein, 15 aa, Homo sapiens
  CDR3 for beta chain variable domain of TCR clone 254675 (TRBV9, TRBJ1-6)
CASSVAGTGDSPLHF

SEQ ID NO: 509351 - protein, 13 aa, Homo sapiens
  CDR3 for alpha chain variable domain of TCR clone 254676 (TRAV35, TRAJ53)
CAGQESSNYKLKF

SEQ ID NO: 509352 - protein, 11 aa, Homo sapiens
  CDR3 for beta chain variable domain of TCR clone 254676 (TRBV29-1, TRBJ2-5)
CSEDRTGTQYF

SEQ ID NO: 509353 - protein, 18 aa, Homo sapiens
  CDR3 for alpha chain variable domain of TCR clone 254677 (TRAV17, TRAJ54)
CFLLLCYGRYQGAQKLVF

SEQ ID NO: 509354 - protein, 12 aa, Homo sapiens
  CDR3 for beta chain variable domain of TCR clone 254677 (TRBV7-9, TRBJ2-7)
CASSIKRQEQYF

SEQ ID NO: 509355 - protein, 14 aa, Homo sapiens
  CDR3 for alpha chain variable domain of TCR clone 254678 (TRAV1-2, TRAJ16)
CAVNRFSDGQKLLF

SEQ ID NO: 509356 - protein, 14 aa, Homo sapiens
  CDR3 for beta chain variable domain of TCR clone 254678 (TRBV12-5, TRBJ2-5)
CASGSRTHQETQFF

SEQ ID NO: 509357 - protein, 14 aa, Homo sapiens
  CDR3 for alpha chain variable domain of TCR clone 254679 (TRAV4, TRAJ17)
CHVGDMAAGNKLTF

SEQ ID NO: 509358 - protein, 14 aa, Homo sapiens
  CDR3 for beta chain variable domain of TCR clone 254679 (TRBV4-1, TRBJ2-7)
CASSPVAGGDEQYF

SEQ ID NO: 509359 - protein, 14 aa, Homo sapiens
  CDR3 for alpha chain variable domain of TCR clone 254680 (TRAV12-2, TRAJ44)
CAVNPAGTASKLTF

SEQ ID NO: 509360 - protein, 15 aa, Homo sapiens
  CDR3 for beta chain variable domain of TCR clone 254680 (TRBV11-2, TRBJ2-2)
CASSSDRVNAGELFF

SEQ ID NO: 509361 - protein, 21 aa, Homo sapiens
  CDR3 for alpha chain variable domain of TCR clone 254681 (TRAV1-2, TRAJ37)
CLLPLCCERFHGSGNTGKLTC

SEQ ID NO: 509362 - protein, 14 aa, Homo sapiens
  CDR3 for beta chain variable domain of TCR clone 254681 (TRBV2, TRBJ2-5)
CASSEVLAQETQYF

SEQ ID NO: 509363 - protein, 13 aa, Homo sapiens
  CDR3 for alpha chain variable domain of TCR clone 254682 (TRAV12-3, TRAJ33)
CAMSVNSNYQLIW

SEQ ID NO: 509364 - protein, 13 aa, Homo sapiens
  CDR3 for beta chain variable domain of TCR clone 254682 (TRBV7-2, TRBJ2-2)
CASSLAVTGALFF

SEQ ID NO: 509365 - protein, 11 aa, Homo sapiens
  CDR3 for alpha chain variable domain of TCR clone 254683 (TRAV29/DV5, TRAJ49)
CAAVPGNQFYF

SEQ ID NO: 509366 - protein, 14 aa, Homo sapiens
  CDR3 for beta chain variable domain of TCR clone 254683 (TRBV19, TRBJ1-5)
CASRAPDSFLSQRF

SEQ ID NO: 509367 - protein, 14 aa, Homo sapiens
  CDR3 for alpha chain variable domain of TCR clone 254684 (TRAV12-2, TRAJ3)
CAVSLYSSASKIIF

SEQ ID NO: 509368 - protein, 15 aa, Homo sapiens
  CDR3 for beta chain variable domain of TCR clone 254684 (TRBV4-1, TRBJ2-7)
CASSQQGQGFDEQYF

SEQ ID NO: 509369 - protein, 13 aa, Homo sapiens
  CDR3 for alpha chain variable domain of TCR clone 254685 (TRAV20, TRAJ20)
CAVRRVRDYKLSF

SEQ ID NO: 509370 - protein, 14 aa, Homo sapiens
  CDR3 for beta chain variable domain of TCR clone 254685 (TRBV19, TRBJ2-2)
CASTVTANTGELFF

SEQ ID NO: 509371 - protein, 13 aa, Homo sapiens
  CDR3 for alpha chain variable domain of TCR clone 254686 (TRAV25, TRAJ17)
CAGLRAAGNKLTF

SEQ ID NO: 509372 - protein, 15 aa, Homo sapiens
  CDR3 for beta chain variable domain of TCR clone 254686 (TRBV6-3, TRBJ2-7)
CASSSPGTVFYEQYF

SEQ ID NO: 509373 - protein, 13 aa, Homo sapiens
  CDR3 for alpha chain variable domain of TCR clone 254687 (TRAV17, TRAJ22)
CAHHSVSARQLTF

SEQ ID NO: 509374 - protein, 16 aa, Homo sapiens
  CDR3 for beta chain variable domain of TCR clone 254687 (TRBV4-1, TRBJ1-2)
CASSQDAGQVLYGYTF

SEQ ID NO: 509375 - protein, 14 aa, Homo sapiens
  CDR3 for alpha chain variable domain of TCR clone 254688 (TRAV12-2, TRAJ24)
CAVTPADSWGKLQF

SEQ ID NO: 509376 - protein, 17 aa, Homo sapiens
  CDR3 for beta chain variable domain of TCR clone 254688 (TRBV7-8, TRBJ2-6)
CASSAGTGGAGANVLTF

SEQ ID NO: 509377 - protein, 15 aa, Homo sapiens
  CDR3 for alpha chain variable domain of TCR clone 254689 (TRAV4, TRAJ28)
CLVEGSGAGRYQLTF

SEQ ID NO: 509378 - protein, 15 aa, Homo sapiens
  CDR3 for beta chain variable domain of TCR clone 254689 (TRBV9, TRBJ2-3)
CASSVRGLAVDTQYF

SEQ ID NO: 509379 - protein, 13 aa, Homo sapiens
  CDR3 for alpha chain variable domain of TCR clone 254690 (TRAV12-1, TRAJ10)
CVVSTGGGNKLTF

SEQ ID NO: 509380 - protein, 16 aa, Homo sapiens
  CDR3 for beta chain variable domain of TCR clone 254690 (TRBV12-4, TRBJ1-5)
CASSRPVGGSNQAQHF

SEQ ID NO: 509381 - protein, 13 aa, Homo sapiens
  CDR3 for alpha chain variable domain of TCR clone 254691 (TRAV12-3, TRAJ54)
CALVHQGAQKLVF

SEQ ID NO: 509382 - protein, 15 aa, Homo sapiens
  CDR3 for beta chain variable domain of TCR clone 254691 (TRBV4-1, TRBJ2-2)
CASSQDSRGTGELFF

SEQ ID NO: 509383 - protein, 13 aa, Homo sapiens
  CDR3 for alpha chain variable domain of TCR clone 254692 (TRAV13-1, TRAJ5)
CAAEKKGRRALTF

SEQ ID NO: 509384 - protein, 13 aa, Homo sapiens
  CDR3 for beta chain variable domain of TCR clone 254692 (TRBV2, TRBJ1-4)
CASNRGTNEKLFF

SEQ ID NO: 509385 - protein, 18 aa, Homo sapiens
  CDR3 for alpha chain variable domain of TCR clone 254693 (TRAV21, TRAJ52)
CAVRPSPAGGTSYGKLTF

SEQ ID NO: 509386 - protein, 16 aa, Homo sapiens
  CDR3 for beta chain variable domain of TCR clone 254693 (TRBV20-1, TRBJ2-6)
CSASSQGYDGANVLTF

SEQ ID NO: 509387 - protein, 11 aa, Homo sapiens
  CDR3 for alpha chain variable domain of TCR clone 254694 (TRAV1-1, TRAJ23)
CAVRQGGKLIF

SEQ ID NO: 509388 - protein, 20 aa, Homo sapiens
  CDR3 for beta chain variable domain of TCR clone 254694 (TRBV7-8, TRBJ2-2)
CASSHFFLGPTIHITGELFF

SEQ ID NO: 509389 - protein, 11 aa, Homo sapiens
  CDR3 for alpha chain variable domain of TCR clone 254695 (TRAV2, TRAJ13)
CASGGYQKVTF

SEQ ID NO: 509390 - protein, 17 aa, Homo sapiens
  CDR3 for beta chain variable domain of TCR clone 254695 (TRBV7-3, TRBJ2-2)
CASSLSGTSGGTGELFF

SEQ ID NO: 509391 - protein, 16 aa, Homo sapiens
  CDR3 for alpha chain variable domain of TCR clone 254696 (TRAV27, TRAJ52)
CAGAGAGGTSYGKLTF

SEQ ID NO: 509392 - protein, 17 aa, Homo sapiens
  CDR3 for beta chain variable domain of TCR clone 254696 (TRBV24-1, TRBJ2-1)
CATSDVSTSGTYNEQFF

SEQ ID NO: 509393 - protein, 15 aa, Homo sapiens
  CDR3 for alpha chain variable domain of TCR clone 254697 (TRAV21, TRAJ45)
CAVSYSGGGANGLTF

SEQ ID NO: 509394 - protein, 13 aa, Homo sapiens
  CDR3 for beta chain variable domain of TCR clone 254697 (TRBV20-1, TRBJ2-5)
CSAATELQETQYF

SEQ ID NO: 509395 - protein, 13 aa, Homo sapiens
  CDR3 for alpha chain variable domain of TCR clone 254698 (TRAV16, TRAJ29)
CSLSRRGNTPLVF

SEQ ID NO: 509396 - protein, 15 aa, Homo sapiens
  CDR3 for beta chain variable domain of TCR clone 254698 (TRBV4-1, TRBJ2-3)
CASSRGQGIPDTQYF

SEQ ID NO: 509397 - protein, 15 aa, Homo sapiens
  CDR3 for alpha chain variable domain of TCR clone 254699 (TRAV20, TRAJ58)
CAVQDLETRGSRLTF

SEQ ID NO: 509398 - protein, 12 aa, Homo sapiens
  CDR3 for beta chain variable domain of TCR clone 254699 (TRBV9, TRBJ2-2)
CASSARTRELFF

SEQ ID NO: 509399 - protein, 12 aa, Homo sapiens
  CDR3 for alpha chain variable domain of TCR clone 254700 (TRAV2, TRAJ31)
CAVEDNNARLMF

SEQ ID NO: 509400 - protein, 11 aa, Homo sapiens
  CDR3 for beta chain variable domain of TCR clone 254700 (TRBV29-1, TRBJ2-5)
CSEDRTGTQYV

SEQ ID NO: 509401 - protein, 14 aa, Homo sapiens
  CDR3 for alpha chain variable domain of TCR clone 254701 (TRAV35, TRAJ24)
CAGPRRDSWGKLQF

SEQ ID NO: 509402 - protein, 15 aa, Homo sapiens
  CDR3 for beta chain variable domain of TCR clone 254701 (TRBV5-1, TRBJ2-1)
CASSPPRAPYNEQFF

SEQ ID NO: 509403 - protein, 13 aa, Homo sapiens
  CDR3 for alpha chain variable domain of TCR clone 254702 (TRAV36/DV7, TRAJ45)
CALSGGGADGLTF

SEQ ID NO: 509404 - protein, 13 aa, Homo sapiens
  CDR3 for beta chain variable domain of TCR clone 254702 (TRBV7-6, TRBJ2-7)
CASSRDQTYEQYF

SEQ ID NO: 509405 - protein, 13 aa, Homo sapiens
  CDR3 for alpha chain variable domain of TCR clone 254703 (TRAV8-6, TRAJ24)
CAVSPDSWGKLQF

SEQ ID NO: 509406 - protein, 14 aa, Homo sapiens
  CDR3 for beta chain variable domain of TCR clone 254703 (TRBV19, TRBJ2-1)
CASPTFVLSGEQFF

SEQ ID NO: 509407 - protein, 20 aa, Homo sapiens
  CDR3 for alpha chain variable domain of TCR clone 254704 (TRAV12-3, TRAJ41)
SLFIRDSQPSESATPEALNF

SEQ ID NO: 509408 - protein, 15 aa, Homo sapiens
  CDR3 for beta chain variable domain of TCR clone 254704 (TRBV5-1, TRBJ2-7)
CASSLDLTSSYEQYF

SEQ ID NO: 509409 - protein, 16 aa, Homo sapiens
  CDR3 for alpha chain variable domain of TCR clone 254705 (TRAV14/DV4, TRAJ54)
CAMREGRIQGAQKLVV

SEQ ID NO: 509410 - protein, 14 aa, Homo sapiens
  CDR3 for beta chain variable domain of TCR clone 254705 (TRBV19, TRBJ2-1)
CASSIGGDYNEQFF

SEQ ID NO: 509411 - protein, 17 aa, Homo sapiens
  CDR3 for alpha chain variable domain of TCR clone 254706 (TRAV21, TRAJ52)
CCEAFPAGGTSYGKLTF

SEQ ID NO: 509412 - protein, 17 aa, Homo sapiens
  CDR3 for beta chain variable domain of TCR clone 254706 (TRBV13, TRBJ2-3)
CAGSLSRVAGGRNTQYF

SEQ ID NO: 509413 - protein, 13 aa, Homo sapiens
  CDR3 for alpha chain variable domain of TCR clone 254707 (TRAV12-1, TRAJ49)
CVVNGVTGNQFYF

SEQ ID NO: 509414 - protein, 10 aa, Homo sapiens
  CDR3 for beta chain variable domain of TCR clone 254707 (TRBV2, TRBJ2-5)
CASSAATQYF

SEQ ID NO: 509415 - protein, 16 aa, Homo sapiens
  CDR3 for alpha chain variable domain of TCR clone 254708 (TRAV3, TRAJ17)
CAVRDGSPAAGHKPTF

SEQ ID NO: 509416 - protein, 14 aa, Homo sapiens
  CDR3 for beta chain variable domain of TCR clone 254708 (TRBV15, TRBJ2-1)
CATNHGGRHNEQFF

SEQ ID NO: 509417 - protein, 14 aa, Homo sapiens
  CDR3 for alpha chain variable domain of TCR clone 254709 (TRAV8-2, TRAJ37)
CVVGISGNTGKLIF

SEQ ID NO: 509418 - protein, 16 aa, Homo sapiens
  CDR3 for beta chain variable domain of TCR clone 254709 (TRBV4-2, TRBJ1-1)
CASRPLDGGGDTEAFF

SEQ ID NO: 509419 - protein, 10 aa, Homo sapiens
  CDR3 for alpha chain variable domain of TCR clone 254710 (TRAV36/DV7, TRAJ49)
CALTGNQFYF

SEQ ID NO: 509420 - protein, 17 aa, Homo sapiens
  CDR3 for beta chain variable domain of TCR clone 254710 (TRBV12-4, TRBJ2-6)
CASSFGAGYSGANVLTF

SEQ ID NO: 509421 - protein, 16 aa, Homo sapiens
  CDR3 for alpha chain variable domain of TCR clone 254711 (TRAV3, TRAJ34)
CAVRARGIPTSPSLGL

SEQ ID NO: 509422 - protein, 15 aa, Homo sapiens
  CDR3 for beta chain variable domain of TCR clone 254711 (TRBV6-3, TRBJ2-7)
CASSSPGTVFYEQYF

SEQ ID NO: 509423 - protein, 11 aa, Homo sapiens
  CDR3 for alpha chain variable domain of TCR clone 254712 (TRAV12-3, TRAJ49)
CVANTGNQFYF

SEQ ID NO: 509424 - protein, 16 aa, Homo sapiens
  CDR3 for beta chain variable domain of TCR clone 254712 (TRBV7-9, TRBJ2-3)
CASSPWREVGTDTQYF

SEQ ID NO: 509425 - protein, 14 aa, Homo sapiens
  CDR3 for alpha chain variable domain of TCR clone 254713 (TRAV17, TRAJ31)
CATVLRNNNARLMF

SEQ ID NO: 509426 - protein, 18 aa, Homo sapiens
  CDR3 for beta chain variable domain of TCR clone 254713 (TRBV12-4, TRBJ2-5)
CASSLWQKQETVLRARHA

SEQ ID NO: 509427 - protein, 13 aa, Homo sapiens
  CDR3 for alpha chain variable domain of TCR clone 254714 (TRAV3, TRAJ20)
CAVRPLNDYKLSF

SEQ ID NO: 509428 - protein, 15 aa, Homo sapiens
  CDR3 for beta chain variable domain of TCR clone 254714 (TRBV9, TRBJ1-6)
CASSVAGTGDSPLHF

SEQ ID NO: 509429 - protein, 16 aa, Homo sapiens
  CDR3 for alpha chain variable domain of TCR clone 254715 (TRAV12-3, TRAJ28)
CAMRANSGAGRYKLTF

SEQ ID NO: 509430 - protein, 16 aa, Homo sapiens
  CDR3 for beta chain variable domain of TCR clone 254715 (TRBV7-2, TRBJ1-3)
CASSRLEASSGNTIYF

SEQ ID NO: 509431 - protein, 14 aa, Homo sapiens
  CDR3 for alpha chain variable domain of TCR clone 254716 (TRAV36/DV7, TRAJ53)
EGENCGGSNYKLTF

SEQ ID NO: 509432 - protein, 13 aa, Homo sapiens
  CDR3 for beta chain variable domain of TCR clone 254716 (TRBV10-3, TRBJ2-7)
CASKLAVNYEQYF

SEQ ID NO: 509433 - protein, 13 aa, Homo sapiens
  CDR3 for alpha chain variable domain of TCR clone 254717 (TRAV13-2, TRAJ40)
CTEFTSGTYKYIF

SEQ ID NO: 509434 - protein, 12 aa, Homo sapiens
  CDR3 for beta chain variable domain of TCR clone 254717 (TRBV11-2, TRBJ2-2)
CASSLGGGELFF

SEQ ID NO: 509435 - protein, 14 aa, Homo sapiens
  CDR3 for alpha chain variable domain of TCR clone 254718 (TRAV1-2, TRAJ16)
CAVNRFSDGQKLLF

SEQ ID NO: 509436 - protein, 17 aa, Homo sapiens
  CDR3 for beta chain variable domain of TCR clone 254718 (TRBV7-9, TRBJ1-4)
CASSARTGGNEKLFLAV

SEQ ID NO: 509437 - protein, 21 aa, Homo sapiens
  CDR3 for alpha chain variable domain of TCR clone 254719 (TRAV35, TRAJ52)
CWAGYADGPNAGGTSYGKLKF

SEQ ID NO: 509438 - protein, 12 aa, Homo sapiens
  CDR3 for beta chain variable domain of TCR clone 254719 (TRBV5-1, TRBJ2-7)
CASSFRGYEQYF

SEQ ID NO: 509439 - protein, 16 aa, Homo sapiens
  CDR3 for alpha chain variable domain of TCR clone 254720 (TRAV30, TRAJ24)
CGTEIVDADSWGRFQF

SEQ ID NO: 509440 - protein, 14 aa, Homo sapiens
  CDR3 for beta chain variable domain of TCR clone 254720 (TRBV20-1, TRBJ1-1)
CSAQTRIGGTGAFF

SEQ ID NO: 509441 - protein, 14 aa, Homo sapiens
  CDR3 for alpha chain variable domain of TCR clone 254721 (TRAV12-1, TRAJ9)
CVVNRGTGGFKTIF

SEQ ID NO: 509442 - protein, 11 aa, Homo sapiens
  CDR3 for beta chain variable domain of TCR clone 254721 (TRBV19, TRBJ2-2)
CASRYSGELFF

SEQ ID NO: 509443 - protein, 13 aa, Homo sapiens
  CDR3 for alpha chain variable domain of TCR clone 254722 (TRAV16, TRAJ54)
CALMVQGAQKLVF

SEQ ID NO: 509444 - protein, 12 aa, Homo sapiens
  CDR3 for beta chain variable domain of TCR clone 254722 (TRBV18, TRBJ2-7)
CASSTAMGVQYF

SEQ ID NO: 509445 - protein, 15 aa, Homo sapiens
  CDR3 for alpha chain variable domain of TCR clone 254723 (TRAV8-3, TRAJ45)
CASSYSGGGADGLTF

SEQ ID NO: 509446 - protein, 12 aa, Homo sapiens
  CDR3 for beta chain variable domain of TCR clone 254723 (TRBV12-4, TRBJ2-7)
CASSLGDYEQYF

SEQ ID NO: 509447 - protein, 13 aa, Homo sapiens
  CDR3 for alpha chain variable domain of TCR clone 254724 (TRAV16, TRAJ34)
CALSPYNTDKLIF

SEQ ID NO: 509448 - protein, 13 aa, Homo sapiens
  CDR3 for beta chain variable domain of TCR clone 254724 (TRBV20-1, TRBJ2-2)
CSASAAGTGELFF

SEQ ID NO: 509449 - protein, 15 aa, Homo sapiens
  CDR3 for alpha chain variable domain of TCR clone 254725 (TRAV17, TRAJ57)
CATGPSQGGSEKLVF

SEQ ID NO: 509450 - protein, 19 aa, Homo sapiens
  CDR3 for beta chain variable domain of TCR clone 254725 (TRBV19, TRBJ2-5)
CASSIGQVTDFFLGETQYF

SEQ ID NO: 509451 - protein, 16 aa, Homo sapiens
  CDR3 for alpha chain variable domain of TCR clone 254726 (TRAV12-2, TRAJ10)
CAVSRVLTGGGNKITF

SEQ ID NO: 509452 - protein, 12 aa, Homo sapiens
  CDR3 for beta chain variable domain of TCR clone 254726 (TRBV28, TRBJ2-7)
CASSFSSYEQYF

SEQ ID NO: 509453 - protein, 11 aa, Homo sapiens
  CDR3 for alpha chain variable domain of TCR clone 254727 (TRAV27, TRAJ47)
CRINQGNKLVF

SEQ ID NO: 509454 - protein, 16 aa, Homo sapiens
  CDR3 for beta chain variable domain of TCR clone 254727 (TRBV7-9, TRBJ2-1)
CASSDVAGGSYNEQFF

SEQ ID NO: 509455 - protein, 16 aa, Homo sapiens
  CDR3 for alpha chain variable domain of TCR clone 254728 (TRAV1-2, TRAJ10)
CAVRGVLTGGGNKLTF

SEQ ID NO: 509456 - protein, 20 aa, Homo sapiens
  CDR3 for beta chain variable domain of TCR clone 254728 (TRBV7-9, TRBJ2-1)
CASSSPRAPRTRSSYNEQFF

SEQ ID NO: 509457 - protein, 16 aa, Homo sapiens
  CDR3 for alpha chain variable domain of TCR clone 254729 (TRAV26-1, TRAJ53)
CIVRVAMGGSNYKLTF

SEQ ID NO: 509458 - protein, 17 aa, Homo sapiens
  CDR3 for beta chain variable domain of TCR clone 254729 (TRBV7-9, TRBJ2-2)
CASSLGVAGMNTGELFF

SEQ ID NO: 509459 - protein, 14 aa, Homo sapiens
  CDR3 for alpha chain variable domain of TCR clone 254730 (TRAV12-2, TRAJ9)
CAVNLNTVGFKTIF

SEQ ID NO: 509460 - protein, 17 aa, Homo sapiens
  CDR3 for beta chain variable domain of TCR clone 254730 (TRBV20-1, TRBJ2-2)
CSASRQVGQGYTGELFF

SEQ ID NO: 509461 - protein, 15 aa, Homo sapiens
  CDR3 for alpha chain variable domain of TCR clone 254731 (TRAV8-3, TRAJ40)
CAAPTLGSGTYKYIF

SEQ ID NO: 509462 - protein, 16 aa, Homo sapiens
  CDR3 for beta chain variable domain of TCR clone 254731 (TRBV7-3, TRBJ2-3)
CASSLSGYRPEDTQYF

SEQ ID NO: 509463 - protein, 16 aa, Homo sapiens
  CDR3 for alpha chain variable domain of TCR clone 254732 (TRAV3, TRAJ37)
CAVRGKGSGNTGKLIF

SEQ ID NO: 509464 - protein, 13 aa, Homo sapiens
  CDR3 for beta chain variable domain of TCR clone 254732 (TRBV10-3, TRBJ1-2)
CAISERDSYGYAF

SEQ ID NO: 509465 - protein, 13 aa, Homo sapiens
  CDR3 for alpha chain variable domain of TCR clone 254733 (TRAV16, TRAJ58)
CALRIPSGSRLTF

SEQ ID NO: 509466 - protein, 16 aa, Homo sapiens
  CDR3 for beta chain variable domain of TCR clone 254733 (TRBV29-1, TRBJ2-6)
CSVEDITYSGANVLTF

SEQ ID NO: 509467 - protein, 17 aa, Homo sapiens
  CDR3 for alpha chain variable domain of TCR clone 254734 (TRAV3, TRAJ42)
CAVRDRDYGGSQGNIIF

SEQ ID NO: 509468 - protein, 15 aa, Homo sapiens
  CDR3 for beta chain variable domain of TCR clone 254734 (TRBV27, TRBJ1-6)
CASSFDRGLGSPLHF

SEQ ID NO: 509469 - protein, 16 aa, Homo sapiens
  CDR3 for alpha chain variable domain of TCR clone 254735 (TRAV12-2, TRAJ10)
CAVNRVLTGGGNKLTF

SEQ ID NO: 509470 - protein, 16 aa, Homo sapiens
  CDR3 for beta chain variable domain of TCR clone 254735 (TRBV12-5, TRBJ2-5)
CASGPRTSGKQETQYF

SEQ ID NO: 509471 - protein, 12 aa, Homo sapiens
  CDR3 for alpha chain variable domain of TCR clone 254736 (TRAV27, TRAJ9)
CAGESGGFKTIF

SEQ ID NO: 509472 - protein, 18 aa, Homo sapiens
  CDR3 for beta chain variable domain of TCR clone 254736 (TRBV10-2, TRBJ2-2)
CISAPAGHQQADAGELFF

SEQ ID NO: 509473 - protein, 13 aa, Homo sapiens
  CDR3 for alpha chain variable domain of TCR clone 254737 (TRAV21, TRAJ57)
CAVIEGGSEKLVF

SEQ ID NO: 509474 - protein, 14 aa, Homo sapiens
  CDR3 for beta chain variable domain of TCR clone 254737 (TRBV12-5, TRBJ2-5)
CASGSWTHQETQYF

SEQ ID NO: 509475 - protein, 13 aa, Homo sapiens
  CDR3 for alpha chain variable domain of TCR clone 254738 (TRAV1-2, TRAJ9)
CAALNTGGFKTIF

SEQ ID NO: 509476 - protein, 12 aa, Homo sapiens
  CDR3 for beta chain variable domain of TCR clone 254738 (TRBV2, TRBJ2-1)
CAYGPPGNEQFF

SEQ ID NO: 509477 - protein, 15 aa, Homo sapiens
  CDR3 for alpha chain variable domain of TCR clone 254739 (TRAV2, TRAJ24)
CAVVRLKNSWGKLQF

SEQ ID NO: 509478 - protein, 16 aa, Homo sapiens
  CDR3 for beta chain variable domain of TCR clone 254739 (TRBV7-9, TRBJ2-3)
CASSPWREVGTDAQYF

SEQ ID NO: 509479 - protein, 16 aa, Homo sapiens
  CDR3 for alpha chain variable domain of TCR clone 254740 (TRAV14/DV4, TRAJ53)
CAMREGGGGSNYKLIF

SEQ ID NO: 509480 - protein, 13 aa, Homo sapiens
  CDR3 for beta chain variable domain of TCR clone 254740 (TRBV4-2, TRBJ1-1)
CASSQAGNTEAFF

SEQ ID NO: 509481 - protein, 16 aa, Homo sapiens
  CDR3 for alpha chain variable domain of TCR clone 254741 (TRAV3, TRAJ37)
CAVRGKGSGNTGKQIF

SEQ ID NO: 509482 - protein, 13 aa, Homo sapiens
  CDR3 for beta chain variable domain of TCR clone 254741 (TRBV7-3, TRBJ1-1)
CASSQDWGAEAFF

SEQ ID NO: 509483 - protein, 14 aa, Homo sapiens
  CDR3 for alpha chain variable domain of TCR clone 254742 (TRAV12-2, TRAJ24)
CAVTPADSWGKLEF

SEQ ID NO: 509484 - protein, 15 aa, Homo sapiens
  CDR3 for beta chain variable domain of TCR clone 254742 (TRBV15, TRBJ2-1)
CATSRPGQGLHEQFF

SEQ ID NO: 509485 - protein, 12 aa, Homo sapiens
  CDR3 for alpha chain variable domain of TCR clone 254743 (TRAV13-2, TRAJ8)
CAPWLGFQKLVF

SEQ ID NO: 509486 - protein, 11 aa, Homo sapiens
  CDR3 for beta chain variable domain of TCR clone 254743 (TRBV11-2, TRBJ1-1)
CASSINTEAFF

SEQ ID NO: 509487 - protein, 15 aa, Homo sapiens
  CDR3 for alpha chain variable domain of TCR clone 254744 (TRAV26-1, TRAJ29)
CIVRVEGSGNTPLVF

SEQ ID NO: 509488 - protein, 13 aa, Homo sapiens
  CDR3 for beta chain variable domain of TCR clone 254744 (TRBV24-1, TRBJ2-2)
CATSDWSTGELFF

SEQ ID NO: 509489 - protein, 13 aa, Homo sapiens
  CDR3 for alpha chain variable domain of TCR clone 254745 (TRAV16, TRAJ27)
CALRRTNAGKSTF

SEQ ID NO: 509490 - protein, 14 aa, Homo sapiens
  CDR3 for beta chain variable domain of TCR clone 254745 (TRBV3-1, TRBJ1-5)
CASSTGDSNQPQHF

SEQ ID NO: 509491 - protein, 18 aa, Homo sapiens
  CDR3 for alpha chain variable domain of TCR clone 254746 (TRAV13-1, TRAJ52)
CAASKRSAGGTSYGKLTF

SEQ ID NO: 509492 - protein, 13 aa, Homo sapiens
  CDR3 for beta chain variable domain of TCR clone 254746 (TRBV12-4, TRBJ1-2)
CAGSLRQGKGYTL

SEQ ID NO: 509493 - protein, 14 aa, Homo sapiens
  CDR3 for alpha chain variable domain of TCR clone 254747 (TRAV30, TRAJ26)
CGTEIVSYSQNFVF

SEQ ID NO: 509494 - protein, 13 aa, Homo sapiens
  CDR3 for beta chain variable domain of TCR clone 254747 (TRBV19, TRBJ1-3)
CASRLSLGNTIYF

SEQ ID NO: 509495 - protein, 23 aa, Homo sapiens
  CDR3 for alpha chain variable domain of TCR clone 254748 (TRAV26-1, TRAJ38)
CIADNAGNNHIQNPDPAVYQLRD

SEQ ID NO: 509496 - protein, 13 aa, Homo sapiens
  CDR3 for beta chain variable domain of TCR clone 254748 (TRBV12-4, TRBJ2-7)
CASSPTETYEQYF

SEQ ID NO: 509497 - protein, 13 aa, Homo sapiens
  CDR3 for alpha chain variable domain of TCR clone 254749 (TRAV21, TRAJ20)
CAVGLRVDYKLSF

SEQ ID NO: 509498 - protein, 18 aa, Homo sapiens
  CDR3 for beta chain variable domain of TCR clone 254749 (TRBV4-1, TRBJ2-7)
CASSQDTGAGSGLNEQYF

SEQ ID NO: 509499 - protein, 14 aa, Homo sapiens
  CDR3 for alpha chain variable domain of TCR clone 254750 (TRAV1-2, TRAJ16)
CAVNRFSDGQKLLF

SEQ ID NO: 509500 - protein, 14 aa, Homo sapiens
  CDR3 for beta chain variable domain of TCR clone 254750 (TRBV20-1, TRBJ1-5)
CSSPGTGVGQPQHF

SEQ ID NO: 509501 - protein, 13 aa, Homo sapiens
  CDR3 for alpha chain variable domain of TCR clone 254751 (TRAV20, TRAJ40)
CAVPFSGTYKYIF

SEQ ID NO: 509502 - protein, 13 aa, Homo sapiens
  CDR3 for beta chain variable domain of TCR clone 254751 (TRBV15, TRBJ2-5)
CATSQIGEETQDF

SEQ ID NO: 509503 - protein, 14 aa, Homo sapiens
  CDR3 for alpha chain variable domain of TCR clone 254752 (TRAV12-2, TRAJ40)
CAVKILSGTYKYIF

SEQ ID NO: 509504 - protein, 17 aa, Homo sapiens
  CDR3 for beta chain variable domain of TCR clone 254752 (TRBV13, TRBJ2-3)
CASSLSRVAGGRNTQYF

SEQ ID NO: 509505 - protein, 15 aa, Homo sapiens
  CDR3 for alpha chain variable domain of TCR clone 254753 (TRAV2, TRAJ37)
CAVGDGSSNTGKLIF

SEQ ID NO: 509506 - protein, 13 aa, Homo sapiens
  CDR3 for beta chain variable domain of TCR clone 254753 (TRBV20-1, TRBJ2-7)
CSAQTGLSYEQYV

SEQ ID NO: 509507 - protein, 13 aa, Homo sapiens
  CDR3 for alpha chain variable domain of TCR clone 254754 (TRAV2, TRAJ40)
CAVVTSGTYNYIF

SEQ ID NO: 509508 - protein, 13 aa, Homo sapiens
  CDR3 for beta chain variable domain of TCR clone 254754 (TRBV7-9, TRBJ1-2)
CASSLKQNYGYTF

SEQ ID NO: 509509 - protein, 13 aa, Homo sapiens
  CDR3 for alpha chain variable domain of TCR clone 254755 (TRAV13-1, TRAJ21)
CAASIYNFNKFYF

SEQ ID NO: 509510 - protein, 14 aa, Homo sapiens
  CDR3 for beta chain variable domain of TCR clone 254755 (TRBV11-1, TRBJ2-7)
CASSFRQGSYEQYF

SEQ ID NO: 509511 - protein, 13 aa, Homo sapiens
  CDR3 for alpha chain variable domain of TCR clone 254756 (TRAV3, TRAJ3)
CAVADSSASKIIF

SEQ ID NO: 509512 - protein, 16 aa, Homo sapiens
  CDR3 for beta chain variable domain of TCR clone 254756 (TRBV5-1, TRBJ2-3)
CASSLGLAVYTDTQYC

SEQ ID NO: 509513 - protein, 15 aa, Homo sapiens
  CDR3 for alpha chain variable domain of TCR clone 254757 (TRAV12-2, TRAJ29)
CAVRSRNSGNTPLVF

SEQ ID NO: 509514 - protein, 12 aa, Homo sapiens
  CDR3 for beta chain variable domain of TCR clone 254757 (TRBV20-1, TRBJ2-3)
CSATRGSDTQYF

SEQ ID NO: 509515 - protein, 15 aa, Homo sapiens
  CDR3 for alpha chain variable domain of TCR clone 254758 (TRAV38-1, TRAJ43)
CAFMKHNSGRHALWS

SEQ ID NO: 509516 - protein, 11 aa, Homo sapiens
  CDR3 for beta chain variable domain of TCR clone 254758 (TRBV7-9, TRBJ2-3)
CASSYTDTQYF

SEQ ID NO: 509517 - protein, 15 aa, Homo sapiens
  CDR3 for alpha chain variable domain of TCR clone 254759 (TRAV17, TRAJ57)
CATGPSQGGSEKLVF

SEQ ID NO: 509518 - protein, 13 aa, Homo sapiens
  CDR3 for beta chain variable domain of TCR clone 254759 (TRBV20-1, TRBJ2-2)
CSASAAGTGELCF

SEQ ID NO: 509519 - protein, 14 aa, Homo sapiens
  CDR3 for alpha chain variable domain of TCR clone 254760 (TRAV12-3, TRAJ10)
SHLPLTGGGNKLTF

SEQ ID NO: 509520 - protein, 15 aa, Homo sapiens
  CDR3 for beta chain variable domain of TCR clone 254760 (TRBV5-4, TRBJ2-1)
CASSLAGTGEEEQFF

SEQ ID NO: 509521 - protein, 13 aa, Homo sapiens
  CDR3 for alpha chain variable domain of TCR clone 254761 (TRAV8-4, TRAJ47)
CAVTALYGNKLVF

SEQ ID NO: 509522 - protein, 19 aa, Homo sapiens
  CDR3 for beta chain variable domain of TCR clone 254761 (TRBV25-1, TRBJ2-2)
GAILVYRVDRGRKTGELFF

SEQ ID NO: 509523 - protein, 11 aa, Homo sapiens
  CDR3 for alpha chain variable domain of TCR clone 254762 (TRAV35, TRAJ30)
CAGPGDDKIIF

SEQ ID NO: 509524 - protein, 13 aa, Homo sapiens
  CDR3 for beta chain variable domain of TCR clone 254762 (TRBV15, TRBJ1-6)
CATSGGLNSPLHF

SEQ ID NO: 509525 - protein, 13 aa, Homo sapiens
  CDR3 for alpha chain variable domain of TCR clone 254763 (TRAV21, TRAJ11)
CAVPNSGYSTLTF

SEQ ID NO: 509526 - protein, 13 aa, Homo sapiens
  CDR3 for beta chain variable domain of TCR clone 254763 (TRBV3-1, TRBJ2-7)
CASSLRHGYEQYF

SEQ ID NO: 509527 - protein, 15 aa, Homo sapiens
  CDR3 for alpha chain variable domain of TCR clone 254764 (TRAV12-3, TRAJ52)
CNGGAGGTSYGKLTF

SEQ ID NO: 509528 - protein, 13 aa, Homo sapiens
  CDR3 for beta chain variable domain of TCR clone 254764 (TRBV20-1, TRBJ2-5)
GSARGDYQETQYF

SEQ ID NO: 509529 - protein, 17 aa, Homo sapiens
  CDR3 for alpha chain variable domain of TCR clone 254765 (TRAV8-6, TRAJ58)
CAVSSWVGETSGSRLTF

SEQ ID NO: 509530 - protein, 18 aa, Homo sapiens
  CDR3 for beta chain variable domain of TCR clone 254765 (TRBV28, TRBJ2-1)
CASSSTSGRANSYNEQLF

SEQ ID NO: 509531 - protein, 15 aa, Homo sapiens
  CDR3 for alpha chain variable domain of TCR clone 254766 (TRAV17, TRAJ57)
CATGPSQGGSEKLVF

SEQ ID NO: 509532 - protein, 15 aa, Homo sapiens
  CDR3 for beta chain variable domain of TCR clone 254766 (TRBV18, TRBJ2-5)
CASSPRASEAETQYF

SEQ ID NO: 509533 - protein, 14 aa, Homo sapiens
  CDR3 for alpha chain variable domain of TCR clone 254767 (TRAV13-1, TRAJ44)
CAAKATGTASKLTF

SEQ ID NO: 509534 - protein, 13 aa, Homo sapiens
  CDR3 for beta chain variable domain of TCR clone 254767 (TRBV24-1, TRBJ2-2)
CATTATRTGELFF

SEQ ID NO: 509535 - protein, 15 aa, Homo sapiens
  CDR3 for alpha chain variable domain of TCR clone 254768 (TRAV8-3, TRAJ11)
CAVGLLNSGYSTLTF

SEQ ID NO: 509536 - protein, 14 aa, Homo sapiens
  CDR3 for beta chain variable domain of TCR clone 254768 (TRBV4-1, TRBJ2-5)
CASGRSGSGETQYF

SEQ ID NO: 509537 - protein, 12 aa, Homo sapiens
  CDR3 for alpha chain variable domain of TCR clone 254769 (TRAV12-1, TRAJ20)
CVVHFNDYKLSF

SEQ ID NO: 509538 - protein, 14 aa, Homo sapiens
  CDR3 for beta chain variable domain of TCR clone 254769 (TRBV3-1, TRBJ2-2)
CASSLPDNTGELFF

SEQ ID NO: 509539 - protein, 13 aa, Homo sapiens
  CDR3 for alpha chain variable domain of TCR clone 254770 (TRAV6, TRAJ4)
CALLRGGYNRLIF

SEQ ID NO: 509540 - protein, 16 aa, Homo sapiens
  CDR3 for beta chain variable domain of TCR clone 254770 (TRBV5-1, TRBJ2-1)
CASSIRSGGSYNEQFF

SEQ ID NO: 509541 - protein, 11 aa, Homo sapiens
  CDR3 for alpha chain variable domain of TCR clone 254771 (TRAV21, TRAJ48)
CAVDGNEKLTF

SEQ ID NO: 509542 - protein, 16 aa, Homo sapiens
  CDR3 for beta chain variable domain of TCR clone 254771 (TRBV12-4, TRBJ1-5)
CASSTGPRGSNQPQHF

SEQ ID NO: 509543 - protein, 11 aa, Homo sapiens
  CDR3 for alpha chain variable domain of TCR clone 254772 (TRAV8-1, TRAJ34)
CSAPGNDQLIF

SEQ ID NO: 509544 - protein, 13 aa, Homo sapiens
  CDR3 for beta chain variable domain of TCR clone 254772 (TRBV12-4, TRBJ1-2)
CASSLRQGKGYTF

SEQ ID NO: 509545 - protein, 13 aa, Homo sapiens
  CDR3 for alpha chain variable domain of TCR clone 254773 (TRAV21, TRAJ15)
CAVANQAGTALIF

SEQ ID NO: 509546 - protein, 14 aa, Homo sapiens
  CDR3 for beta chain variable domain of TCR clone 254773 (TRBV15, TRBJ1-5)
CATSREQSNQPQHF

SEQ ID NO: 509547 - protein, 16 aa, Homo sapiens
  CDR3 for alpha chain variable domain of TCR clone 254774 (TRAV16, TRAJ4)
CALSRMFSGGYNKLIF

SEQ ID NO: 509548 - protein, 15 aa, Homo sapiens
  CDR3 for beta chain variable domain of TCR clone 254774 (TRBV5-1, TRBJ1-1)
CASSLAPRGNTEAFF

SEQ ID NO: 509549 - protein, 11 aa, Homo sapiens
  CDR3 for alpha chain variable domain of TCR clone 254775 (TRAV1-2, TRAJ20)
CAVANDYKLSF

SEQ ID NO: 509550 - protein, 18 aa, Homo sapiens
  CDR3 for beta chain variable domain of TCR clone 254775 (TRBV20-1, TRBJ2-6)
CSDETTPTHGSGANVLNF

SEQ ID NO: 509551 - protein, 14 aa, Homo sapiens
  CDR3 for alpha chain variable domain of TCR clone 254776 (TRAV12-2, TRAJ5)
CAVKGATGRRALTF

SEQ ID NO: 509552 - protein, 15 aa, Homo sapiens
  CDR3 for beta chain variable domain of TCR clone 254776 (TRBV27, TRBJ2-1)
CASSNGGGSSNEQFF

SEQ ID NO: 509553 - protein, 15 aa, Homo sapiens
  CDR3 for alpha chain variable domain of TCR clone 254777 (TRAV12-2, TRAJ53)
CAVNGGGGSNYKLTF

SEQ ID NO: 509554 - protein, 17 aa, Homo sapiens
  CDR3 for beta chain variable domain of TCR clone 254777 (TRBV7-3, TRBJ2-3)
RASSLIKRMRGADTQYF

SEQ ID NO: 509555 - protein, 11 aa, Homo sapiens
  CDR3 for alpha chain variable domain of TCR clone 254778 (TRAV2, TRAJ13)
CGSGGYQKVTF

SEQ ID NO: 509556 - protein, 17 aa, Homo sapiens
  CDR3 for beta chain variable domain of TCR clone 254778 (TRBV20-1, TRBJ2-2)
CSASGSGQGGLTGELFF

SEQ ID NO: 509557 - protein, 14 aa, Homo sapiens
  CDR3 for alpha chain variable domain of TCR clone 254779 (TRAV12-2, TRAJ5)
CAVNRSTGSRALTF

SEQ ID NO: 509558 - protein, 14 aa, Homo sapiens
  CDR3 for beta chain variable domain of TCR clone 254779 (TRBV12-5, TRBJ2-5)
CASGSRTHQETQYF

SEQ ID NO: 509559 - protein, 11 aa, Homo sapiens
  CDR3 for alpha chain variable domain of TCR clone 254780 (TRAV3, TRAJ21)
CAVGNFNKFYF

SEQ ID NO: 509560 - protein, 16 aa, Homo sapiens
  CDR3 for beta chain variable domain of TCR clone 254780 (TRBV19, TRBJ2-7)
CASSLTGTSELGEQYF

SEQ ID NO: 509561 - protein, 14 aa, Homo sapiens
  CDR3 for alpha chain variable domain of TCR clone 254781 (TRAV1-2, TRAJ29)
RAVRELTSATPLVF

SEQ ID NO: 509562 - protein, 16 aa, Homo sapiens
  CDR3 for beta chain variable domain of TCR clone 254781 (TRBV2, TRBJ2-3)
CASSTSVEGVTDTQYF

SEQ ID NO: 509563 - protein, 14 aa, Homo sapiens
  CDR3 for alpha chain variable domain of TCR clone 254782 (TRAV1-2, TRAJ16)
CAVNRFSVGQKLLF

SEQ ID NO: 509564 - protein, 18 aa, Homo sapiens
  CDR3 for beta chain variable domain of TCR clone 254782 (TRBV6-6, TRBJ1-3)
CASSYPKWDSISGNTIYF

SEQ ID NO: 509565 - protein, 13 aa, Homo sapiens
  CDR3 for alpha chain variable domain of TCR clone 254783 (TRAV13-2, TRAJ53)
CAENVGSNYKLTF

SEQ ID NO: 509566 - protein, 13 aa, Homo sapiens
  CDR3 for beta chain variable domain of TCR clone 254783 (TRBV4-1, TRBJ2-2)
CASSQENTGELFF

SEQ ID NO: 509567 - protein, 13 aa, Homo sapiens
  CDR3 for alpha chain variable domain of TCR clone 254784 (TRAV8-4, TRAJ47)
CAVTALYGNKLVF

SEQ ID NO: 509568 - protein, 14 aa, Homo sapiens
  CDR3 for beta chain variable domain of TCR clone 254784 (TRBV19, TRBJ2-7)
CASSIGGAVAGQYF

SEQ ID NO: 509569 - protein, 11 aa, Homo sapiens
  CDR3 for alpha chain variable domain of TCR clone 254785 (TRAV17, TRAJ36)
CAPTGANNLFF

SEQ ID NO: 509570 - protein, 12 aa, Homo sapiens
  CDR3 for beta chain variable domain of TCR clone 254785 (TRBV29-1, TRBJ2-3)
CSVTGGADKQYF

SEQ ID NO: 509571 - protein, 14 aa, Homo sapiens
  CDR3 for alpha chain variable domain of TCR clone 254786 (TRAV26-1, TRAJ38)
CIADNAGNNSKLIW

SEQ ID NO: 509572 - protein, 13 aa, Homo sapiens
  CDR3 for beta chain variable domain of TCR clone 254786 (TRBV4-1, TRBJ2-7)
CASSQGQAYEQYF

SEQ ID NO: 509573 - protein, 13 aa, Homo sapiens
  CDR3 for alpha chain variable domain of TCR clone 254787 (TRAV8-3, TRAJ28)
CAVGAVGSYQLTF

SEQ ID NO: 509574 - protein, 15 aa, Homo sapiens
  CDR3 for beta chain variable domain of TCR clone 254787 (TRBV19, TRBJ1-5)
CASSIVWADNRPQHF

SEQ ID NO: 509575 - protein, 15 aa, Homo sapiens
  CDR3 for alpha chain variable domain of TCR clone 254788 (TRAV8-3, TRAJ45)
CASSYSGGGADGLTF

SEQ ID NO: 509576 - protein, 13 aa, Homo sapiens
  CDR3 for beta chain variable domain of TCR clone 254788 (TRBV19, TRBJ1-1)
CASSFGRNTEAFF

SEQ ID NO: 509577 - protein, 12 aa, Homo sapiens
  CDR3 for alpha chain variable domain of TCR clone 254789 (TRAV8-3, TRAJ26)
CAGDNYGQNFVF

SEQ ID NO: 509578 - protein, 16 aa, Homo sapiens
  CDR3 for beta chain variable domain of TCR clone 254789 (TRBV20-1, TRBJ1-4)
CSAPGQGLLTNDKLFF

SEQ ID NO: 509579 - protein, 13 aa, Homo sapiens
  CDR3 for alpha chain variable domain of TCR clone 254790 (TRAV23/DV6, TRAJ10)
ASVLTGGGDKLTF

SEQ ID NO: 509580 - protein, 13 aa, Homo sapiens
  CDR3 for beta chain variable domain of TCR clone 254790 (TRBV11-1, TRBJ1-2)
CASVGSWGYGYTF

SEQ ID NO: 509581 - protein, 11 aa, Homo sapiens
  CDR3 for alpha chain variable domain of TCR clone 254791 (TRAV12-1, TRAJ30)
CVVNGQDKIIF

SEQ ID NO: 509582 - protein, 15 aa, Homo sapiens
  CDR3 for beta chain variable domain of TCR clone 254791 (TRBV7-3, TRBJ2-1)
CASSLDGNSYNEQFF

SEQ ID NO: 509583 - protein, 11 aa, Homo sapiens
  CDR3 for alpha chain variable domain of TCR clone 254792 (TRAV12-2, TRAJ54)
CAVEGAQKLVF

SEQ ID NO: 509584 - protein, 17 aa, Homo sapiens
  CDR3 for beta chain variable domain of TCR clone 254792 (TRBV18, TRBJ1-3)
CASSPYPTGTSGNTIYF

SEQ ID NO: 509585 - protein, 15 aa, Homo sapiens
  CDR3 for alpha chain variable domain of TCR clone 254793 (TRAV17, TRAJ54)
CATEKLGQGAQKLVF

SEQ ID NO: 509586 - protein, 15 aa, Homo sapiens
  CDR3 for beta chain variable domain of TCR clone 254793 (TRBV9, TRBJ1-2)
CQQRRGKGPPYGYTF

SEQ ID NO: 509587 - protein, 11 aa, Homo sapiens
  CDR3 for alpha chain variable domain of TCR clone 254794 (TRAV23/DV6, TRAJ58)
CAARLLRGETS

SEQ ID NO: 509588 - protein, 13 aa, Homo sapiens
  CDR3 for beta chain variable domain of TCR clone 254794 (TRBV15, TRBJ1-6)
CATSGGLNSPLHF

SEQ ID NO: 509589 - protein, 14 aa, Homo sapiens
  CDR3 for alpha chain variable domain of TCR clone 254795 (TRAV17, TRAJ4)
CATAPLGGYNKLIF

SEQ ID NO: 509590 - protein, 16 aa, Homo sapiens
  CDR3 for beta chain variable domain of TCR clone 254795 (TRBV12-4, TRBJ1-5)
CASSRPVGGSNQPQHF

SEQ ID NO: 509591 - protein, 12 aa, Homo sapiens
  CDR3 for alpha chain variable domain of TCR clone 254796 (TRAV21, TRAJ31)
CAVWGNNARLMF

SEQ ID NO: 509592 - protein, 14 aa, Homo sapiens
  CDR3 for beta chain variable domain of TCR clone 254796 (TRBV7-2, TRBJ2-3)
CASRQTGSSYTQYF

SEQ ID NO: 509593 - protein, 14 aa, Homo sapiens
  CDR3 for alpha chain variable domain of TCR clone 254797 (TRAV12-2, TRAJ40)
CAVKIPSGTYKFIF

SEQ ID NO: 509594 - protein, 13 aa, Homo sapiens
  CDR3 for beta chain variable domain of TCR clone 254797 (TRBV7-9, TRBJ1-2)
CASSLKQNYGYTF

SEQ ID NO: 509595 - protein, 14 aa, Homo sapiens
  CDR3 for alpha chain variable domain of TCR clone 254798 (TRAV8-2, TRAJ37)
CVLSISGNTGKLIF

SEQ ID NO: 509596 - protein, 15 aa, Homo sapiens
  CDR3 for beta chain variable domain of TCR clone 254798 (TRBV10-2, TRBJ2-6)
CASSEQGTGANVLTF

SEQ ID NO: 509597 - protein, 12 aa, Homo sapiens
  CDR3 for alpha chain variable domain of TCR clone 254799 (TRAV12-3, TRAJ17)
CAMTLTGNKLTF

SEQ ID NO: 509598 - protein, 19 aa, Homo sapiens
  CDR3 for beta chain variable domain of TCR clone 254799 (TRBV25-1, TRBJ2-2)
CAILVYRVDMGRKTGELFF

SEQ ID NO: 509599 - protein, 14 aa, Homo sapiens
  CDR3 for alpha chain variable domain of TCR clone 254800 (TRAV8-6, TRAJ54)
CAVSLIQGAQKLVF

SEQ ID NO: 509600 - protein, 17 aa, Homo sapiens
  CDR3 for beta chain variable domain of TCR clone 254800 (TRBV4-1, TRBJ2-3)
CASSQGYVSGGTDTQYF

SEQ ID NO: 509601 - protein, 12 aa, Homo sapiens
  CDR3 for alpha chain variable domain of TCR clone 254801 (TRAV12-3, TRAJ17)
GAMTLTGNKLTF

SEQ ID NO: 509602 - protein, 15 aa, Homo sapiens
  CDR3 for beta chain variable domain of TCR clone 254801 (TRBV20-1, TRBJ2-7)
CSARDRVPGMDEQYF

SEQ ID NO: 509603 - protein, 16 aa, Homo sapiens
  CDR3 for alpha chain variable domain of TCR clone 254802 (TRAV35, TRAJ42)
GRMERYYGGSQGNLIF

SEQ ID NO: 509604 - protein, 15 aa, Homo sapiens
  CDR3 for beta chain variable domain of TCR clone 254802 (TRBV6-1, TRBJ2-7)
CASSDWHKPNYEQYF

SEQ ID NO: 509605 - protein, 16 aa, Homo sapiens
  CDR3 for alpha chain variable domain of TCR clone 254803 (TRAV12-2, TRAJ28)
CAVIADSGAGSYQLTF

SEQ ID NO: 509606 - protein, 14 aa, Homo sapiens
  CDR3 for beta chain variable domain of TCR clone 254803 (TRBV25-1, TRBJ1-1)
CASTHLGGNTEAFF

SEQ ID NO: 509607 - protein, 15 aa, Homo sapiens
  CDR3 for alpha chain variable domain of TCR clone 254804 (TRAV4, TRAJ15)
CLVGDIRRAGTALIF

SEQ ID NO: 509608 - protein, 16 aa, Homo sapiens
  CDR3 for beta chain variable domain of TCR clone 254804 (TRBV24-1, TRBJ2-2)
CATSDTGQGGTGELFF

SEQ ID NO: 509609 - protein, 14 aa, Homo sapiens
  CDR3 for alpha chain variable domain of TCR clone 254805 (TRAV1-2, TRAJ8)
CAVREDTGFQKIVC

SEQ ID NO: 509610 - protein, 11 aa, Homo sapiens
  CDR3 for beta chain variable domain of TCR clone 254805 (TRBV12-4, TRBJ2-3)
CASTATDTQYF

SEQ ID NO: 509611 - protein, 12 aa, Homo sapiens
  CDR3 for alpha chain variable domain of TCR clone 254806 (TRAV14/DV4, TRAJ9)
CAMNPGGSKTIF

SEQ ID NO: 509612 - protein, 16 aa, Homo sapiens
  CDR3 for beta chain variable domain of TCR clone 254806 (TRBV28, TRBJ2-5)
CASSFSPAGGWETQYF

SEQ ID NO: 509613 - protein, 16 aa, Homo sapiens
  CDR3 for alpha chain variable domain of TCR clone 254807 (TRAV1-2, TRAJ10)
CAVRGVLTGGGNKLTF

SEQ ID NO: 509614 - protein, 20 aa, Homo sapiens
  CDR3 for beta chain variable domain of TCR clone 254807 (TRBV7-8, TRBJ2-2)
CASSRLFPGPTIHITGELFF

SEQ ID NO: 509615 - protein, 12 aa, Homo sapiens
  CDR3 for alpha chain variable domain of TCR clone 254808 (TRAV13-1, TRAJ21)
CAAKEGFNKFYF

SEQ ID NO: 509616 - protein, 13 aa, Homo sapiens
  CDR3 for beta chain variable domain of TCR clone 254808 (TRBV19, TRBJ1-5)
CASSEGSNQPQHF

SEQ ID NO: 509617 - protein, 16 aa, Homo sapiens
  CDR3 for alpha chain variable domain of TCR clone 254809 (TRAV16, TRAJ52)
CALSGVGGTSYGKLTF

SEQ ID NO: 509618 - protein, 14 aa, Homo sapiens
  CDR3 for beta chain variable domain of TCR clone 254809 (TRBV19, TRBJ1-2)
CDSSLQGQAYGYTF

SEQ ID NO: 509619 - protein, 11 aa, Homo sapiens
  CDR3 for alpha chain variable domain of TCR clone 254810 (TRAV2, TRAJ21)
CAVFNFNKFYF

SEQ ID NO: 509620 - protein, 13 aa, Homo sapiens
  CDR3 for beta chain variable domain of TCR clone 254810 (TRBV15, TRBJ2-7)
CATSTTGHYEQYF

SEQ ID NO: 509621 - protein, 11 aa, Homo sapiens
  CDR3 for alpha chain variable domain of TCR clone 254811 (TRAV35, TRAJ30)
CAPGGDDKIIF

SEQ ID NO: 509622 - protein, 17 aa, Homo sapiens
  CDR3 for beta chain variable domain of TCR clone 254811 (TRBV11-2, TRBJ2-1)
CASSLYPPGVEYNEQFF

SEQ ID NO: 509623 - protein, 13 aa, Homo sapiens
  CDR3 for alpha chain variable domain of TCR clone 254812 (TRAV13-1, TRAJ6)
CAASKGGSYLPTF

SEQ ID NO: 509624 - protein, 14 aa, Homo sapiens
  CDR3 for beta chain variable domain of TCR clone 254812 (TRBV7-8, TRBJ2-1)
CASSLGVGYNEQFF

SEQ ID NO: 509625 - protein, 13 aa, Homo sapiens
  CDR3 for alpha chain variable domain of TCR clone 254813 (TRAV12-3, TRAJ13)
CAMSSGGYQKVTF

SEQ ID NO: 509626 - protein, 13 aa, Homo sapiens
  CDR3 for beta chain variable domain of TCR clone 254813 (TRBV20-1, TRBJ1-1)
CNAPPGGHTEAFF

SEQ ID NO: 509627 - protein, 13 aa, Homo sapiens
  CDR3 for alpha chain variable domain of TCR clone 254814 (TRAV13-1, TRAJ39)
CSKYSNAGNMLTF

SEQ ID NO: 509628 - protein, 16 aa, Homo sapiens
  CDR3 for beta chain variable domain of TCR clone 254814 (TRBV20-1, TRBJ1-4)
CSAPGQGLLTDEKLFF

SEQ ID NO: 509629 - protein, 14 aa, Homo sapiens
  CDR3 for alpha chain variable domain of TCR clone 254815 (TRAV1-2, TRAJ16)
CAVNRFSDGQKLLF

SEQ ID NO: 509630 - protein, 14 aa, Homo sapiens
  CDR3 for beta chain variable domain of TCR clone 254815 (TRBV7-3, TRBJ2-1)
CASSLGGGMNEQFF

SEQ ID NO: 509631 - protein, 13 aa, Homo sapiens
  CDR3 for alpha chain variable domain of TCR clone 254816 (TRAV13-1, TRAJ5)
CAARVTGRRALTF

SEQ ID NO: 509632 - protein, 15 aa, Homo sapiens
  CDR3 for beta chain variable domain of TCR clone 254816 (TRBV11-3, TRBJ2-3)
CASLKDGREGDTQYF

SEQ ID NO: 509633 - protein, 14 aa, Homo sapiens
  CDR3 for alpha chain variable domain of TCR clone 254817 (TRAV1-2, TRAJ8)
CAVREDTGFQKLVI

SEQ ID NO: 509634 - protein, 14 aa, Homo sapiens
  CDR3 for beta chain variable domain of TCR clone 254817 (TRBV5-4, TRBJ1-1)
CASSLDSRRDEAFF

SEQ ID NO: 509635 - protein, 16 aa, Homo sapiens
  CDR3 for alpha chain variable domain of TCR clone 254818 (TRAV35, TRAJ28)
CAGYLYSGAGSSQLTF

SEQ ID NO: 509636 - protein, 16 aa, Homo sapiens
  CDR3 for beta chain variable domain of TCR clone 254818 (TRBV5-1, TRBJ2-1)
CASSHGLAGPQNEQFF

SEQ ID NO: 509637 - protein, 14 aa, Homo sapiens
  CDR3 for alpha chain variable domain of TCR clone 254819 (TRAV21, TRAJ21)
CAVNGFGNFNKFYF

SEQ ID NO: 509638 - protein, 13 aa, Homo sapiens
  CDR3 for beta chain variable domain of TCR clone 254819 (TRBV18, TRBJ1-1)
CASSPETKPEAFF

SEQ ID NO: 509639 - protein, 13 aa, Homo sapiens
  CDR3 for alpha chain variable domain of TCR clone 254820 (TRAV21, TRAJ20)
CAVGLRVDYKLSF

SEQ ID NO: 509640 - protein, 14 aa, Homo sapiens
  CDR3 for beta chain variable domain of TCR clone 254820 (TRBV11-2, TRBJ2-3)
CASSRLARTDTQYF

SEQ ID NO: 509641 - protein, 13 aa, Homo sapiens
  CDR3 for alpha chain variable domain of TCR clone 254821 (TRAV8-6, TRAJ49)
CAVITNTGNQVYF

SEQ ID NO: 509642 - protein, 14 aa, Homo sapiens
  CDR3 for beta chain variable domain of TCR clone 254821 (TRBV5-1, TRBJ2-7)
CASSRGESVYEQYF

SEQ ID NO: 509643 - protein, 16 aa, Homo sapiens
  CDR3 for alpha chain variable domain of TCR clone 254822 (TRAV3, TRAJ10)
CAVRDMRAGGGNKLTV

SEQ ID NO: 509644 - protein, 11 aa, Homo sapiens
  CDR3 for beta chain variable domain of TCR clone 254822 (TRBV29-1, TRBJ2-5)
CSEDRTGTQYF

SEQ ID NO: 509645 - protein, 12 aa, Homo sapiens
  CDR3 for alpha chain variable domain of TCR clone 254823 (TRAV17, TRAJ57)
CATDGGSEKLVF

SEQ ID NO: 509646 - protein, 13 aa, Homo sapiens
  CDR3 for beta chain variable domain of TCR clone 254823 (TRBV7-9, TRBJ2-7)
WASSFAGAYEQYF

SEQ ID NO: 509647 - protein, 17 aa, Homo sapiens
  CDR3 for alpha chain variable domain of TCR clone 254824 (TRAV13-1, TRAJ31)
CAPRDRLMFGNGTHLVV

SEQ ID NO: 509648 - protein, 12 aa, Homo sapiens
  CDR3 for beta chain variable domain of TCR clone 254824 (TRBV7-9, TRBJ2-7)
CASSLEGYEQYF

SEQ ID NO: 509649 - protein, 12 aa, Homo sapiens
  CDR3 for alpha chain variable domain of TCR clone 254825 (TRAV12-3, TRAJ17)
CAMTLTGNKLTF

SEQ ID NO: 509650 - protein, 16 aa, Homo sapiens
  CDR3 for beta chain variable domain of TCR clone 254825 (TRBV7-8, TRBJ2-5)
CASSPAGGRNQETQYF

SEQ ID NO: 509651 - protein, 14 aa, Homo sapiens
  CDR3 for alpha chain variable domain of TCR clone 254826 (TRAV16, TRAJ33)
CALSAMDSNYQLIW

SEQ ID NO: 509652 - protein, 14 aa, Homo sapiens
  CDR3 for beta chain variable domain of TCR clone 254826 (TRBV20-1, TRBJ1-5)
CSARDDRGNQPQHF

SEQ ID NO: 509653 - protein, 13 aa, Homo sapiens
  CDR3 for alpha chain variable domain of TCR clone 254827 (TRAV12-3, TRAJ35)
CAMAIGFGNVLPC

SEQ ID NO: 509654 - protein, 15 aa, Homo sapiens
  CDR3 for beta chain variable domain of TCR clone 254827 (TRBV20-1, TRBJ2-1)
CSARGSGTYYNEQFF

SEQ ID NO: 509655 - protein, 12 aa, Homo sapiens
  CDR3 for alpha chain variable domain of TCR clone 254828 (TRAV13-2, TRAJ23)
CAERHRGGKLIF

SEQ ID NO: 509656 - protein, 15 aa, Homo sapiens
  CDR3 for beta chain variable domain of TCR clone 254828 (TRBV12-4, TRBJ2-5)
CASSPPTGLQETQFF

SEQ ID NO: 509657 - protein, 13 aa, Homo sapiens
  CDR3 for alpha chain variable domain of TCR clone 254829 (TRAV23/DV6, TRAJ24)
CSASEDSWGKLQV

SEQ ID NO: 509658 - protein, 12 aa, Homo sapiens
  CDR3 for beta chain variable domain of TCR clone 254829 (TRBV5-1, TRBJ2-7)
CASSDSTYEQYF

SEQ ID NO: 509659 - protein, 13 aa, Homo sapiens
  CDR3 for alpha chain variable domain of TCR clone 254830 (TRAV8-3, TRAJ40)
CAVGAQYLRNLQI

SEQ ID NO: 509660 - protein, 15 aa, Homo sapiens
  CDR3 for beta chain variable domain of TCR clone 254830 (TRBV2, TRBJ2-1)
CASSEEREGDNEQFF

SEQ ID NO: 509661 - protein, 13 aa, Homo sapiens
  CDR3 for alpha chain variable domain of TCR clone 254831 (TRAV12-3, TRAJ5)
CAMIYTCRRALTF

SEQ ID NO: 509662 - protein, 12 aa, Homo sapiens
  CDR3 for beta chain variable domain of TCR clone 254831 (TRBV18, TRBJ1-4)
CASSPSREKLFF

SEQ ID NO: 509663 - protein, 16 aa, Homo sapiens
  CDR3 for alpha chain variable domain of TCR clone 254832 (TRAV12-3, TRAJ53)
CAMSPGSGGSNYKLTF

SEQ ID NO: 509664 - protein, 13 aa, Homo sapiens
  CDR3 for beta chain variable domain of TCR clone 254832 (TRBV20-1, TRBJ2-5)
CSARDSKQATQYF

SEQ ID NO: 509665 - protein, 11 aa, Homo sapiens
  CDR3 for alpha chain variable domain of TCR clone 254833 (TRAV17, TRAJ9)
CVTTGGFKTIF

SEQ ID NO: 509666 - protein, 13 aa, Homo sapiens
  CDR3 for beta chain variable domain of TCR clone 254833 (TRBV20-1, TRBJ1-1)
CSAPLGGGTEAFF

SEQ ID NO: 509667 - protein, 11 aa, Homo sapiens
  CDR3 for alpha chain variable domain of TCR clone 254834 (TRAV3, TRAJ32)
CAVREGSMVVL

SEQ ID NO: 509668 - protein, 13 aa, Homo sapiens
  CDR3 for beta chain variable domain of TCR clone 254834 (TRBV2, TRBJ1-1)
CASSEGGNTDAFF

SEQ ID NO: 509669 - protein, 13 aa, Homo sapiens
  CDR3 for alpha chain variable domain of TCR clone 254835 (TRAV12-2, TRAJ20)
CAAYTSNDYKLSF

SEQ ID NO: 509670 - protein, 18 aa, Homo sapiens
  CDR3 for beta chain variable domain of TCR clone 254835 (TRBV25-1, TRBJ1-2)
CASSGLQNGQGLIFGYTF

SEQ ID NO: 509671 - protein, 14 aa, Homo sapiens
  CDR3 for alpha chain variable domain of TCR clone 254836 (TRAV14/DV4, TRAJ41)
CARGGPDSGYALNF

SEQ ID NO: 509672 - protein, 12 aa, Homo sapiens
  CDR3 for beta chain variable domain of TCR clone 254836 (TRBV18, TRBJ2-7)
CASSTAMGEQYF

SEQ ID NO: 509673 - protein, 16 aa, Homo sapiens
  CDR3 for alpha chain variable domain of TCR clone 254837 (TRAV3, TRAJ37)
CAVRVRGSGNTGKLIF

SEQ ID NO: 509674 - protein, 15 aa, Homo sapiens
  CDR3 for beta chain variable domain of TCR clone 254837 (TRBV3-1, TRBJ2-1)
CACSPRDSGFNEQFF

SEQ ID NO: 509675 - protein, 12 aa, Homo sapiens
  CDR3 for alpha chain variable domain of TCR clone 254838 (TRAV12-3, TRAJ17)
CAMTLTGNKLTF

SEQ ID NO: 509676 - protein, 15 aa, Homo sapiens
  CDR3 for beta chain variable domain of TCR clone 254838 (TRBV20-1, TRBJ2-7)
CSARDRVAGMDEQYF

SEQ ID NO: 509677 - protein, 20 aa, Homo sapiens
  CDR3 for alpha chain variable domain of TCR clone 254839 (TRAV1-1, TRAJ4)
CLLLLRCEGFLSGGYNKLIF

SEQ ID NO: 509678 - protein, 14 aa, Homo sapiens
  CDR3 for beta chain variable domain of TCR clone 254839 (TRBV4-2, TRBJ1-5)
CASSRDRGNQPQHF

SEQ ID NO: 509679 - protein, 14 aa, Homo sapiens
  CDR3 for alpha chain variable domain of TCR clone 254840 (TRAV35, TRAJ22)
CAGLRPGSARQLTF

SEQ ID NO: 509680 - protein, 14 aa, Homo sapiens
  CDR3 for beta chain variable domain of TCR clone 254840 (TRBV4-1, TRBJ2-2)
CASCQAVNTGELFF

SEQ ID NO: 509681 - protein, 13 aa, Homo sapiens
  CDR3 for alpha chain variable domain of TCR clone 254841 (TRAV30, TRAJ24)
CGTVTDSWGKLQF

SEQ ID NO: 509682 - protein, 15 aa, Homo sapiens
  CDR3 for beta chain variable domain of TCR clone 254841 (TRBV11-2, TRBJ2-1)
CASSKNRGLIYEQFF

SEQ ID NO: 509683 - protein, 14 aa, Homo sapiens
  CDR3 for alpha chain variable domain of TCR clone 254842 (TRAV12-3, TRAJ54)
CAMSAQKGAPKLVF

SEQ ID NO: 509684 - protein, 17 aa, Homo sapiens
  CDR3 for beta chain variable domain of TCR clone 254842 (TRBV11-2, TRBJ2-1)
CASSLYPPGVEYNEQFF

SEQ ID NO: 509685 - protein, 10 aa, Homo sapiens
  CDR3 for alpha chain variable domain of TCR clone 254843 (TRAV5, TRAJ34)
CAEDTDKLIF

SEQ ID NO: 509686 - protein, 13 aa, Homo sapiens
  CDR3 for beta chain variable domain of TCR clone 254843 (TRBV12-4, TRBJ2-5)
CASSLGGSRTQYF

SEQ ID NO: 509687 - protein, 17 aa, Homo sapiens
  CDR3 for alpha chain variable domain of TCR clone 254844 (TRAV23/DV6, )
CAEPDIQNPDPAVYQLR

SEQ ID NO: 509688 - protein, 15 aa, Homo sapiens
  CDR3 for beta chain variable domain of TCR clone 254844 (TRBV12-4, TRBJ2-5)
CASTLNSGRGETQYF

SEQ ID NO: 509689 - protein, 17 aa, Homo sapiens
  CDR3 for alpha chain variable domain of TCR clone 254845 (TRAV8-6, TRAJ58)
CAVSSWVGETSGSRLTF

SEQ ID NO: 509690 - protein, 15 aa, Homo sapiens
  CDR3 for beta chain variable domain of TCR clone 254845 (TRBV28, TRBJ2-3)
CASSLNLGDADTQYF

SEQ ID NO: 509691 - protein, 11 aa, Homo sapiens
  CDR3 for alpha chain variable domain of TCR clone 254846 (TRAV8-3, TRAJ49)
CAVNTGNQFYF

SEQ ID NO: 509692 - protein, 15 aa, Homo sapiens
  CDR3 for beta chain variable domain of TCR clone 254846 (TRBV19, TRBJ1-1)
CASTSGQIQNTEAFF

SEQ ID NO: 509693 - protein, 21 aa, Homo sapiens
  CDR3 for alpha chain variable domain of TCR clone 254847 (TRAV3, TRAJ27)
CAVRPLGAGKSTFGDGPTLTF

SEQ ID NO: 509694 - protein, 13 aa, Homo sapiens
  CDR3 for beta chain variable domain of TCR clone 254847 (TRBV7-9, TRBJ2-3)
CASSPGSTDTQYF

SEQ ID NO: 509695 - protein, 11 aa, Homo sapiens
  CDR3 for alpha chain variable domain of TCR clone 254848 (TRAV2, TRAJ13)
CASGGYQNVTF

SEQ ID NO: 509696 - protein, 11 aa, Homo sapiens
  CDR3 for beta chain variable domain of TCR clone 254848 (TRBV5-6, TRBJ2-5)
CASSLERTQYF

SEQ ID NO: 509697 - protein, 17 aa, Homo sapiens
  CDR3 for alpha chain variable domain of TCR clone 254849 (TRAV17, TRAJ7)
CATLGRLAFGKGNQVVV

SEQ ID NO: 509698 - protein, 14 aa, Homo sapiens
  CDR3 for beta chain variable domain of TCR clone 254849 (TRBV20-1, TRBJ2-7)
CSAKTGTGGYEQYF

SEQ ID NO: 509699 - protein, 13 aa, Homo sapiens
  CDR3 for alpha chain variable domain of TCR clone 254850 (TRAV12-1, TRAJ26)
CVVRRNYGQNFVF

SEQ ID NO: 509700 - protein, 15 aa, Homo sapiens
  CDR3 for beta chain variable domain of TCR clone 254850 (TRBV7-9, TRBJ1-5)
CASSQGHQPNQPQHF

SEQ ID NO: 509701 - protein, 16 aa, Homo sapiens
  CDR3 for alpha chain variable domain of TCR clone 254851 (TRAV12-2, TRAJ32)
CAVNLGQGGATNKLIF

SEQ ID NO: 509702 - protein, 15 aa, Homo sapiens
  CDR3 for beta chain variable domain of TCR clone 254851 (TRBV7-9, TRBJ1-3)
CASSFRGSPGNTIYF

SEQ ID NO: 509703 - protein, 16 aa, Homo sapiens
  CDR3 for alpha chain variable domain of TCR clone 254852 (TRAV30, TRAJ24)
CGTEIVDADSWGKFQF

SEQ ID NO: 509704 - protein, 15 aa, Homo sapiens
  CDR3 for beta chain variable domain of TCR clone 254852 (TRBV5-1, TRBJ1-1)
CASSLAPRGNAEAFF

SEQ ID NO: 509705 - protein, 11 aa, Homo sapiens
  CDR3 for alpha chain variable domain of TCR clone 254853 (TRAV2, TRAJ13)
CASGGYQKVTF

SEQ ID NO: 509706 - protein, 14 aa, Homo sapiens
  CDR3 for beta chain variable domain of TCR clone 254853 (TRBV25-1, TRBJ1-4)
CASSGGGQPEKLFF

SEQ ID NO: 509707 - protein, 14 aa, Homo sapiens
  CDR3 for alpha chain variable domain of TCR clone 254854 (TRAV8-3, TRAJ4)
CAVGAAGGYNKLIF

SEQ ID NO: 509708 - protein, 16 aa, Homo sapiens
  CDR3 for beta chain variable domain of TCR clone 254854 (TRBV13, TRBJ2-2)
CASSPRTGGHTGELFF

SEQ ID NO: 509709 - protein, 15 aa, Homo sapiens
  CDR3 for alpha chain variable domain of TCR clone 254855 (TRAV3, TRAJ22)
CAVRDRSGSARQLTF

SEQ ID NO: 509710 - protein, 14 aa, Homo sapiens
  CDR3 for beta chain variable domain of TCR clone 254855 (TRBV15, TRBJ2-1)
CATSGVEDYNEQFF

SEQ ID NO: 509711 - protein, 14 aa, Homo sapiens
  CDR3 for alpha chain variable domain of TCR clone 254856 (TRAV1-2, TRAJ16)
CAVNRFSDGQKLLF

SEQ ID NO: 509712 - protein, 15 aa, Homo sapiens
  CDR3 for beta chain variable domain of TCR clone 254856 (TRBV11-1, TRBJ2-7)
CASSLNYGASYGQYF

SEQ ID NO: 509713 - protein, 12 aa, Homo sapiens
  CDR3 for alpha chain variable domain of TCR clone 254857 (TRAV8-3, TRAJ20)
CAADFNDYKLSF

SEQ ID NO: 509714 - protein, 13 aa, Homo sapiens
  CDR3 for beta chain variable domain of TCR clone 254857 (TRBV20-1, TRBJ2-1)
CSAQDGGPNEQFF

SEQ ID NO: 509715 - protein, 14 aa, Homo sapiens
  CDR3 for alpha chain variable domain of TCR clone 254858 (TRAV1-2, TRAJ8)
CAVREDTGFQKLVF

SEQ ID NO: 509716 - protein, 15 aa, Homo sapiens
  CDR3 for beta chain variable domain of TCR clone 254858 (TRBV3-1, TRBJ2-7)
CASSRAPSGSYEQYF

SEQ ID NO: 509717 - protein, 14 aa, Homo sapiens
  CDR3 for alpha chain variable domain of TCR clone 254859 (TRAV20, TRAJ56)
CAVQFGGANSKLTF

SEQ ID NO: 509718 - protein, 14 aa, Homo sapiens
  CDR3 for beta chain variable domain of TCR clone 254859 (TRBV5-4, TRBJ1-1)
CASSLDSRRDEAFF

SEQ ID NO: 509719 - protein, 13 aa, Homo sapiens
  CDR3 for alpha chain variable domain of TCR clone 254860 (TRAV8-3, TRAJ28)
CAVGAVGSYQLTF

SEQ ID NO: 509720 - protein, 16 aa, Homo sapiens
  CDR3 for beta chain variable domain of TCR clone 254860 (TRBV19, TRBJ2-1)
CASSKAGTSSYNEQFF

SEQ ID NO: 509721 - protein, 13 aa, Homo sapiens
  CDR3 for alpha chain variable domain of TCR clone 254861 (TRAV26-1, TRAJ31)
CIVRVDGNARLMF

SEQ ID NO: 509722 - protein, 17 aa, Homo sapiens
  CDR3 for beta chain variable domain of TCR clone 254861 (TRBV11-2, TRBJ2-1)
CGSSLYPPGVEYNEQFF

SEQ ID NO: 509723 - protein, 17 aa, Homo sapiens
  CDR3 for alpha chain variable domain of TCR clone 254862 (TRAV3, TRAJ42)
CAVRARDYGGSQGNPIF

SEQ ID NO: 509724 - protein, 12 aa, Homo sapiens
  CDR3 for beta chain variable domain of TCR clone 254862 (TRBV11-2, TRBJ2-1)
CASSPGNNEQFF

SEQ ID NO: 509725 - protein, 13 aa, Homo sapiens
  CDR3 for alpha chain variable domain of TCR clone 254863 (TRAV2, TRAJ36)
CAVDQTGANNLFF

SEQ ID NO: 509726 - protein, 17 aa, Homo sapiens
  CDR3 for beta chain variable domain of TCR clone 254863 (TRBV13, TRBJ2-3)
CASSLSRVAGGRNTQYF

SEQ ID NO: 509727 - protein, 14 aa, Homo sapiens
  CDR3 for alpha chain variable domain of TCR clone 254864 (TRAV12-1, TRAJ4)
CGEQRSGGDNKLIF

SEQ ID NO: 509728 - protein, 16 aa, Homo sapiens
  CDR3 for beta chain variable domain of TCR clone 254864 (TRBV11-3, TRBJ2-5)
CASSSVVAGSTETQYF

SEQ ID NO: 509729 - protein, 14 aa, Homo sapiens
  CDR3 for alpha chain variable domain of TCR clone 254865 (TRAV1-2, TRAJ8)
CAVREDTGFQKLVF

SEQ ID NO: 509730 - protein, 12 aa, Homo sapiens
  CDR3 for beta chain variable domain of TCR clone 254865 (TRBV11-2, TRBJ2-2)
CASSLGGGELFS

SEQ ID NO: 509731 - protein, 14 aa, Homo sapiens
  CDR3 for alpha chain variable domain of TCR clone 254866 (TRAV4, TRAJ9)
CLVGSRTGGFKTIF

SEQ ID NO: 509732 - protein, 13 aa, Homo sapiens
  CDR3 for beta chain variable domain of TCR clone 254866 (TRBV4-3, TRBJ2-1)
CASSFWDYNEQFF

SEQ ID NO: 509733 - protein, 17 aa, Homo sapiens
  CDR3 for alpha chain variable domain of TCR clone 254867 (TRAV8-3, TRAJ8)
CAVGPNEHRLSETWIWN

SEQ ID NO: 509734 - protein, 13 aa, Homo sapiens
  CDR3 for beta chain variable domain of TCR clone 254867 (TRBV10-2, TRBJ2-3)
CASSESGDHTQYF

SEQ ID NO: 509735 - protein, 14 aa, Homo sapiens
  CDR3 for alpha chain variable domain of TCR clone 254868 (TRAV13-1, TRAJ40)
CAASMTSGTYKYIF

SEQ ID NO: 509736 - protein, 14 aa, Homo sapiens
  CDR3 for beta chain variable domain of TCR clone 254868 (TRBV7-2, TRBJ2-2)
CASRGQGAAGELFF

SEQ ID NO: 509737 - protein, 14 aa, Homo sapiens
  CDR3 for alpha chain variable domain of TCR clone 254869 (TRAV8-3, TRAJ13)
CAVGAQEGYQKVTF

SEQ ID NO: 509738 - protein, 11 aa, Homo sapiens
  CDR3 for beta chain variable domain of TCR clone 254869 (TRBV7-9, TRBJ2-3)
CASSPTDTQYF

SEQ ID NO: 509739 - protein, 15 aa, Homo sapiens
  CDR3 for alpha chain variable domain of TCR clone 254870 (TRAV12-3, TRAJ42)
CAMITSVGSQGNLIF

SEQ ID NO: 509740 - protein, 17 aa, Homo sapiens
  CDR3 for beta chain variable domain of TCR clone 254870 (TRBV13, TRBJ2-3)
CASSLSRVAGGRNTQYF

SEQ ID NO: 509741 - protein, 14 aa, Homo sapiens
  CDR3 for alpha chain variable domain of TCR clone 254871 (TRAV13-2, TRAJ17)
FAENGKAAGNKLTF

SEQ ID NO: 509742 - protein, 15 aa, Homo sapiens
  CDR3 for beta chain variable domain of TCR clone 254871 (TRBV14, TRBJ1-1)
CASSQEGMGFTEAFF

SEQ ID NO: 509743 - protein, 12 aa, Homo sapiens
  CDR3 for alpha chain variable domain of TCR clone 254872 (TRAV12-1, TRAJ3)
CVVPPGTAVLPR

SEQ ID NO: 509744 - protein, 15 aa, Homo sapiens
  CDR3 for beta chain variable domain of TCR clone 254872 (TRBV7-2, TRBJ2-6)
CASSREGSGANVLTF

SEQ ID NO: 509745 - protein, 14 aa, Homo sapiens
  CDR3 for alpha chain variable domain of TCR clone 254873 (TRAV12-1, TRAJ17)
CVVNYKAAGNKLTF

SEQ ID NO: 509746 - protein, 14 aa, Homo sapiens
  CDR3 for beta chain variable domain of TCR clone 254873 (TRBV7-8, TRBJ2-3)
CASSVEAGTDTQYF

SEQ ID NO: 509747 - protein, 12 aa, Homo sapiens
  CDR3 for alpha chain variable domain of TCR clone 254874 (TRAV25, TRAJ38)
CAGTGNNRKLIW

SEQ ID NO: 509748 - protein, 14 aa, Homo sapiens
  CDR3 for beta chain variable domain of TCR clone 254874 (TRBV19, TRBJ1-5)
CAISKMTGPQPQHF

SEQ ID NO: 509749 - protein, 17 aa, Homo sapiens
  CDR3 for alpha chain variable domain of TCR clone 254875 (TRAV3, TRAJ38)
CAVRDCLNAGNNRKLSW

SEQ ID NO: 509750 - protein, 14 aa, Homo sapiens
  CDR3 for beta chain variable domain of TCR clone 254875 (TRBV5-5, TRBJ1-5)
CASSGQGVDQPQHF

SEQ ID NO: 509751 - protein, 14 aa, Homo sapiens
  CDR3 for alpha chain variable domain of TCR clone 254876 (TRAV35, TRAJ41)
CAGQASVRRNALNF

SEQ ID NO: 509752 - protein, 15 aa, Homo sapiens
  CDR3 for beta chain variable domain of TCR clone 254876 (TRBV25-1, TRBJ1-2)
CASSETGRPSYGYTF

SEQ ID NO: 509753 - protein, 12 aa, Homo sapiens
  CDR3 for alpha chain variable domain of TCR clone 254877 (TRAV8-3, TRAJ41)
CAVALSGYALNF

SEQ ID NO: 509754 - protein, 11 aa, Homo sapiens
  CDR3 for beta chain variable domain of TCR clone 254877 (TRBV29-1, TRBJ2-5)
CSEDRTGTQYF

SEQ ID NO: 509755 - protein, 11 aa, Homo sapiens
  CDR3 for alpha chain variable domain of TCR clone 254878 (TRAV13-2, TRAJ20)
CADSNDYKLSF

SEQ ID NO: 509756 - protein, 12 aa, Homo sapiens
  CDR3 for beta chain variable domain of TCR clone 254878 (TRBV11-2, TRBJ2-2)
CASSLVGGELFF

SEQ ID NO: 509757 - protein, 14 aa, Homo sapiens
  CDR3 for alpha chain variable domain of TCR clone 254879 (TRAV12-3, TRAJ29)
CATSPYSGNTPLVF

SEQ ID NO: 509758 - protein, 15 aa, Homo sapiens
  CDR3 for beta chain variable domain of TCR clone 254879 (TRBV27, TRBJ2-1)
CASSNGGGSSNEQFF

SEQ ID NO: 509759 - protein, 14 aa, Homo sapiens
  CDR3 for alpha chain variable domain of TCR clone 254880 (TRAV8-6, TRAJ49)
CAVSVRYTGNQFYF

SEQ ID NO: 509760 - protein, 19 aa, Homo sapiens
  CDR3 for beta chain variable domain of TCR clone 254880 (TRBV25-1, TRBJ2-2)
CAILVYRVDRGRKTGELFF

SEQ ID NO: 509761 - protein, 16 aa, Homo sapiens
  CDR3 for alpha chain variable domain of TCR clone 254881 (TRAV3, TRAJ42)
CAVRDIEGGSQGNPIF

SEQ ID NO: 509762 - protein, 15 aa, Homo sapiens
  CDR3 for beta chain variable domain of TCR clone 254881 (TRBV9, TRBJ2-2)
CASSDFAGASGELFF

SEQ ID NO: 509763 - protein, 15 aa, Homo sapiens
  CDR3 for alpha chain variable domain of TCR clone 254882 (TRAV12-3, TRAJ6)
CAMSATTGGSYIPTF

SEQ ID NO: 509764 - protein, 13 aa, Homo sapiens
  CDR3 for beta chain variable domain of TCR clone 254882 (TRBV7-9, TRBJ2-1)
CASSLDVGNEQFF

SEQ ID NO: 509765 - protein, 12 aa, Homo sapiens
  CDR3 for alpha chain variable domain of TCR clone 254883 (TRAV13-1, TRAJ49)
CAAPNTSNQFYF

SEQ ID NO: 509766 - protein, 17 aa, Homo sapiens
  CDR3 for beta chain variable domain of TCR clone 254883 (TRBV25-1, TRBJ2-7)
CASSDARVVFSSYEQYF

SEQ ID NO: 509767 - protein, 13 aa, Homo sapiens
  CDR3 for alpha chain variable domain of TCR clone 254884 (TRAV35, TRAJ48)
CAGHEFGNDKLTS

SEQ ID NO: 509768 - protein, 15 aa, Homo sapiens
  CDR3 for beta chain variable domain of TCR clone 254884 (TRBV27, TRBJ2-7)
CASSPQREGQREQYF

SEQ ID NO: 509769 - protein, 15 aa, Homo sapiens
  CDR3 for alpha chain variable domain of TCR clone 254885 (TRAV13-1, TRAJ45)
CAASGSGGGADGLTF

SEQ ID NO: 509770 - protein, 14 aa, Homo sapiens
  CDR3 for beta chain variable domain of TCR clone 254885 (TRBV12-4, TRBJ1-2)
CASSFVGTAYGYTL

SEQ ID NO: 509771 - protein, 10 aa, Homo sapiens
  CDR3 for alpha chain variable domain of TCR clone 254886 (TRAV26-1, TRAJ22)
CIAGSRQLTF

SEQ ID NO: 509772 - protein, 13 aa, Homo sapiens
  CDR3 for beta chain variable domain of TCR clone 254886 (TRBV12-5, TRBJ2-3)
CASGDRQSDTQYF

SEQ ID NO: 509773 - protein, 13 aa, Homo sapiens
  CDR3 for alpha chain variable domain of TCR clone 254887 (TRAV13-1, TRAJ10)
CAALEGGGNKLNF

SEQ ID NO: 509774 - protein, 17 aa, Homo sapiens
  CDR3 for beta chain variable domain of TCR clone 254887 (TRBV7-3, TRBJ2-2)
CASSLSGTSGGTGELFF

SEQ ID NO: 509775 - protein, 11 aa, Homo sapiens
  CDR3 for alpha chain variable domain of TCR clone 254888 (TRAV26-1, TRAJ37)
CIVRVGRKRIF

SEQ ID NO: 509776 - protein, 17 aa, Homo sapiens
  CDR3 for beta chain variable domain of TCR clone 254888 (TRBV13, TRBJ2-3)
CASSLSRVAGGRNTQYF

SEQ ID NO: 509777 - protein, 12 aa, Homo sapiens
  CDR3 for alpha chain variable domain of TCR clone 254889 (TRAV12-3, TRAJ34)
CAMGYDTDKLIF

SEQ ID NO: 509778 - protein, 15 aa, Homo sapiens
  CDR3 for beta chain variable domain of TCR clone 254889 (TRBV28, TRBJ2-1)
CASSIIAGGRSEQFF

SEQ ID NO: 509779 - protein, 12 aa, Homo sapiens
  CDR3 for alpha chain variable domain of TCR clone 254890 (TRAV29/DV5, TRAJ49)
CAATDTGNQFYF

SEQ ID NO: 509780 - protein, 12 aa, Homo sapiens
  CDR3 for beta chain variable domain of TCR clone 254890 (TRBV12-4, TRBJ2-7)
CASSLGGYEQFF

SEQ ID NO: 509781 - protein, 15 aa, Homo sapiens
  CDR3 for alpha chain variable domain of TCR clone 254891 (TRAV12-1, TRAJ44)
CVVDEYTGPASKLTF

SEQ ID NO: 509782 - protein, 14 aa, Homo sapiens
  CDR3 for beta chain variable domain of TCR clone 254891 (TRBV5-1, TRBJ1-2)
CASSLEPVNYGYTF

SEQ ID NO: 509783 - protein, 12 aa, Homo sapiens
  CDR3 for alpha chain variable domain of TCR clone 254892 (TRAV16, TRAJ49)
CAINEGGNQFYF

SEQ ID NO: 509784 - protein, 14 aa, Homo sapiens
  CDR3 for beta chain variable domain of TCR clone 254892 (TRBV7-9, TRBJ2-1)
CASRPTGLRNEQFF

SEQ ID NO: 509785 - protein, 11 aa, Homo sapiens
  CDR3 for alpha chain variable domain of TCR clone 254893 (TRAV1-2, TRAJ20)
CAVANDYKLSF

SEQ ID NO: 509786 - protein, 18 aa, Homo sapiens
  CDR3 for beta chain variable domain of TCR clone 254893 (TRBV20-1, TRBJ2-6)
GSAGTTPTHGSGANVLTF

SEQ ID NO: 509787 - protein, 13 aa, Homo sapiens
  CDR3 for alpha chain variable domain of TCR clone 254894 (TRAV21, TRAJ20)
CAVGLRVDYKLSF

SEQ ID NO: 509788 - protein, 17 aa, Homo sapiens
  CDR3 for beta chain variable domain of TCR clone 254894 (TRBV20-1, TRBJ2-1)
CSAPPRLAGTRYNEQFF

SEQ ID NO: 509789 - protein, 13 aa, Homo sapiens
  CDR3 for alpha chain variable domain of TCR clone 254895 (TRAV16, TRAJ22)
SAMLAGSARQLTF

SEQ ID NO: 509790 - protein, 15 aa, Homo sapiens
  CDR3 for beta chain variable domain of TCR clone 254895 (TRBV20-1, TRBJ2-7)
CSARDRVSGMDEQYF

SEQ ID NO: 509791 - protein, 10 aa, Homo sapiens
  CDR3 for alpha chain variable domain of TCR clone 254896 (TRAV16, TRAJ39)
FSSAGNMLTF

SEQ ID NO: 509792 - protein, 14 aa, Homo sapiens
  CDR3 for beta chain variable domain of TCR clone 254896 (TRBV27, TRBJ1-4)
CASSLDGGWEKLFF

SEQ ID NO: 509793 - protein, 13 aa, Homo sapiens
  CDR3 for alpha chain variable domain of TCR clone 254897 (TRAV17, TRAJ9)
CATDYTGGFKSIF

SEQ ID NO: 509794 - protein, 16 aa, Homo sapiens
  CDR3 for beta chain variable domain of TCR clone 254897 (TRBV7-7, TRBJ2-1)
CASSLASGTSYNEQFF

SEQ ID NO: 509795 - protein, 14 aa, Homo sapiens
  CDR3 for alpha chain variable domain of TCR clone 254898 (TRAV20, TRAJ56)
CAVQFGGANSKLTF

SEQ ID NO: 509796 - protein, 14 aa, Homo sapiens
  CDR3 for beta chain variable domain of TCR clone 254898 (TRBV20-1, TRBJ2-7)
CSAKRGGSAYEQYF

SEQ ID NO: 509797 - protein, 17 aa, Homo sapiens
  CDR3 for alpha chain variable domain of TCR clone 254899 (TRAV3, TRAJ12)
CSVRDGGRMDSSYKLIF

SEQ ID NO: 509798 - protein, 14 aa, Homo sapiens
  CDR3 for beta chain variable domain of TCR clone 254899 (TRBV7-9, TRBJ1-2)
CASSRQGANYGYTF

SEQ ID NO: 509799 - protein, 16 aa, Homo sapiens
  CDR3 for alpha chain variable domain of TCR clone 254900 (TRAV30, TRAJ24)
CGTEMVDADSWWKVQF

SEQ ID NO: 509800 - protein, 14 aa, Homo sapiens
  CDR3 for beta chain variable domain of TCR clone 254900 (TRBV12-5, TRBJ2-5)
CASGSRTHQETQYF

SEQ ID NO: 509801 - protein, 17 aa, Homo sapiens
  CDR3 for alpha chain variable domain of TCR clone 254901 (TRAV26-2, TRAJ42)
CILRDVGYGGSQGSLIF

SEQ ID NO: 509802 - protein, 16 aa, Homo sapiens
  CDR3 for beta chain variable domain of TCR clone 254901 (TRBV12-4, TRBJ2-7)
CASSSIGGTGTYEQYF

SEQ ID NO: 509803 - protein, 13 aa, Homo sapiens
  CDR3 for alpha chain variable domain of TCR clone 254902 (TRAV30, TRAJ6)
CGTEAGGSYIPTF

SEQ ID NO: 509804 - protein, 14 aa, Homo sapiens
  CDR3 for beta chain variable domain of TCR clone 254902 (TRBV15, TRBJ2-1)
CATSGVEDYNEQFF

SEQ ID NO: 509805 - protein, 16 aa, Homo sapiens
  CDR3 for alpha chain variable domain of TCR clone 254903 (TRAV30, TRAJ24)
CGTQIVDADSWGKFQF

SEQ ID NO: 509806 - protein, 14 aa, Homo sapiens
  CDR3 for beta chain variable domain of TCR clone 254903 (TRBV12-5, TRBJ2-5)
CASGSRTHQEAQYF

SEQ ID NO: 509807 - protein, 15 aa, Homo sapiens
  CDR3 for alpha chain variable domain of TCR clone 254904 (TRAV4, TRAJ39)
CLVGPNNNAGNMLTL

SEQ ID NO: 509808 - protein, 16 aa, Homo sapiens
  CDR3 for beta chain variable domain of TCR clone 254904 (TRBV13, TRBJ2-2)
CASSPRTGEHTGELFF

SEQ ID NO: 509809 - protein, 17 aa, Homo sapiens
  CDR3 for alpha chain variable domain of TCR clone 254905 (TRAV13-1, TRAJ52)
CAASSGAGGTSYGKLTF

SEQ ID NO: 509810 - protein, 15 aa, Homo sapiens
  CDR3 for beta chain variable domain of TCR clone 254905 (TRBV2, TRBJ2-1)
CDSSELAGSYNEQFF

SEQ ID NO: 509811 - protein, 12 aa, Homo sapiens
  CDR3 for alpha chain variable domain of TCR clone 254906 (TRAV22, TRAJ20)
CAVGGNYYKLSF

SEQ ID NO: 509812 - protein, 13 aa, Homo sapiens
  CDR3 for beta chain variable domain of TCR clone 254906 (TRBV9, TRBJ1-1)
CASSVGTGTEAFF

SEQ ID NO: 509813 - protein, 15 aa, Homo sapiens
  CDR3 for alpha chain variable domain of TCR clone 254907 (TRAV13-1, TRAJ5)
CAASKADTGRRAITF

SEQ ID NO: 509814 - protein, 16 aa, Homo sapiens
  CDR3 for beta chain variable domain of TCR clone 254907 (TRBV7-2, TRBJ2-1)
CASSLGRTSGDNEQFS

SEQ ID NO: 509815 - protein, 14 aa, Homo sapiens
  CDR3 for alpha chain variable domain of TCR clone 254908 (TRAV1-2, TRAJ16)
CAVNRFSDGQKLLF

SEQ ID NO: 509816 - protein, 12 aa, Homo sapiens
  CDR3 for beta chain variable domain of TCR clone 254908 (TRBV20-1, TRBJ2-5)
CSAREGHETQYF

SEQ ID NO: 509817 - protein, 18 aa, Homo sapiens
  CDR3 for alpha chain variable domain of TCR clone 254909 (TRAV12-3, TRAJ52)
CAMGVGGDGGTSYGKLTF

SEQ ID NO: 509818 - protein, 15 aa, Homo sapiens
  CDR3 for beta chain variable domain of TCR clone 254909 (TRBV27, TRBJ1-6)
CASSFDRGLGSPLHF

SEQ ID NO: 509819 - protein, 15 aa, Homo sapiens
  CDR3 for alpha chain variable domain of TCR clone 254910 (TRAV23/DV6, TRAJ45)
CAASSAGGGADGPTL

SEQ ID NO: 509820 - protein, 14 aa, Homo sapiens
  CDR3 for beta chain variable domain of TCR clone 254910 (TRBV7-2, TRBJ2-4)
CASSLSGGANIQYF

SEQ ID NO: 509821 - protein, 14 aa, Homo sapiens
  CDR3 for alpha chain variable domain of TCR clone 254911 (TRAV12-3, TRAJ42)
CAMNYGGSQGNLIF

SEQ ID NO: 509822 - protein, 12 aa, Homo sapiens
  CDR3 for beta chain variable domain of TCR clone 254911 (TRBV5-4, TRBJ2-5)
CASGSTRETQYF

SEQ ID NO: 509823 - protein, 17 aa, Homo sapiens
  CDR3 for alpha chain variable domain of TCR clone 254912 (TRAV9-2, TRAJ45)
CALSGYYSGGGADGLTF

SEQ ID NO: 509824 - protein, 15 aa, Homo sapiens
  CDR3 for beta chain variable domain of TCR clone 254912 (TRBV10-3, TRBJ2-3)
CAISLTSGGTDTQYF

SEQ ID NO: 509825 - protein, 14 aa, Homo sapiens
  CDR3 for alpha chain variable domain of TCR clone 254913 (TRAV12-3, TRAJ10)
SHLPLTGGGNKLTF

SEQ ID NO: 509826 - protein, 15 aa, Homo sapiens
  CDR3 for beta chain variable domain of TCR clone 254913 (TRBV10-3, TRBJ1-3)
CASSDSQGAGNTIYF

SEQ ID NO: 509827 - protein, 16 aa, Homo sapiens
  CDR3 for alpha chain variable domain of TCR clone 254914 (TRAV3, TRAJ37)
CAVRGKGSGNTGKLSF

SEQ ID NO: 509828 - protein, 14 aa, Homo sapiens
  CDR3 for beta chain variable domain of TCR clone 254914 (TRBV7-7, TRBJ2-2)
CASSRDRSTGELFF

SEQ ID NO: 509829 - protein, 16 aa, Homo sapiens
  CDR3 for alpha chain variable domain of TCR clone 254915 (TRAV12-2, TRAJ32)
CAVNLGEGGATNKLIF

SEQ ID NO: 509830 - protein, 15 aa, Homo sapiens
  CDR3 for beta chain variable domain of TCR clone 254915 (TRBV20-1, TRBJ2-7)
CSARGPLAGGREQYF

SEQ ID NO: 509831 - protein, 14 aa, Homo sapiens
  CDR3 for alpha chain variable domain of TCR clone 254916 (TRAV1-2, TRAJ16)
CAVNRFSDGQKLLF

SEQ ID NO: 509832 - protein, 13 aa, Homo sapiens
  CDR3 for beta chain variable domain of TCR clone 254916 (TRBV18, TRBJ2-5)
CASSPVGKETQYF

SEQ ID NO: 509833 - protein, 14 aa, Homo sapiens
  CDR3 for alpha chain variable domain of TCR clone 254917 (TRAV12-2, TRAJ45)
CAVNIGGGADGLTF

SEQ ID NO: 509834 - protein, 17 aa, Homo sapiens
  CDR3 for beta chain variable domain of TCR clone 254917 (TRBV20-1, TRBJ2-2)
GSASGSGQGGLTGELFF

SEQ ID NO: 509835 - protein, 13 aa, Homo sapiens
  CDR3 for alpha chain variable domain of TCR clone 254918 (TRAV12-1, TRAJ13)
CVVTSGGYQKVTF

SEQ ID NO: 509836 - protein, 14 aa, Homo sapiens
  CDR3 for beta chain variable domain of TCR clone 254918 (TRBV27, TRBJ2-7)
CASCLAGLSYEQYF

SEQ ID NO: 509837 - protein, 12 aa, Homo sapiens
  CDR3 for alpha chain variable domain of TCR clone 254919 (TRAV12-3, TRAJ17)
CAMKLTGNKLTF

SEQ ID NO: 509838 - protein, 15 aa, Homo sapiens
  CDR3 for beta chain variable domain of TCR clone 254919 (TRBV20-1, TRBJ2-7)
CNARDRVSGMDEQYF

SEQ ID NO: 509839 - protein, 12 aa, Homo sapiens
  CDR3 for alpha chain variable domain of TCR clone 254920 (TRAV30, TRAJ43)
CGTEERGNDMRF

SEQ ID NO: 509840 - protein, 13 aa, Homo sapiens
  CDR3 for beta chain variable domain of TCR clone 254920 (TRBV7-9, TRBJ2-3)
CASSPVSTDTQYF

SEQ ID NO: 509841 - protein, 17 aa, Homo sapiens
  CDR3 for alpha chain variable domain of TCR clone 254921 (TRAV3, TRAJ6)
CAVRDRPRAGGSYIPTF

SEQ ID NO: 509842 - protein, 18 aa, Homo sapiens
  CDR3 for beta chain variable domain of TCR clone 254921 (TRBV7-9, TRBJ2-7)
CASSLTTSGSRTWYEQYF

SEQ ID NO: 509843 - protein, 14 aa, Homo sapiens
  CDR3 for alpha chain variable domain of TCR clone 254922 (TRAV8-1, TRAJ5)
CAVSMGTGRRALAF

SEQ ID NO: 509844 - protein, 13 aa, Homo sapiens
  CDR3 for beta chain variable domain of TCR clone 254922 (TRBV7-9, TRBJ1-2)
CASSLKQNYGYTF

SEQ ID NO: 509845 - protein, 13 aa, Homo sapiens
  CDR3 for alpha chain variable domain of TCR clone 254923 (TRAV2, TRAJ40)
CAVVTSGTYKYIF

SEQ ID NO: 509846 - protein, 15 aa, Homo sapiens
  CDR3 for beta chain variable domain of TCR clone 254923 (TRBV7-2, TRBJ2-2)
CASSFQRGETGELFF

SEQ ID NO: 509847 - protein, 11 aa, Homo sapiens
  CDR3 for alpha chain variable domain of TCR clone 254924 (TRAV21, TRAJ34)
CAHYNTDKLIF

SEQ ID NO: 509848 - protein, 14 aa, Homo sapiens
  CDR3 for beta chain variable domain of TCR clone 254924 (TRBV12-4, TRBJ2-3)
CASTIAGWGDTQYF

SEQ ID NO: 509849 - protein, 14 aa, Homo sapiens
  CDR3 for alpha chain variable domain of TCR clone 254925 (TRAV3, TRAJ7)
CAVREEEREQQTRF

SEQ ID NO: 509850 - protein, 15 aa, Homo sapiens
  CDR3 for beta chain variable domain of TCR clone 254925 (TRBV11-3, TRBJ2-3)
CASNGGLDSTDTQYF

SEQ ID NO: 509851 - protein, 14 aa, Homo sapiens
  CDR3 for alpha chain variable domain of TCR clone 254926 (TRAV8-3, TRAJ39)
CAVGANNAGNMLTF

SEQ ID NO: 509852 - protein, 12 aa, Homo sapiens
  CDR3 for beta chain variable domain of TCR clone 254926 (TRBV28, TRBJ1-3)
CASVSAGNTIYF

SEQ ID NO: 509853 - protein, 11 aa, Homo sapiens
  CDR3 for alpha chain variable domain of TCR clone 254927 (TRAV12-3, TRAJ43)
CAMSVSNDMRF

SEQ ID NO: 509854 - protein, 12 aa, Homo sapiens
  CDR3 for beta chain variable domain of TCR clone 254927 (TRBV20-1, TRBJ1-1)
QRSTWGGTEAFF

SEQ ID NO: 509855 - protein, 10 aa, Homo sapiens
  CDR3 for alpha chain variable domain of TCR clone 254928 (TRAV23/DV6, TRAJ57)
CAASSTLSQG

SEQ ID NO: 509856 - protein, 11 aa, Homo sapiens
  CDR3 for beta chain variable domain of TCR clone 254928 (TRBV29-1, TRBJ2-5)
CSEDPTGTQYF

SEQ ID NO: 509857 - protein, 11 aa, Homo sapiens
  CDR3 for alpha chain variable domain of TCR clone 254929 (TRAV13-1, TRAJ20)
CAASNDYKLSF

SEQ ID NO: 509858 - protein, 17 aa, Homo sapiens
  CDR3 for beta chain variable domain of TCR clone 254929 (TRBV24-1, TRBJ2-4)
CATSDAEARGVRNIQYF

SEQ ID NO: 509859 - protein, 13 aa, Homo sapiens
  CDR3 for alpha chain variable domain of TCR clone 254930 (TRAV17, TRAJ5)
CAPMDTGRTALTF

SEQ ID NO: 509860 - protein, 15 aa, Homo sapiens
  CDR3 for beta chain variable domain of TCR clone 254930 (TRBV20-1, TRBJ2-7)
CSAASGTSGAYEHYF

SEQ ID NO: 509861 - protein, 12 aa, Homo sapiens
  CDR3 for alpha chain variable domain of TCR clone 254931 (TRAV17, TRAJ29)
CYASAGNTPLVF

SEQ ID NO: 509862 - protein, 13 aa, Homo sapiens
  CDR3 for beta chain variable domain of TCR clone 254931 (TRBV14, TRBJ2-7)
CASSQDRRYEQYF

SEQ ID NO: 509863 - protein, 14 aa, Homo sapiens
  CDR3 for alpha chain variable domain of TCR clone 254932 (TRAV17, TRAJ15)
CATDRGQAGTALIF

SEQ ID NO: 509864 - protein, 12 aa, Homo sapiens
  CDR3 for beta chain variable domain of TCR clone 254932 (TRBV11-2, TRBJ2-1)
CASSPGNNEQFF

SEQ ID NO: 509865 - protein, 14 aa, Homo sapiens
  CDR3 for alpha chain variable domain of TCR clone 254933 (TRAV17, TRAJ57)
CATDPQGGSEKLVF

SEQ ID NO: 509866 - protein, 15 aa, Homo sapiens
  CDR3 for beta chain variable domain of TCR clone 254933 (TRBV27, TRBJ1-5)
CASSLGTGFDQPQHF

SEQ ID NO: 509867 - protein, 14 aa, Homo sapiens
  CDR3 for alpha chain variable domain of TCR clone 254934 (TRAV8-4, TRAJ54)
CAVSEVLGAHKLVF

SEQ ID NO: 509868 - protein, 13 aa, Homo sapiens
  CDR3 for beta chain variable domain of TCR clone 254934 (TRBV27, TRBJ2-7)
CASSFVSSYEQYF

SEQ ID NO: 509869 - protein, 18 aa, Homo sapiens
  CDR3 for alpha chain variable domain of TCR clone 254935 (TRAV26-1, TRAJ23)
CIVRVGLEVWNQGGKLIF

SEQ ID NO: 509870 - protein, 14 aa, Homo sapiens
  CDR3 for beta chain variable domain of TCR clone 254935 (TRBV7-6, TRBJ2-3)
CASSLGTVTDTHYF

SEQ ID NO: 509871 - protein, 14 aa, Homo sapiens
  CDR3 for alpha chain variable domain of TCR clone 254936 (TRAV12-3, TRAJ6)
CAMSATGGGYIPTF

SEQ ID NO: 509872 - protein, 15 aa, Homo sapiens
  CDR3 for beta chain variable domain of TCR clone 254936 (TRBV10-3, TRBJ2-3)
CAISLTSGGTDTQYF

SEQ ID NO: 509873 - protein, 15 aa, Homo sapiens
  CDR3 for alpha chain variable domain of TCR clone 254937 (TRAV26-1, TRAJ23)
CIVRVAGYQGGKLIF

SEQ ID NO: 509874 - protein, 16 aa, Homo sapiens
  CDR3 for beta chain variable domain of TCR clone 254937 (TRBV29-1, TRBJ2-7)
CSVEVVGTSGSYEQYF

SEQ ID NO: 509875 - protein, 13 aa, Homo sapiens
  CDR3 for alpha chain variable domain of TCR clone 254938 (TRAV17, TRAJ5)
CAPMDTGRRALTF

SEQ ID NO: 509876 - protein, 14 aa, Homo sapiens
  CDR3 for beta chain variable domain of TCR clone 254938 (TRBV7-3, TRBJ2-7)
CASSLKADSYEQYF

SEQ ID NO: 509877 - protein, 16 aa, Homo sapiens
  CDR3 for alpha chain variable domain of TCR clone 254939 (TRAV26-1, )
CIDIQNPHPAVYQLRD

SEQ ID NO: 509878 - protein, 19 aa, Homo sapiens
  CDR3 for beta chain variable domain of TCR clone 254939 (TRBV19, TRBJ2-5)
CASSIGQVTDFFLGETQYF

SEQ ID NO: 509879 - protein, 13 aa, Homo sapiens
  CDR3 for alpha chain variable domain of TCR clone 254940 (TRAV16, TRAJ34)
CALISYNTDKLIF

SEQ ID NO: 509880 - protein, 16 aa, Homo sapiens
  CDR3 for beta chain variable domain of TCR clone 254940 (TRBV13, TRBJ2-2)
CASSPRTGEHTGELFF

SEQ ID NO: 509881 - protein, 12 aa, Homo sapiens
  CDR3 for alpha chain variable domain of TCR clone 254941 (TRAV17, TRAJ57)
CSTDGGSEKLVF

SEQ ID NO: 509882 - protein, 14 aa, Homo sapiens
  CDR3 for beta chain variable domain of TCR clone 254941 (TRBV28, TRBJ2-7)
CASTFYGRAHEQYF

SEQ ID NO: 509883 - protein, 11 aa, Homo sapiens
  CDR3 for alpha chain variable domain of TCR clone 254942 (TRAV13-1, TRAJ33)
CAANSNYQLIW

SEQ ID NO: 509884 - protein, 14 aa, Homo sapiens
  CDR3 for beta chain variable domain of TCR clone 254942 (TRBV7-2, TRBJ2-3)
CRQLRGGGRDTQYF

SEQ ID NO: 509885 - protein, 15 aa, Homo sapiens
  CDR3 for alpha chain variable domain of TCR clone 254943 (TRAV3, TRAJ22)
CAVRDRGGSARTLTF

SEQ ID NO: 509886 - protein, 15 aa, Homo sapiens
  CDR3 for beta chain variable domain of TCR clone 254943 (TRBV20-1, TRBJ1-1)
CSASRGVTGNTEAFF

SEQ ID NO: 509887 - protein, 16 aa, Homo sapiens
  CDR3 for alpha chain variable domain of TCR clone 254944 (TRAV38-2/DV8, TRAJ37)
CAYRRPRSSNTGKLIF

SEQ ID NO: 509888 - protein, 17 aa, Homo sapiens
  CDR3 for beta chain variable domain of TCR clone 254944 (TRBV4-1, TRBJ2-7)
CASSRDPLGVRGGEQYF

SEQ ID NO: 509889 - protein, 12 aa, Homo sapiens
  CDR3 for alpha chain variable domain of TCR clone 254945 (TRAV3, TRAJ43)
CAVRDPNNDMRC

SEQ ID NO: 509890 - protein, 15 aa, Homo sapiens
  CDR3 for beta chain variable domain of TCR clone 254945 (TRBV27, TRBJ1-5)
CASSLGTGFDQPQHF

SEQ ID NO: 509891 - protein, 13 aa, Homo sapiens
  CDR3 for alpha chain variable domain of TCR clone 254946 (TRAV21, TRAJ10)
CAVPTGGGNKLTF

SEQ ID NO: 509892 - protein, 13 aa, Homo sapiens
  CDR3 for beta chain variable domain of TCR clone 254946 (TRBV12-4, TRBJ2-5)
CASSSVPQETQYF

SEQ ID NO: 509893 - protein, 14 aa, Homo sapiens
  CDR3 for alpha chain variable domain of TCR clone 254947 (TRAV38-2/DV8, TRAJ42)
CAYPEGGSQGNLIF

SEQ ID NO: 509894 - protein, 14 aa, Homo sapiens
  CDR3 for beta chain variable domain of TCR clone 254947 (TRBV7-2, TRBJ2-7)
CASSLPPGQGPQYF

SEQ ID NO: 509895 - protein, 15 aa, Homo sapiens
  CDR3 for alpha chain variable domain of TCR clone 254948 (TRAV16, TRAJ16)
CALQGGGSDVQKLLF

SEQ ID NO: 509896 - protein, 15 aa, Homo sapiens
  CDR3 for beta chain variable domain of TCR clone 254948 (TRBV20-1, TRBJ2-7)
CSARDRVSGMDEQYF

SEQ ID NO: 509897 - protein, 18 aa, Homo sapiens
  CDR3 for alpha chain variable domain of TCR clone 254949 (TRAV26-2, TRAJ54)
CIMRDVEVGIQGAQKLVF

SEQ ID NO: 509898 - protein, 17 aa, Homo sapiens
  CDR3 for beta chain variable domain of TCR clone 254949 (TRBV20-1, TRBJ1-5)
CSASLSPGQGGNQPQHF

SEQ ID NO: 509899 - protein, 11 aa, Homo sapiens
  CDR3 for alpha chain variable domain of TCR clone 254950 (TRAV3, TRAJ49)
CAPVTGNQFYF

SEQ ID NO: 509900 - protein, 16 aa, Homo sapiens
  CDR3 for beta chain variable domain of TCR clone 254950 (TRBV5-1, TRBJ2-3)
CASSVFPMSSTDTQYF

SEQ ID NO: 509901 - protein, 15 aa, Homo sapiens
  CDR3 for alpha chain variable domain of TCR clone 254951 (TRAV20, TRAJ53)
CAVQASGGSKYKLTF

SEQ ID NO: 509902 - protein, 16 aa, Homo sapiens
  CDR3 for beta chain variable domain of TCR clone 254951 (TRBV7-9, TRBJ1-2)
CASSLGFSSGEDGYTF

SEQ ID NO: 509903 - protein, 14 aa, Homo sapiens
  CDR3 for alpha chain variable domain of TCR clone 254952 (TRAV2, TRAJ9)
CAVEDRSGGFKTIF

SEQ ID NO: 509904 - protein, 13 aa, Homo sapiens
  CDR3 for beta chain variable domain of TCR clone 254952 (TRBV20-1, TRBJ2-3)
CSAPGVGADTQYF

SEQ ID NO: 509905 - protein, 10 aa, Homo sapiens
  CDR3 for alpha chain variable domain of TCR clone 254953 (TRAV30, TRAJ48)
CGIGNEKLTF

SEQ ID NO: 509906 - protein, 16 aa, Homo sapiens
  CDR3 for beta chain variable domain of TCR clone 254953 (TRBV11-2, TRBJ2-7)
CASSPLAGGPRYEQYF

SEQ ID NO: 509907 - protein, 11 aa, Homo sapiens
  CDR3 for alpha chain variable domain of TCR clone 254954 (TRAV12-3, TRAJ43)
CAMSVSNDMRF

SEQ ID NO: 509908 - protein, 14 aa, Homo sapiens
  CDR3 for beta chain variable domain of TCR clone 254954 (TRBV7-3, TRBJ2-7)
CASSLKADSYEQYF

SEQ ID NO: 509909 - protein, 12 aa, Homo sapiens
  CDR3 for alpha chain variable domain of TCR clone 254955 (TRAV20, TRAJ20)
CAVRVNDYKLRF

SEQ ID NO: 509910 - protein, 14 aa, Homo sapiens
  CDR3 for beta chain variable domain of TCR clone 254955 (TRBV20-1, TRBJ2-1)
CSAQIGGSANEQFF

SEQ ID NO: 509911 - protein, 14 aa, Homo sapiens
  CDR3 for alpha chain variable domain of TCR clone 254956 (TRAV1-2, TRAJ8)
CAVREDTCFQKLVF

SEQ ID NO: 509912 - protein, 16 aa, Homo sapiens
  CDR3 for beta chain variable domain of TCR clone 254956 (TRBV24-1, TRBJ2-3)
CATSDPGTGATDTQYF

SEQ ID NO: 509913 - protein, 16 aa, Homo sapiens
  CDR3 for alpha chain variable domain of TCR clone 254957 (TRAV8-3, TRAJ28)
CAVPPQRVAGSYQLTF

SEQ ID NO: 509914 - protein, 13 aa, Homo sapiens
  CDR3 for beta chain variable domain of TCR clone 254957 (TRBV7-6, TRBJ2-3)
CASSLRSDNTQYF

SEQ ID NO: 509915 - protein, 14 aa, Homo sapiens
  CDR3 for alpha chain variable domain of TCR clone 254958 (TRAV12-2, TRAJ13)
CAVKKTGGYQKVTF

SEQ ID NO: 509916 - protein, 19 aa, Homo sapiens
  CDR3 for beta chain variable domain of TCR clone 254958 (TRBV12-4, TRBJ2-1)
CASTLAFDPRDKEANEQFF

SEQ ID NO: 509917 - protein, 10 aa, Homo sapiens
  CDR3 for alpha chain variable domain of TCR clone 254959 (TRAV12-3, TRAJ49)
CAMNDDQFYF

SEQ ID NO: 509918 - protein, 13 aa, Homo sapiens
  CDR3 for beta chain variable domain of TCR clone 254959 (TRBV20-1, TRBJ1-1)
CSARGGGNTEAFF

SEQ ID NO: 509919 - protein, 16 aa, Homo sapiens
  CDR3 for alpha chain variable domain of TCR clone 254960 (TRAV30, TRAJ24)
CGTEIVDADSWGKFQF

SEQ ID NO: 509920 - protein, 14 aa, Homo sapiens
  CDR3 for beta chain variable domain of TCR clone 254960 (TRBV5-1, TRBJ1-5)
CASSLGQGAQPQHF

SEQ ID NO: 509921 - protein, 18 aa, Homo sapiens
  CDR3 for alpha chain variable domain of TCR clone 254961 (TRAV21, TRAJ53)
CAVKGGENSGGSNYKLTF

SEQ ID NO: 509922 - protein, 14 aa, Homo sapiens
  CDR3 for beta chain variable domain of TCR clone 254961 (TRBV13, TRBJ2-7)
CASSLKGASYEQYF

SEQ ID NO: 509923 - protein, 13 aa, Homo sapiens
  CDR3 for alpha chain variable domain of TCR clone 254962 (TRAV27, TRAJ6)
CAGGTRGSYIPTF

SEQ ID NO: 509924 - protein, 14 aa, Homo sapiens
  CDR3 for beta chain variable domain of TCR clone 254962 (TRBV19, TRBJ2-7)
CASSMGQGAIEQYF

SEQ ID NO: 509925 - protein, 13 aa, Homo sapiens
  CDR3 for alpha chain variable domain of TCR clone 254963 (TRAV26-1, TRAJ39)
CIVRVVAGNILTF

SEQ ID NO: 509926 - protein, 14 aa, Homo sapiens
  CDR3 for beta chain variable domain of TCR clone 254963 (TRBV20-1, TRBJ2-5)
CSARHQGIRETQYF

SEQ ID NO: 509927 - protein, 14 aa, Homo sapiens
  CDR3 for alpha chain variable domain of TCR clone 254964 (TRAV1-2, TRAJ16)
CAVKRFSDGQKLLF

SEQ ID NO: 509928 - protein, 16 aa, Homo sapiens
  CDR3 for beta chain variable domain of TCR clone 254964 (TRBV7-3, TRBJ2-2)
CASSLKRGTLSGELFF

SEQ ID NO: 509929 - protein, 14 aa, Homo sapiens
  CDR3 for alpha chain variable domain of TCR clone 254965 (TRAV8-2, TRAJ4)
CVVGSSGGYNKLIF

SEQ ID NO: 509930 - protein, 15 aa, Homo sapiens
  CDR3 for beta chain variable domain of TCR clone 254965 (TRBV4-1, TRBJ1-4)
CASSDTGGTNEKLFF

SEQ ID NO: 509931 - protein, 19 aa, Homo sapiens
  CDR3 for alpha chain variable domain of TCR clone 254966 (TRAV1-2, TRAJ26)
CLLPLCCERPDNYGQNFVF

SEQ ID NO: 509932 - protein, 12 aa, Homo sapiens
  CDR3 for beta chain variable domain of TCR clone 254966 (TRBV6-5, TRBJ2-2)
CASRTGTGELFF

SEQ ID NO: 509933 - protein, 12 aa, Homo sapiens
  CDR3 for alpha chain variable domain of TCR clone 254967 (TRAV21, TRAJ49)
CAVTNTGNQFYF

SEQ ID NO: 509934 - protein, 14 aa, Homo sapiens
  CDR3 for beta chain variable domain of TCR clone 254967 (TRBV7-9, TRBJ2-3)
CASSLEDGTDTQYF

SEQ ID NO: 509935 - protein, 12 aa, Homo sapiens
  CDR3 for alpha chain variable domain of TCR clone 254968 (TRAV21, TRAJ49)
CAVRNTGNQFYF

SEQ ID NO: 509936 - protein, 14 aa, Homo sapiens
  CDR3 for beta chain variable domain of TCR clone 254968 (TRBV12-5, TRBJ2-5)
CASGSRTHQETQYF

SEQ ID NO: 509937 - protein, 14 aa, Homo sapiens
  CDR3 for alpha chain variable domain of TCR clone 254969 (TRAV1-2, TRAJ8)
CAVREDTGFQTLVF

SEQ ID NO: 509938 - protein, 15 aa, Homo sapiens
  CDR3 for beta chain variable domain of TCR clone 254969 (TRBV12-4, TRBJ1-5)
CQQPTGRGSNQPQHF

SEQ ID NO: 509939 - protein, 14 aa, Homo sapiens
  CDR3 for alpha chain variable domain of TCR clone 254970 (TRAV2, TRAJ37)
CAVDFTSNTGKLIF

SEQ ID NO: 509940 - protein, 15 aa, Homo sapiens
  CDR3 for beta chain variable domain of TCR clone 254970 (TRBV20-1, TRBJ1-1)
CSANRGVTGSTEAFF

SEQ ID NO: 509941 - protein, 13 aa, Homo sapiens
  CDR3 for alpha chain variable domain of TCR clone 254971 (TRAV36/DV7, TRAJ34)
CAVGEVNTDKLIF

SEQ ID NO: 509942 - protein, 12 aa, Homo sapiens
  CDR3 for beta chain variable domain of TCR clone 254971 (TRBV24-1, TRBJ1-1)
CATLYPDTEAFF

SEQ ID NO: 509943 - protein, 11 aa, Homo sapiens
  CDR3 for alpha chain variable domain of TCR clone 254972 (TRAV2, TRAJ33)
CAVDSNYQLIW

SEQ ID NO: 509944 - protein, 15 aa, Homo sapiens
  CDR3 for beta chain variable domain of TCR clone 254972 (TRBV19, TRBJ1-2)
CASSVGQDLNYGYTF

SEQ ID NO: 509945 - protein, 13 aa, Homo sapiens
  CDR3 for alpha chain variable domain of TCR clone 254973 (TRAV13-1, TRAJ6)
CAASSGGSYIPTF

SEQ ID NO: 509946 - protein, 15 aa, Homo sapiens
  CDR3 for beta chain variable domain of TCR clone 254973 (TRBV19, TRBJ1-2)
CASTPGQVANYGYTF

SEQ ID NO: 509947 - protein, 13 aa, Homo sapiens
  CDR3 for alpha chain variable domain of TCR clone 254974 (TRAV3, TRAJ21)
CAVREQDFNKFYF

SEQ ID NO: 509948 - protein, 13 aa, Homo sapiens
  CDR3 for beta chain variable domain of TCR clone 254974 (TRBV9, TRBJ2-1)
CASSPSGGNEQFF

SEQ ID NO: 509949 - protein, 14 aa, Homo sapiens
  CDR3 for alpha chain variable domain of TCR clone 254975 (TRAV1-2, TRAJ16)
CAVNRFSDDQKLLF

SEQ ID NO: 509950 - protein, 15 aa, Homo sapiens
  CDR3 for beta chain variable domain of TCR clone 254975 (TRBV20-1, TRBJ2-7)
CSARDRVSGMDEQYF

SEQ ID NO: 509951 - protein, 21 aa, Homo sapiens
  CDR3 for alpha chain variable domain of TCR clone 254976 (TRAV26-1, TRAJ38)
CIADNAGNNHIQNPDPAVDQL

SEQ ID NO: 509952 - protein, 13 aa, Homo sapiens
  CDR3 for beta chain variable domain of TCR clone 254976 (TRBV20-1, TRBJ1-1)
CSARGGGNTEAFF

SEQ ID NO: 509953 - protein, 14 aa, Homo sapiens
  CDR3 for alpha chain variable domain of TCR clone 254977 (TRAV16, TRAJ17)
CALSGRAAGNKLTF

SEQ ID NO: 509954 - protein, 16 aa, Homo sapiens
  CDR3 for beta chain variable domain of TCR clone 254977 (TRBV19, TRBJ2-1)
CASSKAGPSSYNEQFF

SEQ ID NO: 509955 - protein, 14 aa, Homo sapiens
  CDR3 for alpha chain variable domain of TCR clone 254978 (TRAV8-6, TRAJ54)
CAVSDFQGAQKLVF

SEQ ID NO: 509956 - protein, 14 aa, Homo sapiens
  CDR3 for beta chain variable domain of TCR clone 254978 (TRBV19, TRBJ2-1)
CASPTFVLSGEQFF

SEQ ID NO: 509957 - protein, 13 aa, Homo sapiens
  CDR3 for alpha chain variable domain of TCR clone 254979 (TRAV30, TRAJ39)
CGTEKNAGNMLTF

SEQ ID NO: 509958 - protein, 12 aa, Homo sapiens
  CDR3 for beta chain variable domain of TCR clone 254979 (TRBV12-4, TRBJ2-5)
CASSSAQETQFF

SEQ ID NO: 509959 - protein, 17 aa, Homo sapiens
  CDR3 for alpha chain variable domain of TCR clone 254980 (TRAV3, TRAJ6)
CAVRDGPRAGGSYIPTF

SEQ ID NO: 509960 - protein, 14 aa, Homo sapiens
  CDR3 for beta chain variable domain of TCR clone 254980 (TRBV7-2, TRBJ2-7)
CASSPKASFYGQYF

SEQ ID NO: 509961 - protein, 14 aa, Homo sapiens
  CDR3 for alpha chain variable domain of TCR clone 254981 (TRAV12-2, TRAJ13)
CAVKKTGGYQKVTF

SEQ ID NO: 509962 - protein, 12 aa, Homo sapiens
  CDR3 for beta chain variable domain of TCR clone 254981 (TRBV12-4, TRBJ1-2)
CASSFIWIHLRF

SEQ ID NO: 509963 - protein, 15 aa, Homo sapiens
  CDR3 for alpha chain variable domain of TCR clone 254982 (TRAV13-1, TRAJ8)
CAASIPNTGFQKLVF

SEQ ID NO: 509964 - protein, 13 aa, Homo sapiens
  CDR3 for beta chain variable domain of TCR clone 254982 (TRBV10-3, TRBJ1-2)
CAISERDSYGYTF

SEQ ID NO: 509965 - protein, 15 aa, Homo sapiens
  CDR3 for alpha chain variable domain of TCR clone 254983 (TRAV40, TRAJ45)
CLLGDLGGGAGGLTF

SEQ ID NO: 509966 - protein, 13 aa, Homo sapiens
  CDR3 for beta chain variable domain of TCR clone 254983 (TRBV7-9, TRBJ1-2)
CASSLKQNYGYTF

SEQ ID NO: 509967 - protein, 16 aa, Homo sapiens
  CDR3 for alpha chain variable domain of TCR clone 254984 (TRAV12-3, TRAJ10)
CAMKKGITGGGNKITF

SEQ ID NO: 509968 - protein, 13 aa, Homo sapiens
  CDR3 for beta chain variable domain of TCR clone 254984 (TRBV7-2, TRBJ2-7)
CASSSPSGSEQYF

SEQ ID NO: 509969 - protein, 19 aa, Homo sapiens
  CDR3 for alpha chain variable domain of TCR clone 254985 (TRAV2, TRAJ20)
ILQVRVADAAVYRDCKLSF

SEQ ID NO: 509970 - protein, 13 aa, Homo sapiens
  CDR3 for beta chain variable domain of TCR clone 254985 (TRBV15, TRBJ1-6)
CATSGGLNSPLHF

SEQ ID NO: 509971 - protein, 15 aa, Homo sapiens
  CDR3 for alpha chain variable domain of TCR clone 254986 (TRAV16, TRAJ16)
CALQGGGSDGQKLLF

SEQ ID NO: 509972 - protein, 15 aa, Homo sapiens
  CDR3 for beta chain variable domain of TCR clone 254986 (TRBV7-2, TRBJ2-1)
CASSSGLAGGNEQFF

SEQ ID NO: 509973 - protein, 14 aa, Homo sapiens
  CDR3 for alpha chain variable domain of TCR clone 254987 (TRAV35, TRAJ22)
CAGLRPGSARQLTF

SEQ ID NO: 509974 - protein, 15 aa, Homo sapiens
  CDR3 for beta chain variable domain of TCR clone 254987 (TRBV28, TRBJ2-1)
CASSIIAGGRSEQFF

SEQ ID NO: 509975 - protein, 12 aa, Homo sapiens
  CDR3 for alpha chain variable domain of TCR clone 254988 (TRAV12-3, TRAJ40)
CAMSSGTYKYIF

SEQ ID NO: 509976 - protein, 20 aa, Homo sapiens
  CDR3 for beta chain variable domain of TCR clone 254988 (TRBV7-8, TRBJ2-2)
CASSPLFPGPTTHITGELFF

SEQ ID NO: 509977 - protein, 16 aa, Homo sapiens
  CDR3 for alpha chain variable domain of TCR clone 254989 (TRAV3, TRAJ21)
CAVRDIERGNFNKFYF

SEQ ID NO: 509978 - protein, 13 aa, Homo sapiens
  CDR3 for beta chain variable domain of TCR clone 254989 (TRBV27, TRBJ2-7)
CASSLTTWYEQYF

SEQ ID NO: 509979 - protein, 14 aa, Homo sapiens
  CDR3 for alpha chain variable domain of TCR clone 254990 (TRAV12-2, TRAJ9)
CAVNALEGGFKTIF

SEQ ID NO: 509980 - protein, 16 aa, Homo sapiens
  CDR3 for beta chain variable domain of TCR clone 254990 (TRBV19, TRBJ1-6)
CASSGAPVAGNSPLHF

SEQ ID NO: 509981 - protein, 10 aa, Homo sapiens
  CDR3 for alpha chain variable domain of TCR clone 254991 (TRAV16, TRAJ26)
CAPEELWSEF

SEQ ID NO: 509982 - protein, 15 aa, Homo sapiens
  CDR3 for beta chain variable domain of TCR clone 254991 (TRBV7-2, TRBJ2-3)
CASSSTGTSTDTQYF

SEQ ID NO: 509983 - protein, 14 aa, Homo sapiens
  CDR3 for alpha chain variable domain of TCR clone 254992 (TRAV8-3, TRAJ4)
CAVGAAGGYNKLIF

SEQ ID NO: 509984 - protein, 17 aa, Homo sapiens
  CDR3 for beta chain variable domain of TCR clone 254992 (TRBV2, TRBJ1-6)
CASSLRSGGLMTSPLHF

SEQ ID NO: 509985 - protein, 11 aa, Homo sapiens
  CDR3 for alpha chain variable domain of TCR clone 254993 (TRAV1-2, TRAJ20)
CALANDYKLSF

SEQ ID NO: 509986 - protein, 18 aa, Homo sapiens
  CDR3 for beta chain variable domain of TCR clone 254993 (TRBV20-1, TRBJ2-6)
CSAEATPTHGSGANVLTF

SEQ ID NO: 509987 - protein, 10 aa, Homo sapiens
  CDR3 for alpha chain variable domain of TCR clone 254994 (TRAV21, TRAJ31)
CAVDNARLMF

SEQ ID NO: 509988 - protein, 12 aa, Homo sapiens
  CDR3 for beta chain variable domain of TCR clone 254994 (TRBV11-2, TRBJ2-2)
CASSLGGGELFF

SEQ ID NO: 509989 - protein, 18 aa, Homo sapiens
  CDR3 for alpha chain variable domain of TCR clone 254995 (TRAV21, TRAJ52)
CAVRPSPAGGTSYGKLTF

SEQ ID NO: 509990 - protein, 16 aa, Homo sapiens
  CDR3 for beta chain variable domain of TCR clone 254995 (TRBV7-3, TRBJ2-1)
CASSLECYRSYNEQFF

SEQ ID NO: 509991 - protein, 12 aa, Homo sapiens
  CDR3 for alpha chain variable domain of TCR clone 254996 (TRAV13-1, TRAJ9)
CASHTGGFKTIF

SEQ ID NO: 509992 - protein, 18 aa, Homo sapiens
  CDR3 for beta chain variable domain of TCR clone 254996 (TRBV11-2, TRBJ2-3)
CASSLGGASRGAPNTQYL

SEQ ID NO: 509993 - protein, 13 aa, Homo sapiens
  CDR3 for alpha chain variable domain of TCR clone 254997 (TRAV35, TRAJ53)
CAGQESTNYKLTF

SEQ ID NO: 509994 - protein, 11 aa, Homo sapiens
  CDR3 for beta chain variable domain of TCR clone 254997 (TRBV29-1, TRBJ2-5)
CSEDRTGTQYF

SEQ ID NO: 509995 - protein, 17 aa, Homo sapiens
  CDR3 for alpha chain variable domain of TCR clone 254998 (TRAV3, TRAJ6)
CAVRDGPRAGGSYIPTF

SEQ ID NO: 509996 - protein, 15 aa, Homo sapiens
  CDR3 for beta chain variable domain of TCR clone 254998 (TRBV5-5, TRBJ1-5)
CASSLKGGGEQPQHF

SEQ ID NO: 509997 - protein, 19 aa, Homo sapiens
  CDR3 for alpha chain variable domain of TCR clone 254999 (TRAV30, TRAJ52)
CGTEANTNAGGTSYGKLTF

SEQ ID NO: 509998 - protein, 13 aa, Homo sapiens
  CDR3 for beta chain variable domain of TCR clone 254999 (TRBV7-9, TRBJ2-3)
CASSPGSTDTQYF

SEQ ID NO: 509999 - protein, 15 aa, Homo sapiens
  CDR3 for alpha chain variable domain of TCR clone 255000 (TRAV12-3, TRAJ6)
CAMSATTGGSYIPTF

SEQ ID NO: 510000 - protein, 16 aa, Homo sapiens
  CDR3 for beta chain variable domain of TCR clone 255000 (TRBV13, TRBJ2-2)
CASSHRTGEHTGELFF

SEQ ID NO: 510001 - protein, 12 aa, Homo sapiens
  CDR3 for alpha chain variable domain of TCR clone 255001 (TRAV12-3, TRAJ17)
CAMTLTGNKVTF

SEQ ID NO: 510002 - protein, 16 aa, Homo sapiens
  CDR3 for beta chain variable domain of TCR clone 255001 (TRBV27, TRBJ2-2)
CASSFRGLVRTGELFF

SEQ ID NO: 510003 - protein, 17 aa, Homo sapiens
  CDR3 for alpha chain variable domain of TCR clone 255002 (TRAV3, TRAJ42)
CAVRDRDIGGSQGNSIF

SEQ ID NO: 510004 - protein, 15 aa, Homo sapiens
  CDR3 for beta chain variable domain of TCR clone 255002 (TRBV4-1, TRBJ2-5)
CASSQWDLYQETQYF

SEQ ID NO: 510005 - protein, 16 aa, Homo sapiens
  CDR3 for alpha chain variable domain of TCR clone 255003 (TRAV16, TRAJ4)
CALSRMFSGGYNKLIF

SEQ ID NO: 510006 - protein, 16 aa, Homo sapiens
  CDR3 for beta chain variable domain of TCR clone 255003 (TRBV7-2, TRBJ2-3)
CASSLVALYSTDTQYF

SEQ ID NO: 510007 - protein, 12 aa, Homo sapiens
  CDR3 for alpha chain variable domain of TCR clone 255004 (TRAV1-1, TRAJ39)
CAVPVVGNMLTF

SEQ ID NO: 510008 - protein, 17 aa, Homo sapiens
  CDR3 for beta chain variable domain of TCR clone 255004 (TRBV5-1, TRBJ2-5)
CASSPVALGQNQETQYF

SEQ ID NO: 510009 - protein, 14 aa, Homo sapiens
  CDR3 for alpha chain variable domain of TCR clone 255005 (TRAV26-1, TRAJ45)
CIVRVVVGADGLTF

SEQ ID NO: 510010 - protein, 16 aa, Homo sapiens
  CDR3 for beta chain variable domain of TCR clone 255005 (TRBV7-9, TRBJ1-1)
CASSLTQVRSNTEAFF

SEQ ID NO: 510011 - protein, 14 aa, Homo sapiens
  CDR3 for alpha chain variable domain of TCR clone 255006 (TRAV13-2, TRAJ40)
CAELPTSGTYKYIF

SEQ ID NO: 510012 - protein, 16 aa, Homo sapiens
  CDR3 for beta chain variable domain of TCR clone 255006 (TRBV11-2, TRBJ1-2)
CASSLDTGGADYGYTF

SEQ ID NO: 510013 - protein, 18 aa, Homo sapiens
  CDR3 for alpha chain variable domain of TCR clone 255007 (TRAV12-3, TRAJ52)
CAMSVGGAGGTSYGKLTF

SEQ ID NO: 510014 - protein, 17 aa, Homo sapiens
  CDR3 for beta chain variable domain of TCR clone 255007 (TRBV13, TRBJ2-3)
CASSLSRVAGGRKTQYF

SEQ ID NO: 510015 - protein, 14 aa, Homo sapiens
  CDR3 for alpha chain variable domain of TCR clone 255008 (TRAV30, TRAJ33)
CGTVAPRSNYQLIW

SEQ ID NO: 510016 - protein, 14 aa, Homo sapiens
  CDR3 for beta chain variable domain of TCR clone 255008 (TRBV15, TRBJ2-3)
CATRSGTSTDTQYF

SEQ ID NO: 510017 - protein, 13 aa, Homo sapiens
  CDR3 for alpha chain variable domain of TCR clone 255009 (TRAV12-1, TRAJ20)
CVGQRFNDYKLSF

SEQ ID NO: 510018 - protein, 14 aa, Homo sapiens
  CDR3 for beta chain variable domain of TCR clone 255009 (TRBV6-3, TRBJ1-5)
CASSYSRFAQHQHF

SEQ ID NO: 510019 - protein, 14 aa, Homo sapiens
  CDR3 for alpha chain variable domain of TCR clone 255010 (TRAV16, TRAJ31)
CSKWRRGDNVRLMF

SEQ ID NO: 510020 - protein, 16 aa, Homo sapiens
  CDR3 for beta chain variable domain of TCR clone 255010 (TRBV28, TRBJ2-7)
CASSLFFETGGPEQYF

SEQ ID NO: 510021 - protein, 14 aa, Homo sapiens
  CDR3 for alpha chain variable domain of TCR clone 255011 (TRAV26-1, TRAJ38)
CIADNAGNNRKLIW

SEQ ID NO: 510022 - protein, 13 aa, Homo sapiens
  CDR3 for beta chain variable domain of TCR clone 255011 (TRBV20-1, TRBJ2-3)
CSAIYPGADTQYF

SEQ ID NO: 510023 - protein, 12 aa, Homo sapiens
  CDR3 for alpha chain variable domain of TCR clone 255012 (TRAV26-2, TRAJ21)
CILKGNFNKFYF

SEQ ID NO: 510024 - protein, 12 aa, Homo sapiens
  CDR3 for beta chain variable domain of TCR clone 255012 (TRBV12-4, TRBJ2-7)
CASSLGGYEQYL

SEQ ID NO: 510025 - protein, 17 aa, Homo sapiens
  CDR3 for alpha chain variable domain of TCR clone 255013 (TRAV13-1, TRAJ52)
CAAGRNAGGTSSGKLTF

SEQ ID NO: 510026 - protein, 15 aa, Homo sapiens
  CDR3 for beta chain variable domain of TCR clone 255013 (TRBV6-3, TRBJ2-7)
CASSSPGTVFYEQYF

SEQ ID NO: 510027 - protein, 13 aa, Homo sapiens
  CDR3 for alpha chain variable domain of TCR clone 255014 (TRAV12-2, TRAJ27)
CAVYNTNAGKSTF

SEQ ID NO: 510028 - protein, 19 aa, Homo sapiens
  CDR3 for beta chain variable domain of TCR clone 255014 (TRBV25-1, TRBJ2-2)
CAILVYRVDRGRKTGELFF

SEQ ID NO: 510029 - protein, 13 aa, Homo sapiens
  CDR3 for alpha chain variable domain of TCR clone 255015 (TRAV36/DV7, TRAJ37)
CAVFSSNTGKLIF

SEQ ID NO: 510030 - protein, 14 aa, Homo sapiens
  CDR3 for beta chain variable domain of TCR clone 255015 (TRBV19, TRBJ2-1)
CARGARSFQWEQFF

SEQ ID NO: 510031 - protein, 14 aa, Homo sapiens
  CDR3 for alpha chain variable domain of TCR clone 255016 (TRAV16, TRAJ57)
CALPTQGGSEKLGF

SEQ ID NO: 510032 - protein, 15 aa, Homo sapiens
  CDR3 for beta chain variable domain of TCR clone 255016 (TRBV28, TRBJ1-3)
CASWGGHLSGNTIYF

SEQ ID NO: 510033 - protein, 13 aa, Homo sapiens
  CDR3 for alpha chain variable domain of TCR clone 255017 (TRAV35, TRAJ48)
CAGHEFGNEKLTF

SEQ ID NO: 510034 - protein, 13 aa, Homo sapiens
  CDR3 for beta chain variable domain of TCR clone 255017 (TRBV5-1, TRBJ1-5)
CASSLAQDQPQHF

SEQ ID NO: 510035 - protein, 14 aa, Homo sapiens
  CDR3 for alpha chain variable domain of TCR clone 255018 (TRAV1-1, TRAJ23)
CAVSIYNQGGKLIF

SEQ ID NO: 510036 - protein, 14 aa, Homo sapiens
  CDR3 for beta chain variable domain of TCR clone 255018 (TRBV7-2, TRBJ1-5)
CASSTQGAGQPQHF

SEQ ID NO: 510037 - protein, 12 aa, Homo sapiens
  CDR3 for alpha chain variable domain of TCR clone 255019 (TRAV1-2, TRAJ9)
CAGYTGGFKTIF

SEQ ID NO: 510038 - protein, 14 aa, Homo sapiens
  CDR3 for beta chain variable domain of TCR clone 255019 (TRBV12-4, TRBJ1-1)
CASSLGTGGTEAFF

SEQ ID NO: 510039 - protein, 14 aa, Homo sapiens
  CDR3 for alpha chain variable domain of TCR clone 255020 (TRAV12-2, TRAJ40)
CAVKIPSGTYKYIF

SEQ ID NO: 510040 - protein, 12 aa, Homo sapiens
  CDR3 for beta chain variable domain of TCR clone 255020 (TRBV7-9, TRBJ2-7)
CASRTGFDEQYF

SEQ ID NO: 510041 - protein, 16 aa, Homo sapiens
  CDR3 for alpha chain variable domain of TCR clone 255021 (TRAV1-2, TRAJ6)
CAVRDQGTGRSYIPTF

SEQ ID NO: 510042 - protein, 13 aa, Homo sapiens
  CDR3 for beta chain variable domain of TCR clone 255021 (TRBV12-4, TRBJ1-2)
CASSLRQGKGYTF

SEQ ID NO: 510043 - protein, 18 aa, Homo sapiens
  CDR3 for alpha chain variable domain of TCR clone 255022 (TRAV8-3, TRAJ6)
CAVGAEHQEEATYLHLEE

SEQ ID NO: 510044 - protein, 14 aa, Homo sapiens
  CDR3 for beta chain variable domain of TCR clone 255022 (TRBV6-6, TRBJ2-7)
CASSDSGAGYEQFF

SEQ ID NO: 510045 - protein, 17 aa, Homo sapiens
  CDR3 for alpha chain variable domain of TCR clone 255023 (TRAV13-1, TRAJ5)
CSNPSLSRDTGRRALTF

SEQ ID NO: 510046 - protein, 17 aa, Homo sapiens
  CDR3 for beta chain variable domain of TCR clone 255023 (TRBV24-1, TRBJ2-1)
YATSDVSTSGTYNEQFF

SEQ ID NO: 510047 - protein, 11 aa, Homo sapiens
  CDR3 for alpha chain variable domain of TCR clone 255024 (TRAV1-2, TRAJ20)
CAVSNDHKLSF

SEQ ID NO: 510048 - protein, 16 aa, Homo sapiens
  CDR3 for beta chain variable domain of TCR clone 255024 (TRBV27, TRBJ1-1)
CASSLLAGTGETEAFF

SEQ ID NO: 510049 - protein, 18 aa, Homo sapiens
  CDR3 for alpha chain variable domain of TCR clone 255025 (TRAV21, TRAJ52)
CAVRPSPAGGTSYGKLTF

SEQ ID NO: 510050 - protein, 17 aa, Homo sapiens
  CDR3 for beta chain variable domain of TCR clone 255025 (TRBV13, TRBJ2-3)
CASSLSRVAGGRNSQYL

SEQ ID NO: 510051 - protein, 15 aa, Homo sapiens
  CDR3 for alpha chain variable domain of TCR clone 255026 (TRAV2, TRAJ22)
CAVPSRGGSARQLTF

SEQ ID NO: 510052 - protein, 11 aa, Homo sapiens
  CDR3 for beta chain variable domain of TCR clone 255026 (TRBV27, TRBJ2-3)
CAISLGDTQYF

SEQ ID NO: 510053 - protein, 13 aa, Homo sapiens
  CDR3 for alpha chain variable domain of TCR clone 255027 (TRAV1-2, TRAJ12)
CAVSMDSSYKLIF

SEQ ID NO: 510054 - protein, 14 aa, Homo sapiens
  CDR3 for beta chain variable domain of TCR clone 255027 (TRBV11-2, TRBJ2-7)
CASSLGAGAYEQYF

SEQ ID NO: 510055 - protein, 17 aa, Homo sapiens
  CDR3 for alpha chain variable domain of TCR clone 255028 (TRAV3, TRAJ6)
CAVRDGPRAGGRYIPNF

SEQ ID NO: 510056 - protein, 14 aa, Homo sapiens
  CDR3 for beta chain variable domain of TCR clone 255028 (TRBV7-2, TRBJ2-7)
CASSPKTSFYEQYF

SEQ ID NO: 510057 - protein, 17 aa, Homo sapiens
  CDR3 for alpha chain variable domain of TCR clone 255029 (TRAV13-1, TRAJ28)
CAASHPYSGAGSYQLTF

SEQ ID NO: 510058 - protein, 12 aa, Homo sapiens
  CDR3 for beta chain variable domain of TCR clone 255029 (TRBV11-2, TRBJ2-2)
CASSLPTEELFF

SEQ ID NO: 510059 - protein, 16 aa, Homo sapiens
  CDR3 for alpha chain variable domain of TCR clone 255030 (TRAV23/DV6, TRAJ9)
CAASMGGNTGGFKTIF

SEQ ID NO: 510060 - protein, 17 aa, Homo sapiens
  CDR3 for beta chain variable domain of TCR clone 255030 (TRBV13, TRBJ2-3)
CASSLSRVAGGRNTQYF

SEQ ID NO: 510061 - protein, 14 aa, Homo sapiens
  CDR3 for alpha chain variable domain of TCR clone 255031 (TRAV8-1, TRAJ22)
CAAPSSGSARQLTF

SEQ ID NO: 510062 - protein, 16 aa, Homo sapiens
  CDR3 for beta chain variable domain of TCR clone 255031 (TRBV7-9, TRBJ2-1)
CASSDVAGGSYNEQFF

SEQ ID NO: 510063 - protein, 14 aa, Homo sapiens
  CDR3 for alpha chain variable domain of TCR clone 255032 (TRAV1-1, TRAJ27)
CAVIYNTNAGKSTF

SEQ ID NO: 510064 - protein, 15 aa, Homo sapiens
  CDR3 for beta chain variable domain of TCR clone 255032 (TRBV20-1, TRBJ1-2)
CSARAPSRGAYGYTF

SEQ ID NO: 510065 - protein, 18 aa, Homo sapiens
  CDR3 for alpha chain variable domain of TCR clone 255033 (TRAV17, TRAJ45)
CATSLDLYSGGGAEGLTF

SEQ ID NO: 510066 - protein, 13 aa, Homo sapiens
  CDR3 for beta chain variable domain of TCR clone 255033 (TRBV10-3, TRBJ2-7)
CASKLAVNYEQYF

SEQ ID NO: 510067 - protein, 14 aa, Homo sapiens
  CDR3 for alpha chain variable domain of TCR clone 255034 (TRAV13-1, TRAJ42)
STSVRRGSQGNLIF

SEQ ID NO: 510068 - protein, 13 aa, Homo sapiens
  CDR3 for beta chain variable domain of TCR clone 255034 (TRBV2, TRBJ1-4)
CASSELGVEKLFF

SEQ ID NO: 510069 - protein, 22 aa, Homo sapiens
  CDR3 for alpha chain variable domain of TCR clone 255035 (TRAV4, )
CLVGTHNYDNQNPDPAVYQLRD

SEQ ID NO: 510070 - protein, 17 aa, Homo sapiens
  CDR3 for beta chain variable domain of TCR clone 255035 (TRBV24-1, TRBJ2-1)
CATSDVSTSGTYNEQFF

SEQ ID NO: 510071 - protein, 13 aa, Homo sapiens
  CDR3 for alpha chain variable domain of TCR clone 255036 (TRAV8-6, TRAJ49)
CAGITNTGNQVYF

SEQ ID NO: 510072 - protein, 14 aa, Homo sapiens
  CDR3 for beta chain variable domain of TCR clone 255036 (TRBV5-1, TRBJ2-7)
CASSRGESLYEQYF

SEQ ID NO: 510073 - protein, 12 aa, Homo sapiens
  CDR3 for alpha chain variable domain of TCR clone 255037 (TRAV8-4, TRAJ43)
CAVSVNNNDMRF

SEQ ID NO: 510074 - protein, 16 aa, Homo sapiens
  CDR3 for beta chain variable domain of TCR clone 255037 (TRBV7-3, TRBJ2-2)
CASSLKRGTLSGELFF

SEQ ID NO: 510075 - protein, 16 aa, Homo sapiens
  CDR3 for alpha chain variable domain of TCR clone 255038 (TRAV3, TRAJ10)
CAVRDMRAGGGNKLTF

SEQ ID NO: 510076 - protein, 16 aa, Homo sapiens
  CDR3 for beta chain variable domain of TCR clone 255038 (TRBV19, TRBJ2-7)
CASSPALGQGLYEQYF

SEQ ID NO: 510077 - protein, 13 aa, Homo sapiens
  CDR3 for alpha chain variable domain of TCR clone 255039 (TRAV12-1, TRAJ22)
CVVPSGSARQLTF

SEQ ID NO: 510078 - protein, 13 aa, Homo sapiens
  CDR3 for beta chain variable domain of TCR clone 255039 (TRBV7-3, TRBJ1-2)
CASSLKRGYGYTF

SEQ ID NO: 510079 - protein, 19 aa, Homo sapiens
  CDR3 for alpha chain variable domain of TCR clone 255040 (TRAV1-2, TRAJ26)
CLLPLCCERPDNYVQNFVF

SEQ ID NO: 510080 - protein, 15 aa, Homo sapiens
  CDR3 for beta chain variable domain of TCR clone 255040 (TRBV27, TRBJ2-1)
CASSNGGGSSNEQFF

SEQ ID NO: 510081 - protein, 16 aa, Homo sapiens
  CDR3 for alpha chain variable domain of TCR clone 255041 (TRAV3, TRAJ10)
CAVRDMRAGGGNKLTF

SEQ ID NO: 510082 - protein, 13 aa, Homo sapiens
  CDR3 for beta chain variable domain of TCR clone 255041 (TRBV4-2, TRBJ1-1)
CARSQAGNTEAFF

SEQ ID NO: 510083 - protein, 14 aa, Homo sapiens
  CDR3 for alpha chain variable domain of TCR clone 255042 (TRAV35, TRAJ41)
CAGQASVRRNALNF

SEQ ID NO: 510084 - protein, 14 aa, Homo sapiens
  CDR3 for beta chain variable domain of TCR clone 255042 (TRBV20-1, TRBJ1-2)
CSASEQGAVYVDTF

SEQ ID NO: 510085 - protein, 14 aa, Homo sapiens
  CDR3 for alpha chain variable domain of TCR clone 255043 (TRAV17, TRAJ16)
CATADFSDGQKLLF

SEQ ID NO: 510086 - protein, 12 aa, Homo sapiens
  CDR3 for beta chain variable domain of TCR clone 255043 (TRBV18, TRBJ1-4)
CASSPSREKLFF

SEQ ID NO: 510087 - protein, 16 aa, Homo sapiens
  CDR3 for alpha chain variable domain of TCR clone 255044 (TRAV35, TRAJ28)
CAGQRYSGAGIYQLTF

SEQ ID NO: 510088 - protein, 13 aa, Homo sapiens
  CDR3 for beta chain variable domain of TCR clone 255044 (TRBV19, TRBJ1-2)
CASSQGQVYGYTF

SEQ ID NO: 510089 - protein, 14 aa, Homo sapiens
  CDR3 for alpha chain variable domain of TCR clone 255045 (TRAV12-2, TRAJ45)
CAVNIGGGANGLTF

SEQ ID NO: 510090 - protein, 13 aa, Homo sapiens
  CDR3 for beta chain variable domain of TCR clone 255045 (TRBV19, TRBJ2-2)
CASSIWSTGELFF

SEQ ID NO: 510091 - protein, 13 aa, Homo sapiens
  CDR3 for alpha chain variable domain of TCR clone 255046 (TRAV17, TRAJ31)
CATDEDNNARLMF

SEQ ID NO: 510092 - protein, 14 aa, Homo sapiens
  CDR3 for beta chain variable domain of TCR clone 255046 (TRBV11-2, TRBJ2-1)
CASSPSRQGGGRFF

SEQ ID NO: 510093 - protein, 14 aa, Homo sapiens
  CDR3 for alpha chain variable domain of TCR clone 255047 (TRAV12-3, TRAJ28)
CAMWSGAGGYQLTF

SEQ ID NO: 510094 - protein, 14 aa, Homo sapiens
  CDR3 for beta chain variable domain of TCR clone 255047 (TRBV19, TRBJ1-5)
CASSLSGGSQPQHF

SEQ ID NO: 510095 - protein, 11 aa, Homo sapiens
  CDR3 for alpha chain variable domain of TCR clone 255048 (TRAV21, TRAJ23)
CAPQRRGKLIF

SEQ ID NO: 510096 - protein, 14 aa, Homo sapiens
  CDR3 for beta chain variable domain of TCR clone 255048 (TRBV11-2, TRBJ2-3)
CASSRLARTDTQYF

SEQ ID NO: 510097 - protein, 13 aa, Homo sapiens
  CDR3 for alpha chain variable domain of TCR clone 255049 (TRAV2, TRAJ15)
CAVASQAGTALIF

SEQ ID NO: 510098 - protein, 17 aa, Homo sapiens
  CDR3 for beta chain variable domain of TCR clone 255049 (TRBV20-1, TRBJ2-2)
CSASGSGQGGLTVELFF

SEQ ID NO: 510099 - protein, 12 aa, Homo sapiens
  CDR3 for alpha chain variable domain of TCR clone 255050 (TRAV3, TRAJ39)
CAGIEWSNMLTL

SEQ ID NO: 510100 - protein, 14 aa, Homo sapiens
  CDR3 for beta chain variable domain of TCR clone 255050 (TRBV7-8, TRBJ2-3)
CASSFPDGQDTQYF

SEQ ID NO: 510101 - protein, 14 aa, Homo sapiens
  CDR3 for alpha chain variable domain of TCR clone 255051 (TRAV17, TRAJ35)
CATDRPGFGNVLHC

SEQ ID NO: 510102 - protein, 15 aa, Homo sapiens
  CDR3 for beta chain variable domain of TCR clone 255051 (TRBV4-3, TRBJ2-7)
CASSQGGRGIYEQYF

SEQ ID NO: 510103 - protein, 11 aa, Homo sapiens
  CDR3 for alpha chain variable domain of TCR clone 255052 (TRAV3, TRAJ21)
CAVGNFNKFYF

SEQ ID NO: 510104 - protein, 14 aa, Homo sapiens
  CDR3 for beta chain variable domain of TCR clone 255052 (TRBV7-2, TRBJ1-2)
CASSQTGSTYGYTF

SEQ ID NO: 510105 - protein, 11 aa, Homo sapiens
  CDR3 for alpha chain variable domain of TCR clone 255053 (TRAV27, TRAJ45)
CAGDQEEVLTD

SEQ ID NO: 510106 - protein, 17 aa, Homo sapiens
  CDR3 for beta chain variable domain of TCR clone 255053 (TRBV11-2, TRBJ2-1)
CASSLYPPGVEYNEQFF

SEQ ID NO: 510107 - protein, 13 aa, Homo sapiens
  CDR3 for alpha chain variable domain of TCR clone 255054 (TRAV8-4, TRAJ9)
CAVSKSGGFKTIF

SEQ ID NO: 510108 - protein, 14 aa, Homo sapiens
  CDR3 for beta chain variable domain of TCR clone 255054 (TRBV18, TRBJ2-7)
CASSPGQDSYEQYF

SEQ ID NO: 510109 - protein, 15 aa, Homo sapiens
  CDR3 for alpha chain variable domain of TCR clone 255055 (TRAV27, TRAJ38)
CAARRNAGNNRKLIW

SEQ ID NO: 510110 - protein, 13 aa, Homo sapiens
  CDR3 for beta chain variable domain of TCR clone 255055 (TRBV12-5, TRBJ2-3)
CASGDRQSDTQYY

SEQ ID NO: 510111 - protein, 15 aa, Homo sapiens
  CDR3 for alpha chain variable domain of TCR clone 255056 (TRAV12-3, TRAJ6)
CAMSATTGGSYIPTF

SEQ ID NO: 510112 - protein, 14 aa, Homo sapiens
  CDR3 for beta chain variable domain of TCR clone 255056 (TRBV11-3, TRBJ2-1)
CASSATTSGSIQFF

SEQ ID NO: 510113 - protein, 12 aa, Homo sapiens
  CDR3 for alpha chain variable domain of TCR clone 255057 (TRAV13-2, TRAJ23)
CAERHRGGKLIF

SEQ ID NO: 510114 - protein, 14 aa, Homo sapiens
  CDR3 for beta chain variable domain of TCR clone 255057 (TRBV2, TRBJ2-1)
CASSEALIYNEQFF

SEQ ID NO: 510115 - protein, 13 aa, Homo sapiens
  CDR3 for alpha chain variable domain of TCR clone 255058 (TRAV2, TRAJ15)
CAVASQAGTALIF

SEQ ID NO: 510116 - protein, 15 aa, Homo sapiens
  CDR3 for beta chain variable domain of TCR clone 255058 (TRBV5-1, TRBJ2-3)
CASSVTSGSTDTQYF

SEQ ID NO: 510117 - protein, 19 aa, Homo sapiens
  CDR3 for alpha chain variable domain of TCR clone 255059 (TRAV38-1, TRAJ53)
CASMKHVLESGGSNYKLTF

SEQ ID NO: 510118 - protein, 13 aa, Homo sapiens
  CDR3 for beta chain variable domain of TCR clone 255059 (TRBV19, TRBJ2-7)
CASSPRQSYEQYF

SEQ ID NO: 510119 - protein, 10 aa, Homo sapiens
  CDR3 for alpha chain variable domain of TCR clone 255060 (TRAV23/DV6, TRAJ57)
CAASSTLSQG

SEQ ID NO: 510120 - protein, 10 aa, Homo sapiens
  CDR3 for beta chain variable domain of TCR clone 255060 (TRBV25-1, TRBJ1-1)
HLGGNTEAFF

SEQ ID NO: 510121 - protein, 13 aa, Homo sapiens
  CDR3 for alpha chain variable domain of TCR clone 255061 (TRAV2, TRAJ40)
CAVVTSGTYKYIF

SEQ ID NO: 510122 - protein, 10 aa, Homo sapiens
  CDR3 for beta chain variable domain of TCR clone 255061 (TRBV19, TRBJ2-1)
TFVLSGEQFF

SEQ ID NO: 510123 - protein, 15 aa, Homo sapiens
  CDR3 for alpha chain variable domain of TCR clone 255062 (TRAV14/DV4, TRAJ10)
CAMRELTGGGNKLTF

SEQ ID NO: 510124 - protein, 18 aa, Homo sapiens
  CDR3 for beta chain variable domain of TCR clone 255062 (TRBV7-9, TRBJ2-7)
CASSVTTSGSRTWYEQYF

SEQ ID NO: 510125 - protein, 23 aa, Homo sapiens
  CDR3 for alpha chain variable domain of TCR clone 255063 (TRAV25, TRAJ26)
PAHHSHPDYRCRNRGVYGQNFVF

SEQ ID NO: 510126 - protein, 15 aa, Homo sapiens
  CDR3 for beta chain variable domain of TCR clone 255063 (TRBV9, TRBJ1-6)
CASSVAGTGDSPLHF

SEQ ID NO: 510127 - protein, 13 aa, Homo sapiens
  CDR3 for alpha chain variable domain of TCR clone 255064 (TRAV21, TRAJ5)
CCEKATGRRALTF

SEQ ID NO: 510128 - protein, 16 aa, Homo sapiens
  CDR3 for beta chain variable domain of TCR clone 255064 (TRBV18, TRBJ2-7)
CASSPRSQGISYEQYF

SEQ ID NO: 510129 - protein, 15 aa, Homo sapiens
  CDR3 for alpha chain variable domain of TCR clone 255065 (TRAV8-1, TRAJ6)
CAVNAGAGGSYIPTF

SEQ ID NO: 510130 - protein, 16 aa, Homo sapiens
  CDR3 for beta chain variable domain of TCR clone 255065 (TRBV25-1, TRBJ1-6)
CASSLSADISPLHLGT

SEQ ID NO: 510131 - protein, 12 aa, Homo sapiens
  CDR3 for alpha chain variable domain of TCR clone 255066 (TRAV21, TRAJ11)
CAATSGYSTLTF

SEQ ID NO: 510132 - protein, 13 aa, Homo sapiens
  CDR3 for beta chain variable domain of TCR clone 255066 (TRBV7-8, TRBJ2-1)
CASSLERLGEQFF

SEQ ID NO: 510133 - protein, 14 aa, Homo sapiens
  CDR3 for alpha chain variable domain of TCR clone 255067 (TRAV26-1, TRAJ44)
CIVRPTGTASKLTF

SEQ ID NO: 510134 - protein, 15 aa, Homo sapiens
  CDR3 for beta chain variable domain of TCR clone 255067 (TRBV7-9, TRBJ1-6)
CASSAPGRGNSPLHF

SEQ ID NO: 510135 - protein, 13 aa, Homo sapiens
  CDR3 for alpha chain variable domain of TCR clone 255068 (TRAV27, TRAJ41)
CAGEGNSGYALNF

SEQ ID NO: 510136 - protein, 14 aa, Homo sapiens
  CDR3 for beta chain variable domain of TCR clone 255068 (TRBV5-5, TRBJ1-5)
CASSGQGVDQPQHF

SEQ ID NO: 510137 - protein, 14 aa, Homo sapiens
  CDR3 for alpha chain variable domain of TCR clone 255069 (TRAV1-2, TRAJ16)
CAVNRFSDAQKLLF

SEQ ID NO: 510138 - protein, 13 aa, Homo sapiens
  CDR3 for beta chain variable domain of TCR clone 255069 (TRBV7-3, TRBJ2-2)
CASSLNVLGELFF

SEQ ID NO: 510139 - protein, 17 aa, Homo sapiens
  CDR3 for alpha chain variable domain of TCR clone 255070 (TRAV4, TRAJ13)
CLVGLQGSSGGYQKVTF

SEQ ID NO: 510140 - protein, 13 aa, Homo sapiens
  CDR3 for beta chain variable domain of TCR clone 255070 (TRBV10-3, TRBJ2-7)
CASKLAVNYEQYF

SEQ ID NO: 510141 - protein, 14 aa, Homo sapiens
  CDR3 for alpha chain variable domain of TCR clone 255071 (TRAV2, TRAJ9)
CAVEDRSGGFKTIF

SEQ ID NO: 510142 - protein, 15 aa, Homo sapiens
  CDR3 for beta chain variable domain of TCR clone 255071 (TRBV12-4, TRBJ2-7)
CASSQTGAISYEQYF

SEQ ID NO: 510143 - protein, 18 aa, Homo sapiens
  CDR3 for alpha chain variable domain of TCR clone 255072 (TRAV21, TRAJ52)
RSVRPSPAGGTSYGKLTF

SEQ ID NO: 510144 - protein, 15 aa, Homo sapiens
  CDR3 for beta chain variable domain of TCR clone 255072 (TRBV19, TRBJ1-1)
CASTSGQIQNTEAFF

SEQ ID NO: 510145 - protein, 13 aa, Homo sapiens
  CDR3 for alpha chain variable domain of TCR clone 255073 (TRAV2, TRAJ39)
TTVHNNAGNMLTF

SEQ ID NO: 510146 - protein, 16 aa, Homo sapiens
  CDR3 for beta chain variable domain of TCR clone 255073 (TRBV24-1, TRBJ2-3)
CATSRYRDRDTDTQYF

SEQ ID NO: 510147 - protein, 16 aa, Homo sapiens
  CDR3 for alpha chain variable domain of TCR clone 255074 (TRAV30, TRAJ24)
CGTEIVDADSWGKFKF

SEQ ID NO: 510148 - protein, 14 aa, Homo sapiens
  CDR3 for beta chain variable domain of TCR clone 255074 (TRBV9, TRBJ2-4)
CASSPSGTSGFQYF

SEQ ID NO: 510149 - protein, 15 aa, Homo sapiens
  CDR3 for alpha chain variable domain of TCR clone 255075 (TRAV27, TRAJ38)
CAARRNAGNNRKLIW

SEQ ID NO: 510150 - protein, 14 aa, Homo sapiens
  CDR3 for beta chain variable domain of TCR clone 255075 (TRBV11-2, TRBJ1-2)
CASSLYRGNYGYTF

SEQ ID NO: 510151 - protein, 11 aa, Homo sapiens
  CDR3 for alpha chain variable domain of TCR clone 255076 (TRAV3, TRAJ21)
CAVGNVNTFYF

SEQ ID NO: 510152 - protein, 16 aa, Homo sapiens
  CDR3 for beta chain variable domain of TCR clone 255076 (TRBV19, TRBJ2-1)
CASSKAGPSSYNEQFF

SEQ ID NO: 510153 - protein, 15 aa, Homo sapiens
  CDR3 for alpha chain variable domain of TCR clone 255077 (TRAV4, TRAJ10)
CLVVREGGGGNKLTF

SEQ ID NO: 510154 - protein, 14 aa, Homo sapiens
  CDR3 for beta chain variable domain of TCR clone 255077 (TRBV4-1, TRBJ2-2)
CASSQAVNTGELFF

SEQ ID NO: 510155 - protein, 14 aa, Homo sapiens
  CDR3 for alpha chain variable domain of TCR clone 255078 (TRAV16, TRAJ4)
CALHFSGGYNKLIF

SEQ ID NO: 510156 - protein, 12 aa, Homo sapiens
  CDR3 for beta chain variable domain of TCR clone 255078 (TRBV7-2, TRBJ2-7)
CASSIKREEQYF

SEQ ID NO: 510157 - protein, 14 aa, Homo sapiens
  CDR3 for alpha chain variable domain of TCR clone 255079 (TRAV12-2, TRAJ40)
CAVKIPSGTYKYIF

SEQ ID NO: 510158 - protein, 14 aa, Homo sapiens
  CDR3 for beta chain variable domain of TCR clone 255079 (TRBV20-1, TRBJ1-1)
WSAQTRIGGTEAFF

SEQ ID NO: 510159 - protein, 11 aa, Homo sapiens
  CDR3 for alpha chain variable domain of TCR clone 255080 (TRAV2, TRAJ13)
CASGGYQKVTF

SEQ ID NO: 510160 - protein, 11 aa, Homo sapiens
  CDR3 for beta chain variable domain of TCR clone 255080 (TRBV5-6, TRBJ2-5)
CASSLGRTQYF

SEQ ID NO: 510161 - protein, 13 aa, Homo sapiens
  CDR3 for alpha chain variable domain of TCR clone 255081 (TRAV20, TRAJ37)
CAGCSSNTGKLIF

SEQ ID NO: 510162 - protein, 14 aa, Homo sapiens
  CDR3 for beta chain variable domain of TCR clone 255081 (TRBV7-9, TRBJ2-1)
CASSPRDSLYEQFF

SEQ ID NO: 510163 - protein, 20 aa, Homo sapiens
  CDR3 for alpha chain variable domain of TCR clone 255082 (TRAV21, TRAJ22)
SLVTQPPTLKSSGSARQLTF

SEQ ID NO: 510164 - protein, 16 aa, Homo sapiens
  CDR3 for beta chain variable domain of TCR clone 255082 (TRBV7-3, TRBJ2-2)
CASSLKRGTLSGKLFF

SEQ ID NO: 510165 - protein, 12 aa, Homo sapiens
  CDR3 for alpha chain variable domain of TCR clone 255083 (TRAV2, TRAJ10)
CASTGGGNKLTF

SEQ ID NO: 510166 - protein, 13 aa, Homo sapiens
  CDR3 for beta chain variable domain of TCR clone 255083 (TRBV28, TRBJ2-7)
CASTPGLAGEQYF

SEQ ID NO: 510167 - protein, 17 aa, Homo sapiens
  CDR3 for alpha chain variable domain of TCR clone 255084 (TRAV12-2, TRAJ4)
CAVNVRPVSGGYNKLIF

SEQ ID NO: 510168 - protein, 20 aa, Homo sapiens
  CDR3 for beta chain variable domain of TCR clone 255084 (TRBV6-3, TRBJ2-1)
CTSVPAVTLPGLGGLDEQFF

SEQ ID NO: 510169 - protein, 11 aa, Homo sapiens
  CDR3 for alpha chain variable domain of TCR clone 255085 (TRAV12-3, TRAJ41)
CAMNAREALNF

SEQ ID NO: 510170 - protein, 15 aa, Homo sapiens
  CDR3 for beta chain variable domain of TCR clone 255085 (TRBV7-6, TRBJ2-7)
CASSGRRDTFGEQYF

SEQ ID NO: 510171 - protein, 15 aa, Homo sapiens
  CDR3 for alpha chain variable domain of TCR clone 255086 (TRAV2, TRAJ36)
CAVQGAQTGANNLFF

SEQ ID NO: 510172 - protein, 13 aa, Homo sapiens
  CDR3 for beta chain variable domain of TCR clone 255086 (TRBV14, TRBJ2-7)
CASSQDRRYEQYF

SEQ ID NO: 510173 - protein, 11 aa, Homo sapiens
  CDR3 for alpha chain variable domain of TCR clone 255087 (TRAV1-2, TRAJ20)
CAVSNDYKLSF

SEQ ID NO: 510174 - protein, 16 aa, Homo sapiens
  CDR3 for beta chain variable domain of TCR clone 255087 (TRBV29-1, TRBJ2-6)
CSVEDITYSGGNVLTF

SEQ ID NO: 510175 - protein, 14 aa, Homo sapiens
  CDR3 for alpha chain variable domain of TCR clone 255088 (TRAV1-2, TRAJ8)
CAVREDTGFQTLVF

SEQ ID NO: 510176 - protein, 14 aa, Homo sapiens
  CDR3 for beta chain variable domain of TCR clone 255088 (TRBV11-2, TRBJ1-2)
CASSLGTANYGYTF

SEQ ID NO: 510177 - protein, 13 aa, Homo sapiens
  CDR3 for alpha chain variable domain of TCR clone 255089 (TRAV27, TRAJ11)
CAGARSGYSPLTF

SEQ ID NO: 510178 - protein, 16 aa, Homo sapiens
  CDR3 for beta chain variable domain of TCR clone 255089 (TRBV10-2, TRBJ2-2)
CASSESRDRGSGELFF

SEQ ID NO: 510179 - protein, 13 aa, Homo sapiens
  CDR3 for alpha chain variable domain of TCR clone 255090 (TRAV12-3, TRAJ13)
CAMSSGDYQKVTF

SEQ ID NO: 510180 - protein, 17 aa, Homo sapiens
  CDR3 for beta chain variable domain of TCR clone 255090 (TRBV4-1, TRBJ1-4)
CASSQEGPRGVEEKLFF

SEQ ID NO: 510181 - protein, 15 aa, Homo sapiens
  CDR3 for alpha chain variable domain of TCR clone 255091 (TRAV8-2, TRAJ40)
CVVLGTTSGTYKYIF

SEQ ID NO: 510182 - protein, 16 aa, Homo sapiens
  CDR3 for beta chain variable domain of TCR clone 255091 (TRBV7-3, TRBJ2-1)
CASSLVGYRSYNEQFF

SEQ ID NO: 510183 - protein, 16 aa, Homo sapiens
  CDR3 for alpha chain variable domain of TCR clone 255092 (TRAV21, TRAJ37)
CAVRPRGSSSTGKLIF

SEQ ID NO: 510184 - protein, 13 aa, Homo sapiens
  CDR3 for beta chain variable domain of TCR clone 255092 (TRBV19, TRBJ1-2)
CASSVPGQDGYTF

SEQ ID NO: 510185 - protein, 13 aa, Homo sapiens
  CDR3 for alpha chain variable domain of TCR clone 255093 (TRAV20, TRAJ49)
CAVQARTGNQFYF

SEQ ID NO: 510186 - protein, 14 aa, Homo sapiens
  CDR3 for beta chain variable domain of TCR clone 255093 (TRBV5-1, TRBJ1-1)
CASSLQRASTEAFF

SEQ ID NO: 510187 - protein, 14 aa, Homo sapiens
  CDR3 for alpha chain variable domain of TCR clone 255094 (TRAV8-4, TRAJ38)
CARLNSGNNRKLIW

SEQ ID NO: 510188 - protein, 12 aa, Homo sapiens
  CDR3 for beta chain variable domain of TCR clone 255094 (TRBV6-1, TRBJ2-7)
YASSEPLYEQYF

SEQ ID NO: 510189 - protein, 16 aa, Homo sapiens
  CDR3 for alpha chain variable domain of TCR clone 255095 (TRAV12-2, TRAJ40)
CTVIRGGTSGTYKYIF

SEQ ID NO: 510190 - protein, 16 aa, Homo sapiens
  CDR3 for beta chain variable domain of TCR clone 255095 (TRBV12-4, TRBJ2-7)
CASSLIGGTGTYEQYF

SEQ ID NO: 510191 - protein, 11 aa, Homo sapiens
  CDR3 for alpha chain variable domain of TCR clone 255096 (TRAV17, TRAJ31)
CATSNNARLRF

SEQ ID NO: 510192 - protein, 16 aa, Homo sapiens
  CDR3 for beta chain variable domain of TCR clone 255096 (TRBV7-8, TRBJ2-4)
CASSAERTLAKNIQYF

SEQ ID NO: 510193 - protein, 13 aa, Homo sapiens
  CDR3 for alpha chain variable domain of TCR clone 255097 (TRAV8-6, TRAJ49)
CAVITNTCNQFYF

SEQ ID NO: 510194 - protein, 14 aa, Homo sapiens
  CDR3 for beta chain variable domain of TCR clone 255097 (TRBV5-1, TRBJ2-7)
CASSRGESLYEQYF

SEQ ID NO: 510195 - protein, 13 aa, Homo sapiens
  CDR3 for alpha chain variable domain of TCR clone 255098 (TRAV5, TRAJ11)
CAETTSGYSTLTF

SEQ ID NO: 510196 - protein, 17 aa, Homo sapiens
  CDR3 for beta chain variable domain of TCR clone 255098 (TRBV5-5, TRBJ2-7)
CASSLLFRGTSSYEQYF

SEQ ID NO: 510197 - protein, 13 aa, Homo sapiens
  CDR3 for alpha chain variable domain of TCR clone 255099 (TRAV21, TRAJ27)
CAARPCNAGNSTF

SEQ ID NO: 510198 - protein, 14 aa, Homo sapiens
  CDR3 for beta chain variable domain of TCR clone 255099 (TRBV7-6, TRBJ2-3)
CASSLGTVTDTQYF

SEQ ID NO: 510199 - protein, 11 aa, Homo sapiens
  CDR3 for alpha chain variable domain of TCR clone 255100 (TRAV12-1, TRAJ21)
CVVNNFNKFYF

SEQ ID NO: 510200 - protein, 15 aa, Homo sapiens
  CDR3 for beta chain variable domain of TCR clone 255100 (TRBV7-2, TRBJ1-2)
CASSLVSGGDYGYTF

SEQ ID NO: 510201 - protein, 13 aa, Homo sapiens
  CDR3 for alpha chain variable domain of TCR clone 255101 (TRAV2, TRAJ40)
CAVVTSGTYKYII

SEQ ID NO: 510202 - protein, 16 aa, Homo sapiens
  CDR3 for beta chain variable domain of TCR clone 255101 (TRBV7-2, TRBJ1-4)
CASSLLGTRGDEKLFF

SEQ ID NO: 510203 - protein, 14 aa, Homo sapiens
  CDR3 for alpha chain variable domain of TCR clone 255102 (TRAV1-2, TRAJ8)
CAVREDTGFQKLVF

SEQ ID NO: 510204 - protein, 14 aa, Homo sapiens
  CDR3 for beta chain variable domain of TCR clone 255102 (TRBV7-2, TRBJ2-7)
CASSLYPGRYEQYL

SEQ ID NO: 510205 - protein, 16 aa, Homo sapiens
  CDR3 for alpha chain variable domain of TCR clone 255103 (TRAV19, TRAJ35)
CALKRDVEGFGNVRHC

SEQ ID NO: 510206 - protein, 16 aa, Homo sapiens
  CDR3 for beta chain variable domain of TCR clone 255103 (TRBV4-3, TRBJ2-1)
CASSPALDRGVNEQFF

SEQ ID NO: 510207 - protein, 14 aa, Homo sapiens
  CDR3 for alpha chain variable domain of TCR clone 255104 (TRAV1-2, TRAJ6)
CAVRSSGGSYIPTF

SEQ ID NO: 510208 - protein, 14 aa, Homo sapiens
  CDR3 for beta chain variable domain of TCR clone 255104 (TRBV19, TRBJ2-7)
CASSMGQGAIEQYF

SEQ ID NO: 510209 - protein, 15 aa, Homo sapiens
  CDR3 for alpha chain variable domain of TCR clone 255105 (TRAV4, TRAJ39)
CLVGPNNNAGNMLTF

SEQ ID NO: 510210 - protein, 14 aa, Homo sapiens
  CDR3 for beta chain variable domain of TCR clone 255105 (TRBV7-8, TRBJ2-1)
CASSSQGTYNEQFF

SEQ ID NO: 510211 - protein, 14 aa, Homo sapiens
  CDR3 for alpha chain variable domain of TCR clone 255106 (TRAV1-2, TRAJ8)
CAVREDKGSQKLVF

SEQ ID NO: 510212 - protein, 15 aa, Homo sapiens
  CDR3 for beta chain variable domain of TCR clone 255106 (TRBV6-3, TRBJ2-7)
CASSSPGTVFYEQYF

SEQ ID NO: 510213 - protein, 15 aa, Homo sapiens
  CDR3 for alpha chain variable domain of TCR clone 255107 (TRAV16, TRAJ10)
CALEGLTGGGNTLTF

SEQ ID NO: 510214 - protein, 16 aa, Homo sapiens
  CDR3 for beta chain variable domain of TCR clone 255107 (TRBV12-4, TRBJ1-5)
CASSRPVGGSNQPQHF

SEQ ID NO: 510215 - protein, 14 aa, Homo sapiens
  CDR3 for alpha chain variable domain of TCR clone 255108 (TRAV13-2, TRAJ17)
CAENGKAAGNKLTF

SEQ ID NO: 510216 - protein, 15 aa, Homo sapiens
  CDR3 for beta chain variable domain of TCR clone 255108 (TRBV6-3, TRBJ2-7)
CASSSPGTVFYEQYF

SEQ ID NO: 510217 - protein, 15 aa, Homo sapiens
  CDR3 for alpha chain variable domain of TCR clone 255109 (TRAV34, TRAJ38)
CGADFTPGNNRKLIW

SEQ ID NO: 510218 - protein, 15 aa, Homo sapiens
  CDR3 for beta chain variable domain of TCR clone 255109 (TRBV28, TRBJ2-1)
CASSIIAGGRSEQFF

SEQ ID NO: 510219 - protein, 12 aa, Homo sapiens
  CDR3 for alpha chain variable domain of TCR clone 255110 (TRAV13-1, TRAJ21)
CAAKEGFNKFYF

SEQ ID NO: 510220 - protein, 14 aa, Homo sapiens
  CDR3 for beta chain variable domain of TCR clone 255110 (TRBV5-1, TRBJ2-7)
CARSRGESLYEQYF

SEQ ID NO: 510221 - protein, 14 aa, Homo sapiens
  CDR3 for alpha chain variable domain of TCR clone 255111 (TRAV3, TRAJ7)
CAVREAEREQQTRF

SEQ ID NO: 510222 - protein, 12 aa, Homo sapiens
  CDR3 for beta chain variable domain of TCR clone 255111 (TRBV7-8, TRBJ2-7)
CASSLGDREQYF

SEQ ID NO: 510223 - protein, 14 aa, Homo sapiens
  CDR3 for alpha chain variable domain of TCR clone 255112 (TRAV30, TRAJ26)
CGTEIVSYDQNFVF

SEQ ID NO: 510224 - protein, 14 aa, Homo sapiens
  CDR3 for beta chain variable domain of TCR clone 255112 (TRBV2, TRBJ2-3)
CASSEGQNTDTQYF

SEQ ID NO: 510225 - protein, 15 aa, Homo sapiens
  CDR3 for alpha chain variable domain of TCR clone 255113 (TRAV25, TRAJ53)
CPTSNSGGSNYKLTF

SEQ ID NO: 510226 - protein, 17 aa, Homo sapiens
  CDR3 for beta chain variable domain of TCR clone 255113 (TRBV7-8, TRBJ2-6)
CASSAGTGGAGANDLSF

SEQ ID NO: 510227 - protein, 13 aa, Homo sapiens
  CDR3 for alpha chain variable domain of TCR clone 255114 (TRAV8-3, TRAJ4)
WVFYSGGYNKLIF

SEQ ID NO: 510228 - protein, 14 aa, Homo sapiens
  CDR3 for beta chain variable domain of TCR clone 255114 (TRBV7-9, TRBJ2-3)
CASSLEDGTDKQYF

SEQ ID NO: 510229 - protein, 15 aa, Homo sapiens
  CDR3 for alpha chain variable domain of TCR clone 255115 (TRAV8-4, TRAJ3)
CAVGEPYSSASKIIF

SEQ ID NO: 510230 - protein, 17 aa, Homo sapiens
  CDR3 for beta chain variable domain of TCR clone 255115 (TRBV13, TRBJ2-3)
CASSLSRVAGGRNTQYF

SEQ ID NO: 510231 - protein, 13 aa, Homo sapiens
  CDR3 for alpha chain variable domain of TCR clone 255116 (TRAV8-6, TRAJ42)
CAVRGRKPRKSHL

SEQ ID NO: 510232 - protein, 13 aa, Homo sapiens
  CDR3 for beta chain variable domain of TCR clone 255116 (TRBV7-3, TRBJ1-1)
CASSQDWGAEAFF

SEQ ID NO: 510233 - protein, 10 aa, Homo sapiens
  CDR3 for alpha chain variable domain of TCR clone 255117 (TRAV12-3, TRAJ49)
CAMNDDQFYF

SEQ ID NO: 510234 - protein, 15 aa, Homo sapiens
  CDR3 for beta chain variable domain of TCR clone 255117 (TRBV20-1, TRBJ2-7)
CSARDRVSGIDEQYF

SEQ ID NO: 510235 - protein, 15 aa, Homo sapiens
  CDR3 for alpha chain variable domain of TCR clone 255118 (TRAV17, TRAJ57)
CATGPSQGGSEKLVF

SEQ ID NO: 510236 - protein, 14 aa, Homo sapiens
  CDR3 for beta chain variable domain of TCR clone 255118 (TRBV12-5, TRBJ2-5)
CASGSRTHQETPYF

SEQ ID NO: 510237 - protein, 13 aa, Homo sapiens
  CDR3 for alpha chain variable domain of TCR clone 255119 (TRAV8-2, TRAJ21)
CVVSQYNFNKFYF

SEQ ID NO: 510238 - protein, 12 aa, Homo sapiens
  CDR3 for beta chain variable domain of TCR clone 255119 (TRBV11-2, TRBJ2-1)
CASSPGNNEQFF

SEQ ID NO: 510239 - protein, 11 aa, Homo sapiens
  CDR3 for alpha chain variable domain of TCR clone 255120 (TRAV3, TRAJ21)
CDVGNFNKFYF

SEQ ID NO: 510240 - protein, 13 aa, Homo sapiens
  CDR3 for beta chain variable domain of TCR clone 255120 (TRBV20-1, TRBJ1-1)
CSARVGGNTEAFF

SEQ ID NO: 510241 - protein, 13 aa, Homo sapiens
  CDR3 for alpha chain variable domain of TCR clone 255121 (TRAV12-2, TRAJ6)
CAVNVSRKLHTYI

SEQ ID NO: 510242 - protein, 14 aa, Homo sapiens
  CDR3 for beta chain variable domain of TCR clone 255121 (TRBV7-6, TRBJ2-7)
CASSFRQGADEQYF

SEQ ID NO: 510243 - protein, 15 aa, Homo sapiens
  CDR3 for alpha chain variable domain of TCR clone 255122 (TRAV30, TRAJ34)
CGTVGITPTSPSLGL

SEQ ID NO: 510244 - protein, 16 aa, Homo sapiens
  CDR3 for beta chain variable domain of TCR clone 255122 (TRBV7-9, TRBJ1-2)
CASSLGFSSGEDGYTF

SEQ ID NO: 510245 - protein, 14 aa, Homo sapiens
  CDR3 for alpha chain variable domain of TCR clone 255123 (TRAV1-1, TRAJ27)
CAVIYKTNAGKSTF

SEQ ID NO: 510246 - protein, 18 aa, Homo sapiens
  CDR3 for beta chain variable domain of TCR clone 255123 (TRBV7-3, TRBJ2-1)
CASSLTLASGRAMVSSSS

SEQ ID NO: 510247 - protein, 13 aa, Homo sapiens
  CDR3 for alpha chain variable domain of TCR clone 255124 (TRAV21, TRAJ20)
CAVGLRVDYKLSF

SEQ ID NO: 510248 - protein, 11 aa, Homo sapiens
  CDR3 for beta chain variable domain of TCR clone 255124 (TRBV27, TRBJ2-3)
CASSLGDTQYF

SEQ ID NO: 510249 - protein, 16 aa, Homo sapiens
  CDR3 for alpha chain variable domain of TCR clone 255125 (TRAV30, TRAJ24)
CGTEIVDADSWWKFQF

SEQ ID NO: 510250 - protein, 17 aa, Homo sapiens
  CDR3 for beta chain variable domain of TCR clone 255125 (TRBV20-1, TRBJ2-1)
CSARDRRRASSYNEQFF

SEQ ID NO: 510251 - protein, 12 aa, Homo sapiens
  CDR3 for alpha chain variable domain of TCR clone 255126 (TRAV3, TRAJ20)
CAVRDPHYKLSF

SEQ ID NO: 510252 - protein, 11 aa, Homo sapiens
  CDR3 for beta chain variable domain of TCR clone 255126 (TRBV28, TRBJ2-5)
CASSLKETQYF

SEQ ID NO: 510253 - protein, 13 aa, Homo sapiens
  CDR3 for alpha chain variable domain of TCR clone 255127 (TRAV21, TRAJ20)
CTVGLRVDYKPSF

SEQ ID NO: 510254 - protein, 13 aa, Homo sapiens
  CDR3 for beta chain variable domain of TCR clone 255127 (TRBV6-1, TRBJ1-1)
CASSRQGNTEAFF

SEQ ID NO: 510255 - protein, 14 aa, Homo sapiens
  CDR3 for alpha chain variable domain of TCR clone 255128 (TRAV26-1, TRAJ49)
CIVRLTNTGKQFYF

SEQ ID NO: 510256 - protein, 11 aa, Homo sapiens
  CDR3 for beta chain variable domain of TCR clone 255128 (TRBV29-1, TRBJ2-5)
CSEDRTGTQYF

SEQ ID NO: 510257 - protein, 16 aa, Homo sapiens
  CDR3 for alpha chain variable domain of TCR clone 255129 (TRAV17, TRAJ28)
CATASVSGAGSYQLTF

SEQ ID NO: 510258 - protein, 13 aa, Homo sapiens
  CDR3 for beta chain variable domain of TCR clone 255129 (TRBV19, TRBJ1-2)
CASSVPGQDGYTF

SEQ ID NO: 510259 - protein, 14 aa, Homo sapiens
  CDR3 for alpha chain variable domain of TCR clone 255130 (TRAV20, TRAJ44)
CAVQDTGTASKLTF

SEQ ID NO: 510260 - protein, 13 aa, Homo sapiens
  CDR3 for beta chain variable domain of TCR clone 255130 (TRBV29-1, TRBJ1-3)
CSAGKGRGNTIYF

SEQ ID NO: 510261 - protein, 11 aa, Homo sapiens
  CDR3 for alpha chain variable domain of TCR clone 255131 (TRAV35, TRAJ30)
CAVERDDKIIF

SEQ ID NO: 510262 - protein, 14 aa, Homo sapiens
  CDR3 for beta chain variable domain of TCR clone 255131 (TRBV15, TRBJ2-5)
CATSGDRGQETQYF

SEQ ID NO: 510263 - protein, 15 aa, Homo sapiens
  CDR3 for alpha chain variable domain of TCR clone 255132 (TRAV10, TRAJ6)
CVVRPRTGGIYIPTF

SEQ ID NO: 510264 - protein, 15 aa, Homo sapiens
  CDR3 for beta chain variable domain of TCR clone 255132 (TRBV20-1, TRBJ2-7)
CSARDRVSGMDEQYF

SEQ ID NO: 510265 - protein, 13 aa, Homo sapiens
  CDR3 for alpha chain variable domain of TCR clone 255133 (TRAV8-1, TRAJ47)
CAVGLEYGNKLVF

SEQ ID NO: 510266 - protein, 13 aa, Homo sapiens
  CDR3 for beta chain variable domain of TCR clone 255133 (TRBV20-1, TRBJ2-2)
CSARVANTGELFF

SEQ ID NO: 510267 - protein, 14 aa, Homo sapiens
  CDR3 for alpha chain variable domain of TCR clone 255134 (TRAV35, TRAJ13)
CAGSPSGGYQKVTF

SEQ ID NO: 510268 - protein, 16 aa, Homo sapiens
  CDR3 for beta chain variable domain of TCR clone 255134 (TRBV13, TRBJ2-2)
CASSPRTGEHTGELFF

SEQ ID NO: 510269 - protein, 14 aa, Homo sapiens
  CDR3 for alpha chain variable domain of TCR clone 255135 (TRAV23/DV6, TRAJ13)
CAASETGGYQKGTL

SEQ ID NO: 510270 - protein, 13 aa, Homo sapiens
  CDR3 for beta chain variable domain of TCR clone 255135 (TRBV29-1, TRBJ2-1)
CSVEGGRVNEQFF

SEQ ID NO: 510271 - protein, 11 aa, Homo sapiens
  CDR3 for alpha chain variable domain of TCR clone 255136 (TRAV1-1, TRAJ16)
CAAGDGQKLLF

SEQ ID NO: 510272 - protein, 15 aa, Homo sapiens
  CDR3 for beta chain variable domain of TCR clone 255136 (TRBV28, TRBJ1-2)
CARIPQGSDDYGYTF

SEQ ID NO: 510273 - protein, 15 aa, Homo sapiens
  CDR3 for alpha chain variable domain of TCR clone 255137 (TRAV3, TRAJ20)
CAVRHIKLSDYKLSF

SEQ ID NO: 510274 - protein, 15 aa, Homo sapiens
  CDR3 for beta chain variable domain of TCR clone 255137 (TRBV7-9, TRBJ1-6)
CASSSPGRGNSPLHF

SEQ ID NO: 510275 - protein, 13 aa, Homo sapiens
  CDR3 for alpha chain variable domain of TCR clone 255138 (TRAV2, TRAJ12)
CAVGAYSSYKLIF

SEQ ID NO: 510276 - protein, 13 aa, Homo sapiens
  CDR3 for beta chain variable domain of TCR clone 255138 (TRBV20-1, TRBJ2-1)
CSARSSPRDEQFF

SEQ ID NO: 510277 - protein, 13 aa, Homo sapiens
  CDR3 for alpha chain variable domain of TCR clone 255139 (TRAV13-1, TRAJ6)
CARGSGGSYIHTF

SEQ ID NO: 510278 - protein, 17 aa, Homo sapiens
  CDR3 for beta chain variable domain of TCR clone 255139 (TRBV7-8, TRBJ2-1)
CASSPPTGTLAYNEQFF

SEQ ID NO: 510279 - protein, 14 aa, Homo sapiens
  CDR3 for alpha chain variable domain of TCR clone 255140 (TRAV8-3, TRAJ4)
CAVGAAGGYNKLIF

SEQ ID NO: 510280 - protein, 15 aa, Homo sapiens
  CDR3 for beta chain variable domain of TCR clone 255140 (TRBV5-1, TRBJ2-1)
CASSRRGPPTMSSSS

SEQ ID NO: 510281 - protein, 12 aa, Homo sapiens
  CDR3 for alpha chain variable domain of TCR clone 255141 (TRAV16, TRAJ56)
CAPTGANSKLTF

SEQ ID NO: 510282 - protein, 17 aa, Homo sapiens
  CDR3 for beta chain variable domain of TCR clone 255141 (TRBV7-8, TRBJ2-6)
CASSAGTGGAGANVLTF

SEQ ID NO: 510283 - protein, 14 aa, Homo sapiens
  CDR3 for alpha chain variable domain of TCR clone 255142 (TRAV36/DV7, TRAJ44)
CCGANTGTASKLTF

SEQ ID NO: 510284 - protein, 14 aa, Homo sapiens
  CDR3 for beta chain variable domain of TCR clone 255142 (TRBV7-2, TRBJ2-7)
CASSGLAGRGEQYF

SEQ ID NO: 510285 - protein, 19 aa, Homo sapiens
  CDR3 for alpha chain variable domain of TCR clone 255143 (TRAV1-1, TRAJ27)
CAGSEMTRSSLVKGHDFIF

SEQ ID NO: 510286 - protein, 14 aa, Homo sapiens
  CDR3 for beta chain variable domain of TCR clone 255143 (TRBV11-3, TRBJ1-6)
CASSFSGGDSPLHF

SEQ ID NO: 510287 - protein, 13 aa, Homo sapiens
  CDR3 for alpha chain variable domain of TCR clone 255144 (TRAV17, TRAJ45)
CATPGGGADGLTF

SEQ ID NO: 510288 - protein, 14 aa, Homo sapiens
  CDR3 for beta chain variable domain of TCR clone 255144 (TRBV4-1, TRBJ1-1)
CASSPTGIHTEAFF

SEQ ID NO: 510289 - protein, 14 aa, Homo sapiens
  CDR3 for alpha chain variable domain of TCR clone 255145 (TRAV17, TRAJ15)
CATTTNQAGTALIF

SEQ ID NO: 510290 - protein, 16 aa, Homo sapiens
  CDR3 for beta chain variable domain of TCR clone 255145 (TRBV4-1, TRBJ2-7)
CASSRGDILNSYKQYF

SEQ ID NO: 510291 - protein, 15 aa, Homo sapiens
  CDR3 for alpha chain variable domain of TCR clone 255146 (TRAV8-3, TRAJ27)
CAVGPSKTNAAKSTF

SEQ ID NO: 510292 - protein, 16 aa, Homo sapiens
  CDR3 for beta chain variable domain of TCR clone 255146 (TRBV6-6, TRBJ2-1)
CASSLLSDSSYNEQFF

SEQ ID NO: 510293 - protein, 13 aa, Homo sapiens
  CDR3 for alpha chain variable domain of TCR clone 255147 (TRAV13-1, TRAJ21)
CAASIYNFNKFYF

SEQ ID NO: 510294 - protein, 15 aa, Homo sapiens
  CDR3 for beta chain variable domain of TCR clone 255147 (TRBV7-8, TRBJ1-5)
CASSLEGQPNQHQHF

SEQ ID NO: 510295 - protein, 12 aa, Homo sapiens
  CDR3 for alpha chain variable domain of TCR clone 255148 (TRAV2, TRAJ9)
CAVGAGGFKTIF

SEQ ID NO: 510296 - protein, 16 aa, Homo sapiens
  CDR3 for beta chain variable domain of TCR clone 255148 (TRBV13, TRBJ2-2)
CASSPRTGDHAGELFF

SEQ ID NO: 510297 - protein, 14 aa, Homo sapiens
  CDR3 for alpha chain variable domain of TCR clone 255149 (TRAV17, TRAJ56)
CATVPAGANSKLTF

SEQ ID NO: 510298 - protein, 15 aa, Homo sapiens
  CDR3 for beta chain variable domain of TCR clone 255149 (TRBV28, TRBJ2-3)
CASSPDRQGANTQYF

SEQ ID NO: 510299 - protein, 13 aa, Homo sapiens
  CDR3 for alpha chain variable domain of TCR clone 255150 (TRAV8-6, TRAJ49)
CAVITNTGNQFYF

SEQ ID NO: 510300 - protein, 18 aa, Homo sapiens
  CDR3 for beta chain variable domain of TCR clone 255150 (TRBV7-9, TRBJ2-7)
CASSLTTSGSRTWYEQYF

SEQ ID NO: 510301 - protein, 16 aa, Homo sapiens
  CDR3 for alpha chain variable domain of TCR clone 255151 (TRAV16, TRAJ57)
CAPYLITQGGSEKLVF

SEQ ID NO: 510302 - protein, 14 aa, Homo sapiens
  CDR3 for beta chain variable domain of TCR clone 255151 (TRBV7-2, TRBJ2-2)
CASRGQGAAGELFF

SEQ ID NO: 510303 - protein, 12 aa, Homo sapiens
  CDR3 for alpha chain variable domain of TCR clone 255152 (TRAV12-3, TRAJ17)
CAMTLTGNKLPF

SEQ ID NO: 510304 - protein, 15 aa, Homo sapiens
  CDR3 for beta chain variable domain of TCR clone 255152 (TRBV20-1, TRBJ2-7)
SSARDRVSGMDEQYF

SEQ ID NO: 510305 - protein, 14 aa, Homo sapiens
  CDR3 for alpha chain variable domain of TCR clone 255153 (TRAV26-1, TRAJ38)
CIADNAGNNRKLIW

SEQ ID NO: 510306 - protein, 14 aa, Homo sapiens
  CDR3 for beta chain variable domain of TCR clone 255153 (TRBV4-1, TRBJ1-1)
CASSRSGQSFEAFF

SEQ ID NO: 510307 - protein, 11 aa, Homo sapiens
  CDR3 for alpha chain variable domain of TCR clone 255154 (TRAV21, TRAJ34)
CAHYNTDKLIF

SEQ ID NO: 510308 - protein, 18 aa, Homo sapiens
  CDR3 for beta chain variable domain of TCR clone 255154 (TRBV28, TRBJ2-1)
CASSSTSGRANSYNEQFF

SEQ ID NO: 510309 - protein, 16 aa, Homo sapiens
  CDR3 for alpha chain variable domain of TCR clone 255155 (TRAV38-1, TRAJ40)
CAFMKHVNSGTYKYIF

SEQ ID NO: 510310 - protein, 13 aa, Homo sapiens
  CDR3 for beta chain variable domain of TCR clone 255155 (TRBV12-4, TRBJ2-1)
CASSLAENNEQFF

SEQ ID NO: 510311 - protein, 13 aa, Homo sapiens
  CDR3 for alpha chain variable domain of TCR clone 255156 (TRAV21, TRAJ37)
CAVSSGNTGKLIC

SEQ ID NO: 510312 - protein, 17 aa, Homo sapiens
  CDR3 for beta chain variable domain of TCR clone 255156 (TRBV5-1, TRBJ2-5)
CASSLLGLAANQETQYF

SEQ ID NO: 510313 - protein, 12 aa, Homo sapiens
  CDR3 for alpha chain variable domain of TCR clone 255157 (TRAV13-2, TRAJ23)
CAERHRGGKLIF

SEQ ID NO: 510314 - protein, 13 aa, Homo sapiens
  CDR3 for beta chain variable domain of TCR clone 255157 (TRBV20-1, TRBJ2-2)
CSALSGGAGGLFF

SEQ ID NO: 510315 - protein, 18 aa, Homo sapiens
  CDR3 for alpha chain variable domain of TCR clone 255158 (TRAV13-1, TRAJ52)
CAAKNPNAGGTSYGKLTF

SEQ ID NO: 510316 - protein, 15 aa, Homo sapiens
  CDR3 for beta chain variable domain of TCR clone 255158 (TRBV24-1, TRBJ2-5)
CATSETTGAVGAQYF

SEQ ID NO: 510317 - protein, 15 aa, Homo sapiens
  CDR3 for alpha chain variable domain of TCR clone 255159 (TRAV35, TRAJ41)
CAGQLFSNSGYALNY

SEQ ID NO: 510318 - protein, 14 aa, Homo sapiens
  CDR3 for beta chain variable domain of TCR clone 255159 (TRBV7-2, TRBJ1-2)
CASSRGGTNYGYTF

SEQ ID NO: 510319 - protein, 13 aa, Homo sapiens
  CDR3 for alpha chain variable domain of TCR clone 255160 (TRAV13-2, TRAJ16)
CADARTDGQKLLF

SEQ ID NO: 510320 - protein, 11 aa, Homo sapiens
  CDR3 for beta chain variable domain of TCR clone 255160 (TRBV7-9, TRBJ2-5)
CASSLGETQYF

SEQ ID NO: 510321 - protein, 15 aa, Homo sapiens
  CDR3 for alpha chain variable domain of TCR clone 255161 (TRAV27, TRAJ50)
CAGRERGTSYDKEIF

SEQ ID NO: 510322 - protein, 16 aa, Homo sapiens
  CDR3 for beta chain variable domain of TCR clone 255161 (TRBV10-3, TRBJ1-5)
CAISDQVGAPNQPQHF

SEQ ID NO: 510323 - protein, 14 aa, Homo sapiens
  CDR3 for alpha chain variable domain of TCR clone 255162 (TRAV8-2, TRAJ4)
FVVSPSGGYIKLIF

SEQ ID NO: 510324 - protein, 15 aa, Homo sapiens
  CDR3 for beta chain variable domain of TCR clone 255162 (TRBV4-1, TRBJ1-4)
CASSDTGGTNEKLFF

SEQ ID NO: 510325 - protein, 12 aa, Homo sapiens
  CDR3 for alpha chain variable domain of TCR clone 255163 (TRAV17, TRAJ4)
CATDGGYNKLIF

SEQ ID NO: 510326 - protein, 13 aa, Homo sapiens
  CDR3 for beta chain variable domain of TCR clone 255163 (TRBV29-1, TRBJ2-2)
CSTPGVNTGELFF

SEQ ID NO: 510327 - protein, 14 aa, Homo sapiens
  CDR3 for alpha chain variable domain of TCR clone 255164 (TRAV12-3, TRAJ11)
CAMTTNSGYSTLTF

SEQ ID NO: 510328 - protein, 16 aa, Homo sapiens
  CDR3 for beta chain variable domain of TCR clone 255164 (TRBV20-1, TRBJ1-1)
CSARALTPGMNTEAFF

SEQ ID NO: 510329 - protein, 15 aa, Homo sapiens
  CDR3 for alpha chain variable domain of TCR clone 255165 (TRAV26-1, TRAJ44)
CIARVPFGTASKLTF

SEQ ID NO: 510330 - protein, 18 aa, Homo sapiens
  CDR3 for beta chain variable domain of TCR clone 255165 (TRBV20-1, TRBJ2-3)
CSASGLAGGPGTTDTQYF

SEQ ID NO: 510331 - protein, 13 aa, Homo sapiens
  CDR3 for alpha chain variable domain of TCR clone 255166 (TRAV12-2, TRAJ9)
CAVLNTGGFKTIF

SEQ ID NO: 510332 - protein, 14 aa, Homo sapiens
  CDR3 for beta chain variable domain of TCR clone 255166 (TRBV7-2, TRBJ2-7)
CASRSQGAAYEQYF

SEQ ID NO: 510333 - protein, 13 aa, Homo sapiens
  CDR3 for alpha chain variable domain of TCR clone 255167 (TRAV2, TRAJ15)
CAVASQAGTALIF

SEQ ID NO: 510334 - protein, 12 aa, Homo sapiens
  CDR3 for beta chain variable domain of TCR clone 255167 (TRBV7-8, TRBJ2-7)
CASSLGDREQCF

SEQ ID NO: 510335 - protein, 16 aa, Homo sapiens
  CDR3 for alpha chain variable domain of TCR clone 255168 (TRAV26-1, TRAJ23)
CIVRPHGNNQGGKLIF

SEQ ID NO: 510336 - protein, 15 aa, Homo sapiens
  CDR3 for beta chain variable domain of TCR clone 255168 (TRBV19, TRBJ1-1)
CASTSGQIQNTEAFF

SEQ ID NO: 510337 - protein, 15 aa, Homo sapiens
  CDR3 for alpha chain variable domain of TCR clone 255169 (TRAV17, TRAJ13)
CATDPGSGGYQKVTF

SEQ ID NO: 510338 - protein, 15 aa, Homo sapiens
  CDR3 for beta chain variable domain of TCR clone 255169 (TRBV11-2, TRBJ2-3)
CASSPGGGATDTQYF

SEQ ID NO: 510339 - protein, 16 aa, Homo sapiens
  CDR3 for alpha chain variable domain of TCR clone 255170 (TRAV1-2, TRAJ10)
CAVRGVLTGGGNKLTF

SEQ ID NO: 510340 - protein, 14 aa, Homo sapiens
  CDR3 for beta chain variable domain of TCR clone 255170 (TRBV12-4, TRBJ1-1)
CASSLGTGCTEAFF

SEQ ID NO: 510341 - protein, 13 aa, Homo sapiens
  CDR3 for alpha chain variable domain of TCR clone 255171 (TRAV3, TRAJ36)
CAVRDGTGANNLF

SEQ ID NO: 510342 - protein, 16 aa, Homo sapiens
  CDR3 for beta chain variable domain of TCR clone 255171 (TRBV7-3, TRBJ2-5)
CASIQPGGSVQETQYF

SEQ ID NO: 510343 - protein, 11 aa, Homo sapiens
  CDR3 for alpha chain variable domain of TCR clone 255172 (TRAV1-1, TRAJ23)
CAVHQGGKFIF

SEQ ID NO: 510344 - protein, 20 aa, Homo sapiens
  CDR3 for beta chain variable domain of TCR clone 255172 (TRBV7-8, TRBJ2-2)
CASSHLFPGPTIHITGELFF

SEQ ID NO: 510345 - protein, 14 aa, Homo sapiens
  CDR3 for alpha chain variable domain of TCR clone 255173 (TRAV17, TRAJ6)
CATDERRGSYIPTF

SEQ ID NO: 510346 - protein, 13 aa, Homo sapiens
  CDR3 for beta chain variable domain of TCR clone 255173 (TRBV27, TRBJ2-1)
CASSLGRIWAQFF

SEQ ID NO: 510347 - protein, 14 aa, Homo sapiens
  CDR3 for alpha chain variable domain of TCR clone 255174 (TRAV14/DV4, TRAJ7)
CAMREAYGNNRRAF

SEQ ID NO: 510348 - protein, 15 aa, Homo sapiens
  CDR3 for beta chain variable domain of TCR clone 255174 (TRBV19, TRBJ2-1)
CASSINREPSHEQFF

SEQ ID NO: 510349 - protein, 16 aa, Homo sapiens
  CDR3 for alpha chain variable domain of TCR clone 255175 (TRAV30, TRAJ24)
CGTEIVDADSWGKFRF

SEQ ID NO: 510350 - protein, 13 aa, Homo sapiens
  CDR3 for beta chain variable domain of TCR clone 255175 (TRBV7-3, TRBJ1-1)
CASSQDWGAEAFF

SEQ ID NO: 510351 - protein, 13 aa, Homo sapiens
  CDR3 for alpha chain variable domain of TCR clone 255176 (TRAV20, TRAJ15)
RATINQAGTTLIF

SEQ ID NO: 510352 - protein, 13 aa, Homo sapiens
  CDR3 for beta chain variable domain of TCR clone 255176 (TRBV12-4, TRBJ2-1)
CASRQPSNNEQFF

SEQ ID NO: 510353 - protein, 13 aa, Homo sapiens
  CDR3 for alpha chain variable domain of TCR clone 255177 (TRAV20, TRAJ37)
CAGGSSNTGKLIF

SEQ ID NO: 510354 - protein, 14 aa, Homo sapiens
  CDR3 for beta chain variable domain of TCR clone 255177 (TRBV20-1, TRBJ2-5)
CSARDGRAGETQYF

SEQ ID NO: 510355 - protein, 14 aa, Homo sapiens
  CDR3 for alpha chain variable domain of TCR clone 255178 (TRAV35, TRAJ33)
CAGSSQDSNYQVIW

SEQ ID NO: 510356 - protein, 16 aa, Homo sapiens
  CDR3 for beta chain variable domain of TCR clone 255178 (TRBV7-8, TRBJ2-6)
CASRVGDSSGANVLTF

SEQ ID NO: 510357 - protein, 12 aa, Homo sapiens
  CDR3 for alpha chain variable domain of TCR clone 255179 (TRAV8-3, TRAJ47)
CAVAPYGNKLVF

SEQ ID NO: 510358 - protein, 17 aa, Homo sapiens
  CDR3 for beta chain variable domain of TCR clone 255179 (TRBV20-1, TRBJ2-2)
CSASGSGQGGLTGELFF

SEQ ID NO: 510359 - protein, 14 aa, Homo sapiens
  CDR3 for alpha chain variable domain of TCR clone 255180 (TRAV3, TRAJ17)
CAVRDAAAGNKLTF

SEQ ID NO: 510360 - protein, 13 aa, Homo sapiens
  CDR3 for beta chain variable domain of TCR clone 255180 (TRBV2, TRBJ1-1)
CASSVSGYTEAFC

SEQ ID NO: 510361 - protein, 17 aa, Homo sapiens
  CDR3 for alpha chain variable domain of TCR clone 255181 (TRAV38-1, TRAJ28)
CAFMKPTSGAGSYQLTF

SEQ ID NO: 510362 - protein, 15 aa, Homo sapiens
  CDR3 for beta chain variable domain of TCR clone 255181 (TRBV5-1, TRBJ2-4)
CASSLGGGGSYIPYF

SEQ ID NO: 510363 - protein, 14 aa, Homo sapiens
  CDR3 for alpha chain variable domain of TCR clone 255182 (TRAV8-4, TRAJ9)
CAVRINTGGFKTIF

SEQ ID NO: 510364 - protein, 13 aa, Homo sapiens
  CDR3 for beta chain variable domain of TCR clone 255182 (TRBV19, TRBJ2-7)
CASSRDRSYEQYF

SEQ ID NO: 510365 - protein, 12 aa, Homo sapiens
  CDR3 for alpha chain variable domain of TCR clone 255183 (TRAV13-1, TRAJ21)
CAAKEGFNKFYF

SEQ ID NO: 510366 - protein, 17 aa, Homo sapiens
  CDR3 for beta chain variable domain of TCR clone 255183 (TRBV19, TRBJ2-7)
YASSISFYDSYPYEQYF

SEQ ID NO: 510367 - protein, 14 aa, Homo sapiens
  CDR3 for alpha chain variable domain of TCR clone 255184 (TRAV4, TRAJ20)
CLVGDKVTTTSSAL

SEQ ID NO: 510368 - protein, 13 aa, Homo sapiens
  CDR3 for beta chain variable domain of TCR clone 255184 (TRBV10-3, TRBJ2-7)
CASRLAVNYEQYF

SEQ ID NO: 510369 - protein, 10 aa, Homo sapiens
  CDR3 for alpha chain variable domain of TCR clone 255185 (TRAV12-1, TRAJ34)
CVTNTDKLIL

SEQ ID NO: 510370 - protein, 13 aa, Homo sapiens
  CDR3 for beta chain variable domain of TCR clone 255185 (TRBV19, TRBJ1-2)
CASSQGQVYGYTF

SEQ ID NO: 510371 - protein, 13 aa, Homo sapiens
  CDR3 for alpha chain variable domain of TCR clone 255186 (TRAV13-1, TRAJ4)
CAASIGGYNKLIF

SEQ ID NO: 510372 - protein, 16 aa, Homo sapiens
  CDR3 for beta chain variable domain of TCR clone 255186 (TRBV20-1, TRBJ2-1)
CSAPGLAGSYSDEEFF

SEQ ID NO: 510373 - protein, 15 aa, Homo sapiens
  CDR3 for alpha chain variable domain of TCR clone 255187 (TRAV3, TRAJ30)
CAVRYEYGRDDKIIF

SEQ ID NO: 510374 - protein, 16 aa, Homo sapiens
  CDR3 for beta chain variable domain of TCR clone 255187 (TRBV5-1, TRBJ2-5)
CASSLANHRGRETQYF

SEQ ID NO: 510375 - protein, 14 aa, Homo sapiens
  CDR3 for alpha chain variable domain of TCR clone 255188 (TRAV12-3, TRAJ5)
CAMSTYTVRRALTF

SEQ ID NO: 510376 - protein, 13 aa, Homo sapiens
  CDR3 for beta chain variable domain of TCR clone 255188 (TRBV28, TRBJ2-3)
CASSTGGGDTQYF

SEQ ID NO: 510377 - protein, 14 aa, Homo sapiens
  CDR3 for alpha chain variable domain of TCR clone 255189 (TRAV12-2, TRAJ45)
CALPERGGADGLTF

SEQ ID NO: 510378 - protein, 14 aa, Homo sapiens
  CDR3 for beta chain variable domain of TCR clone 255189 (TRBV18, TRBJ1-5)
CASSPGNSNQPQHV

SEQ ID NO: 510379 - protein, 13 aa, Homo sapiens
  CDR3 for alpha chain variable domain of TCR clone 255190 (TRAV20, TRAJ54)
CAVQAGGAQKLVF

SEQ ID NO: 510380 - protein, 13 aa, Homo sapiens
  CDR3 for beta chain variable domain of TCR clone 255190 (TRBV19, TRBJ1-2)
CASSQGQVYGYTF

SEQ ID NO: 510381 - protein, 15 aa, Homo sapiens
  CDR3 for alpha chain variable domain of TCR clone 255191 (TRAV8-3, TRAJ40)
CAAPSLGSRTYKYIF

SEQ ID NO: 510382 - protein, 16 aa, Homo sapiens
  CDR3 for beta chain variable domain of TCR clone 255191 (TRBV7-3, TRBJ2-3)
CASSLSGYRPEDTQYF

SEQ ID NO: 510383 - protein, 14 aa, Homo sapiens
  CDR3 for alpha chain variable domain of TCR clone 255192 (TRAV26-2, TRAJ32)
CCVGYGGATNKLIF

SEQ ID NO: 510384 - protein, 14 aa, Homo sapiens
  CDR3 for beta chain variable domain of TCR clone 255192 (TRBV4-2, TRBJ2-1)
CVSGLDRAYNEQFF

SEQ ID NO: 510385 - protein, 14 aa, Homo sapiens
  CDR3 for alpha chain variable domain of TCR clone 255193 (TRAV1-2, TRAJ16)
CAVNRFSDGQKLLF

SEQ ID NO: 510386 - protein, 13 aa, Homo sapiens
  CDR3 for beta chain variable domain of TCR clone 255193 (TRBV18, TRBJ2-5)
CASSPAGKENQYF

SEQ ID NO: 510387 - protein, 12 aa, Homo sapiens
  CDR3 for alpha chain variable domain of TCR clone 255194 (TRAV2, TRAJ5)
CALDTGRRALTF

SEQ ID NO: 510388 - protein, 17 aa, Homo sapiens
  CDR3 for beta chain variable domain of TCR clone 255194 (TRBV20-1, TRBJ2-1)
CSASSSGLAGSYNEQFF

SEQ ID NO: 510389 - protein, 14 aa, Homo sapiens
  CDR3 for alpha chain variable domain of TCR clone 255195 (TRAV9-2, TRAJ39)
CALYIYNAGNMLPF

SEQ ID NO: 510390 - protein, 16 aa, Homo sapiens
  CDR3 for beta chain variable domain of TCR clone 255195 (TRBV15, TRBJ1-2)
CATSRGPRTGGGGYTF

SEQ ID NO: 510391 - protein, 13 aa, Homo sapiens
  CDR3 for alpha chain variable domain of TCR clone 255196 (TRAV20, TRAJ20)
CAVQAGSGYKLSF

SEQ ID NO: 510392 - protein, 13 aa, Homo sapiens
  CDR3 for beta chain variable domain of TCR clone 255196 (TRBV3-1, TRBJ2-3)
CASSQGGGDTKYF

SEQ ID NO: 510393 - protein, 14 aa, Homo sapiens
  CDR3 for alpha chain variable domain of TCR clone 255197 (TRAV27, TRAJ9)
CAVVYNTGGFKTIF

SEQ ID NO: 510394 - protein, 14 aa, Homo sapiens
  CDR3 for beta chain variable domain of TCR clone 255197 (TRBV7-3, TRBJ2-2)
CASSSGGYTGELFF

SEQ ID NO: 510395 - protein, 14 aa, Homo sapiens
  CDR3 for alpha chain variable domain of TCR clone 255198 (TRAV1-2, TRAJ8)
CAVREDTGLQKLVF

SEQ ID NO: 510396 - protein, 12 aa, Homo sapiens
  CDR3 for beta chain variable domain of TCR clone 255198 (TRBV11-2, TRBJ2-2)
CASSLGGGELFF

SEQ ID NO: 510397 - protein, 15 aa, Homo sapiens
  CDR3 for alpha chain variable domain of TCR clone 255199 (TRAV1-1, TRAJ20)
CAVRENVANDYKPSF

SEQ ID NO: 510398 - protein, 13 aa, Homo sapiens
  CDR3 for beta chain variable domain of TCR clone 255199 (TRBV4-1, TRBJ2-2)
CASSQENTGELFF

SEQ ID NO: 510399 - protein, 12 aa, Homo sapiens
  CDR3 for alpha chain variable domain of TCR clone 255200 (TRAV12-3, TRAJ17)
CPMTLTGNKLTF

SEQ ID NO: 510400 - protein, 12 aa, Homo sapiens
  CDR3 for beta chain variable domain of TCR clone 255200 (TRBV2, TRBJ2-1)
CAYGPPGNEQFF

SEQ ID NO: 510401 - protein, 16 aa, Homo sapiens
  CDR3 for alpha chain variable domain of TCR clone 255201 (TRAV12-1, TRAJ49)
CVVNKGTGNTGNQFYF

SEQ ID NO: 510402 - protein, 14 aa, Homo sapiens
  CDR3 for beta chain variable domain of TCR clone 255201 (TRBV28, TRBJ2-7)
CASSPWDSSYEQYF

SEQ ID NO: 510403 - protein, 16 aa, Homo sapiens
  CDR3 for alpha chain variable domain of TCR clone 255202 (TRAV16, TRAJ4)
CALSRMFSGGYNKLIF

SEQ ID NO: 510404 - protein, 14 aa, Homo sapiens
  CDR3 for beta chain variable domain of TCR clone 255202 (TRBV7-8, TRBJ2-7)
CASSPRDRVYEQYF

SEQ ID NO: 510405 - protein, 10 aa, Homo sapiens
  CDR3 for alpha chain variable domain of TCR clone 255203 (TRAV9-2, TRAJ49)
CALTGNQFYF

SEQ ID NO: 510406 - protein, 16 aa, Homo sapiens
  CDR3 for beta chain variable domain of TCR clone 255203 (TRBV19, TRBJ2-3)
CASSPGAASSTDTQYF

SEQ ID NO: 510407 - protein, 14 aa, Homo sapiens
  CDR3 for alpha chain variable domain of TCR clone 255204 (TRAV17, TRAJ5)
CATSTDTGRRALTF

SEQ ID NO: 510408 - protein, 14 aa, Homo sapiens
  CDR3 for beta chain variable domain of TCR clone 255204 (TRBV3-1, TRBJ1-5)
CASSTGDSSQPQHF

SEQ ID NO: 510409 - protein, 16 aa, Homo sapiens
  CDR3 for alpha chain variable domain of TCR clone 255205 (TRAV30, TRAJ24)
CGTEIVDADSWGKFQF

SEQ ID NO: 510410 - protein, 13 aa, Homo sapiens
  CDR3 for beta chain variable domain of TCR clone 255205 (TRBV7-3, TRBJ1-1)
CASSQECGAEAFF

SEQ ID NO: 510411 - protein, 13 aa, Homo sapiens
  CDR3 for alpha chain variable domain of TCR clone 255206 (TRAV12-1, TRAJ16)
CVVNGPDGQKLLF

SEQ ID NO: 510412 - protein, 13 aa, Homo sapiens
  CDR3 for beta chain variable domain of TCR clone 255206 (TRBV2, TRBJ1-1)
CARNQTGGFHAFF

SEQ ID NO: 510413 - protein, 12 aa, Homo sapiens
  CDR3 for alpha chain variable domain of TCR clone 255207 (TRAV23/DV6, TRAJ30)
CAASKGDDKITF

SEQ ID NO: 510414 - protein, 13 aa, Homo sapiens
  CDR3 for beta chain variable domain of TCR clone 255207 (TRBV7-9, TRBJ1-2)
CASSLKQNYGYTF

SEQ ID NO: 510415 - protein, 12 aa, Homo sapiens
  CDR3 for alpha chain variable domain of TCR clone 255208 (TRAV36/DV7, TRAJ54)
CAVVRGAQRLVF

SEQ ID NO: 510416 - protein, 16 aa, Homo sapiens
  CDR3 for beta chain variable domain of TCR clone 255208 (TRBV28, TRBJ2-7)
CASSSGTSGRGYEQYF

SEQ ID NO: 510417 - protein, 17 aa, Homo sapiens
  CDR3 for alpha chain variable domain of TCR clone 255209 (TRAV3, TRAJ6)
CAVRDGPRAGGSYIPTF

SEQ ID NO: 510418 - protein, 13 aa, Homo sapiens
  CDR3 for beta chain variable domain of TCR clone 255209 (TRBV4-1, TRBJ2-7)
CASSQGQAYEQYF

SEQ ID NO: 510419 - protein, 15 aa, Homo sapiens
  CDR3 for alpha chain variable domain of TCR clone 255210 (TRAV26-1, TRAJ24)
CIVPLKTDSWGKFQF

SEQ ID NO: 510420 - protein, 14 aa, Homo sapiens
  CDR3 for beta chain variable domain of TCR clone 255210 (TRBV10-3, TRBJ2-3)
CAISEKGLGDTQYF

SEQ ID NO: 510421 - protein, 15 aa, Homo sapiens
  CDR3 for alpha chain variable domain of TCR clone 255211 (TRAV12-3, TRAJ6)
CAMSATTGGSYIPTF

SEQ ID NO: 510422 - protein, 14 aa, Homo sapiens
  CDR3 for beta chain variable domain of TCR clone 255211 (TRBV7-2, TRBJ1-3)
CASSLGTAGNTIYF

SEQ ID NO: 510423 - protein, 14 aa, Homo sapiens
  CDR3 for alpha chain variable domain of TCR clone 255212 (TRAV13-1, TRAJ5)
CAAHPDTGRRALTF

SEQ ID NO: 510424 - protein, 16 aa, Homo sapiens
  CDR3 for beta chain variable domain of TCR clone 255212 (TRBV20-1, TRBJ2-7)
CSARGSVVADIYEQYF

SEQ ID NO: 510425 - protein, 14 aa, Homo sapiens
  CDR3 for alpha chain variable domain of TCR clone 255213 (TRAV9-2, TRAJ39)
CALYIYNAGNMLTF

SEQ ID NO: 510426 - protein, 15 aa, Homo sapiens
  CDR3 for beta chain variable domain of TCR clone 255213 (TRBV6-5, TRBJ1-1)
CASSYSAAMETEAFF

SEQ ID NO: 510427 - protein, 14 aa, Homo sapiens
  CDR3 for alpha chain variable domain of TCR clone 255214 (TRAV20, TRAJ56)
CAVQFGGANSKLTF

SEQ ID NO: 510428 - protein, 14 aa, Homo sapiens
  CDR3 for beta chain variable domain of TCR clone 255214 (TRBV20-1, TRBJ2-7)
CSAKPGRSSYEQYF

SEQ ID NO: 510429 - protein, 13 aa, Homo sapiens
  CDR3 for alpha chain variable domain of TCR clone 255215 (TRAV12-1, TRAJ16)
CVVNGPDGQKLLF

SEQ ID NO: 510430 - protein, 10 aa, Homo sapiens
  CDR3 for beta chain variable domain of TCR clone 255215 (TRBV6-3, TRBJ2-7)
CASSSPGQFS

SEQ ID NO: 510431 - protein, 13 aa, Homo sapiens
  CDR3 for alpha chain variable domain of TCR clone 255216 (TRAV17, TRAJ5)
CAPMDTARRALTF

SEQ ID NO: 510432 - protein, 15 aa, Homo sapiens
  CDR3 for beta chain variable domain of TCR clone 255216 (TRBV6-6, TRBJ2-5)
CASSPGGGLEETQYF

SEQ ID NO: 510433 - protein, 15 aa, Homo sapiens
  CDR3 for alpha chain variable domain of TCR clone 255217 (TRAV13-1, TRAJ6)
CSAIHPSGGSYIPTF

SEQ ID NO: 510434 - protein, 14 aa, Homo sapiens
  CDR3 for beta chain variable domain of TCR clone 255217 (TRBV7-9, TRBJ2-2)
CASGLAINTGELFF

SEQ ID NO: 510435 - protein, 16 aa, Homo sapiens
  CDR3 for alpha chain variable domain of TCR clone 255218 (TRAV30, TRAJ24)
CGTEIVDADSWGKFQF

SEQ ID NO: 510436 - protein, 14 aa, Homo sapiens
  CDR3 for beta chain variable domain of TCR clone 255218 (TRBV4-1, TRBJ2-2)
CASSLTEDTGELFF

SEQ ID NO: 510437 - protein, 19 aa, Homo sapiens
  CDR3 for alpha chain variable domain of TCR clone 255219 (TRAV12-1, TRAJ45)
CVVTHDVGYSGGGADGLTF

SEQ ID NO: 510438 - protein, 13 aa, Homo sapiens
  CDR3 for beta chain variable domain of TCR clone 255219 (TRBV7-9, TRBJ2-3)
CASSPGSTDTQYF

SEQ ID NO: 510439 - protein, 12 aa, Homo sapiens
  CDR3 for alpha chain variable domain of TCR clone 255220 (TRAV30, TRAJ43)
CGTEERGNDMRF

SEQ ID NO: 510440 - protein, 14 aa, Homo sapiens
  CDR3 for beta chain variable domain of TCR clone 255220 (TRBV19, TRBJ2-7)
CASNFRDTFTGMYF

SEQ ID NO: 510441 - protein, 13 aa, Homo sapiens
  CDR3 for alpha chain variable domain of TCR clone 255221 (TRAV26-2, TRAJ57)
CILSRGGSEKLVF

SEQ ID NO: 510442 - protein, 16 aa, Homo sapiens
  CDR3 for beta chain variable domain of TCR clone 255221 (TRBV18, TRBJ1-5)
CASSPRTGGGNKPQHF

SEQ ID NO: 510443 - protein, 13 aa, Homo sapiens
  CDR3 for alpha chain variable domain of TCR clone 255222 (TRAV3, TRAJ30)
CAVIDRGDDKIIF

SEQ ID NO: 510444 - protein, 16 aa, Homo sapiens
  CDR3 for beta chain variable domain of TCR clone 255222 (TRBV7-3, TRBJ2-2)
CASSLKRGTLSGELFF

SEQ ID NO: 510445 - protein, 11 aa, Homo sapiens
  CDR3 for alpha chain variable domain of TCR clone 255223 (TRAV12-1, TRAJ8)
CVVTGFQKLVF

SEQ ID NO: 510446 - protein, 15 aa, Homo sapiens
  CDR3 for beta chain variable domain of TCR clone 255223 (TRBV19, TRBJ2-4)
CASSTPGIAKNIQYF

SEQ ID NO: 510447 - protein, 14 aa, Homo sapiens
  CDR3 for alpha chain variable domain of TCR clone 255224 (TRAV29/DV5, TRAJ36)
CAARRKTRANNLFF

SEQ ID NO: 510448 - protein, 12 aa, Homo sapiens
  CDR3 for beta chain variable domain of TCR clone 255224 (TRBV12-5, TRBJ2-5)
CASGQGVETQYF

SEQ ID NO: 510449 - protein, 15 aa, Homo sapiens
  CDR3 for alpha chain variable domain of TCR clone 255225 (TRAV35, TRAJ42)
CAGRLYGGSQGNLIF

SEQ ID NO: 510450 - protein, 12 aa, Homo sapiens
  CDR3 for beta chain variable domain of TCR clone 255225 (TRBV11-2, TRBJ2-1)
CASSPGNNEQFF

SEQ ID NO: 510451 - protein, 17 aa, Homo sapiens
  CDR3 for alpha chain variable domain of TCR clone 255226 (TRAV3, TRAJ42)
CAVRDRDYGGSQGNLTF

SEQ ID NO: 510452 - protein, 20 aa, Homo sapiens
  CDR3 for beta chain variable domain of TCR clone 255226 (TRBV28, TRBJ2-1)
CASTPIGRSPGLAGGNEQFF

SEQ ID NO: 510453 - protein, 14 aa, Homo sapiens
  CDR3 for alpha chain variable domain of TCR clone 255227 (TRAV1-2, TRAJ16)
CAVNRFSDGQKLLF

SEQ ID NO: 510454 - protein, 19 aa, Homo sapiens
  CDR3 for beta chain variable domain of TCR clone 255227 (TRBV6-1, TRBJ1-3)
CASVQGGGWKHHVFWRGKL

SEQ ID NO: 510455 - protein, 13 aa, Homo sapiens
  CDR3 for alpha chain variable domain of TCR clone 255228 (TRAV13-1, TRAJ6)
CAASRGGSYIATF

SEQ ID NO: 510456 - protein, 15 aa, Homo sapiens
  CDR3 for beta chain variable domain of TCR clone 255228 (TRBV25-1, TRBJ2-5)
CASSDTGTHQETQYF

SEQ ID NO: 510457 - protein, 14 aa, Homo sapiens
  CDR3 for alpha chain variable domain of TCR clone 255229 (TRAV13-1, TRAJ31)
CAASSRPDNARLMF

SEQ ID NO: 510458 - protein, 15 aa, Homo sapiens
  CDR3 for beta chain variable domain of TCR clone 255229 (TRBV4-2, TRBJ2-4)
CASSPLGAAKNIQYF

SEQ ID NO: 510459 - protein, 14 aa, Homo sapiens
  CDR3 for alpha chain variable domain of TCR clone 255230 (TRAV1-2, TRAJ16)
CAVNRFSDGQKLLF

SEQ ID NO: 510460 - protein, 16 aa, Homo sapiens
  CDR3 for beta chain variable domain of TCR clone 255230 (TRBV12-5, TRBJ2-5)
CASGPRASGNQETQYF

SEQ ID NO: 510461 - protein, 10 aa, Homo sapiens
  CDR3 for alpha chain variable domain of TCR clone 255231 (TRAV26-2, TRAJ20)
CILGGYKLSF

SEQ ID NO: 510462 - protein, 15 aa, Homo sapiens
  CDR3 for beta chain variable domain of TCR clone 255231 (TRBV11-2, TRBJ2-2)
CASSSDRVNAGELFF

SEQ ID NO: 510463 - protein, 17 aa, Homo sapiens
  CDR3 for alpha chain variable domain of TCR clone 255232 (TRAV38-2/DV8, TRAJ56)
CAYRSEVGTGANRKLTF

SEQ ID NO: 510464 - protein, 14 aa, Homo sapiens
  CDR3 for beta chain variable domain of TCR clone 255232 (TRBV11-1, TRBJ1-1)
CASSLEHPNTEAFF

SEQ ID NO: 510465 - protein, 14 aa, Homo sapiens
  CDR3 for alpha chain variable domain of TCR clone 255233 (TRAV1-1, TRAJ27)
CAVIYNTNAVKSTF

SEQ ID NO: 510466 - protein, 15 aa, Homo sapiens
  CDR3 for beta chain variable domain of TCR clone 255233 (TRBV7-2, TRBJ2-1)
CSSSSGLAGGNEQFF

SEQ ID NO: 510467 - protein, 13 aa, Homo sapiens
  CDR3 for alpha chain variable domain of TCR clone 255234 (TRAV17, TRAJ5)
CALRGTGGRALTF

SEQ ID NO: 510468 - protein, 11 aa, Homo sapiens
  CDR3 for beta chain variable domain of TCR clone 255234 (TRBV6-3, TRBJ2-3)
CATGQADTQYF

SEQ ID NO: 510469 - protein, 13 aa, Homo sapiens
  CDR3 for alpha chain variable domain of TCR clone 255235 (TRAV27, TRAJ6)
CAGGTRGSYIPTF

SEQ ID NO: 510470 - protein, 14 aa, Homo sapiens
  CDR3 for beta chain variable domain of TCR clone 255235 (TRBV6-3, TRBJ1-1)
CASSYLRRDTEAFF

SEQ ID NO: 510471 - protein, 18 aa, Homo sapiens
  CDR3 for alpha chain variable domain of TCR clone 255236 (TRAV12-2, )
CAVEDIQNPDPAVYQLRD

SEQ ID NO: 510472 - protein, 18 aa, Homo sapiens
  CDR3 for beta chain variable domain of TCR clone 255236 (TRBV11-2, TRBJ2-3)
CASSLGGASRWAPNTQYF

SEQ ID NO: 510473 - protein, 12 aa, Homo sapiens
  CDR3 for alpha chain variable domain of TCR clone 255237 (TRAV8-3, TRAJ26)
CAGDNYGQNFVF

SEQ ID NO: 510474 - protein, 14 aa, Homo sapiens
  CDR3 for beta chain variable domain of TCR clone 255237 (TRBV6-3, TRBJ2-2)
CASTYTPDTGELFF

SEQ ID NO: 510475 - protein, 19 aa, Homo sapiens
  CDR3 for alpha chain variable domain of TCR clone 255238 (TRAV1-2, TRAJ26)
CLLPLCCERPDNYGQNFVF

SEQ ID NO: 510476 - protein, 13 aa, Homo sapiens
  CDR3 for beta chain variable domain of TCR clone 255238 (TRBV19, TRBJ1-2)
CARSQGQVYGYTF

SEQ ID NO: 510477 - protein, 12 aa, Homo sapiens
  CDR3 for alpha chain variable domain of TCR clone 255239 (TRAV13-1, TRAJ21)
CAAFFNFYKFYF

SEQ ID NO: 510478 - protein, 14 aa, Homo sapiens
  CDR3 for beta chain variable domain of TCR clone 255239 (TRBV4-1, TRBJ2-7)
CASRLTSGSYEQYF

SEQ ID NO: 510479 - protein, 13 aa, Homo sapiens
  CDR3 for alpha chain variable domain of TCR clone 255240 (TRAV8-6, TRAJ49)
CAFITNTGNQFYF

SEQ ID NO: 510480 - protein, 13 aa, Homo sapiens
  CDR3 for beta chain variable domain of TCR clone 255240 (TRBV7-9, TRBJ2-7)
CASSFAGAYEQYF

SEQ ID NO: 510481 - protein, 12 aa, Homo sapiens
  CDR3 for alpha chain variable domain of TCR clone 255241 (TRAV35, TRAJ49)
CAGWNTGNQFYF

SEQ ID NO: 510482 - protein, 14 aa, Homo sapiens
  CDR3 for beta chain variable domain of TCR clone 255241 (TRBV4-1, TRBJ2-2)
CASSQAVNTGELFF

SEQ ID NO: 510483 - protein, 14 aa, Homo sapiens
  CDR3 for alpha chain variable domain of TCR clone 255242 (TRAV3, TRAJ37)
CAVKESGNTGKLIF

SEQ ID NO: 510484 - protein, 14 aa, Homo sapiens
  CDR3 for beta chain variable domain of TCR clone 255242 (TRBV7-8, TRBJ2-3)
CASSLEAGTDTQYF

SEQ ID NO: 510485 - protein, 15 aa, Homo sapiens
  CDR3 for alpha chain variable domain of TCR clone 255243 (TRAV8-2, TRAJ40)
CVVLGTTSGTYKYIF

SEQ ID NO: 510486 - protein, 14 aa, Homo sapiens
  CDR3 for beta chain variable domain of TCR clone 255243 (TRBV20-1, TRBJ2-7)
CSAKRGRSSYEQYF

SEQ ID NO: 510487 - protein, 13 aa, Homo sapiens
  CDR3 for alpha chain variable domain of TCR clone 255244 (TRAV8-4, TRAJ34)
CAVTLYNTDELIF

SEQ ID NO: 510488 - protein, 10 aa, Homo sapiens
  CDR3 for beta chain variable domain of TCR clone 255244 (TRBV7-2, TRBJ2-2)
CASSPSWRGA

SEQ ID NO: 510489 - protein, 11 aa, Homo sapiens
  CDR3 for alpha chain variable domain of TCR clone 255245 (TRAV38-2/DV8, TRAJ43)
CAYRTLNDMRF

SEQ ID NO: 510490 - protein, 17 aa, Homo sapiens
  CDR3 for beta chain variable domain of TCR clone 255245 (TRBV7-8, TRBJ2-6)
CASSAGTGGAGANDLTF

SEQ ID NO: 510491 - protein, 14 aa, Homo sapiens
  CDR3 for alpha chain variable domain of TCR clone 255246 (TRAV8-4, TRAJ34)
CAVSDPGDTDKPIF

SEQ ID NO: 510492 - protein, 17 aa, Homo sapiens
  CDR3 for beta chain variable domain of TCR clone 255246 (TRBV7-3, TRBJ2-3)
CASSLMKRMRGADTQYF

SEQ ID NO: 510493 - protein, 14 aa, Homo sapiens
  CDR3 for alpha chain variable domain of TCR clone 255247 (TRAV17, TRAJ56)
CATVPAGANSKLTF

SEQ ID NO: 510494 - protein, 15 aa, Homo sapiens
  CDR3 for beta chain variable domain of TCR clone 255247 (TRBV7-9, TRBJ1-4)
CASSRTGGFNEKLFF

SEQ ID NO: 510495 - protein, 16 aa, Homo sapiens
  CDR3 for alpha chain variable domain of TCR clone 255248 (TRAV30, TRAJ24)
CGTEIVDADSRGKFQF

SEQ ID NO: 510496 - protein, 14 aa, Homo sapiens
  CDR3 for beta chain variable domain of TCR clone 255248 (TRBV19, TRBJ2-7)
CASNFRDTFTGMYF

SEQ ID NO: 510497 - protein, 13 aa, Homo sapiens
  CDR3 for alpha chain variable domain of TCR clone 255249 (TRAV8-3, TRAJ34)
CAVGAYNTDKLIF

SEQ ID NO: 510498 - protein, 15 aa, Homo sapiens
  CDR3 for beta chain variable domain of TCR clone 255249 (TRBV28, TRBJ2-1)
CASSIIAGGRSEQFF

SEQ ID NO: 510499 - protein, 16 aa, Homo sapiens
  CDR3 for alpha chain variable domain of TCR clone 255250 (TRAV30, TRAJ24)
CGTEIVDADSWGKFQF

SEQ ID NO: 510500 - protein, 15 aa, Homo sapiens
  CDR3 for beta chain variable domain of TCR clone 255250 (TRBV28, TRBJ2-1)
CASSIIAGGRSEQFS

SEQ ID NO: 510501 - protein, 14 aa, Homo sapiens
  CDR3 for alpha chain variable domain of TCR clone 255251 (TRAV23/DV6, TRAJ3)
CAASMASSASKIIF

SEQ ID NO: 510502 - protein, 13 aa, Homo sapiens
  CDR3 for beta chain variable domain of TCR clone 255251 (TRBV27, TRBJ2-5)
CASFSRVLETQYF

SEQ ID NO: 510503 - protein, 23 aa, Homo sapiens
  CDR3 for alpha chain variable domain of TCR clone 255252 (TRAV26-1, TRAJ38)
CIADNAGNNHIQNPDPAVYHLRN

SEQ ID NO: 510504 - protein, 13 aa, Homo sapiens
  CDR3 for beta chain variable domain of TCR clone 255252 (TRBV20-1, TRBJ1-1)
CSARGGGNTEAFF

SEQ ID NO: 510505 - protein, 16 aa, Homo sapiens
  CDR3 for alpha chain variable domain of TCR clone 255253 (TRAV8-3, TRAJ18)
CAVALDRGSNLGRLYF

SEQ ID NO: 510506 - protein, 11 aa, Homo sapiens
  CDR3 for beta chain variable domain of TCR clone 255253 (TRBV29-1, TRBJ1-1)
CSVEILTEAFF

SEQ ID NO: 510507 - protein, 13 aa, Homo sapiens
  CDR3 for alpha chain variable domain of TCR clone 255254 (TRAV2, TRAJ40)
YAVVTSGTYKYIF

SEQ ID NO: 510508 - protein, 15 aa, Homo sapiens
  CDR3 for beta chain variable domain of TCR clone 255254 (TRBV6-6, TRBJ2-5)
CASSPRGGLEETQYF

SEQ ID NO: 510509 - protein, 15 aa, Homo sapiens
  CDR3 for alpha chain variable domain of TCR clone 255255 (TRAV34, TRAJ38)
CGADFTPGNNRKLIW

SEQ ID NO: 510510 - protein, 14 aa, Homo sapiens
  CDR3 for beta chain variable domain of TCR clone 255255 (TRBV12-5, TRBJ2-5)
CASGSRTHQETQFF

SEQ ID NO: 510511 - protein, 14 aa, Homo sapiens
  CDR3 for alpha chain variable domain of TCR clone 255256 (TRAV12-1, TRAJ17)
CVVNYKAAGNKLTF

SEQ ID NO: 510512 - protein, 13 aa, Homo sapiens
  CDR3 for beta chain variable domain of TCR clone 255256 (TRBV7-8, TRBJ2-2)
CASSSSRTGELFF

SEQ ID NO: 510513 - protein, 13 aa, Homo sapiens
  CDR3 for alpha chain variable domain of TCR clone 255257 (TRAV8-3, TRAJ21)
CAVGIYNFNKFYF

SEQ ID NO: 510514 - protein, 13 aa, Homo sapiens
  CDR3 for beta chain variable domain of TCR clone 255257 (TRBV7-7, TRBJ2-5)
CASSLRAIEAQYF

SEQ ID NO: 510515 - protein, 13 aa, Homo sapiens
  CDR3 for alpha chain variable domain of TCR clone 255258 (TRAV29/DV5, TRAJ44)
CAASTGTASKLTF

SEQ ID NO: 510516 - protein, 16 aa, Homo sapiens
  CDR3 for beta chain variable domain of TCR clone 255258 (TRBV19, TRBJ2-1)
CASSMGGGSSYNEQFF

SEQ ID NO: 510517 - protein, 15 aa, Homo sapiens
  CDR3 for alpha chain variable domain of TCR clone 255259 (TRAV1-1, TRAJ24)
CALSGGTDSWGELQF

SEQ ID NO: 510518 - protein, 16 aa, Homo sapiens
  CDR3 for beta chain variable domain of TCR clone 255259 (TRBV2, TRBJ2-7)
CASSEPWTGPPYEQYF

SEQ ID NO: 510519 - protein, 14 aa, Homo sapiens
  CDR3 for alpha chain variable domain of TCR clone 255260 (TRAV3, TRAJ28)
CAVRRGAGSSQLTF

SEQ ID NO: 510520 - protein, 16 aa, Homo sapiens
  CDR3 for beta chain variable domain of TCR clone 255260 (TRBV4-1, TRBJ2-7)
CASSQEWTSGPLEQYF

SEQ ID NO: 510521 - protein, 11 aa, Homo sapiens
  CDR3 for alpha chain variable domain of TCR clone 255261 (TRAV1-1, TRAJ5)
CAVRVRRALTF

SEQ ID NO: 510522 - protein, 16 aa, Homo sapiens
  CDR3 for beta chain variable domain of TCR clone 255261 (TRBV20-1, TRBJ2-1)
CSASASGYSSYNEQFF

SEQ ID NO: 510523 - protein, 18 aa, Homo sapiens
  CDR3 for alpha chain variable domain of TCR clone 255262 (TRAV9-2, TRAJ52)
CALSRHNAGGTSYGKLTF

SEQ ID NO: 510524 - protein, 17 aa, Homo sapiens
  CDR3 for beta chain variable domain of TCR clone 255262 (TRBV4-2, TRBJ1-1)
CASTQFGGGSGNTEAFF

SEQ ID NO: 510525 - protein, 12 aa, Homo sapiens
  CDR3 for alpha chain variable domain of TCR clone 255263 (TRAV35, TRAJ28)
GVAGAGSYQLTF

SEQ ID NO: 510526 - protein, 15 aa, Homo sapiens
  CDR3 for beta chain variable domain of TCR clone 255263 (TRBV5-1, TRBJ2-1)
CASSPPRAPYNEQFF

SEQ ID NO: 510527 - protein, 12 aa, Homo sapiens
  CDR3 for alpha chain variable domain of TCR clone 255264 (TRAV13-1, TRAJ21)
CSAKEGFNKFYF

SEQ ID NO: 510528 - protein, 14 aa, Homo sapiens
  CDR3 for beta chain variable domain of TCR clone 255264 (TRBV6-1, TRBJ1-3)
CASVQGGGGNTIYF

SEQ ID NO: 510529 - protein, 15 aa, Homo sapiens
  CDR3 for alpha chain variable domain of TCR clone 255265 (TRAV21, TRAJ24)
CAARSSTDSWGKLQF

SEQ ID NO: 510530 - protein, 13 aa, Homo sapiens
  CDR3 for beta chain variable domain of TCR clone 255265 (TRBV11-2, TRBJ2-5)
GASSSTGEETQYF

SEQ ID NO: 510531 - protein, 14 aa, Homo sapiens
  CDR3 for alpha chain variable domain of TCR clone 255266 (TRAV1-2, TRAJ16)
CAVNRFSDGQKLLF

SEQ ID NO: 510532 - protein, 17 aa, Homo sapiens
  CDR3 for beta chain variable domain of TCR clone 255266 (TRBV20-1, TRBJ2-1)
CSASSSGLAGSYNEQFC

SEQ ID NO: 510533 - protein, 14 aa, Homo sapiens
  CDR3 for alpha chain variable domain of TCR clone 255267 (TRAV1-2, TRAJ8)
CAVREDTGFQKLGF

SEQ ID NO: 510534 - protein, 14 aa, Homo sapiens
  CDR3 for beta chain variable domain of TCR clone 255267 (TRBV5-4, TRBJ1-1)
CASSLDSRRDEAFF

SEQ ID NO: 510535 - protein, 17 aa, Homo sapiens
  CDR3 for alpha chain variable domain of TCR clone 255268 (TRAV1-1, TRAJ28)
CAVDPAYSGAGIYQLTF

SEQ ID NO: 510536 - protein, 14 aa, Homo sapiens
  CDR3 for beta chain variable domain of TCR clone 255268 (TRBV19, TRBJ2-1)
CASPTFVLSGEQFF

SEQ ID NO: 510537 - protein, 12 aa, Homo sapiens
  CDR3 for alpha chain variable domain of TCR clone 255269 (TRAV27, TRAJ20)
CAGASNDYKLSF

SEQ ID NO: 510538 - protein, 15 aa, Homo sapiens
  CDR3 for beta chain variable domain of TCR clone 255269 (TRBV5-7, TRBJ1-5)
CASSYGKLWDQPQHF

SEQ ID NO: 510539 - protein, 15 aa, Homo sapiens
  CDR3 for alpha chain variable domain of TCR clone 255270 (TRAV38-1, TRAJ37)
CAFIHGSGNTGKLIF

SEQ ID NO: 510540 - protein, 12 aa, Homo sapiens
  CDR3 for beta chain variable domain of TCR clone 255270 (TRBV7-9, TRBJ2-7)
CASSFGSYEQYC

SEQ ID NO: 510541 - protein, 12 aa, Homo sapiens
  CDR3 for alpha chain variable domain of TCR clone 255271 (TRAV3, TRAJ20)
CAVRDPDYKRSF

SEQ ID NO: 510542 - protein, 13 aa, Homo sapiens
  CDR3 for beta chain variable domain of TCR clone 255271 (TRBV9, TRBJ2-1)
CASSVGQGGEQFF

SEQ ID NO: 510543 - protein, 13 aa, Homo sapiens
  CDR3 for alpha chain variable domain of TCR clone 255272 (TRAV20, TRAJ37)
CAGCSSNTGKLIF

SEQ ID NO: 510544 - protein, 14 aa, Homo sapiens
  CDR3 for beta chain variable domain of TCR clone 255272 (TRBV20-1, TRBJ2-5)
SAVLETGGPGRQYF

SEQ ID NO: 510545 - protein, 14 aa, Homo sapiens
  CDR3 for alpha chain variable domain of TCR clone 255273 (TRAV12-2, TRAJ40)
CAVKIPSGTYKYIF

SEQ ID NO: 510546 - protein, 13 aa, Homo sapiens
  CDR3 for beta chain variable domain of TCR clone 255273 (TRBV4-2, TRBJ2-1)
CASSPGTYNEQFF

SEQ ID NO: 510547 - protein, 16 aa, Homo sapiens
  CDR3 for alpha chain variable domain of TCR clone 255274 (TRAV14/DV4, TRAJ20)
CAMREGRSRDDYKLSF

SEQ ID NO: 510548 - protein, 13 aa, Homo sapiens
  CDR3 for beta chain variable domain of TCR clone 255274 (TRBV12-4, TRBJ2-6)
CASSGTGANVLTF

SEQ ID NO: 510549 - protein, 12 aa, Homo sapiens
  CDR3 for alpha chain variable domain of TCR clone 255275 (TRAV12-1, TRAJ40)
CVVYSGTYKYIF

SEQ ID NO: 510550 - protein, 18 aa, Homo sapiens
  CDR3 for beta chain variable domain of TCR clone 255275 (TRBV11-2, TRBJ2-3)
CARSLEGASRGAPNTQYF

SEQ ID NO: 510551 - protein, 11 aa, Homo sapiens
  CDR3 for alpha chain variable domain of TCR clone 255276 (TRAV2, TRAJ33)
CAVDSNYQLIW

SEQ ID NO: 510552 - protein, 18 aa, Homo sapiens
  CDR3 for beta chain variable domain of TCR clone 255276 (TRBV13, TRBJ2-6)
CASSPMTSGGSGANVLTF

SEQ ID NO: 510553 - protein, 12 aa, Homo sapiens
  CDR3 for alpha chain variable domain of TCR clone 255277 (TRAV13-1, TRAJ30)
CAASYRDDKIIF

SEQ ID NO: 510554 - protein, 12 aa, Homo sapiens
  CDR3 for beta chain variable domain of TCR clone 255277 (TRBV7-8, TRBJ2-7)
CASSLGDREQYF

SEQ ID NO: 510555 - protein, 13 aa, Homo sapiens
  CDR3 for alpha chain variable domain of TCR clone 255278 (TRAV12-1, TRAJ9)
CVVLNTGGFKSIF

SEQ ID NO: 510556 - protein, 13 aa, Homo sapiens
  CDR3 for beta chain variable domain of TCR clone 255278 (TRBV20-1, TRBJ1-1)
CSARGGGNTEAFF

SEQ ID NO: 510557 - protein, 15 aa, Homo sapiens
  CDR3 for alpha chain variable domain of TCR clone 255279 (TRAV27, TRAJ53)
CAGVVGGGSNYKLTF

SEQ ID NO: 510558 - protein, 12 aa, Homo sapiens
  CDR3 for beta chain variable domain of TCR clone 255279 (TRBV7-8, TRBJ2-5)
CASSPRVETQYF

SEQ ID NO: 510559 - protein, 17 aa, Homo sapiens
  CDR3 for alpha chain variable domain of TCR clone 255280 (TRAV36/DV7, TRAJ52)
CAVAQRAGGTSHGKLTF

SEQ ID NO: 510560 - protein, 17 aa, Homo sapiens
  CDR3 for beta chain variable domain of TCR clone 255280 (TRBV28, TRBJ2-5)
CASSTPEGDALQETQYF

SEQ ID NO: 510561 - protein, 13 aa, Homo sapiens
  CDR3 for alpha chain variable domain of TCR clone 255281 (TRAV16, TRAJ31)
CALSAHNNARLMF

SEQ ID NO: 510562 - protein, 17 aa, Homo sapiens
  CDR3 for beta chain variable domain of TCR clone 255281 (TRBV12-4, TRBJ2-1)
CASSPGRAGGRINEQFF

SEQ ID NO: 510563 - protein, 15 aa, Homo sapiens
  CDR3 for alpha chain variable domain of TCR clone 255282 (TRAV8-3, TRAJ11)
CAVGLLNSGYSTLTF

SEQ ID NO: 510564 - protein, 19 aa, Homo sapiens
  CDR3 for beta chain variable domain of TCR clone 255282 (TRBV7-9, TRBJ1-2)
KKSRLLSDRFSSGEDGYTF

SEQ ID NO: 510565 - protein, 14 aa, Homo sapiens
  CDR3 for alpha chain variable domain of TCR clone 255283 (TRAV12-2, TRAJ24)
CAVTPADSWGKLQF

SEQ ID NO: 510566 - protein, 15 aa, Homo sapiens
  CDR3 for beta chain variable domain of TCR clone 255283 (TRBV11-2, TRBJ2-1)
CASSKNRGLIYEQFF

SEQ ID NO: 510567 - protein, 14 aa, Homo sapiens
  CDR3 for alpha chain variable domain of TCR clone 255284 (TRAV1-2, TRAJ8)
CAVREDTGFQKLVF

SEQ ID NO: 510568 - protein, 11 aa, Homo sapiens
  CDR3 for beta chain variable domain of TCR clone 255284 (TRBV11-3, TRBJ2-7)
CSSSRTYEQYV

SEQ ID NO: 510569 - protein, 13 aa, Homo sapiens
  CDR3 for alpha chain variable domain of TCR clone 255285 (TRAV8-3, TRAJ47)
CAVSMEYGNKLVF

SEQ ID NO: 510570 - protein, 14 aa, Homo sapiens
  CDR3 for beta chain variable domain of TCR clone 255285 (TRBV2, TRBJ1-5)
CASSGIGFNQPQHF

SEQ ID NO: 510571 - protein, 11 aa, Homo sapiens
  CDR3 for alpha chain variable domain of TCR clone 255286 (TRAV2, TRAJ33)
CAVDSNYQLIW

SEQ ID NO: 510572 - protein, 15 aa, Homo sapiens
  CDR3 for beta chain variable domain of TCR clone 255286 (TRBV7-2, TRBJ1-2)
CASSPRAGWNYGYTF

SEQ ID NO: 510573 - protein, 10 aa, Homo sapiens
  CDR3 for alpha chain variable domain of TCR clone 255287 (TRAV12-2, TRAJ52)
RSTSYGKLTF

SEQ ID NO: 510574 - protein, 17 aa, Homo sapiens
  CDR3 for beta chain variable domain of TCR clone 255287 (TRBV7-8, TRBJ2-6)
CASSAGTGGAGANVLTF

SEQ ID NO: 510575 - protein, 15 aa, Homo sapiens
  CDR3 for alpha chain variable domain of TCR clone 255288 (TRAV29/DV5, TRAJ24)
CAASGATDSWGKFQF

SEQ ID NO: 510576 - protein, 14 aa, Homo sapiens
  CDR3 for beta chain variable domain of TCR clone 255288 (TRBV7-9, TRBJ1-2)
CASSRQGANYGYTF

SEQ ID NO: 510577 - protein, 14 aa, Homo sapiens
  CDR3 for alpha chain variable domain of TCR clone 255289 (TRAV4, TRAJ9)
CLVGSGTVGFKTIF

SEQ ID NO: 510578 - protein, 15 aa, Homo sapiens
  CDR3 for beta chain variable domain of TCR clone 255289 (TRBV7-2, TRBJ2-1)
CASSLASGRVNEQFF

SEQ ID NO: 510579 - protein, 15 aa, Homo sapiens
  CDR3 for alpha chain variable domain of TCR clone 255290 (TRAV13-1, TRAJ10)
CAATMLTGGGNKLTF

SEQ ID NO: 510580 - protein, 15 aa, Homo sapiens
  CDR3 for beta chain variable domain of TCR clone 255290 (TRBV2, TRBJ2-7)
CASTLLGSGATEQYF

SEQ ID NO: 510581 - protein, 16 aa, Homo sapiens
  CDR3 for alpha chain variable domain of TCR clone 255291 (TRAV30, TRAJ24)
CGTEIVDADSWGKFQF

SEQ ID NO: 510582 - protein, 14 aa, Homo sapiens
  CDR3 for beta chain variable domain of TCR clone 255291 (TRBV11-1, TRBJ2-7)
CASSLEREWGEQYF

SEQ ID NO: 510583 - protein, 12 aa, Homo sapiens
  CDR3 for alpha chain variable domain of TCR clone 255292 (TRAV35, TRAJ12)
CAGRDSSYKLIF

SEQ ID NO: 510584 - protein, 14 aa, Homo sapiens
  CDR3 for beta chain variable domain of TCR clone 255292 (TRBV28, TRBJ2-5)
CASSLYRGTETQYF

SEQ ID NO: 510585 - protein, 13 aa, Homo sapiens
  CDR3 for alpha chain variable domain of TCR clone 255293 (TRAV29/DV5, TRAJ44)
CAASTGTASKPTF

SEQ ID NO: 510586 - protein, 13 aa, Homo sapiens
  CDR3 for beta chain variable domain of TCR clone 255293 (TRBV19, TRBJ2-7)
CASRKAGGSEQYF

SEQ ID NO: 510587 - protein, 15 aa, Homo sapiens
  CDR3 for alpha chain variable domain of TCR clone 255294 (TRAV26-1, TRAJ42)
CIVRVKGGSQGNLIF

SEQ ID NO: 510588 - protein, 14 aa, Homo sapiens
  CDR3 for beta chain variable domain of TCR clone 255294 (TRBV19, TRBJ2-2)
CATMGHANTGELFF

SEQ ID NO: 510589 - protein, 13 aa, Homo sapiens
  CDR3 for alpha chain variable domain of TCR clone 255295 (TRAV2, TRAJ40)
CAVVISGTYKYIF

SEQ ID NO: 510590 - protein, 16 aa, Homo sapiens
  CDR3 for beta chain variable domain of TCR clone 255295 (TRBV19, TRBJ2-2)
CASRSPGTGATGELFF

SEQ ID NO: 510591 - protein, 15 aa, Homo sapiens
  CDR3 for alpha chain variable domain of TCR clone 255296 (TRAV17, TRAJ57)
CATGPSQGGSEKLVF

SEQ ID NO: 510592 - protein, 14 aa, Homo sapiens
  CDR3 for beta chain variable domain of TCR clone 255296 (TRBV12-5, TRBJ2-5)
CVSGSRTHQETQYF

SEQ ID NO: 510593 - protein, 11 aa, Homo sapiens
  CDR3 for alpha chain variable domain of TCR clone 255297 (TRAV8-4, TRAJ34)
CAVSWTDKLIF

SEQ ID NO: 510594 - protein, 13 aa, Homo sapiens
  CDR3 for beta chain variable domain of TCR clone 255297 (TRBV10-3, TRBJ2-7)
CASKLAVNYEQYF

SEQ ID NO: 510595 - protein, 11 aa, Homo sapiens
  CDR3 for alpha chain variable domain of TCR clone 255298 (TRAV35, TRAJ22)
CAGPGVGQLTF

SEQ ID NO: 510596 - protein, 17 aa, Homo sapiens
  CDR3 for beta chain variable domain of TCR clone 255298 (TRBV3-1, TRBJ2-5)
CASSNWGGTSGQETQYF

SEQ ID NO: 510597 - protein, 15 aa, Homo sapiens
  CDR3 for alpha chain variable domain of TCR clone 255299 (TRAV21, TRAJ53)
CATLNSGGSNYKLTF

SEQ ID NO: 510598 - protein, 13 aa, Homo sapiens
  CDR3 for beta chain variable domain of TCR clone 255299 (TRBV11-2, TRBJ2-7)
CASSGARPYEQYF

SEQ ID NO: 510599 - protein, 14 aa, Homo sapiens
  CDR3 for alpha chain variable domain of TCR clone 255300 (TRAV1-2, TRAJ8)
CAVGEDTGFQKLVF

SEQ ID NO: 510600 - protein, 15 aa, Homo sapiens
  CDR3 for beta chain variable domain of TCR clone 255300 (TRBV20-1, TRBJ2-3)
CSAEPLAGHGDTQYF

SEQ ID NO: 510601 - protein, 13 aa, Homo sapiens
  CDR3 for alpha chain variable domain of TCR clone 255301 (TRAV3, TRAJ13)
CAVRDGGYQQVTF

SEQ ID NO: 510602 - protein, 14 aa, Homo sapiens
  CDR3 for beta chain variable domain of TCR clone 255301 (TRBV15, TRBJ2-2)
CATSSGWNTGELFF

SEQ ID NO: 510603 - protein, 13 aa, Homo sapiens
  CDR3 for alpha chain variable domain of TCR clone 255302 (TRAV17, TRAJ39)
CATDSNAGNMLTF

SEQ ID NO: 510604 - protein, 14 aa, Homo sapiens
  CDR3 for beta chain variable domain of TCR clone 255302 (TRBV20-1, TRBJ1-1)
CSAQTRIGGTEAFF

SEQ ID NO: 510605 - protein, 13 aa, Homo sapiens
  CDR3 for alpha chain variable domain of TCR clone 255303 (TRAV12-2, TRAJ37)
CAGGSGNTGKLIF

SEQ ID NO: 510606 - protein, 13 aa, Homo sapiens
  CDR3 for beta chain variable domain of TCR clone 255303 (TRBV11-2, TRBJ2-1)
CASSLDLVNEQFF

SEQ ID NO: 510607 - protein, 17 aa, Homo sapiens
  CDR3 for alpha chain variable domain of TCR clone 255304 (TRAV36/DV7, TRAJ42)
CAGGGMNYGGSQGNLIF

SEQ ID NO: 510608 - protein, 15 aa, Homo sapiens
  CDR3 for beta chain variable domain of TCR clone 255304 (TRBV7-3, TRBJ2-1)
CASSPQRGGYNEQFF

SEQ ID NO: 510609 - protein, 14 aa, Homo sapiens
  CDR3 for alpha chain variable domain of TCR clone 255305 (TRAV38-2/DV8, TRAJ30)
CAYMDGLGRDKIIF

SEQ ID NO: 510610 - protein, 15 aa, Homo sapiens
  CDR3 for beta chain variable domain of TCR clone 255305 (TRBV7-9, TRBJ2-2)
CASRPADRDTGELFF

SEQ ID NO: 510611 - protein, 11 aa, Homo sapiens
  CDR3 for alpha chain variable domain of TCR clone 255306 (TRAV16, TRAJ33)
CALHSNYQLIW

SEQ ID NO: 510612 - protein, 15 aa, Homo sapiens
  CDR3 for beta chain variable domain of TCR clone 255306 (TRBV4-1, TRBJ2-7)
CASCQQGQGFDEQYF

SEQ ID NO: 510613 - protein, 13 aa, Homo sapiens
  CDR3 for alpha chain variable domain of TCR clone 255307 (TRAV17, TRAJ5)
CAPMDTGRRALAF

SEQ ID NO: 510614 - protein, 15 aa, Homo sapiens
  CDR3 for beta chain variable domain of TCR clone 255307 (TRBV6-6, TRBJ2-5)
CASRPGGGLEETQYF

SEQ ID NO: 510615 - protein, 14 aa, Homo sapiens
  CDR3 for alpha chain variable domain of TCR clone 255308 (TRAV16, TRAJ37)
CALDISGNTGKLIF

SEQ ID NO: 510616 - protein, 14 aa, Homo sapiens
  CDR3 for beta chain variable domain of TCR clone 255308 (TRBV7-9, TRBJ2-1)
CASSPRDSLYEQFF

SEQ ID NO: 510617 - protein, 14 aa, Homo sapiens
  CDR3 for alpha chain variable domain of TCR clone 255309 (TRAV8-3, TRAJ4)
CAVGAAGGDNKLIF

SEQ ID NO: 510618 - protein, 13 aa, Homo sapiens
  CDR3 for beta chain variable domain of TCR clone 255309 (TRBV3-1, TRBJ1-1)
CASSPGVITEAFF

SEQ ID NO: 510619 - protein, 12 aa, Homo sapiens
  CDR3 for alpha chain variable domain of TCR clone 255310 (TRAV3, TRAJ27)
CAVRDKAGKSTF

SEQ ID NO: 510620 - protein, 13 aa, Homo sapiens
  CDR3 for beta chain variable domain of TCR clone 255310 (TRBV6-5, TRBJ2-5)
CASSPRGGETQYF

SEQ ID NO: 510621 - protein, 12 aa, Homo sapiens
  CDR3 for alpha chain variable domain of TCR clone 255311 (TRAV30, TRAJ43)
CGTEERGNDMRF

SEQ ID NO: 510622 - protein, 17 aa, Homo sapiens
  CDR3 for beta chain variable domain of TCR clone 255311 (TRBV11-2, TRBJ2-1)
CASSVYPPGVEYNEQFF

SEQ ID NO: 510623 - protein, 13 aa, Homo sapiens
  CDR3 for alpha chain variable domain of TCR clone 255312 (TRAV16, TRAJ34)
CALSPYNTDKRIF

SEQ ID NO: 510624 - protein, 17 aa, Homo sapiens
  CDR3 for beta chain variable domain of TCR clone 255312 (TRBV5-1, TRBJ2-1)
CASSTGTSGYSYNEQFF

SEQ ID NO: 510625 - protein, 12 aa, Homo sapiens
  CDR3 for alpha chain variable domain of TCR clone 255313 (TRAV3, TRAJ20)
CAVRDHDYKLSF

SEQ ID NO: 510626 - protein, 13 aa, Homo sapiens
  CDR3 for beta chain variable domain of TCR clone 255313 (TRBV9, TRBJ2-7)
CASSVGQCGEQYF

SEQ ID NO: 510627 - protein, 11 aa, Homo sapiens
  CDR3 for alpha chain variable domain of TCR clone 255314 (TRAV27, TRAJ45)
CAGAQEEVLTD

SEQ ID NO: 510628 - protein, 17 aa, Homo sapiens
  CDR3 for beta chain variable domain of TCR clone 255314 (TRBV11-2, TRBJ2-1)
CASSVYPPGVEYNEQFF

SEQ ID NO: 510629 - protein, 14 aa, Homo sapiens
  CDR3 for alpha chain variable domain of TCR clone 255315 (TRAV1-2, TRAJ16)
CAVNRFSDGQKLLF

SEQ ID NO: 510630 - protein, 13 aa, Homo sapiens
  CDR3 for beta chain variable domain of TCR clone 255315 (TRBV4-1, TRBJ2-1)
CASSHAGGDEQFF

SEQ ID NO: 510631 - protein, 12 aa, Homo sapiens
  CDR3 for alpha chain variable domain of TCR clone 255316 (TRAV3, TRAJ29)
CCERLGKHTLVF

SEQ ID NO: 510632 - protein, 15 aa, Homo sapiens
  CDR3 for beta chain variable domain of TCR clone 255316 (TRBV12-4, TRBJ2-5)
CASIGRTGEGETQYF

SEQ ID NO: 510633 - protein, 15 aa, Homo sapiens
  CDR3 for alpha chain variable domain of TCR clone 255317 (TRAV23/DV6, TRAJ18)
CAARYRGSTLGRLYF

SEQ ID NO: 510634 - protein, 12 aa, Homo sapiens
  CDR3 for beta chain variable domain of TCR clone 255317 (TRBV12-4, TRBJ2-3)
CASGTLPDTQYF

SEQ ID NO: 510635 - protein, 13 aa, Homo sapiens
  CDR3 for alpha chain variable domain of TCR clone 255318 (TRAV13-2, TRAJ48)
CAEMDFGNEKLTF

SEQ ID NO: 510636 - protein, 15 aa, Homo sapiens
  CDR3 for beta chain variable domain of TCR clone 255318 (TRBV7-9, TRBJ1-6)
CASSSPGRGISPPHF

SEQ ID NO: 510637 - protein, 14 aa, Homo sapiens
  CDR3 for alpha chain variable domain of TCR clone 255319 (TRAV26-1, TRAJ45)
CIEVTGGGADGLTF

SEQ ID NO: 510638 - protein, 15 aa, Homo sapiens
  CDR3 for beta chain variable domain of TCR clone 255319 (TRBV6-3, TRBJ2-7)
CASSSPGTVSYEQYF

SEQ ID NO: 510639 - protein, 15 aa, Homo sapiens
  CDR3 for alpha chain variable domain of TCR clone 255320 (TRAV20, TRAJ32)
CAVQAKRGATNKLIF

SEQ ID NO: 510640 - protein, 16 aa, Homo sapiens
  CDR3 for beta chain variable domain of TCR clone 255320 (TRBV18, TRBJ1-5)
CASSPYRVEGNQPQHF

SEQ ID NO: 510641 - protein, 14 aa, Homo sapiens
  CDR3 for alpha chain variable domain of TCR clone 255321 (TRAV2, TRAJ29)
CAVEPLSGNTPLVF

SEQ ID NO: 510642 - protein, 16 aa, Homo sapiens
  CDR3 for beta chain variable domain of TCR clone 255321 (TRBV5-7, TRBJ1-4)
CASSLVGGGTNEKLFF

SEQ ID NO: 510643 - protein, 13 aa, Homo sapiens
  CDR3 for alpha chain variable domain of TCR clone 255322 (TRAV3, TRAJ27)
CAVRPLGAGKSTF

SEQ ID NO: 510644 - protein, 14 aa, Homo sapiens
  CDR3 for beta chain variable domain of TCR clone 255322 (TRBV7-9, TRBJ1-1)
CASTPLQSYTEAFF

SEQ ID NO: 510645 - protein, 15 aa, Homo sapiens
  CDR3 for alpha chain variable domain of TCR clone 255323 (TRAV26-1, TRAJ29)
CIVRDEGSGNTPLVF

SEQ ID NO: 510646 - protein, 15 aa, Homo sapiens
  CDR3 for beta chain variable domain of TCR clone 255323 (TRBV7-9, TRBJ1-5)
CASSQGHQPNQTQHF

SEQ ID NO: 510647 - protein, 15 aa, Homo sapiens
  CDR3 for alpha chain variable domain of TCR clone 255324 (TRAV8-3, TRAJ45)
CASSYSGGGANGLTF

SEQ ID NO: 510648 - protein, 17 aa, Homo sapiens
  CDR3 for beta chain variable domain of TCR clone 255324 (TRBV7-8, TRBJ1-2)
CASSLRPLQGHLYGYTF

SEQ ID NO: 510649 - protein, 16 aa, Homo sapiens
  CDR3 for alpha chain variable domain of TCR clone 255325 (TRAV3, TRAJ37)
CAVRGKGSGNTGKLIF

SEQ ID NO: 510650 - protein, 16 aa, Homo sapiens
  CDR3 for beta chain variable domain of TCR clone 255325 (TRBV5-4, TRBJ2-3)
CASSKSGTSSRDTQYF

SEQ ID NO: 510651 - protein, 13 aa, Homo sapiens
  CDR3 for alpha chain variable domain of TCR clone 255326 (TRAV13-1, TRAJ20)
CAARVSNEYKLSF

SEQ ID NO: 510652 - protein, 16 aa, Homo sapiens
  CDR3 for beta chain variable domain of TCR clone 255326 (TRBV11-1, TRBJ1-1)
CATNPRDRAFNTEAFF

SEQ ID NO: 510653 - protein, 14 aa, Homo sapiens
  CDR3 for alpha chain variable domain of TCR clone 255327 (TRAV12-2, TRAJ45)
CAVYSGGGADGLTF

SEQ ID NO: 510654 - protein, 17 aa, Homo sapiens
  CDR3 for beta chain variable domain of TCR clone 255327 (TRBV28, TRBJ1-2)
CASSPGQSAVLLYGYTF

SEQ ID NO: 510655 - protein, 13 aa, Homo sapiens
  CDR3 for alpha chain variable domain of TCR clone 255328 (TRAV21, TRAJ15)
CAVANQAGTALIF

SEQ ID NO: 510656 - protein, 14 aa, Homo sapiens
  CDR3 for beta chain variable domain of TCR clone 255328 (TRBV27, TRBJ2-2)
CASSLGAAKGELFF

SEQ ID NO: 510657 - protein, 14 aa, Homo sapiens
  CDR3 for alpha chain variable domain of TCR clone 255329 (TRAV12-2, TRAJ5)
CAVNRSTGRRALTF

SEQ ID NO: 510658 - protein, 16 aa, Homo sapiens
  CDR3 for beta chain variable domain of TCR clone 255329 (TRBV4-1, TRBJ2-5)
CASSSGLAGVLGTQYF

SEQ ID NO: 510659 - protein, 16 aa, Homo sapiens
  CDR3 for alpha chain variable domain of TCR clone 255330 (TRAV27, TRAJ53)
CAAPAGRGGSNYKLTF

SEQ ID NO: 510660 - protein, 14 aa, Homo sapiens
  CDR3 for beta chain variable domain of TCR clone 255330 (TRBV4-3, TRBJ1-5)
CASSQGGQGWPQHF

SEQ ID NO: 510661 - protein, 11 aa, Homo sapiens
  CDR3 for alpha chain variable domain of TCR clone 255331 (TRAV21, TRAJ11)
CAVIEYSTLTF

SEQ ID NO: 510662 - protein, 11 aa, Homo sapiens
  CDR3 for beta chain variable domain of TCR clone 255331 (TRBV19, TRBJ1-1)
CASSIGSEAFF

SEQ ID NO: 510663 - protein, 12 aa, Homo sapiens
  CDR3 for alpha chain variable domain of TCR clone 255332 (TRAV21, TRAJ49)
CAVANTGNQFYF

SEQ ID NO: 510664 - protein, 17 aa, Homo sapiens
  CDR3 for beta chain variable domain of TCR clone 255332 (TRBV13, TRBJ2-3)
CASSLSRVAGGGNTQYF

SEQ ID NO: 510665 - protein, 16 aa, Homo sapiens
  CDR3 for alpha chain variable domain of TCR clone 255333 (TRAV26-2, TRAJ56)
CILRDVAAGANSKLTF

SEQ ID NO: 510666 - protein, 15 aa, Homo sapiens
  CDR3 for beta chain variable domain of TCR clone 255333 (TRBV28, TRBJ1-3)
CASSMGWASGNTIYF

SEQ ID NO: 510667 - protein, 12 aa, Homo sapiens
  CDR3 for alpha chain variable domain of TCR clone 255334 (TRAV26-1, TRAJ36)
CIVRVRADNLFF

SEQ ID NO: 510668 - protein, 15 aa, Homo sapiens
  CDR3 for beta chain variable domain of TCR clone 255334 (TRBV6-3, TRBJ2-7)
CACSSPGTVFYEQYF

SEQ ID NO: 510669 - protein, 12 aa, Homo sapiens
  CDR3 for alpha chain variable domain of TCR clone 255335 (TRAV1-2, TRAJ29)
CAVPSGNTPLVF

SEQ ID NO: 510670 - protein, 17 aa, Homo sapiens
  CDR3 for beta chain variable domain of TCR clone 255335 (TRBV20-1, TRBJ2-3)
CSASLLGRGGSADTQYF

SEQ ID NO: 510671 - protein, 13 aa, Homo sapiens
  CDR3 for alpha chain variable domain of TCR clone 255336 (TRAV35, TRAJ47)
CAGSGEYGNKLVF

SEQ ID NO: 510672 - protein, 15 aa, Homo sapiens
  CDR3 for beta chain variable domain of TCR clone 255336 (TRBV7-3, TRBJ2-2)
CASSETGQGTGELFF

SEQ ID NO: 510673 - protein, 14 aa, Homo sapiens
  CDR3 for alpha chain variable domain of TCR clone 255337 (TRAV4, TRAJ9)
CLVGSGTGGFKTIF

SEQ ID NO: 510674 - protein, 15 aa, Homo sapiens
  CDR3 for beta chain variable domain of TCR clone 255337 (TRBV20-1, TRBJ2-5)
CSAPPRTGFGETQYF

SEQ ID NO: 510675 - protein, 15 aa, Homo sapiens
  CDR3 for alpha chain variable domain of TCR clone 255338 (TRAV3, TRAJ17)
CAVSPKEAAGNKLTF

SEQ ID NO: 510676 - protein, 14 aa, Homo sapiens
  CDR3 for beta chain variable domain of TCR clone 255338 (TRBV2, TRBJ2-7)
CASSEIDRGVEQYF

SEQ ID NO: 510677 - protein, 12 aa, Homo sapiens
  CDR3 for alpha chain variable domain of TCR clone 255339 (TRAV12-3, TRAJ17)
CAMTLTGTKLTF

SEQ ID NO: 510678 - protein, 15 aa, Homo sapiens
  CDR3 for beta chain variable domain of TCR clone 255339 (TRBV20-1, TRBJ2-7)
CSARDRVSGMDEQCF

SEQ ID NO: 510679 - protein, 20 aa, Homo sapiens
  CDR3 for alpha chain variable domain of TCR clone 255340 (TRAV26-1, TRAJ42)
CCVLLHRQTYYGGSQGNLIF

SEQ ID NO: 510680 - protein, 17 aa, Homo sapiens
  CDR3 for beta chain variable domain of TCR clone 255340 (TRBV5-1, TRBJ2-5)
CASSLLGLAANQETQYF

SEQ ID NO: 510681 - protein, 17 aa, Homo sapiens
  CDR3 for alpha chain variable domain of TCR clone 255341 (TRAV3, TRAJ42)
CAVRDRDYGGSQGTLIF

SEQ ID NO: 510682 - protein, 17 aa, Homo sapiens
  CDR3 for beta chain variable domain of TCR clone 255341 (TRBV7-9, TRBJ2-3)
CASSPTVAGDLTDTQYF

SEQ ID NO: 510683 - protein, 15 aa, Homo sapiens
  CDR3 for alpha chain variable domain of TCR clone 255342 (TRAV38-1, TRAJ37)
CAFIHGSGTTGKLIF

SEQ ID NO: 510684 - protein, 14 aa, Homo sapiens
  CDR3 for beta chain variable domain of TCR clone 255342 (TRBV29-1, TRBJ2-5)
CSVETSGSGETQYF

SEQ ID NO: 510685 - protein, 13 aa, Homo sapiens
  CDR3 for alpha chain variable domain of TCR clone 255343 (TRAV1-2, TRAJ9)
CAALNTGGFKTIF

SEQ ID NO: 510686 - protein, 15 aa, Homo sapiens
  CDR3 for beta chain variable domain of TCR clone 255343 (TRBV18, TRBJ2-1)
CASSPPSASYNELFF

SEQ ID NO: 510687 - protein, 14 aa, Homo sapiens
  CDR3 for alpha chain variable domain of TCR clone 255344 (TRAV20, TRAJ10)
CAVRVEGGGNKLTF

SEQ ID NO: 510688 - protein, 12 aa, Homo sapiens
  CDR3 for beta chain variable domain of TCR clone 255344 (TRBV11-2, TRBJ2-1)
CASSPGNNEQFF

SEQ ID NO: 510689 - protein, 15 aa, Homo sapiens
  CDR3 for alpha chain variable domain of TCR clone 255345 (TRAV26-1, TRAJ39)
CTVRVARTAGNMLTF

SEQ ID NO: 510690 - protein, 16 aa, Homo sapiens
  CDR3 for beta chain variable domain of TCR clone 255345 (TRBV5-1, TRBJ2-1)
CASSLTLAGGINEQFF

SEQ ID NO: 510691 - protein, 13 aa, Homo sapiens
  CDR3 for alpha chain variable domain of TCR clone 255346 (TRAV3, TRAJ21)
CAVRETDFNKFYF

SEQ ID NO: 510692 - protein, 15 aa, Homo sapiens
  CDR3 for beta chain variable domain of TCR clone 255346 (TRBV4-3, TRBJ2-2)
CASSQGQGGTGELFF

SEQ ID NO: 510693 - protein, 14 aa, Homo sapiens
  CDR3 for alpha chain variable domain of TCR clone 255347 (TRAV12-2, TRAJ5)
CAVNRSTGRRALTF

SEQ ID NO: 510694 - protein, 15 aa, Homo sapiens
  CDR3 for beta chain variable domain of TCR clone 255347 (TRBV7-6, TRBJ1-1)
CASSPQGGANTEAFF

SEQ ID NO: 510695 - protein, 12 aa, Homo sapiens
  CDR3 for alpha chain variable domain of TCR clone 255348 (TRAV27, TRAJ35)
CAGADFGNVLHC

SEQ ID NO: 510696 - protein, 17 aa, Homo sapiens
  CDR3 for beta chain variable domain of TCR clone 255348 (TRBV28, TRBJ2-5)
CASSRQGGLAGAETQYF

SEQ ID NO: 510697 - protein, 14 aa, Homo sapiens
  CDR3 for alpha chain variable domain of TCR clone 255349 (TRAV17, TRAJ57)
CATDPQGASEKLVF

SEQ ID NO: 510698 - protein, 14 aa, Homo sapiens
  CDR3 for beta chain variable domain of TCR clone 255349 (TRBV7-8, TRBJ2-7)
CASSPRDRVYEQYF

SEQ ID NO: 510699 - protein, 16 aa, Homo sapiens
  CDR3 for alpha chain variable domain of TCR clone 255350 (TRAV3, TRAJ37)
CAVRVGGSGNTGKLIF

SEQ ID NO: 510700 - protein, 13 aa, Homo sapiens
  CDR3 for beta chain variable domain of TCR clone 255350 (TRBV7-9, TRBJ1-2)
CASSLKQNYGYTF

SEQ ID NO: 510701 - protein, 15 aa, Homo sapiens
  CDR3 for alpha chain variable domain of TCR clone 255351 (TRAV12-1, TRAJ44)
CVVDEYTGTDSKLTF

SEQ ID NO: 510702 - protein, 14 aa, Homo sapiens
  CDR3 for beta chain variable domain of TCR clone 255351 (TRBV5-1, TRBJ1-2)
CASSLEPVNYGYTF

SEQ ID NO: 510703 - protein, 14 aa, Homo sapiens
  CDR3 for alpha chain variable domain of TCR clone 255352 (TRAV12-3, TRAJ11)
CARTTNSGYSTLTF

SEQ ID NO: 510704 - protein, 16 aa, Homo sapiens
  CDR3 for beta chain variable domain of TCR clone 255352 (TRBV20-1, TRBJ1-1)
CSARALTQGMNTEAFF

SEQ ID NO: 510705 - protein, 17 aa, Homo sapiens
  CDR3 for alpha chain variable domain of TCR clone 255353 (TRAV13-1, TRAJ28)
CAASPPYPGAGSYQLTF

SEQ ID NO: 510706 - protein, 19 aa, Homo sapiens
  CDR3 for beta chain variable domain of TCR clone 255353 (TRBV25-1, TRBJ2-2)
CAILVCRVDRGRKTGELFF

SEQ ID NO: 510707 - protein, 14 aa, Homo sapiens
  CDR3 for alpha chain variable domain of TCR clone 255354 (TRAV26-1, TRAJ21)
CIVRPPYNFNKFYF

SEQ ID NO: 510708 - protein, 13 aa, Homo sapiens
  CDR3 for beta chain variable domain of TCR clone 255354 (TRBV7-3, TRBJ2-1)
CASSLDSYNEQFF

SEQ ID NO: 510709 - protein, 19 aa, Homo sapiens
  CDR3 for alpha chain variable domain of TCR clone 255355 (TRAV8-3, TRAJ41)
CAVGSNSNSGYPEPCPCRV

SEQ ID NO: 510710 - protein, 17 aa, Homo sapiens
  CDR3 for beta chain variable domain of TCR clone 255355 (TRBV25-1, TRBJ2-1)
CASSAYGQGRGVYEQFF

SEQ ID NO: 510711 - protein, 12 aa, Homo sapiens
  CDR3 for alpha chain variable domain of TCR clone 255356 (TRAV23/DV6, TRAJ24)
CAANDSWGKLQF

SEQ ID NO: 510712 - protein, 16 aa, Homo sapiens
  CDR3 for beta chain variable domain of TCR clone 255356 (TRBV12-4, TRBJ2-5)
CASSLSASGGKETQYF

SEQ ID NO: 510713 - protein, 17 aa, Homo sapiens
  CDR3 for alpha chain variable domain of TCR clone 255357 (TRAV3, TRAJ6)
CAVRDGPRAGGSYIPTF

SEQ ID NO: 510714 - protein, 16 aa, Homo sapiens
  CDR3 for beta chain variable domain of TCR clone 255357 (TRBV7-9, TRBJ1-3)
CASSQTGGLRMGTIYF

SEQ ID NO: 510715 - protein, 17 aa, Homo sapiens
  CDR3 for alpha chain variable domain of TCR clone 255358 (TRAV3, TRAJ42)
CAVRGRDYGGSQVNLIF

SEQ ID NO: 510716 - protein, 14 aa, Homo sapiens
  CDR3 for beta chain variable domain of TCR clone 255358 (TRBV5-4, TRBJ1-1)
CASSLDSRRDEAFF

SEQ ID NO: 510717 - protein, 12 aa, Homo sapiens
  CDR3 for alpha chain variable domain of TCR clone 255359 (TRAV12-3, TRAJ17)
CAMTLTGTKLTF

SEQ ID NO: 510718 - protein, 13 aa, Homo sapiens
  CDR3 for beta chain variable domain of TCR clone 255359 (TRBV10-3, TRBJ1-2)
CAISERDSYGYTF

SEQ ID NO: 510719 - protein, 14 aa, Homo sapiens
  CDR3 for alpha chain variable domain of TCR clone 255360 (TRAV1-2, TRAJ16)
CAVNRFSDGQTLLF

SEQ ID NO: 510720 - protein, 15 aa, Homo sapiens
  CDR3 for beta chain variable domain of TCR clone 255360 (TRBV9, TRBJ1-6)
CASSVAGTGESPLHF

SEQ ID NO: 510721 - protein, 12 aa, Homo sapiens
  CDR3 for alpha chain variable domain of TCR clone 255361 (TRAV8-1, TRAJ6)
CATSGGSYIPTF

SEQ ID NO: 510722 - protein, 12 aa, Homo sapiens
  CDR3 for beta chain variable domain of TCR clone 255361 (TRBV19, TRBJ1-1)
CASMNRYTEAFF

SEQ ID NO: 510723 - protein, 13 aa, Homo sapiens
  CDR3 for alpha chain variable domain of TCR clone 255362 (TRAV16, TRAJ10)
CDPAREEEPNSPL

SEQ ID NO: 510724 - protein, 15 aa, Homo sapiens
  CDR3 for beta chain variable domain of TCR clone 255362 (TRBV6-3, TRBJ2-7)
CASSSPGTVFYEQYF

SEQ ID NO: 510725 - protein, 18 aa, Homo sapiens
  CDR3 for alpha chain variable domain of TCR clone 255363 (TRAV26-1, TRAJ5)
CIVRVVPPRDTGRRALTF

SEQ ID NO: 510726 - protein, 15 aa, Homo sapiens
  CDR3 for beta chain variable domain of TCR clone 255363 (TRBV7-9, TRBJ2-7)
CASSLPVGQANEQYF

SEQ ID NO: 510727 - protein, 15 aa, Homo sapiens
  CDR3 for alpha chain variable domain of TCR clone 255364 (TRAV8-3, TRAJ6)
CAVGPLGGGSYIPTF

SEQ ID NO: 510728 - protein, 16 aa, Homo sapiens
  CDR3 for beta chain variable domain of TCR clone 255364 (TRBV20-1, TRBJ1-4)
CSAPGQGLLTNEKLFF

SEQ ID NO: 510729 - protein, 23 aa, Homo sapiens
  CDR3 for alpha chain variable domain of TCR clone 255365 (TRAV12-2, TRAJ36)
SLLIRDSQPSDSATLERANNLFF

SEQ ID NO: 510730 - protein, 15 aa, Homo sapiens
  CDR3 for beta chain variable domain of TCR clone 255365 (TRBV28, TRBJ2-1)
CASSIIAGGRSEQFF

SEQ ID NO: 510731 - protein, 14 aa, Homo sapiens
  CDR3 for alpha chain variable domain of TCR clone 255366 (TRAV16, TRAJ17)
CALRGRAAGNKLTF

SEQ ID NO: 510732 - protein, 17 aa, Homo sapiens
  CDR3 for beta chain variable domain of TCR clone 255366 (TRBV13, TRBJ2-3)
CASSLSRVAGGRNTQYF

SEQ ID NO: 510733 - protein, 14 aa, Homo sapiens
  CDR3 for alpha chain variable domain of TCR clone 255367 (TRAV26-1, TRAJ22)
CIVRVYGSARPLTF

SEQ ID NO: 510734 - protein, 17 aa, Homo sapiens
  CDR3 for beta chain variable domain of TCR clone 255367 (TRBV7-3, TRBJ2-3)
CASSPGGLAGFGDTQYF

SEQ ID NO: 510735 - protein, 11 aa, Homo sapiens
  CDR3 for alpha chain variable domain of TCR clone 255368 (TRAV3, TRAJ21)
CAVGNFNKFYF

SEQ ID NO: 510736 - protein, 16 aa, Homo sapiens
  CDR3 for beta chain variable domain of TCR clone 255368 (TRBV19, TRBJ2-1)
CAGSKAGPSSYNEQLF

SEQ ID NO: 510737 - protein, 14 aa, Homo sapiens
  CDR3 for alpha chain variable domain of TCR clone 255369 (TRAV9-2, TRAJ39)
CALYIYNAGNMLTF

SEQ ID NO: 510738 - protein, 15 aa, Homo sapiens
  CDR3 for beta chain variable domain of TCR clone 255369 (TRBV7-9, TRBJ2-7)
CASSLPMGQANEQYF

SEQ ID NO: 510739 - protein, 15 aa, Homo sapiens
  CDR3 for alpha chain variable domain of TCR clone 255370 (TRAV8-3, TRAJ27)
CAVGPSKTTAGKSTF

SEQ ID NO: 510740 - protein, 14 aa, Homo sapiens
  CDR3 for beta chain variable domain of TCR clone 255370 (TRBV19, TRBJ2-1)
CASPTFVLSGEQFF

SEQ ID NO: 510741 - protein, 13 aa, Homo sapiens
  CDR3 for alpha chain variable domain of TCR clone 255371 (TRAV2, TRAJ40)
CAVVTSGTYKYIF

SEQ ID NO: 510742 - protein, 16 aa, Homo sapiens
  CDR3 for beta chain variable domain of TCR clone 255371 (TRBV11-2, TRBJ1-2)
CASSLDTGGADYGYTF

SEQ ID NO: 510743 - protein, 13 aa, Homo sapiens
  CDR3 for alpha chain variable domain of TCR clone 255372 (TRAV21, TRAJ57)
CAVIEGGPEKLVF

SEQ ID NO: 510744 - protein, 14 aa, Homo sapiens
  CDR3 for beta chain variable domain of TCR clone 255372 (TRBV12-5, TRBJ2-5)
CASGSRTHQETQYF

SEQ ID NO: 510745 - protein, 15 aa, Homo sapiens
  CDR3 for alpha chain variable domain of TCR clone 255373 (TRAV13-1, TRAJ57)
CEASNTQGGSEKLVF

SEQ ID NO: 510746 - protein, 13 aa, Homo sapiens
  CDR3 for beta chain variable domain of TCR clone 255373 (TRBV7-6, TRBJ1-5)
CASSQGPNRPQHF

SEQ ID NO: 510747 - protein, 11 aa, Homo sapiens
  CDR3 for alpha chain variable domain of TCR clone 255374 (TRAV2, TRAJ13)
CASGGYQKVTF

SEQ ID NO: 510748 - protein, 12 aa, Homo sapiens
  CDR3 for beta chain variable domain of TCR clone 255374 (TRBV7-9, TRBJ1-1)
CASSLGDTEAFF

SEQ ID NO: 510749 - protein, 15 aa, Homo sapiens
  CDR3 for alpha chain variable domain of TCR clone 255375 (TRAV3, TRAJ13)
CAVRVYSGGYQKVTF

SEQ ID NO: 510750 - protein, 13 aa, Homo sapiens
  CDR3 for beta chain variable domain of TCR clone 255375 (TRBV7-3, TRBJ2-5)
CASSSDREETQYF

SEQ ID NO: 510751 - protein, 11 aa, Homo sapiens
  CDR3 for alpha chain variable domain of TCR clone 255376 (TRAV1-2, TRAJ40)
CAVPGTYKYIF

SEQ ID NO: 510752 - protein, 15 aa, Homo sapiens
  CDR3 for beta chain variable domain of TCR clone 255376 (TRBV6-5, TRBJ1-4)
CASSSVGGAGEKLFF

SEQ ID NO: 510753 - protein, 14 aa, Homo sapiens
  CDR3 for alpha chain variable domain of TCR clone 255377 (TRAV12-3, TRAJ9)
CAMSPNTGGFKTIF

SEQ ID NO: 510754 - protein, 13 aa, Homo sapiens
  CDR3 for beta chain variable domain of TCR clone 255377 (TRBV4-1, TRBJ2-1)
CASSQAGGDEQFF

SEQ ID NO: 510755 - protein, 15 aa, Homo sapiens
  CDR3 for alpha chain variable domain of TCR clone 255378 (TRAV21, TRAJ23)
CAPNRVYNQGGKLIF

SEQ ID NO: 510756 - protein, 14 aa, Homo sapiens
  CDR3 for beta chain variable domain of TCR clone 255378 (TRBV6-6, TRBJ2-7)
CASSDSGAGYEQYF

SEQ ID NO: 510757 - protein, 14 aa, Homo sapiens
  CDR3 for alpha chain variable domain of TCR clone 255379 (TRAV8-4, TRAJ34)
CAVSDPGGTDKLIF

SEQ ID NO: 510758 - protein, 13 aa, Homo sapiens
  CDR3 for beta chain variable domain of TCR clone 255379 (TRBV7-9, TRBJ2-5)
CASLSPGQETQYF

SEQ ID NO: 510759 - protein, 15 aa, Homo sapiens
  CDR3 for alpha chain variable domain of TCR clone 255380 (TRAV12-2, TRAJ53)
CAVNGGGGSNDKLTF

SEQ ID NO: 510760 - protein, 13 aa, Homo sapiens
  CDR3 for beta chain variable domain of TCR clone 255380 (TRBV10-3, TRBJ2-7)
CASKLAVNYEQYF

SEQ ID NO: 510761 - protein, 14 aa, Homo sapiens
  CDR3 for alpha chain variable domain of TCR clone 255381 (TRAV12-3, TRAJ10)
CAMSGTGGGNKLTF

SEQ ID NO: 510762 - protein, 14 aa, Homo sapiens
  CDR3 for beta chain variable domain of TCR clone 255381 (TRBV20-1, TRBJ2-3)
CSARGGTSTDTQYF

SEQ ID NO: 510763 - protein, 12 aa, Homo sapiens
  CDR3 for alpha chain variable domain of TCR clone 255382 (TRAV4, TRAJ26)
FLVGDYGQNFVF

SEQ ID NO: 510764 - protein, 16 aa, Homo sapiens
  CDR3 for beta chain variable domain of TCR clone 255382 (TRBV7-2, TRBJ1-2)
CASSSNQDRRGNGYTF

SEQ ID NO: 510765 - protein, 11 aa, Homo sapiens
  CDR3 for alpha chain variable domain of TCR clone 255383 (TRAV12-3, TRAJ27)
CAMANAGKSTF

SEQ ID NO: 510766 - protein, 16 aa, Homo sapiens
  CDR3 for beta chain variable domain of TCR clone 255383 (TRBV6-1, TRBJ2-5)
CASSETLDRGAETQYF

SEQ ID NO: 510767 - protein, 13 aa, Homo sapiens
  CDR3 for alpha chain variable domain of TCR clone 255384 (TRAV1-1, TRAJ23)
CAVVANQGGKLIF

SEQ ID NO: 510768 - protein, 16 aa, Homo sapiens
  CDR3 for beta chain variable domain of TCR clone 255384 (TRBV7-3, TRBJ2-1)
CASSLSGGVHYNEQFF

SEQ ID NO: 510769 - protein, 11 aa, Homo sapiens
  CDR3 for alpha chain variable domain of TCR clone 255385 (TRAV3, TRAJ21)
CAVGNFNKFYF

SEQ ID NO: 510770 - protein, 17 aa, Homo sapiens
  CDR3 for beta chain variable domain of TCR clone 255385 (TRBV25-1, TRBJ2-7)
CQPQQPPRTGVTYEQYF

SEQ ID NO: 510771 - protein, 14 aa, Homo sapiens
  CDR3 for alpha chain variable domain of TCR clone 255386 (TRAV1-2, TRAJ16)
CAVNRFSDGQRLLF

SEQ ID NO: 510772 - protein, 14 aa, Homo sapiens
  CDR3 for beta chain variable domain of TCR clone 255386 (TRBV12-4, TRBJ1-1)
CASSLGTGGTEAFF

SEQ ID NO: 510773 - protein, 15 aa, Homo sapiens
  CDR3 for alpha chain variable domain of TCR clone 255387 (TRAV35, TRAJ23)
CAGPLGNNQGGKLIF

SEQ ID NO: 510774 - protein, 14 aa, Homo sapiens
  CDR3 for beta chain variable domain of TCR clone 255387 (TRBV7-9, TRBJ1-1)
CASAPLQAYTEAFF

SEQ ID NO: 510775 - protein, 13 aa, Homo sapiens
  CDR3 for alpha chain variable domain of TCR clone 255388 (TRAV12-1, TRAJ17)
CVVNKAAGNKLTF

SEQ ID NO: 510776 - protein, 16 aa, Homo sapiens
  CDR3 for beta chain variable domain of TCR clone 255388 (TRBV11-2, TRBJ2-2)
CASSPRTGNLIGELFF

SEQ ID NO: 510777 - protein, 17 aa, Homo sapiens
  CDR3 for alpha chain variable domain of TCR clone 255389 (TRAV17, TRAJ20)
CATRYKLSFGAGTTVTV

SEQ ID NO: 510778 - protein, 13 aa, Homo sapiens
  CDR3 for beta chain variable domain of TCR clone 255389 (TRBV7-9, TRBJ1-2)
CASSLKQNYGYTF

SEQ ID NO: 510779 - protein, 13 aa, Homo sapiens
  CDR3 for alpha chain variable domain of TCR clone 255390 (TRAV16, TRAJ10)
CALLTGGGNKLTF

SEQ ID NO: 510780 - protein, 12 aa, Homo sapiens
  CDR3 for beta chain variable domain of TCR clone 255390 (TRBV28, TRBJ2-7)
CASTGNHHEQYF

SEQ ID NO: 510781 - protein, 14 aa, Homo sapiens
  CDR3 for alpha chain variable domain of TCR clone 255391 (TRAV9-2, TRAJ39)
CALYIYNAGNMLTF

SEQ ID NO: 510782 - protein, 14 aa, Homo sapiens
  CDR3 for beta chain variable domain of TCR clone 255391 (TRBV12-5, TRBJ2-5)
CASGPRTHQETQYF

SEQ ID NO: 510783 - protein, 15 aa, Homo sapiens
  CDR3 for alpha chain variable domain of TCR clone 255392 (TRAV21, TRAJ53)
CATLNSGGSNDKLTF

SEQ ID NO: 510784 - protein, 16 aa, Homo sapiens
  CDR3 for beta chain variable domain of TCR clone 255392 (TRBV20-1, TRBJ1-2)
CSASMGQGVANYGYTF

SEQ ID NO: 510785 - protein, 14 aa, Homo sapiens
  CDR3 for alpha chain variable domain of TCR clone 255393 (TRAV16, TRAJ31)
CALSGRNNNARLMF

SEQ ID NO: 510786 - protein, 12 aa, Homo sapiens
  CDR3 for beta chain variable domain of TCR clone 255393 (TRBV11-2, TRBJ1-2)
CAGSREGDGYTF

SEQ ID NO: 510787 - protein, 16 aa, Homo sapiens
  CDR3 for alpha chain variable domain of TCR clone 255394 (TRAV3, TRAJ18)
CAVRDGRGSTLGRLYF

SEQ ID NO: 510788 - protein, 14 aa, Homo sapiens
  CDR3 for beta chain variable domain of TCR clone 255394 (TRBV12-5, TRBJ2-5)
CASGSRTHQETQYF

SEQ ID NO: 510789 - protein, 14 aa, Homo sapiens
  CDR3 for alpha chain variable domain of TCR clone 255395 (TRAV3, TRAJ9)
CAVRGNTVGFKTIF

SEQ ID NO: 510790 - protein, 16 aa, Homo sapiens
  CDR3 for beta chain variable domain of TCR clone 255395 (TRBV7-2, TRBJ2-7)
CASSLGLAGGAYEQYF

SEQ ID NO: 510791 - protein, 14 aa, Homo sapiens
  CDR3 for alpha chain variable domain of TCR clone 255396 (TRAV17, TRAJ5)
CATVALTSRRALTF

SEQ ID NO: 510792 - protein, 14 aa, Homo sapiens
  CDR3 for beta chain variable domain of TCR clone 255396 (TRBV28, TRBJ2-7)
CASSPYGMAYEQYF

SEQ ID NO: 510793 - protein, 15 aa, Homo sapiens
  CDR3 for alpha chain variable domain of TCR clone 255397 (TRAV2, TRAJ9)
CAVEDRGTGGFKTIF

SEQ ID NO: 510794 - protein, 16 aa, Homo sapiens
  CDR3 for beta chain variable domain of TCR clone 255397 (TRBV24-1, TRBJ2-3)
CATSDPGTGARDTQYF

SEQ ID NO: 510795 - protein, 14 aa, Homo sapiens
  CDR3 for alpha chain variable domain of TCR clone 255398 (TRAV12-2, TRAJ13)
RAVKKTGGYQKVTF

SEQ ID NO: 510796 - protein, 17 aa, Homo sapiens
  CDR3 for beta chain variable domain of TCR clone 255398 (TRBV20-1, TRBJ2-2)
CSASGSGQGGLTGELFF

SEQ ID NO: 510797 - protein, 14 aa, Homo sapiens
  CDR3 for alpha chain variable domain of TCR clone 255399 (TRAV1-2, TRAJ16)
CAVNWFSDGQKLLF

SEQ ID NO: 510798 - protein, 17 aa, Homo sapiens
  CDR3 for beta chain variable domain of TCR clone 255399 (TRBV13, TRBJ2-3)
CASSLSRVAGGRNTQYF

SEQ ID NO: 510799 - protein, 11 aa, Homo sapiens
  CDR3 for alpha chain variable domain of TCR clone 255400 (TRAV21, TRAJ27)
CAVRMQANQPL

SEQ ID NO: 510800 - protein, 16 aa, Homo sapiens
  CDR3 for beta chain variable domain of TCR clone 255400 (TRBV10-3, TRBJ2-1)
CAIRGGGRGDYNEQFF

SEQ ID NO: 510801 - protein, 15 aa, Homo sapiens
  CDR3 for alpha chain variable domain of TCR clone 255401 (TRAV12-2, TRAJ42)
CAANSHGGSQGNLIF

SEQ ID NO: 510802 - protein, 13 aa, Homo sapiens
  CDR3 for beta chain variable domain of TCR clone 255401 (TRBV27, TRBJ1-1)
CASSVSANTEAFF

SEQ ID NO: 510803 - protein, 15 aa, Homo sapiens
  CDR3 for alpha chain variable domain of TCR clone 255402 (TRAV12-1, TRAJ9)
CVVSFVDTGGFKTIF

SEQ ID NO: 510804 - protein, 13 aa, Homo sapiens
  CDR3 for beta chain variable domain of TCR clone 255402 (TRBV2, TRBJ1-4)
CASSERAGEKLFF

SEQ ID NO: 510805 - protein, 11 aa, Homo sapiens
  CDR3 for alpha chain variable domain of TCR clone 255403 (TRAV3, TRAJ21)
CAVGSFNKFYF

SEQ ID NO: 510806 - protein, 16 aa, Homo sapiens
  CDR3 for beta chain variable domain of TCR clone 255403 (TRBV19, TRBJ2-1)
CASSKAGPSSCNEQFF

SEQ ID NO: 510807 - protein, 14 aa, Homo sapiens
  CDR3 for alpha chain variable domain of TCR clone 255404 (TRAV8-2, TRAJ37)
CVVSISGNTGKLIF

SEQ ID NO: 510808 - protein, 13 aa, Homo sapiens
  CDR3 for beta chain variable domain of TCR clone 255404 (TRBV7-8, TRBJ2-7)
CRVRLTEMGEQYF

SEQ ID NO: 510809 - protein, 14 aa, Homo sapiens
  CDR3 for alpha chain variable domain of TCR clone 255405 (TRAV3, TRAJ21)
CAVRDAYNFNKFYF

SEQ ID NO: 510810 - protein, 15 aa, Homo sapiens
  CDR3 for beta chain variable domain of TCR clone 255405 (TRBV6-5, TRBJ1-5)
CASSYSWDCNQPQHF

SEQ ID NO: 510811 - protein, 14 aa, Homo sapiens
  CDR3 for alpha chain variable domain of TCR clone 255406 (TRAV26-1, TRAJ15)
CIVRANQAGTALIF

SEQ ID NO: 510812 - protein, 16 aa, Homo sapiens
  CDR3 for beta chain variable domain of TCR clone 255406 (TRBV20-1, TRBJ1-4)
CSAIGGPRGANDKLFF

SEQ ID NO: 510813 - protein, 14 aa, Homo sapiens
  CDR3 for alpha chain variable domain of TCR clone 255407 (TRAV29/DV5, TRAJ49)
CAASAQNTGNQFYF

SEQ ID NO: 510814 - protein, 20 aa, Homo sapiens
  CDR3 for beta chain variable domain of TCR clone 255407 (TRBV7-8, TRBJ2-2)
CASSHLFPGPTIHITGELFF

SEQ ID NO: 510815 - protein, 14 aa, Homo sapiens
  CDR3 for alpha chain variable domain of TCR clone 255408 (TRAV1-2, TRAJ29)
CAVREITSATPLVF

SEQ ID NO: 510816 - protein, 13 aa, Homo sapiens
  CDR3 for beta chain variable domain of TCR clone 255408 (TRBV7-9, TRBJ1-2)
CASSLKQNYGYTF

SEQ ID NO: 510817 - protein, 11 aa, Homo sapiens
  CDR3 for alpha chain variable domain of TCR clone 255409 (TRAV12-3, TRAJ17)
CNDAYRQKLTF

SEQ ID NO: 510818 - protein, 15 aa, Homo sapiens
  CDR3 for beta chain variable domain of TCR clone 255409 (TRBV20-1, TRBJ2-7)
CSASDRVSGMDEQYF

SEQ ID NO: 510819 - protein, 11 aa, Homo sapiens
  CDR3 for alpha chain variable domain of TCR clone 255410 (TRAV13-2, TRAJ20)
CADSNNYKLSF

SEQ ID NO: 510820 - protein, 12 aa, Homo sapiens
  CDR3 for beta chain variable domain of TCR clone 255410 (TRBV5-1, TRBJ2-3)
CASSLAADTQYF

SEQ ID NO: 510821 - protein, 14 aa, Homo sapiens
  CDR3 for alpha chain variable domain of TCR clone 255411 (TRAV23/DV6, TRAJ5)
CAAKRPAGRRALTF

SEQ ID NO: 510822 - protein, 14 aa, Homo sapiens
  CDR3 for beta chain variable domain of TCR clone 255411 (TRBV20-1, TRBJ1-1)
CSARDRRTNTEAFF

SEQ ID NO: 510823 - protein, 15 aa, Homo sapiens
  CDR3 for alpha chain variable domain of TCR clone 255412 (TRAV12-2, TRAJ53)
CAVNGGGGSNYKLTC

SEQ ID NO: 510824 - protein, 12 aa, Homo sapiens
  CDR3 for beta chain variable domain of TCR clone 255412 (TRBV18, TRBJ1-1)
CASSPGQLQAFF

SEQ ID NO: 510825 - protein, 12 aa, Homo sapiens
  CDR3 for alpha chain variable domain of TCR clone 255413 (TRAV12-3, TRAJ17)
CAMTLTGNELTF

SEQ ID NO: 510826 - protein, 15 aa, Homo sapiens
  CDR3 for beta chain variable domain of TCR clone 255413 (TRBV20-1, TRBJ2-7)
GSARDRVSGMDEQYF

SEQ ID NO: 510827 - protein, 12 aa, Homo sapiens
  CDR3 for alpha chain variable domain of TCR clone 255414 (TRAV12-3, TRAJ3)
CAIDSSASKIIF

SEQ ID NO: 510828 - protein, 15 aa, Homo sapiens
  CDR3 for beta chain variable domain of TCR clone 255414 (TRBV7-9, TRBJ1-6)
CASSSPGRGNSPLHF

SEQ ID NO: 510829 - protein, 12 aa, Homo sapiens
  CDR3 for alpha chain variable domain of TCR clone 255415 (TRAV17, TRAJ20)
CATDSNDYKLSF

SEQ ID NO: 510830 - protein, 13 aa, Homo sapiens
  CDR3 for beta chain variable domain of TCR clone 255415 (TRBV7-3, TRBJ1-1)
CASSQDWGAEAFF

SEQ ID NO: 510831 - protein, 14 aa, Homo sapiens
  CDR3 for alpha chain variable domain of TCR clone 255416 (TRAV8-3, TRAJ4)
CAVGAAGGYNKLIF

SEQ ID NO: 510832 - protein, 12 aa, Homo sapiens
  CDR3 for beta chain variable domain of TCR clone 255416 (TRBV20-1, TRBJ1-2)
CSAPPRQGPDTF

SEQ ID NO: 510833 - protein, 15 aa, Homo sapiens
  CDR3 for alpha chain variable domain of TCR clone 255417 (TRAV21, TRAJ53)
CAVRQSGGSNYKLTF

SEQ ID NO: 510834 - protein, 12 aa, Homo sapiens
  CDR3 for beta chain variable domain of TCR clone 255417 (TRBV12-4, TRBJ2-3)
CASSTLPDTQYF

SEQ ID NO: 510835 - protein, 12 aa, Homo sapiens
  CDR3 for alpha chain variable domain of TCR clone 255418 (TRAV8-3, TRAJ27)
CAVGAEASKSTF

SEQ ID NO: 510836 - protein, 14 aa, Homo sapiens
  CDR3 for beta chain variable domain of TCR clone 255418 (TRBV2, TRBJ2-1)
CASRLIVGHDEQFF

SEQ ID NO: 510837 - protein, 18 aa, Homo sapiens
  CDR3 for alpha chain variable domain of TCR clone 255419 (TRAV21, TRAJ52)
CAVRPYPVGGTSYGKLTF

SEQ ID NO: 510838 - protein, 16 aa, Homo sapiens
  CDR3 for beta chain variable domain of TCR clone 255419 (TRBV7-3, TRBJ2-1)
CASSLEGYRSYNEQFF

SEQ ID NO: 510839 - protein, 14 aa, Homo sapiens
  CDR3 for alpha chain variable domain of TCR clone 255420 (TRAV29/DV5, TRAJ40)
CAAAVASGTYKYIF

SEQ ID NO: 510840 - protein, 15 aa, Homo sapiens
  CDR3 for beta chain variable domain of TCR clone 255420 (TRBV4-2, TRBJ1-2)
CASSQRTGGRDGYTF

SEQ ID NO: 510841 - protein, 12 aa, Homo sapiens
  CDR3 for alpha chain variable domain of TCR clone 255421 (TRAV12-3, TRAJ17)
CAMTLAGNKLTF

SEQ ID NO: 510842 - protein, 14 aa, Homo sapiens
  CDR3 for beta chain variable domain of TCR clone 255421 (TRBV11-2, TRBJ2-3)
CASSRLARTDTQYF

SEQ ID NO: 510843 - protein, 14 aa, Homo sapiens
  CDR3 for alpha chain variable domain of TCR clone 255422 (TRAV12-2, TRAJ40)
CAVKIPSGTYKYIF

SEQ ID NO: 510844 - protein, 13 aa, Homo sapiens
  CDR3 for beta chain variable domain of TCR clone 255422 (TRBV19, TRBJ2-7)
CASIKAGGSEQYF

SEQ ID NO: 510845 - protein, 13 aa, Homo sapiens
  CDR3 for alpha chain variable domain of TCR clone 255423 (TRAV26-2, TRAJ43)
CILRAVNNNDMRF

SEQ ID NO: 510846 - protein, 13 aa, Homo sapiens
  CDR3 for beta chain variable domain of TCR clone 255423 (TRBV19, TRBJ1-2)
CASSVPGQDGYTF

SEQ ID NO: 510847 - protein, 15 aa, Homo sapiens
  CDR3 for alpha chain variable domain of TCR clone 255424 (TRAV35, TRAJ50)
CAGQLRKTSYDKVIF

SEQ ID NO: 510848 - protein, 13 aa, Homo sapiens
  CDR3 for beta chain variable domain of TCR clone 255424 (TRBV12-4, TRBJ2-7)
CASSPTETYEQYF

SEQ ID NO: 510849 - protein, 16 aa, Homo sapiens
  CDR3 for alpha chain variable domain of TCR clone 255425 (TRAV12-3, TRAJ58)
CAMTDTEETSGSRLTF

SEQ ID NO: 510850 - protein, 19 aa, Homo sapiens
  CDR3 for beta chain variable domain of TCR clone 255425 (TRBV19, TRBJ2-5)
CASSIGQVTDFFLGETQYF

SEQ ID NO: 510851 - protein, 18 aa, Homo sapiens
  CDR3 for alpha chain variable domain of TCR clone 255426 (TRAV12-2, TRAJ52)
CAVRPSPAGGTSYGKLTF

SEQ ID NO: 510852 - protein, 14 aa, Homo sapiens
  CDR3 for beta chain variable domain of TCR clone 255426 (TRBV4-1, TRBJ2-2)
CASSQAVNTGELFF

SEQ ID NO: 510853 - protein, 14 aa, Homo sapiens
  CDR3 for alpha chain variable domain of TCR clone 255427 (TRAV2, TRAJ9)
CAVEDRSGGFKTIF

SEQ ID NO: 510854 - protein, 10 aa, Homo sapiens
  CDR3 for beta chain variable domain of TCR clone 255427 (TRBV2, TRBJ2-7)
CASSVYEQYF

SEQ ID NO: 510855 - protein, 18 aa, Homo sapiens
  CDR3 for alpha chain variable domain of TCR clone 255428 (TRAV38-2/DV8, TRAJ52)
CAYRSVGAGGTSYGKLTF

SEQ ID NO: 510856 - protein, 15 aa, Homo sapiens
  CDR3 for beta chain variable domain of TCR clone 255428 (TRBV3-1, TRBJ1-1)
CASKVRATMNTEAFF

SEQ ID NO: 510857 - protein, 16 aa, Homo sapiens
  CDR3 for alpha chain variable domain of TCR clone 255429 (TRAV26-1, TRAJ31)
CIVRPPVLNNNARLMF

SEQ ID NO: 510858 - protein, 12 aa, Homo sapiens
  CDR3 for beta chain variable domain of TCR clone 255429 (TRBV12-4, TRBJ2-7)
CASSLGGYEQYF

SEQ ID NO: 510859 - protein, 13 aa, Homo sapiens
  CDR3 for alpha chain variable domain of TCR clone 255430 (TRAV12-3, TRAJ13)
RAMGTGGYQKVTF

SEQ ID NO: 510860 - protein, 16 aa, Homo sapiens
  CDR3 for beta chain variable domain of TCR clone 255430 (TRBV9, TRBJ2-1)
CASGVGGGGNYNEQFF

SEQ ID NO: 510861 - protein, 17 aa, Homo sapiens
  CDR3 for alpha chain variable domain of TCR clone 255431 (TRAV3, TRAJ42)
CAVRDRDYGGSQGNLIF

SEQ ID NO: 510862 - protein, 14 aa, Homo sapiens
  CDR3 for beta chain variable domain of TCR clone 255431 (TRBV25-1, TRBJ1-1)
CASTHLGGNTEAFC

SEQ ID NO: 510863 - protein, 13 aa, Homo sapiens
  CDR3 for alpha chain variable domain of TCR clone 255432 (TRAV35, TRAJ42)
CAWFPGSQGNLIF

SEQ ID NO: 510864 - protein, 14 aa, Homo sapiens
  CDR3 for beta chain variable domain of TCR clone 255432 (TRBV29-1, TRBJ2-2)
CSVLAETNTGELFF

SEQ ID NO: 510865 - protein, 12 aa, Homo sapiens
  CDR3 for alpha chain variable domain of TCR clone 255433 (TRAV17, TRAJ48)
CALNFVNEKLTF

SEQ ID NO: 510866 - protein, 13 aa, Homo sapiens
  CDR3 for beta chain variable domain of TCR clone 255433 (TRBV6-5, TRBJ2-5)
CASSSPGGETQYF

SEQ ID NO: 510867 - protein, 15 aa, Homo sapiens
  CDR3 for alpha chain variable domain of TCR clone 255434 (TRAV8-2, TRAJ15)
CVVTMGNQAGTALIF

SEQ ID NO: 510868 - protein, 17 aa, Homo sapiens
  CDR3 for beta chain variable domain of TCR clone 255434 (TRBV20-1, TRBJ2-7)
CSARETKTGYLSYEQYF

SEQ ID NO: 510869 - protein, 13 aa, Homo sapiens
  CDR3 for alpha chain variable domain of TCR clone 255435 (TRAV8-1, TRAJ9)
CAVNSVGGFQTIF

SEQ ID NO: 510870 - protein, 15 aa, Homo sapiens
  CDR3 for beta chain variable domain of TCR clone 255435 (TRBV11-2, TRBJ2-3)
CASSGRDGLTDTQYF

SEQ ID NO: 510871 - protein, 18 aa, Homo sapiens
  CDR3 for alpha chain variable domain of TCR clone 255436 (TRAV26-1, TRAJ11)
TIASSESSWDSGYSTLTF

SEQ ID NO: 510872 - protein, 14 aa, Homo sapiens
  CDR3 for beta chain variable domain of TCR clone 255436 (TRBV25-1, TRBJ1-4)
CASSGGGQPEKLFF

SEQ ID NO: 510873 - protein, 14 aa, Homo sapiens
  CDR3 for alpha chain variable domain of TCR clone 255437 (TRAV8-3, TRAJ10)
CAVGNAGGGNKLTF

SEQ ID NO: 510874 - protein, 17 aa, Homo sapiens
  CDR3 for beta chain variable domain of TCR clone 255437 (TRBV20-1, TRBJ2-1)
CSAPPRLAGTRYNEQFF

SEQ ID NO: 510875 - protein, 13 aa, Homo sapiens
  CDR3 for alpha chain variable domain of TCR clone 255438 (TRAV29/DV5, TRAJ31)
CVASRNNNARLMF

SEQ ID NO: 510876 - protein, 16 aa, Homo sapiens
  CDR3 for beta chain variable domain of TCR clone 255438 (TRBV19, TRBJ2-2)
CASRSPGTGATGELFF

SEQ ID NO: 510877 - protein, 12 aa, Homo sapiens
  CDR3 for alpha chain variable domain of TCR clone 255439 (TRAV3, TRAJ31)
CPVRPRGPRLMV

SEQ ID NO: 510878 - protein, 17 aa, Homo sapiens
  CDR3 for beta chain variable domain of TCR clone 255439 (TRBV7-9, TRBJ1-5)
CASSASQGGYSNQPQHF

SEQ ID NO: 510879 - protein, 13 aa, Homo sapiens
  CDR3 for alpha chain variable domain of TCR clone 255440 (TRAV39, TRAJ58)
CAGEETSGSRLTF

SEQ ID NO: 510880 - protein, 16 aa, Homo sapiens
  CDR3 for beta chain variable domain of TCR clone 255440 (TRBV24-1, TRBJ2-1)
CATSDILGGNYNEQFF

SEQ ID NO: 510881 - protein, 12 aa, Homo sapiens
  CDR3 for alpha chain variable domain of TCR clone 255441 (TRAV30, TRAJ43)
CGTEERGSDMRF

SEQ ID NO: 510882 - protein, 14 aa, Homo sapiens
  CDR3 for beta chain variable domain of TCR clone 255441 (TRBV7-2, TRBJ2-7)
CASSPKTSFYEQYF

SEQ ID NO: 510883 - protein, 13 aa, Homo sapiens
  CDR3 for alpha chain variable domain of TCR clone 255442 (TRAV2, TRAJ40)
CAVVTSGTYKYIF

SEQ ID NO: 510884 - protein, 19 aa, Homo sapiens
  CDR3 for beta chain variable domain of TCR clone 255442 (TRBV7-2, TRBJ2-3)
CASSFLSRNLGGGTDTQYF

SEQ ID NO: 510885 - protein, 10 aa, Homo sapiens
  CDR3 for alpha chain variable domain of TCR clone 255443 (TRAV38-1, TRAJ53)
CAFMKHGLES

SEQ ID NO: 510886 - protein, 16 aa, Homo sapiens
  CDR3 for beta chain variable domain of TCR clone 255443 (TRBV20-1, TRBJ2-3)
CSGEAGLAGGQDTQYF

SEQ ID NO: 510887 - protein, 15 aa, Homo sapiens
  CDR3 for alpha chain variable domain of TCR clone 255444 (TRAV35, TRAJ40)
CAGQLWDSGTYKYIF

SEQ ID NO: 510888 - protein, 12 aa, Homo sapiens
  CDR3 for beta chain variable domain of TCR clone 255444 (TRBV7-8, TRBJ2-7)
CASGLAGYEQYF

SEQ ID NO: 510889 - protein, 15 aa, Homo sapiens
  CDR3 for alpha chain variable domain of TCR clone 255445 (TRAV3, TRAJ22)
CAVRDRGGSARQLTF

SEQ ID NO: 510890 - protein, 14 aa, Homo sapiens
  CDR3 for beta chain variable domain of TCR clone 255445 (TRBV19, TRBJ2-7)
CASSIEASSYEQYF

SEQ ID NO: 510891 - protein, 11 aa, Homo sapiens
  CDR3 for alpha chain variable domain of TCR clone 255446 (TRAV29/DV5, TRAJ37)
CATSNTGKLIF

SEQ ID NO: 510892 - protein, 14 aa, Homo sapiens
  CDR3 for beta chain variable domain of TCR clone 255446 (TRBV10-3, TRBJ1-1)
CAISDGSGVTEAFF

SEQ ID NO: 510893 - protein, 12 aa, Homo sapiens
  CDR3 for alpha chain variable domain of TCR clone 255447 (TRAV2, TRAJ9)
CAVGAGGFKNIF

SEQ ID NO: 510894 - protein, 16 aa, Homo sapiens
  CDR3 for beta chain variable domain of TCR clone 255447 (TRBV13, TRBJ2-2)
CASSPRTEEHTGELFF

SEQ ID NO: 510895 - protein, 15 aa, Homo sapiens
  CDR3 for alpha chain variable domain of TCR clone 255448 (TRAV12-3, TRAJ6)
CAMSATTGGSYIPTF

SEQ ID NO: 510896 - protein, 15 aa, Homo sapiens
  CDR3 for beta chain variable domain of TCR clone 255448 (TRBV5-1, TRBJ2-1)
CASKGLSGVYNEQFF

SEQ ID NO: 510897 - protein, 14 aa, Homo sapiens
  CDR3 for alpha chain variable domain of TCR clone 255449 (TRAV17, TRAJ16)
CATADFSDGQKLPF

SEQ ID NO: 510898 - protein, 12 aa, Homo sapiens
  CDR3 for beta chain variable domain of TCR clone 255449 (TRBV19, TRBJ2-7)
CASTSVGSEQYF

SEQ ID NO: 510899 - protein, 16 aa, Homo sapiens
  CDR3 for alpha chain variable domain of TCR clone 255450 (TRAV26-1, )
CIDIQNPDPAVYQLRD

SEQ ID NO: 510900 - protein, 19 aa, Homo sapiens
  CDR3 for beta chain variable domain of TCR clone 255450 (TRBV19, TRBJ2-5)
CASSIGQVTDFFLGETLYF

SEQ ID NO: 510901 - protein, 13 aa, Homo sapiens
  CDR3 for alpha chain variable domain of TCR clone 255451 (TRAV12-2, TRAJ3)
CAFQYSSASKIIF

SEQ ID NO: 510902 - protein, 11 aa, Homo sapiens
  CDR3 for beta chain variable domain of TCR clone 255451 (TRBV20-1, TRBJ2-3)
CSGTSSSTQYF

SEQ ID NO: 510903 - protein, 17 aa, Homo sapiens
  CDR3 for alpha chain variable domain of TCR clone 255452 (TRAV2, TRAJ31)
CAVEDNNARHVWRWNSA

SEQ ID NO: 510904 - protein, 14 aa, Homo sapiens
  CDR3 for beta chain variable domain of TCR clone 255452 (TRBV28, TRBJ1-5)
CASSRTGLNQPQHF

SEQ ID NO: 510905 - protein, 13 aa, Homo sapiens
  CDR3 for alpha chain variable domain of TCR clone 255453 (TRAV12-3, TRAJ7)
CAMSAFGNNRLAS

SEQ ID NO: 510906 - protein, 14 aa, Homo sapiens
  CDR3 for beta chain variable domain of TCR clone 255453 (TRBV13, TRBJ2-5)
CASSLGPRGETQYF

SEQ ID NO: 510907 - protein, 14 aa, Homo sapiens
  CDR3 for alpha chain variable domain of TCR clone 255454 (TRAV26-1, TRAJ38)
CIADNAGNNRKLIW

SEQ ID NO: 510908 - protein, 16 aa, Homo sapiens
  CDR3 for beta chain variable domain of TCR clone 255454 (TRBV10-3, TRBJ2-1)
CAISGVGDGGGGEQFF

SEQ ID NO: 510909 - protein, 13 aa, Homo sapiens
  CDR3 for alpha chain variable domain of TCR clone 255455 (TRAV12-1, TRAJ26)
SATYLYYGQNSVF

SEQ ID NO: 510910 - protein, 17 aa, Homo sapiens
  CDR3 for beta chain variable domain of TCR clone 255455 (TRBV4-2, TRBJ1-1)
CASTQFGGGSGNTEAFF

SEQ ID NO: 510911 - protein, 15 aa, Homo sapiens
  CDR3 for alpha chain variable domain of TCR clone 255456 (TRAV27, TRAJ38)
CAARRNAGNNRKLIW

SEQ ID NO: 510912 - protein, 19 aa, Homo sapiens
  CDR3 for beta chain variable domain of TCR clone 255456 (TRBV19, TRBJ2-5)
CASSIGQVTDFFLGETQYF

SEQ ID NO: 510913 - protein, 12 aa, Homo sapiens
  CDR3 for alpha chain variable domain of TCR clone 255457 (TRAV17, TRAJ20)
RATDSNDYKLSF

SEQ ID NO: 510914 - protein, 17 aa, Homo sapiens
  CDR3 for beta chain variable domain of TCR clone 255457 (TRBV5-1, TRBJ2-2)
CASSLAGLSGGTGELFF

SEQ ID NO: 510915 - protein, 22 aa, Homo sapiens
  CDR3 for alpha chain variable domain of TCR clone 255458 (TRAV27, TRAJ38)
CAARRNAGNNHIQNPDPAVYQL

SEQ ID NO: 510916 - protein, 14 aa, Homo sapiens
  CDR3 for beta chain variable domain of TCR clone 255458 (TRBV19, TRBJ2-1)
CASPTFVLSGEQFF

SEQ ID NO: 510917 - protein, 15 aa, Homo sapiens
  CDR3 for alpha chain variable domain of TCR clone 255459 (TRAV3, TRAJ22)
CAVSDRGGSARQLTF

SEQ ID NO: 510918 - protein, 15 aa, Homo sapiens
  CDR3 for beta chain variable domain of TCR clone 255459 (TRBV7-3, TRBJ2-2)
CASSETGQGTGELFF

SEQ ID NO: 510919 - protein, 12 aa, Homo sapiens
  CDR3 for alpha chain variable domain of TCR clone 255460 (TRAV1-2, TRAJ29)
CAVPSGNTPLVF

SEQ ID NO: 510920 - protein, 11 aa, Homo sapiens
  CDR3 for beta chain variable domain of TCR clone 255460 (TRBV29-1, TRBJ2-5)
CSEDRTGTQYL

SEQ ID NO: 510921 - protein, 14 aa, Homo sapiens
  CDR3 for alpha chain variable domain of TCR clone 255461 (TRAV3, TRAJ8)
CAALMNTGFQKLVC

SEQ ID NO: 510922 - protein, 15 aa, Homo sapiens
  CDR3 for beta chain variable domain of TCR clone 255461 (TRBV28, TRBJ2-5)
CASSLGLGNQETQYF

SEQ ID NO: 510923 - protein, 12 aa, Homo sapiens
  CDR3 for alpha chain variable domain of TCR clone 255462 (TRAV36/DV7, TRAJ43)
CAVEAKNNDMRF

SEQ ID NO: 510924 - protein, 16 aa, Homo sapiens
  CDR3 for beta chain variable domain of TCR clone 255462 (TRBV7-2, TRBJ2-5)
CASSAFPTGGEETQYF

SEQ ID NO: 510925 - protein, 15 aa, Homo sapiens
  CDR3 for alpha chain variable domain of TCR clone 255463 (TRAV27, TRAJ38)
CAARRNAGNNRQLLW

SEQ ID NO: 510926 - protein, 13 aa, Homo sapiens
  CDR3 for beta chain variable domain of TCR clone 255463 (TRBV12-5, TRBJ2-3)
CASGDRQSDTQYF

SEQ ID NO: 510927 - protein, 14 aa, Homo sapiens
  CDR3 for alpha chain variable domain of TCR clone 255464 (TRAV9-2, TRAJ39)
CALYIYNAGNMLTF

SEQ ID NO: 510928 - protein, 14 aa, Homo sapiens
  CDR3 for beta chain variable domain of TCR clone 255464 (TRBV25-1, TRBJ2-1)
CASSKTGGYNEQFF

SEQ ID NO: 510929 - protein, 13 aa, Homo sapiens
  CDR3 for alpha chain variable domain of TCR clone 255465 (TRAV27, TRAJ29)
CAGAHSGNTPLVF

SEQ ID NO: 510930 - protein, 12 aa, Homo sapiens
  CDR3 for beta chain variable domain of TCR clone 255465 (TRBV7-9, TRBJ2-7)
CASSLEGYEQYF

SEQ ID NO: 510931 - protein, 11 aa, Homo sapiens
  CDR3 for alpha chain variable domain of TCR clone 255466 (TRAV1-2, TRAJ20)
CAVANDYKLSF

SEQ ID NO: 510932 - protein, 15 aa, Homo sapiens
  CDR3 for beta chain variable domain of TCR clone 255466 (TRBV2, TRBJ2-5)
CASSELAGSYNEQYF

SEQ ID NO: 510933 - protein, 17 aa, Homo sapiens
  CDR3 for alpha chain variable domain of TCR clone 255467 (TRAV23/DV6, TRAJ57)
CAASSTLPQGGSEKLVF

SEQ ID NO: 510934 - protein, 13 aa, Homo sapiens
  CDR3 for beta chain variable domain of TCR clone 255467 (TRBV15, TRBJ1-6)
CATSGGLKSPLHF

SEQ ID NO: 510935 - protein, 14 aa, Homo sapiens
  CDR3 for alpha chain variable domain of TCR clone 255468 (TRAV13-1, TRAJ44)
CAAKATGTASKLTF

SEQ ID NO: 510936 - protein, 16 aa, Homo sapiens
  CDR3 for beta chain variable domain of TCR clone 255468 (TRBV7-3, TRBJ2-3)
CASSLMKRMGSRYAVF

SEQ ID NO: 510937 - protein, 15 aa, Homo sapiens
  CDR3 for alpha chain variable domain of TCR clone 255469 (TRAV21, TRAJ53)
CATLNSGGSNYKLTF

SEQ ID NO: 510938 - protein, 13 aa, Homo sapiens
  CDR3 for beta chain variable domain of TCR clone 255469 (TRBV7-9, TRBJ2-2)
CASSLDPTGELFF

SEQ ID NO: 510939 - protein, 13 aa, Homo sapiens
  CDR3 for alpha chain variable domain of TCR clone 255470 (TRAV3, TRAJ27)
CAVRPLGAGKSTF

SEQ ID NO: 510940 - protein, 12 aa, Homo sapiens
  CDR3 for beta chain variable domain of TCR clone 255470 (TRBV11-3, TRBJ1-1)
CASSHRQGEAFF

SEQ ID NO: 510941 - protein, 14 aa, Homo sapiens
  CDR3 for alpha chain variable domain of TCR clone 255471 (TRAV16, TRAJ42)
CALLAGGSQGNLIF

SEQ ID NO: 510942 - protein, 15 aa, Homo sapiens
  CDR3 for beta chain variable domain of TCR clone 255471 (TRBV7-9, TRBJ1-5)
CASSQGHQPNQPQHF

SEQ ID NO: 510943 - protein, 14 aa, Homo sapiens
  CDR3 for alpha chain variable domain of TCR clone 255472 (TRAV13-1, TRAJ44)
CAAKATGTASKPTF

SEQ ID NO: 510944 - protein, 22 aa, Homo sapiens
  CDR3 for beta chain variable domain of TCR clone 255472 (TRBV19, TRBJ2-1)
CASGVRDRVTGTSGRIYNEQFF

SEQ ID NO: 510945 - protein, 14 aa, Homo sapiens
  CDR3 for alpha chain variable domain of TCR clone 255473 (TRAV12-2, TRAJ15)
CAPHTGQAGTALIF

SEQ ID NO: 510946 - protein, 17 aa, Homo sapiens
  CDR3 for beta chain variable domain of TCR clone 255473 (TRBV7-8, TRBJ2-6)
CASSAGTGGAGANVLTF

SEQ ID NO: 510947 - protein, 15 aa, Homo sapiens
  CDR3 for alpha chain variable domain of TCR clone 255474 (TRAV20, TRAJ43)
CAVQAGKGSNNDMRF

SEQ ID NO: 510948 - protein, 17 aa, Homo sapiens
  CDR3 for beta chain variable domain of TCR clone 255474 (TRBV7-2, TRBJ2-5)
CASSSGLAGDGQETQYF

SEQ ID NO: 510949 - protein, 14 aa, Homo sapiens
  CDR3 for alpha chain variable domain of TCR clone 255475 (TRAV12-2, TRAJ13)
CAVKKPGGYQKVTF

SEQ ID NO: 510950 - protein, 17 aa, Homo sapiens
  CDR3 for beta chain variable domain of TCR clone 255475 (TRBV13, TRBJ2-3)
CASSLSRVAGGRNTQYF

SEQ ID NO: 510951 - protein, 19 aa, Homo sapiens
  CDR3 for alpha chain variable domain of TCR clone 255476 (TRAV26-1, TRAJ48)
CCVLLHRQSRDFGNEKLTF

SEQ ID NO: 510952 - protein, 16 aa, Homo sapiens
  CDR3 for beta chain variable domain of TCR clone 255476 (TRBV4-1, TRBJ2-3)
CASSQRAGGLTDTQYF

SEQ ID NO: 510953 - protein, 12 aa, Homo sapiens
  CDR3 for alpha chain variable domain of TCR clone 255477 (TRAV1-1, TRAJ30)
CAVRGRDDKIIF

SEQ ID NO: 510954 - protein, 14 aa, Homo sapiens
  CDR3 for beta chain variable domain of TCR clone 255477 (TRBV6-1, TRBJ1-3)
CGSVQGGGGNTIYF

SEQ ID NO: 510955 - protein, 11 aa, Homo sapiens
  CDR3 for alpha chain variable domain of TCR clone 255478 (TRAV21, TRAJ11)
CAVNGYSTLTF

SEQ ID NO: 510956 - protein, 14 aa, Homo sapiens
  CDR3 for beta chain variable domain of TCR clone 255478 (TRBV7-3, TRBJ2-1)
CASSLSGSYNEQFF

SEQ ID NO: 510957 - protein, 17 aa, Homo sapiens
  CDR3 for alpha chain variable domain of TCR clone 255479 (TRAV4, TRAJ13)
CLVGVQGSSGGYQKVTF

SEQ ID NO: 510958 - protein, 12 aa, Homo sapiens
  CDR3 for beta chain variable domain of TCR clone 255479 (TRBV11-2, TRBJ2-1)
CASSPGNNEQFF

SEQ ID NO: 510959 - protein, 14 aa, Homo sapiens
  CDR3 for alpha chain variable domain of TCR clone 255480 (TRAV8-3, TRAJ4)
CAVGASGGYNKLIF

SEQ ID NO: 510960 - protein, 14 aa, Homo sapiens
  CDR3 for beta chain variable domain of TCR clone 255480 (TRBV11-2, TRBJ2-5)
CASSRTGGIETQYF

SEQ ID NO: 510961 - protein, 13 aa, Homo sapiens
  CDR3 for alpha chain variable domain of TCR clone 255481 (TRAV8-6, TRAJ9)
CAVSHTGGFKTIF

SEQ ID NO: 510962 - protein, 16 aa, Homo sapiens
  CDR3 for beta chain variable domain of TCR clone 255481 (TRBV19, TRBJ2-3)
CASSPGAASRTDTQYF

SEQ ID NO: 510963 - protein, 15 aa, Homo sapiens
  CDR3 for alpha chain variable domain of TCR clone 255482 (TRAV12-3, TRAJ6)
CAMSATTGGSYIPTF

SEQ ID NO: 510964 - protein, 15 aa, Homo sapiens
  CDR3 for beta chain variable domain of TCR clone 255482 (TRBV7-6, TRBJ1-5)
CASSQSIGINQPQHF

SEQ ID NO: 510965 - protein, 14 aa, Homo sapiens
  CDR3 for alpha chain variable domain of TCR clone 255483 (TRAV8-1, TRAJ5)
CAVSMDTGRRALTF

SEQ ID NO: 510966 - protein, 15 aa, Homo sapiens
  CDR3 for beta chain variable domain of TCR clone 255483 (TRBV19, TRBJ2-7)
CASRGPRRGENIQYF

SEQ ID NO: 510967 - protein, 16 aa, Homo sapiens
  CDR3 for alpha chain variable domain of TCR clone 255484 (TRAV27, TRAJ53)
CAAPEGSGGSNYKLTF

SEQ ID NO: 510968 - protein, 18 aa, Homo sapiens
  CDR3 for beta chain variable domain of TCR clone 255484 (TRBV20-1, TRBJ2-6)
CSAETTPTHGSGANVLTF

SEQ ID NO: 510969 - protein, 13 aa, Homo sapiens
  CDR3 for alpha chain variable domain of TCR clone 255485 (TRAV17, TRAJ9)
CATYYTGGFKTTF

SEQ ID NO: 510970 - protein, 14 aa, Homo sapiens
  CDR3 for beta chain variable domain of TCR clone 255485 (TRBV19, TRBJ2-5)
CASSMTGQQETQYF

SEQ ID NO: 510971 - protein, 13 aa, Homo sapiens
  CDR3 for alpha chain variable domain of TCR clone 255486 (TRAV26-1, TRAJ30)
CIVRVESNDKIIF

SEQ ID NO: 510972 - protein, 13 aa, Homo sapiens
  CDR3 for beta chain variable domain of TCR clone 255486 (TRBV11-2, TRBJ1-1)
CASSLETSTEAFF

SEQ ID NO: 510973 - protein, 13 aa, Homo sapiens
  CDR3 for alpha chain variable domain of TCR clone 255487 (TRAV12-2, TRAJ4)
CAGFSGGYNKLIF

SEQ ID NO: 510974 - protein, 14 aa, Homo sapiens
  CDR3 for beta chain variable domain of TCR clone 255487 (TRBV7-3, TRBJ2-1)
CASSLTGGANEQFF

SEQ ID NO: 510975 - protein, 16 aa, Homo sapiens
  CDR3 for alpha chain variable domain of TCR clone 255488 (TRAV4, TRAJ18)
CCVLLIGGSTLGRLYF

SEQ ID NO: 510976 - protein, 13 aa, Homo sapiens
  CDR3 for beta chain variable domain of TCR clone 255488 (TRBV10-3, TRBJ2-7)
CASKLAVNYEQYF

SEQ ID NO: 510977 - protein, 14 aa, Homo sapiens
  CDR3 for alpha chain variable domain of TCR clone 255489 (TRAV16, TRAJ42)
CALSGMGSQGNLIF

SEQ ID NO: 510978 - protein, 16 aa, Homo sapiens
  CDR3 for beta chain variable domain of TCR clone 255489 (TRBV5-1, TRBJ2-2)
CASSSRTGGRTGELFF

SEQ ID NO: 510979 - protein, 12 aa, Homo sapiens
  CDR3 for alpha chain variable domain of TCR clone 255490 (TRAV20, TRAJ39)
CAVGNAGNMLSF

SEQ ID NO: 510980 - protein, 16 aa, Homo sapiens
  CDR3 for beta chain variable domain of TCR clone 255490 (TRBV15, TRBJ1-2)
CATSRGPRTGGGGYTF

SEQ ID NO: 510981 - protein, 16 aa, Homo sapiens
  CDR3 for alpha chain variable domain of TCR clone 255491 (TRAV26-1, TRAJ36)
CIGRAIGRSGANNLFF

SEQ ID NO: 510982 - protein, 14 aa, Homo sapiens
  CDR3 for beta chain variable domain of TCR clone 255491 (TRBV25-1, TRBJ2-1)
CASSKTGGYNEQFF

SEQ ID NO: 510983 - protein, 13 aa, Homo sapiens
  CDR3 for alpha chain variable domain of TCR clone 255492 (TRAV20, TRAJ37)
CAGCPSNTGKLIF

SEQ ID NO: 510984 - protein, 13 aa, Homo sapiens
  CDR3 for beta chain variable domain of TCR clone 255492 (TRBV12-4, TRBJ1-2)
CASSSGLTVISTF

SEQ ID NO: 510985 - protein, 11 aa, Homo sapiens
  CDR3 for alpha chain variable domain of TCR clone 255493 (TRAV12-3, TRAJ43)
CAMSVSNDMRF

SEQ ID NO: 510986 - protein, 16 aa, Homo sapiens
  CDR3 for beta chain variable domain of TCR clone 255493 (TRBV20-1, TRBJ2-1)
CNARDSLGAVYNEQFF

SEQ ID NO: 510987 - protein, 23 aa, Homo sapiens
  CDR3 for alpha chain variable domain of TCR clone 255494 (TRAV21, TRAJ39)
AASQPGDPATYPLLVNAGNMLTF

SEQ ID NO: 510988 - protein, 14 aa, Homo sapiens
  CDR3 for beta chain variable domain of TCR clone 255494 (TRBV7-2, TRBJ2-7)
CASRSQGAAYEQYF

SEQ ID NO: 510989 - protein, 14 aa, Homo sapiens
  CDR3 for alpha chain variable domain of TCR clone 255495 (TRAV12-2, TRAJ24)
CAVTPADSCGKLQF

SEQ ID NO: 510990 - protein, 15 aa, Homo sapiens
  CDR3 for beta chain variable domain of TCR clone 255495 (TRBV27, TRBJ2-1)
CASSNGGGSSNEQFF

SEQ ID NO: 510991 - protein, 10 aa, Homo sapiens
  CDR3 for alpha chain variable domain of TCR clone 255496 (TRAV1-2, TRAJ23)
CAGQGGKLIF

SEQ ID NO: 510992 - protein, 16 aa, Homo sapiens
  CDR3 for beta chain variable domain of TCR clone 255496 (TRBV11-2, TRBJ1-1)
CASSLRQGGEDSKAFF

SEQ ID NO: 510993 - protein, 13 aa, Homo sapiens
  CDR3 for alpha chain variable domain of TCR clone 255497 (TRAV21, TRAJ52)
CAVRPSPAGGTSY

SEQ ID NO: 510994 - protein, 16 aa, Homo sapiens
  CDR3 for beta chain variable domain of TCR clone 255497 (TRBV7-3, TRBJ2-1)
CASSLEGYRSYNEQFF

SEQ ID NO: 510995 - protein, 16 aa, Homo sapiens
  CDR3 for alpha chain variable domain of TCR clone 255498 (TRAV3, TRAJ18)
CAVRDGRGSTRGRLYF

SEQ ID NO: 510996 - protein, 17 aa, Homo sapiens
  CDR3 for beta chain variable domain of TCR clone 255498 (TRBV5-1, TRBJ2-3)
CASSKIGLADRTDTQYF

SEQ ID NO: 510997 - protein, 14 aa, Homo sapiens
  CDR3 for alpha chain variable domain of TCR clone 255499 (TRAV3, TRAJ6)
CAVRDWGGSNIPTF

SEQ ID NO: 510998 - protein, 15 aa, Homo sapiens
  CDR3 for beta chain variable domain of TCR clone 255499 (TRBV5-1, TRBJ2-1)
CASSPPRAPYNEQFF

SEQ ID NO: 510999 - protein, 11 aa, Homo sapiens
  CDR3 for alpha chain variable domain of TCR clone 255500 (TRAV17, TRAJ9)
CATTGGFKAIF

SEQ ID NO: 511000 - protein, 17 aa, Homo sapiens
  CDR3 for beta chain variable domain of TCR clone 255500 (TRBV20-1, TRBJ2-2)
CSASGSGQGGLTGELVF

SEQ ID NO: 511001 - protein, 13 aa, Homo sapiens
  CDR3 for alpha chain variable domain of TCR clone 255501 (TRAV12-2, TRAJ42)
CAVKRGSQGNLIF

SEQ ID NO: 511002 - protein, 16 aa, Homo sapiens
  CDR3 for beta chain variable domain of TCR clone 255501 (TRBV9, TRBJ2-2)
CASSAIGKGNTGELFF

SEQ ID NO: 511003 - protein, 13 aa, Homo sapiens
  CDR3 for alpha chain variable domain of TCR clone 255502 (TRAV12-2, TRAJ50)
CAVIVTSYDKVIF

SEQ ID NO: 511004 - protein, 16 aa, Homo sapiens
  CDR3 for beta chain variable domain of TCR clone 255502 (TRBV29-1, TRBJ2-7)
CSVEVVGTSGSYEQYF

SEQ ID NO: 511005 - protein, 13 aa, Homo sapiens
  CDR3 for alpha chain variable domain of TCR clone 255503 (TRAV19, TRAJ57)
CSLLQGGSEKLLF

SEQ ID NO: 511006 - protein, 14 aa, Homo sapiens
  CDR3 for beta chain variable domain of TCR clone 255503 (TRBV11-1, TRBJ2-7)
CASTFAVPSYEQYF

SEQ ID NO: 511007 - protein, 14 aa, Homo sapiens
  CDR3 for alpha chain variable domain of TCR clone 255504 (TRAV38-1, TRAJ29)
CAFITPSGNTPLVF

SEQ ID NO: 511008 - protein, 12 aa, Homo sapiens
  CDR3 for beta chain variable domain of TCR clone 255504 (TRBV20-1, TRBJ2-1)
CSARLGTDEQFF

SEQ ID NO: 511009 - protein, 12 aa, Homo sapiens
  CDR3 for alpha chain variable domain of TCR clone 255505 (TRAV12-2, TRAJ10)
WGVTGGGNKLTF

SEQ ID NO: 511010 - protein, 14 aa, Homo sapiens
  CDR3 for beta chain variable domain of TCR clone 255505 (TRBV18, TRBJ2-5)
CASSPGVSQETQYF

SEQ ID NO: 511011 - protein, 12 aa, Homo sapiens
  CDR3 for alpha chain variable domain of TCR clone 255506 (TRAV17, TRAJ12)
CATLRSSYKLIF

SEQ ID NO: 511012 - protein, 16 aa, Homo sapiens
  CDR3 for beta chain variable domain of TCR clone 255506 (TRBV28, TRBJ2-7)
CASSLFFESGGPEQYF

SEQ ID NO: 511013 - protein, 20 aa, Homo sapiens
  CDR3 for alpha chain variable domain of TCR clone 255507 (TRAV17, TRAJ9)
CFLLLCYGGMGGTGGFKTIF

SEQ ID NO: 511014 - protein, 15 aa, Homo sapiens
  CDR3 for beta chain variable domain of TCR clone 255507 (TRBV20-1, TRBJ1-2)
CSARDSRGRNYGYTF

SEQ ID NO: 511015 - protein, 13 aa, Homo sapiens
  CDR3 for alpha chain variable domain of TCR clone 255508 (TRAV2, TRAJ40)
CAVVSSGTYKYIF

SEQ ID NO: 511016 - protein, 14 aa, Homo sapiens
  CDR3 for beta chain variable domain of TCR clone 255508 (TRBV19, TRBJ2-1)
CASPTSVLSGEQFF

SEQ ID NO: 511017 - protein, 16 aa, Homo sapiens
  CDR3 for alpha chain variable domain of TCR clone 255509 (TRAV12-2, TRAJ43)
CAGDDMRFGAGTRLTV

SEQ ID NO: 511018 - protein, 17 aa, Homo sapiens
  CDR3 for beta chain variable domain of TCR clone 255509 (TRBV28, TRBJ2-3)
CASSSPPTGLSTDTQYF

SEQ ID NO: 511019 - protein, 14 aa, Homo sapiens
  CDR3 for alpha chain variable domain of TCR clone 255510 (TRAV1-2, TRAJ16)
CAVNRFSDGQKLLS

SEQ ID NO: 511020 - protein, 12 aa, Homo sapiens
  CDR3 for beta chain variable domain of TCR clone 255510 (TRBV24-1, TRBJ1-1)
CATLYPDTEAFF

SEQ ID NO: 511021 - protein, 14 aa, Homo sapiens
  CDR3 for alpha chain variable domain of TCR clone 255511 (TRAV26-1, TRAJ44)
CIVKSTGTASKLTF

SEQ ID NO: 511022 - protein, 16 aa, Homo sapiens
  CDR3 for beta chain variable domain of TCR clone 255511 (TRBV12-3, TRBJ2-1)
CASSPGGNRWSHEQFF

SEQ ID NO: 511023 - protein, 14 aa, Homo sapiens
  CDR3 for alpha chain variable domain of TCR clone 255512 (TRAV12-1, TRAJ38)
CGELKAGNNRKLIC

SEQ ID NO: 511024 - protein, 15 aa, Homo sapiens
  CDR3 for beta chain variable domain of TCR clone 255512 (TRBV18, TRBJ2-1)
CASSPPSASYNEQFF

SEQ ID NO: 511025 - protein, 12 aa, Homo sapiens
  CDR3 for alpha chain variable domain of TCR clone 255513 (TRAV21, TRAJ49)
CAVNDGGNQFYF

SEQ ID NO: 511026 - protein, 14 aa, Homo sapiens
  CDR3 for beta chain variable domain of TCR clone 255513 (TRBV18, TRBJ2-7)
CASAPRGGSYEQYF

SEQ ID NO: 511027 - protein, 13 aa, Homo sapiens
  CDR3 for alpha chain variable domain of TCR clone 255514 (TRAV20, TRAJ20)
CAVRWVRDYKLSF

SEQ ID NO: 511028 - protein, 12 aa, Homo sapiens
  CDR3 for beta chain variable domain of TCR clone 255514 (TRBV18, TRBJ2-7)
CASSLDSYEQYF

SEQ ID NO: 511029 - protein, 14 aa, Homo sapiens
  CDR3 for alpha chain variable domain of TCR clone 255515 (TRAV12-2, TRAJ40)
CAVKIPSGTYKYIF

SEQ ID NO: 511030 - protein, 13 aa, Homo sapiens
  CDR3 for beta chain variable domain of TCR clone 255515 (TRBV7-9, TRBJ1-2)
CASSLKQNYGYIF

SEQ ID NO: 511031 - protein, 14 aa, Homo sapiens
  CDR3 for alpha chain variable domain of TCR clone 255516 (TRAV1-2, TRAJ16)
CAVNRFSDGQKQLF

SEQ ID NO: 511032 - protein, 15 aa, Homo sapiens
  CDR3 for beta chain variable domain of TCR clone 255516 (TRBV6-3, TRBJ2-7)
CASSSPGTVFYEQYF

SEQ ID NO: 511033 - protein, 13 aa, Homo sapiens
  CDR3 for alpha chain variable domain of TCR clone 255517 (TRAV12-2, TRAJ9)
CAVKWAGGFKTIF

SEQ ID NO: 511034 - protein, 13 aa, Homo sapiens
  CDR3 for beta chain variable domain of TCR clone 255517 (TRBV7-3, TRBJ1-1)
CASSQDWGAESFF

SEQ ID NO: 511035 - protein, 14 aa, Homo sapiens
  CDR3 for alpha chain variable domain of TCR clone 255518 (TRAV40, TRAJ41)
CLLGPPNPGYALNF

SEQ ID NO: 511036 - protein, 11 aa, Homo sapiens
  CDR3 for beta chain variable domain of TCR clone 255518 (TRBV19, TRBJ2-7)
CTSSILGEQYF

SEQ ID NO: 511037 - protein, 10 aa, Homo sapiens
  CDR3 for alpha chain variable domain of TCR clone 255519 (TRAV12-3, TRAJ34)
CAMSADKLIF

SEQ ID NO: 511038 - protein, 15 aa, Homo sapiens
  CDR3 for beta chain variable domain of TCR clone 255519 (TRBV20-1, TRBJ2-3)
CSASSGEAITDTQYF

SEQ ID NO: 511039 - protein, 15 aa, Homo sapiens
  CDR3 for alpha chain variable domain of TCR clone 255520 (TRAV12-2, TRAJ53)
CAVNGGGGSNYKLTF

SEQ ID NO: 511040 - protein, 15 aa, Homo sapiens
  CDR3 for beta chain variable domain of TCR clone 255520 (TRBV20-1, TRBJ2-3)
CSARPSGFYTDTQYF

SEQ ID NO: 511041 - protein, 12 aa, Homo sapiens
  CDR3 for alpha chain variable domain of TCR clone 255521 (TRAV35, TRAJ49)
CAGWNAGNQFYF

SEQ ID NO: 511042 - protein, 16 aa, Homo sapiens
  CDR3 for beta chain variable domain of TCR clone 255521 (TRBV5-1, TRBJ2-2)
CASSLWDTTNTGELFF

SEQ ID NO: 511043 - protein, 13 aa, Homo sapiens
  CDR3 for alpha chain variable domain of TCR clone 255522 (TRAV3, TRAJ21)
CAVREQDFNKFYF

SEQ ID NO: 511044 - protein, 14 aa, Homo sapiens
  CDR3 for beta chain variable domain of TCR clone 255522 (TRBV25-1, TRBJ1-1)
CASTHLGGNTEAFF

SEQ ID NO: 511045 - protein, 10 aa, Homo sapiens
  CDR3 for alpha chain variable domain of TCR clone 255523 (TRAV27, TRAJ43)
FAGANNDMRF

SEQ ID NO: 511046 - protein, 20 aa, Homo sapiens
  CDR3 for beta chain variable domain of TCR clone 255523 (TRBV6-1, TRBJ1-4)
CASSESLAGGMRATNEKLFF

SEQ ID NO: 511047 - protein, 16 aa, Homo sapiens
  CDR3 for alpha chain variable domain of TCR clone 255524 (TRAV17, TRAJ54)
CATDSDIIQGAQKLVF

SEQ ID NO: 511048 - protein, 12 aa, Homo sapiens
  CDR3 for beta chain variable domain of TCR clone 255524 (TRBV18, TRBJ2-3)
CQLNQNTDTQYF

SEQ ID NO: 511049 - protein, 13 aa, Homo sapiens
  CDR3 for alpha chain variable domain of TCR clone 255525 (TRAV13-1, TRAJ20)
CAARVSNDYKLSF

SEQ ID NO: 511050 - protein, 15 aa, Homo sapiens
  CDR3 for beta chain variable domain of TCR clone 255525 (TRBV19, TRBJ1-1)
CASTSGQIQNTEAFF

SEQ ID NO: 511051 - protein, 17 aa, Homo sapiens
  CDR3 for alpha chain variable domain of TCR clone 255526 (TRAV3, TRAJ12)
CAVRDGGRMDSSYKLIF

SEQ ID NO: 511052 - protein, 15 aa, Homo sapiens
  CDR3 for beta chain variable domain of TCR clone 255526 (TRBV19, TRBJ2-6)
CASVRRDSGANVLTF

SEQ ID NO: 511053 - protein, 12 aa, Homo sapiens
  CDR3 for alpha chain variable domain of TCR clone 255527 (TRAV13-1, TRAJ21)
CAAKEGFNKFYF

SEQ ID NO: 511054 - protein, 16 aa, Homo sapiens
  CDR3 for beta chain variable domain of TCR clone 255527 (TRBV7-2, TRBJ2-6)
CASSLAGRSGANDLTF

SEQ ID NO: 511055 - protein, 13 aa, Homo sapiens
  CDR3 for alpha chain variable domain of TCR clone 255528 (TRAV3, TRAJ21)
CAVREPDFNKFYF

SEQ ID NO: 511056 - protein, 15 aa, Homo sapiens
  CDR3 for beta chain variable domain of TCR clone 255528 (TRBV2, TRBJ2-1)
CASSEEREGDNEQFF

SEQ ID NO: 511057 - protein, 14 aa, Homo sapiens
  CDR3 for alpha chain variable domain of TCR clone 255529 (TRAV12-3, TRAJ13)
CAMRNSGGYQKVTF

SEQ ID NO: 511058 - protein, 15 aa, Homo sapiens
  CDR3 for beta chain variable domain of TCR clone 255529 (TRBV19, TRBJ2-1)
CASSIQATSYNEQFF

SEQ ID NO: 511059 - protein, 13 aa, Homo sapiens
  CDR3 for alpha chain variable domain of TCR clone 255530 (TRAV3, TRAJ35)
CGMRKSIGNVLHC

SEQ ID NO: 511060 - protein, 14 aa, Homo sapiens
  CDR3 for beta chain variable domain of TCR clone 255530 (TRBV6-5, TRBJ1-4)
CASSYRAAEEKLFF

SEQ ID NO: 511061 - protein, 14 aa, Homo sapiens
  CDR3 for alpha chain variable domain of TCR clone 255531 (TRAV12-2, TRAJ6)
CASKWGGGSYIPTF

SEQ ID NO: 511062 - protein, 12 aa, Homo sapiens
  CDR3 for beta chain variable domain of TCR clone 255531 (TRBV5-4, TRBJ2-5)
CASSSTRETQYF

SEQ ID NO: 511063 - protein, 12 aa, Homo sapiens
  CDR3 for alpha chain variable domain of TCR clone 255532 (TRAV27, TRAJ42)
CAGGGSQGNLIF

SEQ ID NO: 511064 - protein, 13 aa, Homo sapiens
  CDR3 for beta chain variable domain of TCR clone 255532 (TRBV7-9, TRBJ2-5)
CASLPSGRETQYF

SEQ ID NO: 511065 - protein, 15 aa, Homo sapiens
  CDR3 for alpha chain variable domain of TCR clone 255533 (TRAV3, TRAJ3)
CCERPRYSSASKIIF

SEQ ID NO: 511066 - protein, 16 aa, Homo sapiens
  CDR3 for beta chain variable domain of TCR clone 255533 (TRBV19, TRBJ1-5)
CASSIDRGGPRRPQHF

SEQ ID NO: 511067 - protein, 12 aa, Homo sapiens
  CDR3 for alpha chain variable domain of TCR clone 255534 (TRAV13-1, TRAJ15)
CAASQSGTALIF

SEQ ID NO: 511068 - protein, 13 aa, Homo sapiens
  CDR3 for beta chain variable domain of TCR clone 255534 (TRBV10-3, TRBJ1-2)
CAISERDSYGYTF

SEQ ID NO: 511069 - protein, 12 aa, Homo sapiens
  CDR3 for alpha chain variable domain of TCR clone 255535 (TRAV16, TRAJ49)
CALNEGGNQFYF

SEQ ID NO: 511070 - protein, 14 aa, Homo sapiens
  CDR3 for beta chain variable domain of TCR clone 255535 (TRBV7-9, TRBJ2-1)
CASRRTGRRNEQFF

SEQ ID NO: 511071 - protein, 15 aa, Homo sapiens
  CDR3 for alpha chain variable domain of TCR clone 255536 (TRAV26-1, TRAJ27)
CIVRVLTPMQANQPL

SEQ ID NO: 511072 - protein, 13 aa, Homo sapiens
  CDR3 for beta chain variable domain of TCR clone 255536 (TRBV20-1, TRBJ2-7)
CSATHTGGYEQYF

SEQ ID NO: 511073 - protein, 15 aa, Homo sapiens
  CDR3 for alpha chain variable domain of TCR clone 255537 (TRAV17, TRAJ57)
CATGPSQGGSEKLVF

SEQ ID NO: 511074 - protein, 12 aa, Homo sapiens
  CDR3 for beta chain variable domain of TCR clone 255537 (TRBV6-3, TRBJ2-7)
CASSRQGYEQYF

SEQ ID NO: 511075 - protein, 12 aa, Homo sapiens
  CDR3 for alpha chain variable domain of TCR clone 255538 (TRAV2, TRAJ33)
CAVPDSNYQLIW

SEQ ID NO: 511076 - protein, 15 aa, Homo sapiens
  CDR3 for beta chain variable domain of TCR clone 255538 (TRBV15, TRBJ1-5)
RATSRDPVSNQPQHF

SEQ ID NO: 511077 - protein, 12 aa, Homo sapiens
  CDR3 for alpha chain variable domain of TCR clone 255539 (TRAV13-1, TRAJ53)
AASGGSNYKLTF

SEQ ID NO: 511078 - protein, 16 aa, Homo sapiens
  CDR3 for beta chain variable domain of TCR clone 255539 (TRBV4-2, TRBJ2-7)
CASSQDGVERGYEQYF

SEQ ID NO: 511079 - protein, 17 aa, Homo sapiens
  CDR3 for alpha chain variable domain of TCR clone 255540 (TRAV1-1, TRAJ32)
CAVRVDELWWCYKQAHL

SEQ ID NO: 511080 - protein, 12 aa, Homo sapiens
  CDR3 for beta chain variable domain of TCR clone 255540 (TRBV7-8, TRBJ2-1)
CASSLGQNEQFF

SEQ ID NO: 511081 - protein, 14 aa, Homo sapiens
  CDR3 for alpha chain variable domain of TCR clone 255541 (TRAV17, TRAJ16)
CATADFSDGQQLLF

SEQ ID NO: 511082 - protein, 15 aa, Homo sapiens
  CDR3 for beta chain variable domain of TCR clone 255541 (TRBV18, TRBJ2-1)
CASSSPSASYNEQLF

SEQ ID NO: 511083 - protein, 14 aa, Homo sapiens
  CDR3 for alpha chain variable domain of TCR clone 255542 (TRAV23/DV6, TRAJ37)
CAASTSSNTGKLIF

SEQ ID NO: 511084 - protein, 20 aa, Homo sapiens
  CDR3 for beta chain variable domain of TCR clone 255542 (TRBV28, TRBJ2-1)
CASTPIGRSPGLAGGNEQFF

SEQ ID NO: 511085 - protein, 13 aa, Homo sapiens
  CDR3 for alpha chain variable domain of TCR clone 255543 (TRAV12-1, TRAJ16)
CVVNGPDGQKLLF

SEQ ID NO: 511086 - protein, 13 aa, Homo sapiens
  CDR3 for beta chain variable domain of TCR clone 255543 (TRBV2, TRBJ1-1)
CARDPTGGLHAFF

SEQ ID NO: 511087 - protein, 22 aa, Homo sapiens
  CDR3 for alpha chain variable domain of TCR clone 255544 (TRAV8-6, TRAJ21)
HLRKPSVHISDTAEYFWHKFYF

SEQ ID NO: 511088 - protein, 15 aa, Homo sapiens
  CDR3 for beta chain variable domain of TCR clone 255544 (TRBV12-4, TRBJ2-7)
CASSQTGAISYEQYF

SEQ ID NO: 511089 - protein, 14 aa, Homo sapiens
  CDR3 for alpha chain variable domain of TCR clone 255545 (TRAV12-2, TRAJ11)
CAVEGGSGYSTLTF

SEQ ID NO: 511090 - protein, 16 aa, Homo sapiens
  CDR3 for beta chain variable domain of TCR clone 255545 (TRBV7-3, TRBJ2-2)
CASSLKRGTLSGEQFF

SEQ ID NO: 511091 - protein, 19 aa, Homo sapiens
  CDR3 for alpha chain variable domain of TCR clone 255546 (TRAV3, TRAJ37)
CAVIDIVGGYPSKTGKLIF

SEQ ID NO: 511092 - protein, 14 aa, Homo sapiens
  CDR3 for beta chain variable domain of TCR clone 255546 (TRBV7-8, TRBJ2-3)
CASSLEAGTDTQYF

SEQ ID NO: 511093 - protein, 14 aa, Homo sapiens
  CDR3 for alpha chain variable domain of TCR clone 255547 (TRAV12-3, TRAJ10)
SHLPLTGGGNKLTF

SEQ ID NO: 511094 - protein, 15 aa, Homo sapiens
  CDR3 for beta chain variable domain of TCR clone 255547 (TRBV20-1, TRBJ2-7)
CSARDRVSVMDEQYF

SEQ ID NO: 511095 - protein, 14 aa, Homo sapiens
  CDR3 for alpha chain variable domain of TCR clone 255548 (TRAV12-2, TRAJ15)
CAPHTGQAGTALFF

SEQ ID NO: 511096 - protein, 11 aa, Homo sapiens
  CDR3 for beta chain variable domain of TCR clone 255548 (TRBV7-8, TRBJ2-7)
CASSLSLEQYF

SEQ ID NO: 511097 - protein, 17 aa, Homo sapiens
  CDR3 for alpha chain variable domain of TCR clone 255549 (TRAV13-1, TRAJ28)
CAASPPYSGAGSYQLTF

SEQ ID NO: 511098 - protein, 14 aa, Homo sapiens
  CDR3 for beta chain variable domain of TCR clone 255549 (TRBV7-3, TRBJ2-7)
CASSLSGVSYEQYF

SEQ ID NO: 511099 - protein, 11 aa, Homo sapiens
  CDR3 for alpha chain variable domain of TCR clone 255550 (TRAV26-1, TRAJ37)
CIVRVGRKLIF

SEQ ID NO: 511100 - protein, 15 aa, Homo sapiens
  CDR3 for beta chain variable domain of TCR clone 255550 (TRBV27, TRBJ2-1)
CASSNGGGSSNEQFF

SEQ ID NO: 511101 - protein, 14 aa, Homo sapiens
  CDR3 for alpha chain variable domain of TCR clone 255551 (TRAV12-2, TRAJ13)
CAVKKTRGYQKLTF

SEQ ID NO: 511102 - protein, 15 aa, Homo sapiens
  CDR3 for beta chain variable domain of TCR clone 255551 (TRBV27, TRBJ2-1)
CASSNGGGSSNEQFF

SEQ ID NO: 511103 - protein, 12 aa, Homo sapiens
  CDR3 for alpha chain variable domain of TCR clone 255552 (TRAV8-3, TRAJ6)
CAVGGGSYIPTF

SEQ ID NO: 511104 - protein, 15 aa, Homo sapiens
  CDR3 for beta chain variable domain of TCR clone 255552 (TRBV7-2, TRBJ2-1)
CASSSGLAGGNEQFF

SEQ ID NO: 511105 - protein, 16 aa, Homo sapiens
  CDR3 for alpha chain variable domain of TCR clone 255553 (TRAV12-3, TRAJ28)
SAMRANSGAGSYQLTF

SEQ ID NO: 511106 - protein, 16 aa, Homo sapiens
  CDR3 for beta chain variable domain of TCR clone 255553 (TRBV7-2, TRBJ1-3)
CASSRLEASSGNTIYF

SEQ ID NO: 511107 - protein, 17 aa, Homo sapiens
  CDR3 for alpha chain variable domain of TCR clone 255554 (TRAV4, TRAJ18)
CLVGERSVGSTLGRLYF

SEQ ID NO: 511108 - protein, 15 aa, Homo sapiens
  CDR3 for beta chain variable domain of TCR clone 255554 (TRBV11-2, TRBJ2-2)
CASSSDRVNAGELFF

SEQ ID NO: 511109 - protein, 14 aa, Homo sapiens
  CDR3 for alpha chain variable domain of TCR clone 255555 (TRAV12-3, TRAJ12)
CAMSEVNSSYKLIF

SEQ ID NO: 511110 - protein, 12 aa, Homo sapiens
  CDR3 for beta chain variable domain of TCR clone 255555 (TRBV18, TRBJ1-4)
CASSPSREKLFF

SEQ ID NO: 511111 - protein, 16 aa, Homo sapiens
  CDR3 for alpha chain variable domain of TCR clone 255556 (TRAV30, TRAJ24)
CGTEIVDADSWGKCQF

SEQ ID NO: 511112 - protein, 16 aa, Homo sapiens
  CDR3 for beta chain variable domain of TCR clone 255556 (TRBV2, TRBJ2-1)
CASRSPAGGKYNEQFF

SEQ ID NO: 511113 - protein, 16 aa, Homo sapiens
  CDR3 for alpha chain variable domain of TCR clone 255557 (TRAV12-3, TRAJ53)
CAMSPGSGCSNYKLTF

SEQ ID NO: 511114 - protein, 15 aa, Homo sapiens
  CDR3 for beta chain variable domain of TCR clone 255557 (TRBV20-1, TRBJ2-7)
CSARDRVSGMDEQYF

SEQ ID NO: 511115 - protein, 15 aa, Homo sapiens
  CDR3 for alpha chain variable domain of TCR clone 255558 (TRAV6, TRAJ4)
CSLGGFSGGYNKLIF

SEQ ID NO: 511116 - protein, 13 aa, Homo sapiens
  CDR3 for beta chain variable domain of TCR clone 255558 (TRBV19, TRBJ1-2)
CASSVPGQDGYTF

SEQ ID NO: 511117 - protein, 12 aa, Homo sapiens
  CDR3 for alpha chain variable domain of TCR clone 255559 (TRAV12-3, TRAJ3)
CALYSSASKIIF

SEQ ID NO: 511118 - protein, 17 aa, Homo sapiens
  CDR3 for beta chain variable domain of TCR clone 255559 (TRBV7-8, TRBJ2-1)
CASSPPTGTLAYNEQFF

SEQ ID NO: 511119 - protein, 15 aa, Homo sapiens
  CDR3 for alpha chain variable domain of TCR clone 255560 (TRAV2, TRAJ28)
CAVPYSGAGSYQLTF

SEQ ID NO: 511120 - protein, 14 aa, Homo sapiens
  CDR3 for beta chain variable domain of TCR clone 255560 (TRBV23-1, TRBJ2-1)
CASSKWSSYNEQFF

SEQ ID NO: 511121 - protein, 14 aa, Homo sapiens
  CDR3 for alpha chain variable domain of TCR clone 255561 (TRAV13-1, TRAJ13)
CAASRVGGYQKVTF

SEQ ID NO: 511122 - protein, 15 aa, Homo sapiens
  CDR3 for beta chain variable domain of TCR clone 255561 (TRBV6-1, TRBJ2-1)
CASSELRGQYNEQFF

SEQ ID NO: 511123 - protein, 13 aa, Homo sapiens
  CDR3 for alpha chain variable domain of TCR clone 255562 (TRAV36/DV7, TRAJ7)
CAGTRYGNNRLAF

SEQ ID NO: 511124 - protein, 15 aa, Homo sapiens
  CDR3 for beta chain variable domain of TCR clone 255562 (TRBV11-3, TRBJ2-7)
CASSPGPASSYEQYC

SEQ ID NO: 511125 - protein, 11 aa, Homo sapiens
  CDR3 for alpha chain variable domain of TCR clone 255563 (TRAV35, TRAJ30)
CAGPGDDKIIF

SEQ ID NO: 511126 - protein, 13 aa, Homo sapiens
  CDR3 for beta chain variable domain of TCR clone 255563 (TRBV7-3, TRBJ1-1)
CASSQDWGAEAFF

SEQ ID NO: 511127 - protein, 16 aa, Homo sapiens
  CDR3 for alpha chain variable domain of TCR clone 255564 (TRAV35, TRAJ28)
CAGQRYSGAGSYQLTF

SEQ ID NO: 511128 - protein, 20 aa, Homo sapiens
  CDR3 for beta chain variable domain of TCR clone 255564 (TRBV28, TRBJ2-1)
CAGTPIGRSPGLAGGNEQFF

SEQ ID NO: 511129 - protein, 13 aa, Homo sapiens
  CDR3 for alpha chain variable domain of TCR clone 255565 (TRAV1-2, TRAJ9)
CAALNTGGFKTIF

SEQ ID NO: 511130 - protein, 12 aa, Homo sapiens
  CDR3 for beta chain variable domain of TCR clone 255565 (TRBV5-1, TRBJ1-2)
CTSSQDTYGYTF

SEQ ID NO: 511131 - protein, 14 aa, Homo sapiens
  CDR3 for alpha chain variable domain of TCR clone 255566 (TRAV35, TRAJ13)
CAGSPSGGYQKVTF

SEQ ID NO: 511132 - protein, 17 aa, Homo sapiens
  CDR3 for beta chain variable domain of TCR clone 255566 (TRBV7-6, TRBJ2-5)
CASSPGLAGPWGETQYF

SEQ ID NO: 511133 - protein, 11 aa, Homo sapiens
  CDR3 for alpha chain variable domain of TCR clone 255567 (TRAV13-1, TRAJ15)
CAATPGTALIF

SEQ ID NO: 511134 - protein, 17 aa, Homo sapiens
  CDR3 for beta chain variable domain of TCR clone 255567 (TRBV13, TRBJ2-3)
CASSLSRVAGERNTQYF

SEQ ID NO: 511135 - protein, 15 aa, Homo sapiens
  CDR3 for alpha chain variable domain of TCR clone 255568 (TRAV8-4, TRAJ37)
CAVSRGSGNTVKLIF

SEQ ID NO: 511136 - protein, 15 aa, Homo sapiens
  CDR3 for beta chain variable domain of TCR clone 255568 (TRBV5-1, TRBJ2-7)
CASSLDLTSSYEQYF

SEQ ID NO: 511137 - protein, 14 aa, Homo sapiens
  CDR3 for alpha chain variable domain of TCR clone 255569 (TRAV3, TRAJ9)
CAVRGNTGGFKTIV

SEQ ID NO: 511138 - protein, 14 aa, Homo sapiens
  CDR3 for beta chain variable domain of TCR clone 255569 (TRBV15, TRBJ2-1)
CATSGVEDYNEQFF

SEQ ID NO: 511139 - protein, 14 aa, Homo sapiens
  CDR3 for alpha chain variable domain of TCR clone 255570 (TRAV2, TRAJ9)
CAVEDRSGGFKTIF

SEQ ID NO: 511140 - protein, 16 aa, Homo sapiens
  CDR3 for beta chain variable domain of TCR clone 255570 (TRBV27, TRBJ2-7)
CASSKQGRGWAYEQYF

SEQ ID NO: 511141 - protein, 12 aa, Homo sapiens
  CDR3 for alpha chain variable domain of TCR clone 255571 (TRAV12-2, TRAJ10)
WGVTGGGNKLTF

SEQ ID NO: 511142 - protein, 15 aa, Homo sapiens
  CDR3 for beta chain variable domain of TCR clone 255571 (TRBV5-5, TRBJ1-5)
CASSSTPGSNQPQHF

SEQ ID NO: 511143 - protein, 12 aa, Homo sapiens
  CDR3 for alpha chain variable domain of TCR clone 255572 (TRAV8-3, TRAJ20)
CAVGANDYKLSF

SEQ ID NO: 511144 - protein, 15 aa, Homo sapiens
  CDR3 for beta chain variable domain of TCR clone 255572 (TRBV28, TRBJ2-5)
CASSSGRTIQETQYF

SEQ ID NO: 511145 - protein, 14 aa, Homo sapiens
  CDR3 for alpha chain variable domain of TCR clone 255573 (TRAV12-3, TRAJ50)
CAMSPKTSYDKVIF

SEQ ID NO: 511146 - protein, 14 aa, Homo sapiens
  CDR3 for beta chain variable domain of TCR clone 255573 (TRBV18, TRBJ2-5)
CASSPGVSQETQYF

SEQ ID NO: 511147 - protein, 13 aa, Homo sapiens
  CDR3 for alpha chain variable domain of TCR clone 255574 (TRAV13-1, TRAJ13)
CAAFGGGYQKVTF

SEQ ID NO: 511148 - protein, 16 aa, Homo sapiens
  CDR3 for beta chain variable domain of TCR clone 255574 (TRBV6-6, TRBJ1-5)
CASSYSTLVGNQPQHF

SEQ ID NO: 511149 - protein, 23 aa, Homo sapiens
  CDR3 for alpha chain variable domain of TCR clone 255575 (TRAV12-2, TRAJ22)
CSSETPSPVIQPPGRSSARQLTF

SEQ ID NO: 511150 - protein, 15 aa, Homo sapiens
  CDR3 for beta chain variable domain of TCR clone 255575 (TRBV20-1, TRBJ2-7)
CSARDRVSGMDEQYF

SEQ ID NO: 511151 - protein, 15 aa, Homo sapiens
  CDR3 for alpha chain variable domain of TCR clone 255576 (TRAV13-1, TRAJ17)
CAASIERAAGNKLTF

SEQ ID NO: 511152 - protein, 14 aa, Homo sapiens
  CDR3 for beta chain variable domain of TCR clone 255576 (TRBV9, TRBJ2-7)
CASSVGVGSYEQYF

SEQ ID NO: 511153 - protein, 12 aa, Homo sapiens
  CDR3 for alpha chain variable domain of TCR clone 255577 (TRAV1-2, TRAJ33)
CAALDSNYQLIW

SEQ ID NO: 511154 - protein, 16 aa, Homo sapiens
  CDR3 for beta chain variable domain of TCR clone 255577 (TRBV6-4, TRBJ1-2)
CASSETVGDPNYGYTF

SEQ ID NO: 511155 - protein, 13 aa, Homo sapiens
  CDR3 for alpha chain variable domain of TCR clone 255578 (TRAV17, TRAJ9)
CATDYTGGFKTIF

SEQ ID NO: 511156 - protein, 13 aa, Homo sapiens
  CDR3 for beta chain variable domain of TCR clone 255578 (TRBV4-1, TRBJ1-1)
CASSRKMNTEAFF

SEQ ID NO: 511157 - protein, 13 aa, Homo sapiens
  CDR3 for alpha chain variable domain of TCR clone 255579 (TRAV22, TRAJ29)
CAEGGSGNTPLVF

SEQ ID NO: 511158 - protein, 13 aa, Homo sapiens
  CDR3 for beta chain variable domain of TCR clone 255579 (TRBV4-2, TRBJ1-1)
CASSQAGNTEAFF

SEQ ID NO: 511159 - protein, 15 aa, Homo sapiens
  CDR3 for alpha chain variable domain of TCR clone 255580 (TRAV17, TRAJ56)
CATDANTGANSKLTF

SEQ ID NO: 511160 - protein, 14 aa, Homo sapiens
  CDR3 for beta chain variable domain of TCR clone 255580 (TRBV19, TRBJ1-5)
CASSLGTGGKPQHF

SEQ ID NO: 511161 - protein, 16 aa, Homo sapiens
  CDR3 for alpha chain variable domain of TCR clone 255581 (TRAV30, TRAJ24)
CGTEIVDADSWGKFKF

SEQ ID NO: 511162 - protein, 14 aa, Homo sapiens
  CDR3 for beta chain variable domain of TCR clone 255581 (TRBV12-5, TRBJ2-7)
CASGSRTHQETQYF

SEQ ID NO: 511163 - protein, 13 aa, Homo sapiens
  CDR3 for alpha chain variable domain of TCR clone 255582 (TRAV27, TRAJ53)
CAPSGGSNYKLTF

SEQ ID NO: 511164 - protein, 15 aa, Homo sapiens
  CDR3 for beta chain variable domain of TCR clone 255582 (TRBV6-1, TRBJ2-3)
CASSENWNGGGRHYF

SEQ ID NO: 511165 - protein, 14 aa, Homo sapiens
  CDR3 for alpha chain variable domain of TCR clone 255583 (TRAV4, TRAJ17)
CFVGDMAAGNKLTF

SEQ ID NO: 511166 - protein, 14 aa, Homo sapiens
  CDR3 for beta chain variable domain of TCR clone 255583 (TRBV4-1, TRBJ2-7)
CASSPVAGGDEQYF

SEQ ID NO: 511167 - protein, 14 aa, Homo sapiens
  CDR3 for alpha chain variable domain of TCR clone 255584 (TRAV12-2, TRAJ13)
CAVKKTWGYQKVTF

SEQ ID NO: 511168 - protein, 14 aa, Homo sapiens
  CDR3 for beta chain variable domain of TCR clone 255584 (TRBV7-2, TRBJ2-7)
CASSPKTSFYEQYF

SEQ ID NO: 511169 - protein, 18 aa, Homo sapiens
  CDR3 for alpha chain variable domain of TCR clone 255585 (TRAV13-1, TRAJ52)
CAASKRSAGGTSYGKLTF

SEQ ID NO: 511170 - protein, 14 aa, Homo sapiens
  CDR3 for beta chain variable domain of TCR clone 255585 (TRBV7-2, TRBJ2-5)
CASSTGGELTTQYF

SEQ ID NO: 511171 - protein, 19 aa, Homo sapiens
  CDR3 for alpha chain variable domain of TCR clone 255586 (TRAV38-1, TRAJ53)
CAFMKHGLESGDSKYKLTF

SEQ ID NO: 511172 - protein, 13 aa, Homo sapiens
  CDR3 for beta chain variable domain of TCR clone 255586 (TRBV19, TRBJ2-7)
CASSPRQSYEQYF

SEQ ID NO: 511173 - protein, 16 aa, Homo sapiens
  CDR3 for alpha chain variable domain of TCR clone 255587 (TRAV26-1, TRAJ36)
CIVRFPDQTGANNLFF

SEQ ID NO: 511174 - protein, 21 aa, Homo sapiens
  CDR3 for beta chain variable domain of TCR clone 255587 (TRBV6-1, TRBJ1-1)
CASSGVGNYKGISGFDTEAFF

SEQ ID NO: 511175 - protein, 14 aa, Homo sapiens
  CDR3 for alpha chain variable domain of TCR clone 255588 (TRAV8-3, TRAJ7)
CAAVELYGNNRLAF

SEQ ID NO: 511176 - protein, 13 aa, Homo sapiens
  CDR3 for beta chain variable domain of TCR clone 255588 (TRBV10-3, TRBJ2-7)
CASKLAVNYEQYF

SEQ ID NO: 511177 - protein, 14 aa, Homo sapiens
  CDR3 for alpha chain variable domain of TCR clone 255589 (TRAV17, TRAJ57)
CATDASGGAAKLVF

SEQ ID NO: 511178 - protein, 14 aa, Homo sapiens
  CDR3 for beta chain variable domain of TCR clone 255589 (TRBV4-2, TRBJ2-1)
CASGLDRAYNEQFF

SEQ ID NO: 511179 - protein, 14 aa, Homo sapiens
  CDR3 for alpha chain variable domain of TCR clone 255590 (TRAV17, TRAJ35)
CATDRPGFGNMLHC

SEQ ID NO: 511180 - protein, 19 aa, Homo sapiens
  CDR3 for beta chain variable domain of TCR clone 255590 (TRBV11-3, TRBJ2-2)
CASSTRPGAKTTNTGELFF

SEQ ID NO: 511181 - protein, 13 aa, Homo sapiens
  CDR3 for alpha chain variable domain of TCR clone 255591 (TRAV16, TRAJ26)
ALSSANYGQNFVF

SEQ ID NO: 511182 - protein, 12 aa, Homo sapiens
  CDR3 for beta chain variable domain of TCR clone 255591 (TRBV6-5, TRBJ2-2)
CASRTGTGELFF

SEQ ID NO: 511183 - protein, 14 aa, Homo sapiens
  CDR3 for alpha chain variable domain of TCR clone 255592 (TRAV1-2, TRAJ8)
CAVREDTGFQKLVF

SEQ ID NO: 511184 - protein, 16 aa, Homo sapiens
  CDR3 for beta chain variable domain of TCR clone 255592 (TRBV7-6, TRBJ2-6)
CASSLPGLSGTNVLTF

SEQ ID NO: 511185 - protein, 14 aa, Homo sapiens
  CDR3 for alpha chain variable domain of TCR clone 255593 (TRAV27, TRAJ22)
CAGVSVLGKRPLTF

SEQ ID NO: 511186 - protein, 17 aa, Homo sapiens
  CDR3 for beta chain variable domain of TCR clone 255593 (TRBV14, TRBJ2-1)
CASSQDRRVTSYNEQFF

SEQ ID NO: 511187 - protein, 16 aa, Homo sapiens
  CDR3 for alpha chain variable domain of TCR clone 255594 (TRAV30, TRAJ24)
CGTEIVDADSWGKFQF

SEQ ID NO: 511188 - protein, 18 aa, Homo sapiens
  CDR3 for beta chain variable domain of TCR clone 255594 (TRBV11-2, TRBJ2-3)
GASSLGGASRGAPNTQYF

SEQ ID NO: 511189 - protein, 12 aa, Homo sapiens
  CDR3 for alpha chain variable domain of TCR clone 255595 (TRAV8-1, TRAJ31)
CAVINDNARLMF

SEQ ID NO: 511190 - protein, 15 aa, Homo sapiens
  CDR3 for beta chain variable domain of TCR clone 255595 (TRBV20-1, TRBJ2-2)
CSARGGQGNTGELFF

SEQ ID NO: 511191 - protein, 14 aa, Homo sapiens
  CDR3 for alpha chain variable domain of TCR clone 255596 (TRAV23/DV6, TRAJ27)
CAASRDTNAGKSTF

SEQ ID NO: 511192 - protein, 13 aa, Homo sapiens
  CDR3 for beta chain variable domain of TCR clone 255596 (TRBV20-1, TRBJ1-5)
CSASGRGNQPQNF

SEQ ID NO: 511193 - protein, 11 aa, Homo sapiens
  CDR3 for alpha chain variable domain of TCR clone 255597 (TRAV13-1, TRAJ5)
CAPKGRRALTF

SEQ ID NO: 511194 - protein, 15 aa, Homo sapiens
  CDR3 for beta chain variable domain of TCR clone 255597 (TRBV11-2, TRBJ1-1)
CASSSRSRLLLSLDK

SEQ ID NO: 511195 - protein, 14 aa, Homo sapiens
  CDR3 for alpha chain variable domain of TCR clone 255598 (TRAV2, TRAJ37)
RAVDFTSNTGKLIF

SEQ ID NO: 511196 - protein, 15 aa, Homo sapiens
  CDR3 for beta chain variable domain of TCR clone 255598 (TRBV20-1, TRBJ1-1)
CSASRGVTGDTEAFF

SEQ ID NO: 511197 - protein, 15 aa, Homo sapiens
  CDR3 for alpha chain variable domain of TCR clone 255599 (TRAV8-3, TRAJ45)
CASSYSGGGADGLTF

SEQ ID NO: 511198 - protein, 14 aa, Homo sapiens
  CDR3 for beta chain variable domain of TCR clone 255599 (TRBV7-2, TRBJ2-7)
CASSLYPGRYEQYF

SEQ ID NO: 511199 - protein, 14 aa, Homo sapiens
  CDR3 for alpha chain variable domain of TCR clone 255600 (TRAV6, TRAJ8)
CALERGTGFQKLVF

SEQ ID NO: 511200 - protein, 20 aa, Homo sapiens
  CDR3 for beta chain variable domain of TCR clone 255600 (TRBV28, TRBJ2-1)
CASTPIGRSPGLAGGSEQFF

SEQ ID NO: 511201 - protein, 11 aa, Homo sapiens
  CDR3 for alpha chain variable domain of TCR clone 255601 (TRAV1-2, TRAJ31)
CAVKNNARLMF

SEQ ID NO: 511202 - protein, 13 aa, Homo sapiens
  CDR3 for beta chain variable domain of TCR clone 255601 (TRBV3-1, TRBJ1-1)
CASSPGVITEAFF

SEQ ID NO: 511203 - protein, 14 aa, Homo sapiens
  CDR3 for alpha chain variable domain of TCR clone 255602 (TRAV13-1, TRAJ44)
CVAKATGTASKLTF

SEQ ID NO: 511204 - protein, 16 aa, Homo sapiens
  CDR3 for beta chain variable domain of TCR clone 255602 (TRBV7-9, TRBJ2-6)
CASSLKGPLRANVLTF

SEQ ID NO: 511205 - protein, 18 aa, Homo sapiens
  CDR3 for alpha chain variable domain of TCR clone 255603 (TRAV21, TRAJ52)
CAVRPSPAGVISYGKLTF

SEQ ID NO: 511206 - protein, 14 aa, Homo sapiens
  CDR3 for beta chain variable domain of TCR clone 255603 (TRBV19, TRBJ2-1)
CARGARSFQWEQFF

SEQ ID NO: 511207 - protein, 17 aa, Homo sapiens
  CDR3 for alpha chain variable domain of TCR clone 255604 (TRAV3, TRAJ6)
CAVRDGPRAGGSYIPPS

SEQ ID NO: 511208 - protein, 14 aa, Homo sapiens
  CDR3 for beta chain variable domain of TCR clone 255604 (TRBV7-2, TRBJ2-7)
CASSPKTSFYEQYF

SEQ ID NO: 511209 - protein, 13 aa, Homo sapiens
  CDR3 for alpha chain variable domain of TCR clone 255605 (TRAV27, TRAJ8)
CAGGPTGFQKLVF

SEQ ID NO: 511210 - protein, 14 aa, Homo sapiens
  CDR3 for beta chain variable domain of TCR clone 255605 (TRBV7-2, TRBJ2-7)
CASSLPPGQGPQYF

SEQ ID NO: 511211 - protein, 11 aa, Homo sapiens
  CDR3 for alpha chain variable domain of TCR clone 255606 (TRAV3, TRAJ21)
CSVGNLNKFYF

SEQ ID NO: 511212 - protein, 16 aa, Homo sapiens
  CDR3 for beta chain variable domain of TCR clone 255606 (TRBV19, TRBJ2-1)
CASSKAGPSSYNEQFF

SEQ ID NO: 511213 - protein, 14 aa, Homo sapiens
  CDR3 for alpha chain variable domain of TCR clone 255607 (TRAV8-4, TRAJ9)
CAVRINTGGFKTIF

SEQ ID NO: 511214 - protein, 13 aa, Homo sapiens
  CDR3 for beta chain variable domain of TCR clone 255607 (TRBV7-6, TRBJ1-2)
CASSLVADYGYTF

SEQ ID NO: 511215 - protein, 14 aa, Homo sapiens
  CDR3 for alpha chain variable domain of TCR clone 255608 (TRAV8-1, TRAJ24)
CAVNAADSWGKFQF

SEQ ID NO: 511216 - protein, 16 aa, Homo sapiens
  CDR3 for beta chain variable domain of TCR clone 255608 (TRBV4-3, TRBJ2-1)
CASSPALDRGVNEQFF

SEQ ID NO: 511217 - protein, 17 aa, Homo sapiens
  CDR3 for alpha chain variable domain of TCR clone 255609 (TRAV13-1, TRAJ52)
CAASSGAGGTSYGKLTF

SEQ ID NO: 511218 - protein, 12 aa, Homo sapiens
  CDR3 for beta chain variable domain of TCR clone 255609 (TRBV11-3, TRBJ2-2)
CASSLGGGELFF

SEQ ID NO: 511219 - protein, 17 aa, Homo sapiens
  CDR3 for alpha chain variable domain of TCR clone 255610 (TRAV17, TRAJ24)
CATANSMTTDSWGKLQF

SEQ ID NO: 511220 - protein, 15 aa, Homo sapiens
  CDR3 for beta chain variable domain of TCR clone 255610 (TRBV19, TRBJ1-1)
CASTSGQIQNTEAFF

SEQ ID NO: 511221 - protein, 14 aa, Homo sapiens
  CDR3 for alpha chain variable domain of TCR clone 255611 (TRAV17, TRAJ39)
CATDPVRAGNMLTF

SEQ ID NO: 511222 - protein, 19 aa, Homo sapiens
  CDR3 for beta chain variable domain of TCR clone 255611 (TRBV25-1, TRBJ2-2)
CAILVYRVDRGRKTGELFF

SEQ ID NO: 511223 - protein, 15 aa, Homo sapiens
  CDR3 for alpha chain variable domain of TCR clone 255612 (TRAV8-3, TRAJ32)
CAVEVVLQKSSSLEL

SEQ ID NO: 511224 - protein, 12 aa, Homo sapiens
  CDR3 for beta chain variable domain of TCR clone 255612 (TRBV7-8, TRBJ2-7)
CASSLGDREQYF

SEQ ID NO: 511225 - protein, 14 aa, Homo sapiens
  CDR3 for alpha chain variable domain of TCR clone 255613 (TRAV8-4, TRAJ34)
CAVSDPGDTDKLIF

SEQ ID NO: 511226 - protein, 13 aa, Homo sapiens
  CDR3 for beta chain variable domain of TCR clone 255613 (TRBV15, TRBJ1-6)
CATSGGLNSPLHF

SEQ ID NO: 511227 - protein, 13 aa, Homo sapiens
  CDR3 for alpha chain variable domain of TCR clone 255614 (TRAV8-1, TRAJ15)
CAVKNQAGTALIF

SEQ ID NO: 511228 - protein, 15 aa, Homo sapiens
  CDR3 for beta chain variable domain of TCR clone 255614 (TRBV7-3, TRBJ2-7)
CASSLMPTGYDEQYF

SEQ ID NO: 511229 - protein, 15 aa, Homo sapiens
  CDR3 for alpha chain variable domain of TCR clone 255615 (TRAV26-1, TRAJ40)
CIVRAVPSGTYKYIF

SEQ ID NO: 511230 - protein, 14 aa, Homo sapiens
  CDR3 for beta chain variable domain of TCR clone 255615 (TRBV19, TRBJ2-1)
CASKDPGLANEQCF

SEQ ID NO: 511231 - protein, 13 aa, Homo sapiens
  CDR3 for alpha chain variable domain of TCR clone 255616 (TRAV2, TRAJ40)
CAVVTSGTYNYIF

SEQ ID NO: 511232 - protein, 14 aa, Homo sapiens
  CDR3 for beta chain variable domain of TCR clone 255616 (TRBV19, TRBJ2-1)
CASSTFVLSGEQFF

SEQ ID NO: 511233 - protein, 14 aa, Homo sapiens
  CDR3 for alpha chain variable domain of TCR clone 255617 (TRAV1-2, TRAJ16)
CAVNRFSDGQKLLS

SEQ ID NO: 511234 - protein, 14 aa, Homo sapiens
  CDR3 for beta chain variable domain of TCR clone 255617 (TRBV7-9, TRBJ2-3)
CASSLEDGTDTQYF

SEQ ID NO: 511235 - protein, 13 aa, Homo sapiens
  CDR3 for alpha chain variable domain of TCR clone 255618 (TRAV12-3, TRAJ5)
CAMRPTGRRALTF

SEQ ID NO: 511236 - protein, 15 aa, Homo sapiens
  CDR3 for beta chain variable domain of TCR clone 255618 (TRBV9, TRBJ1-6)
CASSVAGTGDSPLHF

SEQ ID NO: 511237 - protein, 14 aa, Homo sapiens
  CDR3 for alpha chain variable domain of TCR clone 255619 (TRAV1-1, TRAJ27)
CAVIYNTNAGKSTF

SEQ ID NO: 511238 - protein, 14 aa, Homo sapiens
  CDR3 for beta chain variable domain of TCR clone 255619 (TRBV7-3, TRBJ1-1)
CASSLKGGNTEAFF

SEQ ID NO: 511239 - protein, 13 aa, Homo sapiens
  CDR3 for alpha chain variable domain of TCR clone 255620 (TRAV38-1, TRAJ42)
CARWGGSQGNLNF

SEQ ID NO: 511240 - protein, 17 aa, Homo sapiens
  CDR3 for beta chain variable domain of TCR clone 255620 (TRBV20-1, TRBJ2-1)
CSARDPLAGVWDNEQFF

SEQ ID NO: 511241 - protein, 14 aa, Homo sapiens
  CDR3 for alpha chain variable domain of TCR clone 255621 (TRAV12-2, TRAJ15)
CAPHTGQAGTVLIF

SEQ ID NO: 511242 - protein, 17 aa, Homo sapiens
  CDR3 for beta chain variable domain of TCR clone 255621 (TRBV5-7, TRBJ1-2)
CASSLGSLDGQSEGYTF

SEQ ID NO: 511243 - protein, 15 aa, Homo sapiens
  CDR3 for alpha chain variable domain of TCR clone 255622 (TRAV25, TRAJ53)
CAATGGGGSNYKLTF

SEQ ID NO: 511244 - protein, 13 aa, Homo sapiens
  CDR3 for beta chain variable domain of TCR clone 255622 (TRBV7-7, TRBJ2-5)
CASSRSGQETQYF

SEQ ID NO: 511245 - protein, 11 aa, Homo sapiens
  CDR3 for alpha chain variable domain of TCR clone 255623 (TRAV2, TRAJ13)
CASGGYQKVTF

SEQ ID NO: 511246 - protein, 17 aa, Homo sapiens
  CDR3 for beta chain variable domain of TCR clone 255623 (TRBV5-1, TRBJ2-5)
CASSLLGLAANQETQYF

SEQ ID NO: 511247 - protein, 14 aa, Homo sapiens
  CDR3 for alpha chain variable domain of TCR clone 255624 (TRAV12-2, TRAJ3)
CAVNGYSSASKIIF

SEQ ID NO: 511248 - protein, 14 aa, Homo sapiens
  CDR3 for beta chain variable domain of TCR clone 255624 (TRBV4-2, TRBJ2-1)
CASGLDRAYNEQFF

SEQ ID NO: 511249 - protein, 15 aa, Homo sapiens
  CDR3 for alpha chain variable domain of TCR clone 255625 (TRAV3, TRAJ22)
CAVRDRGGSARQLTF

SEQ ID NO: 511250 - protein, 13 aa, Homo sapiens
  CDR3 for beta chain variable domain of TCR clone 255625 (TRBV20-1, TRBJ1-1)
CSARVGGNAEAFF

SEQ ID NO: 511251 - protein, 12 aa, Homo sapiens
  CDR3 for alpha chain variable domain of TCR clone 255626 (TRAV26-1, TRAJ40)
CSTTSGTYNYIF

SEQ ID NO: 511252 - protein, 14 aa, Homo sapiens
  CDR3 for beta chain variable domain of TCR clone 255626 (TRBV24-1, TRBJ1-1)
CATRPTQGATEAFF

SEQ ID NO: 511253 - protein, 13 aa, Homo sapiens
  CDR3 for alpha chain variable domain of TCR clone 255627 (TRAV17, TRAJ21)
CATDGNNFNKFYF

SEQ ID NO: 511254 - protein, 12 aa, Homo sapiens
  CDR3 for beta chain variable domain of TCR clone 255627 (TRBV20-1, TRBJ1-1)
CSARGGNTGAFF

SEQ ID NO: 511255 - protein, 13 aa, Homo sapiens
  CDR3 for alpha chain variable domain of TCR clone 255628 (TRAV35, TRAJ42)
CAGFPGSQGHLIF

SEQ ID NO: 511256 - protein, 13 aa, Homo sapiens
  CDR3 for beta chain variable domain of TCR clone 255628 (TRBV29-1, TRBJ2-1)
CSVEGGRVNEQFF

SEQ ID NO: 511257 - protein, 14 aa, Homo sapiens
  CDR3 for alpha chain variable domain of TCR clone 255629 (TRAV13-2, TRAJ58)
CAERWLTSGARLTF

SEQ ID NO: 511258 - protein, 16 aa, Homo sapiens
  CDR3 for beta chain variable domain of TCR clone 255629 (TRBV18, TRBJ1-4)
CASSLQTVATNGKLFF

SEQ ID NO: 511259 - protein, 18 aa, Homo sapiens
  CDR3 for alpha chain variable domain of TCR clone 255630 (TRAV21, TRAJ52)
CAVRPSPAGGTSYGKLTF

SEQ ID NO: 511260 - protein, 19 aa, Homo sapiens
  CDR3 for beta chain variable domain of TCR clone 255630 (TRBV6-3, TRBJ2-1)
CASSYSWTSGRATYNEQFF

SEQ ID NO: 511261 - protein, 15 aa, Homo sapiens
  CDR3 for alpha chain variable domain of TCR clone 255631 (TRAV27, TRAJ50)
CAGVGGGTSYDKVIF

SEQ ID NO: 511262 - protein, 14 aa, Homo sapiens
  CDR3 for beta chain variable domain of TCR clone 255631 (TRBV7-2, TRBJ1-1)
CASSFYDLNTEAFF

SEQ ID NO: 511263 - protein, 16 aa, Homo sapiens
  CDR3 for alpha chain variable domain of TCR clone 255632 (TRAV21, TRAJ52)
CAVTNAGGTSYGKLTF

SEQ ID NO: 511264 - protein, 14 aa, Homo sapiens
  CDR3 for beta chain variable domain of TCR clone 255632 (TRBV6-1, TRBJ2-7)
CASTRTGDYYEQYF

SEQ ID NO: 511265 - protein, 16 aa, Homo sapiens
  CDR3 for alpha chain variable domain of TCR clone 255633 (TRAV16, TRAJ42)
CARKMNHGGSQGNLIF

SEQ ID NO: 511266 - protein, 14 aa, Homo sapiens
  CDR3 for beta chain variable domain of TCR clone 255633 (TRBV14, TRBJ2-3)
CQQPDERDTDTQYF

SEQ ID NO: 511267 - protein, 14 aa, Homo sapiens
  CDR3 for alpha chain variable domain of TCR clone 255634 (TRAV1-2, TRAJ16)
CAVNRVSDGQQLLF

SEQ ID NO: 511268 - protein, 15 aa, Homo sapiens
  CDR3 for beta chain variable domain of TCR clone 255634 (TRBV7-9, TRBJ1-6)
CASSSPGRGNSPLHF

SEQ ID NO: 511269 - protein, 14 aa, Homo sapiens
  CDR3 for alpha chain variable domain of TCR clone 255635 (TRAV3, TRAJ9)
CDVRLNNGGFKTIL

SEQ ID NO: 511270 - protein, 15 aa, Homo sapiens
  CDR3 for beta chain variable domain of TCR clone 255635 (TRBV7-2, TRBJ2-1)
CASSLASGRVNEQFF

SEQ ID NO: 511271 - protein, 11 aa, Homo sapiens
  CDR3 for alpha chain variable domain of TCR clone 255636 (TRAV12-3, TRAJ43)
CAMSVSNDMRF

SEQ ID NO: 511272 - protein, 15 aa, Homo sapiens
  CDR3 for beta chain variable domain of TCR clone 255636 (TRBV20-1, TRBJ1-5)
CSAREGGYSNQPQHF

SEQ ID NO: 511273 - protein, 15 aa, Homo sapiens
  CDR3 for alpha chain variable domain of TCR clone 255637 (TRAV12-1, TRAJ9)
CVVSFGDTGGFKTIF

SEQ ID NO: 511274 - protein, 13 aa, Homo sapiens
  CDR3 for beta chain variable domain of TCR clone 255637 (TRBV2, TRBJ1-4)
CASSERAGEKLCF

SEQ ID NO: 511275 - protein, 14 aa, Homo sapiens
  CDR3 for alpha chain variable domain of TCR clone 255638 (TRAV29/DV5, TRAJ32)
CAASQGGATNKLIC

SEQ ID NO: 511276 - protein, 14 aa, Homo sapiens
  CDR3 for beta chain variable domain of TCR clone 255638 (TRBV25-1, TRBJ1-1)
CASTHLGGNTEAFF

SEQ ID NO: 511277 - protein, 14 aa, Homo sapiens
  CDR3 for alpha chain variable domain of TCR clone 255639 (TRAV17, TRAJ54)
CATDANQGAQKLVF

SEQ ID NO: 511278 - protein, 12 aa, Homo sapiens
  CDR3 for beta chain variable domain of TCR clone 255639 (TRBV6-3, TRBJ2-1)
CVSSGSYNEQFF

SEQ ID NO: 511279 - protein, 16 aa, Homo sapiens
  CDR3 for alpha chain variable domain of TCR clone 255640 (TRAV1-1, TRAJ29)
CAVRPTRNSGNTPLVF

SEQ ID NO: 511280 - protein, 15 aa, Homo sapiens
  CDR3 for beta chain variable domain of TCR clone 255640 (TRBV29-1, TRBJ2-1)
CSVGRHALFYNEQFF

SEQ ID NO: 511281 - protein, 14 aa, Homo sapiens
  CDR3 for alpha chain variable domain of TCR clone 255641 (TRAV8-2, TRAJ23)
CVVSDDNQGGKLPF

SEQ ID NO: 511282 - protein, 13 aa, Homo sapiens
  CDR3 for beta chain variable domain of TCR clone 255641 (TRBV7-7, TRBJ2-2)
CASSLTSAGELFF

SEQ ID NO: 511283 - protein, 14 aa, Homo sapiens
  CDR3 for alpha chain variable domain of TCR clone 255642 (TRAV8-2, TRAJ4)
CVVSPSGGYNKLIF

SEQ ID NO: 511284 - protein, 13 aa, Homo sapiens
  CDR3 for beta chain variable domain of TCR clone 255642 (TRBV5-1, TRBJ1-5)
CASSLAQDQPQHF

SEQ ID NO: 511285 - protein, 19 aa, Homo sapiens
  CDR3 for alpha chain variable domain of TCR clone 255643 (TRAV17, TRAJ40)
TASRAADTASYFCASKYIF

SEQ ID NO: 511286 - protein, 17 aa, Homo sapiens
  CDR3 for beta chain variable domain of TCR clone 255643 (TRBV11-2, TRBJ2-4)
CASSFLALGGAGDVQYF

SEQ ID NO: 511287 - protein, 18 aa, Homo sapiens
  CDR3 for alpha chain variable domain of TCR clone 255644 (TRAV1-2, TRAJ18)
CAVRDMGYRGSTLGRLYF

SEQ ID NO: 511288 - protein, 16 aa, Homo sapiens
  CDR3 for beta chain variable domain of TCR clone 255644 (TRBV29-1, TRBJ1-2)
CSVEANRDIANYGYTF

SEQ ID NO: 511289 - protein, 14 aa, Homo sapiens
  CDR3 for alpha chain variable domain of TCR clone 255645 (TRAV16, TRAJ17)
CAPRIKAAGNKLTF

SEQ ID NO: 511290 - protein, 18 aa, Homo sapiens
  CDR3 for beta chain variable domain of TCR clone 255645 (TRBV11-2, TRBJ2-3)
CASSLGGASRGAPNTQYF

SEQ ID NO: 511291 - protein, 11 aa, Homo sapiens
  CDR3 for alpha chain variable domain of TCR clone 255646 (TRAV1-1, TRAJ23)
CAVRQGGKLIF

SEQ ID NO: 511292 - protein, 15 aa, Homo sapiens
  CDR3 for beta chain variable domain of TCR clone 255646 (TRBV6-1, TRBJ1-5)
CASSELREGNQPQHF

SEQ ID NO: 511293 - protein, 14 aa, Homo sapiens
  CDR3 for alpha chain variable domain of TCR clone 255647 (TRAV12-2, TRAJ40)
CAVKIPSGTYKYLF

SEQ ID NO: 511294 - protein, 12 aa, Homo sapiens
  CDR3 for beta chain variable domain of TCR clone 255647 (TRBV11-2, TRBJ2-1)
CASSPGNNEQFF

SEQ ID NO: 511295 - protein, 23 aa, Homo sapiens
  CDR3 for alpha chain variable domain of TCR clone 255648 (TRAV2, TRAJ13)
CASGGYQKVPLELEQSSKSSQIS

SEQ ID NO: 511296 - protein, 16 aa, Homo sapiens
  CDR3 for beta chain variable domain of TCR clone 255648 (TRBV6-1, TRBJ2-5)
CASSETLDRGAETQYF

SEQ ID NO: 511297 - protein, 21 aa, Homo sapiens
  CDR3 for alpha chain variable domain of TCR clone 255649 (TRAV16, TRAJ31)
CALSGGVETMPDPWLEMELSW

SEQ ID NO: 511298 - protein, 16 aa, Homo sapiens
  CDR3 for beta chain variable domain of TCR clone 255649 (TRBV28, TRBJ2-7)
CASSLFFETGGPEQYF

SEQ ID NO: 511299 - protein, 14 aa, Homo sapiens
  CDR3 for alpha chain variable domain of TCR clone 255650 (TRAV16, TRAJ33)
CALSAMDSTYQLIW

SEQ ID NO: 511300 - protein, 12 aa, Homo sapiens
  CDR3 for beta chain variable domain of TCR clone 255650 (TRBV5-1, TRBJ1-2)
CASSQDTYGYTF

SEQ ID NO: 511301 - protein, 14 aa, Homo sapiens
  CDR3 for alpha chain variable domain of TCR clone 255651 (TRAV13-2, TRAJ11)
CAETGNSGYSTLTF

SEQ ID NO: 511302 - protein, 15 aa, Homo sapiens
  CDR3 for beta chain variable domain of TCR clone 255651 (TRBV19, TRBJ2-3)
CASRPLGTSRDTQYF

SEQ ID NO: 511303 - protein, 12 aa, Homo sapiens
  CDR3 for alpha chain variable domain of TCR clone 255652 (TRAV21, TRAJ42)
CAVGGSQGNLIF

SEQ ID NO: 511304 - protein, 14 aa, Homo sapiens
  CDR3 for beta chain variable domain of TCR clone 255652 (TRBV12-4, TRBJ1-1)
CASSLGTGGTEAFI

SEQ ID NO: 511305 - protein, 13 aa, Homo sapiens
  CDR3 for alpha chain variable domain of TCR clone 255653 (TRAV8-3, TRAJ43)
CAVGPDNNNDMRF

SEQ ID NO: 511306 - protein, 14 aa, Homo sapiens
  CDR3 for beta chain variable domain of TCR clone 255653 (TRBV19, TRBJ2-1)
YASPTFVLSGEQFF

SEQ ID NO: 511307 - protein, 14 aa, Homo sapiens
  CDR3 for alpha chain variable domain of TCR clone 255654 (TRAV12-3, TRAJ10)
SHLPLTGGGNKLTF

SEQ ID NO: 511308 - protein, 15 aa, Homo sapiens
  CDR3 for beta chain variable domain of TCR clone 255654 (TRBV10-2, TRBJ2-6)
CASSEQGTGANVLSF

SEQ ID NO: 511309 - protein, 16 aa, Homo sapiens
  CDR3 for alpha chain variable domain of TCR clone 255655 (TRAV8-4, TRAJ18)
CAVSSDRGSTLGRLYF

SEQ ID NO: 511310 - protein, 13 aa, Homo sapiens
  CDR3 for beta chain variable domain of TCR clone 255655 (TRBV24-1, TRBJ2-2)
CATSDWSTGELLF

SEQ ID NO: 511311 - protein, 15 aa, Homo sapiens
  CDR3 for alpha chain variable domain of TCR clone 255656 (TRAV22, TRAJ24)
CAVPLSTDSWRKLQF

SEQ ID NO: 511312 - protein, 14 aa, Homo sapiens
  CDR3 for beta chain variable domain of TCR clone 255656 (TRBV7-2, TRBJ2-7)
CASRSQGAAYEQYF

SEQ ID NO: 511313 - protein, 12 aa, Homo sapiens
  CDR3 for alpha chain variable domain of TCR clone 255657 (TRAV13-2, TRAJ23)
SAERHRGGKLIF

SEQ ID NO: 511314 - protein, 16 aa, Homo sapiens
  CDR3 for beta chain variable domain of TCR clone 255657 (TRBV7-9, TRBJ1-2)
CASSLGFSSGEDGYTF

SEQ ID NO: 511315 - protein, 13 aa, Homo sapiens
  CDR3 for alpha chain variable domain of TCR clone 255658 (TRAV27, TRAJ45)
CRSSGGGADGLTF

SEQ ID NO: 511316 - protein, 16 aa, Homo sapiens
  CDR3 for beta chain variable domain of TCR clone 255658 (TRBV10-3, TRBJ2-1)
CAISGVGDGGGGEQFF

SEQ ID NO: 511317 - protein, 15 aa, Homo sapiens
  CDR3 for alpha chain variable domain of TCR clone 255659 (TRAV38-2/DV8, TRAJ39)
CAYRTSNNAGKMLTF

SEQ ID NO: 511318 - protein, 12 aa, Homo sapiens
  CDR3 for beta chain variable domain of TCR clone 255659 (TRBV18, TRBJ2-1)
CASSSDEDEQFF

SEQ ID NO: 511319 - protein, 10 aa, Homo sapiens
  CDR3 for alpha chain variable domain of TCR clone 255660 (TRAV8-3, TRAJ27)
CAVGPSKTNA

SEQ ID NO: 511320 - protein, 16 aa, Homo sapiens
  CDR3 for beta chain variable domain of TCR clone 255660 (TRBV4-1, TRBJ2-2)
CASSQESGQATGELFF

SEQ ID NO: 511321 - protein, 14 aa, Homo sapiens
  CDR3 for alpha chain variable domain of TCR clone 255661 (TRAV1-2, TRAJ16)
CAVRGFSDGQKLLF

SEQ ID NO: 511322 - protein, 13 aa, Homo sapiens
  CDR3 for beta chain variable domain of TCR clone 255661 (TRBV7-3, TRBJ1-1)
CASSQDWGAEAFF

SEQ ID NO: 511323 - protein, 16 aa, Homo sapiens
  CDR3 for alpha chain variable domain of TCR clone 255662 (TRAV3, TRAJ10)
WAVRDMNAGGGNKLTL

SEQ ID NO: 511324 - protein, 16 aa, Homo sapiens
  CDR3 for beta chain variable domain of TCR clone 255662 (TRBV6-3, TRBJ1-2)
CASSYSRRASNYGYTF

SEQ ID NO: 511325 - protein, 14 aa, Homo sapiens
  CDR3 for alpha chain variable domain of TCR clone 255663 (TRAV17, TRAJ48)
CATEGNFGNEKLTF

SEQ ID NO: 511326 - protein, 14 aa, Homo sapiens
  CDR3 for beta chain variable domain of TCR clone 255663 (TRBV25-1, TRBJ1-1)
CASTHLGGNTEAFF

SEQ ID NO: 511327 - protein, 13 aa, Homo sapiens
  CDR3 for alpha chain variable domain of TCR clone 255664 (TRAV12-2, TRAJ42)
CAVKRGSEGNLIF

SEQ ID NO: 511328 - protein, 13 aa, Homo sapiens
  CDR3 for beta chain variable domain of TCR clone 255664 (TRBV7-9, TRBJ2-3)
CASSPGSTDTQYF

SEQ ID NO: 511329 - protein, 12 aa, Homo sapiens
  CDR3 for alpha chain variable domain of TCR clone 255665 (TRAV27, TRAJ42)
CAGGGSQGNLIL

SEQ ID NO: 511330 - protein, 13 aa, Homo sapiens
  CDR3 for beta chain variable domain of TCR clone 255665 (TRBV19, TRBJ2-7)
CASSIRSSYEQYF

SEQ ID NO: 511331 - protein, 14 aa, Homo sapiens
  CDR3 for alpha chain variable domain of TCR clone 255666 (TRAV12-2, TRAJ40)
CAVQIPSGTYKYIF

SEQ ID NO: 511332 - protein, 13 aa, Homo sapiens
  CDR3 for beta chain variable domain of TCR clone 255666 (TRBV7-9, TRBJ1-2)
CASSLKQNYGYTF

SEQ ID NO: 511333 - protein, 14 aa, Homo sapiens
  CDR3 for alpha chain variable domain of TCR clone 255667 (TRAV16, TRAJ33)
CALSAMHSNYQLIW

SEQ ID NO: 511334 - protein, 12 aa, Homo sapiens
  CDR3 for beta chain variable domain of TCR clone 255667 (TRBV5-1, TRBJ1-2)
CASSQDTYGYTF

SEQ ID NO: 511335 - protein, 14 aa, Homo sapiens
  CDR3 for alpha chain variable domain of TCR clone 255668 (TRAV1-2, TRAJ16)
CAVNRFSDGQKLLF

SEQ ID NO: 511336 - protein, 16 aa, Homo sapiens
  CDR3 for beta chain variable domain of TCR clone 255668 (TRBV20-1, TRBJ1-4)
CSAPGQGLLTNDKLFF

SEQ ID NO: 511337 - protein, 14 aa, Homo sapiens
  CDR3 for alpha chain variable domain of TCR clone 255669 (TRAV12-3, TRAJ10)
SHLPLTGGGNKLTF

SEQ ID NO: 511338 - protein, 14 aa, Homo sapiens
  CDR3 for beta chain variable domain of TCR clone 255669 (TRBV6-3, TRBJ2-7)
CASSYLVSGNEQYF

SEQ ID NO: 511339 - protein, 14 aa, Homo sapiens
  CDR3 for alpha chain variable domain of TCR clone 255670 (TRAV26-1, TRAJ38)
CIADNAGNNRKLIC

SEQ ID NO: 511340 - protein, 13 aa, Homo sapiens
  CDR3 for beta chain variable domain of TCR clone 255670 (TRBV20-1, TRBJ1-1)
CSARGGGNTEDFF

SEQ ID NO: 511341 - protein, 14 aa, Homo sapiens
  CDR3 for alpha chain variable domain of TCR clone 255671 (TRAV27, TRAJ36)
GAGPPKRGANNLFF

SEQ ID NO: 511342 - protein, 15 aa, Homo sapiens
  CDR3 for beta chain variable domain of TCR clone 255671 (TRBV18, TRBJ2-6)
CASSPASTPNYEQYF

SEQ ID NO: 511343 - protein, 14 aa, Homo sapiens
  CDR3 for alpha chain variable domain of TCR clone 255672 (TRAV23/DV6, TRAJ22)
CAASVPGSARQLTF

SEQ ID NO: 511344 - protein, 15 aa, Homo sapiens
  CDR3 for beta chain variable domain of TCR clone 255672 (TRBV20-1, TRBJ2-7)
CSARDRVSGMDEQYF

SEQ ID NO: 511345 - protein, 14 aa, Homo sapiens
  CDR3 for alpha chain variable domain of TCR clone 255673 (TRAV8-4, TRAJ49)
CAVSESNTGNQFYF

SEQ ID NO: 511346 - protein, 13 aa, Homo sapiens
  CDR3 for beta chain variable domain of TCR clone 255673 (TRBV4-1, TRBJ2-7)
CANSQGQAYEQYF

SEQ ID NO: 511347 - protein, 13 aa, Homo sapiens
  CDR3 for alpha chain variable domain of TCR clone 255674 (TRAV13-2, TRAJ49)
CAEAPQTGNQFYF

SEQ ID NO: 511348 - protein, 15 aa, Homo sapiens
  CDR3 for beta chain variable domain of TCR clone 255674 (TRBV19, TRBJ1-1)
CASTSGQIQNTEAFF

SEQ ID NO: 511349 - protein, 15 aa, Homo sapiens
  CDR3 for alpha chain variable domain of TCR clone 255675 (TRAV17, TRAJ4)
CANGTWSGGYNKLIF

SEQ ID NO: 511350 - protein, 13 aa, Homo sapiens
  CDR3 for beta chain variable domain of TCR clone 255675 (TRBV12-4, TRBJ2-7)
CASSPTETYEQYF

SEQ ID NO: 511351 - protein, 11 aa, Homo sapiens
  CDR3 for alpha chain variable domain of TCR clone 255676 (TRAV20, TRAJ23)
CACNQAGKLIF

SEQ ID NO: 511352 - protein, 16 aa, Homo sapiens
  CDR3 for beta chain variable domain of TCR clone 255676 (TRBV7-8, TRBJ2-5)
CASSFGGQPTQETQYF

SEQ ID NO: 511353 - protein, 13 aa, Homo sapiens
  CDR3 for alpha chain variable domain of TCR clone 255677 (TRAV29/DV5, TRAJ9)
CAASETGGFKPIF

SEQ ID NO: 511354 - protein, 15 aa, Homo sapiens
  CDR3 for beta chain variable domain of TCR clone 255677 (TRBV19, TRBJ2-1)
CASSMGSGTGRQQFF

SEQ ID NO: 511355 - protein, 12 aa, Homo sapiens
  CDR3 for alpha chain variable domain of TCR clone 255678 (TRAV12-3, TRAJ20)
CAMVRGDYKHSF

SEQ ID NO: 511356 - protein, 16 aa, Homo sapiens
  CDR3 for beta chain variable domain of TCR clone 255678 (TRBV5-1, TRBJ2-3)
CASSLGLAVYTDTQYF

SEQ ID NO: 511357 - protein, 12 aa, Homo sapiens
  CDR3 for alpha chain variable domain of TCR clone 255679 (TRAV3, TRAJ36)
CCERHWGKHLFF

SEQ ID NO: 511358 - protein, 15 aa, Homo sapiens
  CDR3 for beta chain variable domain of TCR clone 255679 (TRBV24-1, TRBJ2-1)
CATSGSGGFYNEQFF

SEQ ID NO: 511359 - protein, 15 aa, Homo sapiens
  CDR3 for alpha chain variable domain of TCR clone 255680 (TRAV29/DV5, TRAJ24)
CAASGATDSWGEFQF

SEQ ID NO: 511360 - protein, 16 aa, Homo sapiens
  CDR3 for beta chain variable domain of TCR clone 255680 (TRBV19, TRBJ2-1)
CASSKAGPSSYNEQFF

SEQ ID NO: 511361 - protein, 11 aa, Homo sapiens
  CDR3 for alpha chain variable domain of TCR clone 255681 (TRAV12-2, TRAJ49)
CAVNTGNQFYF

SEQ ID NO: 511362 - protein, 13 aa, Homo sapiens
  CDR3 for beta chain variable domain of TCR clone 255681 (TRBV12-5, TRBJ2-3)
CASGDRQSDTQYF

SEQ ID NO: 511363 - protein, 14 aa, Homo sapiens
  CDR3 for alpha chain variable domain of TCR clone 255682 (TRAV21, TRAJ35)
CAVMPIGFGNGLHC

SEQ ID NO: 511364 - protein, 12 aa, Homo sapiens
  CDR3 for beta chain variable domain of TCR clone 255682 (TRBV7-9, TRBJ2-7)
YASGIKREEQYF

SEQ ID NO: 511365 - protein, 13 aa, Homo sapiens
  CDR3 for alpha chain variable domain of TCR clone 255683 (TRAV1-2, TRAJ9)
CAALNTGGFKTIS

SEQ ID NO: 511366 - protein, 15 aa, Homo sapiens
  CDR3 for beta chain variable domain of TCR clone 255683 (TRBV5-1, TRBJ2-1)
CASSPPRAPYNEQFF

SEQ ID NO: 511367 - protein, 13 aa, Homo sapiens
  CDR3 for alpha chain variable domain of TCR clone 255684 (TRAV17, TRAJ5)
CAPMDTGRRALTL

SEQ ID NO: 511368 - protein, 14 aa, Homo sapiens
  CDR3 for beta chain variable domain of TCR clone 255684 (TRBV19, TRBJ2-1)
CASPTFVSSGEQFF

SEQ ID NO: 511369 - protein, 21 aa, Homo sapiens
  CDR3 for alpha chain variable domain of TCR clone 255685 (TRAV12-3, )
CASRQIPDVQNPDPAVYQLRD

SEQ ID NO: 511370 - protein, 14 aa, Homo sapiens
  CDR3 for beta chain variable domain of TCR clone 255685 (TRBV7-2, TRBJ1-3)
CASSLGTAGNTIYF

SEQ ID NO: 511371 - protein, 14 aa, Homo sapiens
  CDR3 for alpha chain variable domain of TCR clone 255686 (TRAV3, TRAJ33)
CAVRDMGSNYQLIW

SEQ ID NO: 511372 - protein, 17 aa, Homo sapiens
  CDR3 for beta chain variable domain of TCR clone 255686 (TRBV19, TRBJ2-1)
CASSIWSAKPTHNEQFF

SEQ ID NO: 511373 - protein, 16 aa, Homo sapiens
  CDR3 for alpha chain variable domain of TCR clone 255687 (TRAV14/DV4, TRAJ53)
CAMREGGGGSHYKLTF

SEQ ID NO: 511374 - protein, 16 aa, Homo sapiens
  CDR3 for beta chain variable domain of TCR clone 255687 (TRBV7-9, TRBJ2-1)
CASSDVAGGSYNEQFF

SEQ ID NO: 511375 - protein, 13 aa, Homo sapiens
  CDR3 for alpha chain variable domain of TCR clone 255688 (TRAV21, TRAJ36)
CAVIKTGANNLFF

SEQ ID NO: 511376 - protein, 13 aa, Homo sapiens
  CDR3 for beta chain variable domain of TCR clone 255688 (TRBV11-2, TRBJ2-1)
CASSLDLVNEQFF

SEQ ID NO: 511377 - protein, 14 aa, Homo sapiens
  CDR3 for alpha chain variable domain of TCR clone 255689 (TRAV3, TRAJ34)
CAGRDINNTDKLIF

SEQ ID NO: 511378 - protein, 15 aa, Homo sapiens
  CDR3 for beta chain variable domain of TCR clone 255689 (TRBV20-1, TRBJ2-7)
CSARDRVSGMDEQYF

SEQ ID NO: 511379 - protein, 14 aa, Homo sapiens
  CDR3 for alpha chain variable domain of TCR clone 255690 (TRAV8-4, TRAJ54)
CAVSEVLGGQKLVF

SEQ ID NO: 511380 - protein, 13 aa, Homo sapiens
  CDR3 for beta chain variable domain of TCR clone 255690 (TRBV27, TRBJ2-7)
CASSFVSSYEQYF

SEQ ID NO: 511381 - protein, 12 aa, Homo sapiens
  CDR3 for alpha chain variable domain of TCR clone 255691 (TRAV13-1, TRAJ27)
CAAHTNAGKSTF

SEQ ID NO: 511382 - protein, 14 aa, Homo sapiens
  CDR3 for beta chain variable domain of TCR clone 255691 (TRBV19, TRBJ2-2)
CASSGQGIAGKLFC

SEQ ID NO: 511383 - protein, 12 aa, Homo sapiens
  CDR3 for alpha chain variable domain of TCR clone 255692 (TRAV3, TRAJ31)
CAVRHGNARLMF

SEQ ID NO: 511384 - protein, 18 aa, Homo sapiens
  CDR3 for beta chain variable domain of TCR clone 255692 (TRBV7-2, TRBJ2-3)
CASSLKREGSGITDTQYF

SEQ ID NO: 511385 - protein, 13 aa, Homo sapiens
  CDR3 for alpha chain variable domain of TCR clone 255693 (TRAV27, TRAJ49)
CAPRPYTGNKFCF

SEQ ID NO: 511386 - protein, 16 aa, Homo sapiens
  CDR3 for beta chain variable domain of TCR clone 255693 (TRBV4-1, TRBJ1-2)
CASSQDAGQVLYGYTF

SEQ ID NO: 511387 - protein, 18 aa, Homo sapiens
  CDR3 for alpha chain variable domain of TCR clone 255694 (TRAV8-4, TRAJ52)
CAVTRANAGGTSYGKLTF

SEQ ID NO: 511388 - protein, 12 aa, Homo sapiens
  CDR3 for beta chain variable domain of TCR clone 255694 (TRBV3-1, TRBJ2-5)
CASSQRGETQYF

SEQ ID NO: 511389 - protein, 12 aa, Homo sapiens
  CDR3 for alpha chain variable domain of TCR clone 255695 (TRAV12-3, TRAJ17)
CAMTLTGNKLTF

SEQ ID NO: 511390 - protein, 18 aa, Homo sapiens
  CDR3 for beta chain variable domain of TCR clone 255695 (TRBV6-6, TRBJ1-3)
CASSYSKWDSISGNTMYF

SEQ ID NO: 511391 - protein, 23 aa, Homo sapiens
  CDR3 for alpha chain variable domain of TCR clone 255696 (TRAV12-2, TRAJ22)
CAVSFRVHPGPPIVSGSARQLTF

SEQ ID NO: 511392 - protein, 13 aa, Homo sapiens
  CDR3 for beta chain variable domain of TCR clone 255696 (TRBV12-4, TRBJ1-2)
CASSLDSNYGDTF

SEQ ID NO: 511393 - protein, 16 aa, Homo sapiens
  CDR3 for alpha chain variable domain of TCR clone 255697 (TRAV3, TRAJ18)
CAVRRPRGSTLGRLYF

SEQ ID NO: 511394 - protein, 14 aa, Homo sapiens
  CDR3 for beta chain variable domain of TCR clone 255697 (TRBV11-2, TRBJ1-2)
CASSLGTANYGYTF

SEQ ID NO: 511395 - protein, 16 aa, Homo sapiens
  CDR3 for alpha chain variable domain of TCR clone 255698 (TRAV3, TRAJ4)
CAVRPSPSGGYNKLIF

SEQ ID NO: 511396 - protein, 14 aa, Homo sapiens
  CDR3 for beta chain variable domain of TCR clone 255698 (TRBV7-9, TRBJ2-4)
CASSLAMGGNIQYF

SEQ ID NO: 511397 - protein, 14 aa, Homo sapiens
  CDR3 for alpha chain variable domain of TCR clone 255699 (TRAV8-4, TRAJ9)
CAVRINTGGFKTIF

SEQ ID NO: 511398 - protein, 16 aa, Homo sapiens
  CDR3 for beta chain variable domain of TCR clone 255699 (TRBV12-4, TRBJ2-3)
CASSIPSGGGTDTQYF

SEQ ID NO: 511399 - protein, 15 aa, Homo sapiens
  CDR3 for alpha chain variable domain of TCR clone 255700 (TRAV8-3, TRAJ23)
CAVGDRYNQGGKLIF

SEQ ID NO: 511400 - protein, 15 aa, Homo sapiens
  CDR3 for beta chain variable domain of TCR clone 255700 (TRBV20-1, TRBJ2-5)
CSAEGTGGLQETQYF

SEQ ID NO: 511401 - protein, 16 aa, Homo sapiens
  CDR3 for alpha chain variable domain of TCR clone 255701 (TRAV26-1, )
CIDIQNPDPAVYQLRD

SEQ ID NO: 511402 - protein, 13 aa, Homo sapiens
  CDR3 for beta chain variable domain of TCR clone 255701 (TRBV4-2, TRBJ1-1)
CASSQAGNTEAFF

SEQ ID NO: 511403 - protein, 19 aa, Homo sapiens
  CDR3 for alpha chain variable domain of TCR clone 255702 (TRAV17, TRAJ40)
TASRAADTASYFCASKYIF

SEQ ID NO: 511404 - protein, 17 aa, Homo sapiens
  CDR3 for beta chain variable domain of TCR clone 255702 (TRBV11-2, TRBJ2-4)
CARSFLALGGAGDIQYF

SEQ ID NO: 511405 - protein, 14 aa, Homo sapiens
  CDR3 for alpha chain variable domain of TCR clone 255703 (TRAV3, TRAJ21)
CAVESQANFNKFYF

SEQ ID NO: 511406 - protein, 17 aa, Homo sapiens
  CDR3 for beta chain variable domain of TCR clone 255703 (TRBV28, TRBJ2-5)
CASSTPEGDALQETQYF

SEQ ID NO: 511407 - protein, 14 aa, Homo sapiens
  CDR3 for alpha chain variable domain of TCR clone 255704 (TRAV17, TRAJ34)
CAPAEVRVSDRLIF

SEQ ID NO: 511408 - protein, 15 aa, Homo sapiens
  CDR3 for beta chain variable domain of TCR clone 255704 (TRBV11-3, TRBJ2-3)
CASLKDGREGDTQYF

SEQ ID NO: 511409 - protein, 15 aa, Homo sapiens
  CDR3 for alpha chain variable domain of TCR clone 255705 (TRAV21, TRAJ53)
WATLNSGGSNYKLTF

SEQ ID NO: 511410 - protein, 13 aa, Homo sapiens
  CDR3 for beta chain variable domain of TCR clone 255705 (TRBV7-3, TRBJ1-1)
CASSQDWGAEAFF

SEQ ID NO: 511411 - protein, 13 aa, Homo sapiens
  CDR3 for alpha chain variable domain of TCR clone 255706 (TRAV17, TRAJ40)
CAGARGGTYKYIF

SEQ ID NO: 511412 - protein, 16 aa, Homo sapiens
  CDR3 for beta chain variable domain of TCR clone 255706 (TRBV7-2, TRBJ1-4)
CASSLAPGRRDEKLFF

SEQ ID NO: 511413 - protein, 14 aa, Homo sapiens
  CDR3 for alpha chain variable domain of TCR clone 255707 (TRAV23/DV6, TRAJ6)
CAASRSGGSYIPTF

SEQ ID NO: 511414 - protein, 17 aa, Homo sapiens
  CDR3 for beta chain variable domain of TCR clone 255707 (TRBV20-1, TRBJ2-1)
CSASACGLAGSYNEQFF

SEQ ID NO: 511415 - protein, 13 aa, Homo sapiens
  CDR3 for alpha chain variable domain of TCR clone 255708 (TRAV34, TRAJ33)
CGADMNSNYQLIW

SEQ ID NO: 511416 - protein, 16 aa, Homo sapiens
  CDR3 for beta chain variable domain of TCR clone 255708 (TRBV4-1, TRBJ2-3)
CASSQSTSGAEDTQYF

SEQ ID NO: 511417 - protein, 15 aa, Homo sapiens
  CDR3 for alpha chain variable domain of TCR clone 255709 (TRAV30, TRAJ32)
CGTEILGGATNKLIF

SEQ ID NO: 511418 - protein, 15 aa, Homo sapiens
  CDR3 for beta chain variable domain of TCR clone 255709 (TRBV15, TRBJ1-1)
CATSLQGGRNTEAFF

SEQ ID NO: 511419 - protein, 11 aa, Homo sapiens
  CDR3 for alpha chain variable domain of TCR clone 255710 (TRAV1-1, TRAJ23)
CAVRQGGKLTL

SEQ ID NO: 511420 - protein, 20 aa, Homo sapiens
  CDR3 for beta chain variable domain of TCR clone 255710 (TRBV7-8, TRBJ2-2)
CASSHLFPGPTIHITGELFF

SEQ ID NO: 511421 - protein, 14 aa, Homo sapiens
  CDR3 for alpha chain variable domain of TCR clone 255711 (TRAV1-2, TRAJ8)
CAVREDTGFQKLEF

SEQ ID NO: 511422 - protein, 13 aa, Homo sapiens
  CDR3 for beta chain variable domain of TCR clone 255711 (TRBV15, TRBJ2-7)
CATSTTGHYEQYF

SEQ ID NO: 511423 - protein, 18 aa, Homo sapiens
  CDR3 for alpha chain variable domain of TCR clone 255712 (TRAV12-3, TRAJ52)
CAMSVGGACGTSYGKLTF

SEQ ID NO: 511424 - protein, 15 aa, Homo sapiens
  CDR3 for beta chain variable domain of TCR clone 255712 (TRBV27, TRBJ1-6)
CASSFDRGLGSPLHC

SEQ ID NO: 511425 - protein, 15 aa, Homo sapiens
  CDR3 for alpha chain variable domain of TCR clone 255713 (TRAV8-4, TRAJ3)
CAVTGENLVQQCFQD

SEQ ID NO: 511426 - protein, 16 aa, Homo sapiens
  CDR3 for beta chain variable domain of TCR clone 255713 (TRBV4-2, TRBJ1-1)
CASSKAGLGMNTEAFF

SEQ ID NO: 511427 - protein, 18 aa, Homo sapiens
  CDR3 for alpha chain variable domain of TCR clone 255714 (TRAV26-2, TRAJ32)
CILRAPLNYGGATTKLIF

SEQ ID NO: 511428 - protein, 13 aa, Homo sapiens
  CDR3 for beta chain variable domain of TCR clone 255714 (TRBV7-3, TRBJ2-1)
CASSLWPYNEQFF

SEQ ID NO: 511429 - protein, 12 aa, Homo sapiens
  CDR3 for alpha chain variable domain of TCR clone 255715 (TRAV12-1, TRAJ40)
CVVYSGTYKYIF

SEQ ID NO: 511430 - protein, 18 aa, Homo sapiens
  CDR3 for beta chain variable domain of TCR clone 255715 (TRBV28, TRBJ1-2)
CASRQQQGKRGSNYGYTF

SEQ ID NO: 511431 - protein, 15 aa, Homo sapiens
  CDR3 for alpha chain variable domain of TCR clone 255716 (TRAV21, TRAJ53)
CATLNSGGSNYKLTF

SEQ ID NO: 511432 - protein, 12 aa, Homo sapiens
  CDR3 for beta chain variable domain of TCR clone 255716 (TRBV11-2, TRBJ2-7)
CASSLPTYEQYF

SEQ ID NO: 511433 - protein, 17 aa, Homo sapiens
  CDR3 for alpha chain variable domain of TCR clone 255717 (TRAV3, TRAJ6)
CAVRDGPRAGGSYIPTF

SEQ ID NO: 511434 - protein, 15 aa, Homo sapiens
  CDR3 for beta chain variable domain of TCR clone 255717 (TRBV6-6, TRBJ2-7)
CASSYSIRGVYEQYF

SEQ ID NO: 511435 - protein, 15 aa, Homo sapiens
  CDR3 for alpha chain variable domain of TCR clone 255718 (TRAV21, TRAJ32)
CAVNSYGGATNKLIF

SEQ ID NO: 511436 - protein, 14 aa, Homo sapiens
  CDR3 for beta chain variable domain of TCR clone 255718 (TRBV7-2, TRBJ2-7)
CASSHKTSFYEQYF

SEQ ID NO: 511437 - protein, 12 aa, Homo sapiens
  CDR3 for alpha chain variable domain of TCR clone 255719 (TRAV21, TRAJ39)
CAADNAGNMLTF

SEQ ID NO: 511438 - protein, 13 aa, Homo sapiens
  CDR3 for beta chain variable domain of TCR clone 255719 (TRBV12-4, TRBJ1-1)
CASSPETGFEAFF

SEQ ID NO: 511439 - protein, 12 aa, Homo sapiens
  CDR3 for alpha chain variable domain of TCR clone 255720 (TRAV17, TRAJ39)
CATDAAGNMLTF

SEQ ID NO: 511440 - protein, 15 aa, Homo sapiens
  CDR3 for beta chain variable domain of TCR clone 255720 (TRBV20-1, TRBJ2-7)
CSARDRVSGMDEQYF

SEQ ID NO: 511441 - protein, 12 aa, Homo sapiens
  CDR3 for alpha chain variable domain of TCR clone 255721 (TRAV21, TRAJ49)
CAVNDGGNQFYF

SEQ ID NO: 511442 - protein, 14 aa, Homo sapiens
  CDR3 for beta chain variable domain of TCR clone 255721 (TRBV18, TRBJ2-7)
CASSPRGGSDEQYF

SEQ ID NO: 511443 - protein, 11 aa, Homo sapiens
  CDR3 for alpha chain variable domain of TCR clone 255722 (TRAV23/DV6, TRAJ48)
CAPRWGEKLTF

SEQ ID NO: 511444 - protein, 14 aa, Homo sapiens
  CDR3 for beta chain variable domain of TCR clone 255722 (TRBV7-6, TRBJ2-7)
CASSFRQGADEQYF

SEQ ID NO: 511445 - protein, 15 aa, Homo sapiens
  CDR3 for alpha chain variable domain of TCR clone 255723 (TRAV3, TRAJ5)
CAVRDLDTGRRALTF

SEQ ID NO: 511446 - protein, 14 aa, Homo sapiens
  CDR3 for beta chain variable domain of TCR clone 255723 (TRBV7-3, TRBJ2-2)
CASSSGGYTGELFF

SEQ ID NO: 511447 - protein, 15 aa, Homo sapiens
  CDR3 for alpha chain variable domain of TCR clone 255724 (TRAV13-1, TRAJ27)
CSARELNTNAGKSPF

SEQ ID NO: 511448 - protein, 14 aa, Homo sapiens
  CDR3 for beta chain variable domain of TCR clone 255724 (TRBV6-5, TRBJ1-2)
CASSYTRDRGRYTF

SEQ ID NO: 511449 - protein, 13 aa, Homo sapiens
  CDR3 for alpha chain variable domain of TCR clone 255725 (TRAV12-3, TRAJ56)
CALATGANSKLTF

SEQ ID NO: 511450 - protein, 13 aa, Homo sapiens
  CDR3 for beta chain variable domain of TCR clone 255725 (TRBV19, TRBJ2-7)
CASSPRQSYEQYF

SEQ ID NO: 511451 - protein, 13 aa, Homo sapiens
  CDR3 for alpha chain variable domain of TCR clone 255726 (TRAV21, TRAJ26)
CAVLDNYGQNFVF

SEQ ID NO: 511452 - protein, 16 aa, Homo sapiens
  CDR3 for beta chain variable domain of TCR clone 255726 (TRBV29-1, TRBJ2-2)
CSVETRASGNTGEPFF

SEQ ID NO: 511453 - protein, 13 aa, Homo sapiens
  CDR3 for alpha chain variable domain of TCR clone 255727 (TRAV12-3, TRAJ9)
CNEPEYWRLKTIF

SEQ ID NO: 511454 - protein, 12 aa, Homo sapiens
  CDR3 for beta chain variable domain of TCR clone 255727 (TRBV19, TRBJ1-5)
CASSIARQPQHF

SEQ ID NO: 511455 - protein, 15 aa, Homo sapiens
  CDR3 for alpha chain variable domain of TCR clone 255728 (TRAV16, TRAJ16)
CALQGGGSDGQKLLF

SEQ ID NO: 511456 - protein, 14 aa, Homo sapiens
  CDR3 for beta chain variable domain of TCR clone 255728 (TRBV4-2, TRBJ2-1)
CASGLDRAYNEQFF

SEQ ID NO: 511457 - protein, 13 aa, Homo sapiens
  CDR3 for alpha chain variable domain of TCR clone 255729 (TRAV17, TRAJ9)
CATDYTGGFKTIF

SEQ ID NO: 511458 - protein, 15 aa, Homo sapiens
  CDR3 for beta chain variable domain of TCR clone 255729 (TRBV4-1, TRBJ1-4)
CASSDTGGTNEKLFF

SEQ ID NO: 511459 - protein, 12 aa, Homo sapiens
  CDR3 for alpha chain variable domain of TCR clone 255730 (TRAV12-1, TRAJ34)
CVVTFNTDKLNF

SEQ ID NO: 511460 - protein, 14 aa, Homo sapiens
  CDR3 for beta chain variable domain of TCR clone 255730 (TRBV19, TRBJ1-1)
CASLRTGLNTEAFF

SEQ ID NO: 511461 - protein, 15 aa, Homo sapiens
  CDR3 for alpha chain variable domain of TCR clone 255731 (TRAV12-2, TRAJ9)
CAVNGGDTGGFKAIF

SEQ ID NO: 511462 - protein, 17 aa, Homo sapiens
  CDR3 for beta chain variable domain of TCR clone 255731 (TRBV4-1, TRBJ2-1)
CASSHRDSGSSYNEQFF

SEQ ID NO: 511463 - protein, 13 aa, Homo sapiens
  CDR3 for alpha chain variable domain of TCR clone 255732 (TRAV8-3, TRAJ42)
CARYGGSHGNLIF

SEQ ID NO: 511464 - protein, 14 aa, Homo sapiens
  CDR3 for beta chain variable domain of TCR clone 255732 (TRBV20-1, TRBJ2-1)
CSALDRGTYNEQFF

SEQ ID NO: 511465 - protein, 14 aa, Homo sapiens
  CDR3 for alpha chain variable domain of TCR clone 255733 (TRAV13-1, TRAJ9)
CAASALTGGFKTIF

SEQ ID NO: 511466 - protein, 19 aa, Homo sapiens
  CDR3 for beta chain variable domain of TCR clone 255733 (TRBV2, TRBJ2-7)
CASSDDETSGRANDYEQYF

SEQ ID NO: 511467 - protein, 11 aa, Homo sapiens
  CDR3 for alpha chain variable domain of TCR clone 255734 (TRAV17, TRAJ43)
CATDNNNDMRF

SEQ ID NO: 511468 - protein, 14 aa, Homo sapiens
  CDR3 for beta chain variable domain of TCR clone 255734 (TRBV20-1, TRBJ1-1)
CSAQTRIGGTEAFF

SEQ ID NO: 511469 - protein, 11 aa, Homo sapiens
  CDR3 for alpha chain variable domain of TCR clone 255735 (TRAV21, TRAJ34)
CAHYNTDQLIF

SEQ ID NO: 511470 - protein, 16 aa, Homo sapiens
  CDR3 for beta chain variable domain of TCR clone 255735 (TRBV5-1, TRBJ2-2)
CASSSRTGGRTGELFF

SEQ ID NO: 511471 - protein, 15 aa, Homo sapiens
  CDR3 for alpha chain variable domain of TCR clone 255736 (TRAV26-1, TRAJ29)
CIVRGEGSGNTPLVF

SEQ ID NO: 511472 - protein, 15 aa, Homo sapiens
  CDR3 for beta chain variable domain of TCR clone 255736 (TRBV7-9, TRBJ1-5)
CASSQGHQPNQPHHF

SEQ ID NO: 511473 - protein, 12 aa, Homo sapiens
  CDR3 for alpha chain variable domain of TCR clone 255737 (TRAV2, TRAJ31)
CAVEEGNARLVF

SEQ ID NO: 511474 - protein, 12 aa, Homo sapiens
  CDR3 for beta chain variable domain of TCR clone 255737 (TRBV7-8, TRBJ2-7)
CASSLGDREQYF

SEQ ID NO: 511475 - protein, 18 aa, Homo sapiens
  CDR3 for alpha chain variable domain of TCR clone 255738 (TRAV21, TRAJ52)
CAVRPSPAGGTSYGKLTF

SEQ ID NO: 511476 - protein, 17 aa, Homo sapiens
  CDR3 for beta chain variable domain of TCR clone 255738 (TRBV13, TRBJ2-3)
RASSLSRVAGGRNTLYF

SEQ ID NO: 511477 - protein, 13 aa, Homo sapiens
  CDR3 for alpha chain variable domain of TCR clone 255739 (TRAV27, TRAJ42)
CAGARGSKGNIIF

SEQ ID NO: 511478 - protein, 15 aa, Homo sapiens
  CDR3 for beta chain variable domain of TCR clone 255739 (TRBV10-3, TRBJ2-2)
CAIRTDREDTGELFF

SEQ ID NO: 511479 - protein, 13 aa, Homo sapiens
  CDR3 for alpha chain variable domain of TCR clone 255740 (TRAV8-3, TRAJ43)
CAVGPDNNNDMRF

SEQ ID NO: 511480 - protein, 14 aa, Homo sapiens
  CDR3 for beta chain variable domain of TCR clone 255740 (TRBV19, TRBJ2-7)
CASPTFVLSGEQFF

SEQ ID NO: 511481 - protein, 14 aa, Homo sapiens
  CDR3 for alpha chain variable domain of TCR clone 255741 (TRAV8-3, TRAJ20)
CAVGPRGNDYKLSV

SEQ ID NO: 511482 - protein, 11 aa, Homo sapiens
  CDR3 for beta chain variable domain of TCR clone 255741 (TRBV10-3, TRBJ2-2)
CATKGTGELFF

SEQ ID NO: 511483 - protein, 17 aa, Homo sapiens
  CDR3 for alpha chain variable domain of TCR clone 255742 (TRAV3, TRAJ6)
CAVRDGPRSGGSYRPTF

SEQ ID NO: 511484 - protein, 20 aa, Homo sapiens
  CDR3 for beta chain variable domain of TCR clone 255742 (TRBV28, TRBJ2-1)
CASTPIGRSPGLAGGNEQFF

SEQ ID NO: 511485 - protein, 14 aa, Homo sapiens
  CDR3 for alpha chain variable domain of TCR clone 255743 (TRAV13-1, TRAJ10)
CAAKEPGGGNKLTF

SEQ ID NO: 511486 - protein, 15 aa, Homo sapiens
  CDR3 for beta chain variable domain of TCR clone 255743 (TRBV6-5, TRBJ2-1)
CASSYDAGAGNEQFF

SEQ ID NO: 511487 - protein, 12 aa, Homo sapiens
  CDR3 for alpha chain variable domain of TCR clone 255744 (TRAV3, TRAJ20)
CAVRDPDYKLSF

SEQ ID NO: 511488 - protein, 11 aa, Homo sapiens
  CDR3 for beta chain variable domain of TCR clone 255744 (TRBV28, TRBJ2-5)
CASSVKETQYF

SEQ ID NO: 511489 - protein, 14 aa, Homo sapiens
  CDR3 for alpha chain variable domain of TCR clone 255745 (TRAV21, TRAJ35)
CAVMPIGFGNVLHC

SEQ ID NO: 511490 - protein, 12 aa, Homo sapiens
  CDR3 for beta chain variable domain of TCR clone 255745 (TRBV7-9, TRBJ2-7)
CASSSKREKQYF

SEQ ID NO: 511491 - protein, 15 aa, Homo sapiens
  CDR3 for alpha chain variable domain of TCR clone 255746 (TRAV17, TRAJ13)
CATDSGSGGYQKVTF

SEQ ID NO: 511492 - protein, 17 aa, Homo sapiens
  CDR3 for beta chain variable domain of TCR clone 255746 (TRBV11-2, TRBJ2-1)
CASSLYPPGVEYNEQFF

SEQ ID NO: 511493 - protein, 13 aa, Homo sapiens
  CDR3 for alpha chain variable domain of TCR clone 255747 (TRAV12-3, TRAJ33)
CAMSVNSNYQLIW

SEQ ID NO: 511494 - protein, 13 aa, Homo sapiens
  CDR3 for beta chain variable domain of TCR clone 255747 (TRBV4-1, TRBJ2-2)
CASSQGNTGELFF

SEQ ID NO: 511495 - protein, 13 aa, Homo sapiens
  CDR3 for alpha chain variable domain of TCR clone 255748 (TRAV16, TRAJ28)
CASTGAGSYQLTF

SEQ ID NO: 511496 - protein, 16 aa, Homo sapiens
  CDR3 for beta chain variable domain of TCR clone 255748 (TRBV28, TRBJ1-5)
CASSLTGQGWNQPQHF

SEQ ID NO: 511497 - protein, 12 aa, Homo sapiens
  CDR3 for alpha chain variable domain of TCR clone 255749 (TRAV8-3, TRAJ20)
CAVGANDYKLSF

SEQ ID NO: 511498 - protein, 15 aa, Homo sapiens
  CDR3 for beta chain variable domain of TCR clone 255749 (TRBV11-2, TRBJ2-2)
CASSSDRVNAGELFF

SEQ ID NO: 511499 - protein, 14 aa, Homo sapiens
  CDR3 for alpha chain variable domain of TCR clone 255750 (TRAV1-2, TRAJ8)
CAVREDTGFQNLAF

SEQ ID NO: 511500 - protein, 14 aa, Homo sapiens
  CDR3 for beta chain variable domain of TCR clone 255750 (TRBV12-5, TRBJ2-5)
CASGSRTHQETQYF

SEQ ID NO: 511501 - protein, 12 aa, Homo sapiens
  CDR3 for alpha chain variable domain of TCR clone 255751 (TRAV3, TRAJ27)
CAVRDIAGKSTF

SEQ ID NO: 511502 - protein, 14 aa, Homo sapiens
  CDR3 for beta chain variable domain of TCR clone 255751 (TRBV5-1, TRBJ1-2)
CASSVDSTNYGYTF

SEQ ID NO: 511503 - protein, 14 aa, Homo sapiens
  CDR3 for alpha chain variable domain of TCR clone 255752 (TRAV8-3, TRAJ16)
CAVDRFSDGQKLLF

SEQ ID NO: 511504 - protein, 15 aa, Homo sapiens
  CDR3 for beta chain variable domain of TCR clone 255752 (TRBV7-6, TRBJ2-1)
CASSSGQGPYNEQFF

SEQ ID NO: 511505 - protein, 18 aa, Homo sapiens
  CDR3 for alpha chain variable domain of TCR clone 255753 (TRAV29/DV5, TRAJ52)
CSAGFRGAGGTSYGKLTF

SEQ ID NO: 511506 - protein, 17 aa, Homo sapiens
  CDR3 for beta chain variable domain of TCR clone 255753 (TRBV20-1, TRBJ2-3)
CSARSAGLAGVTDTQYF

SEQ ID NO: 511507 - protein, 14 aa, Homo sapiens
  CDR3 for alpha chain variable domain of TCR clone 255754 (TRAV16, TRAJ37)
CALDISGNTGKLIF

SEQ ID NO: 511508 - protein, 14 aa, Homo sapiens
  CDR3 for beta chain variable domain of TCR clone 255754 (TRBV11-2, TRBJ2-3)
CASSLGGGANTQYF

SEQ ID NO: 511509 - protein, 14 aa, Homo sapiens
  CDR3 for alpha chain variable domain of TCR clone 255755 (TRAV38-2/DV8, TRAJ47)
CAYRTLEYGNKMVF

SEQ ID NO: 511510 - protein, 16 aa, Homo sapiens
  CDR3 for beta chain variable domain of TCR clone 255755 (TRBV12-4, TRBJ2-5)
CASSFFVRGRQETQYF

SEQ ID NO: 511511 - protein, 16 aa, Homo sapiens
  CDR3 for alpha chain variable domain of TCR clone 255756 (TRAV23/DV6, TRAJ9)
CAASIGGNTGGFKTIF

SEQ ID NO: 511512 - protein, 13 aa, Homo sapiens
  CDR3 for beta chain variable domain of TCR clone 255756 (TRBV12-4, TRBJ2-5)
CASRLAVQETQYF

SEQ ID NO: 511513 - protein, 14 aa, Homo sapiens
  CDR3 for alpha chain variable domain of TCR clone 255757 (TRAV1-2, TRAJ8)
FAVREDTGFQKLVF

SEQ ID NO: 511514 - protein, 15 aa, Homo sapiens
  CDR3 for beta chain variable domain of TCR clone 255757 (TRBV6-3, TRBJ2-7)
CASSPPGTVFYEQYF

SEQ ID NO: 511515 - protein, 14 aa, Homo sapiens
  CDR3 for alpha chain variable domain of TCR clone 255758 (TRAV16, TRAJ54)
CAPRGVQGAQKLVF

SEQ ID NO: 511516 - protein, 15 aa, Homo sapiens
  CDR3 for beta chain variable domain of TCR clone 255758 (TRBV18, TRBJ2-2)
CASSTSGLHTGELFF

SEQ ID NO: 511517 - protein, 14 aa, Homo sapiens
  CDR3 for alpha chain variable domain of TCR clone 255759 (TRAV13-1, TRAJ3)
CAAEGYSSASEIIF

SEQ ID NO: 511518 - protein, 14 aa, Homo sapiens
  CDR3 for beta chain variable domain of TCR clone 255759 (TRBV19, TRBJ2-5)
CASSSSGIQETQYF

SEQ ID NO: 511519 - protein, 17 aa, Homo sapiens
  CDR3 for alpha chain variable domain of TCR clone 255760 (TRAV13-2, TRAJ31)
FAENARLMFGDGTQLVV

SEQ ID NO: 511520 - protein, 14 aa, Homo sapiens
  CDR3 for beta chain variable domain of TCR clone 255760 (TRBV7-9, TRBJ2-1)
CASSLGVADNEQFF

SEQ ID NO: 511521 - protein, 18 aa, Homo sapiens
  CDR3 for alpha chain variable domain of TCR clone 255761 (TRAV14/DV4, TRAJ11)
CAMREAHHRNSGYSTLTF

SEQ ID NO: 511522 - protein, 12 aa, Homo sapiens
  CDR3 for beta chain variable domain of TCR clone 255761 (TRBV6-1, TRBJ2-7)
CASSDYSYEQYF

SEQ ID NO: 511523 - protein, 15 aa, Homo sapiens
  CDR3 for alpha chain variable domain of TCR clone 255762 (TRAV8-4, TRAJ9)
CAVSDRETGGFKTIF

SEQ ID NO: 511524 - protein, 13 aa, Homo sapiens
  CDR3 for beta chain variable domain of TCR clone 255762 (TRBV28, TRBJ2-5)
CASSFAGGETQYF

SEQ ID NO: 511525 - protein, 13 aa, Homo sapiens
  CDR3 for alpha chain variable domain of TCR clone 255763 (TRAV17, TRAJ7)
CSTDNYGNNRLAF

SEQ ID NO: 511526 - protein, 16 aa, Homo sapiens
  CDR3 for beta chain variable domain of TCR clone 255763 (TRBV4-1, TRBJ2-5)
CASSQAIAASSATQYF

SEQ ID NO: 511527 - protein, 16 aa, Homo sapiens
  CDR3 for alpha chain variable domain of TCR clone 255764 (TRAV35, TRAJ42)
GRMERYYGGSQGNLIF

SEQ ID NO: 511528 - protein, 15 aa, Homo sapiens
  CDR3 for beta chain variable domain of TCR clone 255764 (TRBV6-1, TRBJ2-7)
CASSDWDNPNYEQYF

SEQ ID NO: 511529 - protein, 14 aa, Homo sapiens
  CDR3 for alpha chain variable domain of TCR clone 255765 (TRAV38-1, TRAJ40)
CALRATSGTYTYIF

SEQ ID NO: 511530 - protein, 14 aa, Homo sapiens
  CDR3 for beta chain variable domain of TCR clone 255765 (TRBV19, TRBJ2-1)
CASPTFVLSGEQFF

SEQ ID NO: 511531 - protein, 13 aa, Homo sapiens
  CDR3 for alpha chain variable domain of TCR clone 255766 (TRAV12-2, TRAJ10)
CAVPTGGGNELTF

SEQ ID NO: 511532 - protein, 11 aa, Homo sapiens
  CDR3 for beta chain variable domain of TCR clone 255766 (TRBV6-1, TRBJ2-1)
CASISSNEQFF

SEQ ID NO: 511533 - protein, 12 aa, Homo sapiens
  CDR3 for alpha chain variable domain of TCR clone 255767 (TRAV30, TRAJ40)
CGTEIPLRNLQI

SEQ ID NO: 511534 - protein, 15 aa, Homo sapiens
  CDR3 for beta chain variable domain of TCR clone 255767 (TRBV6-3, TRBJ2-7)
CASSYSGGLSYEQYF

SEQ ID NO: 511535 - protein, 14 aa, Homo sapiens
  CDR3 for alpha chain variable domain of TCR clone 255768 (TRAV12-2, TRAJ24)
CAVTPADSWGKLQF

SEQ ID NO: 511536 - protein, 17 aa, Homo sapiens
  CDR3 for beta chain variable domain of TCR clone 255768 (TRBV7-8, TRBJ1-2)
CASSLRPLQGHLYGYTF

SEQ ID NO: 511537 - protein, 11 aa, Homo sapiens
  CDR3 for alpha chain variable domain of TCR clone 255769 (TRAV13-2, TRAJ23)
CAESPRGKLIF

SEQ ID NO: 511538 - protein, 16 aa, Homo sapiens
  CDR3 for beta chain variable domain of TCR clone 255769 (TRBV12-5, TRBJ2-5)
CASGPRTSGNQETQYF

SEQ ID NO: 511539 - protein, 13 aa, Homo sapiens
  CDR3 for alpha chain variable domain of TCR clone 255770 (TRAV27, TRAJ41)
CAGEGNSGYALNY

SEQ ID NO: 511540 - protein, 14 aa, Homo sapiens
  CDR3 for beta chain variable domain of TCR clone 255770 (TRBV25-1, TRBJ1-1)
CASTHLGGNTEAFF

SEQ ID NO: 511541 - protein, 12 aa, Homo sapiens
  CDR3 for alpha chain variable domain of TCR clone 255771 (TRAV24, TRAJ39)
CAFANAGNMLTF

SEQ ID NO: 511542 - protein, 15 aa, Homo sapiens
  CDR3 for beta chain variable domain of TCR clone 255771 (TRBV5-1, TRBJ2-7)
CASSLGDFTTYEQYF

SEQ ID NO: 511543 - protein, 14 aa, Homo sapiens
  CDR3 for alpha chain variable domain of TCR clone 255772 (TRAV9-2, TRAJ39)
CALYIYNAGKMLTF

SEQ ID NO: 511544 - protein, 15 aa, Homo sapiens
  CDR3 for beta chain variable domain of TCR clone 255772 (TRBV3-1, TRBJ2-7)
CASSQVRQGAYEQYF

SEQ ID NO: 511545 - protein, 11 aa, Homo sapiens
  CDR3 for alpha chain variable domain of TCR clone 255773 (TRAV12-3, TRAJ43)
CGMSVSNDMRF

SEQ ID NO: 511546 - protein, 13 aa, Homo sapiens
  CDR3 for beta chain variable domain of TCR clone 255773 (TRBV20-1, TRBJ1-1)
CSAPLGGGTEAFF

SEQ ID NO: 511547 - protein, 16 aa, Homo sapiens
  CDR3 for alpha chain variable domain of TCR clone 255774 (TRAV12-2, TRAJ45)
CAVIFLSGGGADVLTF

SEQ ID NO: 511548 - protein, 19 aa, Homo sapiens
  CDR3 for beta chain variable domain of TCR clone 255774 (TRBV28, TRBJ2-4)
CASSFQPGGPAHSKNIQYF

SEQ ID NO: 511549 - protein, 10 aa, Homo sapiens
  CDR3 for alpha chain variable domain of TCR clone 255775 (TRAV8-4, TRAJ43)
CAVSADDMRL

SEQ ID NO: 511550 - protein, 15 aa, Homo sapiens
  CDR3 for beta chain variable domain of TCR clone 255775 (TRBV5-1, TRBJ2-3)
CASSVTSGSTDTQYF

SEQ ID NO: 511551 - protein, 15 aa, Homo sapiens
  CDR3 for alpha chain variable domain of TCR clone 255776 (TRAV8-3, TRAJ11)
CAVGLLNSGYSTLTF

SEQ ID NO: 511552 - protein, 14 aa, Homo sapiens
  CDR3 for beta chain variable domain of TCR clone 255776 (TRBV2, TRBJ2-3)
CASNRGTSTDTQYF

SEQ ID NO: 511553 - protein, 13 aa, Homo sapiens
  CDR3 for alpha chain variable domain of TCR clone 255777 (TRAV30, TRAJ29)
CHRAFSGNTPLVF

SEQ ID NO: 511554 - protein, 15 aa, Homo sapiens
  CDR3 for beta chain variable domain of TCR clone 255777 (TRBV5-1, TRBJ2-2)
CASSLFGQNTGELFF

SEQ ID NO: 511555 - protein, 11 aa, Homo sapiens
  CDR3 for alpha chain variable domain of TCR clone 255778 (TRAV3, TRAJ21)
CAVGNFNKFYF

SEQ ID NO: 511556 - protein, 16 aa, Homo sapiens
  CDR3 for beta chain variable domain of TCR clone 255778 (TRBV19, TRBJ2-1)
CASSNAGPSSYNEKFF

SEQ ID NO: 511557 - protein, 10 aa, Homo sapiens
  CDR3 for alpha chain variable domain of TCR clone 255779 (TRAV12-2, TRAJ52)
RSTSYGKLTF

SEQ ID NO: 511558 - protein, 11 aa, Homo sapiens
  CDR3 for beta chain variable domain of TCR clone 255779 (TRBV11-2, TRBJ2-2)
CASSLLGELFF

SEQ ID NO: 511559 - protein, 16 aa, Homo sapiens
  CDR3 for alpha chain variable domain of TCR clone 255780 (TRAV38-2/DV8, TRAJ45)
CAYTTTSGGGADGRTF

SEQ ID NO: 511560 - protein, 14 aa, Homo sapiens
  CDR3 for beta chain variable domain of TCR clone 255780 (TRBV7-9, TRBJ2-2)
CASSFGHRTGELFF

SEQ ID NO: 511561 - protein, 16 aa, Homo sapiens
  CDR3 for alpha chain variable domain of TCR clone 255781 (TRAV3, TRAJ37)
CAVRGKGSGNTGKLIF

SEQ ID NO: 511562 - protein, 13 aa, Homo sapiens
  CDR3 for beta chain variable domain of TCR clone 255781 (TRBV14, TRBJ2-7)
CASSLDRRYEQYF

SEQ ID NO: 511563 - protein, 15 aa, Homo sapiens
  CDR3 for alpha chain variable domain of TCR clone 255782 (TRAV8-2, TRAJ16)
CVVSDGFSDGQKLLV

SEQ ID NO: 511564 - protein, 14 aa, Homo sapiens
  CDR3 for beta chain variable domain of TCR clone 255782 (TRBV7-3, TRBJ1-1)
CASSLGTGYTEAFF

SEQ ID NO: 511565 - protein, 16 aa, Homo sapiens
  CDR3 for alpha chain variable domain of TCR clone 255783 (TRAV3, TRAJ37)
CAVRVRGSGNTGKLIC

SEQ ID NO: 511566 - protein, 16 aa, Homo sapiens
  CDR3 for beta chain variable domain of TCR clone 255783 (TRBV11-2, TRBJ2-7)
CASSPTTGGVSYEQYF

SEQ ID NO: 511567 - protein, 18 aa, Homo sapiens
  CDR3 for alpha chain variable domain of TCR clone 255784 (TRAV21, TRAJ52)
CAVRPSPAGGTSYGKLTF

SEQ ID NO: 511568 - protein, 12 aa, Homo sapiens
  CDR3 for beta chain variable domain of TCR clone 255784 (TRBV20-1, TRBJ2-5)
CSARDSREAQYF

SEQ ID NO: 511569 - protein, 16 aa, Homo sapiens
  CDR3 for alpha chain variable domain of TCR clone 255785 (TRAV38-1, TRAJ42)
CAFRLVRGGSQGNLIF

SEQ ID NO: 511570 - protein, 13 aa, Homo sapiens
  CDR3 for beta chain variable domain of TCR clone 255785 (TRBV7-9, TRBJ2-7)
CASSFAGAYEQYF

SEQ ID NO: 511571 - protein, 14 aa, Homo sapiens
  CDR3 for alpha chain variable domain of TCR clone 255786 (TRAV17, TRAJ6)
CATNPAGGSYIPTF

SEQ ID NO: 511572 - protein, 13 aa, Homo sapiens
  CDR3 for beta chain variable domain of TCR clone 255786 (TRBV27, TRBJ2-1)
CASTPLAAGEQFF

SEQ ID NO: 511573 - protein, 16 aa, Homo sapiens
  CDR3 for alpha chain variable domain of TCR clone 255787 (TRAV8-3, TRAJ13)
CAVGAYPSGGYQKVTF

SEQ ID NO: 511574 - protein, 15 aa, Homo sapiens
  CDR3 for beta chain variable domain of TCR clone 255787 (TRBV19, TRBJ1-5)
CTSSIVWVDNQPQHF

SEQ ID NO: 511575 - protein, 17 aa, Homo sapiens
  CDR3 for alpha chain variable domain of TCR clone 255788 (TRAV3, TRAJ6)
CAVRDGPRAGGSYIPTF

SEQ ID NO: 511576 - protein, 13 aa, Homo sapiens
  CDR3 for beta chain variable domain of TCR clone 255788 (TRBV7-3, TRBJ2-1)
CASSPVAYNEQFF

SEQ ID NO: 511577 - protein, 14 aa, Homo sapiens
  CDR3 for alpha chain variable domain of TCR clone 255789 (TRAV38-1, TRAJ40)
CALRLTSGTYKYIF

SEQ ID NO: 511578 - protein, 14 aa, Homo sapiens
  CDR3 for beta chain variable domain of TCR clone 255789 (TRBV25-1, TRBJ1-1)
CASTHPGGNTEAFF

SEQ ID NO: 511579 - protein, 15 aa, Homo sapiens
  CDR3 for alpha chain variable domain of TCR clone 255790 (TRAV8-2, TRAJ15)
CVVSDRYQAGTALIF

SEQ ID NO: 511580 - protein, 15 aa, Homo sapiens
  CDR3 for beta chain variable domain of TCR clone 255790 (TRBV20-1, TRBJ2-7)
CSARDRVSGMDEQYF

SEQ ID NO: 511581 - protein, 16 aa, Homo sapiens
  CDR3 for alpha chain variable domain of TCR clone 255791 (TRAV30, TRAJ24)
CGTEIVDADSWGKFQF

SEQ ID NO: 511582 - protein, 15 aa, Homo sapiens
  CDR3 for beta chain variable domain of TCR clone 255791 (TRBV7-6, TRBJ2-1)
CASSPGQGPYNEQFF

SEQ ID NO: 511583 - protein, 16 aa, Homo sapiens
  CDR3 for alpha chain variable domain of TCR clone 255792 (TRAV30, TRAJ24)
CGTEIVDADSWGKFQF

SEQ ID NO: 511584 - protein, 11 aa, Homo sapiens
  CDR3 for beta chain variable domain of TCR clone 255792 (TRBV29-1, TRBJ1-1)
CSVEVNVITFF

SEQ ID NO: 511585 - protein, 14 aa, Homo sapiens
  CDR3 for alpha chain variable domain of TCR clone 255793 (TRAV12-2, TRAJ13)
CAVKKTGGYQKVTF

SEQ ID NO: 511586 - protein, 14 aa, Homo sapiens
  CDR3 for beta chain variable domain of TCR clone 255793 (TRBV7-2, TRBJ2-7)
CASSPKTSFYEQHF

SEQ ID NO: 511587 - protein, 14 aa, Homo sapiens
  CDR3 for alpha chain variable domain of TCR clone 255794 (TRAV3, TRAJ33)
CTVRDMGSNYQLIW

SEQ ID NO: 511588 - protein, 17 aa, Homo sapiens
  CDR3 for beta chain variable domain of TCR clone 255794 (TRBV19, TRBJ2-1)
CASSIWSAQPTHNEQFF

SEQ ID NO: 511589 - protein, 11 aa, Homo sapiens
  CDR3 for alpha chain variable domain of TCR clone 255795 (TRAV12-2, TRAJ29)
CAVTLRSPLVF

SEQ ID NO: 511590 - protein, 13 aa, Homo sapiens
  CDR3 for beta chain variable domain of TCR clone 255795 (TRBV12-4, TRBJ2-5)
CASSPGTEETQYF

SEQ ID NO: 511591 - protein, 17 aa, Homo sapiens
  CDR3 for alpha chain variable domain of TCR clone 255796 (TRAV12-2, TRAJ48)
CASNEKLTFGTGTRLTI

SEQ ID NO: 511592 - protein, 15 aa, Homo sapiens
  CDR3 for beta chain variable domain of TCR clone 255796 (TRBV5-1, TRBJ2-1)
CASSQAGYWWNQQFF

SEQ ID NO: 511593 - protein, 15 aa, Homo sapiens
  CDR3 for alpha chain variable domain of TCR clone 255797 (TRAV2, TRAJ9)
CAVEDRGTGGCKTIF

SEQ ID NO: 511594 - protein, 16 aa, Homo sapiens
  CDR3 for beta chain variable domain of TCR clone 255797 (TRBV11-2, TRBJ2-2)
CASSLRTGNLIGELFF

SEQ ID NO: 511595 - protein, 11 aa, Homo sapiens
  CDR3 for alpha chain variable domain of TCR clone 255798 (TRAV23/DV6, TRAJ58)
CAASLLRGETK

SEQ ID NO: 511596 - protein, 14 aa, Homo sapiens
  CDR3 for beta chain variable domain of TCR clone 255798 (TRBV2, TRBJ2-7)
CASSLTSGGYDQYF

SEQ ID NO: 511597 - protein, 13 aa, Homo sapiens
  CDR3 for alpha chain variable domain of TCR clone 255799 (TRAV17, TRAJ9)
CATDYTGGFKTIF

SEQ ID NO: 511598 - protein, 12 aa, Homo sapiens
  CDR3 for beta chain variable domain of TCR clone 255799 (TRBV14, TRBJ2-7)
CASSRLKGEQYF

SEQ ID NO: 511599 - protein, 14 aa, Homo sapiens
  CDR3 for alpha chain variable domain of TCR clone 255800 (TRAV26-2, TRAJ27)
CILRDISNAGKSTF

SEQ ID NO: 511600 - protein, 15 aa, Homo sapiens
  CDR3 for beta chain variable domain of TCR clone 255800 (TRBV10-3, TRBJ2-7)
CATREQGLRSYEQYF

SEQ ID NO: 511601 - protein, 12 aa, Homo sapiens
  CDR3 for alpha chain variable domain of TCR clone 255801 (TRAV20, TRAJ37)
CALPSNTGKVIF

SEQ ID NO: 511602 - protein, 16 aa, Homo sapiens
  CDR3 for beta chain variable domain of TCR clone 255801 (TRBV28, TRBJ1-2)
CASSHGQGVYKDGYTF

SEQ ID NO: 511603 - protein, 10 aa, Homo sapiens
  CDR3 for alpha chain variable domain of TCR clone 255802 (TRAV8-1, TRAJ43)
CAVNVDDMRF

SEQ ID NO: 511604 - protein, 15 aa, Homo sapiens
  CDR3 for beta chain variable domain of TCR clone 255802 (TRBV11-3, TRBJ2-7)
CASSPGPARSYEQYF

SEQ ID NO: 511605 - protein, 12 aa, Homo sapiens
  CDR3 for alpha chain variable domain of TCR clone 255803 (TRAV21, TRAJ42)
CAVGGSQGNRIL

SEQ ID NO: 511606 - protein, 13 aa, Homo sapiens
  CDR3 for beta chain variable domain of TCR clone 255803 (TRBV12-4, TRBJ1-1)
CQQSRDRGTEAFF

SEQ ID NO: 511607 - protein, 18 aa, Homo sapiens
  CDR3 for alpha chain variable domain of TCR clone 255804 (TRAV16, TRAJ45)
RAQASYPSSGGGADGLTF

SEQ ID NO: 511608 - protein, 11 aa, Homo sapiens
  CDR3 for beta chain variable domain of TCR clone 255804 (TRBV4-1, TRBJ2-2)
CASEHTGELFF

SEQ ID NO: 511609 - protein, 14 aa, Homo sapiens
  CDR3 for alpha chain variable domain of TCR clone 255805 (TRAV13-1, TRAJ36)
CAASINTRANNLFF

SEQ ID NO: 511610 - protein, 18 aa, Homo sapiens
  CDR3 for beta chain variable domain of TCR clone 255805 (TRBV20-1, TRBJ2-3)
CSASDPCGQGLSTDTQYF

SEQ ID NO: 511611 - protein, 12 aa, Homo sapiens
  CDR3 for alpha chain variable domain of TCR clone 255806 (TRAV12-3, TRAJ17)
CAMTLTGNKLTF

SEQ ID NO: 511612 - protein, 13 aa, Homo sapiens
  CDR3 for beta chain variable domain of TCR clone 255806 (TRBV5-6, TRBJ2-6)
GASTSSGANVLTF

SEQ ID NO: 511613 - protein, 13 aa, Homo sapiens
  CDR3 for alpha chain variable domain of TCR clone 255807 (TRAV25, TRAJ10)
CAGRTGGGNKITF

SEQ ID NO: 511614 - protein, 15 aa, Homo sapiens
  CDR3 for beta chain variable domain of TCR clone 255807 (TRBV19, TRBJ2-1)
CASSSPGVPLDEQFF

SEQ ID NO: 511615 - protein, 13 aa, Homo sapiens
  CDR3 for alpha chain variable domain of TCR clone 255808 (TRAV13-1, TRAJ39)
CAASIWAGNMLTF

SEQ ID NO: 511616 - protein, 15 aa, Homo sapiens
  CDR3 for beta chain variable domain of TCR clone 255808 (TRBV7-9, TRBJ1-1)
CASSLLEQGNTEAFF

SEQ ID NO: 511617 - protein, 19 aa, Homo sapiens
  CDR3 for alpha chain variable domain of TCR clone 255809 (TRAV2, TRAJ20)
ILQVREADAAVYRDCKLSF

SEQ ID NO: 511618 - protein, 14 aa, Homo sapiens
  CDR3 for beta chain variable domain of TCR clone 255809 (TRBV7-9, TRBJ2-1)
CASSSMVGFGEQFF

SEQ ID NO: 511619 - protein, 16 aa, Homo sapiens
  CDR3 for alpha chain variable domain of TCR clone 255810 (TRAV1-2, TRAJ6)
CAVRDQGTGVSYIPTF

SEQ ID NO: 511620 - protein, 13 aa, Homo sapiens
  CDR3 for beta chain variable domain of TCR clone 255810 (TRBV28, TRBJ2-7)
CAITPGLAGEQYF

SEQ ID NO: 511621 - protein, 14 aa, Homo sapiens
  CDR3 for alpha chain variable domain of TCR clone 255811 (TRAV12-1, TRAJ41)
CVVLNSNSGYALNF

SEQ ID NO: 511622 - protein, 14 aa, Homo sapiens
  CDR3 for beta chain variable domain of TCR clone 255811 (TRBV7-3, TRBJ1-1)
CASSLKGGNTEAFF

SEQ ID NO: 511623 - protein, 12 aa, Homo sapiens
  CDR3 for alpha chain variable domain of TCR clone 255812 (TRAV12-3, TRAJ17)
CAMTLTGNKLTF

SEQ ID NO: 511624 - protein, 16 aa, Homo sapiens
  CDR3 for beta chain variable domain of TCR clone 255812 (TRBV29-1, TRBJ2-7)
CSVEVVGASGSYEQYF

SEQ ID NO: 511625 - protein, 19 aa, Homo sapiens
  CDR3 for alpha chain variable domain of TCR clone 255813 (TRAV17, TRAJ17)
CATDGRPGVIKDAGNKLTF

SEQ ID NO: 511626 - protein, 17 aa, Homo sapiens
  CDR3 for beta chain variable domain of TCR clone 255813 (TRBV12-4, TRBJ1-1)
CASSLSGFRTMNTEAFF

SEQ ID NO: 511627 - protein, 12 aa, Homo sapiens
  CDR3 for alpha chain variable domain of TCR clone 255814 (TRAV25, TRAJ38)
CAGTGNNRNLIW

SEQ ID NO: 511628 - protein, 13 aa, Homo sapiens
  CDR3 for beta chain variable domain of TCR clone 255814 (TRBV7-2, TRBJ2-4)
CASSREHANIQYF

SEQ ID NO: 511629 - protein, 14 aa, Homo sapiens
  CDR3 for alpha chain variable domain of TCR clone 255815 (TRAV9-2, TRAJ39)
CALYIYNAGNMLTF

SEQ ID NO: 511630 - protein, 15 aa, Homo sapiens
  CDR3 for beta chain variable domain of TCR clone 255815 (TRBV20-1, TRBJ1-6)
CSARVQGQGVSPLLF

SEQ ID NO: 511631 - protein, 12 aa, Homo sapiens
  CDR3 for alpha chain variable domain of TCR clone 255816 (TRAV12-3, TRAJ17)
CAMTLTGNKLTF

SEQ ID NO: 511632 - protein, 15 aa, Homo sapiens
  CDR3 for beta chain variable domain of TCR clone 255816 (TRBV4-1, TRBJ1-4)
CASSQTGGQAEKLFF

SEQ ID NO: 511633 - protein, 15 aa, Homo sapiens
  CDR3 for alpha chain variable domain of TCR clone 255817 (TRAV8-3, TRAJ27)
CAVGPSKTNAGQSTF

SEQ ID NO: 511634 - protein, 15 aa, Homo sapiens
  CDR3 for beta chain variable domain of TCR clone 255817 (TRBV10-3, TRBJ2-3)
CAISLTSGGTDTQYF

SEQ ID NO: 511635 - protein, 16 aa, Homo sapiens
  CDR3 for alpha chain variable domain of TCR clone 255818 (TRAV14/DV4, TRAJ53)
CAMREGGGGSNYKLTC

SEQ ID NO: 511636 - protein, 14 aa, Homo sapiens
  CDR3 for beta chain variable domain of TCR clone 255818 (TRBV20-1, TRBJ2-7)
CSAKTGTGGYEQYF

SEQ ID NO: 511637 - protein, 15 aa, Homo sapiens
  CDR3 for alpha chain variable domain of TCR clone 255819 (TRAV17, TRAJ35)
CATAFVIGFGNVLHC

SEQ ID NO: 511638 - protein, 15 aa, Homo sapiens
  CDR3 for beta chain variable domain of TCR clone 255819 (TRBV7-9, TRBJ2-7)
CASSLALAEANEQYF

SEQ ID NO: 511639 - protein, 16 aa, Homo sapiens
  CDR3 for alpha chain variable domain of TCR clone 255820 (TRAV2, TRAJ4)
CAVEDRFSGGYNKLIF

SEQ ID NO: 511640 - protein, 12 aa, Homo sapiens
  CDR3 for beta chain variable domain of TCR clone 255820 (TRBV11-2, TRBJ2-1)
CASSPGNNEQFF

SEQ ID NO: 511641 - protein, 14 aa, Homo sapiens
  CDR3 for alpha chain variable domain of TCR clone 255821 (TRAV1-2, TRAJ16)
CAVNRFSDGQKLLF

SEQ ID NO: 511642 - protein, 14 aa, Homo sapiens
  CDR3 for beta chain variable domain of TCR clone 255821 (TRBV7-8, TRBJ2-3)
CASSLEAGTDTQYL

SEQ ID NO: 511643 - protein, 10 aa, Homo sapiens
  CDR3 for alpha chain variable domain of TCR clone 255822 (TRAV26-1, TRAJ47)
CIEYGNKLVF

SEQ ID NO: 511644 - protein, 16 aa, Homo sapiens
  CDR3 for beta chain variable domain of TCR clone 255822 (TRBV5-1, TRBJ2-2)
CASSSAGQGAPGELFF

SEQ ID NO: 511645 - protein, 14 aa, Homo sapiens
  CDR3 for alpha chain variable domain of TCR clone 255823 (TRAV2, TRAJ22)
CAVGRGGSARQLTF

SEQ ID NO: 511646 - protein, 12 aa, Homo sapiens
  CDR3 for beta chain variable domain of TCR clone 255823 (TRBV7-8, TRBJ2-7)
CASSLGDREQCF

SEQ ID NO: 511647 - protein, 14 aa, Homo sapiens
  CDR3 for alpha chain variable domain of TCR clone 255824 (TRAV13-1, TRAJ4)
CAASTPGGYNKLIF

SEQ ID NO: 511648 - protein, 15 aa, Homo sapiens
  CDR3 for beta chain variable domain of TCR clone 255824 (TRBV15, TRBJ2-3)
CATSRVRARTDTQYF

SEQ ID NO: 511649 - protein, 13 aa, Homo sapiens
  CDR3 for alpha chain variable domain of TCR clone 255825 (TRAV3, TRAJ27)
CAVRPLGAGKSTF

SEQ ID NO: 511650 - protein, 13 aa, Homo sapiens
  CDR3 for beta chain variable domain of TCR clone 255825 (TRBV18, TRBJ1-1)
CASSPGPSGEAFF

SEQ ID NO: 511651 - protein, 15 aa, Homo sapiens
  CDR3 for alpha chain variable domain of TCR clone 255826 (TRAV6, TRAJ13)
CALGGDSGGYQKVTF

SEQ ID NO: 511652 - protein, 12 aa, Homo sapiens
  CDR3 for beta chain variable domain of TCR clone 255826 (TRBV5-7, TRBJ1-2)
CASSDRTHGYTF

SEQ ID NO: 511653 - protein, 14 aa, Homo sapiens
  CDR3 for alpha chain variable domain of TCR clone 255827 (TRAV23/DV6, TRAJ4)
CAAPSSGGYNKLIF

SEQ ID NO: 511654 - protein, 15 aa, Homo sapiens
  CDR3 for beta chain variable domain of TCR clone 255827 (TRBV11-3, TRBJ2-3)
CASLKDGREGDTQYF

SEQ ID NO: 511655 - protein, 14 aa, Homo sapiens
  CDR3 for alpha chain variable domain of TCR clone 255828 (TRAV9-2, TRAJ36)
RALPWRTGANNLFF

SEQ ID NO: 511656 - protein, 14 aa, Homo sapiens
  CDR3 for beta chain variable domain of TCR clone 255828 (TRBV2, TRBJ1-2)
CASSELQVNYGYSF

SEQ ID NO: 511657 - protein, 13 aa, Homo sapiens
  CDR3 for alpha chain variable domain of TCR clone 255829 (TRAV21, TRAJ27)
CAARPGNAGKSTF

SEQ ID NO: 511658 - protein, 14 aa, Homo sapiens
  CDR3 for beta chain variable domain of TCR clone 255829 (TRBV2, TRBJ2-1)
CASSEALIYNEQFF

SEQ ID NO: 511659 - protein, 13 aa, Homo sapiens
  CDR3 for alpha chain variable domain of TCR clone 255830 (TRAV12-2, TRAJ9)
FAVKWAGGFKTIF

SEQ ID NO: 511660 - protein, 15 aa, Homo sapiens
  CDR3 for beta chain variable domain of TCR clone 255830 (TRBV5-1, TRBJ1-4)
CASSLTADSDEKLFF

SEQ ID NO: 511661 - protein, 16 aa, Homo sapiens
  CDR3 for alpha chain variable domain of TCR clone 255831 (TRAV2, TRAJ4)
CAVEDRFTGGYNKLIF

SEQ ID NO: 511662 - protein, 13 aa, Homo sapiens
  CDR3 for beta chain variable domain of TCR clone 255831 (TRBV7-7, TRBJ2-5)
CASSRSGQETQYF

SEQ ID NO: 511663 - protein, 17 aa, Homo sapiens
  CDR3 for alpha chain variable domain of TCR clone 255832 (TRAV26-1, TRAJ21)
CVAKGKFYFGSGTKINV

SEQ ID NO: 511664 - protein, 15 aa, Homo sapiens
  CDR3 for beta chain variable domain of TCR clone 255832 (TRBV7-2, TRBJ2-1)
CASSSGLAGGNEQFF

SEQ ID NO: 511665 - protein, 13 aa, Homo sapiens
  CDR3 for alpha chain variable domain of TCR clone 255833 (TRAV8-3, TRAJ4)
WVFYSGGYNKLIF

SEQ ID NO: 511666 - protein, 15 aa, Homo sapiens
  CDR3 for beta chain variable domain of TCR clone 255833 (TRBV7-2, TRBJ2-3)
CASSLAGAFIDTQYF

SEQ ID NO: 511667 - protein, 15 aa, Homo sapiens
  CDR3 for alpha chain variable domain of TCR clone 255834 (TRAV14/DV4, TRAJ21)
CAMREGPEQLQQILL

SEQ ID NO: 511668 - protein, 12 aa, Homo sapiens
  CDR3 for beta chain variable domain of TCR clone 255834 (TRBV29-1, TRBJ2-2)
CSVDKYTGELFF

SEQ ID NO: 511669 - protein, 17 aa, Homo sapiens
  CDR3 for alpha chain variable domain of TCR clone 255835 (TRAV12-2, TRAJ6)
CAPQGPPRAGGIYIPTF

SEQ ID NO: 511670 - protein, 16 aa, Homo sapiens
  CDR3 for beta chain variable domain of TCR clone 255835 (TRBV19, TRBJ2-2)
CASSTARASNTGELFF

SEQ ID NO: 511671 - protein, 17 aa, Homo sapiens
  CDR3 for alpha chain variable domain of TCR clone 255836 (TRAV20, TRAJ45)
CAVQGMYSGGGADGLTF

SEQ ID NO: 511672 - protein, 15 aa, Homo sapiens
  CDR3 for beta chain variable domain of TCR clone 255836 (TRBV6-1, TRBJ2-1)
CASSESRGQYNEQFF

SEQ ID NO: 511673 - protein, 13 aa, Homo sapiens
  CDR3 for alpha chain variable domain of TCR clone 255837 (TRAV2, TRAJ29)
CAAVNSGNTPLVF

SEQ ID NO: 511674 - protein, 15 aa, Homo sapiens
  CDR3 for beta chain variable domain of TCR clone 255837 (TRBV6-3, TRBJ2-7)
CASSSPGTVFYEQYF

SEQ ID NO: 511675 - protein, 14 aa, Homo sapiens
  CDR3 for alpha chain variable domain of TCR clone 255838 (TRAV35, TRAJ50)
CAGHRKTSYDKVIF

SEQ ID NO: 511676 - protein, 13 aa, Homo sapiens
  CDR3 for beta chain variable domain of TCR clone 255838 (TRBV7-7, TRBJ2-3)
CANSLSRADTQYF

SEQ ID NO: 511677 - protein, 14 aa, Homo sapiens
  CDR3 for alpha chain variable domain of TCR clone 255839 (TRAV38-1, TRAJ43)
FAFMKHNNNNDMRF

SEQ ID NO: 511678 - protein, 17 aa, Homo sapiens
  CDR3 for beta chain variable domain of TCR clone 255839 (TRBV7-7, TRBJ1-4)
CASSLVGQGASNEKLFF

SEQ ID NO: 511679 - protein, 12 aa, Homo sapiens
  CDR3 for alpha chain variable domain of TCR clone 255840 (TRAV16, TRAJ36)
CALKTGANNLFF

SEQ ID NO: 511680 - protein, 13 aa, Homo sapiens
  CDR3 for beta chain variable domain of TCR clone 255840 (TRBV19, TRBJ1-2)
CASSVPGQDGYTF

SEQ ID NO: 511681 - protein, 11 aa, Homo sapiens
  CDR3 for alpha chain variable domain of TCR clone 255841 (TRAV1-2, TRAJ31)
FAVKNNARLMF

SEQ ID NO: 511682 - protein, 12 aa, Homo sapiens
  CDR3 for beta chain variable domain of TCR clone 255841 (TRBV20-1, TRBJ2-5)
CSAPRSQETQYF

SEQ ID NO: 511683 - protein, 13 aa, Homo sapiens
  CDR3 for alpha chain variable domain of TCR clone 255842 (TRAV12-2, TRAJ39)
CAVNNNAGNMLIF

SEQ ID NO: 511684 - protein, 14 aa, Homo sapiens
  CDR3 for beta chain variable domain of TCR clone 255842 (TRBV7-3, TRBJ2-1)
CASSPEGGGNEQFF

SEQ ID NO: 511685 - protein, 14 aa, Homo sapiens
  CDR3 for alpha chain variable domain of TCR clone 255843 (TRAV12-3, TRAJ10)
SHLPLTGGGNKLTF

SEQ ID NO: 511686 - protein, 11 aa, Homo sapiens
  CDR3 for beta chain variable domain of TCR clone 255843 (TRBV28, TRBJ2-5)
CATGNQETQYF

SEQ ID NO: 511687 - protein, 17 aa, Homo sapiens
  CDR3 for alpha chain variable domain of TCR clone 255844 (TRAV36/DV7, TRAJ52)
CAVAQRAGGTSYGKLTF

SEQ ID NO: 511688 - protein, 14 aa, Homo sapiens
  CDR3 for beta chain variable domain of TCR clone 255844 (TRBV12-4, TRBJ2-5)
CASSFGDRGETQYF

SEQ ID NO: 511689 - protein, 12 aa, Homo sapiens
  CDR3 for alpha chain variable domain of TCR clone 255845 (TRAV12-3, TRAJ5)
CAMDTGRRARTF

SEQ ID NO: 511690 - protein, 14 aa, Homo sapiens
  CDR3 for beta chain variable domain of TCR clone 255845 (TRBV20-1, TRBJ2-1)
CSAQIGGSANEQFF

SEQ ID NO: 511691 - protein, 13 aa, Homo sapiens
  CDR3 for alpha chain variable domain of TCR clone 255846 (TRAV12-2, TRAJ4)
CAGRSGGYNKLIF

SEQ ID NO: 511692 - protein, 15 aa, Homo sapiens
  CDR3 for beta chain variable domain of TCR clone 255846 (TRBV10-3, TRBJ2-1)
CAISDVQDRAYEQFF

SEQ ID NO: 511693 - protein, 14 aa, Homo sapiens
  CDR3 for alpha chain variable domain of TCR clone 255847 (TRAV12-2, TRAJ53)
CAVKGGGSNYKLTF

SEQ ID NO: 511694 - protein, 14 aa, Homo sapiens
  CDR3 for beta chain variable domain of TCR clone 255847 (TRBV7-7, TRBJ2-2)
CATRQDSDTGSCFF

SEQ ID NO: 511695 - protein, 16 aa, Homo sapiens
  CDR3 for alpha chain variable domain of TCR clone 255848 (TRAV20, TRAJ10)
CAVLRGLTGGGNKLTF

SEQ ID NO: 511696 - protein, 15 aa, Homo sapiens
  CDR3 for beta chain variable domain of TCR clone 255848 (TRBV5-1, TRBJ2-1)
CASSPPRAPYNEQFF

SEQ ID NO: 511697 - protein, 15 aa, Homo sapiens
  CDR3 for alpha chain variable domain of TCR clone 255849 (TRAV14/DV4, TRAJ12)
CAMTPPVDSSYKLIF

SEQ ID NO: 511698 - protein, 11 aa, Homo sapiens
  CDR3 for beta chain variable domain of TCR clone 255849 (TRBV19, TRBJ2-1)
VTIRGANEQFF

SEQ ID NO: 511699 - protein, 14 aa, Homo sapiens
  CDR3 for alpha chain variable domain of TCR clone 255850 (TRAV16, TRAJ29)
CALTRNSGNTPLAF

SEQ ID NO: 511700 - protein, 12 aa, Homo sapiens
  CDR3 for beta chain variable domain of TCR clone 255850 (TRBV2, TRBJ2-1)
CAKREGYNEQFF

SEQ ID NO: 511701 - protein, 12 aa, Homo sapiens
  CDR3 for alpha chain variable domain of TCR clone 255851 (TRAV13-1, TRAJ26)
QVQDNYGHNFVF

SEQ ID NO: 511702 - protein, 13 aa, Homo sapiens
  CDR3 for beta chain variable domain of TCR clone 255851 (TRBV7-9, TRBJ2-7)
CASSAGLQYEQYF

SEQ ID NO: 511703 - protein, 12 aa, Homo sapiens
  CDR3 for alpha chain variable domain of TCR clone 255852 (TRAV12-3, TRAJ40)
CAVSSGTYKYIF

SEQ ID NO: 511704 - protein, 17 aa, Homo sapiens
  CDR3 for beta chain variable domain of TCR clone 255852 (TRBV11-2, TRBJ2-1)
CASSLYPPGVEYNEQFF

SEQ ID NO: 511705 - protein, 15 aa, Homo sapiens
  CDR3 for alpha chain variable domain of TCR clone 255853 (TRAV3, TRAJ3)
CAVRDRDSSASKIIF

SEQ ID NO: 511706 - protein, 15 aa, Homo sapiens
  CDR3 for beta chain variable domain of TCR clone 255853 (TRBV27, TRBJ2-1)
CASSNGGGSSNEQFF

SEQ ID NO: 511707 - protein, 19 aa, Homo sapiens
  CDR3 for alpha chain variable domain of TCR clone 255854 (TRAV17, TRAJ56)
CFLLLCYGAFTGANSKLTF

SEQ ID NO: 511708 - protein, 15 aa, Homo sapiens
  CDR3 for beta chain variable domain of TCR clone 255854 (TRBV28, TRBJ1-5)
CASSRTGGYVQPQHF

SEQ ID NO: 511709 - protein, 21 aa, Homo sapiens
  CDR3 for alpha chain variable domain of TCR clone 255855 (TRAV16, TRAJ31)
CALSGGVETMPDSCLETELSW

SEQ ID NO: 511710 - protein, 16 aa, Homo sapiens
  CDR3 for beta chain variable domain of TCR clone 255855 (TRBV28, TRBJ2-7)
CASSLFFETGGPEQYF

SEQ ID NO: 511711 - protein, 13 aa, Homo sapiens
  CDR3 for alpha chain variable domain of TCR clone 255856 (TRAV35, TRAJ43)
CAGYTYNNNDMRF

SEQ ID NO: 511712 - protein, 15 aa, Homo sapiens
  CDR3 for beta chain variable domain of TCR clone 255856 (TRBV25-1, TRBJ1-4)
CASSKRIAINEKLFF

SEQ ID NO: 511713 - protein, 14 aa, Homo sapiens
  CDR3 for alpha chain variable domain of TCR clone 255857 (TRAV12-2, TRAJ13)
CAVKKTGGYQKVTF

SEQ ID NO: 511714 - protein, 19 aa, Homo sapiens
  CDR3 for beta chain variable domain of TCR clone 255857 (TRBV25-1, TRBJ2-2)
CAILVDRVDRGRKTGELFF

SEQ ID NO: 511715 - protein, 13 aa, Homo sapiens
  CDR3 for alpha chain variable domain of TCR clone 255858 (TRAV3, TRAJ4)
CAVRDGGYNKLIF

SEQ ID NO: 511716 - protein, 14 aa, Homo sapiens
  CDR3 for beta chain variable domain of TCR clone 255858 (TRBV12-4, TRBJ1-2)
CASSPSAAGSSYTF

SEQ ID NO: 511717 - protein, 13 aa, Homo sapiens
  CDR3 for alpha chain variable domain of TCR clone 255859 (TRAV17, TRAJ42)
CSKLWRKQGNLIF

SEQ ID NO: 511718 - protein, 13 aa, Homo sapiens
  CDR3 for beta chain variable domain of TCR clone 255859 (TRBV20-1, TRBJ1-2)
CSAPRSGRYGYTF

SEQ ID NO: 511719 - protein, 13 aa, Homo sapiens
  CDR3 for alpha chain variable domain of TCR clone 255860 (TRAV13-1, TRAJ39)
CSKYSNAGNMLTF

SEQ ID NO: 511720 - protein, 13 aa, Homo sapiens
  CDR3 for beta chain variable domain of TCR clone 255860 (TRBV10-2, TRBJ2-3)
CASSESGDHTQYF

SEQ ID NO: 511721 - protein, 12 aa, Homo sapiens
  CDR3 for alpha chain variable domain of TCR clone 255861 (TRAV1-2, TRAJ29)
CAVPSGNTPLVF

SEQ ID NO: 511722 - protein, 13 aa, Homo sapiens
  CDR3 for beta chain variable domain of TCR clone 255861 (TRBV5-4, TRBJ1-1)
CASSIDLGTEAFF

SEQ ID NO: 511723 - protein, 11 aa, Homo sapiens
  CDR3 for alpha chain variable domain of TCR clone 255862 (TRAV1-1, TRAJ23)
CAVRQGGKLIF

SEQ ID NO: 511724 - protein, 15 aa, Homo sapiens
  CDR3 for beta chain variable domain of TCR clone 255862 (TRBV3-1, TRBJ2-1)
CASSQDYTPRGEQFF

SEQ ID NO: 511725 - protein, 11 aa, Homo sapiens
  CDR3 for alpha chain variable domain of TCR clone 255863 (TRAV17, TRAJ9)
CGFTGGFKTTF

SEQ ID NO: 511726 - protein, 12 aa, Homo sapiens
  CDR3 for beta chain variable domain of TCR clone 255863 (TRBV29-1, TRBJ2-3)
CSVTGGADTQYF

SEQ ID NO: 511727 - protein, 14 aa, Homo sapiens
  CDR3 for alpha chain variable domain of TCR clone 255864 (TRAV17, TRAJ39)
CATDPVRAGNTPTF

SEQ ID NO: 511728 - protein, 15 aa, Homo sapiens
  CDR3 for beta chain variable domain of TCR clone 255864 (TRBV13, TRBJ1-5)
CASSFGQGGVQPQHF

SEQ ID NO: 511729 - protein, 14 aa, Homo sapiens
  CDR3 for alpha chain variable domain of TCR clone 255865 (TRAV16, TRAJ40)
CALHESYYLRNLQI

SEQ ID NO: 511730 - protein, 13 aa, Homo sapiens
  CDR3 for beta chain variable domain of TCR clone 255865 (TRBV3-1, TRBJ1-1)
CASSQLQGAEAFF

SEQ ID NO: 511731 - protein, 13 aa, Homo sapiens
  CDR3 for alpha chain variable domain of TCR clone 255866 (TRAV29/DV5, TRAJ31)
CAASRNNNARLMF

SEQ ID NO: 511732 - protein, 12 aa, Homo sapiens
  CDR3 for beta chain variable domain of TCR clone 255866 (TRBV14, TRBJ2-5)
CASSHLKETKYF

SEQ ID NO: 511733 - protein, 13 aa, Homo sapiens
  CDR3 for alpha chain variable domain of TCR clone 255867 (TRAV2, TRAJ40)
CAVVTAGTYKYIF

SEQ ID NO: 511734 - protein, 15 aa, Homo sapiens
  CDR3 for beta chain variable domain of TCR clone 255867 (TRBV11-3, TRBJ2-3)
CASLKDGREGDTQYL

SEQ ID NO: 511735 - protein, 20 aa, Homo sapiens
  CDR3 for alpha chain variable domain of TCR clone 255868 (TRAV1-2, TRAJ34)
LLKELQMKDSASPNTDKLIF

SEQ ID NO: 511736 - protein, 23 aa, Homo sapiens
  CDR3 for beta chain variable domain of TCR clone 255868 (TRBV3-1, TRBJ2-5)
CASSQAGTSGGGARDPVLRARHA

SEQ ID NO: 511737 - protein, 16 aa, Homo sapiens
  CDR3 for alpha chain variable domain of TCR clone 255869 (TRAV9-2, TRAJ10)
CALSEGGTGGGNKLTF

SEQ ID NO: 511738 - protein, 16 aa, Homo sapiens
  CDR3 for beta chain variable domain of TCR clone 255869 (TRBV7-2, TRBJ1-4)
CASSPDGRFDREKLFF

SEQ ID NO: 511739 - protein, 11 aa, Homo sapiens
  CDR3 for alpha chain variable domain of TCR clone 255870 (TRAV17, TRAJ36)
CAPTGATNLFF

SEQ ID NO: 511740 - protein, 12 aa, Homo sapiens
  CDR3 for beta chain variable domain of TCR clone 255870 (TRBV29-1, TRBJ2-3)
CSVTGGADTQYF

SEQ ID NO: 511741 - protein, 15 aa, Homo sapiens
  CDR3 for alpha chain variable domain of TCR clone 255871 (TRAV3, TRAJ3)
CAVRDRDSSASKIIF

SEQ ID NO: 511742 - protein, 18 aa, Homo sapiens
  CDR3 for beta chain variable domain of TCR clone 255871 (TRBV25-1, TRBJ1-2)
CDSSGLQNGQGLIFGDTF

SEQ ID NO: 511743 - protein, 14 aa, Homo sapiens
  CDR3 for alpha chain variable domain of TCR clone 255872 (TRAV3, TRAJ7)
CAGREEEREQQTRF

SEQ ID NO: 511744 - protein, 12 aa, Homo sapiens
  CDR3 for beta chain variable domain of TCR clone 255872 (TRBV7-8, TRBJ2-7)
CASSLGDREQYF

SEQ ID NO: 511745 - protein, 15 aa, Homo sapiens
  CDR3 for alpha chain variable domain of TCR clone 255873 (TRAV3, TRAJ42)
CAVRGGTGSHGNLIF

SEQ ID NO: 511746 - protein, 14 aa, Homo sapiens
  CDR3 for beta chain variable domain of TCR clone 255873 (TRBV19, TRBJ1-2)
CASSSLFARDVYTF

SEQ ID NO: 511747 - protein, 12 aa, Homo sapiens
  CDR3 for alpha chain variable domain of TCR clone 255874 (TRAV16, TRAJ10)
CSRTGGGNKLTF

SEQ ID NO: 511748 - protein, 16 aa, Homo sapiens
  CDR3 for beta chain variable domain of TCR clone 255874 (TRBV7-3, TRBJ2-2)
CASSLKRGTLSGKLFF

SEQ ID NO: 511749 - protein, 12 aa, Homo sapiens
  CDR3 for alpha chain variable domain of TCR clone 255875 (TRAV16, TRAJ10)
CAFTGGGNKLTF

SEQ ID NO: 511750 - protein, 15 aa, Homo sapiens
  CDR3 for beta chain variable domain of TCR clone 255875 (TRBV4-1, TRBJ1-4)
CASSDTGGTNEKLFF

SEQ ID NO: 511751 - protein, 14 aa, Homo sapiens
  CDR3 for alpha chain variable domain of TCR clone 255876 (TRAV21, TRAJ32)
CCGAYGGATNKLIF

SEQ ID NO: 511752 - protein, 13 aa, Homo sapiens
  CDR3 for beta chain variable domain of TCR clone 255876 (TRBV2, TRBJ1-6)
CASGRGGISPLHF

SEQ ID NO: 511753 - protein, 14 aa, Homo sapiens
  CDR3 for alpha chain variable domain of TCR clone 255877 (TRAV8-2, TRAJ23)
CVVRDDNQGGKLSF

SEQ ID NO: 511754 - protein, 16 aa, Homo sapiens
  CDR3 for beta chain variable domain of TCR clone 255877 (TRBV4-2, TRBJ2-5)
CASSQELVGSQETQYF

SEQ ID NO: 511755 - protein, 17 aa, Homo sapiens
  CDR3 for alpha chain variable domain of TCR clone 255878 (TRAV3, TRAJ6)
CAVRDGPRAGGSYIPTF

SEQ ID NO: 511756 - protein, 14 aa, Homo sapiens
  CDR3 for beta chain variable domain of TCR clone 255878 (TRBV19, TRBJ1-6)
CASSSGTGYSPLHF

SEQ ID NO: 511757 - protein, 16 aa, Homo sapiens
  CDR3 for alpha chain variable domain of TCR clone 255879 (TRAV38-1, TRAJ32)
CAFMPFIGGATNKLIF

SEQ ID NO: 511758 - protein, 20 aa, Homo sapiens
  CDR3 for beta chain variable domain of TCR clone 255879 (TRBV7-8, TRBJ2-2)
CASSHLFPGPTIHITGELFF

SEQ ID NO: 511759 - protein, 14 aa, Homo sapiens
  CDR3 for alpha chain variable domain of TCR clone 255880 (TRAV29/DV5, TRAJ48)
CAAMALFRNEKLTF

SEQ ID NO: 511760 - protein, 15 aa, Homo sapiens
  CDR3 for beta chain variable domain of TCR clone 255880 (TRBV7-2, TRBJ2-1)
CASTHGTGIYNEQFF

SEQ ID NO: 511761 - protein, 14 aa, Homo sapiens
  CDR3 for alpha chain variable domain of TCR clone 255881 (TRAV12-1, TRAJ17)
CGVNEKAAGNKLTF

SEQ ID NO: 511762 - protein, 15 aa, Homo sapiens
  CDR3 for beta chain variable domain of TCR clone 255881 (TRBV7-2, TRBJ2-1)
CASTHGTGIYNEQFF

SEQ ID NO: 511763 - protein, 13 aa, Homo sapiens
  CDR3 for alpha chain variable domain of TCR clone 255882 (TRAV21, TRAJ27)
CAARPGSAGKSTF

SEQ ID NO: 511764 - protein, 14 aa, Homo sapiens
  CDR3 for beta chain variable domain of TCR clone 255882 (TRBV20-1, TRBJ2-1)
CSAAGSGEYNEQFF

SEQ ID NO: 511765 - protein, 11 aa, Homo sapiens
  CDR3 for alpha chain variable domain of TCR clone 255883 (TRAV12-2, TRAJ31)
CAVTRWARLMF

SEQ ID NO: 511766 - protein, 15 aa, Homo sapiens
  CDR3 for beta chain variable domain of TCR clone 255883 (TRBV19, TRBJ2-7)
CASSIGGGRVNEQYC

SEQ ID NO: 511767 - protein, 15 aa, Homo sapiens
  CDR3 for alpha chain variable domain of TCR clone 255884 (TRAV12-2, TRAJ9)
CAVNGGYTGGFKTIF

SEQ ID NO: 511768 - protein, 14 aa, Homo sapiens
  CDR3 for beta chain variable domain of TCR clone 255884 (TRBV11-3, TRBJ1-5)
LTGDRLYYNQPQHF

SEQ ID NO: 511769 - protein, 14 aa, Homo sapiens
  CDR3 for alpha chain variable domain of TCR clone 255885 (TRAV27, TRAJ22)
CAGLPSGSARQLTF

SEQ ID NO: 511770 - protein, 15 aa, Homo sapiens
  CDR3 for beta chain variable domain of TCR clone 255885 (TRBV11-1, TRBJ2-1)
CASSLFRDTYNEQFF

SEQ ID NO: 511771 - protein, 14 aa, Homo sapiens
  CDR3 for alpha chain variable domain of TCR clone 255886 (TRAV12-2, TRAJ40)
CAVKIPSGTSKYIF

SEQ ID NO: 511772 - protein, 14 aa, Homo sapiens
  CDR3 for beta chain variable domain of TCR clone 255886 (TRBV7-8, TRBJ2-7)
CASSPRDRVYEQYF

SEQ ID NO: 511773 - protein, 17 aa, Homo sapiens
  CDR3 for alpha chain variable domain of TCR clone 255887 (TRAV3, TRAJ6)
CAVRDGPRAGGSDIPTF

SEQ ID NO: 511774 - protein, 14 aa, Homo sapiens
  CDR3 for beta chain variable domain of TCR clone 255887 (TRBV13, TRBJ2-5)
CASSLGPRGETQYF

SEQ ID NO: 511775 - protein, 13 aa, Homo sapiens
  CDR3 for alpha chain variable domain of TCR clone 255888 (TRAV8-3, TRAJ48)
CAVVRFGNEKLTF

SEQ ID NO: 511776 - protein, 16 aa, Homo sapiens
  CDR3 for beta chain variable domain of TCR clone 255888 (TRBV20-1, TRBJ2-5)
CRARDFASGIQETQYF

SEQ ID NO: 511777 - protein, 12 aa, Homo sapiens
  CDR3 for alpha chain variable domain of TCR clone 255889 (TRAV13-1, TRAJ42)
SVLRGSQGNLIF

SEQ ID NO: 511778 - protein, 13 aa, Homo sapiens
  CDR3 for beta chain variable domain of TCR clone 255889 (TRBV2, TRBJ1-4)
CASSELVVEKLFF

SEQ ID NO: 511779 - protein, 16 aa, Homo sapiens
  CDR3 for alpha chain variable domain of TCR clone 255890 (TRAV12-3, TRAJ53)
CAMSPGSGGSNYKLTF

SEQ ID NO: 511780 - protein, 17 aa, Homo sapiens
  CDR3 for beta chain variable domain of TCR clone 255890 (TRBV20-1, TRBJ2-2)
CSASGSGQGELTGELFF

SEQ ID NO: 511781 - protein, 12 aa, Homo sapiens
  CDR3 for alpha chain variable domain of TCR clone 255891 (TRAV8-1, TRAJ6)
CASSGGSYIPTF

SEQ ID NO: 511782 - protein, 12 aa, Homo sapiens
  CDR3 for beta chain variable domain of TCR clone 255891 (TRBV19, TRBJ1-1)
RASMNRYTEAFF

SEQ ID NO: 511783 - protein, 10 aa, Homo sapiens
  CDR3 for alpha chain variable domain of TCR clone 255892 (TRAV13-1, TRAJ7)
LIRGNNRLAF

SEQ ID NO: 511784 - protein, 16 aa, Homo sapiens
  CDR3 for beta chain variable domain of TCR clone 255892 (TRBV4-1, TRBJ1-2)
CASSKDAGQVLYGYTF

SEQ ID NO: 511785 - protein, 13 aa, Homo sapiens
  CDR3 for alpha chain variable domain of TCR clone 255893 (TRAV8-6, TRAJ34)
CAVSDQGTDKLIF

SEQ ID NO: 511786 - protein, 15 aa, Homo sapiens
  CDR3 for beta chain variable domain of TCR clone 255893 (TRBV2, TRBJ2-5)
CASTRDGGPQETQYF

SEQ ID NO: 511787 - protein, 11 aa, Homo sapiens
  CDR3 for alpha chain variable domain of TCR clone 255894 (TRAV13-1, TRAJ15)
CAATPGTALIF

SEQ ID NO: 511788 - protein, 15 aa, Homo sapiens
  CDR3 for beta chain variable domain of TCR clone 255894 (TRBV11-3, TRBJ2-3)
CASLKDGREGDTQYF

SEQ ID NO: 511789 - protein, 14 aa, Homo sapiens
  CDR3 for alpha chain variable domain of TCR clone 255895 (TRAV12-1, TRAJ24)
CVVRSTDSWRKFQF

SEQ ID NO: 511790 - protein, 13 aa, Homo sapiens
  CDR3 for beta chain variable domain of TCR clone 255895 (TRBV2, TRBJ2-3)
CASILAGGQGQYF

SEQ ID NO: 511791 - protein, 12 aa, Homo sapiens
  CDR3 for alpha chain variable domain of TCR clone 255896 (TRAV2, TRAJ15)
CAVASQAGTADL

SEQ ID NO: 511792 - protein, 16 aa, Homo sapiens
  CDR3 for beta chain variable domain of TCR clone 255896 (TRBV5-1, TRBJ1-1)
CASSSGGNSLNTEAFF

SEQ ID NO: 511793 - protein, 14 aa, Homo sapiens
  CDR3 for alpha chain variable domain of TCR clone 255897 (TRAV12-1, TRAJ31)
CLVNNRDNNARLMF

SEQ ID NO: 511794 - protein, 16 aa, Homo sapiens
  CDR3 for beta chain variable domain of TCR clone 255897 (TRBV3-1, TRBJ2-3)
CASSRRAAGGRDTQYF

SEQ ID NO: 511795 - protein, 15 aa, Homo sapiens
  CDR3 for alpha chain variable domain of TCR clone 255898 (TRAV4, TRAJ39)
CLVGPNNNAGTMLTF

SEQ ID NO: 511796 - protein, 12 aa, Homo sapiens
  CDR3 for beta chain variable domain of TCR clone 255898 (TRBV7-8, TRBJ2-7)
CASSLGDREQYF

SEQ ID NO: 511797 - protein, 14 aa, Homo sapiens
  CDR3 for alpha chain variable domain of TCR clone 255899 (TRAV13-2, TRAJ17)
CAENSKAAGNKLTF

SEQ ID NO: 511798 - protein, 11 aa, Homo sapiens
  CDR3 for beta chain variable domain of TCR clone 255899 (TRBV6-3, TRBJ2-3)
CATGQADKQYF

SEQ ID NO: 511799 - protein, 15 aa, Homo sapiens
  CDR3 for alpha chain variable domain of TCR clone 255900 (TRAV26-1, TRAJ29)
CIVRVEGSGNTPLVF

SEQ ID NO: 511800 - protein, 15 aa, Homo sapiens
  CDR3 for beta chain variable domain of TCR clone 255900 (TRBV7-9, TRBJ1-5)
RASSQGHQPNQHQHF

SEQ ID NO: 511801 - protein, 15 aa, Homo sapiens
  CDR3 for alpha chain variable domain of TCR clone 255901 (TRAV14/DV4, TRAJ33)
CAMREGRDSNYQLIW

SEQ ID NO: 511802 - protein, 15 aa, Homo sapiens
  CDR3 for beta chain variable domain of TCR clone 255901 (TRBV5-5, TRBJ1-5)
CASSSTPGSNHPQHF

SEQ ID NO: 511803 - protein, 14 aa, Homo sapiens
  CDR3 for alpha chain variable domain of TCR clone 255902 (TRAV2, TRAJ9)
CAVEDRSGGFKTIF

SEQ ID NO: 511804 - protein, 15 aa, Homo sapiens
  CDR3 for beta chain variable domain of TCR clone 255902 (TRBV7-2, TRBJ2-1)
CASSLASGRVNEQFF

SEQ ID NO: 511805 - protein, 15 aa, Homo sapiens
  CDR3 for alpha chain variable domain of TCR clone 255903 (TRAV8-3, TRAJ45)
CALSYSGGGADGLTF

SEQ ID NO: 511806 - protein, 13 aa, Homo sapiens
  CDR3 for beta chain variable domain of TCR clone 255903 (TRBV10-3, TRBJ2-7)
CASKLVVNYEQYF

SEQ ID NO: 511807 - protein, 15 aa, Homo sapiens
  CDR3 for alpha chain variable domain of TCR clone 255904 (TRAV38-2/DV8, TRAJ48)
CAYRSGGFGNEKLNF

SEQ ID NO: 511808 - protein, 16 aa, Homo sapiens
  CDR3 for beta chain variable domain of TCR clone 255904 (TRBV28, TRBJ2-7)
CASSPWVATGDRSQYF

SEQ ID NO: 511809 - protein, 13 aa, Homo sapiens
  CDR3 for alpha chain variable domain of TCR clone 255905 (TRAV12-2, TRAJ18)
CAVRGSTLGGYTL

SEQ ID NO: 511810 - protein, 20 aa, Homo sapiens
  CDR3 for beta chain variable domain of TCR clone 255905 (TRBV7-8, TRBJ2-2)
CDSSHLFPGPTIHITGELFF

SEQ ID NO: 511811 - protein, 14 aa, Homo sapiens
  CDR3 for alpha chain variable domain of TCR clone 255906 (TRAV12-3, TRAJ12)
CAMGRRDSSYKLIF

SEQ ID NO: 511812 - protein, 14 aa, Homo sapiens
  CDR3 for beta chain variable domain of TCR clone 255906 (TRBV20-1, TRBJ1-4)
CSARSGQSNEKLFF

SEQ ID NO: 511813 - protein, 13 aa, Homo sapiens
  CDR3 for alpha chain variable domain of TCR clone 255907 (TRAV8-6, TRAJ16)
CAVSSPDGQKLLF

SEQ ID NO: 511814 - protein, 17 aa, Homo sapiens
  CDR3 for beta chain variable domain of TCR clone 255907 (TRBV20-1, TRBJ2-2)
CSASGSGQGGLTGELFF

SEQ ID NO: 511815 - protein, 14 aa, Homo sapiens
  CDR3 for alpha chain variable domain of TCR clone 255908 (TRAV12-2, TRAJ40)
CAVKIPSGTYKYIF

SEQ ID NO: 511816 - protein, 13 aa, Homo sapiens
  CDR3 for beta chain variable domain of TCR clone 255908 (TRBV20-1, TRBJ1-3)
CSAIVQGRDTIYF

SEQ ID NO: 511817 - protein, 14 aa, Homo sapiens
  CDR3 for alpha chain variable domain of TCR clone 255909 (TRAV8-6, TRAJ5)
CAVSVDTGRRAFTF

SEQ ID NO: 511818 - protein, 11 aa, Homo sapiens
  CDR3 for beta chain variable domain of TCR clone 255909 (TRBV7-3, TRBJ2-5)
CASSLSETQYF

SEQ ID NO: 511819 - protein, 13 aa, Homo sapiens
  CDR3 for alpha chain variable domain of TCR clone 255910 (TRAV27, TRAJ39)
CAGEGNAGNMLTF

SEQ ID NO: 511820 - protein, 15 aa, Homo sapiens
  CDR3 for beta chain variable domain of TCR clone 255910 (TRBV19, TRBJ1-6)
CASSTQGAVGSHLHF

SEQ ID NO: 511821 - protein, 14 aa, Homo sapiens
  CDR3 for alpha chain variable domain of TCR clone 255911 (TRAV3, TRAJ21)
CAVRDAYNFNKFYF

SEQ ID NO: 511822 - protein, 15 aa, Homo sapiens
  CDR3 for beta chain variable domain of TCR clone 255911 (TRBV6-1, TRBJ2-4)
CASSEAVWTINIQYF

SEQ ID NO: 511823 - protein, 11 aa, Homo sapiens
  CDR3 for alpha chain variable domain of TCR clone 255912 (TRAV2, TRAJ33)
CAVDSNYQLIW

SEQ ID NO: 511824 - protein, 15 aa, Homo sapiens
  CDR3 for beta chain variable domain of TCR clone 255912 (TRBV19, TRBJ2-4)
CASRGPRRGENIQYF

SEQ ID NO: 511825 - protein, 13 aa, Homo sapiens
  CDR3 for alpha chain variable domain of TCR clone 255913 (TRAV2, TRAJ29)
CAAGNSGNTPLVF

SEQ ID NO: 511826 - protein, 14 aa, Homo sapiens
  CDR3 for beta chain variable domain of TCR clone 255913 (TRBV7-9, TRBJ2-2)
CASSLVQDTGELFF

SEQ ID NO: 511827 - protein, 12 aa, Homo sapiens
  CDR3 for alpha chain variable domain of TCR clone 255914 (TRAV16, TRAJ10)
CSRTGGGNKLTF

SEQ ID NO: 511828 - protein, 12 aa, Homo sapiens
  CDR3 for beta chain variable domain of TCR clone 255914 (TRBV29-1, TRBJ2-3)
CSVTGGADTQYF

SEQ ID NO: 511829 - protein, 14 aa, Homo sapiens
  CDR3 for alpha chain variable domain of TCR clone 255915 (TRAV35, TRAJ33)
CAGSSQDSNYQLIW

SEQ ID NO: 511830 - protein, 10 aa, Homo sapiens
  CDR3 for beta chain variable domain of TCR clone 255915 (TRBV20-1, TRBJ2-7)
PTSGAYEQYF

SEQ ID NO: 511831 - protein, 11 aa, Homo sapiens
  CDR3 for alpha chain variable domain of TCR clone 255916 (TRAV2, TRAJ23)
CAVETRGKLNF

SEQ ID NO: 511832 - protein, 14 aa, Homo sapiens
  CDR3 for beta chain variable domain of TCR clone 255916 (TRBV2, TRBJ2-3)
CASSEGQNTDTQYF

SEQ ID NO: 511833 - protein, 11 aa, Homo sapiens
  CDR3 for alpha chain variable domain of TCR clone 255917 (TRAV16, TRAJ31)
CALFNNARLMF

SEQ ID NO: 511834 - protein, 15 aa, Homo sapiens
  CDR3 for beta chain variable domain of TCR clone 255917 (TRBV5-4, TRBJ2-3)
CATRSSGGALDTQYF

SEQ ID NO: 511835 - protein, 14 aa, Homo sapiens
  CDR3 for alpha chain variable domain of TCR clone 255918 (TRAV12-2, TRAJ5)
CAVNRSTGRRALTF

SEQ ID NO: 511836 - protein, 15 aa, Homo sapiens
  CDR3 for beta chain variable domain of TCR clone 255918 (TRBV20-1, TRBJ2-7)
CSARDPVKGEGEQYF

SEQ ID NO: 511837 - protein, 15 aa, Homo sapiens
  CDR3 for alpha chain variable domain of TCR clone 255919 (TRAV27, TRAJ38)
CAARRNAGNNRKLRW

SEQ ID NO: 511838 - protein, 13 aa, Homo sapiens
  CDR3 for beta chain variable domain of TCR clone 255919 (TRBV12-5, TRBJ2-3)
CASGDRQSDTQYF

SEQ ID NO: 511839 - protein, 13 aa, Homo sapiens
  CDR3 for alpha chain variable domain of TCR clone 255920 (TRAV21, TRAJ27)
CAARPGNAGSSTF

SEQ ID NO: 511840 - protein, 14 aa, Homo sapiens
  CDR3 for beta chain variable domain of TCR clone 255920 (TRBV7-6, TRBJ2-3)
CASSLGTVTDTQYF

SEQ ID NO: 511841 - protein, 13 aa, Homo sapiens
  CDR3 for alpha chain variable domain of TCR clone 255921 (TRAV2, TRAJ47)
CAVDREYGNKLVF

SEQ ID NO: 511842 - protein, 16 aa, Homo sapiens
  CDR3 for beta chain variable domain of TCR clone 255921 (TRBV19, TRBJ2-2)
CASRSPGTGATGELFF

SEQ ID NO: 511843 - protein, 16 aa, Homo sapiens
  CDR3 for alpha chain variable domain of TCR clone 255922 (TRAV3, TRAJ22)
CAVRDMGSGSARQLTF

SEQ ID NO: 511844 - protein, 13 aa, Homo sapiens
  CDR3 for beta chain variable domain of TCR clone 255922 (TRBV12-5, TRBJ2-3)
CASGDRQSDTQYF

SEQ ID NO: 511845 - protein, 12 aa, Homo sapiens
  CDR3 for alpha chain variable domain of TCR clone 255923 (TRAV12-1, TRAJ24)
CVVIDAGNMLTF

SEQ ID NO: 511846 - protein, 17 aa, Homo sapiens
  CDR3 for beta chain variable domain of TCR clone 255923 (TRBV7-2, TRBJ2-7)
CASSPFGSSGPSPEQYF

SEQ ID NO: 511847 - protein, 16 aa, Homo sapiens
  CDR3 for alpha chain variable domain of TCR clone 255924 (TRAV3, TRAJ37)
CAVRPHGSGNTGKLVF

SEQ ID NO: 511848 - protein, 16 aa, Homo sapiens
  CDR3 for beta chain variable domain of TCR clone 255924 (TRBV9, TRBJ1-2)
CASSVEEKVSPDGYTF

SEQ ID NO: 511849 - protein, 12 aa, Homo sapiens
  CDR3 for alpha chain variable domain of TCR clone 255925 (TRAV16, TRAJ9)
CDLRAGGFKTIF

SEQ ID NO: 511850 - protein, 13 aa, Homo sapiens
  CDR3 for beta chain variable domain of TCR clone 255925 (TRBV4-3, TRBJ1-1)
CASSQVEGSMAFF

SEQ ID NO: 511851 - protein, 13 aa, Homo sapiens
  CDR3 for alpha chain variable domain of TCR clone 255926 (TRAV8-3, TRAJ36)
CAVGATGANNLFF

SEQ ID NO: 511852 - protein, 15 aa, Homo sapiens
  CDR3 for beta chain variable domain of TCR clone 255926 (TRBV7-2, TRBJ1-2)
CASSPRAGWNYGYPF

SEQ ID NO: 511853 - protein, 11 aa, Homo sapiens
  CDR3 for alpha chain variable domain of TCR clone 255927 (TRAV17, TRAJ43)
CDTPRSNDMRF

SEQ ID NO: 511854 - protein, 13 aa, Homo sapiens
  CDR3 for beta chain variable domain of TCR clone 255927 (TRBV20-1, TRBJ2-3)
CSAIYPGADTQYF

SEQ ID NO: 511855 - protein, 13 aa, Homo sapiens
  CDR3 for alpha chain variable domain of TCR clone 255928 (TRAV1-2, TRAJ12)
CAVSMDSSYKLIF

SEQ ID NO: 511856 - protein, 15 aa, Homo sapiens
  CDR3 for beta chain variable domain of TCR clone 255928 (TRBV27, TRBJ2-5)
RASSLIPSGGETQYF

SEQ ID NO: 511857 - protein, 13 aa, Homo sapiens
  CDR3 for alpha chain variable domain of TCR clone 255929 (TRAV27, TRAJ24)
CAGDRDSWGKLQF

SEQ ID NO: 511858 - protein, 16 aa, Homo sapiens
  CDR3 for beta chain variable domain of TCR clone 255929 (TRBV11-2, TRBJ2-7)
CASSLAPTGVNYEQYF

SEQ ID NO: 511859 - protein, 13 aa, Homo sapiens
  CDR3 for alpha chain variable domain of TCR clone 255930 (TRAV9-2, TRAJ53)
CALSGGSNYKLTF

SEQ ID NO: 511860 - protein, 16 aa, Homo sapiens
  CDR3 for beta chain variable domain of TCR clone 255930 (TRBV11-2, TRBJ2-1)
CQQLIPPGVEYNEQFF

SEQ ID NO: 511861 - protein, 14 aa, Homo sapiens
  CDR3 for alpha chain variable domain of TCR clone 255931 (TRAV29/DV5, TRAJ48)
CAAMALFGNGKLTF

SEQ ID NO: 511862 - protein, 13 aa, Homo sapiens
  CDR3 for beta chain variable domain of TCR clone 255931 (TRBV7-3, TRBJ1-1)
CASSQDWGAEAFF

SEQ ID NO: 511863 - protein, 13 aa, Homo sapiens
  CDR3 for alpha chain variable domain of TCR clone 255932 (TRAV26-2, TRAJ57)
CILSRGGSEKLVF

SEQ ID NO: 511864 - protein, 16 aa, Homo sapiens
  CDR3 for beta chain variable domain of TCR clone 255932 (TRBV18, TRBJ1-5)
CASSPRTGGCNQPQHF

SEQ ID NO: 511865 - protein, 12 aa, Homo sapiens
  CDR3 for alpha chain variable domain of TCR clone 255933 (TRAV8-3, TRAJ20)
CAVDFNNYKLSF

SEQ ID NO: 511866 - protein, 13 aa, Homo sapiens
  CDR3 for beta chain variable domain of TCR clone 255933 (TRBV5-6, TRBJ2-3)
CASSLGRTDTQYF

SEQ ID NO: 511867 - protein, 15 aa, Homo sapiens
  CDR3 for alpha chain variable domain of TCR clone 255934 (TRAV26-1, TRAJ44)
CIVRANTGIASKLTF

SEQ ID NO: 511868 - protein, 16 aa, Homo sapiens
  CDR3 for beta chain variable domain of TCR clone 255934 (TRBV7-7, TRBJ2-1)
CASSLASGTSYNEQFF

SEQ ID NO: 511869 - protein, 14 aa, Homo sapiens
  CDR3 for alpha chain variable domain of TCR clone 255935 (TRAV36/DV7, TRAJ57)
CAVGFPGGSEKLVF

SEQ ID NO: 511870 - protein, 16 aa, Homo sapiens
  CDR3 for beta chain variable domain of TCR clone 255935 (TRBV7-2, TRBJ2-5)
CASSYKTGISVETQYF

SEQ ID NO: 511871 - protein, 16 aa, Homo sapiens
  CDR3 for alpha chain variable domain of TCR clone 255936 (TRAV12-1, TRAJ28)
CVVIAYSGAVSYQLTF

SEQ ID NO: 511872 - protein, 15 aa, Homo sapiens
  CDR3 for beta chain variable domain of TCR clone 255936 (TRBV14, TRBJ1-1)
CASSQEGMGFTEAFF

SEQ ID NO: 511873 - protein, 12 aa, Homo sapiens
  CDR3 for alpha chain variable domain of TCR clone 255937 (TRAV13-1, TRAJ5)
WAAKAGRRALTF

SEQ ID NO: 511874 - protein, 13 aa, Homo sapiens
  CDR3 for beta chain variable domain of TCR clone 255937 (TRBV7-9, TRBJ1-2)
CASSLKQNYGYTF

SEQ ID NO: 511875 - protein, 15 aa, Homo sapiens
  CDR3 for alpha chain variable domain of TCR clone 255938 (TRAV30, TRAJ32)
CGTEILGGATKKLIF

SEQ ID NO: 511876 - protein, 13 aa, Homo sapiens
  CDR3 for beta chain variable domain of TCR clone 255938 (TRBV6-3, TRBJ2-7)
CASSFSGGYEQYF

SEQ ID NO: 511877 - protein, 15 aa, Homo sapiens
  CDR3 for alpha chain variable domain of TCR clone 255939 (TRAV3, TRAJ29)
CAVGAPLSGNTPLVL

SEQ ID NO: 511878 - protein, 15 aa, Homo sapiens
  CDR3 for beta chain variable domain of TCR clone 255939 (TRBV28, TRBJ1-1)
CASRIKGGLNTEAFF

SEQ ID NO: 511879 - protein, 15 aa, Homo sapiens
  CDR3 for alpha chain variable domain of TCR clone 255940 (TRAV12-3, TRAJ11)
CAMSEENSGYSTLTF

SEQ ID NO: 511880 - protein, 12 aa, Homo sapiens
  CDR3 for beta chain variable domain of TCR clone 255940 (TRBV19, TRBJ2-1)
CASSQISNEQFF

SEQ ID NO: 511881 - protein, 14 aa, Homo sapiens
  CDR3 for alpha chain variable domain of TCR clone 255941 (TRAV16, TRAJ32)
CALKSGGATNKLIF

SEQ ID NO: 511882 - protein, 16 aa, Homo sapiens
  CDR3 for beta chain variable domain of TCR clone 255941 (TRBV7-2, TRBJ2-5)
CASSYKTGISLETQYF

SEQ ID NO: 511883 - protein, 11 aa, Homo sapiens
  CDR3 for alpha chain variable domain of TCR clone 255942 (TRAV35, TRAJ30)
CAGERDDKIIF

SEQ ID NO: 511884 - protein, 14 aa, Homo sapiens
  CDR3 for beta chain variable domain of TCR clone 255942 (TRBV15, TRBJ2-5)
CATSGDRGQGTQYF

SEQ ID NO: 511885 - protein, 14 aa, Homo sapiens
  CDR3 for alpha chain variable domain of TCR clone 255943 (TRAV17, TRAJ22)
CATVLSGSARQLTF

SEQ ID NO: 511886 - protein, 14 aa, Homo sapiens
  CDR3 for beta chain variable domain of TCR clone 255943 (TRBV12-4, TRBJ2-5)
CASSFGDRGGTQYF

SEQ ID NO: 511887 - protein, 15 aa, Homo sapiens
  CDR3 for alpha chain variable domain of TCR clone 255944 (TRAV13-2, TRAJ35)
CAESPNLGFGNVLHC

SEQ ID NO: 511888 - protein, 13 aa, Homo sapiens
  CDR3 for beta chain variable domain of TCR clone 255944 (TRBV10-2, TRBJ2-5)
CASSTLARETQYF

SEQ ID NO: 511889 - protein, 13 aa, Homo sapiens
  CDR3 for alpha chain variable domain of TCR clone 255945 (TRAV8-3, TRAJ28)
CAVGAVGSYQLTF

SEQ ID NO: 511890 - protein, 13 aa, Homo sapiens
  CDR3 for beta chain variable domain of TCR clone 255945 (TRBV11-2, TRBJ2-2)
CASGRDREEELFF

SEQ ID NO: 511891 - protein, 16 aa, Homo sapiens
  CDR3 for alpha chain variable domain of TCR clone 255946 (TRAV12-2, TRAJ13)
CAVDSAGAGGYQEVTF

SEQ ID NO: 511892 - protein, 14 aa, Homo sapiens
  CDR3 for beta chain variable domain of TCR clone 255946 (TRBV20-1, TRBJ1-4)
CSARDGSGWEKLFF

SEQ ID NO: 511893 - protein, 15 aa, Homo sapiens
  CDR3 for alpha chain variable domain of TCR clone 255947 (TRAV17, TRAJ22)
CATVAPSGSARQLTF

SEQ ID NO: 511894 - protein, 16 aa, Homo sapiens
  CDR3 for beta chain variable domain of TCR clone 255947 (TRBV10-3, TRBJ2-7)
CAISAYFADRPYEQYF

SEQ ID NO: 511895 - protein, 13 aa, Homo sapiens
  CDR3 for alpha chain variable domain of TCR clone 255948 (TRAV27, TRAJ45)
CRSSGGGADGLTF

SEQ ID NO: 511896 - protein, 14 aa, Homo sapiens
  CDR3 for beta chain variable domain of TCR clone 255948 (TRBV20-1, TRBJ2-7)
CSAPELAGVGEQYF

SEQ ID NO: 511897 - protein, 11 aa, Homo sapiens
  CDR3 for alpha chain variable domain of TCR clone 255949 (TRAV3, TRAJ32)
CAVREGIMVVL

SEQ ID NO: 511898 - protein, 13 aa, Homo sapiens
  CDR3 for beta chain variable domain of TCR clone 255949 (TRBV2, TRBJ1-1)
CASSGGGNTEAFF

SEQ ID NO: 511899 - protein, 11 aa, Homo sapiens
  CDR3 for alpha chain variable domain of TCR clone 255950 (TRAV2, TRAJ21)
CAVFNFNKFYF

SEQ ID NO: 511900 - protein, 16 aa, Homo sapiens
  CDR3 for beta chain variable domain of TCR clone 255950 (TRBV7-6, TRBJ2-5)
CASSETSGRAVETQYF

SEQ ID NO: 511901 - protein, 22 aa, Homo sapiens
  CDR3 for alpha chain variable domain of TCR clone 255951 (TRAV17, TRAJ6)
CATEKEEEATYLHLEEEPAFLF

SEQ ID NO: 511902 - protein, 13 aa, Homo sapiens
  CDR3 for beta chain variable domain of TCR clone 255951 (TRBV27, TRBJ2-1)
CASSLGRIWGQFF

SEQ ID NO: 511903 - protein, 13 aa, Homo sapiens
  CDR3 for alpha chain variable domain of TCR clone 255952 (TRAV13-1, TRAJ49)
CAAMLYTVNQFYF

SEQ ID NO: 511904 - protein, 15 aa, Homo sapiens
  CDR3 for beta chain variable domain of TCR clone 255952 (TRBV12-4, TRBJ1-5)
CASTRGSGFGQPQHF

SEQ ID NO: 511905 - protein, 11 aa, Homo sapiens
  CDR3 for alpha chain variable domain of TCR clone 255953 (TRAV12-3, TRAJ27)
CAMANAGKSTF

SEQ ID NO: 511906 - protein, 15 aa, Homo sapiens
  CDR3 for beta chain variable domain of TCR clone 255953 (TRBV7-9, TRBJ2-1)
CASSLGWGRANEQFF

SEQ ID NO: 511907 - protein, 15 aa, Homo sapiens
  CDR3 for alpha chain variable domain of TCR clone 255954 (TRAV26-1, TRAJ44)
CIVRANTGTASKLTF

SEQ ID NO: 511908 - protein, 12 aa, Homo sapiens
  CDR3 for beta chain variable domain of TCR clone 255954 (TRBV3-1, TRBJ2-1)
CASSQGSSGQFF

SEQ ID NO: 511909 - protein, 14 aa, Homo sapiens
  CDR3 for alpha chain variable domain of TCR clone 255955 (TRAV12-2, TRAJ5)
CAVNRSTGRRALTF

SEQ ID NO: 511910 - protein, 13 aa, Homo sapiens
  CDR3 for beta chain variable domain of TCR clone 255955 (TRBV11-2, TRBJ2-1)
CASSSEAYNEQFF

SEQ ID NO: 511911 - protein, 13 aa, Homo sapiens
  CDR3 for alpha chain variable domain of TCR clone 255956 (TRAV13-2, TRAJ48)
CAEMDFGNEKLTF

SEQ ID NO: 511912 - protein, 17 aa, Homo sapiens
  CDR3 for beta chain variable domain of TCR clone 255956 (TRBV10-3, TRBJ2-4)
CTSVPSVNKGSKNIQYF

SEQ ID NO: 511913 - protein, 13 aa, Homo sapiens
  CDR3 for alpha chain variable domain of TCR clone 255957 (TRAV8-3, TRAJ30)
CAVGGWRDDKIIF

SEQ ID NO: 511914 - protein, 14 aa, Homo sapiens
  CDR3 for beta chain variable domain of TCR clone 255957 (TRBV20-1, TRBJ1-1)
CSAPPADMNTKAFF

SEQ ID NO: 511915 - protein, 18 aa, Homo sapiens
  CDR3 for alpha chain variable domain of TCR clone 255958 (TRAV9-2, TRAJ52)
CALSRHNAGGTSYGKLTF

SEQ ID NO: 511916 - protein, 13 aa, Homo sapiens
  CDR3 for beta chain variable domain of TCR clone 255958 (TRBV7-9, TRBJ1-2)
CARSLKQNYGYAF

SEQ ID NO: 511917 - protein, 11 aa, Homo sapiens
  CDR3 for alpha chain variable domain of TCR clone 255959 (TRAV2, TRAJ13)
CASVGYQKGTF

SEQ ID NO: 511918 - protein, 15 aa, Homo sapiens
  CDR3 for beta chain variable domain of TCR clone 255959 (TRBV6-1, TRBJ2-2)
CASSRLRGDTGELFF

SEQ ID NO: 511919 - protein, 13 aa, Homo sapiens
  CDR3 for alpha chain variable domain of TCR clone 255960 (TRAV20, TRAJ42)
CSVQGGSQGNLIF

SEQ ID NO: 511920 - protein, 15 aa, Homo sapiens
  CDR3 for beta chain variable domain of TCR clone 255960 (TRBV10-1, TRBJ2-1)
CASSEWRGTYNEQFF

SEQ ID NO: 511921 - protein, 16 aa, Homo sapiens
  CDR3 for alpha chain variable domain of TCR clone 255961 (TRAV3, TRAJ23)
CAVKIGIYNQGGKLIF

SEQ ID NO: 511922 - protein, 17 aa, Homo sapiens
  CDR3 for beta chain variable domain of TCR clone 255961 (TRBV10-3, TRBJ2-6)
CAISESTAPSGSNVLTF

SEQ ID NO: 511923 - protein, 14 aa, Homo sapiens
  CDR3 for alpha chain variable domain of TCR clone 255962 (TRAV12-2, TRAJ17)
CAVLFKAAGNKLTF

SEQ ID NO: 511924 - protein, 14 aa, Homo sapiens
  CDR3 for beta chain variable domain of TCR clone 255962 (TRBV7-8, TRBJ2-7)
CASSPRDRVYEQYF

SEQ ID NO: 511925 - protein, 16 aa, Homo sapiens
  CDR3 for alpha chain variable domain of TCR clone 255963 (TRAV4, TRAJ18)
CCVLLIGGSTLGRLYF

SEQ ID NO: 511926 - protein, 15 aa, Homo sapiens
  CDR3 for beta chain variable domain of TCR clone 255963 (TRBV3-1, TRBJ2-1)
CASSQQPSGGNEQFF

SEQ ID NO: 511927 - protein, 18 aa, Homo sapiens
  CDR3 for alpha chain variable domain of TCR clone 255964 (TRAV21, TRAJ52)
CAVRTSPAGGTSYGKLTF

SEQ ID NO: 511928 - protein, 17 aa, Homo sapiens
  CDR3 for beta chain variable domain of TCR clone 255964 (TRBV20-1, TRBJ2-2)
CSASGSGQGGLTGELFF

SEQ ID NO: 511929 - protein, 15 aa, Homo sapiens
  CDR3 for alpha chain variable domain of TCR clone 255965 (TRAV26-1, TRAJ22)
CIVRVSFWFCKATDL

SEQ ID NO: 511930 - protein, 20 aa, Homo sapiens
  CDR3 for beta chain variable domain of TCR clone 255965 (TRBV11-2, TRBJ2-2)
LRTRPCISVPAALEAGSCFF

SEQ ID NO: 511931 - protein, 14 aa, Homo sapiens
  CDR3 for alpha chain variable domain of TCR clone 255966 (TRAV3, TRAJ21)
CAVRDKYNFNRFYF

SEQ ID NO: 511932 - protein, 14 aa, Homo sapiens
  CDR3 for beta chain variable domain of TCR clone 255966 (TRBV27, TRBJ2-3)
CASRDSPITDTQYF

SEQ ID NO: 511933 - protein, 17 aa, Homo sapiens
  CDR3 for alpha chain variable domain of TCR clone 255967 (TRAV26-1, TRAJ47)
CIVPPLLYMEYGNKLVF

SEQ ID NO: 511934 - protein, 14 aa, Homo sapiens
  CDR3 for beta chain variable domain of TCR clone 255967 (TRBV7-3, TRBJ1-5)
RASSFSGCNQPQHF

SEQ ID NO: 511935 - protein, 16 aa, Homo sapiens
  CDR3 for alpha chain variable domain of TCR clone 255968 (TRAV26-1, )
CIDIQNPDPAVYQLRD

SEQ ID NO: 511936 - protein, 19 aa, Homo sapiens
  CDR3 for beta chain variable domain of TCR clone 255968 (TRBV19, TRBJ2-5)
CASSIGRVTDFFLGETQYF

SEQ ID NO: 511937 - protein, 13 aa, Homo sapiens
  CDR3 for alpha chain variable domain of TCR clone 255969 (TRAV1-2, TRAJ9)
CAALNTGGFKTIF

SEQ ID NO: 511938 - protein, 13 aa, Homo sapiens
  CDR3 for beta chain variable domain of TCR clone 255969 (TRBV7-9, TRBJ1-2)
CASSLKQDYGYAF

SEQ ID NO: 511939 - protein, 14 aa, Homo sapiens
  CDR3 for alpha chain variable domain of TCR clone 255970 (TRAV12-2, TRAJ22)
CAVRFSGSARQLTF

SEQ ID NO: 511940 - protein, 13 aa, Homo sapiens
  CDR3 for beta chain variable domain of TCR clone 255970 (TRBV6-1, TRBJ2-1)
CASTGTGLNVQFF

SEQ ID NO: 511941 - protein, 14 aa, Homo sapiens
  CDR3 for alpha chain variable domain of TCR clone 255971 (TRAV8-2, TRAJ45)
CVVSAGGGADGLTF

SEQ ID NO: 511942 - protein, 13 aa, Homo sapiens
  CDR3 for beta chain variable domain of TCR clone 255971 (TRBV10-3, TRBJ2-7)
CASKLAVNYEQYF

SEQ ID NO: 511943 - protein, 14 aa, Homo sapiens
  CDR3 for alpha chain variable domain of TCR clone 255972 (TRAV1-2, TRAJ8)
CAVREDTGFQKLVF

SEQ ID NO: 511944 - protein, 16 aa, Homo sapiens
  CDR3 for beta chain variable domain of TCR clone 255972 (TRBV28, TRBJ1-4)
CATSPPYRGRSEKLFF

SEQ ID NO: 511945 - protein, 18 aa, Homo sapiens
  CDR3 for alpha chain variable domain of TCR clone 255973 (TRAV26-1, TRAJ23)
CIVRVGLEVWNQGGKPIF

SEQ ID NO: 511946 - protein, 13 aa, Homo sapiens
  CDR3 for beta chain variable domain of TCR clone 255973 (TRBV7-2, TRBJ2-2)
CASSLAVTGELFF

SEQ ID NO: 511947 - protein, 16 aa, Homo sapiens
  CDR3 for alpha chain variable domain of TCR clone 255974 (TRAV17, TRAJ17)
CATALQEEAAGNKLTF

SEQ ID NO: 511948 - protein, 16 aa, Homo sapiens
  CDR3 for beta chain variable domain of TCR clone 255974 (TRBV7-3, TRBJ2-2)
CASSLKRGTLSGELFF

SEQ ID NO: 511949 - protein, 14 aa, Homo sapiens
  CDR3 for alpha chain variable domain of TCR clone 255975 (TRAV1-2, TRAJ16)
CAVNRFSDGQKLLF

SEQ ID NO: 511950 - protein, 17 aa, Homo sapiens
  CDR3 for beta chain variable domain of TCR clone 255975 (TRBV20-1, TRBJ2-1)
CSASSSGLAGTYNEQFF

SEQ ID NO: 511951 - protein, 13 aa, Homo sapiens
  CDR3 for alpha chain variable domain of TCR clone 255976 (TRAV8-4, TRAJ21)
CAVSEYNFNKFSF

SEQ ID NO: 511952 - protein, 12 aa, Homo sapiens
  CDR3 for beta chain variable domain of TCR clone 255976 (TRBV7-9, TRBJ1-5)
CASSSDQAPQHF

SEQ ID NO: 511953 - protein, 14 aa, Homo sapiens
  CDR3 for alpha chain variable domain of TCR clone 255977 (TRAV29/DV5, TRAJ36)
CAARRKTGANNLFF

SEQ ID NO: 511954 - protein, 16 aa, Homo sapiens
  CDR3 for beta chain variable domain of TCR clone 255977 (TRBV5-1, TRBJ2-3)
CASSSIGAGSTDTQYF

SEQ ID NO: 511955 - protein, 12 aa, Homo sapiens
  CDR3 for alpha chain variable domain of TCR clone 255978 (TRAV8-3, TRAJ26)
CAGDNYGQNFVL

SEQ ID NO: 511956 - protein, 15 aa, Homo sapiens
  CDR3 for beta chain variable domain of TCR clone 255978 (TRBV9, TRBJ2-1)
CASRLAGSSYNEQFF

SEQ ID NO: 511957 - protein, 13 aa, Homo sapiens
  CDR3 for alpha chain variable domain of TCR clone 255979 (TRAV27, TRAJ6)
CAGGTRGSHIPTF

SEQ ID NO: 511958 - protein, 16 aa, Homo sapiens
  CDR3 for beta chain variable domain of TCR clone 255979 (TRBV7-3, TRBJ2-2)
CASSLKRGTLSGELFF

SEQ ID NO: 511959 - protein, 11 aa, Homo sapiens
  CDR3 for alpha chain variable domain of TCR clone 255980 (TRAV12-2, TRAJ36)
CAVDGANNLFC

SEQ ID NO: 511960 - protein, 13 aa, Homo sapiens
  CDR3 for beta chain variable domain of TCR clone 255980 (TRBV28, TRBJ2-5)
CAGVSRGEETQYF

SEQ ID NO: 511961 - protein, 15 aa, Homo sapiens
  CDR3 for alpha chain variable domain of TCR clone 255981 (TRAV8-3, TRAJ45)
CASSYSGGGADGLTF

SEQ ID NO: 511962 - protein, 13 aa, Homo sapiens
  CDR3 for beta chain variable domain of TCR clone 255981 (TRBV28, TRBJ2-5)
CASSSRNQETQYF

SEQ ID NO: 511963 - protein, 16 aa, Homo sapiens
  CDR3 for alpha chain variable domain of TCR clone 255982 (TRAV30, TRAJ24)
CGTEIVDADSWGKFQF

SEQ ID NO: 511964 - protein, 12 aa, Homo sapiens
  CDR3 for beta chain variable domain of TCR clone 255982 (TRBV27, TRBJ2-1)
CASRGFYNEQFF

SEQ ID NO: 511965 - protein, 13 aa, Homo sapiens
  CDR3 for alpha chain variable domain of TCR clone 255983 (TRAV13-2, TRAJ48)
CAEMDFGNENLTL

SEQ ID NO: 511966 - protein, 15 aa, Homo sapiens
  CDR3 for beta chain variable domain of TCR clone 255983 (TRBV7-9, TRBJ1-6)
CASSSPGRGNSPLHF

SEQ ID NO: 511967 - protein, 14 aa, Homo sapiens
  CDR3 for alpha chain variable domain of TCR clone 255984 (TRAV12-3, TRAJ10)
SHLPVTGGGNKLTF

SEQ ID NO: 511968 - protein, 14 aa, Homo sapiens
  CDR3 for beta chain variable domain of TCR clone 255984 (TRBV27, TRBJ2-2)
CASSLGAATGELFF

SEQ ID NO: 511969 - protein, 14 aa, Homo sapiens
  CDR3 for alpha chain variable domain of TCR clone 255985 (TRAV1-2, TRAJ16)
CAVNRFSDGQKMLF

SEQ ID NO: 511970 - protein, 11 aa, Homo sapiens
  CDR3 for beta chain variable domain of TCR clone 255985 (TRBV29-1, TRBJ2-5)
CSEDRTGTHYF

SEQ ID NO: 511971 - protein, 13 aa, Homo sapiens
  CDR3 for alpha chain variable domain of TCR clone 255986 (TRAV2, TRAJ15)
CAVASQAGTALIF

SEQ ID NO: 511972 - protein, 16 aa, Homo sapiens
  CDR3 for beta chain variable domain of TCR clone 255986 (TRBV5-1, TRBJ1-1)
CATSSGGNSLNTEAFF

SEQ ID NO: 511973 - protein, 14 aa, Homo sapiens
  CDR3 for alpha chain variable domain of TCR clone 255987 (TRAV8-4, TRAJ8)
CAVSLNIGFQKLVF

SEQ ID NO: 511974 - protein, 13 aa, Homo sapiens
  CDR3 for beta chain variable domain of TCR clone 255987 (TRBV7-9, TRBJ2-3)
CASSPGSTDTQYF

SEQ ID NO: 511975 - protein, 14 aa, Homo sapiens
  CDR3 for alpha chain variable domain of TCR clone 255988 (TRAV1-2, TRAJ8)
CAVREDTGFQKLVF

SEQ ID NO: 511976 - protein, 15 aa, Homo sapiens
  CDR3 for beta chain variable domain of TCR clone 255988 (TRBV6-3, TRBJ2-7)
CASSCPGTVCYEQYF

SEQ ID NO: 511977 - protein, 14 aa, Homo sapiens
  CDR3 for alpha chain variable domain of TCR clone 255989 (TRAV17, TRAJ22)
CATSTSGSARQLTF

SEQ ID NO: 511978 - protein, 13 aa, Homo sapiens
  CDR3 for beta chain variable domain of TCR clone 255989 (TRBV12-4, TRBJ1-2)
CASSLRQGKGYAF

SEQ ID NO: 511979 - protein, 13 aa, Homo sapiens
  CDR3 for alpha chain variable domain of TCR clone 255990 (TRAV1-1, TRAJ9)
CAAKNTGGFKTIF

SEQ ID NO: 511980 - protein, 17 aa, Homo sapiens
  CDR3 for beta chain variable domain of TCR clone 255990 (TRBV7-3, TRBJ2-3)
RASSLMKRMRGADTQYF

SEQ ID NO: 511981 - protein, 14 aa, Homo sapiens
  CDR3 for alpha chain variable domain of TCR clone 255991 (TRAV1-2, TRAJ16)
CAVNRFSDGQKLLF

SEQ ID NO: 511982 - protein, 14 aa, Homo sapiens
  CDR3 for beta chain variable domain of TCR clone 255991 (TRBV3-1, TRBJ2-7)
CASSQDRTSYEQYF

SEQ ID NO: 511983 - protein, 13 aa, Homo sapiens
  CDR3 for alpha chain variable domain of TCR clone 255992 (TRAV12-1, TRAJ13)
CVVNLGGYQKVTF

SEQ ID NO: 511984 - protein, 15 aa, Homo sapiens
  CDR3 for beta chain variable domain of TCR clone 255992 (TRBV6-3, TRBJ2-7)
CASSSPGTVFYEQYF

SEQ ID NO: 511985 - protein, 13 aa, Homo sapiens
  CDR3 for alpha chain variable domain of TCR clone 255993 (TRAV3, TRAJ21)
CAVREPDFNQFYF

SEQ ID NO: 511986 - protein, 13 aa, Homo sapiens
  CDR3 for beta chain variable domain of TCR clone 255993 (TRBV9, TRBJ2-1)
CASSPSGGNEQFF

SEQ ID NO: 511987 - protein, 16 aa, Homo sapiens
  CDR3 for alpha chain variable domain of TCR clone 255994 (TRAV30, TRAJ24)
CGTEIVDADSWGKFQF

SEQ ID NO: 511988 - protein, 14 aa, Homo sapiens
  CDR3 for beta chain variable domain of TCR clone 255994 (TRBV12-5, TRBJ2-5)
CASGSRTRHETQYF

SEQ ID NO: 511989 - protein, 19 aa, Homo sapiens
  CDR3 for alpha chain variable domain of TCR clone 255995 (TRAV1-2, TRAJ26)
CLLPLCCERPDSYGQNFVF

SEQ ID NO: 511990 - protein, 17 aa, Homo sapiens
  CDR3 for beta chain variable domain of TCR clone 255995 (TRBV13, TRBJ2-3)
CASSLSRVAGGRNTQYF

SEQ ID NO: 511991 - protein, 15 aa, Homo sapiens
  CDR3 for alpha chain variable domain of TCR clone 255996 (TRAV3, TRAJ15)
CAVRPAYQAGTALIF

SEQ ID NO: 511992 - protein, 14 aa, Homo sapiens
  CDR3 for beta chain variable domain of TCR clone 255996 (TRBV4-1, TRBJ2-2)
CASSQAVNTGELFF

SEQ ID NO: 511993 - protein, 15 aa, Homo sapiens
  CDR3 for alpha chain variable domain of TCR clone 255997 (TRAV8-3, TRAJ10)
CAVGLLTGGGNNLTF

SEQ ID NO: 511994 - protein, 16 aa, Homo sapiens
  CDR3 for beta chain variable domain of TCR clone 255997 (TRBV4-3, TRBJ2-1)
CASSPALDRGVNEQFF

SEQ ID NO: 511995 - protein, 11 aa, Homo sapiens
  CDR3 for alpha chain variable domain of TCR clone 255998 (TRAV12-1, TRAJ15)
CVVNAGTALIF

SEQ ID NO: 511996 - protein, 16 aa, Homo sapiens
  CDR3 for beta chain variable domain of TCR clone 255998 (TRBV28, TRBJ2-1)
CASSSRVRDSYNEQFS

SEQ ID NO: 511997 - protein, 15 aa, Homo sapiens
  CDR3 for alpha chain variable domain of TCR clone 255999 (TRAV38-1, TRAJ37)
CAFIFGSGNTGKLIF

SEQ ID NO: 511998 - protein, 11 aa, Homo sapiens
  CDR3 for beta chain variable domain of TCR clone 255999 (TRBV12-4, TRBJ2-3)
WASTATDTQYF

SEQ ID NO: 511999 - protein, 16 aa, Homo sapiens
  CDR3 for alpha chain variable domain of TCR clone 256000 (TRAV8-3, TRAJ8)
CAVPRDGNTGFQKLVF

SEQ ID NO: 512000 - protein, 13 aa, Homo sapiens
  CDR3 for beta chain variable domain of TCR clone 256000 (TRBV12-4, TRBJ1-2)
CASSLRQGKGYTF

SEQ ID NO: 512001 - protein, 16 aa, Homo sapiens
  CDR3 for alpha chain variable domain of TCR clone 256001 (TRAV1-2, TRAJ10)
CAVRGVLTGGGNKRTF

SEQ ID NO: 512002 - protein, 16 aa, Homo sapiens
  CDR3 for beta chain variable domain of TCR clone 256001 (TRBV12-5, TRBJ2-5)
CASGPRTSGNQETQYF

SEQ ID NO: 512003 - protein, 16 aa, Homo sapiens
  CDR3 for alpha chain variable domain of TCR clone 256002 (TRAV12-3, TRAJ53)
CAMSPGSGGSNSKLTF

SEQ ID NO: 512004 - protein, 13 aa, Homo sapiens
  CDR3 for beta chain variable domain of TCR clone 256002 (TRBV10-3, TRBJ2-7)
CASKLAVNYEQYF

SEQ ID NO: 512005 - protein, 12 aa, Homo sapiens
  CDR3 for alpha chain variable domain of TCR clone 256003 (TRAV12-2, TRAJ20)
CAERPSDYKLSF

SEQ ID NO: 512006 - protein, 14 aa, Homo sapiens
  CDR3 for beta chain variable domain of TCR clone 256003 (TRBV6-1, TRBJ2-7)
CASNRARPDYEQYF

SEQ ID NO: 512007 - protein, 15 aa, Homo sapiens
  CDR3 for alpha chain variable domain of TCR clone 256004 (TRAV17, TRAJ28)
CATVDSGAGSYQLTF

SEQ ID NO: 512008 - protein, 13 aa, Homo sapiens
  CDR3 for beta chain variable domain of TCR clone 256004 (TRBV5-4, TRBJ2-5)
CASSRQEGETHYF

SEQ ID NO: 512009 - protein, 15 aa, Homo sapiens
  CDR3 for alpha chain variable domain of TCR clone 256005 (TRAV14/DV4, TRAJ33)
CAMKEGRDSNYQLIW

SEQ ID NO: 512010 - protein, 16 aa, Homo sapiens
  CDR3 for beta chain variable domain of TCR clone 256005 (TRBV12-5, TRBJ2-5)
CASGPRTSGNQETQYF

SEQ ID NO: 512011 - protein, 13 aa, Homo sapiens
  CDR3 for alpha chain variable domain of TCR clone 256006 (TRAV17, TRAJ5)
CALRGTGRRALTF

SEQ ID NO: 512012 - protein, 12 aa, Homo sapiens
  CDR3 for beta chain variable domain of TCR clone 256006 (TRBV24-1, TRBJ1-1)
CATLYPDTEAFF

SEQ ID NO: 512013 - protein, 14 aa, Homo sapiens
  CDR3 for alpha chain variable domain of TCR clone 256007 (TRAV3, TRAJ8)
CAVSLNTGFQKLVF

SEQ ID NO: 512014 - protein, 12 aa, Homo sapiens
  CDR3 for beta chain variable domain of TCR clone 256007 (TRBV7-9, TRBJ1-6)
CASSLMTSPLHF

SEQ ID NO: 512015 - protein, 17 aa, Homo sapiens
  CDR3 for alpha chain variable domain of TCR clone 256008 (TRAV3, TRAJ6)
CAVRDGPRVGGSYIPTF

SEQ ID NO: 512016 - protein, 12 aa, Homo sapiens
  CDR3 for beta chain variable domain of TCR clone 256008 (TRBV11-2, TRBJ2-2)
CASSPGGGELFF

SEQ ID NO: 512017 - protein, 13 aa, Homo sapiens
  CDR3 for alpha chain variable domain of TCR clone 256009 (TRAV8-6, TRAJ27)
CAVSNTNAGKSTF

SEQ ID NO: 512018 - protein, 12 aa, Homo sapiens
  CDR3 for beta chain variable domain of TCR clone 256009 (TRBV11-2, TRBJ2-2)
CASSLGGGELFF

SEQ ID NO: 512019 - protein, 12 aa, Homo sapiens
  CDR3 for alpha chain variable domain of TCR clone 256010 (TRAV12-2, TRAJ10)
CGVTGGGNKLTF

SEQ ID NO: 512020 - protein, 15 aa, Homo sapiens
  CDR3 for beta chain variable domain of TCR clone 256010 (TRBV10-2, TRBJ2-6)
CASSEQGTGANVLSF

SEQ ID NO: 512021 - protein, 14 aa, Homo sapiens
  CDR3 for alpha chain variable domain of TCR clone 256011 (TRAV8-3, TRAJ4)
CAVRAAGGYNKLIF

SEQ ID NO: 512022 - protein, 14 aa, Homo sapiens
  CDR3 for beta chain variable domain of TCR clone 256011 (TRBV12-5, TRBJ2-5)
CASCSRTHQETQYF

SEQ ID NO: 512023 - protein, 13 aa, Homo sapiens
  CDR3 for alpha chain variable domain of TCR clone 256012 (TRAV16, TRAJ58)
CALSIPSGSRLTF

SEQ ID NO: 512024 - protein, 15 aa, Homo sapiens
  CDR3 for beta chain variable domain of TCR clone 256012 (TRBV11-2, TRBJ2-2)
CASSSDRVNAGELFF

SEQ ID NO: 512025 - protein, 16 aa, Homo sapiens
  CDR3 for alpha chain variable domain of TCR clone 256013 (TRAV30, TRAJ24)
CGTEIVDADSWGKFQS

SEQ ID NO: 512026 - protein, 14 aa, Homo sapiens
  CDR3 for beta chain variable domain of TCR clone 256013 (TRBV12-5, TRBJ2-5)
CGSGSRTHQETQYF

SEQ ID NO: 512027 - protein, 15 aa, Homo sapiens
  CDR3 for alpha chain variable domain of TCR clone 256014 (TRAV23/DV6, TRAJ18)
CAARYRGSTLGRRSF

SEQ ID NO: 512028 - protein, 13 aa, Homo sapiens
  CDR3 for beta chain variable domain of TCR clone 256014 (TRBV7-2, TRBJ2-7)
CASSSPSGSEQYF

SEQ ID NO: 512029 - protein, 15 aa, Homo sapiens
  CDR3 for alpha chain variable domain of TCR clone 256015 (TRAV25, TRAJ10)
CAGPLLTGGGNKLTF

SEQ ID NO: 512030 - protein, 13 aa, Homo sapiens
  CDR3 for beta chain variable domain of TCR clone 256015 (TRBV7-3, TRBJ2-5)
CASSFRGGETQYF

SEQ ID NO: 512031 - protein, 14 aa, Homo sapiens
  CDR3 for alpha chain variable domain of TCR clone 256016 (TRAV29/DV5, TRAJ32)
CAAANGGATNKLIF

SEQ ID NO: 512032 - protein, 14 aa, Homo sapiens
  CDR3 for beta chain variable domain of TCR clone 256016 (TRBV20-1, TRBJ1-1)
CSAQTRIGGTEAFF

SEQ ID NO: 512033 - protein, 15 aa, Homo sapiens
  CDR3 for alpha chain variable domain of TCR clone 256017 (TRAV21, TRAJ53)
CATLNSGGSNDKLTF

SEQ ID NO: 512034 - protein, 16 aa, Homo sapiens
  CDR3 for beta chain variable domain of TCR clone 256017 (TRBV9, TRBJ2-1)
CASSVGGGGNYNEQFF

SEQ ID NO: 512035 - protein, 13 aa, Homo sapiens
  CDR3 for alpha chain variable domain of TCR clone 256018 (TRAV1-2, TRAJ9)
CAALNTGGFKTIF

SEQ ID NO: 512036 - protein, 15 aa, Homo sapiens
  CDR3 for beta chain variable domain of TCR clone 256018 (TRBV20-1, TRBJ2-4)
CSARDLTGGPNIQYF

SEQ ID NO: 512037 - protein, 14 aa, Homo sapiens
  CDR3 for alpha chain variable domain of TCR clone 256019 (TRAV1-2, TRAJ29)
CAVRELTSATPLVF

SEQ ID NO: 512038 - protein, 13 aa, Homo sapiens
  CDR3 for beta chain variable domain of TCR clone 256019 (TRBV19, TRBJ1-2)
CASSVPGQDGYTF

SEQ ID NO: 512039 - protein, 15 aa, Homo sapiens
  CDR3 for alpha chain variable domain of TCR clone 256020 (TRAV3, TRAJ22)
CDVRDRGGSARQLTF

SEQ ID NO: 512040 - protein, 20 aa, Homo sapiens
  CDR3 for beta chain variable domain of TCR clone 256020 (TRBV11-2, TRBJ1-6)
CASSLVFATGGSVHPSTLGT

SEQ ID NO: 512041 - protein, 13 aa, Homo sapiens
  CDR3 for alpha chain variable domain of TCR clone 256021 (TRAV17, TRAJ9)
CATDYTGGFKTIF

SEQ ID NO: 512042 - protein, 17 aa, Homo sapiens
  CDR3 for beta chain variable domain of TCR clone 256021 (TRBV5-1, TRBJ2-5)
CASSLLGLAANQETQYF

SEQ ID NO: 512043 - protein, 13 aa, Homo sapiens
  CDR3 for alpha chain variable domain of TCR clone 256022 (TRAV1-2, TRAJ24)
CAVRADSWGKFQF

SEQ ID NO: 512044 - protein, 14 aa, Homo sapiens
  CDR3 for beta chain variable domain of TCR clone 256022 (TRBV19, TRBJ2-1)
CASPTFVLSGEQFS

SEQ ID NO: 512045 - protein, 13 aa, Homo sapiens
  CDR3 for alpha chain variable domain of TCR clone 256023 (TRAV13-1, TRAJ43)
CAASKNNNNDMRF

SEQ ID NO: 512046 - protein, 14 aa, Homo sapiens
  CDR3 for beta chain variable domain of TCR clone 256023 (TRBV19, TRBJ2-1)
CASPTFVLSGEQFF

SEQ ID NO: 512047 - protein, 14 aa, Homo sapiens
  CDR3 for alpha chain variable domain of TCR clone 256024 (TRAV1-2, TRAJ16)
CAVNRFSDGPKLLF

SEQ ID NO: 512048 - protein, 13 aa, Homo sapiens
  CDR3 for beta chain variable domain of TCR clone 256024 (TRBV10-2, TRBJ2-7)
CASSESGVYEQYF

SEQ ID NO: 512049 - protein, 12 aa, Homo sapiens
  CDR3 for alpha chain variable domain of TCR clone 256025 (TRAV12-3, TRAJ34)
CAMGYNTDKLIF

SEQ ID NO: 512050 - protein, 14 aa, Homo sapiens
  CDR3 for beta chain variable domain of TCR clone 256025 (TRBV4-1, TRBJ2-2)
CASSQAVNTGELCF

SEQ ID NO: 512051 - protein, 14 aa, Homo sapiens
  CDR3 for alpha chain variable domain of TCR clone 256026 (TRAV2, TRAJ37)
CAVDFTSNTGKLIF

SEQ ID NO: 512052 - protein, 15 aa, Homo sapiens
  CDR3 for beta chain variable domain of TCR clone 256026 (TRBV5-5, TRBJ2-2)
CASSRQASGAGELFF

SEQ ID NO: 512053 - protein, 14 aa, Homo sapiens
  CDR3 for alpha chain variable domain of TCR clone 256027 (TRAV1-2, TRAJ8)
CAVREDTGFQKLVF

SEQ ID NO: 512054 - protein, 15 aa, Homo sapiens
  CDR3 for beta chain variable domain of TCR clone 256027 (TRBV6-1, TRBJ2-7)
CASSEAVAGVAEQYF

SEQ ID NO: 512055 - protein, 14 aa, Homo sapiens
  CDR3 for alpha chain variable domain of TCR clone 256028 (TRAV8-2, TRAJ6)
CVVISAGGSYIHTF

SEQ ID NO: 512056 - protein, 16 aa, Homo sapiens
  CDR3 for beta chain variable domain of TCR clone 256028 (TRBV7-6, TRBJ2-6)
CASSLPGLSGANVLTF

SEQ ID NO: 512057 - protein, 16 aa, Homo sapiens
  CDR3 for alpha chain variable domain of TCR clone 256029 (TRAV12-1, TRAJ43)
CVVNPHRFGAGTRLTV

SEQ ID NO: 512058 - protein, 13 aa, Homo sapiens
  CDR3 for beta chain variable domain of TCR clone 256029 (TRBV10-2, TRBJ2-7)
CASGASGGYEQYC

SEQ ID NO: 512059 - protein, 13 aa, Homo sapiens
  CDR3 for alpha chain variable domain of TCR clone 256030 (TRAV3, TRAJ30)
CAVRDRGDDKIIF

SEQ ID NO: 512060 - protein, 14 aa, Homo sapiens
  CDR3 for beta chain variable domain of TCR clone 256030 (TRBV5-1, TRBJ1-1)
CASSRTTGDTESFF

SEQ ID NO: 512061 - protein, 15 aa, Homo sapiens
  CDR3 for alpha chain variable domain of TCR clone 256031 (TRAV17, TRAJ56)
CATDANTGANSKLTS

SEQ ID NO: 512062 - protein, 14 aa, Homo sapiens
  CDR3 for beta chain variable domain of TCR clone 256031 (TRBV19, TRBJ1-5)
CASSLGTGGQPQHF

SEQ ID NO: 512063 - protein, 13 aa, Homo sapiens
  CDR3 for alpha chain variable domain of TCR clone 256032 (TRAV2, TRAJ40)
CAVVTSGTYKYIF

SEQ ID NO: 512064 - protein, 15 aa, Homo sapiens
  CDR3 for beta chain variable domain of TCR clone 256032 (TRBV28, TRBJ2-1)
CASSLSGGGDNEQFF

SEQ ID NO: 512065 - protein, 13 aa, Homo sapiens
  CDR3 for alpha chain variable domain of TCR clone 256033 (TRAV17, TRAJ39)
CATVSNAGNMLTF

SEQ ID NO: 512066 - protein, 16 aa, Homo sapiens
  CDR3 for beta chain variable domain of TCR clone 256033 (TRBV28, TRBJ2-1)
CASSSPEYPRDNEQFF

SEQ ID NO: 512067 - protein, 16 aa, Homo sapiens
  CDR3 for alpha chain variable domain of TCR clone 256034 (TRAV3, TRAJ37)
CAVRGKGSGKTGKLIF

SEQ ID NO: 512068 - protein, 21 aa, Homo sapiens
  CDR3 for beta chain variable domain of TCR clone 256034 (TRBV15, TRBJ2-1)
AWGTQPCTCVPPAEVDTARFF

SEQ ID NO: 512069 - protein, 15 aa, Homo sapiens
  CDR3 for alpha chain variable domain of TCR clone 256035 (TRAV14/DV4, TRAJ47)
CAMREAMEYGNKLVF

SEQ ID NO: 512070 - protein, 13 aa, Homo sapiens
  CDR3 for beta chain variable domain of TCR clone 256035 (TRBV10-3, TRBJ2-7)
CASKLAVNYEQYF

SEQ ID NO: 512071 - protein, 16 aa, Homo sapiens
  CDR3 for alpha chain variable domain of TCR clone 256036 (TRAV3, TRAJ10)
CAVRDMRAGGGNKLTF

SEQ ID NO: 512072 - protein, 14 aa, Homo sapiens
  CDR3 for beta chain variable domain of TCR clone 256036 (TRBV20-1, TRBJ2-3)
CSATPVGPTDTQYF

SEQ ID NO: 512073 - protein, 11 aa, Homo sapiens
  CDR3 for alpha chain variable domain of TCR clone 256037 (TRAV29/DV5, TRAJ49)
CPAVPGNQFYF

SEQ ID NO: 512074 - protein, 17 aa, Homo sapiens
  CDR3 for beta chain variable domain of TCR clone 256037 (TRBV4-2, TRBJ1-1)
CASTQFGGGSGNTEAFF

SEQ ID NO: 512075 - protein, 17 aa, Homo sapiens
  CDR3 for alpha chain variable domain of TCR clone 256038 (TRAV3, TRAJ12)
CAVRDGGRMDSSYKLIF

SEQ ID NO: 512076 - protein, 15 aa, Homo sapiens
  CDR3 for beta chain variable domain of TCR clone 256038 (TRBV29-1, TRBJ2-7)
CSVEFFDRGSYEQYF

SEQ ID NO: 512077 - protein, 14 aa, Homo sapiens
  CDR3 for alpha chain variable domain of TCR clone 256039 (TRAV27, TRAJ23)
CAGLSYNQGGKLIF

SEQ ID NO: 512078 - protein, 14 aa, Homo sapiens
  CDR3 for beta chain variable domain of TCR clone 256039 (TRBV19, TRBJ2-2)
CSSLNRGVTGELFF

SEQ ID NO: 512079 - protein, 12 aa, Homo sapiens
  CDR3 for alpha chain variable domain of TCR clone 256040 (TRAV1-1, TRAJ24)
CAVRGSWGKFQF

SEQ ID NO: 512080 - protein, 18 aa, Homo sapiens
  CDR3 for beta chain variable domain of TCR clone 256040 (TRBV7-2, TRBJ2-3)
CASSLKREGSGITDTQYF

SEQ ID NO: 512081 - protein, 14 aa, Homo sapiens
  CDR3 for alpha chain variable domain of TCR clone 256041 (TRAV13-1, TRAJ20)
CAARPGSNDYKLSF

SEQ ID NO: 512082 - protein, 14 aa, Homo sapiens
  CDR3 for beta chain variable domain of TCR clone 256041 (TRBV7-2, TRBJ2-7)
CASSLPPGQGPQYF

SEQ ID NO: 512083 - protein, 12 aa, Homo sapiens
  CDR3 for alpha chain variable domain of TCR clone 256042 (TRAV12-1, TRAJ9)
CVVHTGGFKTIF

SEQ ID NO: 512084 - protein, 14 aa, Homo sapiens
  CDR3 for beta chain variable domain of TCR clone 256042 (TRBV12-4, TRBJ1-1)
CASSLGTGGTEAFF

SEQ ID NO: 512085 - protein, 14 aa, Homo sapiens
  CDR3 for alpha chain variable domain of TCR clone 256043 (TRAV12-2, TRAJ13)
CAVKKTGGDQKVTF

SEQ ID NO: 512086 - protein, 15 aa, Homo sapiens
  CDR3 for beta chain variable domain of TCR clone 256043 (TRBV20-1, TRBJ1-1)
CSASWDRSLNTEAFF

SEQ ID NO: 512087 - protein, 13 aa, Homo sapiens
  CDR3 for alpha chain variable domain of TCR clone 256044 (TRAV13-1, TRAJ21)
CAASIYNFNKFYF

SEQ ID NO: 512088 - protein, 15 aa, Homo sapiens
  CDR3 for beta chain variable domain of TCR clone 256044 (TRBV4-1, TRBJ2-7)
CASSQNTGRLYEQYF

SEQ ID NO: 512089 - protein, 15 aa, Homo sapiens
  CDR3 for alpha chain variable domain of TCR clone 256045 (TRAV17, TRAJ23)
CATDAEDNQVGKLSF

SEQ ID NO: 512090 - protein, 12 aa, Homo sapiens
  CDR3 for beta chain variable domain of TCR clone 256045 (TRBV2, TRBJ2-1)
CAKREGYNEQFF

SEQ ID NO: 512091 - protein, 18 aa, Homo sapiens
  CDR3 for alpha chain variable domain of TCR clone 256046 (TRAV8-6, TRAJ52)
CAVSRANAGGTSYGKLTF

SEQ ID NO: 512092 - protein, 17 aa, Homo sapiens
  CDR3 for beta chain variable domain of TCR clone 256046 (TRBV19, TRBJ2-6)
CASSTGQVFSGANVLTF

SEQ ID NO: 512093 - protein, 14 aa, Homo sapiens
  CDR3 for alpha chain variable domain of TCR clone 256047 (TRAV13-1, TRAJ39)
CAASYNNADNMLTF

SEQ ID NO: 512094 - protein, 13 aa, Homo sapiens
  CDR3 for beta chain variable domain of TCR clone 256047 (TRBV24-1, TRBJ1-4)
CATNNGRSEKLFF

SEQ ID NO: 512095 - protein, 15 aa, Homo sapiens
  CDR3 for alpha chain variable domain of TCR clone 256048 (TRAV3, TRAJ22)
CAVRDRGGSARQLAF

SEQ ID NO: 512096 - protein, 14 aa, Homo sapiens
  CDR3 for beta chain variable domain of TCR clone 256048 (TRBV11-2, TRBJ2-7)
CASSLGAGAYEQYF

SEQ ID NO: 512097 - protein, 15 aa, Homo sapiens
  CDR3 for alpha chain variable domain of TCR clone 256049 (TRAV8-2, TRAJ40)
CVVLGTTSGTYTSIF

SEQ ID NO: 512098 - protein, 16 aa, Homo sapiens
  CDR3 for beta chain variable domain of TCR clone 256049 (TRBV7-3, TRBJ2-1)
CASSLEGYRSYNEQFF

SEQ ID NO: 512099 - protein, 21 aa, Homo sapiens
  CDR3 for alpha chain variable domain of TCR clone 256050 (TRAV26-1, TRAJ17)
CCVLLHRQSSGSKAAGNKLTF

SEQ ID NO: 512100 - protein, 14 aa, Homo sapiens
  CDR3 for beta chain variable domain of TCR clone 256050 (TRBV28, TRBJ1-2)
CASRIQGANYGYTC

SEQ ID NO: 512101 - protein, 12 aa, Homo sapiens
  CDR3 for alpha chain variable domain of TCR clone 256051 (TRAV8-3, TRAJ20)
CAVGGGDYKLSF

SEQ ID NO: 512102 - protein, 16 aa, Homo sapiens
  CDR3 for beta chain variable domain of TCR clone 256051 (TRBV12-5, TRBJ2-5)
CASGPRTSGNQETQYF

SEQ ID NO: 512103 - protein, 14 aa, Homo sapiens
  CDR3 for alpha chain variable domain of TCR clone 256052 (TRAV2, TRAJ9)
CAVEDRSGGFKTIF

SEQ ID NO: 512104 - protein, 14 aa, Homo sapiens
  CDR3 for beta chain variable domain of TCR clone 256052 (TRBV19, TRBJ1-6)
CASSSGTGYSPLHF

SEQ ID NO: 512105 - protein, 13 aa, Homo sapiens
  CDR3 for alpha chain variable domain of TCR clone 256053 (TRAV12-2, TRAJ22)
GAVKWGSARQLTF

SEQ ID NO: 512106 - protein, 14 aa, Homo sapiens
  CDR3 for beta chain variable domain of TCR clone 256053 (TRBV11-3, TRBJ2-2)
CASSRDTSTGELFF

SEQ ID NO: 512107 - protein, 14 aa, Homo sapiens
  CDR3 for alpha chain variable domain of TCR clone 256054 (TRAV21, TRAJ35)
CAVMPIGFGNVLHW

SEQ ID NO: 512108 - protein, 15 aa, Homo sapiens
  CDR3 for beta chain variable domain of TCR clone 256054 (TRBV7-9, TRBJ2-1)
CASTHGTGIYNEQFF

SEQ ID NO: 512109 - protein, 14 aa, Homo sapiens
  CDR3 for alpha chain variable domain of TCR clone 256055 (TRAV1-2, TRAJ8)
CAVREDTGFQKLVF

SEQ ID NO: 512110 - protein, 15 aa, Homo sapiens
  CDR3 for beta chain variable domain of TCR clone 256055 (TRBV9, TRBJ1-4)
CASSVLGSGVEKLFF

SEQ ID NO: 512111 - protein, 13 aa, Homo sapiens
  CDR3 for alpha chain variable domain of TCR clone 256056 (TRAV2, TRAJ15)
CAVASQAGTALIF

SEQ ID NO: 512112 - protein, 16 aa, Homo sapiens
  CDR3 for beta chain variable domain of TCR clone 256056 (TRBV20-1, TRBJ1-4)
CSAPGQGLLTNEKLFV

SEQ ID NO: 512113 - protein, 16 aa, Homo sapiens
  CDR3 for alpha chain variable domain of TCR clone 256057 (TRAV3, TRAJ10)
CAVRDMRAGGGNKLTF

SEQ ID NO: 512114 - protein, 15 aa, Homo sapiens
  CDR3 for beta chain variable domain of TCR clone 256057 (TRBV3-1, TRBJ1-2)
CASSHTGQGGYGYTF

SEQ ID NO: 512115 - protein, 13 aa, Homo sapiens
  CDR3 for alpha chain variable domain of TCR clone 256058 (TRAV39, TRAJ49)
CAVDRNTGNRFYF

SEQ ID NO: 512116 - protein, 14 aa, Homo sapiens
  CDR3 for beta chain variable domain of TCR clone 256058 (TRBV4-1, TRBJ1-1)
CASSRSGQSFEAFF

SEQ ID NO: 512117 - protein, 14 aa, Homo sapiens
  CDR3 for alpha chain variable domain of TCR clone 256059 (TRAV26-1, TRAJ38)
CIADNAGNNRKLIW

SEQ ID NO: 512118 - protein, 16 aa, Homo sapiens
  CDR3 for beta chain variable domain of TCR clone 256059 (TRBV19, TRBJ2-1)
CASSKAGPSSYNEQSF

SEQ ID NO: 512119 - protein, 11 aa, Homo sapiens
  CDR3 for alpha chain variable domain of TCR clone 256060 (TRAV17, TRAJ31)
CATSNNARLMF

SEQ ID NO: 512120 - protein, 15 aa, Homo sapiens
  CDR3 for beta chain variable domain of TCR clone 256060 (TRBV4-3, TRBJ1-1)
CASSQELGRGTEAFF

SEQ ID NO: 512121 - protein, 13 aa, Homo sapiens
  CDR3 for alpha chain variable domain of TCR clone 256061 (TRAV12-3, TRAJ13)
CAMTSGGYQKVTF

SEQ ID NO: 512122 - protein, 13 aa, Homo sapiens
  CDR3 for beta chain variable domain of TCR clone 256061 (TRBV5-1, TRBJ2-1)
CASSLGSYNEQFF

SEQ ID NO: 512123 - protein, 15 aa, Homo sapiens
  CDR3 for alpha chain variable domain of TCR clone 256062 (TRAV8-4, TRAJ37)
CAVSRGSGNTGKLIF

SEQ ID NO: 512124 - protein, 11 aa, Homo sapiens
  CDR3 for beta chain variable domain of TCR clone 256062 (TRBV29-1, TRBJ2-5)
CSEDRTGTQYF

SEQ ID NO: 512125 - protein, 13 aa, Homo sapiens
  CDR3 for alpha chain variable domain of TCR clone 256063 (TRAV41, TRAJ44)
CAVLSGTASKLTF

SEQ ID NO: 512126 - protein, 13 aa, Homo sapiens
  CDR3 for beta chain variable domain of TCR clone 256063 (TRBV10-2, TRBJ2-7)
CASGASGGYEQYF

SEQ ID NO: 512127 - protein, 15 aa, Homo sapiens
  CDR3 for alpha chain variable domain of TCR clone 256064 (TRAV8-3, TRAJ45)
CASSYSGGGADGLTF

SEQ ID NO: 512128 - protein, 15 aa, Homo sapiens
  CDR3 for beta chain variable domain of TCR clone 256064 (TRBV7-2, TRBJ2-7)
CASSLKGALTYEQYF

SEQ ID NO: 512129 - protein, 16 aa, Homo sapiens
  CDR3 for alpha chain variable domain of TCR clone 256065 (TRAV21, TRAJ17)
CAVRPGEEAAGNKLTF

SEQ ID NO: 512130 - protein, 16 aa, Homo sapiens
  CDR3 for beta chain variable domain of TCR clone 256065 (TRBV2, TRBJ2-7)
CASSEPWTGASYEQYF

SEQ ID NO: 512131 - protein, 14 aa, Homo sapiens
  CDR3 for alpha chain variable domain of TCR clone 256066 (TRAV12-2, TRAJ17)
CAVLFEAAGNTLTF

SEQ ID NO: 512132 - protein, 17 aa, Homo sapiens
  CDR3 for beta chain variable domain of TCR clone 256066 (TRBV20-1, TRBJ2-2)
CSASGSGQGGLTGELFF

SEQ ID NO: 512133 - protein, 16 aa, Homo sapiens
  CDR3 for alpha chain variable domain of TCR clone 256067 (TRAV26-1, TRAJ37)
CIYASHGSSNTGKLIF

SEQ ID NO: 512134 - protein, 16 aa, Homo sapiens
  CDR3 for beta chain variable domain of TCR clone 256067 (TRBV19, TRBJ2-4)
CATGGLAGGTKNIQYF

SEQ ID NO: 512135 - protein, 15 aa, Homo sapiens
  CDR3 for alpha chain variable domain of TCR clone 256068 (TRAV4, TRAJ36)
CLVGDRPTGANNLFF

SEQ ID NO: 512136 - protein, 15 aa, Homo sapiens
  CDR3 for beta chain variable domain of TCR clone 256068 (TRBV7-6, TRBJ2-1)
CASSSLAGEGNEQFF

SEQ ID NO: 512137 - protein, 12 aa, Homo sapiens
  CDR3 for alpha chain variable domain of TCR clone 256069 (TRAV8-6, TRAJ8)
CAGTPGFQKLVF

SEQ ID NO: 512138 - protein, 16 aa, Homo sapiens
  CDR3 for beta chain variable domain of TCR clone 256069 (TRBV7-3, TRBJ2-2)
CASSLKRGTLSGELFF

SEQ ID NO: 512139 - protein, 12 aa, Homo sapiens
  CDR3 for alpha chain variable domain of TCR clone 256070 (TRAV10, TRAJ43)
CVVVRVGNNMRF

SEQ ID NO: 512140 - protein, 15 aa, Homo sapiens
  CDR3 for beta chain variable domain of TCR clone 256070 (TRBV2, TRBJ2-7)
CASSEGLARSYEQYF

SEQ ID NO: 512141 - protein, 17 aa, Homo sapiens
  CDR3 for alpha chain variable domain of TCR clone 256071 (TRAV3, TRAJ12)
CAVRAGGRMDSSYKLIF

SEQ ID NO: 512142 - protein, 13 aa, Homo sapiens
  CDR3 for beta chain variable domain of TCR clone 256071 (TRBV15, TRBJ1-6)
CATSGGLNSPLHF

SEQ ID NO: 512143 - protein, 14 aa, Homo sapiens
  CDR3 for alpha chain variable domain of TCR clone 256072 (TRAV26-1, TRAJ34)
CIVRVAYNTDKLIF

SEQ ID NO: 512144 - protein, 16 aa, Homo sapiens
  CDR3 for beta chain variable domain of TCR clone 256072 (TRBV7-2, TRBJ2-5)
CASSPGGARRGETQYF

SEQ ID NO: 512145 - protein, 13 aa, Homo sapiens
  CDR3 for alpha chain variable domain of TCR clone 256073 (TRAV12-2, TRAJ49)
CAVNMRTGNQFYF

SEQ ID NO: 512146 - protein, 13 aa, Homo sapiens
  CDR3 for beta chain variable domain of TCR clone 256073 (TRBV5-7, TRBJ2-6)
CASTSSGANVLTF

SEQ ID NO: 512147 - protein, 13 aa, Homo sapiens
  CDR3 for alpha chain variable domain of TCR clone 256074 (TRAV20, TRAJ48)
CAVQGVGNEKLTF

SEQ ID NO: 512148 - protein, 10 aa, Homo sapiens
  CDR3 for beta chain variable domain of TCR clone 256074 (TRBV2, TRBJ2-2)
CASRQPGLAG

SEQ ID NO: 512149 - protein, 13 aa, Homo sapiens
  CDR3 for alpha chain variable domain of TCR clone 256075 (TRAV13-1, TRAJ21)
CAASIYNFNKFYF

SEQ ID NO: 512150 - protein, 15 aa, Homo sapiens
  CDR3 for beta chain variable domain of TCR clone 256075 (TRBV7-2, TRBJ2-7)
CASSLDPAQGQEQYF

SEQ ID NO: 512151 - protein, 15 aa, Homo sapiens
  CDR3 for alpha chain variable domain of TCR clone 256076 (TRAV3, TRAJ20)
CAVRDIKFSDYKLSF

SEQ ID NO: 512152 - protein, 15 aa, Homo sapiens
  CDR3 for beta chain variable domain of TCR clone 256076 (TRBV7-9, TRBJ1-6)
CASSSPGRGNSPLLF

SEQ ID NO: 512153 - protein, 12 aa, Homo sapiens
  CDR3 for alpha chain variable domain of TCR clone 256077 (TRAV13-1, TRAJ21)
CAAKEGFNKFNF

SEQ ID NO: 512154 - protein, 14 aa, Homo sapiens
  CDR3 for beta chain variable domain of TCR clone 256077 (TRBV5-4, TRBJ1-1)
CASSLDSRRDEAFF

SEQ ID NO: 512155 - protein, 12 aa, Homo sapiens
  CDR3 for alpha chain variable domain of TCR clone 256078 (TRAV12-3, TRAJ17)
CAMTLTGDKLTF

SEQ ID NO: 512156 - protein, 17 aa, Homo sapiens
  CDR3 for beta chain variable domain of TCR clone 256078 (TRBV28, TRBJ2-5)
CASSTPEGDALQETQYF

SEQ ID NO: 512157 - protein, 17 aa, Homo sapiens
  CDR3 for alpha chain variable domain of TCR clone 256079 (TRAV3, TRAJ12)
CAVRDGGRMDSSYKLVF

SEQ ID NO: 512158 - protein, 13 aa, Homo sapiens
  CDR3 for beta chain variable domain of TCR clone 256079 (TRBV12-4, TRBJ1-2)
CASSLRQGKGYTF

SEQ ID NO: 512159 - protein, 11 aa, Homo sapiens
  CDR3 for alpha chain variable domain of TCR clone 256080 (TRAV2, TRAJ13)
CASGGYQTVTF

SEQ ID NO: 512160 - protein, 14 aa, Homo sapiens
  CDR3 for beta chain variable domain of TCR clone 256080 (TRBV12-5, TRBJ2-5)
CASGSRTHQETQYF

SEQ ID NO: 512161 - protein, 13 aa, Homo sapiens
  CDR3 for alpha chain variable domain of TCR clone 256081 (TRAV13-2, TRAJ13)
CAERPGGYQKVTF

SEQ ID NO: 512162 - protein, 14 aa, Homo sapiens
  CDR3 for beta chain variable domain of TCR clone 256081 (TRBV19, TRBJ2-1)
CVSSMGSGRRSSSS

SEQ ID NO: 512163 - protein, 13 aa, Homo sapiens
  CDR3 for alpha chain variable domain of TCR clone 256082 (TRAV2, TRAJ40)
CAVVTSGTYKYIF

SEQ ID NO: 512164 - protein, 14 aa, Homo sapiens
  CDR3 for beta chain variable domain of TCR clone 256082 (TRBV12-4, TRBJ1-4)
CASRMTGRSEKLFF

SEQ ID NO: 512165 - protein, 18 aa, Homo sapiens
  CDR3 for alpha chain variable domain of TCR clone 256083 (TRAV29/DV5, TRAJ52)
CAAGFRGAGGTSYGKLTF

SEQ ID NO: 512166 - protein, 15 aa, Homo sapiens
  CDR3 for beta chain variable domain of TCR clone 256083 (TRBV7-3, TRBJ2-2)
CQQLKAGDLVRELFF

SEQ ID NO: 512167 - protein, 10 aa, Homo sapiens
  CDR3 for alpha chain variable domain of TCR clone 256084 (TRAV8-4, TRAJ43)
CAVSADDMRF

SEQ ID NO: 512168 - protein, 13 aa, Homo sapiens
  CDR3 for beta chain variable domain of TCR clone 256084 (TRBV12-4, TRBJ2-5)
CASSPGTEETQCV

SEQ ID NO: 512169 - protein, 15 aa, Homo sapiens
  CDR3 for alpha chain variable domain of TCR clone 256085 (TRAV21, TRAJ24)
CAARSSTDSWGKLQF

SEQ ID NO: 512170 - protein, 16 aa, Homo sapiens
  CDR3 for beta chain variable domain of TCR clone 256085 (TRBV7-9, TRBJ2-6)
CASSLKGPLRANVLTF

SEQ ID NO: 512171 - protein, 11 aa, Homo sapiens
  CDR3 for alpha chain variable domain of TCR clone 256086 (TRAV2, TRAJ13)
CASGGYQKVTF

SEQ ID NO: 512172 - protein, 13 aa, Homo sapiens
  CDR3 for beta chain variable domain of TCR clone 256086 (TRBV19, TRBJ2-2)
CASSQRSTGELFF

SEQ ID NO: 512173 - protein, 13 aa, Homo sapiens
  CDR3 for alpha chain variable domain of TCR clone 256087 (TRAV27, TRAJ29)
CAGAHSGNTPLVF

SEQ ID NO: 512174 - protein, 13 aa, Homo sapiens
  CDR3 for beta chain variable domain of TCR clone 256087 (TRBV12-4, TRBJ1-5)
CASSPDRAQPQHF

SEQ ID NO: 512175 - protein, 14 aa, Homo sapiens
  CDR3 for alpha chain variable domain of TCR clone 256088 (TRAV8-3, TRAJ16)
CAVDRFSDGQKRLF

SEQ ID NO: 512176 - protein, 15 aa, Homo sapiens
  CDR3 for beta chain variable domain of TCR clone 256088 (TRBV7-6, TRBJ2-1)
CASSPGQGPYNEQFF

SEQ ID NO: 512177 - protein, 13 aa, Homo sapiens
  CDR3 for alpha chain variable domain of TCR clone 256089 (TRAV12-2, TRAJ33)
CGYAPDSNYQLIW

SEQ ID NO: 512178 - protein, 15 aa, Homo sapiens
  CDR3 for beta chain variable domain of TCR clone 256089 (TRBV27, TRBJ2-1)
CASSNGGGSSNEQFF

SEQ ID NO: 512179 - protein, 13 aa, Homo sapiens
  CDR3 for alpha chain variable domain of TCR clone 256090 (TRAV12-1, TRAJ53)
CVVNAESNYKLTF

SEQ ID NO: 512180 - protein, 13 aa, Homo sapiens
  CDR3 for beta chain variable domain of TCR clone 256090 (TRBV24-1, TRBJ2-2)
CATSDWSTGGLFF

SEQ ID NO: 512181 - protein, 16 aa, Homo sapiens
  CDR3 for alpha chain variable domain of TCR clone 256091 (TRAV12-3, TRAJ18)
CAMRGSRGSALGRLYF

SEQ ID NO: 512182 - protein, 19 aa, Homo sapiens
  CDR3 for beta chain variable domain of TCR clone 256091 (TRBV6-3, TRBJ2-7)
CASSYRTGLAGGVSGEQYF

SEQ ID NO: 512183 - protein, 18 aa, Homo sapiens
  CDR3 for alpha chain variable domain of TCR clone 256092 (TRAV26-1, TRAJ22)
CIVRVSFWFCKATDLWIL

SEQ ID NO: 512184 - protein, 13 aa, Homo sapiens
  CDR3 for beta chain variable domain of TCR clone 256092 (TRBV7-9, TRBJ1-2)
CASSLKQNYGYTF

SEQ ID NO: 512185 - protein, 13 aa, Homo sapiens
  CDR3 for alpha chain variable domain of TCR clone 256093 (TRAV20, TRAJ37)
CAGCSSNTGKRIF

SEQ ID NO: 512186 - protein, 11 aa, Homo sapiens
  CDR3 for beta chain variable domain of TCR clone 256093 (TRBV12-4, TRBJ2-3)
CASTATDTQYL

SEQ ID NO: 512187 - protein, 12 aa, Homo sapiens
  CDR3 for alpha chain variable domain of TCR clone 256094 (TRAV12-3, TRAJ3)
CAIDSSASKIIF

SEQ ID NO: 512188 - protein, 13 aa, Homo sapiens
  CDR3 for beta chain variable domain of TCR clone 256094 (TRBV12-4, TRBJ1-2)
CAGSLRQGKGYTF

SEQ ID NO: 512189 - protein, 12 aa, Homo sapiens
  CDR3 for alpha chain variable domain of TCR clone 256095 (TRAV13-1, TRAJ21)
CAAKEGCNKFYF

SEQ ID NO: 512190 - protein, 14 aa, Homo sapiens
  CDR3 for beta chain variable domain of TCR clone 256095 (TRBV20-1, TRBJ2-7)
CSAKTGTGGYEQYF

SEQ ID NO: 512191 - protein, 12 aa, Homo sapiens
  CDR3 for alpha chain variable domain of TCR clone 256096 (TRAV16, TRAJ26)
FALRSYGQNFVF

SEQ ID NO: 512192 - protein, 14 aa, Homo sapiens
  CDR3 for beta chain variable domain of TCR clone 256096 (TRBV10-3, TRBJ2-1)
CASSSDLAYNEQFF

SEQ ID NO: 512193 - protein, 14 aa, Homo sapiens
  CDR3 for alpha chain variable domain of TCR clone 256097 (TRAV17, TRAJ16)
CATADFSDGQKLLF

SEQ ID NO: 512194 - protein, 15 aa, Homo sapiens
  CDR3 for beta chain variable domain of TCR clone 256097 (TRBV27, TRBJ1-6)
CASSFDRGLGSPLHF

SEQ ID NO: 512195 - protein, 15 aa, Homo sapiens
  CDR3 for alpha chain variable domain of TCR clone 256098 (TRAV2, TRAJ24)
CAVEVLTDSWGKFQF

SEQ ID NO: 512196 - protein, 16 aa, Homo sapiens
  CDR3 for beta chain variable domain of TCR clone 256098 (TRBV19, TRBJ2-1)
CASSMGSGRRSSSAGQ

SEQ ID NO: 512197 - protein, 14 aa, Homo sapiens
  CDR3 for alpha chain variable domain of TCR clone 256099 (TRAV29/DV5, TRAJ36)
CAARRKTGANNLFF

SEQ ID NO: 512198 - protein, 16 aa, Homo sapiens
  CDR3 for beta chain variable domain of TCR clone 256099 (TRBV19, TRBJ1-5)
CASRPGTGGRNQPQHF

SEQ ID NO: 512199 - protein, 12 aa, Homo sapiens
  CDR3 for alpha chain variable domain of TCR clone 256100 (TRAV29/DV5, TRAJ49)
CAATDTGNQFYF

SEQ ID NO: 512200 - protein, 19 aa, Homo sapiens
  CDR3 for beta chain variable domain of TCR clone 256100 (TRBV25-1, TRBJ2-2)
CAILVYRVDRGRKTRELFF

SEQ ID NO: 512201 - protein, 15 aa, Homo sapiens
  CDR3 for alpha chain variable domain of TCR clone 256101 (TRAV3, TRAJ20)
CAVRDSRSNEYKLSF

SEQ ID NO: 512202 - protein, 14 aa, Homo sapiens
  CDR3 for beta chain variable domain of TCR clone 256101 (TRBV20-1, TRBJ2-7)
CSARRGNGIYEQYF

SEQ ID NO: 512203 - protein, 13 aa, Homo sapiens
  CDR3 for alpha chain variable domain of TCR clone 256102 (TRAV13-1, TRAJ5)
CAASDTGRRTLTF

SEQ ID NO: 512204 - protein, 12 aa, Homo sapiens
  CDR3 for beta chain variable domain of TCR clone 256102 (TRBV28, TRBJ2-3)
CASSSYRDTQYF

SEQ ID NO: 512205 - protein, 17 aa, Homo sapiens
  CDR3 for alpha chain variable domain of TCR clone 256103 (TRAV3, TRAJ28)
CAVREAYSGAGSYQITF

SEQ ID NO: 512206 - protein, 18 aa, Homo sapiens
  CDR3 for beta chain variable domain of TCR clone 256103 (TRBV27, TRBJ2-1)
CASGNRAVGVGSKNEQFF

SEQ ID NO: 512207 - protein, 12 aa, Homo sapiens
  CDR3 for alpha chain variable domain of TCR clone 256104 (TRAV13-2, TRAJ8)
CAPCLGFQKLVF

SEQ ID NO: 512208 - protein, 14 aa, Homo sapiens
  CDR3 for beta chain variable domain of TCR clone 256104 (TRBV18, TRBJ1-5)
CASSRQQRNQPQHF

SEQ ID NO: 512209 - protein, 16 aa, Homo sapiens
  CDR3 for alpha chain variable domain of TCR clone 256105 (TRAV3, TRAJ37)
CAVRGKGSGNTGKLIF

SEQ ID NO: 512210 - protein, 15 aa, Homo sapiens
  CDR3 for beta chain variable domain of TCR clone 256105 (TRBV7-9, TRBJ1-6)
CASSSPGRGKSPRHF

SEQ ID NO: 512211 - protein, 16 aa, Homo sapiens
  CDR3 for alpha chain variable domain of TCR clone 256106 (TRAV12-3, TRAJ53)
CAMRPGSGGSNYKLTF

SEQ ID NO: 512212 - protein, 17 aa, Homo sapiens
  CDR3 for beta chain variable domain of TCR clone 256106 (TRBV5-4, TRBJ2-1)
CASSSAGGRGPYNEQFF

SEQ ID NO: 512213 - protein, 13 aa, Homo sapiens
  CDR3 for alpha chain variable domain of TCR clone 256107 (TRAV35, TRAJ32)
CAGVGGATNKLIF

SEQ ID NO: 512214 - protein, 17 aa, Homo sapiens
  CDR3 for beta chain variable domain of TCR clone 256107 (TRBV4-3, TRBJ2-1)
CASSQFPSGRASGEQFF

SEQ ID NO: 512215 - protein, 14 aa, Homo sapiens
  CDR3 for alpha chain variable domain of TCR clone 256108 (TRAV8-2, TRAJ11)
CVVSEKSGYSTLTF

SEQ ID NO: 512216 - protein, 16 aa, Homo sapiens
  CDR3 for beta chain variable domain of TCR clone 256108 (TRBV28, TRBJ2-1)
CASSSPEYHRDNEQFF

SEQ ID NO: 512217 - protein, 17 aa, Homo sapiens
  CDR3 for alpha chain variable domain of TCR clone 256109 (TRAV23/DV6, TRAJ58)
CAARLLRGETSGSRLTF

SEQ ID NO: 512218 - protein, 13 aa, Homo sapiens
  CDR3 for beta chain variable domain of TCR clone 256109 (TRBV6-4, TRBJ1-5)
CASSADLNQHQHF

SEQ ID NO: 512219 - protein, 12 aa, Homo sapiens
  CDR3 for alpha chain variable domain of TCR clone 256110 (TRAV8-3, TRAJ6)
CAVVVRKLHTYI

SEQ ID NO: 512220 - protein, 14 aa, Homo sapiens
  CDR3 for beta chain variable domain of TCR clone 256110 (TRBV5-1, TRBJ2-7)
CASSRGESLYEQYF

SEQ ID NO: 512221 - protein, 11 aa, Homo sapiens
  CDR3 for alpha chain variable domain of TCR clone 256111 (TRAV3, TRAJ21)
CAVGNFNKFYF

SEQ ID NO: 512222 - protein, 16 aa, Homo sapiens
  CDR3 for beta chain variable domain of TCR clone 256111 (TRBV20-1, TRBJ1-2)
GSASMGQGVANYGYTF

SEQ ID NO: 512223 - protein, 15 aa, Homo sapiens
  CDR3 for alpha chain variable domain of TCR clone 256112 (TRAV13-2, TRAJ45)
CAESGSGGGADGLTF

SEQ ID NO: 512224 - protein, 17 aa, Homo sapiens
  CDR3 for beta chain variable domain of TCR clone 256112 (TRBV27, TRBJ1-6)
CASSLDQLSSYNSPIHF

SEQ ID NO: 512225 - protein, 15 aa, Homo sapiens
  CDR3 for alpha chain variable domain of TCR clone 256113 (TRAV3, TRAJ22)
CAVRDRGGSARQLTF

SEQ ID NO: 512226 - protein, 13 aa, Homo sapiens
  CDR3 for beta chain variable domain of TCR clone 256113 (TRBV7-3, TRBJ2-1)
CASSPVAYDEQFF

SEQ ID NO: 512227 - protein, 13 aa, Homo sapiens
  CDR3 for alpha chain variable domain of TCR clone 256114 (TRAV12-2, TRAJ12)
CAVNWDSSYKLIF

SEQ ID NO: 512228 - protein, 16 aa, Homo sapiens
  CDR3 for beta chain variable domain of TCR clone 256114 (TRBV27, TRBJ2-5)
CASSFGPGGTKETQYF

SEQ ID NO: 512229 - protein, 13 aa, Homo sapiens
  CDR3 for alpha chain variable domain of TCR clone 256115 (TRAV16, TRAJ54)
CALKVRGAQKLVF

SEQ ID NO: 512230 - protein, 16 aa, Homo sapiens
  CDR3 for beta chain variable domain of TCR clone 256115 (TRBV7-2, TRBJ2-5)
CASSSKWLSGQETQYF

SEQ ID NO: 512231 - protein, 12 aa, Homo sapiens
  CDR3 for alpha chain variable domain of TCR clone 256116 (TRAV8-3, TRAJ20)
CAVGANDYRRSF

SEQ ID NO: 512232 - protein, 16 aa, Homo sapiens
  CDR3 for beta chain variable domain of TCR clone 256116 (TRBV19, TRBJ2-2)
CASRSPGTGATGELFF

SEQ ID NO: 512233 - protein, 14 aa, Homo sapiens
  CDR3 for alpha chain variable domain of TCR clone 256117 (TRAV1-1, TRAJ27)
CAMIYNTNAGKSTF

SEQ ID NO: 512234 - protein, 13 aa, Homo sapiens
  CDR3 for beta chain variable domain of TCR clone 256117 (TRBV7-9, TRBJ1-2)
CASSLKQNYGYTF

SEQ ID NO: 512235 - protein, 14 aa, Homo sapiens
  CDR3 for alpha chain variable domain of TCR clone 256118 (TRAV8-4, TRAJ5)
CAVSTDTGRRALTF

SEQ ID NO: 512236 - protein, 17 aa, Homo sapiens
  CDR3 for beta chain variable domain of TCR clone 256118 (TRBV7-8, TRBJ2-6)
CASSAGTGGAGANVLTF

SEQ ID NO: 512237 - protein, 18 aa, Homo sapiens
  CDR3 for alpha chain variable domain of TCR clone 256119 (TRAV26-2, TRAJ54)
CILRDVEVGIQGAQKLVF

SEQ ID NO: 512238 - protein, 17 aa, Homo sapiens
  CDR3 for beta chain variable domain of TCR clone 256119 (TRBV15, TRBJ1-4)
CATSRYGTGDPNEKLFF

SEQ ID NO: 512239 - protein, 12 aa, Homo sapiens
  CDR3 for alpha chain variable domain of TCR clone 256120 (TRAV30, TRAJ43)
CGTEERGNDMRF

SEQ ID NO: 512240 - protein, 13 aa, Homo sapiens
  CDR3 for beta chain variable domain of TCR clone 256120 (TRBV27, TRBJ2-7)
CASSFSQGYEQHF

SEQ ID NO: 512241 - protein, 23 aa, Homo sapiens
  CDR3 for alpha chain variable domain of TCR clone 256121 (TRAV8-3, TRAJ38)
CAVGASNAGNNHIQNPDPAVYQL

SEQ ID NO: 512242 - protein, 19 aa, Homo sapiens
  CDR3 for beta chain variable domain of TCR clone 256121 (TRBV7-2, TRBJ2-3)
CASSFLSRNWGGGTDTQYF

SEQ ID NO: 512243 - protein, 14 aa, Homo sapiens
  CDR3 for alpha chain variable domain of TCR clone 256122 (TRAV13-2, TRAJ9)
CAENLETGGFKTVF

SEQ ID NO: 512244 - protein, 16 aa, Homo sapiens
  CDR3 for beta chain variable domain of TCR clone 256122 (TRBV28, TRBJ2-5)
CASSFAPAGGWETQYF

SEQ ID NO: 512245 - protein, 14 aa, Homo sapiens
  CDR3 for alpha chain variable domain of TCR clone 256123 (TRAV8-2, TRAJ37)
CVVSISGNTGKLIF

SEQ ID NO: 512246 - protein, 11 aa, Homo sapiens
  CDR3 for beta chain variable domain of TCR clone 256123 (TRBV18, TRBJ2-5)
CSSSPRETQYF

SEQ ID NO: 512247 - protein, 14 aa, Homo sapiens
  CDR3 for alpha chain variable domain of TCR clone 256124 (TRAV17, TRAJ22)
CATAISGSARQLTF

SEQ ID NO: 512248 - protein, 13 aa, Homo sapiens
  CDR3 for beta chain variable domain of TCR clone 256124 (TRBV6-3, TRBJ1-2)
CASSLDRSSGDTF

SEQ ID NO: 512249 - protein, 14 aa, Homo sapiens
  CDR3 for alpha chain variable domain of TCR clone 256125 (TRAV13-1, TRAJ26)
CAASRGNYGQNFVF

SEQ ID NO: 512250 - protein, 14 aa, Homo sapiens
  CDR3 for beta chain variable domain of TCR clone 256125 (TRBV6-3, TRBJ2-1)
CASSYTDQGSEQFF

SEQ ID NO: 512251 - protein, 14 aa, Homo sapiens
  CDR3 for alpha chain variable domain of TCR clone 256126 (TRAV3, TRAJ21)
CAVRDKYNFNKFYF

SEQ ID NO: 512252 - protein, 14 aa, Homo sapiens
  CDR3 for beta chain variable domain of TCR clone 256126 (TRBV2, TRBJ1-5)
CASSENRGGQPQHF

SEQ ID NO: 512253 - protein, 13 aa, Homo sapiens
  CDR3 for alpha chain variable domain of TCR clone 256127 (TRAV20, TRAJ31)
CAVQAWNNARLMF

SEQ ID NO: 512254 - protein, 13 aa, Homo sapiens
  CDR3 for beta chain variable domain of TCR clone 256127 (TRBV7-2, TRBJ1-1)
CASNLKGAKVAFF

SEQ ID NO: 512255 - protein, 14 aa, Homo sapiens
  CDR3 for alpha chain variable domain of TCR clone 256128 (TRAV4, TRAJ17)
CLVGDMAAGNKLTF

SEQ ID NO: 512256 - protein, 14 aa, Homo sapiens
  CDR3 for beta chain variable domain of TCR clone 256128 (TRBV4-2, TRBJ1-5)
CASSRDRGNQPQHF

SEQ ID NO: 512257 - protein, 18 aa, Homo sapiens
  CDR3 for alpha chain variable domain of TCR clone 256129 (TRAV26-1, TRAJ22)
CIVRVSFWFCKATDLLIW

SEQ ID NO: 512258 - protein, 14 aa, Homo sapiens
  CDR3 for beta chain variable domain of TCR clone 256129 (TRBV4-1, TRBJ2-2)
CASSQAANTGELFF

SEQ ID NO: 512259 - protein, 14 aa, Homo sapiens
  CDR3 for alpha chain variable domain of TCR clone 256130 (TRAV16, TRAJ15)
CALSFNQAGTALIF

SEQ ID NO: 512260 - protein, 15 aa, Homo sapiens
  CDR3 for beta chain variable domain of TCR clone 256130 (TRBV9, TRBJ2-1)
CASSLAGSSYNEQFF

SEQ ID NO: 512261 - protein, 14 aa, Homo sapiens
  CDR3 for alpha chain variable domain of TCR clone 256131 (TRAV3, TRAJ9)
CAVRLNTGGFKTIF

SEQ ID NO: 512262 - protein, 15 aa, Homo sapiens
  CDR3 for beta chain variable domain of TCR clone 256131 (TRBV5-7, TRBJ1-2)
CASSLGVAANYGYTF

SEQ ID NO: 512263 - protein, 13 aa, Homo sapiens
  CDR3 for alpha chain variable domain of TCR clone 256132 (TRAV17, TRAJ13)
CATDSGGYQKVTF

SEQ ID NO: 512264 - protein, 13 aa, Homo sapiens
  CDR3 for beta chain variable domain of TCR clone 256132 (TRBV15, TRBJ1-6)
CATSGGLNSPLHF

SEQ ID NO: 512265 - protein, 16 aa, Homo sapiens
  CDR3 for alpha chain variable domain of TCR clone 256133 (TRAV30, TRAJ24)
CGTEIVDADSWGKFQF

SEQ ID NO: 512266 - protein, 15 aa, Homo sapiens
  CDR3 for beta chain variable domain of TCR clone 256133 (TRBV7-7, TRBJ2-5)
CASSQLERAEETQYF

SEQ ID NO: 512267 - protein, 18 aa, Homo sapiens
  CDR3 for alpha chain variable domain of TCR clone 256134 (TRAV13-1, TRAJ52)
CAAKNPNAGGTSYGKLTF

SEQ ID NO: 512268 - protein, 18 aa, Homo sapiens
  CDR3 for beta chain variable domain of TCR clone 256134 (TRBV25-1, TRBJ1-2)
CASSGLQNGQGLIFGYTF

SEQ ID NO: 512269 - protein, 17 aa, Homo sapiens
  CDR3 for alpha chain variable domain of TCR clone 256135 (TRAV3, TRAJ6)
CAVRDGPRAGGSSITTF

SEQ ID NO: 512270 - protein, 14 aa, Homo sapiens
  CDR3 for beta chain variable domain of TCR clone 256135 (TRBV7-2, TRBJ2-7)
CASSPKTSFYEQYF

SEQ ID NO: 512271 - protein, 14 aa, Homo sapiens
  CDR3 for alpha chain variable domain of TCR clone 256136 (TRAV1-2, TRAJ16)
CAVNRFSDGQKLLF

SEQ ID NO: 512272 - protein, 15 aa, Homo sapiens
  CDR3 for beta chain variable domain of TCR clone 256136 (TRBV28, TRBJ2-5)
CASSAPRQVRETQYF

SEQ ID NO: 512273 - protein, 12 aa, Homo sapiens
  CDR3 for alpha chain variable domain of TCR clone 256137 (TRAV2, TRAJ9)
CAVGAGGFKTIF

SEQ ID NO: 512274 - protein, 16 aa, Homo sapiens
  CDR3 for beta chain variable domain of TCR clone 256137 (TRBV13, TRBJ2-2)
CASNPRTGEHTGELFF

SEQ ID NO: 512275 - protein, 10 aa, Homo sapiens
  CDR3 for alpha chain variable domain of TCR clone 256138 (TRAV12-2, TRAJ22)
CAVNETQLTF

SEQ ID NO: 512276 - protein, 15 aa, Homo sapiens
  CDR3 for beta chain variable domain of TCR clone 256138 (TRBV7-9, TRBJ2-7)
CASSFGTSGAYEQYF

SEQ ID NO: 512277 - protein, 14 aa, Homo sapiens
  CDR3 for alpha chain variable domain of TCR clone 256139 (TRAV3, TRAJ32)
CCERRAGATNKLIF

SEQ ID NO: 512278 - protein, 12 aa, Homo sapiens
  CDR3 for beta chain variable domain of TCR clone 256139 (TRBV20-1, TRBJ2-7)
CSAGLKMGEQYF

SEQ ID NO: 512279 - protein, 11 aa, Homo sapiens
  CDR3 for alpha chain variable domain of TCR clone 256140 (TRAV3, TRAJ21)
CSVGNFNKFYF

SEQ ID NO: 512280 - protein, 16 aa, Homo sapiens
  CDR3 for beta chain variable domain of TCR clone 256140 (TRBV19, TRBJ2-1)
CASSKAGPRSYNEQFF

SEQ ID NO: 512281 - protein, 15 aa, Homo sapiens
  CDR3 for alpha chain variable domain of TCR clone 256141 (TRAV40, TRAJ53)
CLLANSGGSNYKLTF

SEQ ID NO: 512282 - protein, 15 aa, Homo sapiens
  CDR3 for beta chain variable domain of TCR clone 256141 (TRBV7-6, TRBJ2-2)
CASRRTSGNTGELVF

SEQ ID NO: 512283 - protein, 15 aa, Homo sapiens
  CDR3 for alpha chain variable domain of TCR clone 256142 (TRAV20, TRAJ4)
CAVAGSSGGYNKLIF

SEQ ID NO: 512284 - protein, 14 aa, Homo sapiens
  CDR3 for beta chain variable domain of TCR clone 256142 (TRBV7-8, TRBJ2-7)
CASTLGGALGEQYF

SEQ ID NO: 512285 - protein, 10 aa, Homo sapiens
  CDR3 for alpha chain variable domain of TCR clone 256143 (TRAV23/DV6, TRAJ31)
CARGGARLMF

SEQ ID NO: 512286 - protein, 17 aa, Homo sapiens
  CDR3 for beta chain variable domain of TCR clone 256143 (TRBV7-3, TRBJ2-3)
RASSLMKRMRGADTQYF

SEQ ID NO: 512287 - protein, 15 aa, Homo sapiens
  CDR3 for alpha chain variable domain of TCR clone 256144 (TRAV26-1, TRAJ44)
CIVRANTGTASKPTF

SEQ ID NO: 512288 - protein, 16 aa, Homo sapiens
  CDR3 for beta chain variable domain of TCR clone 256144 (TRBV7-7, TRBJ2-1)
CASSLASGTSCNEQFF

SEQ ID NO: 512289 - protein, 11 aa, Homo sapiens
  CDR3 for alpha chain variable domain of TCR clone 256145 (TRAV13-1, TRAJ40)
CAVSGTYKYIF

SEQ ID NO: 512290 - protein, 13 aa, Homo sapiens
  CDR3 for beta chain variable domain of TCR clone 256145 (TRBV19, TRBJ1-5)
CASSIGGNHAQHF

SEQ ID NO: 512291 - protein, 14 aa, Homo sapiens
  CDR3 for alpha chain variable domain of TCR clone 256146 (TRAV12-2, TRAJ13)
CAVKKTGGYQKVTF

SEQ ID NO: 512292 - protein, 16 aa, Homo sapiens
  CDR3 for beta chain variable domain of TCR clone 256146 (TRBV28, TRBJ2-7)
CASSLLFETGGPEQYF

SEQ ID NO: 512293 - protein, 16 aa, Homo sapiens
  CDR3 for alpha chain variable domain of TCR clone 256147 (TRAV12-3, TRAJ53)
CAMSPGSGGSNYKQTF

SEQ ID NO: 512294 - protein, 11 aa, Homo sapiens
  CDR3 for beta chain variable domain of TCR clone 256147 (TRBV29-1, TRBJ2-5)
CSEDRTGTQYF

SEQ ID NO: 512295 - protein, 12 aa, Homo sapiens
  CDR3 for alpha chain variable domain of TCR clone 256148 (TRAV17, TRAJ36)
CATLTGANNLFF

SEQ ID NO: 512296 - protein, 14 aa, Homo sapiens
  CDR3 for beta chain variable domain of TCR clone 256148 (TRBV7-3, TRBJ2-1)
CASSLAGGTNEQFF

SEQ ID NO: 512297 - protein, 10 aa, Homo sapiens
  CDR3 for alpha chain variable domain of TCR clone 256149 (TRAV12-3, TRAJ50)
CAMSAMGNLL

SEQ ID NO: 512298 - protein, 17 aa, Homo sapiens
  CDR3 for beta chain variable domain of TCR clone 256149 (TRBV11-2, TRBJ2-1)
CASSLYPPGVEYNEQFF

SEQ ID NO: 512299 - protein, 14 aa, Homo sapiens
  CDR3 for alpha chain variable domain of TCR clone 256150 (TRAV1-2, TRAJ16)
CAVNRFSDGQKLLF

SEQ ID NO: 512300 - protein, 15 aa, Homo sapiens
  CDR3 for beta chain variable domain of TCR clone 256150 (TRBV7-9, TRBJ1-3)
CASSFRGSPGDTIYF

SEQ ID NO: 512301 - protein, 13 aa, Homo sapiens
  CDR3 for alpha chain variable domain of TCR clone 256151 (TRAV23/DV6, TRAJ36)
CAAGQTGANNLFF

SEQ ID NO: 512302 - protein, 15 aa, Homo sapiens
  CDR3 for beta chain variable domain of TCR clone 256151 (TRBV11-3, TRBJ1-3)
CASSLSGTSGNTIYF

SEQ ID NO: 512303 - protein, 13 aa, Homo sapiens
  CDR3 for alpha chain variable domain of TCR clone 256152 (TRAV12-1, TRAJ30)
CVVNTYRDDKIIF

SEQ ID NO: 512304 - protein, 16 aa, Homo sapiens
  CDR3 for beta chain variable domain of TCR clone 256152 (TRBV19, TRBJ2-1)
CASSKAGPSSYNEQFF

SEQ ID NO: 512305 - protein, 11 aa, Homo sapiens
  CDR3 for alpha chain variable domain of TCR clone 256153 (TRAV29/DV5, TRAJ49)
CAAVPGNQFYF

SEQ ID NO: 512306 - protein, 11 aa, Homo sapiens
  CDR3 for beta chain variable domain of TCR clone 256153 (TRBV12-4, TRBJ2-3)
CASTATDTQYF

SEQ ID NO: 512307 - protein, 15 aa, Homo sapiens
  CDR3 for alpha chain variable domain of TCR clone 256154 (TRAV17, TRAJ57)
CATGPSQGGSEKLVF

SEQ ID NO: 512308 - protein, 16 aa, Homo sapiens
  CDR3 for beta chain variable domain of TCR clone 256154 (TRBV4-3, TRBJ2-2)
CASSHLQGSGTGELFF

SEQ ID NO: 512309 - protein, 13 aa, Homo sapiens
  CDR3 for alpha chain variable domain of TCR clone 256155 (TRAV9-2, TRAJ49)
CALIQIGGNQFYF

SEQ ID NO: 512310 - protein, 15 aa, Homo sapiens
  CDR3 for beta chain variable domain of TCR clone 256155 (TRBV7-2, TRBJ2-1)
CASTHGTGIYNEQFF

SEQ ID NO: 512311 - protein, 12 aa, Homo sapiens
  CDR3 for alpha chain variable domain of TCR clone 256156 (TRAV12-1, TRAJ6)
CVVSERSYIPTF

SEQ ID NO: 512312 - protein, 21 aa, Homo sapiens
  CDR3 for beta chain variable domain of TCR clone 256156 (TRBV7-3, TRBJ2-1)
GGTQPCISVPAAYGLAGDQFF

SEQ ID NO: 512313 - protein, 13 aa, Homo sapiens
  CDR3 for alpha chain variable domain of TCR clone 256157 (TRAV3, TRAJ20)
CAVRSLNDYKLSF

SEQ ID NO: 512314 - protein, 13 aa, Homo sapiens
  CDR3 for beta chain variable domain of TCR clone 256157 (TRBV7-3, TRBJ1-1)
CAISQYWGAEAFF

SEQ ID NO: 512315 - protein, 13 aa, Homo sapiens
  CDR3 for alpha chain variable domain of TCR clone 256158 (TRAV12-2, TRAJ20)
CAVYPSNDYKLSF

SEQ ID NO: 512316 - protein, 15 aa, Homo sapiens
  CDR3 for beta chain variable domain of TCR clone 256158 (TRBV7-3, TRBJ2-2)
CASSETGQGTGELFF

SEQ ID NO: 512317 - protein, 13 aa, Homo sapiens
  CDR3 for alpha chain variable domain of TCR clone 256159 (TRAV17, TRAJ9)
CATAITGGFKTFF

SEQ ID NO: 512318 - protein, 16 aa, Homo sapiens
  CDR3 for beta chain variable domain of TCR clone 256159 (TRBV20-1, TRBJ2-1)
CSARSTSESSYNEQFF

SEQ ID NO: 512319 - protein, 16 aa, Homo sapiens
  CDR3 for alpha chain variable domain of TCR clone 256160 (TRAV30, TRAJ49)
SAAQRVGPNTGNQLYF

SEQ ID NO: 512320 - protein, 15 aa, Homo sapiens
  CDR3 for beta chain variable domain of TCR clone 256160 (TRBV7-2, TRBJ2-1)
CASSSGLAGGNEQFF

SEQ ID NO: 512321 - protein, 15 aa, Homo sapiens
  CDR3 for alpha chain variable domain of TCR clone 256161 (TRAV25, TRAJ52)
CAGRPGGTSYGKLTF

SEQ ID NO: 512322 - protein, 23 aa, Homo sapiens
  CDR3 for beta chain variable domain of TCR clone 256161 (TRBV7-8, TRBJ2-6)
CASSADRGRWGQRPDFRGRQQAD

SEQ ID NO: 512323 - protein, 17 aa, Homo sapiens
  CDR3 for alpha chain variable domain of TCR clone 256162 (TRAV3, TRAJ6)
CAVRDGSRAGGSYVPTF

SEQ ID NO: 512324 - protein, 14 aa, Homo sapiens
  CDR3 for beta chain variable domain of TCR clone 256162 (TRBV7-2, TRBJ2-7)
CASSPKTSFYEQYF

SEQ ID NO: 512325 - protein, 14 aa, Homo sapiens
  CDR3 for alpha chain variable domain of TCR clone 256163 (TRAV16, TRAJ40)
CALFRASGTYKYIF

SEQ ID NO: 512326 - protein, 11 aa, Homo sapiens
  CDR3 for beta chain variable domain of TCR clone 256163 (TRBV7-6, TRBJ2-7)
CASSLGYEQYF

SEQ ID NO: 512327 - protein, 14 aa, Homo sapiens
  CDR3 for alpha chain variable domain of TCR clone 256164 (TRAV27, TRAJ23)
CAGLSYNQGGKLIF

SEQ ID NO: 512328 - protein, 15 aa, Homo sapiens
  CDR3 for beta chain variable domain of TCR clone 256164 (TRBV19, TRBJ2-2)
CASSLNRGVTGEMFF

SEQ ID NO: 512329 - protein, 13 aa, Homo sapiens
  CDR3 for alpha chain variable domain of TCR clone 256165 (TRAV21, TRAJ15)
CAVANQAGTALIF

SEQ ID NO: 512330 - protein, 13 aa, Homo sapiens
  CDR3 for beta chain variable domain of TCR clone 256165 (TRBV10-3, TRBJ2-7)
CAAKLAVNYEQYF

SEQ ID NO: 512331 - protein, 15 aa, Homo sapiens
  CDR3 for alpha chain variable domain of TCR clone 256166 (TRAV23/DV6, TRAJ44)
FAARLLTGTASKLTF

SEQ ID NO: 512332 - protein, 15 aa, Homo sapiens
  CDR3 for beta chain variable domain of TCR clone 256166 (TRBV12-4, TRBJ1-5)
CASTLNRVSNQPQHF

SEQ ID NO: 512333 - protein, 13 aa, Homo sapiens
  CDR3 for alpha chain variable domain of TCR clone 256167 (TRAV29/DV5, TRAJ31)
CSASRNNNARLMF

SEQ ID NO: 512334 - protein, 13 aa, Homo sapiens
  CDR3 for beta chain variable domain of TCR clone 256167 (TRBV7-9, TRBJ1-2)
CASSLKQNYGYAC

SEQ ID NO: 512335 - protein, 15 aa, Homo sapiens
  CDR3 for alpha chain variable domain of TCR clone 256168 (TRAV21, TRAJ40)
CAVRPQTSGTYKYIF

SEQ ID NO: 512336 - protein, 14 aa, Homo sapiens
  CDR3 for beta chain variable domain of TCR clone 256168 (TRBV11-2, TRBJ2-7)
CASSSTGEGYEQYF

SEQ ID NO: 512337 - protein, 11 aa, Homo sapiens
  CDR3 for alpha chain variable domain of TCR clone 256169 (TRAV35, TRAJ30)
CAPGGADKIIF

SEQ ID NO: 512338 - protein, 13 aa, Homo sapiens
  CDR3 for beta chain variable domain of TCR clone 256169 (TRBV7-6, TRBJ2-1)
CQQLGGGADEQFF

SEQ ID NO: 512339 - protein, 15 aa, Homo sapiens
  CDR3 for alpha chain variable domain of TCR clone 256170 (TRAV21, TRAJ53)
CATLNSGSSNYKLTF

SEQ ID NO: 512340 - protein, 13 aa, Homo sapiens
  CDR3 for beta chain variable domain of TCR clone 256170 (TRBV7-9, TRBJ1-2)
CASSLKQNYGYTF

SEQ ID NO: 512341 - protein, 14 aa, Homo sapiens
  CDR3 for alpha chain variable domain of TCR clone 256171 (TRAV12-2, TRAJ48)
CAVNAFFGNEKFTF

SEQ ID NO: 512342 - protein, 13 aa, Homo sapiens
  CDR3 for beta chain variable domain of TCR clone 256171 (TRBV28, TRBJ2-7)
CAGAQQGLDEQYF

SEQ ID NO: 512343 - protein, 14 aa, Homo sapiens
  CDR3 for alpha chain variable domain of TCR clone 256172 (TRAV1-1, TRAJ27)
CAVIYNTNAGKSTY

SEQ ID NO: 512344 - protein, 15 aa, Homo sapiens
  CDR3 for beta chain variable domain of TCR clone 256172 (TRBV7-2, TRBJ2-1)
CASSSGLAGGNEQFF

SEQ ID NO: 512345 - protein, 15 aa, Homo sapiens
  CDR3 for alpha chain variable domain of TCR clone 256173 (TRAV9-2, TRAJ8)
CALRGLNTGFQELVF

SEQ ID NO: 512346 - protein, 16 aa, Homo sapiens
  CDR3 for beta chain variable domain of TCR clone 256173 (TRBV12-4, TRBJ1-5)
CASSRPVGGSNQPQHF

SEQ ID NO: 512347 - protein, 13 aa, Homo sapiens
  CDR3 for alpha chain variable domain of TCR clone 256174 (TRAV12-1, TRAJ11)
CVVNRAGYSTLTF

SEQ ID NO: 512348 - protein, 15 aa, Homo sapiens
  CDR3 for beta chain variable domain of TCR clone 256174 (TRBV7-3, TRBJ2-2)
CASSATGQGTGELFF

SEQ ID NO: 512349 - protein, 11 aa, Homo sapiens
  CDR3 for alpha chain variable domain of TCR clone 256175 (TRAV13-1, TRAJ6)
CATLGSYIPTF

SEQ ID NO: 512350 - protein, 15 aa, Homo sapiens
  CDR3 for beta chain variable domain of TCR clone 256175 (TRBV11-2, TRBJ2-2)
CASSSDRVNAGELFF

SEQ ID NO: 512351 - protein, 16 aa, Homo sapiens
  CDR3 for alpha chain variable domain of TCR clone 256176 (TRAV22, TRAJ45)
CAVERGKRGGADGLTF

SEQ ID NO: 512352 - protein, 14 aa, Homo sapiens
  CDR3 for beta chain variable domain of TCR clone 256176 (TRBV19, TRBJ2-1)
CASSKDRGQDEQFF

SEQ ID NO: 512353 - protein, 14 aa, Homo sapiens
  CDR3 for alpha chain variable domain of TCR clone 256177 (TRAV1-2, TRAJ16)
CAVNRFSDGQKLLF

SEQ ID NO: 512354 - protein, 14 aa, Homo sapiens
  CDR3 for beta chain variable domain of TCR clone 256177 (TRBV7-6, TRBJ2-3)
CASSFGTVTDTQYF

SEQ ID NO: 512355 - protein, 15 aa, Homo sapiens
  CDR3 for alpha chain variable domain of TCR clone 256178 (TRAV12-3, TRAJ13)
CAMGTGGYQKVTLEL

SEQ ID NO: 512356 - protein, 16 aa, Homo sapiens
  CDR3 for beta chain variable domain of TCR clone 256178 (TRBV9, TRBJ2-1)
CASSVGGGGNYNEQFF

SEQ ID NO: 512357 - protein, 12 aa, Homo sapiens
  CDR3 for alpha chain variable domain of TCR clone 256179 (TRAV12-3, TRAJ17)
CAMTLTGNKLTF

SEQ ID NO: 512358 - protein, 15 aa, Homo sapiens
  CDR3 for beta chain variable domain of TCR clone 256179 (TRBV18, TRBJ2-3)
CASSPLAGETDTQYF

SEQ ID NO: 512359 - protein, 16 aa, Homo sapiens
  CDR3 for alpha chain variable domain of TCR clone 256180 (TRAV16, TRAJ4)
CALSRMFSGGYNKLIF

SEQ ID NO: 512360 - protein, 16 aa, Homo sapiens
  CDR3 for beta chain variable domain of TCR clone 256180 (TRBV24-1, TRBJ2-3)
CATSDPGTGAADTQYF

SEQ ID NO: 512361 - protein, 14 aa, Homo sapiens
  CDR3 for alpha chain variable domain of TCR clone 256181 (TRAV20, TRAJ29)
CAVQAWVGNTPLVF

SEQ ID NO: 512362 - protein, 11 aa, Homo sapiens
  CDR3 for beta chain variable domain of TCR clone 256181 (TRBV12-4, TRBJ2-3)
CASTATDTQYF

SEQ ID NO: 512363 - protein, 14 aa, Homo sapiens
  CDR3 for alpha chain variable domain of TCR clone 256182 (TRAV1-2, TRAJ8)
CAVREDTGFQKLVF

SEQ ID NO: 512364 - protein, 17 aa, Homo sapiens
  CDR3 for beta chain variable domain of TCR clone 256182 (TRBV11-2, TRBJ2-1)
CASSLYPPGVEYNEQLF

SEQ ID NO: 512365 - protein, 14 aa, Homo sapiens
  CDR3 for alpha chain variable domain of TCR clone 256183 (TRAV8-6, TRAJ29)
CAVSRASGNTPLVF

SEQ ID NO: 512366 - protein, 13 aa, Homo sapiens
  CDR3 for beta chain variable domain of TCR clone 256183 (TRBV19, TRBJ1-5)
CASSEGSDQPQHF

SEQ ID NO: 512367 - protein, 13 aa, Homo sapiens
  CDR3 for alpha chain variable domain of TCR clone 256184 (TRAV17, TRAJ4)
CATKSGGYNKLIF

SEQ ID NO: 512368 - protein, 14 aa, Homo sapiens
  CDR3 for beta chain variable domain of TCR clone 256184 (TRBV20-1, TRBJ1-5)
CSARDVRGNQPQHF

SEQ ID NO: 512369 - protein, 13 aa, Homo sapiens
  CDR3 for alpha chain variable domain of TCR clone 256185 (TRAV10, TRAJ41)
CVVSGGAGYALNF

SEQ ID NO: 512370 - protein, 15 aa, Homo sapiens
  CDR3 for beta chain variable domain of TCR clone 256185 (TRBV19, TRBJ1-6)
CASSTQGAVGSPLHF

SEQ ID NO: 512371 - protein, 17 aa, Homo sapiens
  CDR3 for alpha chain variable domain of TCR clone 256186 (TRAV13-1, TRAJ52)
CAASSGAGGTSYGKLTF

SEQ ID NO: 512372 - protein, 15 aa, Homo sapiens
  CDR3 for beta chain variable domain of TCR clone 256186 (TRBV28, TRBJ1-3)
CASSMGWASGNTIYF

SEQ ID NO: 512373 - protein, 16 aa, Homo sapiens
  CDR3 for alpha chain variable domain of TCR clone 256187 (TRAV30, TRAJ24)
CGTEIVDADRWGKFQF

SEQ ID NO: 512374 - protein, 14 aa, Homo sapiens
  CDR3 for beta chain variable domain of TCR clone 256187 (TRBV19, TRBJ2-1)
CASPTFVLSGEQFF

SEQ ID NO: 512375 - protein, 18 aa, Homo sapiens
  CDR3 for alpha chain variable domain of TCR clone 256188 (TRAV26-2, TRAJ33)
CCVLLHPEEPASNYQLIW

SEQ ID NO: 512376 - protein, 13 aa, Homo sapiens
  CDR3 for beta chain variable domain of TCR clone 256188 (TRBV24-1, TRBJ2-2)
CATRDWSTGELFF

SEQ ID NO: 512377 - protein, 13 aa, Homo sapiens
  CDR3 for alpha chain variable domain of TCR clone 256189 (TRAV12-2, TRAJ24)
CAVSTASWGKLQF

SEQ ID NO: 512378 - protein, 12 aa, Homo sapiens
  CDR3 for beta chain variable domain of TCR clone 256189 (TRBV7-6, TRBJ2-7)
CASSLADSEQYF

SEQ ID NO: 512379 - protein, 13 aa, Homo sapiens
  CDR3 for alpha chain variable domain of TCR clone 256190 (TRAV8-6, TRAJ48)
CAGVNFGNVKLTF

SEQ ID NO: 512380 - protein, 16 aa, Homo sapiens
  CDR3 for beta chain variable domain of TCR clone 256190 (TRBV4-2, TRBJ2-6)
CASSQARSSGANVLTF

SEQ ID NO: 512381 - protein, 14 aa, Homo sapiens
  CDR3 for alpha chain variable domain of TCR clone 256191 (TRAV26-1, TRAJ5)
CIVRVRFNRRALTF

SEQ ID NO: 512382 - protein, 11 aa, Homo sapiens
  CDR3 for beta chain variable domain of TCR clone 256191 (TRBV7-9, TRBJ2-5)
CASSLVDTQYF

SEQ ID NO: 512383 - protein, 13 aa, Homo sapiens
  CDR3 for alpha chain variable domain of TCR clone 256192 (TRAV20, TRAJ34)
CAVRSHNTDKLIF

SEQ ID NO: 512384 - protein, 15 aa, Homo sapiens
  CDR3 for beta chain variable domain of TCR clone 256192 (TRBV27, TRBJ1-3)
CASSPSPGSGNTIYV

SEQ ID NO: 512385 - protein, 17 aa, Homo sapiens
  CDR3 for alpha chain variable domain of TCR clone 256193 (TRAV26-1, TRAJ53)
CIVRVDDSGGINYKLTF

SEQ ID NO: 512386 - protein, 15 aa, Homo sapiens
  CDR3 for beta chain variable domain of TCR clone 256193 (TRBV11-2, TRBJ2-2)
CASSSDRVNAGELFF

SEQ ID NO: 512387 - protein, 14 aa, Homo sapiens
  CDR3 for alpha chain variable domain of TCR clone 256194 (TRAV1-2, TRAJ16)
CAVNRFSDGQELLF

SEQ ID NO: 512388 - protein, 14 aa, Homo sapiens
  CDR3 for beta chain variable domain of TCR clone 256194 (TRBV7-3, TRBJ1-1)
CASSLKGGNTEAFS

SEQ ID NO: 512389 - protein, 14 aa, Homo sapiens
  CDR3 for alpha chain variable domain of TCR clone 256195 (TRAV12-3, TRAJ57)
CARALEGGSEKLVF

SEQ ID NO: 512390 - protein, 15 aa, Homo sapiens
  CDR3 for beta chain variable domain of TCR clone 256195 (TRBV11-3, TRBJ2-3)
CASLKDGREGDTQYF

SEQ ID NO: 512391 - protein, 14 aa, Homo sapiens
  CDR3 for alpha chain variable domain of TCR clone 256196 (TRAV2, TRAJ9)
CAVEDRSGGFKTIF

SEQ ID NO: 512392 - protein, 14 aa, Homo sapiens
  CDR3 for beta chain variable domain of TCR clone 256196 (TRBV9, TRBJ2-1)
CASSVAGTFEEQFF

SEQ ID NO: 512393 - protein, 13 aa, Homo sapiens
  CDR3 for alpha chain variable domain of TCR clone 256197 (TRAV8-3, TRAJ28)
CAVGAVGSYQLTF

SEQ ID NO: 512394 - protein, 16 aa, Homo sapiens
  CDR3 for beta chain variable domain of TCR clone 256197 (TRBV15, TRBJ2-3)
CATRLSGGRAPDTQYF

SEQ ID NO: 512395 - protein, 12 aa, Homo sapiens
  CDR3 for alpha chain variable domain of TCR clone 256198 (TRAV3, TRAJ20)
CAVRDGDYKLSF

SEQ ID NO: 512396 - protein, 13 aa, Homo sapiens
  CDR3 for beta chain variable domain of TCR clone 256198 (TRBV7-6, TRBJ1-2)
CASSLVADYGYTF

SEQ ID NO: 512397 - protein, 18 aa, Homo sapiens
  CDR3 for alpha chain variable domain of TCR clone 256199 (TRAV9-2, TRAJ52)
CALSRHNAGGTSYGKLTF

SEQ ID NO: 512398 - protein, 13 aa, Homo sapiens
  CDR3 for beta chain variable domain of TCR clone 256199 (TRBV19, TRBJ2-7)
CASRKAGGSEQYF

SEQ ID NO: 512399 - protein, 15 aa, Homo sapiens
  CDR3 for alpha chain variable domain of TCR clone 256200 (TRAV8-3, TRAJ27)
CAVGPSKTNAGKSTF

SEQ ID NO: 512400 - protein, 17 aa, Homo sapiens
  CDR3 for beta chain variable domain of TCR clone 256200 (TRBV7-9, TRBJ2-5)
CASSTKLAAGGQETQYF

SEQ ID NO: 512401 - protein, 13 aa, Homo sapiens
  CDR3 for alpha chain variable domain of TCR clone 256201 (TRAV20, TRAJ49)
CAVQARTGNQFYF

SEQ ID NO: 512402 - protein, 14 aa, Homo sapiens
  CDR3 for beta chain variable domain of TCR clone 256201 (TRBV27, TRBJ2-2)
CASSLSVVDGRMFF

SEQ ID NO: 512403 - protein, 12 aa, Homo sapiens
  CDR3 for alpha chain variable domain of TCR clone 256202 (TRAV12-3, TRAJ17)
CAMTLTGNKLTF

SEQ ID NO: 512404 - protein, 14 aa, Homo sapiens
  CDR3 for beta chain variable domain of TCR clone 256202 (TRBV20-1, TRBJ2-1)
CSAQICGSANEQFF

SEQ ID NO: 512405 - protein, 16 aa, Homo sapiens
  CDR3 for alpha chain variable domain of TCR clone 256203 (TRAV27, TRAJ34)
CSGGGLGDYNTDKLTF

SEQ ID NO: 512406 - protein, 15 aa, Homo sapiens
  CDR3 for beta chain variable domain of TCR clone 256203 (TRBV9, TRBJ1-4)
CASSVGGSTNEELFF

SEQ ID NO: 512407 - protein, 16 aa, Homo sapiens
  CDR3 for alpha chain variable domain of TCR clone 256204 (TRAV12-3, TRAJ53)
CAMSPGSGGSNYRLTF

SEQ ID NO: 512408 - protein, 13 aa, Homo sapiens
  CDR3 for beta chain variable domain of TCR clone 256204 (TRBV7-3, TRBJ1-1)
CASSQDWGAEAFF

SEQ ID NO: 512409 - protein, 13 aa, Homo sapiens
  CDR3 for alpha chain variable domain of TCR clone 256205 (TRAV1-2, TRAJ33)
CAVVMDSNYQLIW

SEQ ID NO: 512410 - protein, 12 aa, Homo sapiens
  CDR3 for beta chain variable domain of TCR clone 256205 (TRBV11-2, TRBJ2-2)
CASSLGGGELFF

SEQ ID NO: 512411 - protein, 16 aa, Homo sapiens
  CDR3 for alpha chain variable domain of TCR clone 256206 (TRAV14/DV4, TRAJ54)
CAMREGRIQGDQKLVF

SEQ ID NO: 512412 - protein, 15 aa, Homo sapiens
  CDR3 for beta chain variable domain of TCR clone 256206 (TRBV7-8, TRBJ2-1)
CASSLAGGLYNEQFF

SEQ ID NO: 512413 - protein, 13 aa, Homo sapiens
  CDR3 for alpha chain variable domain of TCR clone 256207 (TRAV13-2, TRAJ21)
CAENLYNFNKFYF

SEQ ID NO: 512414 - protein, 15 aa, Homo sapiens
  CDR3 for beta chain variable domain of TCR clone 256207 (TRBV2, TRBJ2-1)
CATQARLVVIGEQFF

SEQ ID NO: 512415 - protein, 17 aa, Homo sapiens
  CDR3 for alpha chain variable domain of TCR clone 256208 (TRAV3, TRAJ42)
CAVRDRDYGGSQGNLIF

SEQ ID NO: 512416 - protein, 16 aa, Homo sapiens
  CDR3 for beta chain variable domain of TCR clone 256208 (TRBV7-3, TRBJ2-2)
CASSLKRGTVSGELFF

SEQ ID NO: 512417 - protein, 15 aa, Homo sapiens
  CDR3 for alpha chain variable domain of TCR clone 256209 (TRAV8-1, TRAJ6)
CAVNTPPGGSYIPTV

SEQ ID NO: 512418 - protein, 14 aa, Homo sapiens
  CDR3 for beta chain variable domain of TCR clone 256209 (TRBV12-4, TRBJ2-1)
CASSLGQGASEQFF

SEQ ID NO: 512419 - protein, 12 aa, Homo sapiens
  CDR3 for alpha chain variable domain of TCR clone 256210 (TRAV12-3, TRAJ17)
CAMTLTGNKLTF

SEQ ID NO: 512420 - protein, 15 aa, Homo sapiens
  CDR3 for beta chain variable domain of TCR clone 256210 (TRBV20-1, TRBJ2-7)
CCARDRVTGMDEQYF

SEQ ID NO: 512421 - protein, 11 aa, Homo sapiens
  CDR3 for alpha chain variable domain of TCR clone 256211 (TRAV1-1, TRAJ23)
CAVRQGGKLIF

SEQ ID NO: 512422 - protein, 20 aa, Homo sapiens
  CDR3 for beta chain variable domain of TCR clone 256211 (TRBV11-2, TRBJ1-6)
CASSLVFAAGGSVHPSTLGT

SEQ ID NO: 512423 - protein, 15 aa, Homo sapiens
  CDR3 for alpha chain variable domain of TCR clone 256212 (TRAV27, TRAJ38)
CAARRNAGNNRKLIW

SEQ ID NO: 512424 - protein, 14 aa, Homo sapiens
  CDR3 for beta chain variable domain of TCR clone 256212 (TRBV15, TRBJ2-3)
CATRSGTSTDTQYF

SEQ ID NO: 512425 - protein, 14 aa, Homo sapiens
  CDR3 for alpha chain variable domain of TCR clone 256213 (TRAV12-1, TRAJ23)
CVVIVYNQGGKLIF

SEQ ID NO: 512426 - protein, 15 aa, Homo sapiens
  CDR3 for beta chain variable domain of TCR clone 256213 (TRBV20-1, TRBJ2-7)
CSARKGLAESYEQYF

SEQ ID NO: 512427 - protein, 13 aa, Homo sapiens
  CDR3 for alpha chain variable domain of TCR clone 256214 (TRAV1-2, TRAJ36)
CVVDQTGANNLFF

SEQ ID NO: 512428 - protein, 14 aa, Homo sapiens
  CDR3 for beta chain variable domain of TCR clone 256214 (TRBV20-1, TRBJ2-5)
CSAREMTKQETQYF

SEQ ID NO: 512429 - protein, 14 aa, Homo sapiens
  CDR3 for alpha chain variable domain of TCR clone 256215 (TRAV17, TRAJ57)
CATDPQGGSEKLVF

SEQ ID NO: 512430 - protein, 18 aa, Homo sapiens
  CDR3 for beta chain variable domain of TCR clone 256215 (TRBV6-6, TRBJ1-3)
CASSYSKWGSISGNTIYF

SEQ ID NO: 512431 - protein, 15 aa, Homo sapiens
  CDR3 for alpha chain variable domain of TCR clone 256216 (TRAV2, TRAJ9)
CAVEDRGTGGFKPIF

SEQ ID NO: 512432 - protein, 17 aa, Homo sapiens
  CDR3 for beta chain variable domain of TCR clone 256216 (TRBV4-3, TRBJ2-1)
CASSQFSSGRASGEQFF

SEQ ID NO: 512433 - protein, 13 aa, Homo sapiens
  CDR3 for alpha chain variable domain of TCR clone 256217 (TRAV1-2, TRAJ9)
CAALNTGGFKTIF

SEQ ID NO: 512434 - protein, 16 aa, Homo sapiens
  CDR3 for beta chain variable domain of TCR clone 256217 (TRBV7-9, TRBJ2-3)
CASSPWREVGTDTQYF

SEQ ID NO: 512435 - protein, 15 aa, Homo sapiens
  CDR3 for alpha chain variable domain of TCR clone 256218 (TRAV16, TRAJ20)
CALKGGLRADYKRSF

SEQ ID NO: 512436 - protein, 16 aa, Homo sapiens
  CDR3 for beta chain variable domain of TCR clone 256218 (TRBV11-3, TRBJ2-2)
CASSSRTSPGTGELFF

SEQ ID NO: 512437 - protein, 13 aa, Homo sapiens
  CDR3 for alpha chain variable domain of TCR clone 256219 (TRAV2, TRAJ40)
CAVVTSGTYKYIF

SEQ ID NO: 512438 - protein, 15 aa, Homo sapiens
  CDR3 for beta chain variable domain of TCR clone 256219 (TRBV6-1, TRBJ2-2)
CASSAGRGYTGELFF

SEQ ID NO: 512439 - protein, 14 aa, Homo sapiens
  CDR3 for alpha chain variable domain of TCR clone 256220 (TRAV12-2, TRAJ44)
CAVNPAGTASKLTF

SEQ ID NO: 512440 - protein, 11 aa, Homo sapiens
  CDR3 for beta chain variable domain of TCR clone 256220 (TRBV29-1, TRBJ2-5)
CSEDRTGTQYF

SEQ ID NO: 512441 - protein, 13 aa, Homo sapiens
  CDR3 for alpha chain variable domain of TCR clone 256221 (TRAV2, TRAJ40)
CSVVTSGTYKYIF

SEQ ID NO: 512442 - protein, 14 aa, Homo sapiens
  CDR3 for beta chain variable domain of TCR clone 256221 (TRBV19, TRBJ2-1)
CASPTSVLSGEQFF

SEQ ID NO: 512443 - protein, 12 aa, Homo sapiens
  CDR3 for alpha chain variable domain of TCR clone 256222 (TRAV25, TRAJ35)
CAGIGFGNVLHC

SEQ ID NO: 512444 - protein, 18 aa, Homo sapiens
  CDR3 for beta chain variable domain of TCR clone 256222 (TRBV11-2, TRBJ2-3)
CASSLGGASRGAPNTQYF

SEQ ID NO: 512445 - protein, 13 aa, Homo sapiens
  CDR3 for alpha chain variable domain of TCR clone 256223 (TRAV8-3, TRAJ28)
CAVGAVGRYQRTF

SEQ ID NO: 512446 - protein, 14 aa, Homo sapiens
  CDR3 for beta chain variable domain of TCR clone 256223 (TRBV25-1, TRBJ1-1)
CASTHLGGNTEAFF

SEQ ID NO: 512447 - protein, 14 aa, Homo sapiens
  CDR3 for alpha chain variable domain of TCR clone 256224 (TRAV12-3, TRAJ22)
CAMSLFGSARQLTF

SEQ ID NO: 512448 - protein, 11 aa, Homo sapiens
  CDR3 for beta chain variable domain of TCR clone 256224 (TRBV12-4, TRBJ2-2)
CASSCAGELFF

SEQ ID NO: 512449 - protein, 16 aa, Homo sapiens
  CDR3 for alpha chain variable domain of TCR clone 256225 (TRAV8-2, TRAJ7)
CVVSEGPYYGNNRLAV

SEQ ID NO: 512450 - protein, 15 aa, Homo sapiens
  CDR3 for beta chain variable domain of TCR clone 256225 (TRBV27, TRBJ2-3)
CASSLGLAATDTQYF

SEQ ID NO: 512451 - protein, 14 aa, Homo sapiens
  CDR3 for alpha chain variable domain of TCR clone 256226 (TRAV8-2, TRAJ4)
CVVSPSGGYNKLIF

SEQ ID NO: 512452 - protein, 16 aa, Homo sapiens
  CDR3 for beta chain variable domain of TCR clone 256226 (TRBV19, TRBJ2-3)
CASSPGAASRTDTQYF

SEQ ID NO: 512453 - protein, 12 aa, Homo sapiens
  CDR3 for alpha chain variable domain of TCR clone 256227 (TRAV16, TRAJ27)
CALNHQCRQINL

SEQ ID NO: 512454 - protein, 15 aa, Homo sapiens
  CDR3 for beta chain variable domain of TCR clone 256227 (TRBV10-2, TRBJ2-6)
CASSEQGTGANVLTV

SEQ ID NO: 512455 - protein, 13 aa, Homo sapiens
  CDR3 for alpha chain variable domain of TCR clone 256228 (TRAV17, TRAJ5)
CALRGTGRRALTF

SEQ ID NO: 512456 - protein, 10 aa, Homo sapiens
  CDR3 for beta chain variable domain of TCR clone 256228 (TRBV15, TRBJ2-7)
AETGGYEQYF

SEQ ID NO: 512457 - protein, 14 aa, Homo sapiens
  CDR3 for alpha chain variable domain of TCR clone 256229 (TRAV8-3, TRAJ4)
CAVGAAGGYNKLIF

SEQ ID NO: 512458 - protein, 15 aa, Homo sapiens
  CDR3 for beta chain variable domain of TCR clone 256229 (TRBV20-1, TRBJ2-5)
CSAPPRTGFGGTQYF

SEQ ID NO: 512459 - protein, 14 aa, Homo sapiens
  CDR3 for alpha chain variable domain of TCR clone 256230 (TRAV26-1, TRAJ45)
CIEVTGGGADGLTF

SEQ ID NO: 512460 - protein, 18 aa, Homo sapiens
  CDR3 for beta chain variable domain of TCR clone 256230 (TRBV12-4, TRBJ2-2)
CASSLVAGTRGRTGELFF

SEQ ID NO: 512461 - protein, 10 aa, Homo sapiens
  CDR3 for alpha chain variable domain of TCR clone 256231 (TRAV1-2, TRAJ20)
CALNDYKLSF

SEQ ID NO: 512462 - protein, 16 aa, Homo sapiens
  CDR3 for beta chain variable domain of TCR clone 256231 (TRBV20-1, TRBJ1-1)
CSARALTRGMNTEAFF

SEQ ID NO: 512463 - protein, 17 aa, Homo sapiens
  CDR3 for alpha chain variable domain of TCR clone 256232 (TRAV12-2, TRAJ53)
CALLTDSQEGSNYKLTF

SEQ ID NO: 512464 - protein, 16 aa, Homo sapiens
  CDR3 for beta chain variable domain of TCR clone 256232 (TRBV20-1, TRBJ2-3)
CSAVRDRGPIADTQYF

SEQ ID NO: 512465 - protein, 16 aa, Homo sapiens
  CDR3 for alpha chain variable domain of TCR clone 256233 (TRAV3, TRAJ37)
CAVRPHRSGNTGKLIF

SEQ ID NO: 512466 - protein, 16 aa, Homo sapiens
  CDR3 for beta chain variable domain of TCR clone 256233 (TRBV28, TRBJ1-4)
CASSSRTGAANEKLFF

SEQ ID NO: 512467 - protein, 14 aa, Homo sapiens
  CDR3 for alpha chain variable domain of TCR clone 256234 (TRAV12-2, TRAJ53)
CAVKGGGSNYKLTF

SEQ ID NO: 512468 - protein, 14 aa, Homo sapiens
  CDR3 for beta chain variable domain of TCR clone 256234 (TRBV4-2, TRBJ2-1)
CASGLDRAYNEQFF

SEQ ID NO: 512469 - protein, 22 aa, Homo sapiens
  CDR3 for alpha chain variable domain of TCR clone 256235 (TRAV2, TRAJ10)
ILQVREADAAVYYTGGGNKLTF

SEQ ID NO: 512470 - protein, 20 aa, Homo sapiens
  CDR3 for beta chain variable domain of TCR clone 256235 (TRBV7-8, TRBJ2-2)
CASSHLFPGPTIHITGELFF

SEQ ID NO: 512471 - protein, 15 aa, Homo sapiens
  CDR3 for alpha chain variable domain of TCR clone 256236 (TRAV3, TRAJ13)
CAVRVYSGGYQKVNF

SEQ ID NO: 512472 - protein, 15 aa, Homo sapiens
  CDR3 for beta chain variable domain of TCR clone 256236 (TRBV7-2, TRBJ2-1)
CASSSGLAGGNEQFF

SEQ ID NO: 512473 - protein, 14 aa, Homo sapiens
  CDR3 for alpha chain variable domain of TCR clone 256237 (TRAV9-2, TRAJ39)
CALYIYNAGNMLTF

SEQ ID NO: 512474 - protein, 15 aa, Homo sapiens
  CDR3 for beta chain variable domain of TCR clone 256237 (TRBV27, TRBJ1-6)
CASSSDRGLGSPLHF

SEQ ID NO: 512475 - protein, 13 aa, Homo sapiens
  CDR3 for alpha chain variable domain of TCR clone 256238 (TRAV12-2, TRAJ3)
CAFQYSSASKIIF

SEQ ID NO: 512476 - protein, 13 aa, Homo sapiens
  CDR3 for beta chain variable domain of TCR clone 256238 (TRBV5-1, TRBJ1-5)
CASSLGAGQPQHF

SEQ ID NO: 512477 - protein, 14 aa, Homo sapiens
  CDR3 for alpha chain variable domain of TCR clone 256239 (TRAV12-1, TRAJ9)
CVVTGYTGGFKTIF

SEQ ID NO: 512478 - protein, 14 aa, Homo sapiens
  CDR3 for beta chain variable domain of TCR clone 256239 (TRBV7-8, TRBJ2-3)
CASSLEAGTDTQYF

SEQ ID NO: 512479 - protein, 11 aa, Homo sapiens
  CDR3 for alpha chain variable domain of TCR clone 256240 (TRAV35, TRAJ30)
CAPGGDDKIIF

SEQ ID NO: 512480 - protein, 15 aa, Homo sapiens
  CDR3 for beta chain variable domain of TCR clone 256240 (TRBV9, TRBJ1-6)
CASSVAGTRDSPLHF

SEQ ID NO: 512481 - protein, 13 aa, Homo sapiens
  CDR3 for alpha chain variable domain of TCR clone 256241 (TRAV39, TRAJ17)
CAAQFTAGNKLTF

SEQ ID NO: 512482 - protein, 20 aa, Homo sapiens
  CDR3 for beta chain variable domain of TCR clone 256241 (TRBV28, TRBJ2-1)
CASTPIGRSPGLAGGNEQFF

SEQ ID NO: 512483 - protein, 17 aa, Homo sapiens
  CDR3 for alpha chain variable domain of TCR clone 256242 (TRAV36/DV7, TRAJ52)
CAVAQRAGGTSYGKLTF

SEQ ID NO: 512484 - protein, 16 aa, Homo sapiens
  CDR3 for beta chain variable domain of TCR clone 256242 (TRBV5-1, TRBJ2-1)
FAPAADAGLVDYEQFF

SEQ ID NO: 512485 - protein, 11 aa, Homo sapiens
  CDR3 for alpha chain variable domain of TCR clone 256243 (TRAV2, TRAJ33)
CAVDSNYQLIW

SEQ ID NO: 512486 - protein, 15 aa, Homo sapiens
  CDR3 for beta chain variable domain of TCR clone 256243 (TRBV29-1, TRBJ2-1)
CSGRDRKSSYNEQFF

SEQ ID NO: 512487 - protein, 19 aa, Homo sapiens
  CDR3 for alpha chain variable domain of TCR clone 256244 (TRAV1-2, TRAJ26)
CLLPLCCERPDNYGQYFVF

SEQ ID NO: 512488 - protein, 13 aa, Homo sapiens
  CDR3 for beta chain variable domain of TCR clone 256244 (TRBV19, TRBJ1-2)
CASSQGQVYGYTF

SEQ ID NO: 512489 - protein, 16 aa, Homo sapiens
  CDR3 for alpha chain variable domain of TCR clone 256245 (TRAV14/DV4, TRAJ54)
CAMREGRIQGAQKLVF

SEQ ID NO: 512490 - protein, 12 aa, Homo sapiens
  CDR3 for beta chain variable domain of TCR clone 256245 (TRBV7-9, TRBJ2-7)
CASRTGFDEQYF

SEQ ID NO: 512491 - protein, 12 aa, Homo sapiens
  CDR3 for alpha chain variable domain of TCR clone 256246 (TRAV17, TRAJ20)
CATQANDYKLSF

SEQ ID NO: 512492 - protein, 14 aa, Homo sapiens
  CDR3 for beta chain variable domain of TCR clone 256246 (TRBV25-1, TRBJ1-1)
CASPHLGGNTEAFF

SEQ ID NO: 512493 - protein, 13 aa, Homo sapiens
  CDR3 for alpha chain variable domain of TCR clone 256247 (TRAV13-1, TRAJ9)
CSASGTGGFKTIL

SEQ ID NO: 512494 - protein, 13 aa, Homo sapiens
  CDR3 for beta chain variable domain of TCR clone 256247 (TRBV12-4, TRBJ2-7)
CASSLERVREQYF

SEQ ID NO: 512495 - protein, 16 aa, Homo sapiens
  CDR3 for alpha chain variable domain of TCR clone 256248 (TRAV3, TRAJ6)
CAVRDGMGRRKLHTYI

SEQ ID NO: 512496 - protein, 14 aa, Homo sapiens
  CDR3 for beta chain variable domain of TCR clone 256248 (TRBV7-2, TRBJ1-5)
CASSTQGAGQPQHF

SEQ ID NO: 512497 - protein, 17 aa, Homo sapiens
  CDR3 for alpha chain variable domain of TCR clone 256249 (TRAV3, TRAJ6)
FAVRDGPRAGGSYIPTF

SEQ ID NO: 512498 - protein, 15 aa, Homo sapiens
  CDR3 for beta chain variable domain of TCR clone 256249 (TRBV7-8, TRBJ1-5)
CASSLERRGLEPRHF

SEQ ID NO: 512499 - protein, 14 aa, Homo sapiens
  CDR3 for alpha chain variable domain of TCR clone 256250 (TRAV1-2, TRAJ16)
CSVNRFSDGQKLLF

SEQ ID NO: 512500 - protein, 12 aa, Homo sapiens
  CDR3 for beta chain variable domain of TCR clone 256250 (TRBV24-1, TRBJ1-1)
CATLYPDTEAFF

SEQ ID NO: 512501 - protein, 15 aa, Homo sapiens
  CDR3 for alpha chain variable domain of TCR clone 256251 (TRAV26-1, TRAJ56)
CIVRVATGANSKLPF

SEQ ID NO: 512502 - protein, 15 aa, Homo sapiens
  CDR3 for beta chain variable domain of TCR clone 256251 (TRBV20-1, TRBJ2-7)
CSARDRVSGMDEQYF

SEQ ID NO: 512503 - protein, 13 aa, Homo sapiens
  CDR3 for alpha chain variable domain of TCR clone 256252 (TRAV12-1, TRAJ34)
CVVTGYNTDKLIF

SEQ ID NO: 512504 - protein, 13 aa, Homo sapiens
  CDR3 for beta chain variable domain of TCR clone 256252 (TRBV28, TRBJ2-7)
CASKAGGVYEQYC

SEQ ID NO: 512505 - protein, 16 aa, Homo sapiens
  CDR3 for alpha chain variable domain of TCR clone 256253 (TRAV16, TRAJ4)
CALSRMFSGGYNKLIF

SEQ ID NO: 512506 - protein, 15 aa, Homo sapiens
  CDR3 for beta chain variable domain of TCR clone 256253 (TRBV24-1, TRBJ2-3)
CATAFPGDGVDTQYF

SEQ ID NO: 512507 - protein, 15 aa, Homo sapiens
  CDR3 for alpha chain variable domain of TCR clone 256254 (TRAV16, TRAJ6)
CALNDASGGSYIPTF

SEQ ID NO: 512508 - protein, 15 aa, Homo sapiens
  CDR3 for beta chain variable domain of TCR clone 256254 (TRBV7-2, TRBJ1-4)
CASSLGGASPEKLFF

SEQ ID NO: 512509 - protein, 13 aa, Homo sapiens
  CDR3 for alpha chain variable domain of TCR clone 256255 (TRAV8-6, TRAJ13)
CAVSSGGYQKVTF

SEQ ID NO: 512510 - protein, 15 aa, Homo sapiens
  CDR3 for beta chain variable domain of TCR clone 256255 (TRBV7-9, TRBJ2-7)
CASSVPVGQANEQYF

SEQ ID NO: 512511 - protein, 11 aa, Homo sapiens
  CDR3 for alpha chain variable domain of TCR clone 256256 (TRAV3, TRAJ21)
CAVGNFNKFYF

SEQ ID NO: 512512 - protein, 16 aa, Homo sapiens
  CDR3 for beta chain variable domain of TCR clone 256256 (TRBV5-1, TRBJ1-3)
CASSPWAPSSGNTIYF

SEQ ID NO: 512513 - protein, 14 aa, Homo sapiens
  CDR3 for alpha chain variable domain of TCR clone 256257 (TRAV12-2, TRAJ40)
WAGTIPSGTYKYIF

SEQ ID NO: 512514 - protein, 14 aa, Homo sapiens
  CDR3 for beta chain variable domain of TCR clone 256257 (TRBV20-1, TRBJ1-1)
CSAQTQIGGTEAFF

SEQ ID NO: 512515 - protein, 10 aa, Homo sapiens
  CDR3 for alpha chain variable domain of TCR clone 256258 (TRAV12-3, TRAJ49)
CAMNDDQFYF

SEQ ID NO: 512516 - protein, 15 aa, Homo sapiens
  CDR3 for beta chain variable domain of TCR clone 256258 (TRBV6-1, TRBJ2-7)
CASSESMGDFYERYF

SEQ ID NO: 512517 - protein, 16 aa, Homo sapiens
  CDR3 for alpha chain variable domain of TCR clone 256259 (TRAV8-4, TRAJ18)
CAVTANGGSTLRRLYF

SEQ ID NO: 512518 - protein, 14 aa, Homo sapiens
  CDR3 for beta chain variable domain of TCR clone 256259 (TRBV12-4, TRBJ1-2)
CASSSAGHIYGYTF

SEQ ID NO: 512519 - protein, 12 aa, Homo sapiens
  CDR3 for alpha chain variable domain of TCR clone 256260 (TRAV12-3, TRAJ54)
CGADRGAQKLVF

SEQ ID NO: 512520 - protein, 13 aa, Homo sapiens
  CDR3 for beta chain variable domain of TCR clone 256260 (TRBV12-4, TRBJ2-5)
CASSQTRGETRYF

SEQ ID NO: 512521 - protein, 13 aa, Homo sapiens
  CDR3 for alpha chain variable domain of TCR clone 256261 (TRAV13-1, TRAJ6)
CAASSGGSYIHTF

SEQ ID NO: 512522 - protein, 15 aa, Homo sapiens
  CDR3 for beta chain variable domain of TCR clone 256261 (TRBV12-4, TRBJ2-5)
CASSPPTGLQETQYF

SEQ ID NO: 512523 - protein, 15 aa, Homo sapiens
  CDR3 for alpha chain variable domain of TCR clone 256262 (TRAV27, TRAJ22)
CAGAPLKGSARQLTF

SEQ ID NO: 512524 - protein, 16 aa, Homo sapiens
  CDR3 for beta chain variable domain of TCR clone 256262 (TRBV19, TRBJ2-2)
CAGTLGASGAPGELFF

SEQ ID NO: 512525 - protein, 13 aa, Homo sapiens
  CDR3 for alpha chain variable domain of TCR clone 256263 (TRAV17, TRAJ9)
CATDYTGGFKTIF

SEQ ID NO: 512526 - protein, 15 aa, Homo sapiens
  CDR3 for beta chain variable domain of TCR clone 256263 (TRBV19, TRBJ2-2)
CASSPRTGWTGELFF

SEQ ID NO: 512527 - protein, 15 aa, Homo sapiens
  CDR3 for alpha chain variable domain of TCR clone 256264 (TRAV21, TRAJ48)
CAVPISNFGNEKLTF

SEQ ID NO: 512528 - protein, 17 aa, Homo sapiens
  CDR3 for beta chain variable domain of TCR clone 256264 (TRBV7-3, TRBJ2-6)
CASSLAASGTGANVLTF

SEQ ID NO: 512529 - protein, 16 aa, Homo sapiens
  CDR3 for alpha chain variable domain of TCR clone 256265 (TRAV3, TRAJ28)
CAVLPRSWAGSYQLTF

SEQ ID NO: 512530 - protein, 13 aa, Homo sapiens
  CDR3 for beta chain variable domain of TCR clone 256265 (TRBV12-4, TRBJ2-5)
CASRLAVQETQYF

SEQ ID NO: 512531 - protein, 13 aa, Homo sapiens
  CDR3 for alpha chain variable domain of TCR clone 256266 (TRAV12-2, TRAJ15)
CAVFNQAGTALIF

SEQ ID NO: 512532 - protein, 15 aa, Homo sapiens
  CDR3 for beta chain variable domain of TCR clone 256266 (TRBV7-8, TRBJ1-5)
GASSRGGGAGQPQHF

SEQ ID NO: 512533 - protein, 17 aa, Homo sapiens
  CDR3 for alpha chain variable domain of TCR clone 256267 (TRAV13-1, TRAJ31)
CAPRDRLMFGDGTQLVV

SEQ ID NO: 512534 - protein, 14 aa, Homo sapiens
  CDR3 for beta chain variable domain of TCR clone 256267 (TRBV7-9, TRBJ2-7)
CASSLEGTSSTSGR

SEQ ID NO: 512535 - protein, 16 aa, Homo sapiens
  CDR3 for alpha chain variable domain of TCR clone 256268 (TRAV3, TRAJ37)
CAVRPHGSGNTGKQIL

SEQ ID NO: 512536 - protein, 13 aa, Homo sapiens
  CDR3 for beta chain variable domain of TCR clone 256268 (TRBV2, TRBJ1-5)
CASGTGGYQPQHF

SEQ ID NO: 512537 - protein, 15 aa, Homo sapiens
  CDR3 for alpha chain variable domain of TCR clone 256269 (TRAV29/DV5, TRAJ24)
CAASGATDSWGKFQF

SEQ ID NO: 512538 - protein, 12 aa, Homo sapiens
  CDR3 for beta chain variable domain of TCR clone 256269 (TRBV11-2, TRBJ2-2)
CARSLPTGELFF

SEQ ID NO: 512539 - protein, 13 aa, Homo sapiens
  CDR3 for alpha chain variable domain of TCR clone 256270 (TRAV12-3, TRAJ33)
CAMSVNSNYQLIW

SEQ ID NO: 512540 - protein, 13 aa, Homo sapiens
  CDR3 for beta chain variable domain of TCR clone 256270 (TRBV7-2, TRBJ2-2)
CASSLAVTGELFY

SEQ ID NO: 512541 - protein, 14 aa, Homo sapiens
  CDR3 for alpha chain variable domain of TCR clone 256271 (TRAV17, TRAJ53)
CATDAGGSNYKLTF

SEQ ID NO: 512542 - protein, 16 aa, Homo sapiens
  CDR3 for beta chain variable domain of TCR clone 256271 (TRBV4-1, TRBJ1-1)
CASSQDAAMGNTEAFF

SEQ ID NO: 512543 - protein, 12 aa, Homo sapiens
  CDR3 for alpha chain variable domain of TCR clone 256272 (TRAV38-2/DV8, TRAJ48)
CALLSGNEKLTF

SEQ ID NO: 512544 - protein, 15 aa, Homo sapiens
  CDR3 for beta chain variable domain of TCR clone 256272 (TRBV6-1, TRBJ2-1)
CASSELSGQYNEQFF

SEQ ID NO: 512545 - protein, 18 aa, Homo sapiens
  CDR3 for alpha chain variable domain of TCR clone 256273 (TRAV13-2, TRAJ52)
CAETLLNAGGTSYGKLTF

SEQ ID NO: 512546 - protein, 14 aa, Homo sapiens
  CDR3 for beta chain variable domain of TCR clone 256273 (TRBV7-9, TRBJ2-1)
CASSSRVGFGEQFF

SEQ ID NO: 512547 - protein, 15 aa, Homo sapiens
  CDR3 for alpha chain variable domain of TCR clone 256274 (TRAV3, TRAJ20)
CAVRDIKLSDYKLSF

SEQ ID NO: 512548 - protein, 10 aa, Homo sapiens
  CDR3 for beta chain variable domain of TCR clone 256274 (TRBV2, TRBJ2-5)
CASSAATQYF

SEQ ID NO: 512549 - protein, 15 aa, Homo sapiens
  CDR3 for alpha chain variable domain of TCR clone 256275 (TRAV3, TRAJ22)
CAVRDRGGYARQLTF

SEQ ID NO: 512550 - protein, 17 aa, Homo sapiens
  CDR3 for beta chain variable domain of TCR clone 256275 (TRBV15, TRBJ2-3)
CATSGTTSEEGTDTQYF

SEQ ID NO: 512551 - protein, 15 aa, Homo sapiens
  CDR3 for alpha chain variable domain of TCR clone 256276 (TRAV12-1, TRAJ26)
CVVNSWVTMVRILSL

SEQ ID NO: 512552 - protein, 13 aa, Homo sapiens
  CDR3 for beta chain variable domain of TCR clone 256276 (TRBV10-3, TRBJ2-7)
CAPKLAVNYEQYF

SEQ ID NO: 512553 - protein, 14 aa, Homo sapiens
  CDR3 for alpha chain variable domain of TCR clone 256277 (TRAV3, TRAJ17)
CAVRDAAAGNKLTF

SEQ ID NO: 512554 - protein, 17 aa, Homo sapiens
  CDR3 for beta chain variable domain of TCR clone 256277 (TRBV20-1, TRBJ2-2)
CSASGSGQGGLTGELFF

SEQ ID NO: 512555 - protein, 14 aa, Homo sapiens
  CDR3 for alpha chain variable domain of TCR clone 256278 (TRAV8-3, TRAJ9)
CAVFYNTGGCKTIF

SEQ ID NO: 512556 - protein, 16 aa, Homo sapiens
  CDR3 for beta chain variable domain of TCR clone 256278 (TRBV11-2, TRBJ2-7)
CASSLAPTGVNYEQYF

SEQ ID NO: 512557 - protein, 14 aa, Homo sapiens
  CDR3 for alpha chain variable domain of TCR clone 256279 (TRAV21, TRAJ52)
CGRAGGTSYGKLTF

SEQ ID NO: 512558 - protein, 14 aa, Homo sapiens
  CDR3 for beta chain variable domain of TCR clone 256279 (TRBV19, TRBJ1-2)
CASSVLGDNYGYTF

SEQ ID NO: 512559 - protein, 14 aa, Homo sapiens
  CDR3 for alpha chain variable domain of TCR clone 256280 (TRAV23/DV6, TRAJ37)
CAASTFSNTGKLIF

SEQ ID NO: 512560 - protein, 15 aa, Homo sapiens
  CDR3 for beta chain variable domain of TCR clone 256280 (TRBV7-9, TRBJ2-7)
CASSPGGGLTYEQYF

SEQ ID NO: 512561 - protein, 13 aa, Homo sapiens
  CDR3 for alpha chain variable domain of TCR clone 256281 (TRAV21, TRAJ15)
CAVANQAGTALIF

SEQ ID NO: 512562 - protein, 13 aa, Homo sapiens
  CDR3 for beta chain variable domain of TCR clone 256281 (TRBV27, TRBJ2-2)
CQQFRAATGELFF

SEQ ID NO: 512563 - protein, 13 aa, Homo sapiens
  CDR3 for alpha chain variable domain of TCR clone 256282 (TRAV23/DV6, TRAJ22)
CALYSGSARQLTF

SEQ ID NO: 512564 - protein, 15 aa, Homo sapiens
  CDR3 for beta chain variable domain of TCR clone 256282 (TRBV11-2, TRBJ1-6)
CASSLDPWAVSPLHF

SEQ ID NO: 512565 - protein, 11 aa, Homo sapiens
  CDR3 for alpha chain variable domain of TCR clone 256283 (TRAV2, TRAJ13)
CASGGYLKVTF

SEQ ID NO: 512566 - protein, 15 aa, Homo sapiens
  CDR3 for beta chain variable domain of TCR clone 256283 (TRBV5-4, TRBJ2-7)
CASGRFGTGSYEQYF

SEQ ID NO: 512567 - protein, 14 aa, Homo sapiens
  CDR3 for alpha chain variable domain of TCR clone 256284 (TRAV8-3, TRAJ39)
CAVGANNAGNMLTF

SEQ ID NO: 512568 - protein, 16 aa, Homo sapiens
  CDR3 for beta chain variable domain of TCR clone 256284 (TRBV13, TRBJ2-2)
CASSPRTGEHTGELFF

SEQ ID NO: 512569 - protein, 15 aa, Homo sapiens
  CDR3 for alpha chain variable domain of TCR clone 256285 (TRAV12-2, TRAJ43)
CAFDMRFGAGTRLTV

SEQ ID NO: 512570 - protein, 16 aa, Homo sapiens
  CDR3 for beta chain variable domain of TCR clone 256285 (TRBV28, TRBJ2-7)
CASSPWVATGDLSQYF

SEQ ID NO: 512571 - protein, 17 aa, Homo sapiens
  CDR3 for alpha chain variable domain of TCR clone 256286 (TRAV12-2, TRAJ52)
CAVNPYAGGTSYGKLTF

SEQ ID NO: 512572 - protein, 16 aa, Homo sapiens
  CDR3 for beta chain variable domain of TCR clone 256286 (TRBV9, TRBJ2-7)
CASSAGPDRSPYEQYF

SEQ ID NO: 512573 - protein, 14 aa, Homo sapiens
  CDR3 for alpha chain variable domain of TCR clone 256287 (TRAV1-2, TRAJ16)
CAVNRCSDGQKLLF

SEQ ID NO: 512574 - protein, 14 aa, Homo sapiens
  CDR3 for beta chain variable domain of TCR clone 256287 (TRBV7-2, TRBJ2-7)
CASSPKTSFYEQYF

SEQ ID NO: 512575 - protein, 16 aa, Homo sapiens
  CDR3 for alpha chain variable domain of TCR clone 256288 (TRAV30, TRAJ24)
CGTEIVDADSWGKFQV

SEQ ID NO: 512576 - protein, 15 aa, Homo sapiens
  CDR3 for beta chain variable domain of TCR clone 256288 (TRBV28, TRBJ2-1)
CASSIIAGGRSEQFF

SEQ ID NO: 512577 - protein, 12 aa, Homo sapiens
  CDR3 for alpha chain variable domain of TCR clone 256289 (TRAV12-3, TRAJ34)
CAMGYNTDKLIF

SEQ ID NO: 512578 - protein, 16 aa, Homo sapiens
  CDR3 for beta chain variable domain of TCR clone 256289 (TRBV7-2, TRBJ2-5)
CASSSKWLSGQETQYF

SEQ ID NO: 512579 - protein, 13 aa, Homo sapiens
  CDR3 for alpha chain variable domain of TCR clone 256290 (TRAV21, TRAJ27)
CAARPGNAGKSTS

SEQ ID NO: 512580 - protein, 14 aa, Homo sapiens
  CDR3 for beta chain variable domain of TCR clone 256290 (TRBV7-6, TRBJ2-3)
CASSLGTVPDTQYF

SEQ ID NO: 512581 - protein, 14 aa, Homo sapiens
  CDR3 for alpha chain variable domain of TCR clone 256291 (TRAV3, TRAJ9)
CAVRLNTGGFKTIF

SEQ ID NO: 512582 - protein, 14 aa, Homo sapiens
  CDR3 for beta chain variable domain of TCR clone 256291 (TRBV20-1, TRBJ2-5)
CSALVPGYQETQYF

SEQ ID NO: 512583 - protein, 11 aa, Homo sapiens
  CDR3 for alpha chain variable domain of TCR clone 256292 (TRAV12-3, TRAJ27)
CAMANAGKSTF

SEQ ID NO: 512584 - protein, 14 aa, Homo sapiens
  CDR3 for beta chain variable domain of TCR clone 256292 (TRBV4-1, TRBJ2-2)
CASSHAVNTGELFF

SEQ ID NO: 512585 - protein, 16 aa, Homo sapiens
  CDR3 for alpha chain variable domain of TCR clone 256293 (TRAV26-1, TRAJ31)
CIVRPPVLNNNARLMF

SEQ ID NO: 512586 - protein, 17 aa, Homo sapiens
  CDR3 for beta chain variable domain of TCR clone 256293 (TRBV5-1, TRBJ1-5)
CASSLVGREEGNQPQHF

SEQ ID NO: 512587 - protein, 14 aa, Homo sapiens
  CDR3 for alpha chain variable domain of TCR clone 256294 (TRAV12-2, TRAJ13)
CAVKKTGGYQKVTF

SEQ ID NO: 512588 - protein, 22 aa, Homo sapiens
  CDR3 for beta chain variable domain of TCR clone 256294 (TRBV4-2, TRBJ2-3)
CQQPRSPRASSISGGRGDTQYF

SEQ ID NO: 512589 - protein, 12 aa, Homo sapiens
  CDR3 for alpha chain variable domain of TCR clone 256295 (TRAV13-1, TRAJ49)
CAASPMGNPFYF

SEQ ID NO: 512590 - protein, 17 aa, Homo sapiens
  CDR3 for beta chain variable domain of TCR clone 256295 (TRBV11-2, TRBJ2-1)
CASSLYPPGVEYNEQFF

SEQ ID NO: 512591 - protein, 14 aa, Homo sapiens
  CDR3 for alpha chain variable domain of TCR clone 256296 (TRAV1-2, TRAJ29)
CAVRTDSGNTPLIF

SEQ ID NO: 512592 - protein, 14 aa, Homo sapiens
  CDR3 for beta chain variable domain of TCR clone 256296 (TRBV7-2, TRBJ2-7)
CASSPKTSFYEQYF

SEQ ID NO: 512593 - protein, 11 aa, Homo sapiens
  CDR3 for alpha chain variable domain of TCR clone 256297 (TRAV2, TRAJ21)
CAVFNFNKFYF

SEQ ID NO: 512594 - protein, 14 aa, Homo sapiens
  CDR3 for beta chain variable domain of TCR clone 256297 (TRBV15, TRBJ2-3)
CATRSGTSTDSQYF

SEQ ID NO: 512595 - protein, 14 aa, Homo sapiens
  CDR3 for alpha chain variable domain of TCR clone 256298 (TRAV17, TRAJ45)
CATDGRGGADGLTF

SEQ ID NO: 512596 - protein, 16 aa, Homo sapiens
  CDR3 for beta chain variable domain of TCR clone 256298 (TRBV20-1, TRBJ1-4)
CSAPGQGLLTNEKLFF

SEQ ID NO: 512597 - protein, 15 aa, Homo sapiens
  CDR3 for alpha chain variable domain of TCR clone 256299 (TRAV3, TRAJ22)
CAVRDRGGSARQLTF

SEQ ID NO: 512598 - protein, 12 aa, Homo sapiens
  CDR3 for beta chain variable domain of TCR clone 256299 (TRBV6-5, TRBJ2-3)
CASSPSTDTQYF

SEQ ID NO: 512599 - protein, 13 aa, Homo sapiens
  CDR3 for alpha chain variable domain of TCR clone 256300 (TRAV2, TRAJ29)
CAAGNSGNTPLVF

SEQ ID NO: 512600 - protein, 16 aa, Homo sapiens
  CDR3 for beta chain variable domain of TCR clone 256300 (TRBV7-9, TRBJ1-2)
FASSPGGGAINYGYTF

SEQ ID NO: 512601 - protein, 13 aa, Homo sapiens
  CDR3 for alpha chain variable domain of TCR clone 256301 (TRAV39, TRAJ17)
CAAQFTAVNKLTF

SEQ ID NO: 512602 - protein, 13 aa, Homo sapiens
  CDR3 for beta chain variable domain of TCR clone 256301 (TRBV12-4, TRBJ2-5)
CASRKRGKETQYF

SEQ ID NO: 512603 - protein, 12 aa, Homo sapiens
  CDR3 for alpha chain variable domain of TCR clone 256302 (TRAV16, TRAJ10)
CSRTGGGNKLTF

SEQ ID NO: 512604 - protein, 13 aa, Homo sapiens
  CDR3 for beta chain variable domain of TCR clone 256302 (TRBV19, TRBJ1-1)
CASSITGESEAFF

SEQ ID NO: 512605 - protein, 11 aa, Homo sapiens
  CDR3 for alpha chain variable domain of TCR clone 256303 (TRAV12-1, TRAJ8)
CVVTGFQKLVF

SEQ ID NO: 512606 - protein, 14 aa, Homo sapiens
  CDR3 for beta chain variable domain of TCR clone 256303 (TRBV19, TRBJ2-1)
CASGKSTQYKEQFF

SEQ ID NO: 512607 - protein, 14 aa, Homo sapiens
  CDR3 for alpha chain variable domain of TCR clone 256304 (TRAV17, TRAJ53)
CATDAGGSNYKLTF

SEQ ID NO: 512608 - protein, 14 aa, Homo sapiens
  CDR3 for beta chain variable domain of TCR clone 256304 (TRBV11-2, TRBJ1-5)
CASSLDRGRQPQHF

SEQ ID NO: 512609 - protein, 10 aa, Homo sapiens
  CDR3 for alpha chain variable domain of TCR clone 256305 (TRAV26-1, TRAJ40)
CIAGTYKYIF

SEQ ID NO: 512610 - protein, 13 aa, Homo sapiens
  CDR3 for beta chain variable domain of TCR clone 256305 (TRBV20-1, TRBJ2-5)
CSAREAFQETQYF

SEQ ID NO: 512611 - protein, 16 aa, Homo sapiens
  CDR3 for alpha chain variable domain of TCR clone 256306 (TRAV13-1, TRAJ48)
CAASIFGNFGNEKLTF

SEQ ID NO: 512612 - protein, 15 aa, Homo sapiens
  CDR3 for beta chain variable domain of TCR clone 256306 (TRBV11-2, TRBJ2-1)
CASSKNRGLIYEQFF

SEQ ID NO: 512613 - protein, 14 aa, Homo sapiens
  CDR3 for alpha chain variable domain of TCR clone 256307 (TRAV23/DV6, TRAJ11)
CAASLESGYSTITF

SEQ ID NO: 512614 - protein, 13 aa, Homo sapiens
  CDR3 for beta chain variable domain of TCR clone 256307 (TRBV4-1, TRBJ2-5)
CASSLTRGETQYF

SEQ ID NO: 512615 - protein, 12 aa, Homo sapiens
  CDR3 for alpha chain variable domain of TCR clone 256308 (TRAV23/DV6, TRAJ30)
CAASKGDAKIIF

SEQ ID NO: 512616 - protein, 15 aa, Homo sapiens
  CDR3 for beta chain variable domain of TCR clone 256308 (TRBV12-4, TRBJ2-1)
CASRPTRTGYNEQFF

SEQ ID NO: 512617 - protein, 15 aa, Homo sapiens
  CDR3 for alpha chain variable domain of TCR clone 256309 (TRAV38-2/DV8, TRAJ39)
CAYRTSNNAGNLLTF

SEQ ID NO: 512618 - protein, 15 aa, Homo sapiens
  CDR3 for beta chain variable domain of TCR clone 256309 (TRBV27, TRBJ1-6)
CASSFDRGLGSPLHF

SEQ ID NO: 512619 - protein, 14 aa, Homo sapiens
  CDR3 for alpha chain variable domain of TCR clone 256310 (TRAV13-2, TRAJ47)
CAESSMDYGNKLVF

SEQ ID NO: 512620 - protein, 12 aa, Homo sapiens
  CDR3 for beta chain variable domain of TCR clone 256310 (TRBV5-1, TRBJ2-1)
CASIGGYNEQFF

SEQ ID NO: 512621 - protein, 18 aa, Homo sapiens
  CDR3 for alpha chain variable domain of TCR clone 256311 (TRAV9-2, TRAJ52)
CSLSRHNAGGTSYGKLTF

SEQ ID NO: 512622 - protein, 13 aa, Homo sapiens
  CDR3 for beta chain variable domain of TCR clone 256311 (TRBV9, TRBJ2-1)
CASSVGQGGEQFF

SEQ ID NO: 512623 - protein, 16 aa, Homo sapiens
  CDR3 for alpha chain variable domain of TCR clone 256312 (TRAV3, TRAJ10)
CAVRDMRAGGGKKLNF

SEQ ID NO: 512624 - protein, 14 aa, Homo sapiens
  CDR3 for beta chain variable domain of TCR clone 256312 (TRBV7-2, TRBJ1-4)
CASSVVEGGEKLFF

SEQ ID NO: 512625 - protein, 14 aa, Homo sapiens
  CDR3 for alpha chain variable domain of TCR clone 256313 (TRAV3, TRAJ6)
CAVRDGMGRRKLHT

SEQ ID NO: 512626 - protein, 15 aa, Homo sapiens
  CDR3 for beta chain variable domain of TCR clone 256313 (TRBV9, TRBJ2-1)
CAISLAGSSYNEQFF

SEQ ID NO: 512627 - protein, 13 aa, Homo sapiens
  CDR3 for alpha chain variable domain of TCR clone 256314 (TRAV8-3, TRAJ43)
CAVVPYNNNDMRF

SEQ ID NO: 512628 - protein, 16 aa, Homo sapiens
  CDR3 for beta chain variable domain of TCR clone 256314 (TRBV12-4, TRBJ2-5)
CASSFFVRGRQETQYF

SEQ ID NO: 512629 - protein, 14 aa, Homo sapiens
  CDR3 for alpha chain variable domain of TCR clone 256315 (TRAV27, TRAJ44)
CAASFTGTASKLTF

SEQ ID NO: 512630 - protein, 17 aa, Homo sapiens
  CDR3 for beta chain variable domain of TCR clone 256315 (TRBV6-5, TRBJ2-4)
CASRPTPGQGSKNIQYF

SEQ ID NO: 512631 - protein, 16 aa, Homo sapiens
  CDR3 for alpha chain variable domain of TCR clone 256316 (TRAV30, TRAJ24)
CGTEIVDADSWGKFKF

SEQ ID NO: 512632 - protein, 14 aa, Homo sapiens
  CDR3 for beta chain variable domain of TCR clone 256316 (TRBV12-5, TRBJ2-5)
FASGSRTHQETQYV

SEQ ID NO: 512633 - protein, 16 aa, Homo sapiens
  CDR3 for alpha chain variable domain of TCR clone 256317 (TRAV12-3, TRAJ53)
CAMSPGSGGSNYKLTS

SEQ ID NO: 512634 - protein, 14 aa, Homo sapiens
  CDR3 for beta chain variable domain of TCR clone 256317 (TRBV4-2, TRBJ2-3)
CASRETRAPGMQYF

SEQ ID NO: 512635 - protein, 14 aa, Homo sapiens
  CDR3 for alpha chain variable domain of TCR clone 256318 (TRAV17, TRAJ4)
CATVPSGGYNKLIF

SEQ ID NO: 512636 - protein, 14 aa, Homo sapiens
  CDR3 for beta chain variable domain of TCR clone 256318 (TRBV9, TRBJ2-7)
CASSVGVGSYEQYF

SEQ ID NO: 512637 - protein, 13 aa, Homo sapiens
  CDR3 for alpha chain variable domain of TCR clone 256319 (TRAV12-2, TRAJ20)
CAVYSSNDYKLSF

SEQ ID NO: 512638 - protein, 14 aa, Homo sapiens
  CDR3 for beta chain variable domain of TCR clone 256319 (TRBV7-2, TRBJ2-7)
CASSPKTSFYEQYF

SEQ ID NO: 512639 - protein, 15 aa, Homo sapiens
  CDR3 for alpha chain variable domain of TCR clone 256320 (TRAV3, TRAJ20)
CAVRDIKFSDYKLSF

SEQ ID NO: 512640 - protein, 15 aa, Homo sapiens
  CDR3 for beta chain variable domain of TCR clone 256320 (TRBV7-9, TRBJ1-6)
CASSSPGCGNSPLHF

SEQ ID NO: 512641 - protein, 14 aa, Homo sapiens
  CDR3 for alpha chain variable domain of TCR clone 256321 (TRAV9-2, TRAJ39)
CALYIYNAGNMLTF

SEQ ID NO: 512642 - protein, 16 aa, Homo sapiens
  CDR3 for beta chain variable domain of TCR clone 256321 (TRBV27, TRBJ2-1)
CASSSRLAGNYNEQFF

SEQ ID NO: 512643 - protein, 13 aa, Homo sapiens
  CDR3 for alpha chain variable domain of TCR clone 256322 (TRAV26-1, TRAJ34)
CIVRGHNTGKLIF

SEQ ID NO: 512644 - protein, 15 aa, Homo sapiens
  CDR3 for beta chain variable domain of TCR clone 256322 (TRBV4-1, TRBJ2-7)
CASSQEWGPSYEQYF

SEQ ID NO: 512645 - protein, 16 aa, Homo sapiens
  CDR3 for alpha chain variable domain of TCR clone 256323 (TRAV12-3, TRAJ53)
CAMSPGSGGSNYKLTF

SEQ ID NO: 512646 - protein, 14 aa, Homo sapiens
  CDR3 for beta chain variable domain of TCR clone 256323 (TRBV4-3, TRBJ2-1)
CASSQDGTTNEQFF

SEQ ID NO: 512647 - protein, 15 aa, Homo sapiens
  CDR3 for alpha chain variable domain of TCR clone 256324 (TRAV2, TRAJ11)
CAVGGRNSGYSTLTF

SEQ ID NO: 512648 - protein, 14 aa, Homo sapiens
  CDR3 for beta chain variable domain of TCR clone 256324 (TRBV7-3, TRBJ2-1)
CASSLSGGANEQFF

SEQ ID NO: 512649 - protein, 12 aa, Homo sapiens
  CDR3 for alpha chain variable domain of TCR clone 256325 (TRAV1-2, TRAJ42)
CVAGGSQGNLIF

SEQ ID NO: 512650 - protein, 12 aa, Homo sapiens
  CDR3 for beta chain variable domain of TCR clone 256325 (TRBV24-1, TRBJ1-1)
CATSDSDRGDFF

SEQ ID NO: 512651 - protein, 18 aa, Homo sapiens
  CDR3 for alpha chain variable domain of TCR clone 256326 (TRAV21, TRAJ52)
CAVRPSPAGGTSYGKLTF

SEQ ID NO: 512652 - protein, 17 aa, Homo sapiens
  CDR3 for beta chain variable domain of TCR clone 256326 (TRBV4-1, TRBJ2-2)
CASSHPHDGSKVGELFF

SEQ ID NO: 512653 - protein, 14 aa, Homo sapiens
  CDR3 for alpha chain variable domain of TCR clone 256327 (TRAV17, TRAJ22)
CATSPSGSARQLTF

SEQ ID NO: 512654 - protein, 15 aa, Homo sapiens
  CDR3 for beta chain variable domain of TCR clone 256327 (TRBV4-1, TRBJ2-5)
CASCQWDLYQETQYF

SEQ ID NO: 512655 - protein, 15 aa, Homo sapiens
  CDR3 for alpha chain variable domain of TCR clone 256328 (TRAV17, TRAJ35)
CATAFVIGVGNVLHC

SEQ ID NO: 512656 - protein, 14 aa, Homo sapiens
  CDR3 for beta chain variable domain of TCR clone 256328 (TRBV6-1, TRBJ1-3)
CASVQGGGGNTIYF

SEQ ID NO: 512657 - protein, 14 aa, Homo sapiens
  CDR3 for alpha chain variable domain of TCR clone 256329 (TRAV12-2, TRAJ13)
CAVKKTGGYQKVTF

SEQ ID NO: 512658 - protein, 16 aa, Homo sapiens
  CDR3 for beta chain variable domain of TCR clone 256329 (TRBV20-1, TRBJ1-4)
CSAPGQGLLTNETLFF

SEQ ID NO: 512659 - protein, 14 aa, Homo sapiens
  CDR3 for alpha chain variable domain of TCR clone 256330 (TRAV3, TRAJ36)
CAARDGTGANNLFF

SEQ ID NO: 512660 - protein, 16 aa, Homo sapiens
  CDR3 for beta chain variable domain of TCR clone 256330 (TRBV20-1, TRBJ2-6)
CSAREGPGVGANVLTF

SEQ ID NO: 512661 - protein, 11 aa, Homo sapiens
  CDR3 for alpha chain variable domain of TCR clone 256331 (TRAV35, TRAJ22)
CAGPGVGQLTF

SEQ ID NO: 512662 - protein, 14 aa, Homo sapiens
  CDR3 for beta chain variable domain of TCR clone 256331 (TRBV4-1, TRBJ2-2)
CASSQAVNTGELFF

SEQ ID NO: 512663 - protein, 14 aa, Homo sapiens
  CDR3 for alpha chain variable domain of TCR clone 256332 (TRAV8-4, TRAJ9)
CAVRINTGGFKTIL

SEQ ID NO: 512664 - protein, 13 aa, Homo sapiens
  CDR3 for beta chain variable domain of TCR clone 256332 (TRBV7-3, TRBJ1-1)
CASSQDWGAEAFF

SEQ ID NO: 512665 - protein, 15 aa, Homo sapiens
  CDR3 for alpha chain variable domain of TCR clone 256333 (TRAV8-3, TRAJ27)
CAVGPSKTNAGKSTF

SEQ ID NO: 512666 - protein, 13 aa, Homo sapiens
  CDR3 for beta chain variable domain of TCR clone 256333 (TRBV12-5, TRBJ1-2)
CASGVRTGNGYPF

SEQ ID NO: 512667 - protein, 11 aa, Homo sapiens
  CDR3 for alpha chain variable domain of TCR clone 256334 (TRAV21, TRAJ31)
CAVRNNARLMF

SEQ ID NO: 512668 - protein, 15 aa, Homo sapiens
  CDR3 for beta chain variable domain of TCR clone 256334 (TRBV2, TRBJ2-7)
CASSEGLARSYEQYF

SEQ ID NO: 512669 - protein, 15 aa, Homo sapiens
  CDR3 for alpha chain variable domain of TCR clone 256335 (TRAV35, TRAJ40)
CAGQLWDSGTYKYIF

SEQ ID NO: 512670 - protein, 12 aa, Homo sapiens
  CDR3 for beta chain variable domain of TCR clone 256335 (TRBV7-8, TRBJ2-7)
GASSLAGYEQYF

SEQ ID NO: 512671 - protein, 14 aa, Homo sapiens
  CDR3 for alpha chain variable domain of TCR clone 256336 (TRAV1-2, TRAJ15)
CAVRDRQAGTALIF

SEQ ID NO: 512672 - protein, 16 aa, Homo sapiens
  CDR3 for beta chain variable domain of TCR clone 256336 (TRBV5-7, TRBJ2-7)
PAANEGGGRGSYEQYF

SEQ ID NO: 512673 - protein, 13 aa, Homo sapiens
  CDR3 for alpha chain variable domain of TCR clone 256337 (TRAV36/DV7, TRAJ7)
CAVERYGNNRLAF

SEQ ID NO: 512674 - protein, 16 aa, Homo sapiens
  CDR3 for beta chain variable domain of TCR clone 256337 (TRBV5-1, TRBJ1-1)
CASSSGGNSLNTEAFF

SEQ ID NO: 512675 - protein, 14 aa, Homo sapiens
  CDR3 for alpha chain variable domain of TCR clone 256338 (TRAV1-2, TRAJ16)
CAVNRFSDGPKLLF

SEQ ID NO: 512676 - protein, 16 aa, Homo sapiens
  CDR3 for beta chain variable domain of TCR clone 256338 (TRBV18, TRBJ1-4)
CASSLQTVATNEKLFF

SEQ ID NO: 512677 - protein, 22 aa, Homo sapiens
  CDR3 for alpha chain variable domain of TCR clone 256339 (TRAV27, TRAJ38)
CAARRNAGNNHIQNPDPAVYQL

SEQ ID NO: 512678 - protein, 13 aa, Homo sapiens
  CDR3 for beta chain variable domain of TCR clone 256339 (TRBV7-2, TRBJ2-7)
CASSSPSGSEQYF

SEQ ID NO: 512679 - protein, 15 aa, Homo sapiens
  CDR3 for alpha chain variable domain of TCR clone 256340 (TRAV3, TRAJ36)
CAVRASQTGANNLFF

SEQ ID NO: 512680 - protein, 13 aa, Homo sapiens
  CDR3 for beta chain variable domain of TCR clone 256340 (TRBV28, TRBJ2-7)
CASSPSGTYEQYF

SEQ ID NO: 512681 - protein, 14 aa, Homo sapiens
  CDR3 for alpha chain variable domain of TCR clone 256341 (TRAV8-1, TRAJ5)
CAVRTDTGRRALTF

SEQ ID NO: 512682 - protein, 13 aa, Homo sapiens
  CDR3 for beta chain variable domain of TCR clone 256341 (TRBV9, TRBJ2-7)
CASSVGQGGEQYF

SEQ ID NO: 512683 - protein, 15 aa, Homo sapiens
  CDR3 for alpha chain variable domain of TCR clone 256342 (TRAV3, TRAJ5)
CAVRDLDTGRRAFTF

SEQ ID NO: 512684 - protein, 13 aa, Homo sapiens
  CDR3 for beta chain variable domain of TCR clone 256342 (TRBV12-4, TRBJ2-2)
CASSITGSGELFF

SEQ ID NO: 512685 - protein, 14 aa, Homo sapiens
  CDR3 for alpha chain variable domain of TCR clone 256343 (TRAV1-2, TRAJ8)
CAVREDTGFQKLVL

SEQ ID NO: 512686 - protein, 22 aa, Homo sapiens
  CDR3 for beta chain variable domain of TCR clone 256343 (TRBV7-3, TRBJ2-2)
GGTQPCISVPAAQEDTPGSCFF

SEQ ID NO: 512687 - protein, 14 aa, Homo sapiens
  CDR3 for alpha chain variable domain of TCR clone 256344 (TRAV21, TRAJ11)
CAVRRNSGYSTLTF

SEQ ID NO: 512688 - protein, 11 aa, Homo sapiens
  CDR3 for beta chain variable domain of TCR clone 256344 (TRBV11-2, TRBJ1-1)
CASSINTEAFC

SEQ ID NO: 512689 - protein, 16 aa, Homo sapiens
  CDR3 for alpha chain variable domain of TCR clone 256345 (TRAV30, TRAJ24)
CGTEIVDADSWGKFQF

SEQ ID NO: 512690 - protein, 17 aa, Homo sapiens
  CDR3 for beta chain variable domain of TCR clone 256345 (TRBV20-1, TRBJ2-1)
CSARDPLAGVWDNEQFF

SEQ ID NO: 512691 - protein, 15 aa, Homo sapiens
  CDR3 for alpha chain variable domain of TCR clone 256346 (TRAV8-3, TRAJ44)
CAVGAGGGTASKLSF

SEQ ID NO: 512692 - protein, 12 aa, Homo sapiens
  CDR3 for beta chain variable domain of TCR clone 256346 (TRBV7-8, TRBJ2-4)
CASSLGGNIQYF

SEQ ID NO: 512693 - protein, 13 aa, Homo sapiens
  CDR3 for alpha chain variable domain of TCR clone 256347 (TRAV20, TRAJ34)
CAVSSYNTDKLIF

SEQ ID NO: 512694 - protein, 15 aa, Homo sapiens
  CDR3 for beta chain variable domain of TCR clone 256347 (TRBV20-1, TRBJ1-2)
CSAAGEGAGIYGYTF

SEQ ID NO: 512695 - protein, 16 aa, Homo sapiens
  CDR3 for alpha chain variable domain of TCR clone 256348 (TRAV30, TRAJ24)
CVPEIVDADSWGKFQF

SEQ ID NO: 512696 - protein, 14 aa, Homo sapiens
  CDR3 for beta chain variable domain of TCR clone 256348 (TRBV12-5, TRBJ2-5)
CASGSRTHQETQYF

SEQ ID NO: 512697 - protein, 15 aa, Homo sapiens
  CDR3 for alpha chain variable domain of TCR clone 256349 (TRAV17, TRAJ57)
CATGPSQGGSEKLVF

SEQ ID NO: 512698 - protein, 15 aa, Homo sapiens
  CDR3 for beta chain variable domain of TCR clone 256349 (TRBV9, TRBJ1-6)
CASSVAGTGYSPLHF

SEQ ID NO: 512699 - protein, 13 aa, Homo sapiens
  CDR3 for alpha chain variable domain of TCR clone 256350 (TRAV3, TRAJ27)
CAVRPLGAGKSTF

SEQ ID NO: 512700 - protein, 16 aa, Homo sapiens
  CDR3 for beta chain variable domain of TCR clone 256350 (TRBV12-4, TRBJ2-1)
CASSPQERPSYNEQFF

SEQ ID NO: 512701 - protein, 17 aa, Homo sapiens
  CDR3 for alpha chain variable domain of TCR clone 256351 (TRAV36/DV7, TRAJ52)
CAVAQRAGGTSYGKLTF

SEQ ID NO: 512702 - protein, 13 aa, Homo sapiens
  CDR3 for beta chain variable domain of TCR clone 256351 (TRBV7-7, TRBJ2-3)
CASSLSRADTQYF

SEQ ID NO: 512703 - protein, 14 aa, Homo sapiens
  CDR3 for alpha chain variable domain of TCR clone 256352 (TRAV1-2, TRAJ16)
CAVNRFSDGQKLLF

SEQ ID NO: 512704 - protein, 11 aa, Homo sapiens
  CDR3 for beta chain variable domain of TCR clone 256352 (TRBV24-1, TRBJ2-3)
CATASTDTQYF

SEQ ID NO: 512705 - protein, 13 aa, Homo sapiens
  CDR3 for alpha chain variable domain of TCR clone 256353 (TRAV12-1, TRAJ49)
CVVNTNTGNQFYF

SEQ ID NO: 512706 - protein, 15 aa, Homo sapiens
  CDR3 for beta chain variable domain of TCR clone 256353 (TRBV11-2, TRBJ2-1)
CASSSPSTRYNEQFF

SEQ ID NO: 512707 - protein, 13 aa, Homo sapiens
  CDR3 for alpha chain variable domain of TCR clone 256354 (TRAV12-3, TRAJ53)
CAMRGGSNYKLTF

SEQ ID NO: 512708 - protein, 13 aa, Homo sapiens
  CDR3 for beta chain variable domain of TCR clone 256354 (TRBV10-3, TRBJ1-2)
CAISERDSYGYTF

SEQ ID NO: 512709 - protein, 12 aa, Homo sapiens
  CDR3 for alpha chain variable domain of TCR clone 256355 (TRAV26-1, TRAJ17)
CISQSCRQQANF

SEQ ID NO: 512710 - protein, 16 aa, Homo sapiens
  CDR3 for beta chain variable domain of TCR clone 256355 (TRBV28, TRBJ1-4)
CASSSRTGAANEKLFF

SEQ ID NO: 512711 - protein, 12 aa, Homo sapiens
  CDR3 for alpha chain variable domain of TCR clone 256356 (TRAV16, TRAJ26)
CASKDGGHNFVF

SEQ ID NO: 512712 - protein, 13 aa, Homo sapiens
  CDR3 for beta chain variable domain of TCR clone 256356 (TRBV25-1, TRBJ1-1)
CASSDRGRAEAFF

SEQ ID NO: 512713 - protein, 12 aa, Homo sapiens
  CDR3 for alpha chain variable domain of TCR clone 256357 (TRAV12-3, TRAJ40)
CAMSSGTYKYIF

SEQ ID NO: 512714 - protein, 15 aa, Homo sapiens
  CDR3 for beta chain variable domain of TCR clone 256357 (TRBV11-1, TRBJ2-7)
CASSLNYGASYEQYF

SEQ ID NO: 512715 - protein, 15 aa, Homo sapiens
  CDR3 for alpha chain variable domain of TCR clone 256358 (TRAV3, TRAJ42)
CAVRGGTGSQGNLIF

SEQ ID NO: 512716 - protein, 14 aa, Homo sapiens
  CDR3 for beta chain variable domain of TCR clone 256358 (TRBV6-4, TRBJ1-1)
RASRADREGTEAFF

SEQ ID NO: 512717 - protein, 15 aa, Homo sapiens
  CDR3 for alpha chain variable domain of TCR clone 256359 (TRAV8-1, TRAJ6)
CAVNAGGGGSYIPTF

SEQ ID NO: 512718 - protein, 14 aa, Homo sapiens
  CDR3 for beta chain variable domain of TCR clone 256359 (TRBV25-1, TRBJ1-6)
CASSLSADISPLHF

SEQ ID NO: 512719 - protein, 11 aa, Homo sapiens
  CDR3 for alpha chain variable domain of TCR clone 256360 (TRAV21, TRAJ31)
CAVRNNARLMF

SEQ ID NO: 512720 - protein, 14 aa, Homo sapiens
  CDR3 for beta chain variable domain of TCR clone 256360 (TRBV7-2, TRBJ2-5)
CASSPAGNQETQYF

SEQ ID NO: 512721 - protein, 15 aa, Homo sapiens
  CDR3 for alpha chain variable domain of TCR clone 256361 (TRAV27, TRAJ38)
CAARRNAGNNRKRIW

SEQ ID NO: 512722 - protein, 15 aa, Homo sapiens
  CDR3 for beta chain variable domain of TCR clone 256361 (TRBV7-2, TRBJ2-7)
CASSWGQGAIYEQYF

SEQ ID NO: 512723 - protein, 15 aa, Homo sapiens
  CDR3 for alpha chain variable domain of TCR clone 256362 (TRAV8-3, TRAJ7)
CAVGSISYGNNRLAF

SEQ ID NO: 512724 - protein, 13 aa, Homo sapiens
  CDR3 for beta chain variable domain of TCR clone 256362 (TRBV4-1, TRBJ2-2)
CASSQENTGELFF

SEQ ID NO: 512725 - protein, 13 aa, Homo sapiens
  CDR3 for alpha chain variable domain of TCR clone 256363 (TRAV12-2, TRAJ4)
CAGFSGGYNKLIF

SEQ ID NO: 512726 - protein, 13 aa, Homo sapiens
  CDR3 for beta chain variable domain of TCR clone 256363 (TRBV19, TRBJ1-5)
CASSIDRDQPQHF

SEQ ID NO: 512727 - protein, 13 aa, Homo sapiens
  CDR3 for alpha chain variable domain of TCR clone 256364 (TRAV21, TRAJ57)
CAGIEGGSEKLVF

SEQ ID NO: 512728 - protein, 15 aa, Homo sapiens
  CDR3 for beta chain variable domain of TCR clone 256364 (TRBV10-3, TRBJ2-5)
CAISEFGRGQETQYF

SEQ ID NO: 512729 - protein, 15 aa, Homo sapiens
  CDR3 for alpha chain variable domain of TCR clone 256365 (TRAV2, TRAJ11)
CAVDDPNSGYSTLTF

SEQ ID NO: 512730 - protein, 15 aa, Homo sapiens
  CDR3 for beta chain variable domain of TCR clone 256365 (TRBV20-1, TRBJ2-7)
CSARDRVSGMDEQYF

SEQ ID NO: 512731 - protein, 12 aa, Homo sapiens
  CDR3 for alpha chain variable domain of TCR clone 256366 (TRAV23/DV6, TRAJ16)
CAATGTGQKLLF

SEQ ID NO: 512732 - protein, 15 aa, Homo sapiens
  CDR3 for beta chain variable domain of TCR clone 256366 (TRBV5-1, TRBJ2-3)
CASSLKTASTDTQYF

SEQ ID NO: 512733 - protein, 14 aa, Homo sapiens
  CDR3 for alpha chain variable domain of TCR clone 256367 (TRAV23/DV6, TRAJ36)
CAASFPPGANNLFF

SEQ ID NO: 512734 - protein, 13 aa, Homo sapiens
  CDR3 for beta chain variable domain of TCR clone 256367 (TRBV5-1, TRBJ1-1)
CASSLGTDAEAFF

SEQ ID NO: 512735 - protein, 11 aa, Homo sapiens
  CDR3 for alpha chain variable domain of TCR clone 256368 (TRAV12-1, TRAJ21)
CVVNNFNQFYF

SEQ ID NO: 512736 - protein, 14 aa, Homo sapiens
  CDR3 for beta chain variable domain of TCR clone 256368 (TRBV15, TRBJ1-5)
CATSREQSNQPQHF

SEQ ID NO: 512737 - protein, 13 aa, Homo sapiens
  CDR3 for alpha chain variable domain of TCR clone 256369 (TRAV1-2, TRAJ11)
CAVRREGYRTLTF

SEQ ID NO: 512738 - protein, 14 aa, Homo sapiens
  CDR3 for beta chain variable domain of TCR clone 256369 (TRBV25-1, TRBJ1-1)
CASTHLGGNTEAFF

SEQ ID NO: 512739 - protein, 15 aa, Homo sapiens
  CDR3 for alpha chain variable domain of TCR clone 256370 (TRAV12-3, TRAJ49)
CAMAVTPNTVNQFYF

SEQ ID NO: 512740 - protein, 18 aa, Homo sapiens
  CDR3 for beta chain variable domain of TCR clone 256370 (TRBV4-1, TRBJ1-5)
CASSRAPRGQGLNQPQHF

SEQ ID NO: 512741 - protein, 13 aa, Homo sapiens
  CDR3 for alpha chain variable domain of TCR clone 256371 (TRAV8-6, TRAJ32)
CAVSDRATNKIIF

SEQ ID NO: 512742 - protein, 13 aa, Homo sapiens
  CDR3 for beta chain variable domain of TCR clone 256371 (TRBV11-2, TRBJ2-7)
CASSLDLGYEQYF

SEQ ID NO: 512743 - protein, 14 aa, Homo sapiens
  CDR3 for alpha chain variable domain of TCR clone 256372 (TRAV2, TRAJ9)
CAVEERSGGFKTIF

SEQ ID NO: 512744 - protein, 17 aa, Homo sapiens
  CDR3 for beta chain variable domain of TCR clone 256372 (TRBV4-1, TRBJ2-7)
CASSRDPLGVRGGEQYF

SEQ ID NO: 512745 - protein, 14 aa, Homo sapiens
  CDR3 for alpha chain variable domain of TCR clone 256373 (TRAV13-1, TRAJ40)
CVASMTSGTYKYIF

SEQ ID NO: 512746 - protein, 23 aa, Homo sapiens
  CDR3 for beta chain variable domain of TCR clone 256373 (TRBV7-3, TRBJ2-1)
GGTQPCISVPAARRGGGEVEQFF

SEQ ID NO: 512747 - protein, 12 aa, Homo sapiens
  CDR3 for alpha chain variable domain of TCR clone 256374 (TRAV12-3, TRAJ41)
CAMSYSGYALNF

SEQ ID NO: 512748 - protein, 12 aa, Homo sapiens
  CDR3 for beta chain variable domain of TCR clone 256374 (TRBV11-2, TRBJ2-2)
CASSLPTGELFF

SEQ ID NO: 512749 - protein, 12 aa, Homo sapiens
  CDR3 for alpha chain variable domain of TCR clone 256375 (TRAV23/DV6, TRAJ30)
CAASKGDDKIIF

SEQ ID NO: 512750 - protein, 18 aa, Homo sapiens
  CDR3 for beta chain variable domain of TCR clone 256375 (TRBV10-3, TRBJ2-3)
CAISESKVGPMRGDTQYV

SEQ ID NO: 512751 - protein, 11 aa, Homo sapiens
  CDR3 for alpha chain variable domain of TCR clone 256376 (TRAV4, TRAJ31)
CLVGLNARLMF

SEQ ID NO: 512752 - protein, 14 aa, Homo sapiens
  CDR3 for beta chain variable domain of TCR clone 256376 (TRBV7-2, TRBJ2-5)
CASSFTQGQETQYF

SEQ ID NO: 512753 - protein, 16 aa, Homo sapiens
  CDR3 for alpha chain variable domain of TCR clone 256377 (TRAV3, TRAJ18)
CAVRDGRGSTLGMLYF

SEQ ID NO: 512754 - protein, 17 aa, Homo sapiens
  CDR3 for beta chain variable domain of TCR clone 256377 (TRBV5-1, TRBJ2-3)
CASSKIGLADRTDTQYF

SEQ ID NO: 512755 - protein, 15 aa, Homo sapiens
  CDR3 for alpha chain variable domain of TCR clone 256378 (TRAV2, TRAJ28)
CAVPYSGAGSYQLTF

SEQ ID NO: 512756 - protein, 17 aa, Homo sapiens
  CDR3 for beta chain variable domain of TCR clone 256378 (TRBV6-6, TRBJ1-6)
CASSCSIPDGGTSPLHF

SEQ ID NO: 512757 - protein, 14 aa, Homo sapiens
  CDR3 for alpha chain variable domain of TCR clone 256379 (TRAV16, TRAJ33)
CALSAMDSNYELIW

SEQ ID NO: 512758 - protein, 16 aa, Homo sapiens
  CDR3 for beta chain variable domain of TCR clone 256379 (TRBV12-4, TRBJ2-3)
CASSFPSNTNTDAQYF

SEQ ID NO: 512759 - protein, 12 aa, Homo sapiens
  CDR3 for alpha chain variable domain of TCR clone 256380 (TRAV26-1, TRAJ26)
CIVFIYGQNFVF

SEQ ID NO: 512760 - protein, 14 aa, Homo sapiens
  CDR3 for beta chain variable domain of TCR clone 256380 (TRBV4-1, TRBJ2-2)
CASSQAVNTGELFF

SEQ ID NO: 512761 - protein, 18 aa, Homo sapiens
  CDR3 for alpha chain variable domain of TCR clone 256381 (TRAV26-1, TRAJ5)
CIVRAVPPRDTGRRPLTF

SEQ ID NO: 512762 - protein, 15 aa, Homo sapiens
  CDR3 for beta chain variable domain of TCR clone 256381 (TRBV7-9, TRBJ2-7)
CASSLPMGQANEQYF

SEQ ID NO: 512763 - protein, 12 aa, Homo sapiens
  CDR3 for alpha chain variable domain of TCR clone 256382 (TRAV20, TRAJ54)
CAVQEGAQKLVF

SEQ ID NO: 512764 - protein, 14 aa, Homo sapiens
  CDR3 for beta chain variable domain of TCR clone 256382 (TRBV20-1, TRBJ2-5)
CSALVPGYQETQYF

SEQ ID NO: 512765 - protein, 18 aa, Homo sapiens
  CDR3 for alpha chain variable domain of TCR clone 256383 (TRAV26-2, TRAJ45)
CILRLWGYSGGGADGLTF

SEQ ID NO: 512766 - protein, 14 aa, Homo sapiens
  CDR3 for beta chain variable domain of TCR clone 256383 (TRBV12-4, TRBJ2-5)
CASSLWQKQETQYF

SEQ ID NO: 512767 - protein, 15 aa, Homo sapiens
  CDR3 for alpha chain variable domain of TCR clone 256384 (TRAV3, TRAJ13)
CSVRVYSGGYQKVTF

SEQ ID NO: 512768 - protein, 15 aa, Homo sapiens
  CDR3 for beta chain variable domain of TCR clone 256384 (TRBV7-2, TRBJ2-1)
CASSSGLAGGNEQFF

SEQ ID NO: 512769 - protein, 13 aa, Homo sapiens
  CDR3 for alpha chain variable domain of TCR clone 256385 (TRAV13-2, TRAJ53)
CAENMGSNYKLTF

SEQ ID NO: 512770 - protein, 14 aa, Homo sapiens
  CDR3 for beta chain variable domain of TCR clone 256385 (TRBV20-1, TRBJ2-5)
CSARYRGLQETQYF

SEQ ID NO: 512771 - protein, 11 aa, Homo sapiens
  CDR3 for alpha chain variable domain of TCR clone 256386 (TRAV17, TRAJ9)
CATTGGFKTIF

SEQ ID NO: 512772 - protein, 18 aa, Homo sapiens
  CDR3 for beta chain variable domain of TCR clone 256386 (TRBV11-2, TRBJ2-3)
CASSLGGASRGAPNTQYF

SEQ ID NO: 512773 - protein, 14 aa, Homo sapiens
  CDR3 for alpha chain variable domain of TCR clone 256387 (TRAV12-2, TRAJ44)
CAVNKAGTASKLTF

SEQ ID NO: 512774 - protein, 16 aa, Homo sapiens
  CDR3 for beta chain variable domain of TCR clone 256387 (TRBV4-2, TRBJ1-1)
CASRPLDGGGDTEAFF

SEQ ID NO: 512775 - protein, 13 aa, Homo sapiens
  CDR3 for alpha chain variable domain of TCR clone 256388 (TRAV3, TRAJ43)
CAVKARNNNDMRF

SEQ ID NO: 512776 - protein, 16 aa, Homo sapiens
  CDR3 for beta chain variable domain of TCR clone 256388 (TRBV7-9, TRBJ2-3)
CASSFSVAWGTDTQYF

SEQ ID NO: 512777 - protein, 15 aa, Homo sapiens
  CDR3 for alpha chain variable domain of TCR clone 256389 (TRAV2, TRAJ15)
CSVEDREQAGTALIF

SEQ ID NO: 512778 - protein, 17 aa, Homo sapiens
  CDR3 for beta chain variable domain of TCR clone 256389 (TRBV7-8, TRBJ2-6)
CASSAGTGGAGANVLTF

SEQ ID NO: 512779 - protein, 12 aa, Homo sapiens
  CDR3 for alpha chain variable domain of TCR clone 256390 (TRAV17, TRAJ12)
CATLRSSSKLIF

SEQ ID NO: 512780 - protein, 14 aa, Homo sapiens
  CDR3 for beta chain variable domain of TCR clone 256390 (TRBV19, TRBJ2-1)
CARGARSFQWEQFF

SEQ ID NO: 512781 - protein, 15 aa, Homo sapiens
  CDR3 for alpha chain variable domain of TCR clone 256391 (TRAV8-4, TRAJ29)
CAVSRLNSGNTPLVF

SEQ ID NO: 512782 - protein, 15 aa, Homo sapiens
  CDR3 for beta chain variable domain of TCR clone 256391 (TRBV7-9, TRBJ1-5)
CASSQGHQPKQPQHF

SEQ ID NO: 512783 - protein, 14 aa, Homo sapiens
  CDR3 for alpha chain variable domain of TCR clone 256392 (TRAV12-1, TRAJ42)
CVVLYGGSQGNLIF

SEQ ID NO: 512784 - protein, 17 aa, Homo sapiens
  CDR3 for beta chain variable domain of TCR clone 256392 (TRBV3-1, TRBJ2-6)
CASSPNTGPAGANVLTF

SEQ ID NO: 512785 - protein, 15 aa, Homo sapiens
  CDR3 for alpha chain variable domain of TCR clone 256393 (TRAV35, TRAJ33)
CAGQPPRYSNYQLIL

SEQ ID NO: 512786 - protein, 13 aa, Homo sapiens
  CDR3 for beta chain variable domain of TCR clone 256393 (TRBV14, TRBJ1-2)
CASSEDRRYGYTF

SEQ ID NO: 512787 - protein, 13 aa, Homo sapiens
  CDR3 for alpha chain variable domain of TCR clone 256394 (TRAV12-3, TRAJ5)
CAMRPAGRRALTF

SEQ ID NO: 512788 - protein, 13 aa, Homo sapiens
  CDR3 for beta chain variable domain of TCR clone 256394 (TRBV2, TRBJ2-7)
CASSVVEAYEQYF

SEQ ID NO: 512789 - protein, 13 aa, Homo sapiens
  CDR3 for alpha chain variable domain of TCR clone 256395 (TRAV13-2, TRAJ5)
CAVMDTGRRALTF

SEQ ID NO: 512790 - protein, 16 aa, Homo sapiens
  CDR3 for beta chain variable domain of TCR clone 256395 (TRBV7-3, TRBJ2-1)
CASSLVSGSSNNEQFF

SEQ ID NO: 512791 - protein, 12 aa, Homo sapiens
  CDR3 for alpha chain variable domain of TCR clone 256396 (TRAV23/DV6, TRAJ30)
CAASKGDDKIIF

SEQ ID NO: 512792 - protein, 15 aa, Homo sapiens
  CDR3 for beta chain variable domain of TCR clone 256396 (TRBV4-1, TRBJ2-5)
CASSQWDLYQETQYF

SEQ ID NO: 512793 - protein, 13 aa, Homo sapiens
  CDR3 for alpha chain variable domain of TCR clone 256397 (TRAV23/DV6, TRAJ58)
CAASEIGGSRLTF

SEQ ID NO: 512794 - protein, 14 aa, Homo sapiens
  CDR3 for beta chain variable domain of TCR clone 256397 (TRBV13, TRBJ2-5)
CASSLERVGETQYF

SEQ ID NO: 512795 - protein, 15 aa, Homo sapiens
  CDR3 for alpha chain variable domain of TCR clone 256398 (TRAV29/DV5, TRAJ24)
CAASGATDSWGKFQF

SEQ ID NO: 512796 - protein, 15 aa, Homo sapiens
  CDR3 for beta chain variable domain of TCR clone 256398 (TRBV7-3, TRBJ2-2)
CASSETGQGTGELFF

SEQ ID NO: 512797 - protein, 16 aa, Homo sapiens
  CDR3 for alpha chain variable domain of TCR clone 256399 (TRAV30, TRAJ24)
CGTEIVDADSWGKFQF

SEQ ID NO: 512798 - protein, 15 aa, Homo sapiens
  CDR3 for beta chain variable domain of TCR clone 256399 (TRBV6-6, TRBJ1-5)
CASSSIQGTNQPQHF

SEQ ID NO: 512799 - protein, 14 aa, Homo sapiens
  CDR3 for alpha chain variable domain of TCR clone 256400 (TRAV12-1, TRAJ22)
CVVPYRGSARQLTF

SEQ ID NO: 512800 - protein, 15 aa, Homo sapiens
  CDR3 for beta chain variable domain of TCR clone 256400 (TRBV12-4, TRBJ2-1)
CASSLGTSAVNEQFS

SEQ ID NO: 512801 - protein, 11 aa, Homo sapiens
  CDR3 for alpha chain variable domain of TCR clone 256401 (TRAV17, TRAJ9)
CATTGGFKTIF

SEQ ID NO: 512802 - protein, 13 aa, Homo sapiens
  CDR3 for beta chain variable domain of TCR clone 256401 (TRBV7-9, TRBJ2-2)
CRQRTSGHRGAVF

SEQ ID NO: 512803 - protein, 15 aa, Homo sapiens
  CDR3 for alpha chain variable domain of TCR clone 256402 (TRAV2, TRAJ9)
CAVEDRGTGGFKTIL

SEQ ID NO: 512804 - protein, 16 aa, Homo sapiens
  CDR3 for beta chain variable domain of TCR clone 256402 (TRBV24-1, TRBJ2-3)
CATSDPGTVATDTQYF

SEQ ID NO: 512805 - protein, 13 aa, Homo sapiens
  CDR3 for alpha chain variable domain of TCR clone 256403 (TRAV1-2, TRAJ12)
CAVSMDISYKLIF

SEQ ID NO: 512806 - protein, 14 aa, Homo sapiens
  CDR3 for beta chain variable domain of TCR clone 256403 (TRBV19, TRBJ2-1)
CASSSGRDYNEQFF

SEQ ID NO: 512807 - protein, 14 aa, Homo sapiens
  CDR3 for alpha chain variable domain of TCR clone 256404 (TRAV35, TRAJ22)
CAGLRPGSARQLTF

SEQ ID NO: 512808 - protein, 17 aa, Homo sapiens
  CDR3 for beta chain variable domain of TCR clone 256404 (TRBV7-3, TRBJ2-3)
CASSLMKRMRGADTQYF

SEQ ID NO: 512809 - protein, 12 aa, Homo sapiens
  CDR3 for alpha chain variable domain of TCR clone 256405 (TRAV26-1, TRAJ17)
CIVRSAGNKLTF

SEQ ID NO: 512810 - protein, 15 aa, Homo sapiens
  CDR3 for beta chain variable domain of TCR clone 256405 (TRBV7-2, TRBJ1-3)
CASSLQAGGENTIYF

SEQ ID NO: 512811 - protein, 12 aa, Homo sapiens
  CDR3 for alpha chain variable domain of TCR clone 256406 (TRAV35, TRAJ49)
CAGWNTGNQFYF

SEQ ID NO: 512812 - protein, 15 aa, Homo sapiens
  CDR3 for beta chain variable domain of TCR clone 256406 (TRBV11-3, TRBJ2-7)
CASSPGPASSYEQYF

SEQ ID NO: 512813 - protein, 13 aa, Homo sapiens
  CDR3 for alpha chain variable domain of TCR clone 256407 (TRAV17, TRAJ9)
CATGSTGGFKTSF

SEQ ID NO: 512814 - protein, 14 aa, Homo sapiens
  CDR3 for beta chain variable domain of TCR clone 256407 (TRBV7-8, TRBJ2-7)
CASTFRGGPNEQYF

SEQ ID NO: 512815 - protein, 14 aa, Homo sapiens
  CDR3 for alpha chain variable domain of TCR clone 256408 (TRAV1-2, TRAJ16)
CAVNRFSDGQKLLF

SEQ ID NO: 512816 - protein, 11 aa, Homo sapiens
  CDR3 for beta chain variable domain of TCR clone 256408 (TRBV4-1, TRBJ2-2)
CASEHNGELFF

SEQ ID NO: 512817 - protein, 12 aa, Homo sapiens
  CDR3 for alpha chain variable domain of TCR clone 256409 (TRAV8-4, TRAJ20)
CAVSDDDYKLSF

SEQ ID NO: 512818 - protein, 16 aa, Homo sapiens
  CDR3 for beta chain variable domain of TCR clone 256409 (TRBV12-4, TRBJ1-5)
CQQSTPGRGSESAQHF

SEQ ID NO: 512819 - protein, 13 aa, Homo sapiens
  CDR3 for alpha chain variable domain of TCR clone 256410 (TRAV2, TRAJ40)
CAVVTSGAYKYIF

SEQ ID NO: 512820 - protein, 14 aa, Homo sapiens
  CDR3 for beta chain variable domain of TCR clone 256410 (TRBV19, TRBJ2-1)
CASPTFVLSGEQVF

SEQ ID NO: 512821 - protein, 14 aa, Homo sapiens
  CDR3 for alpha chain variable domain of TCR clone 256411 (TRAV1-2, TRAJ16)
CAVNRLSDGQKLLF

SEQ ID NO: 512822 - protein, 15 aa, Homo sapiens
  CDR3 for beta chain variable domain of TCR clone 256411 (TRBV19, TRBJ1-5)
CASSIVWADNQPQHF

SEQ ID NO: 512823 - protein, 13 aa, Homo sapiens
  CDR3 for alpha chain variable domain of TCR clone 256412 (TRAV2, TRAJ40)
CSVVTSGTYKYIF

SEQ ID NO: 512824 - protein, 14 aa, Homo sapiens
  CDR3 for beta chain variable domain of TCR clone 256412 (TRBV2, TRBJ2-3)
CASSEGQNTDTQYF

SEQ ID NO: 512825 - protein, 14 aa, Homo sapiens
  CDR3 for alpha chain variable domain of TCR clone 256413 (TRAV17, TRAJ6)
CATNPAGGSYIPTF

SEQ ID NO: 512826 - protein, 14 aa, Homo sapiens
  CDR3 for beta chain variable domain of TCR clone 256413 (TRBV7-2, TRBJ2-7)
CASRSQGAAYEQYF

SEQ ID NO: 512827 - protein, 13 aa, Homo sapiens
  CDR3 for alpha chain variable domain of TCR clone 256414 (TRAV20, TRAJ3)
CARRYSSASKIIF

SEQ ID NO: 512828 - protein, 16 aa, Homo sapiens
  CDR3 for beta chain variable domain of TCR clone 256414 (TRBV7-9, TRBJ1-2)
CASSLGFSSGEDGYTF

SEQ ID NO: 512829 - protein, 12 aa, Homo sapiens
  CDR3 for alpha chain variable domain of TCR clone 256415 (TRAV2, TRAJ9)
CAVGAGGFKTIF

SEQ ID NO: 512830 - protein, 12 aa, Homo sapiens
  CDR3 for beta chain variable domain of TCR clone 256415 (TRBV2, TRBJ2-1)
CAYGPPGNEQFF

SEQ ID NO: 512831 - protein, 15 aa, Homo sapiens
  CDR3 for alpha chain variable domain of TCR clone 256416 (TRAV12-3, TRAJ6)
CAMSAATGGSYIPTF

SEQ ID NO: 512832 - protein, 14 aa, Homo sapiens
  CDR3 for beta chain variable domain of TCR clone 256416 (TRBV7-2, TRBJ1-1)
CASSFLTGTTEAFF

SEQ ID NO: 512833 - protein, 15 aa, Homo sapiens
  CDR3 for alpha chain variable domain of TCR clone 256417 (TRAV2, TRAJ22)
CAVPSRGGSVRQLTF

SEQ ID NO: 512834 - protein, 14 aa, Homo sapiens
  CDR3 for beta chain variable domain of TCR clone 256417 (TRBV7-6, TRBJ2-3)
CASSLGTVTDTQYF

SEQ ID NO: 512835 - protein, 15 aa, Homo sapiens
  CDR3 for alpha chain variable domain of TCR clone 256418 (TRAV12-3, TRAJ27)
CAMRAYNTNAGKSTF

SEQ ID NO: 512836 - protein, 13 aa, Homo sapiens
  CDR3 for beta chain variable domain of TCR clone 256418 (TRBV11-2, TRBJ2-5)
CASSRGPSETQFF

SEQ ID NO: 512837 - protein, 11 aa, Homo sapiens
  CDR3 for alpha chain variable domain of TCR clone 256419 (TRAV26-2, TRAJ8)
CILTGFQKLVF

SEQ ID NO: 512838 - protein, 15 aa, Homo sapiens
  CDR3 for beta chain variable domain of TCR clone 256419 (TRBV10-3, TRBJ2-1)
CATNGGPGQGDEQFF

SEQ ID NO: 512839 - protein, 11 aa, Homo sapiens
  CDR3 for alpha chain variable domain of TCR clone 256420 (TRAV27, TRAJ47)
SIVEYGNKLVF

SEQ ID NO: 512840 - protein, 18 aa, Homo sapiens
  CDR3 for beta chain variable domain of TCR clone 256420 (TRBV2, TRBJ2-1)
CASRVLAGGPRTYNEQFF

SEQ ID NO: 512841 - protein, 12 aa, Homo sapiens
  CDR3 for alpha chain variable domain of TCR clone 256421 (TRAV21, TRAJ13)
PGTSGGYQKVTF

SEQ ID NO: 512842 - protein, 14 aa, Homo sapiens
  CDR3 for beta chain variable domain of TCR clone 256421 (TRBV27, TRBJ2-5)
CASSSLKGWETQYF

SEQ ID NO: 512843 - protein, 11 aa, Homo sapiens
  CDR3 for alpha chain variable domain of TCR clone 256422 (TRAV2, TRAJ21)
CAVFNFNKFYF

SEQ ID NO: 512844 - protein, 14 aa, Homo sapiens
  CDR3 for beta chain variable domain of TCR clone 256422 (TRBV15, TRBJ2-3)
CATRSGPSTDTQYF

SEQ ID NO: 512845 - protein, 16 aa, Homo sapiens
  CDR3 for alpha chain variable domain of TCR clone 256423 (TRAV16, TRAJ52)
CALSAAGGTSYRKLTF

SEQ ID NO: 512846 - protein, 12 aa, Homo sapiens
  CDR3 for beta chain variable domain of TCR clone 256423 (TRBV12-4, TRBJ1-3)
CASSFSGNTIYF

SEQ ID NO: 512847 - protein, 13 aa, Homo sapiens
  CDR3 for alpha chain variable domain of TCR clone 256424 (TRAV16, TRAJ9)
CAPRATGGFKTIF

SEQ ID NO: 512848 - protein, 16 aa, Homo sapiens
  CDR3 for beta chain variable domain of TCR clone 256424 (TRBV5-1, TRBJ1-3)
CASSRSGEDSGNTIYF

SEQ ID NO: 512849 - protein, 14 aa, Homo sapiens
  CDR3 for alpha chain variable domain of TCR clone 256425 (TRAV1-2, TRAJ16)
CAVNRFSDGQKLLF

SEQ ID NO: 512850 - protein, 17 aa, Homo sapiens
  CDR3 for beta chain variable domain of TCR clone 256425 (TRBV7-2, TRBJ2-3)
CASSSYSGTRRADTQYF

SEQ ID NO: 512851 - protein, 13 aa, Homo sapiens
  CDR3 for alpha chain variable domain of TCR clone 256426 (TRAV22, TRAJ7)
CAVEFYGNNRLAF

SEQ ID NO: 512852 - protein, 14 aa, Homo sapiens
  CDR3 for beta chain variable domain of TCR clone 256426 (TRBV19, TRBJ2-1)
CASPTFVLSGGQFF

SEQ ID NO: 512853 - protein, 12 aa, Homo sapiens
  CDR3 for alpha chain variable domain of TCR clone 256427 (TRAV13-2, TRAJ8)
CAPWLGFQKLVF

SEQ ID NO: 512854 - protein, 13 aa, Homo sapiens
  CDR3 for beta chain variable domain of TCR clone 256427 (TRBV12-4, TRBJ1-5)
CASSPDRAEPQHF

SEQ ID NO: 512855 - protein, 11 aa, Homo sapiens
  CDR3 for alpha chain variable domain of TCR clone 256428 (TRAV13-1, TRAJ43)
CAASGANDMRF

SEQ ID NO: 512856 - protein, 13 aa, Homo sapiens
  CDR3 for beta chain variable domain of TCR clone 256428 (TRBV2, TRBJ2-3)
CASGRGRTDTQYF

SEQ ID NO: 512857 - protein, 14 aa, Homo sapiens
  CDR3 for alpha chain variable domain of TCR clone 256429 (TRAV1-1, TRAJ27)
CAVIYNTNAGKSTF

SEQ ID NO: 512858 - protein, 15 aa, Homo sapiens
  CDR3 for beta chain variable domain of TCR clone 256429 (TRBV19, TRBJ2-3)
CASSIAGGSTDTQYF

SEQ ID NO: 512859 - protein, 15 aa, Homo sapiens
  CDR3 for alpha chain variable domain of TCR clone 256430 (TRAV8-6, TRAJ45)
CDVSEQGGGADGLTF

SEQ ID NO: 512860 - protein, 14 aa, Homo sapiens
  CDR3 for beta chain variable domain of TCR clone 256430 (TRBV28, TRBJ2-5)
CASRGSSFWETQYF

SEQ ID NO: 512861 - protein, 12 aa, Homo sapiens
  CDR3 for alpha chain variable domain of TCR clone 256431 (TRAV12-3, TRAJ17)
CAMTLTGNKLTF

SEQ ID NO: 512862 - protein, 13 aa, Homo sapiens
  CDR3 for beta chain variable domain of TCR clone 256431 (TRBV7-9, TRBJ1-2)
CASSLKQNYGYTS

SEQ ID NO: 512863 - protein, 13 aa, Homo sapiens
  CDR3 for alpha chain variable domain of TCR clone 256432 (TRAV20, TRAJ54)
CAPTFEGAQKLVF

SEQ ID NO: 512864 - protein, 12 aa, Homo sapiens
  CDR3 for beta chain variable domain of TCR clone 256432 (TRBV5-1, TRBJ2-5)
CASSFSWETQYF

SEQ ID NO: 512865 - protein, 16 aa, Homo sapiens
  CDR3 for alpha chain variable domain of TCR clone 256433 (TRAV3, TRAJ37)
CAVRGKGSGNTGKLIF

SEQ ID NO: 512866 - protein, 15 aa, Homo sapiens
  CDR3 for beta chain variable domain of TCR clone 256433 (TRBV5-5, TRBJ1-1)
CASSLVGKDNTEAFF

SEQ ID NO: 512867 - protein, 13 aa, Homo sapiens
  CDR3 for alpha chain variable domain of TCR clone 256434 (TRAV2, TRAJ15)
CAVASQAGTALIF

SEQ ID NO: 512868 - protein, 17 aa, Homo sapiens
  CDR3 for beta chain variable domain of TCR clone 256434 (TRBV4-1, TRBJ2-5)
CASSQALTGGPIETQYF

SEQ ID NO: 512869 - protein, 14 aa, Homo sapiens
  CDR3 for alpha chain variable domain of TCR clone 256435 (TRAV21, TRAJ21)
CAVKGFGNFNKFYF

SEQ ID NO: 512870 - protein, 14 aa, Homo sapiens
  CDR3 for beta chain variable domain of TCR clone 256435 (TRBV19, TRBJ2-1)
CASPTFVLSGEQFF

SEQ ID NO: 512871 - protein, 15 aa, Homo sapiens
  CDR3 for alpha chain variable domain of TCR clone 256436 (TRAV26-2, TRAJ13)
CILRDLSGGYQKVTF

SEQ ID NO: 512872 - protein, 10 aa, Homo sapiens
  CDR3 for beta chain variable domain of TCR clone 256436 (TRBV7-9, TRBJ2-3)
CQQLHRYAYF

SEQ ID NO: 512873 - protein, 14 aa, Homo sapiens
  CDR3 for alpha chain variable domain of TCR clone 256437 (TRAV14/DV4, TRAJ32)
SNVLPLTPTNKLIF

SEQ ID NO: 512874 - protein, 19 aa, Homo sapiens
  CDR3 for beta chain variable domain of TCR clone 256437 (TRBV25-1, TRBJ2-2)
CAILVYRVDRGRKTGELFF

SEQ ID NO: 512875 - protein, 15 aa, Homo sapiens
  CDR3 for alpha chain variable domain of TCR clone 256438 (TRAV20, TRAJ22)
CCAGFIVWFCRQLTF

SEQ ID NO: 512876 - protein, 13 aa, Homo sapiens
  CDR3 for beta chain variable domain of TCR clone 256438 (TRBV7-2, TRBJ2-5)
CASSQTSVETQYF

SEQ ID NO: 512877 - protein, 14 aa, Homo sapiens
  CDR3 for alpha chain variable domain of TCR clone 256439 (TRAV35, TRAJ22)
CAGLRPGSARQLTF

SEQ ID NO: 512878 - protein, 14 aa, Homo sapiens
  CDR3 for beta chain variable domain of TCR clone 256439 (TRBV12-4, TRBJ2-5)
GRQSPTGLQETQYF

SEQ ID NO: 512879 - protein, 14 aa, Homo sapiens
  CDR3 for alpha chain variable domain of TCR clone 256440 (TRAV21, TRAJ58)
CAVRRGRSGSRLTF

SEQ ID NO: 512880 - protein, 17 aa, Homo sapiens
  CDR3 for beta chain variable domain of TCR clone 256440 (TRBV28, TRBJ2-5)
CASSTPEGDALQETQYF

SEQ ID NO: 512881 - protein, 14 aa, Homo sapiens
  CDR3 for alpha chain variable domain of TCR clone 256441 (TRAV17, TRAJ54)
CATDANQGAQKLVF

SEQ ID NO: 512882 - protein, 12 aa, Homo sapiens
  CDR3 for beta chain variable domain of TCR clone 256441 (TRBV6-3, TRBJ2-1)
CASSGSHNEQFF

SEQ ID NO: 512883 - protein, 16 aa, Homo sapiens
  CDR3 for alpha chain variable domain of TCR clone 256442 (TRAV3, TRAJ32)
CAVRENHGGATNKLIF

SEQ ID NO: 512884 - protein, 12 aa, Homo sapiens
  CDR3 for beta chain variable domain of TCR clone 256442 (TRBV20-1, TRBJ1-2)
CSVTPEGYGYTF

SEQ ID NO: 512885 - protein, 11 aa, Homo sapiens
  CDR3 for alpha chain variable domain of TCR clone 256443 (TRAV17, TRAJ9)
CGFTGGFKTIF

SEQ ID NO: 512886 - protein, 13 aa, Homo sapiens
  CDR3 for beta chain variable domain of TCR clone 256443 (TRBV20-1, TRBJ2-5)
CSAREAFQETQYF

SEQ ID NO: 512887 - protein, 15 aa, Homo sapiens
  CDR3 for alpha chain variable domain of TCR clone 256444 (TRAV13-1, TRAJ44)
CAASRGGRTASKLTF

SEQ ID NO: 512888 - protein, 14 aa, Homo sapiens
  CDR3 for beta chain variable domain of TCR clone 256444 (TRBV7-2, TRBJ2-5)
CASSPRGSSENQYF

SEQ ID NO: 512889 - protein, 14 aa, Homo sapiens
  CDR3 for alpha chain variable domain of TCR clone 256445 (TRAV1-2, TRAJ8)
CAVREDTGFQKLVF

SEQ ID NO: 512890 - protein, 13 aa, Homo sapiens
  CDR3 for beta chain variable domain of TCR clone 256445 (TRBV12-4, TRBJ1-2)
CASSCGLTVISTF

SEQ ID NO: 512891 - protein, 14 aa, Homo sapiens
  CDR3 for alpha chain variable domain of TCR clone 256446 (TRAV12-3, TRAJ42)
CAMNYGGSQGNLIF

SEQ ID NO: 512892 - protein, 16 aa, Homo sapiens
  CDR3 for beta chain variable domain of TCR clone 256446 (TRBV11-3, TRBJ2-5)
CASSSVVAGSTETQYF

SEQ ID NO: 512893 - protein, 17 aa, Homo sapiens
  CDR3 for alpha chain variable domain of TCR clone 256447 (TRAV4, TRAJ18)
CLVGERSVGSTLGRLYF

SEQ ID NO: 512894 - protein, 16 aa, Homo sapiens
  CDR3 for beta chain variable domain of TCR clone 256447 (TRBV15, TRBJ1-4)
CATSRDSPPGREKLIF

SEQ ID NO: 512895 - protein, 14 aa, Homo sapiens
  CDR3 for alpha chain variable domain of TCR clone 256448 (TRAV12-1, TRAJ17)
CVVNYKAAGNKLTF

SEQ ID NO: 512896 - protein, 15 aa, Homo sapiens
  CDR3 for beta chain variable domain of TCR clone 256448 (TRBV7-2, TRBJ1-2)
CASTPRAGWNYGYTF

SEQ ID NO: 512897 - protein, 12 aa, Homo sapiens
  CDR3 for alpha chain variable domain of TCR clone 256449 (TRAV8-3, TRAJ20)
CAVGANDYRLSC

SEQ ID NO: 512898 - protein, 16 aa, Homo sapiens
  CDR3 for beta chain variable domain of TCR clone 256449 (TRBV19, TRBJ2-2)
CASRSPGTGATGELFF

SEQ ID NO: 512899 - protein, 15 aa, Homo sapiens
  CDR3 for alpha chain variable domain of TCR clone 256450 (TRAV3, TRAJ27)
CAVRGFTPLQANQPL

SEQ ID NO: 512900 - protein, 12 aa, Homo sapiens
  CDR3 for beta chain variable domain of TCR clone 256450 (TRBV11-2, TRBJ2-2)
CASSLGGGELFF

SEQ ID NO: 512901 - protein, 15 aa, Homo sapiens
  CDR3 for alpha chain variable domain of TCR clone 256451 (TRAV3, TRAJ5)
CAVRDLDTGRRALTF

SEQ ID NO: 512902 - protein, 15 aa, Homo sapiens
  CDR3 for beta chain variable domain of TCR clone 256451 (TRBV11-2, TRBJ2-1)
CASCTGTSGYNEQFF

SEQ ID NO: 512903 - protein, 17 aa, Homo sapiens
  CDR3 for alpha chain variable domain of TCR clone 256452 (TRAV3, TRAJ6)
CAVRVGPRAGGSYIPTF

SEQ ID NO: 512904 - protein, 20 aa, Homo sapiens
  CDR3 for beta chain variable domain of TCR clone 256452 (TRBV28, TRBJ2-1)
CASTPIGRSPGLAGGNEQFF

SEQ ID NO: 512905 - protein, 12 aa, Homo sapiens
  CDR3 for alpha chain variable domain of TCR clone 256453 (TRAV13-2, TRAJ23)
CAECHRGGKLIS

SEQ ID NO: 512906 - protein, 15 aa, Homo sapiens
  CDR3 for beta chain variable domain of TCR clone 256453 (TRBV7-9, TRBJ1-6)
CASSSPGRGNSPLHF

SEQ ID NO: 512907 - protein, 15 aa, Homo sapiens
  CDR3 for alpha chain variable domain of TCR clone 256454 (TRAV8-3, TRAJ15)
CAVGAPNQAGTALIF

SEQ ID NO: 512908 - protein, 14 aa, Homo sapiens
  CDR3 for beta chain variable domain of TCR clone 256454 (TRBV20-1, TRBJ2-1)
CSPNDAASYNEQFF

SEQ ID NO: 512909 - protein, 13 aa, Homo sapiens
  CDR3 for alpha chain variable domain of TCR clone 256455 (TRAV12-1, TRAJ29)
CVVNGPGNTPLFF

SEQ ID NO: 512910 - protein, 13 aa, Homo sapiens
  CDR3 for beta chain variable domain of TCR clone 256455 (TRBV7-2, TRBJ2-5)
CASSRGGLETQYF

SEQ ID NO: 512911 - protein, 14 aa, Homo sapiens
  CDR3 for alpha chain variable domain of TCR clone 256456 (TRAV3, TRAJ32)
CCERGAGATNKLIF

SEQ ID NO: 512912 - protein, 14 aa, Homo sapiens
  CDR3 for beta chain variable domain of TCR clone 256456 (TRBV4-1, TRBJ2-2)
CASSQAVNTGELFF

SEQ ID NO: 512913 - protein, 16 aa, Homo sapiens
  CDR3 for alpha chain variable domain of TCR clone 256457 (TRAV17, TRAJ35)
CATAEGGIGFGNVLHW

SEQ ID NO: 512914 - protein, 16 aa, Homo sapiens
  CDR3 for beta chain variable domain of TCR clone 256457 (TRBV6-5, TRBJ2-7)
CASSSDPTSGFYEQYF

SEQ ID NO: 512915 - protein, 15 aa, Homo sapiens
  CDR3 for alpha chain variable domain of TCR clone 256458 (TRAV12-2, TRAJ43)
CAFDMRFGAGTRLTV

SEQ ID NO: 512916 - protein, 13 aa, Homo sapiens
  CDR3 for beta chain variable domain of TCR clone 256458 (TRBV11-2, TRBJ2-5)
CASSFSSQETQYF

SEQ ID NO: 512917 - protein, 15 aa, Homo sapiens
  CDR3 for alpha chain variable domain of TCR clone 256459 (TRAV13-1, TRAJ8)
CAASIPNTGFQKLVF

SEQ ID NO: 512918 - protein, 13 aa, Homo sapiens
  CDR3 for beta chain variable domain of TCR clone 256459 (TRBV5-4, TRBJ1-1)
SASSFQVNTEAFF

SEQ ID NO: 512919 - protein, 13 aa, Homo sapiens
  CDR3 for alpha chain variable domain of TCR clone 256460 (TRAV12-1, TRAJ7)
CEVNMRGNNRLAF

SEQ ID NO: 512920 - protein, 16 aa, Homo sapiens
  CDR3 for beta chain variable domain of TCR clone 256460 (TRBV20-1, TRBJ1-4)
CSAPGQGLLTNEKLFF

SEQ ID NO: 512921 - protein, 12 aa, Homo sapiens
  CDR3 for alpha chain variable domain of TCR clone 256461 (TRAV1-2, TRAJ29)
CAVPSGNTPLVF

SEQ ID NO: 512922 - protein, 14 aa, Homo sapiens
  CDR3 for beta chain variable domain of TCR clone 256461 (TRBV18, TRBJ2-5)
CASAPGVSQETQYF

SEQ ID NO: 512923 - protein, 15 aa, Homo sapiens
  CDR3 for alpha chain variable domain of TCR clone 256462 (TRAV8-4, TRAJ47)
CAVSDPEEYGNKLVF

SEQ ID NO: 512924 - protein, 12 aa, Homo sapiens
  CDR3 for beta chain variable domain of TCR clone 256462 (TRBV11-2, TRBJ2-1)
CASSPGNNEQFF

SEQ ID NO: 512925 - protein, 13 aa, Homo sapiens
  CDR3 for alpha chain variable domain of TCR clone 256463 (TRAV2, TRAJ29)
CAAGNSGNTPLVF

SEQ ID NO: 512926 - protein, 16 aa, Homo sapiens
  CDR3 for beta chain variable domain of TCR clone 256463 (TRBV7-9, TRBJ1-2)
CASSPGGGARNYGYTF

SEQ ID NO: 512927 - protein, 13 aa, Homo sapiens
  CDR3 for alpha chain variable domain of TCR clone 256464 (TRAV8-3, TRAJ44)
CAVVPGTASKLTF

SEQ ID NO: 512928 - protein, 15 aa, Homo sapiens
  CDR3 for beta chain variable domain of TCR clone 256464 (TRBV19, TRBJ1-2)
CASSVGQVLNYGYTF

SEQ ID NO: 512929 - protein, 14 aa, Homo sapiens
  CDR3 for alpha chain variable domain of TCR clone 256465 (TRAV1-2, TRAJ16)
CAVNRFSDGPKLLF

SEQ ID NO: 512930 - protein, 15 aa, Homo sapiens
  CDR3 for beta chain variable domain of TCR clone 256465 (TRBV9, TRBJ1-6)
CASSVAGTGGSPLHF

SEQ ID NO: 512931 - protein, 13 aa, Homo sapiens
  CDR3 for alpha chain variable domain of TCR clone 256466 (TRAV12-3, TRAJ40)
CAMSDSGTYKYIF

SEQ ID NO: 512932 - protein, 14 aa, Homo sapiens
  CDR3 for beta chain variable domain of TCR clone 256466 (TRBV7-2, TRBJ2-7)
CASRRGGGSYEQYF

SEQ ID NO: 512933 - protein, 14 aa, Homo sapiens
  CDR3 for alpha chain variable domain of TCR clone 256467 (TRAV38-1, TRAJ40)
CALRPTSGTYKYIF

SEQ ID NO: 512934 - protein, 15 aa, Homo sapiens
  CDR3 for beta chain variable domain of TCR clone 256467 (TRBV19, TRBJ1-1)
CASTSGQIQNTEAFF

SEQ ID NO: 512935 - protein, 12 aa, Homo sapiens
  CDR3 for alpha chain variable domain of TCR clone 256468 (TRAV8-3, TRAJ20)
CAVDFNDYKLGF

SEQ ID NO: 512936 - protein, 17 aa, Homo sapiens
  CDR3 for beta chain variable domain of TCR clone 256468 (TRBV7-8, TRBJ2-6)
CASSAGPGGAGANVLTF

SEQ ID NO: 512937 - protein, 11 aa, Homo sapiens
  CDR3 for alpha chain variable domain of TCR clone 256469 (TRAV21, TRAJ23)
CAPQRRGKLIF

SEQ ID NO: 512938 - protein, 14 aa, Homo sapiens
  CDR3 for beta chain variable domain of TCR clone 256469 (TRBV12-4, TRBJ1-1)
CASTCTGHDTEAFF

SEQ ID NO: 512939 - protein, 14 aa, Homo sapiens
  CDR3 for alpha chain variable domain of TCR clone 256470 (TRAV35, TRAJ13)
CAGSPSGGYQKVNF

SEQ ID NO: 512940 - protein, 13 aa, Homo sapiens
  CDR3 for beta chain variable domain of TCR clone 256470 (TRBV29-1, TRBJ1-1)
CSVGDSRNTEAFF

SEQ ID NO: 512941 - protein, 15 aa, Homo sapiens
  CDR3 for alpha chain variable domain of TCR clone 256471 (TRAV17, TRAJ35)
CATASVIAFGNVLHC

SEQ ID NO: 512942 - protein, 15 aa, Homo sapiens
  CDR3 for beta chain variable domain of TCR clone 256471 (TRBV7-9, TRBJ2-7)
CASSLALAEAYEQYF

SEQ ID NO: 512943 - protein, 14 aa, Homo sapiens
  CDR3 for alpha chain variable domain of TCR clone 256472 (TRAV12-2, TRAJ13)
CAVKKTGGYQKFTF

SEQ ID NO: 512944 - protein, 13 aa, Homo sapiens
  CDR3 for beta chain variable domain of TCR clone 256472 (TRBV10-3, TRBJ2-7)
CASKLAVNYEQYF

SEQ ID NO: 512945 - protein, 12 aa, Homo sapiens
  CDR3 for alpha chain variable domain of TCR clone 256473 (TRAV13-1, TRAJ42)
SVLRGSQGTLIF

SEQ ID NO: 512946 - protein, 13 aa, Homo sapiens
  CDR3 for beta chain variable domain of TCR clone 256473 (TRBV2, TRBJ1-4)
CASSELGAEKLFF

SEQ ID NO: 512947 - protein, 12 aa, Homo sapiens
  CDR3 for alpha chain variable domain of TCR clone 256474 (TRAV16, TRAJ26)
CALRSYGQNFVF

SEQ ID NO: 512948 - protein, 13 aa, Homo sapiens
  CDR3 for beta chain variable domain of TCR clone 256474 (TRBV19, TRBJ2-7)
CASSIDRTYEQYF

SEQ ID NO: 512949 - protein, 11 aa, Homo sapiens
  CDR3 for alpha chain variable domain of TCR clone 256475 (TRAV35, TRAJ34)
CWARTTDKLIF

SEQ ID NO: 512950 - protein, 14 aa, Homo sapiens
  CDR3 for beta chain variable domain of TCR clone 256475 (TRBV5-1, TRBJ2-7)
CASSRGESLYEQYF

SEQ ID NO: 512951 - protein, 11 aa, Homo sapiens
  CDR3 for alpha chain variable domain of TCR clone 256476 (TRAV2, TRAJ13)
CASGGYQKVTF

SEQ ID NO: 512952 - protein, 15 aa, Homo sapiens
  CDR3 for beta chain variable domain of TCR clone 256476 (TRBV6-1, TRBJ2-2)
CASSRLRGDNGELFF

SEQ ID NO: 512953 - protein, 13 aa, Homo sapiens
  CDR3 for alpha chain variable domain of TCR clone 256477 (TRAV1-2, TRAJ9)
CAALNTGGFKTIF

SEQ ID NO: 512954 - protein, 13 aa, Homo sapiens
  CDR3 for beta chain variable domain of TCR clone 256477 (TRBV7-9, TRBJ1-2)
CASSVKQNYGYTF

SEQ ID NO: 512955 - protein, 13 aa, Homo sapiens
  CDR3 for alpha chain variable domain of TCR clone 256478 (TRAV13-2, TRAJ13)
CADLSGGYQKVTF

SEQ ID NO: 512956 - protein, 14 aa, Homo sapiens
  CDR3 for beta chain variable domain of TCR clone 256478 (TRBV19, TRBJ2-1)
CASPTFVLSGEQFF

SEQ ID NO: 512957 - protein, 11 aa, Homo sapiens
  CDR3 for alpha chain variable domain of TCR clone 256479 (TRAV22, TRAJ20)
CAPLHDYKLSF

SEQ ID NO: 512958 - protein, 16 aa, Homo sapiens
  CDR3 for beta chain variable domain of TCR clone 256479 (TRBV5-1, TRBJ1-1)
CASSSGGNSLDTEAFF

SEQ ID NO: 512959 - protein, 13 aa, Homo sapiens
  CDR3 for alpha chain variable domain of TCR clone 256480 (TRAV12-3, TRAJ5)
CTMIYTGRRALTF

SEQ ID NO: 512960 - protein, 12 aa, Homo sapiens
  CDR3 for beta chain variable domain of TCR clone 256480 (TRBV18, TRBJ1-4)
CASSPSREKLFF

SEQ ID NO: 512961 - protein, 15 aa, Homo sapiens
  CDR3 for alpha chain variable domain of TCR clone 256481 (TRAV2, TRAJ15)
CAVEDRGQAGTALIF

SEQ ID NO: 512962 - protein, 15 aa, Homo sapiens
  CDR3 for beta chain variable domain of TCR clone 256481 (TRBV11-2, TRBJ2-1)
CASSSPSTRYNEQFF

SEQ ID NO: 512963 - protein, 15 aa, Homo sapiens
  CDR3 for alpha chain variable domain of TCR clone 256482 (TRAV26-1, TRAJ22)
CIVRVSFWFCKATDL

SEQ ID NO: 512964 - protein, 13 aa, Homo sapiens
  CDR3 for beta chain variable domain of TCR clone 256482 (TRBV7-9, TRBJ1-2)
CASSLKQNYGDSF

SEQ ID NO: 512965 - protein, 15 aa, Homo sapiens
  CDR3 for alpha chain variable domain of TCR clone 256483 (TRAV35, TRAJ58)
CAGRRQETSGSRLTF

SEQ ID NO: 512966 - protein, 13 aa, Homo sapiens
  CDR3 for beta chain variable domain of TCR clone 256483 (TRBV10-3, TRBJ2-7)
CASKLAVNYEQYF

SEQ ID NO: 512967 - protein, 14 aa, Homo sapiens
  CDR3 for alpha chain variable domain of TCR clone 256484 (TRAV1-2, TRAJ16)
CAVNRFLDGQKLLF

SEQ ID NO: 512968 - protein, 14 aa, Homo sapiens
  CDR3 for beta chain variable domain of TCR clone 256484 (TRBV7-9, TRBJ2-3)
CASSLEDGTDTQYF

SEQ ID NO: 512969 - protein, 12 aa, Homo sapiens
  CDR3 for alpha chain variable domain of TCR clone 256485 (TRAV12-1, TRAJ20)
CVVNIDDYKLSF

SEQ ID NO: 512970 - protein, 15 aa, Homo sapiens
  CDR3 for beta chain variable domain of TCR clone 256485 (TRBV7-9, TRBJ1-1)
CASSLLEQGGTEAFF

SEQ ID NO: 512971 - protein, 12 aa, Homo sapiens
  CDR3 for alpha chain variable domain of TCR clone 256486 (TRAV13-2, TRAJ23)
CAERHRVGKLIF

SEQ ID NO: 512972 - protein, 13 aa, Homo sapiens
  CDR3 for beta chain variable domain of TCR clone 256486 (TRBV10-3, TRBJ2-7)
CASKLAVNYEQYF

SEQ ID NO: 512973 - protein, 11 aa, Homo sapiens
  CDR3 for alpha chain variable domain of TCR clone 256487 (TRAV12-2, TRAJ31)
CAVTRWVRLMF

SEQ ID NO: 512974 - protein, 15 aa, Homo sapiens
  CDR3 for beta chain variable domain of TCR clone 256487 (TRBV19, TRBJ2-7)
CASSIGGGLVNEQYF

SEQ ID NO: 512975 - protein, 14 aa, Homo sapiens
  CDR3 for alpha chain variable domain of TCR clone 256488 (TRAV29/DV5, TRAJ36)
CTARCKTGANNLFF

SEQ ID NO: 512976 - protein, 14 aa, Homo sapiens
  CDR3 for beta chain variable domain of TCR clone 256488 (TRBV12-5, TRBJ2-5)
CASGSRTHQETQYF

SEQ ID NO: 512977 - protein, 11 aa, Homo sapiens
  CDR3 for alpha chain variable domain of TCR clone 256489 (TRAV3, TRAJ32)
CAVSPKGMVVL

SEQ ID NO: 512978 - protein, 15 aa, Homo sapiens
  CDR3 for beta chain variable domain of TCR clone 256489 (TRBV4-1, TRBJ1-4)
CASSDTGGTNEKLFF

SEQ ID NO: 512979 - protein, 17 aa, Homo sapiens
  CDR3 for alpha chain variable domain of TCR clone 256490 (TRAV13-1, TRAJ52)
CAASSGAGGTSYGQLTF

SEQ ID NO: 512980 - protein, 12 aa, Homo sapiens
  CDR3 for beta chain variable domain of TCR clone 256490 (TRBV7-8, TRBJ2-7)
CASSLGDREQYF

SEQ ID NO: 512981 - protein, 12 aa, Homo sapiens
  CDR3 for alpha chain variable domain of TCR clone 256491 (TRAV20, TRAJ56)
CAVNGANSKLTF

SEQ ID NO: 512982 - protein, 14 aa, Homo sapiens
  CDR3 for beta chain variable domain of TCR clone 256491 (TRBV20-1, TRBJ2-5)
CSALVPGYQETQYF

SEQ ID NO: 512983 - protein, 16 aa, Homo sapiens
  CDR3 for alpha chain variable domain of TCR clone 256492 (TRAV3, TRAJ10)
CAVRDMRAGGGNKLTF

SEQ ID NO: 512984 - protein, 14 aa, Homo sapiens
  CDR3 for beta chain variable domain of TCR clone 256492 (TRBV25-1, TRBJ1-1)
CASTHLGGTTEAFF

SEQ ID NO: 512985 - protein, 16 aa, Homo sapiens
  CDR3 for alpha chain variable domain of TCR clone 256493 (TRAV30, TRAJ24)
CGTEIVYADSWGKFQF

SEQ ID NO: 512986 - protein, 13 aa, Homo sapiens
  CDR3 for beta chain variable domain of TCR clone 256493 (TRBV4-1, TRBJ2-2)
CASSQENTGELFF

SEQ ID NO: 512987 - protein, 13 aa, Homo sapiens
  CDR3 for alpha chain variable domain of TCR clone 256494 (TRAV2, TRAJ15)
CAVASQAGTALIF

SEQ ID NO: 512988 - protein, 16 aa, Homo sapiens
  CDR3 for beta chain variable domain of TCR clone 256494 (TRBV5-1, TRBJ1-1)
CASSSGDNSLNTEAFF

SEQ ID NO: 512989 - protein, 17 aa, Homo sapiens
  CDR3 for alpha chain variable domain of TCR clone 256495 (TRAV23/DV6, TRAJ57)
CEASSTLSQGGSEKLVF

SEQ ID NO: 512990 - protein, 14 aa, Homo sapiens
  CDR3 for beta chain variable domain of TCR clone 256495 (TRBV25-1, TRBJ1-1)
CASTHLGGNTEAFF

SEQ ID NO: 512991 - protein, 14 aa, Homo sapiens
  CDR3 for alpha chain variable domain of TCR clone 256496 (TRAV12-1, TRAJ30)
CVPTGTNRDDKIIF

SEQ ID NO: 512992 - protein, 11 aa, Homo sapiens
  CDR3 for beta chain variable domain of TCR clone 256496 (TRBV4-1, TRBJ2-2)
CASEDTGELFF

SEQ ID NO: 512993 - protein, 13 aa, Homo sapiens
  CDR3 for alpha chain variable domain of TCR clone 256497 (TRAV13-1, TRAJ37)
CAAVSGNKGKLIF

SEQ ID NO: 512994 - protein, 17 aa, Homo sapiens
  CDR3 for beta chain variable domain of TCR clone 256497 (TRBV10-2, TRBJ1-6)
CASSENRGSSYNSPLHF

SEQ ID NO: 512995 - protein, 12 aa, Homo sapiens
  CDR3 for alpha chain variable domain of TCR clone 256498 (TRAV21, TRAJ37)
CAVRGNTGKLIF

SEQ ID NO: 512996 - protein, 14 aa, Homo sapiens
  CDR3 for beta chain variable domain of TCR clone 256498 (TRBV4-2, TRBJ2-1)
CASGLDRAYNEQFF

SEQ ID NO: 512997 - protein, 14 aa, Homo sapiens
  CDR3 for alpha chain variable domain of TCR clone 256499 (TRAV1-2, TRAJ16)
CAANRFSDGQKLLF

SEQ ID NO: 512998 - protein, 17 aa, Homo sapiens
  CDR3 for beta chain variable domain of TCR clone 256499 (TRBV9, TRBJ1-6)
CASSVAGTGDSPLHLGT

SEQ ID NO: 512999 - protein, 18 aa, Homo sapiens
  CDR3 for alpha chain variable domain of TCR clone 256500 (TRAV26-1, TRAJ23)
CIVRVGLEVWNQGGKLIF

SEQ ID NO: 513000 - protein, 13 aa, Homo sapiens
  CDR3 for beta chain variable domain of TCR clone 256500 (TRBV2, TRBJ1-1)
CASRWTVNTEAFF

SEQ ID NO: 513001 - protein, 14 aa, Homo sapiens
  CDR3 for alpha chain variable domain of TCR clone 256501 (TRAV21, TRAJ48)
CAVRSNFGNEKLTF

SEQ ID NO: 513002 - protein, 15 aa, Homo sapiens
  CDR3 for beta chain variable domain of TCR clone 256501 (TRBV4-1, TRBJ2-7)
CASSQNTGRLYEQYF

SEQ ID NO: 513003 - protein, 11 aa, Homo sapiens
  CDR3 for alpha chain variable domain of TCR clone 256502 (TRAV2, TRAJ33)
CAVESNYQLIW

SEQ ID NO: 513004 - protein, 12 aa, Homo sapiens
  CDR3 for beta chain variable domain of TCR clone 256502 (TRBV7-9, TRBJ1-6)
CASSLMTSPLHF

SEQ ID NO: 513005 - protein, 15 aa, Homo sapiens
  CDR3 for alpha chain variable domain of TCR clone 256503 (TRAV8-3, TRAJ45)
CASSYSGGGADVLTF

SEQ ID NO: 513006 - protein, 16 aa, Homo sapiens
  CDR3 for beta chain variable domain of TCR clone 256503 (TRBV20-1, TRBJ2-2)
CSASASGIPGAGELFF

SEQ ID NO: 513007 - protein, 11 aa, Homo sapiens
  CDR3 for alpha chain variable domain of TCR clone 256504 (TRAV21, TRAJ11)
CAVNGFSTLTF

SEQ ID NO: 513008 - protein, 11 aa, Homo sapiens
  CDR3 for beta chain variable domain of TCR clone 256504 (TRBV19, TRBJ1-1)
CASSIGSEDFF

SEQ ID NO: 513009 - protein, 14 aa, Homo sapiens
  CDR3 for alpha chain variable domain of TCR clone 256505 (TRAV26-1, TRAJ38)
CIADNAGNNHKLIW

SEQ ID NO: 513010 - protein, 17 aa, Homo sapiens
  CDR3 for beta chain variable domain of TCR clone 256505 (TRBV11-2, TRBJ2-1)
CASSLYPPGVEYNEQFF

SEQ ID NO: 513011 - protein, 12 aa, Homo sapiens
  CDR3 for alpha chain variable domain of TCR clone 256506 (TRAV3, TRAJ26)
CAVRDYGQNFVF

SEQ ID NO: 513012 - protein, 16 aa, Homo sapiens
  CDR3 for beta chain variable domain of TCR clone 256506 (TRBV11-2, TRBJ1-2)
CASSPLGREANYGYTF

SEQ ID NO: 513013 - protein, 14 aa, Homo sapiens
  CDR3 for alpha chain variable domain of TCR clone 256507 (TRAV12-1, TRAJ17)
CVVNYKAAGNKLTF

SEQ ID NO: 513014 - protein, 15 aa, Homo sapiens
  CDR3 for beta chain variable domain of TCR clone 256507 (TRBV7-2, TRBJ2-1)
YASTHGTGIYNEQFF

SEQ ID NO: 513015 - protein, 11 aa, Homo sapiens
  CDR3 for alpha chain variable domain of TCR clone 256508 (TRAV17, TRAJ43)
CATPRSNDMRF

SEQ ID NO: 513016 - protein, 15 aa, Homo sapiens
  CDR3 for beta chain variable domain of TCR clone 256508 (TRBV11-2, TRBJ2-1)
CASSLGTSGLNEQSF

SEQ ID NO: 513017 - protein, 12 aa, Homo sapiens
  CDR3 for alpha chain variable domain of TCR clone 256509 (TRAV2, TRAJ10)
CASTGGVNKLTF

SEQ ID NO: 513018 - protein, 13 aa, Homo sapiens
  CDR3 for beta chain variable domain of TCR clone 256509 (TRBV19, TRBJ1-5)
CASSMRGYQPQHF

SEQ ID NO: 513019 - protein, 12 aa, Homo sapiens
  CDR3 for alpha chain variable domain of TCR clone 256510 (TRAV27, TRAJ41)
CAGRNSGYALNF

SEQ ID NO: 513020 - protein, 14 aa, Homo sapiens
  CDR3 for beta chain variable domain of TCR clone 256510 (TRBV25-1, TRBJ1-1)
CASTHLGGNTEAFF

SEQ ID NO: 513021 - protein, 14 aa, Homo sapiens
  CDR3 for alpha chain variable domain of TCR clone 256511 (TRAV13-1, TRAJ44)
CAAKATGTASKLTF

SEQ ID NO: 513022 - protein, 13 aa, Homo sapiens
  CDR3 for beta chain variable domain of TCR clone 256511 (TRBV20-1, TRBJ1-1)
CSAFDRENTEAFF

SEQ ID NO: 513023 - protein, 12 aa, Homo sapiens
  CDR3 for alpha chain variable domain of TCR clone 256512 (TRAV21, TRAJ8)
CAVNTGFQKLVF

SEQ ID NO: 513024 - protein, 13 aa, Homo sapiens
  CDR3 for beta chain variable domain of TCR clone 256512 (TRBV10-3, TRBJ2-7)
CASKLAVNYEQYF

SEQ ID NO: 513025 - protein, 15 aa, Homo sapiens
  CDR3 for alpha chain variable domain of TCR clone 256513 (TRAV26-1, TRAJ40)
CIVSAVPSGTYKYIF

SEQ ID NO: 513026 - protein, 16 aa, Homo sapiens
  CDR3 for beta chain variable domain of TCR clone 256513 (TRBV7-2, TRBJ2-2)
CASSLRGQANTGELFF

SEQ ID NO: 513027 - protein, 12 aa, Homo sapiens
  CDR3 for alpha chain variable domain of TCR clone 256514 (TRAV26-1, TRAJ36)
CIVETGANNLFF

SEQ ID NO: 513028 - protein, 13 aa, Homo sapiens
  CDR3 for beta chain variable domain of TCR clone 256514 (TRBV7-9, TRBJ1-2)
CASSLKQNYGYTF

SEQ ID NO: 513029 - protein, 15 aa, Homo sapiens
  CDR3 for alpha chain variable domain of TCR clone 256515 (TRAV23/DV6, TRAJ38)
CAASGGAGSNRKLIL

SEQ ID NO: 513030 - protein, 13 aa, Homo sapiens
  CDR3 for beta chain variable domain of TCR clone 256515 (TRBV7-2, TRBJ1-2)
CASSLPGLYGYTF

SEQ ID NO: 513031 - protein, 12 aa, Homo sapiens
  CDR3 for alpha chain variable domain of TCR clone 256516 (TRAV8-3, TRAJ41)
CAVALSGYALNF

SEQ ID NO: 513032 - protein, 18 aa, Homo sapiens
  CDR3 for beta chain variable domain of TCR clone 256516 (TRBV20-1, TRBJ2-6)
RSAETTPTHGSGANVLTF

SEQ ID NO: 513033 - protein, 15 aa, Homo sapiens
  CDR3 for alpha chain variable domain of TCR clone 256517 (TRAV3, TRAJ47)
CAVRDIGEYGNKLVF

SEQ ID NO: 513034 - protein, 16 aa, Homo sapiens
  CDR3 for beta chain variable domain of TCR clone 256517 (TRBV2, TRBJ2-7)
CASSEAIGGYTTEQYF

SEQ ID NO: 513035 - protein, 12 aa, Homo sapiens
  CDR3 for alpha chain variable domain of TCR clone 256518 (TRAV13-1, TRAJ15)
CAASQAGTALIF

SEQ ID NO: 513036 - protein, 14 aa, Homo sapiens
  CDR3 for beta chain variable domain of TCR clone 256518 (TRBV19, TRBJ2-1)
CASPTFVVSGEQFF

SEQ ID NO: 513037 - protein, 17 aa, Homo sapiens
  CDR3 for alpha chain variable domain of TCR clone 256519 (TRAV3, TRAJ38)
CAVRDCLNAGNNRKLIW

SEQ ID NO: 513038 - protein, 15 aa, Homo sapiens
  CDR3 for beta chain variable domain of TCR clone 256519 (TRBV6-3, TRBJ2-2)
CASSFLATLTGELFF

SEQ ID NO: 513039 - protein, 13 aa, Homo sapiens
  CDR3 for alpha chain variable domain of TCR clone 256520 (TRAV16, TRAJ22)
SAMLAGSARQLTF

SEQ ID NO: 513040 - protein, 17 aa, Homo sapiens
  CDR3 for beta chain variable domain of TCR clone 256520 (TRBV7-2, TRBJ2-3)
CQQLRNGPGPKADTQYF

SEQ ID NO: 513041 - protein, 14 aa, Homo sapiens
  CDR3 for alpha chain variable domain of TCR clone 256521 (TRAV38-1, TRAJ45)
CAYYSGGGADGLTF

SEQ ID NO: 513042 - protein, 14 aa, Homo sapiens
  CDR3 for beta chain variable domain of TCR clone 256521 (TRBV25-1, TRBJ1-1)
CASTHLGGNTEAFV

SEQ ID NO: 513043 - protein, 14 aa, Homo sapiens
  CDR3 for alpha chain variable domain of TCR clone 256522 (TRAV1-2, TRAJ16)
CAVNRFSDGQKLLF

SEQ ID NO: 513044 - protein, 13 aa, Homo sapiens
  CDR3 for beta chain variable domain of TCR clone 256522 (TRBV29-1, TRBJ1-1)
CSVGDRRNTEAFF

SEQ ID NO: 513045 - protein, 18 aa, Homo sapiens
  CDR3 for alpha chain variable domain of TCR clone 256523 (TRAV12-3, TRAJ52)
CAMSVGGAGGTSYGKLTF

SEQ ID NO: 513046 - protein, 13 aa, Homo sapiens
  CDR3 for beta chain variable domain of TCR clone 256523 (TRBV7-3, TRBJ1-1)
CASSQDWGADAFF

SEQ ID NO: 513047 - protein, 15 aa, Homo sapiens
  CDR3 for alpha chain variable domain of TCR clone 256524 (TRAV8-3, TRAJ27)
CAVGPSKTNACKSTF

SEQ ID NO: 513048 - protein, 13 aa, Homo sapiens
  CDR3 for beta chain variable domain of TCR clone 256524 (TRBV12-5, TRBJ1-2)
CASGVRTGNGYTF

SEQ ID NO: 513049 - protein, 15 aa, Homo sapiens
  CDR3 for alpha chain variable domain of TCR clone 256525 (TRAV12-3, TRAJ28)
CASSYSGAGSYQLTF

SEQ ID NO: 513050 - protein, 16 aa, Homo sapiens
  CDR3 for beta chain variable domain of TCR clone 256525 (TRBV12-4, TRBJ1-3)
CASSSPQQGYGNTIYF

SEQ ID NO: 513051 - protein, 18 aa, Homo sapiens
  CDR3 for alpha chain variable domain of TCR clone 256526 (TRAV12-3, TRAJ52)
CAMSVGGSGGASYGKLTF

SEQ ID NO: 513052 - protein, 15 aa, Homo sapiens
  CDR3 for beta chain variable domain of TCR clone 256526 (TRBV27, TRBJ1-6)
CASSFDRGLGSPLHF

SEQ ID NO: 513053 - protein, 14 aa, Homo sapiens
  CDR3 for alpha chain variable domain of TCR clone 256527 (TRAV12-2, TRAJ33)
CAVKRARRHYQLIW

SEQ ID NO: 513054 - protein, 12 aa, Homo sapiens
  CDR3 for beta chain variable domain of TCR clone 256527 (TRBV24-1, TRBJ2-3)
CATSDSTDTQYF

SEQ ID NO: 513055 - protein, 12 aa, Homo sapiens
  CDR3 for alpha chain variable domain of TCR clone 256528 (TRAV3, TRAJ43)
CAVRDPNNDMRF

SEQ ID NO: 513056 - protein, 15 aa, Homo sapiens
  CDR3 for beta chain variable domain of TCR clone 256528 (TRBV27, TRBJ1-5)
CASSLGRGFDQPQHF

SEQ ID NO: 513057 - protein, 15 aa, Homo sapiens
  CDR3 for alpha chain variable domain of TCR clone 256529 (TRAV17, TRAJ22)
CATVAPSGSARQLTT

SEQ ID NO: 513058 - protein, 16 aa, Homo sapiens
  CDR3 for beta chain variable domain of TCR clone 256529 (TRBV10-3, TRBJ2-7)
CAISADFADRPYEQYF

SEQ ID NO: 513059 - protein, 15 aa, Homo sapiens
  CDR3 for alpha chain variable domain of TCR clone 256530 (TRAV2, TRAJ13)
CAVEANSGGYQKVNF

SEQ ID NO: 513060 - protein, 15 aa, Homo sapiens
  CDR3 for beta chain variable domain of TCR clone 256530 (TRBV5-1, TRBJ2-7)
CASSPINRLTYEQYF

SEQ ID NO: 513061 - protein, 14 aa, Homo sapiens
  CDR3 for alpha chain variable domain of TCR clone 256531 (TRAV13-1, TRAJ16)
CAAAYFFRWPEAAL

SEQ ID NO: 513062 - protein, 20 aa, Homo sapiens
  CDR3 for beta chain variable domain of TCR clone 256531 (TRBV7-8, TRBJ2-2)
CASSHLFPGPTIHITGELFF

SEQ ID NO: 513063 - protein, 11 aa, Homo sapiens
  CDR3 for alpha chain variable domain of TCR clone 256532 (TRAV12-2, TRAJ10)
GVTGGGNRLTF

SEQ ID NO: 513064 - protein, 16 aa, Homo sapiens
  CDR3 for beta chain variable domain of TCR clone 256532 (TRBV6-4, TRBJ1-2)
CASSEAVGDPNYGYTF

SEQ ID NO: 513065 - protein, 13 aa, Homo sapiens
  CDR3 for alpha chain variable domain of TCR clone 256533 (TRAV12-2, TRAJ49)
CAVNMRTGNPFYF

SEQ ID NO: 513066 - protein, 11 aa, Homo sapiens
  CDR3 for beta chain variable domain of TCR clone 256533 (TRBV5-5, TRBJ1-1)
CASSLGVEAFF

SEQ ID NO: 513067 - protein, 14 aa, Homo sapiens
  CDR3 for alpha chain variable domain of TCR clone 256534 (TRAV1-2, TRAJ8)
CGVREDTGFQKLVF

SEQ ID NO: 513068 - protein, 17 aa, Homo sapiens
  CDR3 for beta chain variable domain of TCR clone 256534 (TRBV13, TRBJ2-3)
CASSLSRVAGGRNTQYF

SEQ ID NO: 513069 - protein, 10 aa, Homo sapiens
  CDR3 for alpha chain variable domain of TCR clone 256535 (TRAV1-2, TRAJ31)
CVSEDARLMF

SEQ ID NO: 513070 - protein, 12 aa, Homo sapiens
  CDR3 for beta chain variable domain of TCR clone 256535 (TRBV4-1, TRBJ2-1)
CASSQPGQGQFF

SEQ ID NO: 513071 - protein, 15 aa, Homo sapiens
  CDR3 for alpha chain variable domain of TCR clone 256536 (TRAV13-1, TRAJ5)
CAVSPIDTGRRALTF

SEQ ID NO: 513072 - protein, 13 aa, Homo sapiens
  CDR3 for beta chain variable domain of TCR clone 256536 (TRBV12-4, TRBJ2-7)
CASSLSGVYEQYF

SEQ ID NO: 513073 - protein, 17 aa, Homo sapiens
  CDR3 for alpha chain variable domain of TCR clone 256537 (TRAV26-1, TRAJ37)
CIVRVITASSNTGKLIF

SEQ ID NO: 513074 - protein, 15 aa, Homo sapiens
  CDR3 for beta chain variable domain of TCR clone 256537 (TRBV10-1, TRBJ2-3)
CASSATSGGFDTQYF

SEQ ID NO: 513075 - protein, 12 aa, Homo sapiens
  CDR3 for alpha chain variable domain of TCR clone 256538 (TRAV13-1, TRAJ48)
CAANCGNEKLTF

SEQ ID NO: 513076 - protein, 13 aa, Homo sapiens
  CDR3 for beta chain variable domain of TCR clone 256538 (TRBV7-3, TRBJ1-1)
CASSQDWGAEAFF

SEQ ID NO: 513077 - protein, 14 aa, Homo sapiens
  CDR3 for alpha chain variable domain of TCR clone 256539 (TRAV12-2, TRAJ44)
CAVNPAGNASKLTF

SEQ ID NO: 513078 - protein, 16 aa, Homo sapiens
  CDR3 for beta chain variable domain of TCR clone 256539 (TRBV2, TRBJ2-1)
CASSVGGYLSYNEQFF

SEQ ID NO: 513079 - protein, 16 aa, Homo sapiens
  CDR3 for alpha chain variable domain of TCR clone 256540 (TRAV30, TRAJ24)
CGTEIVDADSWGKFRF

SEQ ID NO: 513080 - protein, 14 aa, Homo sapiens
  CDR3 for beta chain variable domain of TCR clone 256540 (TRBV12-5, TRBJ2-5)
CASCSRTHQETQYF

SEQ ID NO: 513081 - protein, 13 aa, Homo sapiens
  CDR3 for alpha chain variable domain of TCR clone 256541 (TRAV17, TRAJ7)
CGTDNYGNNRLAF

SEQ ID NO: 513082 - protein, 16 aa, Homo sapiens
  CDR3 for beta chain variable domain of TCR clone 256541 (TRBV4-1, TRBJ2-5)
CASSQAIAASSATQYF

SEQ ID NO: 513083 - protein, 11 aa, Homo sapiens
  CDR3 for alpha chain variable domain of TCR clone 256542 (TRAV1-1, TRAJ26)
CAVRDGQNFVF

SEQ ID NO: 513084 - protein, 14 aa, Homo sapiens
  CDR3 for beta chain variable domain of TCR clone 256542 (TRBV4-1, TRBJ2-5)
CASSQDLALETQYF

SEQ ID NO: 513085 - protein, 18 aa, Homo sapiens
  CDR3 for alpha chain variable domain of TCR clone 256543 (TRAV21, TRAJ52)
CAVRPSPAGGTSYGKLTF

SEQ ID NO: 513086 - protein, 14 aa, Homo sapiens
  CDR3 for beta chain variable domain of TCR clone 256543 (TRBV2, TRBJ1-6)
CASEVSSYNSPLHF

SEQ ID NO: 513087 - protein, 19 aa, Homo sapiens
  CDR3 for alpha chain variable domain of TCR clone 256544 (TRAV3, TRAJ6)
CAVRDRNPSRSGGSYIPTF

SEQ ID NO: 513088 - protein, 17 aa, Homo sapiens
  CDR3 for beta chain variable domain of TCR clone 256544 (TRBV15, TRBJ1-5)
CATSRAPPGTRNQPQHF

SEQ ID NO: 513089 - protein, 15 aa, Homo sapiens
  CDR3 for alpha chain variable domain of TCR clone 256545 (TRAV38-2/DV8, TRAJ45)
CAYWDSGGGADGLTF

SEQ ID NO: 513090 - protein, 16 aa, Homo sapiens
  CDR3 for beta chain variable domain of TCR clone 256545 (TRBV7-2, TRBJ2-1)
CASSPRLAGSNNEQFF

SEQ ID NO: 513091 - protein, 16 aa, Homo sapiens
  CDR3 for alpha chain variable domain of TCR clone 256546 (TRAV13-1, TRAJ48)
CAASIFGNFGNEKLTF

SEQ ID NO: 513092 - protein, 15 aa, Homo sapiens
  CDR3 for beta chain variable domain of TCR clone 256546 (TRBV20-1, TRBJ2-7)
CSARDRVSGMDEQYF

SEQ ID NO: 513093 - protein, 15 aa, Homo sapiens
  CDR3 for alpha chain variable domain of TCR clone 256547 (TRAV2, TRAJ13)
CATPSYSGSYQKVTF

SEQ ID NO: 513094 - protein, 13 aa, Homo sapiens
  CDR3 for beta chain variable domain of TCR clone 256547 (TRBV14, TRBJ1-5)
CASSQDRRGPQHF

SEQ ID NO: 513095 - protein, 18 aa, Homo sapiens
  CDR3 for alpha chain variable domain of TCR clone 256548 (TRAV26-1, TRAJ52)
CIVDPVGAGGTSYGKLTF

SEQ ID NO: 513096 - protein, 15 aa, Homo sapiens
  CDR3 for beta chain variable domain of TCR clone 256548 (TRBV2, TRBJ2-7)
CASTLLGSGATEQYF

SEQ ID NO: 513097 - protein, 16 aa, Homo sapiens
  CDR3 for alpha chain variable domain of TCR clone 256549 (TRAV3, TRAJ28)
CAVLPRSGAGSYQLTF

SEQ ID NO: 513098 - protein, 13 aa, Homo sapiens
  CDR3 for beta chain variable domain of TCR clone 256549 (TRBV12-4, TRBJ2-5)
CASRLAVLETQYF

SEQ ID NO: 513099 - protein, 14 aa, Homo sapiens
  CDR3 for alpha chain variable domain of TCR clone 256550 (TRAV8-4, TRAJ13)
CAVTLSGGYQKVTF

SEQ ID NO: 513100 - protein, 14 aa, Homo sapiens
  CDR3 for beta chain variable domain of TCR clone 256550 (TRBV7-2, TRBJ1-2)
CASSQTGSTYGSTF

SEQ ID NO: 513101 - protein, 12 aa, Homo sapiens
  CDR3 for alpha chain variable domain of TCR clone 256551 (TRAV12-3, TRAJ17)
CALTLTGNKLTF

SEQ ID NO: 513102 - protein, 17 aa, Homo sapiens
  CDR3 for beta chain variable domain of TCR clone 256551 (TRBV7-3, TRBJ2-3)
CASSLMKRMRGADTQYF

SEQ ID NO: 513103 - protein, 14 aa, Homo sapiens
  CDR3 for alpha chain variable domain of TCR clone 256552 (TRAV26-1, TRAJ57)
CIRSGQGGSDKLVF

SEQ ID NO: 513104 - protein, 13 aa, Homo sapiens
  CDR3 for beta chain variable domain of TCR clone 256552 (TRBV19, TRBJ2-7)
CASSLTTSHEQYF

SEQ ID NO: 513105 - protein, 15 aa, Homo sapiens
  CDR3 for alpha chain variable domain of TCR clone 256553 (TRAV3, TRAJ20)
CAVRDIKLSGYKLSF

SEQ ID NO: 513106 - protein, 18 aa, Homo sapiens
  CDR3 for beta chain variable domain of TCR clone 256553 (TRBV20-1, TRBJ2-5)
CSQTGDSGRLGGKETQYF

SEQ ID NO: 513107 - protein, 16 aa, Homo sapiens
  CDR3 for alpha chain variable domain of TCR clone 256554 (TRAV1-2, TRAJ18)
CAVRVERGSTLGRLYC

SEQ ID NO: 513108 - protein, 16 aa, Homo sapiens
  CDR3 for beta chain variable domain of TCR clone 256554 (TRBV20-1, TRBJ2-7)
CSASTSGRLSSYEQYF

SEQ ID NO: 513109 - protein, 13 aa, Homo sapiens
  CDR3 for alpha chain variable domain of TCR clone 256555 (TRAV13-2, TRAJ48)
CAEMDFGNEKLTF

SEQ ID NO: 513110 - protein, 13 aa, Homo sapiens
  CDR3 for beta chain variable domain of TCR clone 256555 (TRBV7-3, TRBJ2-5)
WASSFRGGETQYF

SEQ ID NO: 513111 - protein, 13 aa, Homo sapiens
  CDR3 for alpha chain variable domain of TCR clone 256556 (TRAV21, TRAJ37)
CAVSSCNTGKLIF

SEQ ID NO: 513112 - protein, 17 aa, Homo sapiens
  CDR3 for beta chain variable domain of TCR clone 256556 (TRBV5-1, TRBJ2-5)
CASSLLGLAANQETQYF

SEQ ID NO: 513113 - protein, 18 aa, Homo sapiens
  CDR3 for alpha chain variable domain of TCR clone 256557 (TRAV21, TRAJ52)
CAVRPSPAGGTSYGKLTF

SEQ ID NO: 513114 - protein, 15 aa, Homo sapiens
  CDR3 for beta chain variable domain of TCR clone 256557 (TRBV19, TRBJ2-7)
CASSFNSGGVWEQYF

SEQ ID NO: 513115 - protein, 17 aa, Homo sapiens
  CDR3 for alpha chain variable domain of TCR clone 256558 (TRAV3, TRAJ6)
CAVRDGPRAGGSYIPTF

SEQ ID NO: 513116 - protein, 14 aa, Homo sapiens
  CDR3 for beta chain variable domain of TCR clone 256558 (TRBV7-2, TRBJ2-7)
CASSTKTSFYEQYC

SEQ ID NO: 513117 - protein, 14 aa, Homo sapiens
  CDR3 for alpha chain variable domain of TCR clone 256559 (TRAV12-2, TRAJ40)
CAVKIPSGTYKYIF

SEQ ID NO: 513118 - protein, 13 aa, Homo sapiens
  CDR3 for beta chain variable domain of TCR clone 256559 (TRBV7-2, TRBJ2-5)
CASSQTSVETQDF

SEQ ID NO: 513119 - protein, 13 aa, Homo sapiens
  CDR3 for alpha chain variable domain of TCR clone 256560 (TRAV12-1, TRAJ11)
CVVRRSGYSTLTF

SEQ ID NO: 513120 - protein, 15 aa, Homo sapiens
  CDR3 for beta chain variable domain of TCR clone 256560 (TRBV11-2, TRBJ2-2)
CASSSDRVNAGELFF

SEQ ID NO: 513121 - protein, 14 aa, Homo sapiens
  CDR3 for alpha chain variable domain of TCR clone 256561 (TRAV8-3, TRAJ4)
CAVGAAGGYNKLIF

SEQ ID NO: 513122 - protein, 12 aa, Homo sapiens
  CDR3 for beta chain variable domain of TCR clone 256561 (TRBV29-1, TRBJ1-1)
CSESDGNTEAFF

SEQ ID NO: 513123 - protein, 15 aa, Homo sapiens
  CDR3 for alpha chain variable domain of TCR clone 256562 (TRAV21, TRAJ53)
CATLNSGGSNYKLKF

SEQ ID NO: 513124 - protein, 14 aa, Homo sapiens
  CDR3 for beta chain variable domain of TCR clone 256562 (TRBV19, TRBJ2-1)
CASPTFVLSGEQFF

SEQ ID NO: 513125 - protein, 18 aa, Homo sapiens
  CDR3 for alpha chain variable domain of TCR clone 256563 (TRAV21, TRAJ52)
CAVRPSPAGGTSYGKLTF

SEQ ID NO: 513126 - protein, 16 aa, Homo sapiens
  CDR3 for beta chain variable domain of TCR clone 256563 (TRBV12-4, TRBJ2-7)
CASSLIGGTGTYEQYF

SEQ ID NO: 513127 - protein, 16 aa, Homo sapiens
  CDR3 for alpha chain variable domain of TCR clone 256564 (TRAV23/DV6, TRAJ9)
CAASIGGNTGGFKTIF

SEQ ID NO: 513128 - protein, 17 aa, Homo sapiens
  CDR3 for beta chain variable domain of TCR clone 256564 (TRBV4-1, TRBJ1-4)
CASSQGGPRGVEEKLFF

SEQ ID NO: 513129 - protein, 11 aa, Homo sapiens
  CDR3 for alpha chain variable domain of TCR clone 256565 (TRAV2, TRAJ13)
CASGGYQKVTF

SEQ ID NO: 513130 - protein, 11 aa, Homo sapiens
  CDR3 for beta chain variable domain of TCR clone 256565 (TRBV6-3, TRBJ2-3)
CATGQADTQYS

SEQ ID NO: 513131 - protein, 12 aa, Homo sapiens
  CDR3 for alpha chain variable domain of TCR clone 256566 (TRAV4, TRAJ26)
CLVGDYGQNFVF

SEQ ID NO: 513132 - protein, 15 aa, Homo sapiens
  CDR3 for beta chain variable domain of TCR clone 256566 (TRBV10-3, TRBJ2-3)
CAISLTSGGTDTQYF

SEQ ID NO: 513133 - protein, 13 aa, Homo sapiens
  CDR3 for alpha chain variable domain of TCR clone 256567 (TRAV8-6, TRAJ9)
CAVSDTGGFKTIF

SEQ ID NO: 513134 - protein, 12 aa, Homo sapiens
  CDR3 for beta chain variable domain of TCR clone 256567 (TRBV11-2, TRBJ2-2)
CASSLGGGELFF

SEQ ID NO: 513135 - protein, 13 aa, Homo sapiens
  CDR3 for alpha chain variable domain of TCR clone 256568 (TRAV8-6, TRAJ49)
CAVITNTGNQFYF

SEQ ID NO: 513136 - protein, 14 aa, Homo sapiens
  CDR3 for beta chain variable domain of TCR clone 256568 (TRBV28, TRBJ2-7)
CAIVGQGHLYEQYF

SEQ ID NO: 513137 - protein, 12 aa, Homo sapiens
  CDR3 for alpha chain variable domain of TCR clone 256569 (TRAV13-2, TRAJ23)
CAERHRGGKLIF

SEQ ID NO: 513138 - protein, 13 aa, Homo sapiens
  CDR3 for beta chain variable domain of TCR clone 256569 (TRBV14, TRBJ1-1)
CASSRTVNTEAFF

SEQ ID NO: 513139 - protein, 13 aa, Homo sapiens
  CDR3 for alpha chain variable domain of TCR clone 256570 (TRAV3, TRAJ21)
CAVREPDFNKFYF

SEQ ID NO: 513140 - protein, 14 aa, Homo sapiens
  CDR3 for beta chain variable domain of TCR clone 256570 (TRBV20-1, TRBJ1-1)
SASRGVTGNTEAFF

SEQ ID NO: 513141 - protein, 13 aa, Homo sapiens
  CDR3 for alpha chain variable domain of TCR clone 256571 (TRAV8-1, TRAJ34)
CAVRPYNTDKLIF

SEQ ID NO: 513142 - protein, 15 aa, Homo sapiens
  CDR3 for beta chain variable domain of TCR clone 256571 (TRBV7-9, TRBJ1-3)
CAISLRSGSGNTIYF

SEQ ID NO: 513143 - protein, 13 aa, Homo sapiens
  CDR3 for alpha chain variable domain of TCR clone 256572 (TRAV17, TRAJ40)
CATDEGGTYKYIF

SEQ ID NO: 513144 - protein, 16 aa, Homo sapiens
  CDR3 for beta chain variable domain of TCR clone 256572 (TRBV4-1, TRBJ1-2)
CASSQDAGQVLYGYTF

SEQ ID NO: 513145 - protein, 15 aa, Homo sapiens
  CDR3 for alpha chain variable domain of TCR clone 256573 (TRAV8-4, TRAJ29)
CAVSEDFRGNTPVVF

SEQ ID NO: 513146 - protein, 14 aa, Homo sapiens
  CDR3 for beta chain variable domain of TCR clone 256573 (TRBV7-2, TRBJ1-1)
CASSFLTGTTEAFF

SEQ ID NO: 513147 - protein, 14 aa, Homo sapiens
  CDR3 for alpha chain variable domain of TCR clone 256574 (TRAV8-3, TRAJ4)
CAVGAAGGYNKLIF

SEQ ID NO: 513148 - protein, 17 aa, Homo sapiens
  CDR3 for beta chain variable domain of TCR clone 256574 (TRBV13, TRBJ2-3)
CASSLSRVAWGRNTQYF

SEQ ID NO: 513149 - protein, 14 aa, Homo sapiens
  CDR3 for alpha chain variable domain of TCR clone 256575 (TRAV26-1, TRAJ38)
CIVVGAGNNRKLMW

SEQ ID NO: 513150 - protein, 12 aa, Homo sapiens
  CDR3 for beta chain variable domain of TCR clone 256575 (TRBV5-1, TRBJ2-5)
CASSWDQETQYF

SEQ ID NO: 513151 - protein, 15 aa, Homo sapiens
  CDR3 for alpha chain variable domain of TCR clone 256576 (TRAV12-2, TRAJ53)
FAVNGGGGSNYKLTF

SEQ ID NO: 513152 - protein, 17 aa, Homo sapiens
  CDR3 for beta chain variable domain of TCR clone 256576 (TRBV7-3, TRBJ2-3)
RASSLMKRMRGADTQYF

SEQ ID NO: 513153 - protein, 15 aa, Homo sapiens
  CDR3 for alpha chain variable domain of TCR clone 256577 (TRAV3, TRAJ4)
CAVRDGTGGYNKLIF

SEQ ID NO: 513154 - protein, 13 aa, Homo sapiens
  CDR3 for beta chain variable domain of TCR clone 256577 (TRBV10-3, TRBJ2-7)
CASRLAVNYEQYF

SEQ ID NO: 513155 - protein, 21 aa, Homo sapiens
  CDR3 for alpha chain variable domain of TCR clone 256578 (TRAV12-1, TRAJ32)
SSVIQPPTSMNYGGATNTLIF

SEQ ID NO: 513156 - protein, 18 aa, Homo sapiens
  CDR3 for beta chain variable domain of TCR clone 256578 (TRBV20-1, TRBJ2-3)
CSASGLAGGPGTTDTQYF

SEQ ID NO: 513157 - protein, 15 aa, Homo sapiens
  CDR3 for alpha chain variable domain of TCR clone 256579 (TRAV12-1, TRAJ9)
CVVSFGDTGGFKTIF

SEQ ID NO: 513158 - protein, 14 aa, Homo sapiens
  CDR3 for beta chain variable domain of TCR clone 256579 (TRBV4-2, TRBJ2-1)
CASGLDRAYNEQFF

SEQ ID NO: 513159 - protein, 15 aa, Homo sapiens
  CDR3 for alpha chain variable domain of TCR clone 256580 (TRAV3, TRAJ20)
CAVRDIKLSDYKLSF

SEQ ID NO: 513160 - protein, 14 aa, Homo sapiens
  CDR3 for beta chain variable domain of TCR clone 256580 (TRBV7-3, TRBJ1-1)
CASSLGTGYTEAFF

SEQ ID NO: 513161 - protein, 14 aa, Homo sapiens
  CDR3 for alpha chain variable domain of TCR clone 256581 (TRAV13-1, TRAJ44)
CAAKATGTASKLNF

SEQ ID NO: 513162 - protein, 15 aa, Homo sapiens
  CDR3 for beta chain variable domain of TCR clone 256581 (TRBV28, TRBJ1-3)
CASSMGWASGNTVYF

SEQ ID NO: 513163 - protein, 14 aa, Homo sapiens
  CDR3 for alpha chain variable domain of TCR clone 256582 (TRAV8-2, TRAJ23)
CVLSDDNQGGKLIF

SEQ ID NO: 513164 - protein, 16 aa, Homo sapiens
  CDR3 for beta chain variable domain of TCR clone 256582 (TRBV4-2, TRBJ2-5)
CASSQELVGSQETQYF

SEQ ID NO: 513165 - protein, 16 aa, Homo sapiens
  CDR3 for alpha chain variable domain of TCR clone 256583 (TRAV3, TRAJ21)
CAVRDIDRGNFNKLYF

SEQ ID NO: 513166 - protein, 13 aa, Homo sapiens
  CDR3 for beta chain variable domain of TCR clone 256583 (TRBV27, TRBJ2-7)
CASSLTTGYEQYF

SEQ ID NO: 513167 - protein, 14 aa, Homo sapiens
  CDR3 for alpha chain variable domain of TCR clone 256584 (TRAV26-1, TRAJ29)
CIVRGTSGNTPLVF

SEQ ID NO: 513168 - protein, 13 aa, Homo sapiens
  CDR3 for beta chain variable domain of TCR clone 256584 (TRBV28, TRBJ2-7)
CAILDRAGGEQYF

SEQ ID NO: 513169 - protein, 15 aa, Homo sapiens
  CDR3 for alpha chain variable domain of TCR clone 256585 (TRAV25, TRAJ53)
CPTSNSGGSNYKLTF

SEQ ID NO: 513170 - protein, 16 aa, Homo sapiens
  CDR3 for beta chain variable domain of TCR clone 256585 (TRBV5-1, TRBJ2-2)
CASSLWDTTNTGELFF

SEQ ID NO: 513171 - protein, 14 aa, Homo sapiens
  CDR3 for alpha chain variable domain of TCR clone 256586 (TRAV24, TRAJ42)
CAQNYGGSQGNIIF

SEQ ID NO: 513172 - protein, 15 aa, Homo sapiens
  CDR3 for beta chain variable domain of TCR clone 256586 (TRBV19, TRBJ1-5)
CASSIPGGAGQPQHF

SEQ ID NO: 513173 - protein, 14 aa, Homo sapiens
  CDR3 for alpha chain variable domain of TCR clone 256587 (TRAV6, TRAJ6)
CALDRAGGGYIPTF

SEQ ID NO: 513174 - protein, 13 aa, Homo sapiens
  CDR3 for beta chain variable domain of TCR clone 256587 (TRBV10-2, TRBJ2-5)
CASSEGGKETQYF

SEQ ID NO: 513175 - protein, 13 aa, Homo sapiens
  CDR3 for alpha chain variable domain of TCR clone 256588 (TRAV13-2, TRAJ48)
CAEMDFGNEKLTF

SEQ ID NO: 513176 - protein, 13 aa, Homo sapiens
  CDR3 for beta chain variable domain of TCR clone 256588 (TRBV27, TRBJ1-6)
CASRWTGYSTLHF

SEQ ID NO: 513177 - protein, 15 aa, Homo sapiens
  CDR3 for alpha chain variable domain of TCR clone 256589 (TRAV8-4, TRAJ37)
CAVTYGSSNTGKLIF

SEQ ID NO: 513178 - protein, 17 aa, Homo sapiens
  CDR3 for beta chain variable domain of TCR clone 256589 (TRBV7-3, TRBJ2-3)
CASSLMKRMRGADTQYF

SEQ ID NO: 513179 - protein, 16 aa, Homo sapiens
  CDR3 for alpha chain variable domain of TCR clone 256590 (TRAV8-6, TRAJ4)
CAVSERISGGSNKLIF

SEQ ID NO: 513180 - protein, 19 aa, Homo sapiens
  CDR3 for beta chain variable domain of TCR clone 256590 (TRBV19, TRBJ1-5)
CASSISPRQTGGGNQPQHF

SEQ ID NO: 513181 - protein, 14 aa, Homo sapiens
  CDR3 for alpha chain variable domain of TCR clone 256591 (TRAV30, TRAJ26)
CGTEVVSYGQNFVF

SEQ ID NO: 513182 - protein, 13 aa, Homo sapiens
  CDR3 for beta chain variable domain of TCR clone 256591 (TRBV19, TRBJ1-3)
CASRLSLGNTIYF

SEQ ID NO: 513183 - protein, 13 aa, Homo sapiens
  CDR3 for alpha chain variable domain of TCR clone 256592 (TRAV1-2, TRAJ12)
CAVSMDSSYKLIC

SEQ ID NO: 513184 - protein, 14 aa, Homo sapiens
  CDR3 for beta chain variable domain of TCR clone 256592 (TRBV19, TRBJ2-1)
CASSSGRDYNEQFF

SEQ ID NO: 513185 - protein, 12 aa, Homo sapiens
  CDR3 for alpha chain variable domain of TCR clone 256593 (TRAV12-3, TRAJ20)
WAMVRGDYKLSF

SEQ ID NO: 513186 - protein, 14 aa, Homo sapiens
  CDR3 for beta chain variable domain of TCR clone 256593 (TRBV5-5, TRBJ1-5)
CASSGQGADQPQHF

SEQ ID NO: 513187 - protein, 10 aa, Homo sapiens
  CDR3 for alpha chain variable domain of TCR clone 256594 (TRAV1-2, TRAJ23)
CAGRGGKLIF

SEQ ID NO: 513188 - protein, 16 aa, Homo sapiens
  CDR3 for beta chain variable domain of TCR clone 256594 (TRBV11-2, TRBJ1-1)
CASSLRQGGEHSKAFF

SEQ ID NO: 513189 - protein, 12 aa, Homo sapiens
  CDR3 for alpha chain variable domain of TCR clone 256595 (TRAV13-1, TRAJ21)
CAAKEGFNKFYF

SEQ ID NO: 513190 - protein, 15 aa, Homo sapiens
  CDR3 for beta chain variable domain of TCR clone 256595 (TRBV2, TRBJ2-1)
CASSALAGSYNEQFF

SEQ ID NO: 513191 - protein, 12 aa, Homo sapiens
  CDR3 for alpha chain variable domain of TCR clone 256596 (TRAV20, TRAJ54)
CAVQEGAQKLVF

SEQ ID NO: 513192 - protein, 17 aa, Homo sapiens
  CDR3 for beta chain variable domain of TCR clone 256596 (TRBV13, TRBJ2-3)
CASSLSRVAGGSNTQYF

SEQ ID NO: 513193 - protein, 16 aa, Homo sapiens
  CDR3 for alpha chain variable domain of TCR clone 256597 (TRAV3, TRAJ10)
CAVRDMNAGGGNKLTF

SEQ ID NO: 513194 - protein, 16 aa, Homo sapiens
  CDR3 for beta chain variable domain of TCR clone 256597 (TRBV6-3, TRBJ1-2)
CASSYSRRASNYGYTC

SEQ ID NO: 513195 - protein, 11 aa, Homo sapiens
  CDR3 for alpha chain variable domain of TCR clone 256598 (TRAV2, TRAJ13)
CASGGYQKVTF

SEQ ID NO: 513196 - protein, 14 aa, Homo sapiens
  CDR3 for beta chain variable domain of TCR clone 256598 (TRBV6-3, TRBJ1-1)
FASSYQRRDTEAFF

SEQ ID NO: 513197 - protein, 14 aa, Homo sapiens
  CDR3 for alpha chain variable domain of TCR clone 256599 (TRAV1-2, TRAJ8)
CAVREDTGFQKLVF

SEQ ID NO: 513198 - protein, 14 aa, Homo sapiens
  CDR3 for beta chain variable domain of TCR clone 256599 (TRBV7-7, TRBJ2-2)
CASSTRASGGELFF

SEQ ID NO: 513199 - protein, 14 aa, Homo sapiens
  CDR3 for alpha chain variable domain of TCR clone 256600 (TRAV2, TRAJ37)
CAVDFTSNTGKLIF

SEQ ID NO: 513200 - protein, 15 aa, Homo sapiens
  CDR3 for beta chain variable domain of TCR clone 256600 (TRBV5-1, TRBJ2-5)
CASSFKGGDQETQYF

SEQ ID NO: 513201 - protein, 16 aa, Homo sapiens
  CDR3 for alpha chain variable domain of TCR clone 256601 (TRAV12-3, TRAJ53)
CAMSPGNGGSNYKLTL

SEQ ID NO: 513202 - protein, 16 aa, Homo sapiens
  CDR3 for beta chain variable domain of TCR clone 256601 (TRBV4-2, TRBJ1-1)
CASSQAGFGMNTEAFF

SEQ ID NO: 513203 - protein, 17 aa, Homo sapiens
  CDR3 for alpha chain variable domain of TCR clone 256602 (TRAV3, TRAJ6)
CAVRDGPRAGGSYILTF

SEQ ID NO: 513204 - protein, 18 aa, Homo sapiens
  CDR3 for beta chain variable domain of TCR clone 256602 (TRBV12-4, TRBJ2-2)
CASSLVAGTRGRTGELFF

SEQ ID NO: 513205 - protein, 14 aa, Homo sapiens
  CDR3 for alpha chain variable domain of TCR clone 256603 (TRAV13-1, TRAJ44)
CAAKATGTASKLTF

SEQ ID NO: 513206 - protein, 15 aa, Homo sapiens
  CDR3 for beta chain variable domain of TCR clone 256603 (TRBV11-3, TRBJ2-2)
CASSYFSTGTGELFF

SEQ ID NO: 513207 - protein, 16 aa, Homo sapiens
  CDR3 for alpha chain variable domain of TCR clone 256604 (TRAV30, TRAJ24)
CGTEIVDADSWGKFQF

SEQ ID NO: 513208 - protein, 17 aa, Homo sapiens
  CDR3 for beta chain variable domain of TCR clone 256604 (TRBV20-1, TRBJ2-1)
CSARDRWRASSYNEQFF

SEQ ID NO: 513209 - protein, 12 aa, Homo sapiens
  CDR3 for alpha chain variable domain of TCR clone 256605 (TRAV12-3, TRAJ17)
CAMTLTGNKLSF

SEQ ID NO: 513210 - protein, 15 aa, Homo sapiens
  CDR3 for beta chain variable domain of TCR clone 256605 (TRBV20-1, TRBJ2-7)
CSARDRVSVMDEQYF

SEQ ID NO: 513211 - protein, 12 aa, Homo sapiens
  CDR3 for alpha chain variable domain of TCR clone 256606 (TRAV12-3, TRAJ20)
WAMVRGDYKLSF

SEQ ID NO: 513212 - protein, 14 aa, Homo sapiens
  CDR3 for beta chain variable domain of TCR clone 256606 (TRBV20-1, TRBJ2-7)
CSAISREASDEQYF

SEQ ID NO: 513213 - protein, 12 aa, Homo sapiens
  CDR3 for alpha chain variable domain of TCR clone 256607 (TRAV16, TRAJ56)
CAPTGANSKLTF

SEQ ID NO: 513214 - protein, 17 aa, Homo sapiens
  CDR3 for beta chain variable domain of TCR clone 256607 (TRBV27, TRBJ2-6)
CASSLTGFAPGANGLTF

SEQ ID NO: 513215 - protein, 16 aa, Homo sapiens
  CDR3 for alpha chain variable domain of TCR clone 256608 (TRAV14/DV4, TRAJ54)
CAMREGRIQGAQKLVF

SEQ ID NO: 513216 - protein, 17 aa, Homo sapiens
  CDR3 for beta chain variable domain of TCR clone 256608 (TRBV11-2, TRBJ2-1)
CASSLSPPGVEYNEQFF

SEQ ID NO: 513217 - protein, 14 aa, Homo sapiens
  CDR3 for alpha chain variable domain of TCR clone 256609 (TRAV17, TRAJ34)
CATDSLEGTDQLIF

SEQ ID NO: 513218 - protein, 13 aa, Homo sapiens
  CDR3 for beta chain variable domain of TCR clone 256609 (TRBV11-2, TRBJ2-7)
CASSGTRPYEQYF

SEQ ID NO: 513219 - protein, 16 aa, Homo sapiens
  CDR3 for alpha chain variable domain of TCR clone 256610 (TRAV30, TRAJ24)
CGTEIVDAYSWGKFQF

SEQ ID NO: 513220 - protein, 17 aa, Homo sapiens
  CDR3 for beta chain variable domain of TCR clone 256610 (TRBV20-1, TRBJ2-2)
CSASGSGQGGLTGELFF

SEQ ID NO: 513221 - protein, 15 aa, Homo sapiens
  CDR3 for alpha chain variable domain of TCR clone 256611 (TRAV21, TRAJ32)
CAAAPYGGATNKLIF

SEQ ID NO: 513222 - protein, 14 aa, Homo sapiens
  CDR3 for beta chain variable domain of TCR clone 256611 (TRBV19, TRBJ2-1)
CASPTFVLSGEQFF

SEQ ID NO: 513223 - protein, 13 aa, Homo sapiens
  CDR3 for alpha chain variable domain of TCR clone 256612 (TRAV21, TRAJ20)
CAVGQRVDFKLSF

SEQ ID NO: 513224 - protein, 13 aa, Homo sapiens
  CDR3 for beta chain variable domain of TCR clone 256612 (TRBV6-1, TRBJ1-1)
CASSRQGNTEAFF

SEQ ID NO: 513225 - protein, 12 aa, Homo sapiens
  CDR3 for alpha chain variable domain of TCR clone 256613 (TRAV3, TRAJ26)
CAVRDYGQNFVF

SEQ ID NO: 513226 - protein, 16 aa, Homo sapiens
  CDR3 for beta chain variable domain of TCR clone 256613 (TRBV11-2, TRBJ1-2)
CASSPSGREASYGYTF

SEQ ID NO: 513227 - protein, 14 aa, Homo sapiens
  CDR3 for alpha chain variable domain of TCR clone 256614 (TRAV13-1, TRAJ9)
CAASALTGGFKTIF

SEQ ID NO: 513228 - protein, 15 aa, Homo sapiens
  CDR3 for beta chain variable domain of TCR clone 256614 (TRBV4-1, TRBJ1-2)
CASSQDRNRDYGYTF

SEQ ID NO: 513229 - protein, 12 aa, Homo sapiens
  CDR3 for alpha chain variable domain of TCR clone 256615 (TRAV12-3, TRAJ17)
CAMTLTGNKLTF

SEQ ID NO: 513230 - protein, 12 aa, Homo sapiens
  CDR3 for beta chain variable domain of TCR clone 256615 (TRBV2, TRBJ2-1)
CAYGPPGNEEFF

SEQ ID NO: 513231 - protein, 13 aa, Homo sapiens
  CDR3 for alpha chain variable domain of TCR clone 256616 (TRAV12-3, TRAJ47)
CAMKKEYGNKLVF

SEQ ID NO: 513232 - protein, 16 aa, Homo sapiens
  CDR3 for beta chain variable domain of TCR clone 256616 (TRBV3-1, TRBJ2-6)
CASSLTWVSGAKVLTF

SEQ ID NO: 513233 - protein, 15 aa, Homo sapiens
  CDR3 for alpha chain variable domain of TCR clone 256617 (TRAV17, TRAJ4)
CATGTWSGGYNKLIF

SEQ ID NO: 513234 - protein, 15 aa, Homo sapiens
  CDR3 for beta chain variable domain of TCR clone 256617 (TRBV4-2, TRBJ2-3)
CASSQGQGPTDTQYF

SEQ ID NO: 513235 - protein, 14 aa, Homo sapiens
  CDR3 for alpha chain variable domain of TCR clone 256618 (TRAV8-6, TRAJ49)
CAVSDQGTGNQFYF

SEQ ID NO: 513236 - protein, 16 aa, Homo sapiens
  CDR3 for beta chain variable domain of TCR clone 256618 (TRBV24-1, TRBJ2-1)
CATSGVAGANYNEQFF

SEQ ID NO: 513237 - protein, 14 aa, Homo sapiens
  CDR3 for alpha chain variable domain of TCR clone 256619 (TRAV12-2, TRAJ40)
CAVKIPSGTYKYIF

SEQ ID NO: 513238 - protein, 12 aa, Homo sapiens
  CDR3 for beta chain variable domain of TCR clone 256619 (TRBV12-4, TRBJ2-3)
CASSLGQDTQYF

SEQ ID NO: 513239 - protein, 15 aa, Homo sapiens
  CDR3 for alpha chain variable domain of TCR clone 256620 (TRAV1-2, TRAJ30)
CALRPHGNRDDKIIF

SEQ ID NO: 513240 - protein, 13 aa, Homo sapiens
  CDR3 for beta chain variable domain of TCR clone 256620 (TRBV4-1, TRBJ2-7)
CASSQGQAYEQYF

SEQ ID NO: 513241 - protein, 16 aa, Homo sapiens
  CDR3 for alpha chain variable domain of TCR clone 256621 (TRAV3, TRAJ10)
CAVRDMRAGGGNKLTF

SEQ ID NO: 513242 - protein, 15 aa, Homo sapiens
  CDR3 for beta chain variable domain of TCR clone 256621 (TRBV9, TRBJ1-6)
CASRVAGTGDSPLHF

SEQ ID NO: 513243 - protein, 14 aa, Homo sapiens
  CDR3 for alpha chain variable domain of TCR clone 256622 (TRAV12-1, TRAJ30)
CVVRGMNRDDKIIF

SEQ ID NO: 513244 - protein, 14 aa, Homo sapiens
  CDR3 for beta chain variable domain of TCR clone 256622 (TRBV7-2, TRBJ2-1)
CASSLTSGNRRQFL

SEQ ID NO: 513245 - protein, 11 aa, Homo sapiens
  CDR3 for alpha chain variable domain of TCR clone 256623 (TRAV1-2, TRAJ11)
CAVRGYSTLTF

SEQ ID NO: 513246 - protein, 14 aa, Homo sapiens
  CDR3 for beta chain variable domain of TCR clone 256623 (TRBV7-8, TRBJ2-3)
CASSLEAGTDTQYF

SEQ ID NO: 513247 - protein, 12 aa, Homo sapiens
  CDR3 for alpha chain variable domain of TCR clone 256624 (TRAV12-3, TRAJ17)
CAMTLTGNKLTF

SEQ ID NO: 513248 - protein, 15 aa, Homo sapiens
  CDR3 for beta chain variable domain of TCR clone 256624 (TRBV20-1, TRBJ2-7)
CSTRDRVSGMDEQHF

SEQ ID NO: 513249 - protein, 20 aa, Homo sapiens
  CDR3 for alpha chain variable domain of TCR clone 256625 (TRAV21, TRAJ30)
CAVRRRMTRSSLEKGHDFIF

SEQ ID NO: 513250 - protein, 15 aa, Homo sapiens
  CDR3 for beta chain variable domain of TCR clone 256625 (TRBV4-1, TRBJ2-7)
CASSQQGQGFDEQYF

SEQ ID NO: 513251 - protein, 14 aa, Homo sapiens
  CDR3 for alpha chain variable domain of TCR clone 256626 (TRAV17, TRAJ4)
CATAPLGGSNKLIF

SEQ ID NO: 513252 - protein, 13 aa, Homo sapiens
  CDR3 for beta chain variable domain of TCR clone 256626 (TRBV12-4, TRBJ1-3)
CASSLASGNTIYF

SEQ ID NO: 513253 - protein, 13 aa, Homo sapiens
  CDR3 for alpha chain variable domain of TCR clone 256627 (TRAV20, TRAJ42)
CAVQGGNQGNLIF

SEQ ID NO: 513254 - protein, 15 aa, Homo sapiens
  CDR3 for beta chain variable domain of TCR clone 256627 (TRBV10-1, TRBJ2-1)
CASSEWRGTYNEQFF

SEQ ID NO: 513255 - protein, 16 aa, Homo sapiens
  CDR3 for alpha chain variable domain of TCR clone 256628 (TRAV3, TRAJ37)
CAVRPHGSGNTGKLIF

SEQ ID NO: 513256 - protein, 13 aa, Homo sapiens
  CDR3 for beta chain variable domain of TCR clone 256628 (TRBV2, TRBJ1-1)
CARNPTGGFHAFF

SEQ ID NO: 513257 - protein, 14 aa, Homo sapiens
  CDR3 for alpha chain variable domain of TCR clone 256629 (TRAV3, TRAJ26)
CAVRDYNYGQNFVF

SEQ ID NO: 513258 - protein, 15 aa, Homo sapiens
  CDR3 for beta chain variable domain of TCR clone 256629 (TRBV20-1, TRBJ2-5)
CSANPPGRGGETQYC

SEQ ID NO: 513259 - protein, 14 aa, Homo sapiens
  CDR3 for alpha chain variable domain of TCR clone 256630 (TRAV8-6, TRAJ5)
CAVSGDTGRRALTF

SEQ ID NO: 513260 - protein, 11 aa, Homo sapiens
  CDR3 for beta chain variable domain of TCR clone 256630 (TRBV7-3, TRBJ2-5)
CASSLSETQYF

SEQ ID NO: 513261 - protein, 15 aa, Homo sapiens
  CDR3 for alpha chain variable domain of TCR clone 256631 (TRAV21, TRAJ24)
CAARTSTDSWGKLQF

SEQ ID NO: 513262 - protein, 13 aa, Homo sapiens
  CDR3 for beta chain variable domain of TCR clone 256631 (TRBV11-2, TRBJ2-5)
CASSSTGEETQYF

SEQ ID NO: 513263 - protein, 10 aa, Homo sapiens
  CDR3 for alpha chain variable domain of TCR clone 256632 (TRAV1-2, TRAJ23)
CAGQGGKLIF

SEQ ID NO: 513264 - protein, 14 aa, Homo sapiens
  CDR3 for beta chain variable domain of TCR clone 256632 (TRBV20-1, TRBJ1-1)
CSAQTRIGGTEAFF

SEQ ID NO: 513265 - protein, 12 aa, Homo sapiens
  CDR3 for alpha chain variable domain of TCR clone 256633 (TRAV12-3, TRAJ17)
CAMTLTGNKLTF

SEQ ID NO: 513266 - protein, 14 aa, Homo sapiens
  CDR3 for beta chain variable domain of TCR clone 256633 (TRBV4-1, TRBJ2-2)
CASSQSVNTGELCF

SEQ ID NO: 513267 - protein, 12 aa, Homo sapiens
  CDR3 for alpha chain variable domain of TCR clone 256634 (TRAV13-2, TRAJ23)
CAERHSGGKLIF

SEQ ID NO: 513268 - protein, 15 aa, Homo sapiens
  CDR3 for beta chain variable domain of TCR clone 256634 (TRBV19, TRBJ1-1)
CASTSGQIQNTEAFF

SEQ ID NO: 513269 - protein, 16 aa, Homo sapiens
  CDR3 for alpha chain variable domain of TCR clone 256635 (TRAV14/DV4, TRAJ54)
CAMREGRIQGAQKLVF

SEQ ID NO: 513270 - protein, 17 aa, Homo sapiens
  CDR3 for beta chain variable domain of TCR clone 256635 (TRBV25-1, TRBJ2-7)
CASSDARVVFSSYEQYF

SEQ ID NO: 513271 - protein, 13 aa, Homo sapiens
  CDR3 for alpha chain variable domain of TCR clone 256636 (TRAV1-1, TRAJ9)
RAAKNIGGFKTIF

SEQ ID NO: 513272 - protein, 14 aa, Homo sapiens
  CDR3 for beta chain variable domain of TCR clone 256636 (TRBV20-1, TRBJ2-1)
CSAQIGGSANEQFF

SEQ ID NO: 513273 - protein, 10 aa, Homo sapiens
  CDR3 for alpha chain variable domain of TCR clone 256637 (TRAV30, TRAJ20)
CGTDDYKLSF

SEQ ID NO: 513274 - protein, 15 aa, Homo sapiens
  CDR3 for beta chain variable domain of TCR clone 256637 (TRBV19, TRBJ2-1)
CASSSPGVPLDEQFF

SEQ ID NO: 513275 - protein, 19 aa, Homo sapiens
  CDR3 for alpha chain variable domain of TCR clone 256638 (TRAV26-1, TRAJ50)
CCVLLHRQNPKTSYDKVIF

SEQ ID NO: 513276 - protein, 17 aa, Homo sapiens
  CDR3 for beta chain variable domain of TCR clone 256638 (TRBV4-1, TRBJ1-4)
CAGSQEGPRGVEEKLFF

SEQ ID NO: 513277 - protein, 14 aa, Homo sapiens
  CDR3 for alpha chain variable domain of TCR clone 256639 (TRAV1-2, TRAJ16)
YAVNRFSDGQKLRF

SEQ ID NO: 513278 - protein, 15 aa, Homo sapiens
  CDR3 for beta chain variable domain of TCR clone 256639 (TRBV9, TRBJ1-6)
CASSVAGTGDSPLHF

SEQ ID NO: 513279 - protein, 14 aa, Homo sapiens
  CDR3 for alpha chain variable domain of TCR clone 256640 (TRAV13-2, TRAJ43)
CAEIPTSNNNDMRF

SEQ ID NO: 513280 - protein, 15 aa, Homo sapiens
  CDR3 for beta chain variable domain of TCR clone 256640 (TRBV7-9, TRBJ2-2)
CASGPLDTFPGELFF

SEQ ID NO: 513281 - protein, 14 aa, Homo sapiens
  CDR3 for alpha chain variable domain of TCR clone 256641 (TRAV26-1, TRAJ38)
CIAENAGNNRKLTW

SEQ ID NO: 513282 - protein, 17 aa, Homo sapiens
  CDR3 for beta chain variable domain of TCR clone 256641 (TRBV7-9, TRBJ2-3)
CASSPTVAGDLTDTQYF

SEQ ID NO: 513283 - protein, 14 aa, Homo sapiens
  CDR3 for alpha chain variable domain of TCR clone 256642 (TRAV26-1, TRAJ6)
CIVSPVGGSYIPTF

SEQ ID NO: 513284 - protein, 15 aa, Homo sapiens
  CDR3 for beta chain variable domain of TCR clone 256642 (TRBV7-9, TRBJ2-3)
CASSLKWGVTDTQYF

SEQ ID NO: 513285 - protein, 17 aa, Homo sapiens
  CDR3 for alpha chain variable domain of TCR clone 256643 (TRAV12-2, TRAJ24)
CAGIRLRSTDSWGKLQF

SEQ ID NO: 513286 - protein, 15 aa, Homo sapiens
  CDR3 for beta chain variable domain of TCR clone 256643 (TRBV7-2, TRBJ2-3)
CASSPRGLSTDTQYF

SEQ ID NO: 513287 - protein, 12 aa, Homo sapiens
  CDR3 for alpha chain variable domain of TCR clone 256644 (TRAV17, TRAJ53)
CATEGRNYKLTF

SEQ ID NO: 513288 - protein, 19 aa, Homo sapiens
  CDR3 for beta chain variable domain of TCR clone 256644 (TRBV5-1, TRBJ2-3)
CASSLWTSGGITTPDTQYF

SEQ ID NO: 513289 - protein, 14 aa, Homo sapiens
  CDR3 for alpha chain variable domain of TCR clone 256645 (TRAV1-2, TRAJ16)
CAVNRFSDGQKLLF

SEQ ID NO: 513290 - protein, 13 aa, Homo sapiens
  CDR3 for beta chain variable domain of TCR clone 256645 (TRBV7-9, TRBJ1-2)
CASSLKQNFGYTF

SEQ ID NO: 513291 - protein, 15 aa, Homo sapiens
  CDR3 for alpha chain variable domain of TCR clone 256646 (TRAV12-3, TRAJ49)
CAMAVTPNTGNQFYF

SEQ ID NO: 513292 - protein, 18 aa, Homo sapiens
  CDR3 for beta chain variable domain of TCR clone 256646 (TRBV4-1, TRBJ1-5)
CASSQDPRGQGLNQPQHF

SEQ ID NO: 513293 - protein, 13 aa, Homo sapiens
  CDR3 for alpha chain variable domain of TCR clone 256647 (TRAV2, TRAJ15)
CAVASQAGTALIF

SEQ ID NO: 513294 - protein, 15 aa, Homo sapiens
  CDR3 for beta chain variable domain of TCR clone 256647 (TRBV15, TRBJ1-5)
CATSRDPVSNQPQHF

SEQ ID NO: 513295 - protein, 17 aa, Homo sapiens
  CDR3 for alpha chain variable domain of TCR clone 256648 (TRAV3, TRAJ12)
CAVRDGGRMDSSSKLIF

SEQ ID NO: 513296 - protein, 12 aa, Homo sapiens
  CDR3 for beta chain variable domain of TCR clone 256648 (TRBV11-2, TRBJ2-2)
CASSLGGGELFF

SEQ ID NO: 513297 - protein, 14 aa, Homo sapiens
  CDR3 for alpha chain variable domain of TCR clone 256649 (TRAV38-1, TRAJ43)
CAFMKHNNNNDMRF

SEQ ID NO: 513298 - protein, 13 aa, Homo sapiens
  CDR3 for beta chain variable domain of TCR clone 256649 (TRBV20-1, TRBJ1-1)
CSARGGGNTEASF

SEQ ID NO: 513299 - protein, 12 aa, Homo sapiens
  CDR3 for alpha chain variable domain of TCR clone 256650 (TRAV13-1, TRAJ21)
CAAKEGFNKFYF

SEQ ID NO: 513300 - protein, 15 aa, Homo sapiens
  CDR3 for beta chain variable domain of TCR clone 256650 (TRBV7-9, TRBJ1-6)
CASSSPGRGNSPLRF

SEQ ID NO: 513301 - protein, 14 aa, Homo sapiens
  CDR3 for alpha chain variable domain of TCR clone 256651 (TRAV1-2, TRAJ8)
CAVREDTGFQKLVC

SEQ ID NO: 513302 - protein, 14 aa, Homo sapiens
  CDR3 for beta chain variable domain of TCR clone 256651 (TRBV7-9, TRBJ2-5)
CASSLDTAQETQYF

SEQ ID NO: 513303 - protein, 16 aa, Homo sapiens
  CDR3 for alpha chain variable domain of TCR clone 256652 (TRAV12-2, TRAJ45)
CAVIFLSGGGADGLTF

SEQ ID NO: 513304 - protein, 14 aa, Homo sapiens
  CDR3 for beta chain variable domain of TCR clone 256652 (TRBV4-1, TRBJ2-7)
CASSPVAGGDEQYF

SEQ ID NO: 513305 - protein, 12 aa, Homo sapiens
  CDR3 for alpha chain variable domain of TCR clone 256653 (TRAV21, TRAJ33)
CAKMDSNYQITW

SEQ ID NO: 513306 - protein, 14 aa, Homo sapiens
  CDR3 for beta chain variable domain of TCR clone 256653 (TRBV2, TRBJ2-7)
CASSLTSGGYEQYF

SEQ ID NO: 513307 - protein, 17 aa, Homo sapiens
  CDR3 for alpha chain variable domain of TCR clone 256654 (TRAV3, TRAJ6)
CAVRDGARAGGSYIPTF

SEQ ID NO: 513308 - protein, 18 aa, Homo sapiens
  CDR3 for beta chain variable domain of TCR clone 256654 (TRBV25-1, TRBJ1-2)
CASSGLQNGQGLIFGYTF

SEQ ID NO: 513309 - protein, 15 aa, Homo sapiens
  CDR3 for alpha chain variable domain of TCR clone 256655 (TRAV21, TRAJ53)
CATLNSGCSNYKLTF

SEQ ID NO: 513310 - protein, 14 aa, Homo sapiens
  CDR3 for beta chain variable domain of TCR clone 256655 (TRBV7-2, TRBJ2-7)
CASRSQGAAYEQYF

SEQ ID NO: 513311 - protein, 15 aa, Homo sapiens
  CDR3 for alpha chain variable domain of TCR clone 256656 (TRAV12-2, TRAJ53)
CAVNGGGGSNYKLKF

SEQ ID NO: 513312 - protein, 13 aa, Homo sapiens
  CDR3 for beta chain variable domain of TCR clone 256656 (TRBV3-1, TRBJ1-1)
CASSPGVITEALF

SEQ ID NO: 513313 - protein, 12 aa, Homo sapiens
  CDR3 for alpha chain variable domain of TCR clone 256657 (TRAV12-3, TRAJ17)
CAMTLTGNKLTF

SEQ ID NO: 513314 - protein, 15 aa, Homo sapiens
  CDR3 for beta chain variable domain of TCR clone 256657 (TRBV7-9, TRBJ1-6)
CASSSPGRGNAPLHF

SEQ ID NO: 513315 - protein, 15 aa, Homo sapiens
  CDR3 for alpha chain variable domain of TCR clone 256658 (TRAV35, TRAJ50)
CAGQLRKTSYDKVIF

SEQ ID NO: 513316 - protein, 14 aa, Homo sapiens
  CDR3 for beta chain variable domain of TCR clone 256658 (TRBV23-1, TRBJ2-5)
CASSFLRSQETQYF

SEQ ID NO: 513317 - protein, 16 aa, Homo sapiens
  CDR3 for alpha chain variable domain of TCR clone 256659 (TRAV30, TRAJ24)
CGPEIVDADSWGKFQV

SEQ ID NO: 513318 - protein, 14 aa, Homo sapiens
  CDR3 for beta chain variable domain of TCR clone 256659 (TRBV12-5, TRBJ2-5)
CASGSRTHQETQYF

SEQ ID NO: 513319 - protein, 13 aa, Homo sapiens
  CDR3 for alpha chain variable domain of TCR clone 256660 (TRAV23/DV6, TRAJ22)
CAPYSGSARQLTF

SEQ ID NO: 513320 - protein, 14 aa, Homo sapiens
  CDR3 for beta chain variable domain of TCR clone 256660 (TRBV6-6, TRBJ2-7)
CASSDSGAGYEQYF

SEQ ID NO: 513321 - protein, 12 aa, Homo sapiens
  CDR3 for alpha chain variable domain of TCR clone 256661 (TRAV12-1, TRAJ20)
CVVNPDDYKLRF

SEQ ID NO: 513322 - protein, 15 aa, Homo sapiens
  CDR3 for beta chain variable domain of TCR clone 256661 (TRBV11-3, TRBJ2-2)
CASSLVGTGAGELFF

SEQ ID NO: 513323 - protein, 12 aa, Homo sapiens
  CDR3 for alpha chain variable domain of TCR clone 256662 (TRAV8-4, TRAJ43)
CAVSVNNNDMRF

SEQ ID NO: 513324 - protein, 17 aa, Homo sapiens
  CDR3 for beta chain variable domain of TCR clone 256662 (TRBV13, TRBJ2-3)
CASSLSRVAGGRNTQYF

SEQ ID NO: 513325 - protein, 16 aa, Homo sapiens
  CDR3 for alpha chain variable domain of TCR clone 256663 (TRAV12-2, TRAJ43)
CAGDDMRFGAGTRLTV

SEQ ID NO: 513326 - protein, 16 aa, Homo sapiens
  CDR3 for beta chain variable domain of TCR clone 256663 (TRBV4-2, TRBJ2-7)
CASSQDRGTSSYEQYF

SEQ ID NO: 513327 - protein, 12 aa, Homo sapiens
  CDR3 for alpha chain variable domain of TCR clone 256664 (TRAV12-3, TRAJ17)
CAMTLTGNKLTF

SEQ ID NO: 513328 - protein, 14 aa, Homo sapiens
  CDR3 for beta chain variable domain of TCR clone 256664 (TRBV7-9, TRBJ1-6)
CASSVMTDYSPLHF

SEQ ID NO: 513329 - protein, 14 aa, Homo sapiens
  CDR3 for alpha chain variable domain of TCR clone 256665 (TRAV12-2, TRAJ33)
CAVKRARSNYQLIW

SEQ ID NO: 513330 - protein, 12 aa, Homo sapiens
  CDR3 for beta chain variable domain of TCR clone 256665 (TRBV24-1, TRBJ2-3)
CATSESTETQYF

SEQ ID NO: 513331 - protein, 20 aa, Homo sapiens
  CDR3 for alpha chain variable domain of TCR clone 256666 (TRAV8-4, TRAJ8)
CALSEDTGFQTCIWNWHPTS

SEQ ID NO: 513332 - protein, 13 aa, Homo sapiens
  CDR3 for beta chain variable domain of TCR clone 256666 (TRBV7-9, TRBJ1-2)
CASSLKQNYGYTF

SEQ ID NO: 513333 - protein, 11 aa, Homo sapiens
  CDR3 for alpha chain variable domain of TCR clone 256667 (TRAV12-2, TRAJ21)
CAVDGFNKFYF

SEQ ID NO: 513334 - protein, 15 aa, Homo sapiens
  CDR3 for beta chain variable domain of TCR clone 256667 (TRBV20-1, TRBJ1-5)
CSASRRGDLGQPQHF

SEQ ID NO: 513335 - protein, 16 aa, Homo sapiens
  CDR3 for alpha chain variable domain of TCR clone 256668 (TRAV21, TRAJ37)
CSVRPRGSSNTGKLIF

SEQ ID NO: 513336 - protein, 13 aa, Homo sapiens
  CDR3 for beta chain variable domain of TCR clone 256668 (TRBV7-9, TRBJ2-5)
CASLSPGQETQYF

SEQ ID NO: 513337 - protein, 14 aa, Homo sapiens
  CDR3 for alpha chain variable domain of TCR clone 256669 (TRAV17, TRAJ42)
CATDNGGSQGNLIF

SEQ ID NO: 513338 - protein, 18 aa, Homo sapiens
  CDR3 for beta chain variable domain of TCR clone 256669 (TRBV11-2, TRBJ2-3)
CASSLGGASRGAPNTQYF

SEQ ID NO: 513339 - protein, 16 aa, Homo sapiens
  CDR3 for alpha chain variable domain of TCR clone 256670 (TRAV12-3, TRAJ53)
CAMSPGRGGSNYKLTF

SEQ ID NO: 513340 - protein, 17 aa, Homo sapiens
  CDR3 for beta chain variable domain of TCR clone 256670 (TRBV28, TRBJ2-5)
CAGSTPEGDALQETQYF

SEQ ID NO: 513341 - protein, 15 aa, Homo sapiens
  CDR3 for alpha chain variable domain of TCR clone 256671 (TRAV13-1, TRAJ15)
CAASIERQAGTALIF

SEQ ID NO: 513342 - protein, 17 aa, Homo sapiens
  CDR3 for beta chain variable domain of TCR clone 256671 (TRBV4-1, TRBJ1-4)
CASSQEGPRGVEEKLFF

SEQ ID NO: 513343 - protein, 19 aa, Homo sapiens
  CDR3 for alpha chain variable domain of TCR clone 256672 (TRAV3, TRAJ6)
CAVRDGTGQEEATYLHLEE

SEQ ID NO: 513344 - protein, 14 aa, Homo sapiens
  CDR3 for beta chain variable domain of TCR clone 256672 (TRBV7-2, TRBJ2-7)
CASSPKTSFYEQYF

SEQ ID NO: 513345 - protein, 17 aa, Homo sapiens
  CDR3 for alpha chain variable domain of TCR clone 256673 (TRAV4, TRAJ18)
CLVVAAGRGSTLGRLYF

SEQ ID NO: 513346 - protein, 17 aa, Homo sapiens
  CDR3 for beta chain variable domain of TCR clone 256673 (TRBV28, TRBJ2-2)
CASSLATGMGDGGELFF

SEQ ID NO: 513347 - protein, 13 aa, Homo sapiens
  CDR3 for alpha chain variable domain of TCR clone 256674 (TRAV8-1, TRAJ9)
CAVNSVGGFTTIF

SEQ ID NO: 513348 - protein, 15 aa, Homo sapiens
  CDR3 for beta chain variable domain of TCR clone 256674 (TRBV11-2, TRBJ2-3)
CASSGRDGLTDTQYF

SEQ ID NO: 513349 - protein, 14 aa, Homo sapiens
  CDR3 for alpha chain variable domain of TCR clone 256675 (TRAV26-2, TRAJ31)
CILIPGNNNARPMF

SEQ ID NO: 513350 - protein, 14 aa, Homo sapiens
  CDR3 for beta chain variable domain of TCR clone 256675 (TRBV12-5, TRBJ2-5)
CASGSRTHQETQYF

SEQ ID NO: 513351 - protein, 14 aa, Homo sapiens
  CDR3 for alpha chain variable domain of TCR clone 256676 (TRAV1-2, TRAJ16)
CAVNRFSDGQKLLF

SEQ ID NO: 513352 - protein, 15 aa, Homo sapiens
  CDR3 for beta chain variable domain of TCR clone 256676 (TRBV6-1, TRBJ2-3)
CDSSERGGITDTQYF

SEQ ID NO: 513353 - protein, 11 aa, Homo sapiens
  CDR3 for alpha chain variable domain of TCR clone 256677 (TRAV3, TRAJ21)
CAVGNFNKFYF

SEQ ID NO: 513354 - protein, 14 aa, Homo sapiens
  CDR3 for beta chain variable domain of TCR clone 256677 (TRBV19, TRBJ2-3)
CASSIDLGGDTQYF

SEQ ID NO: 513355 - protein, 15 aa, Homo sapiens
  CDR3 for alpha chain variable domain of TCR clone 256678 (TRAV26-1, TRAJ3)
CIVRSGYSSASKIIF

SEQ ID NO: 513356 - protein, 14 aa, Homo sapiens
  CDR3 for beta chain variable domain of TCR clone 256678 (TRBV13, TRBJ2-5)
CASYRRLAEETEYF

SEQ ID NO: 513357 - protein, 14 aa, Homo sapiens
  CDR3 for alpha chain variable domain of TCR clone 256679 (TRAV26-1, TRAJ38)
CIADNAGNNRKLIL

SEQ ID NO: 513358 - protein, 13 aa, Homo sapiens
  CDR3 for beta chain variable domain of TCR clone 256679 (TRBV20-1, TRBJ1-1)
FSARGGGNTEAFF

SEQ ID NO: 513359 - protein, 18 aa, Homo sapiens
  CDR3 for alpha chain variable domain of TCR clone 256680 (TRAV26-2, TRAJ45)
CILRVDKYSGGGADGLTF

SEQ ID NO: 513360 - protein, 14 aa, Homo sapiens
  CDR3 for beta chain variable domain of TCR clone 256680 (TRBV12-5, TRBJ2-5)
CASGSRTHQETQYF

SEQ ID NO: 513361 - protein, 18 aa, Homo sapiens
  CDR3 for alpha chain variable domain of TCR clone 256681 (TRAV12-2, )
CAVEDIQNPDPAVYQLRD

SEQ ID NO: 513362 - protein, 14 aa, Homo sapiens
  CDR3 for beta chain variable domain of TCR clone 256681 (TRBV7-2, TRBJ1-3)
CASSRLRSGNTIYF

SEQ ID NO: 513363 - protein, 16 aa, Homo sapiens
  CDR3 for alpha chain variable domain of TCR clone 256682 (TRAV26-1, TRAJ23)
CVVRVHPYNQGGKLIF

SEQ ID NO: 513364 - protein, 15 aa, Homo sapiens
  CDR3 for beta chain variable domain of TCR clone 256682 (TRBV5-7, TRBJ2-7)
CASSPYFEGSYEQYF

SEQ ID NO: 513365 - protein, 12 aa, Homo sapiens
  CDR3 for alpha chain variable domain of TCR clone 256683 (TRAV30, TRAJ43)
CGTEERGNDMRS

SEQ ID NO: 513366 - protein, 11 aa, Homo sapiens
  CDR3 for beta chain variable domain of TCR clone 256683 (TRBV11-3, TRBJ2-7)
CASSRTYEQYF

SEQ ID NO: 513367 - protein, 15 aa, Homo sapiens
  CDR3 for alpha chain variable domain of TCR clone 256684 (TRAV17, TRAJ13)
CATDAGSGGYQKVTF

SEQ ID NO: 513368 - protein, 16 aa, Homo sapiens
  CDR3 for beta chain variable domain of TCR clone 256684 (TRBV12-4, TRBJ1-5)
CASSRPVGGSNQPQHF

SEQ ID NO: 513369 - protein, 16 aa, Homo sapiens
  CDR3 for alpha chain variable domain of TCR clone 256685 (TRAV3, TRAJ6)
CAVRDGQGRRKLHTYI

SEQ ID NO: 513370 - protein, 15 aa, Homo sapiens
  CDR3 for beta chain variable domain of TCR clone 256685 (TRBV6-3, TRBJ2-7)
CASSSPGTVFYEQYF

SEQ ID NO: 513371 - protein, 12 aa, Homo sapiens
  CDR3 for alpha chain variable domain of TCR clone 256686 (TRAV12-3, TRAJ17)
CAMTLKGNKLTF

SEQ ID NO: 513372 - protein, 15 aa, Homo sapiens
  CDR3 for beta chain variable domain of TCR clone 256686 (TRBV20-1, TRBJ2-7)
RSARDRVSGMDEQYF

SEQ ID NO: 513373 - protein, 14 aa, Homo sapiens
  CDR3 for alpha chain variable domain of TCR clone 256687 (TRAV8-3, TRAJ4)
CAVGAAGGYNKLIF

SEQ ID NO: 513374 - protein, 15 aa, Homo sapiens
  CDR3 for beta chain variable domain of TCR clone 256687 (TRBV6-5, TRBJ1-2)
CASSYSPPRFYGDTF

SEQ ID NO: 513375 - protein, 16 aa, Homo sapiens
  CDR3 for alpha chain variable domain of TCR clone 256688 (TRAV26-1, TRAJ45)
CIVEKYSGGGADGLTF

SEQ ID NO: 513376 - protein, 16 aa, Homo sapiens
  CDR3 for beta chain variable domain of TCR clone 256688 (TRBV10-3, TRBJ1-6)
CAISGRRGQGNSPLHF

SEQ ID NO: 513377 - protein, 12 aa, Homo sapiens
  CDR3 for alpha chain variable domain of TCR clone 256689 (TRAV16, TRAJ49)
CALNEGGNQFYY

SEQ ID NO: 513378 - protein, 14 aa, Homo sapiens
  CDR3 for beta chain variable domain of TCR clone 256689 (TRBV7-9, TRBJ2-1)
CASRPTGLRNEQFF

SEQ ID NO: 513379 - protein, 12 aa, Homo sapiens
  CDR3 for alpha chain variable domain of TCR clone 256690 (TRAV8-3, TRAJ4)
PAFSGGYNKMIF

SEQ ID NO: 513380 - protein, 13 aa, Homo sapiens
  CDR3 for beta chain variable domain of TCR clone 256690 (TRBV20-1, TRBJ1-3)
CSAGAYSGNTIYF

SEQ ID NO: 513381 - protein, 14 aa, Homo sapiens
  CDR3 for alpha chain variable domain of TCR clone 256691 (TRAV3, TRAJ34)
CAVRDINNTDKLIF

SEQ ID NO: 513382 - protein, 13 aa, Homo sapiens
  CDR3 for beta chain variable domain of TCR clone 256691 (TRBV20-1, TRBJ1-1)
CSARGGGNTKAFF

SEQ ID NO: 513383 - protein, 11 aa, Homo sapiens
  CDR3 for alpha chain variable domain of TCR clone 256692 (TRAV1-1, TRAJ23)
CAVRQGGKLLF

SEQ ID NO: 513384 - protein, 20 aa, Homo sapiens
  CDR3 for beta chain variable domain of TCR clone 256692 (TRBV7-8, TRBJ2-2)
CASSHLFPGPTVHITGELFF

SEQ ID NO: 513385 - protein, 17 aa, Homo sapiens
  CDR3 for alpha chain variable domain of TCR clone 256693 (TRAV3, TRAJ42)
CAVRDRDYGGSQGNPIF

SEQ ID NO: 513386 - protein, 13 aa, Homo sapiens
  CDR3 for beta chain variable domain of TCR clone 256693 (TRBV12-4, TRBJ2-2)
CASSITGSGELFF

SEQ ID NO: 513387 - protein, 16 aa, Homo sapiens
  CDR3 for alpha chain variable domain of TCR clone 256694 (TRAV3, TRAJ37)
CAVRGKGSGNTGKLIF

SEQ ID NO: 513388 - protein, 16 aa, Homo sapiens
  CDR3 for beta chain variable domain of TCR clone 256694 (TRBV20-1, TRBJ2-2)
CSARDRGRAGTGELFF

SEQ ID NO: 513389 - protein, 16 aa, Homo sapiens
  CDR3 for alpha chain variable domain of TCR clone 256695 (TRAV12-3, TRAJ50)
CAMRDPMKTSYDKVIF

SEQ ID NO: 513390 - protein, 13 aa, Homo sapiens
  CDR3 for beta chain variable domain of TCR clone 256695 (TRBV4-1, TRBJ2-3)
CASSLDFTDKQYF

SEQ ID NO: 513391 - protein, 14 aa, Homo sapiens
  CDR3 for alpha chain variable domain of TCR clone 256696 (TRAV12-1, TRAJ17)
WVVNYKAAGNKLTF

SEQ ID NO: 513392 - protein, 17 aa, Homo sapiens
  CDR3 for beta chain variable domain of TCR clone 256696 (TRBV20-1, TRBJ2-1)
CSASSSGLAGSYSEQFF

SEQ ID NO: 513393 - protein, 13 aa, Homo sapiens
  CDR3 for alpha chain variable domain of TCR clone 256697 (TRAV13-1, TRAJ39)
CEASIWAGNMLTF

SEQ ID NO: 513394 - protein, 15 aa, Homo sapiens
  CDR3 for beta chain variable domain of TCR clone 256697 (TRBV7-9, TRBJ1-1)
CASSLLEQGGTEAFF

SEQ ID NO: 513395 - protein, 15 aa, Homo sapiens
  CDR3 for alpha chain variable domain of TCR clone 256698 (TRAV20, TRAJ43)
CAVKAGKSSNNDIRF

SEQ ID NO: 513396 - protein, 14 aa, Homo sapiens
  CDR3 for beta chain variable domain of TCR clone 256698 (TRBV27, TRBJ2-1)
CASRHLGGGKEQFF

SEQ ID NO: 513397 - protein, 14 aa, Homo sapiens
  CDR3 for alpha chain variable domain of TCR clone 256699 (TRAV26-1, TRAJ38)
CIADNAGNNRKLIW

SEQ ID NO: 513398 - protein, 15 aa, Homo sapiens
  CDR3 for beta chain variable domain of TCR clone 256699 (TRBV20-1, TRBJ2-7)
CSARDRVSGTDEQYF

SEQ ID NO: 513399 - protein, 12 aa, Homo sapiens
  CDR3 for alpha chain variable domain of TCR clone 256700 (TRAV30, TRAJ43)
CGTEERGNDMRF

SEQ ID NO: 513400 - protein, 13 aa, Homo sapiens
  CDR3 for beta chain variable domain of TCR clone 256700 (TRBV27, TRBJ2-5)
CASSFSQGYEQYF

SEQ ID NO: 513401 - protein, 12 aa, Homo sapiens
  CDR3 for alpha chain variable domain of TCR clone 256701 (TRAV12-3, TRAJ17)
CAMTLAGNELTF

SEQ ID NO: 513402 - protein, 15 aa, Homo sapiens
  CDR3 for beta chain variable domain of TCR clone 256701 (TRBV20-1, TRBJ2-7)
CSAIDRVSGMDEQYF

SEQ ID NO: 513403 - protein, 12 aa, Homo sapiens
  CDR3 for alpha chain variable domain of TCR clone 256702 (TRAV12-3, TRAJ20)
GAMVRGDYKLSF

SEQ ID NO: 513404 - protein, 14 aa, Homo sapiens
  CDR3 for beta chain variable domain of TCR clone 256702 (TRBV20-1, TRBJ2-7)
CSAKRGRSSYEQYF

SEQ ID NO: 513405 - protein, 11 aa, Homo sapiens
  CDR3 for alpha chain variable domain of TCR clone 256703 (TRAV26-2, TRAJ8)
CILTGFQKLVF

SEQ ID NO: 513406 - protein, 13 aa, Homo sapiens
  CDR3 for beta chain variable domain of TCR clone 256703 (TRBV7-2, TRBJ2-4)
YASSREHANIQYF

SEQ ID NO: 513407 - protein, 19 aa, Homo sapiens
  CDR3 for alpha chain variable domain of TCR clone 256704 (TRAV1-2, TRAJ26)
CLLPLCCERPDNYGQNFVF

SEQ ID NO: 513408 - protein, 13 aa, Homo sapiens
  CDR3 for beta chain variable domain of TCR clone 256704 (TRBV19, TRBJ1-2)
CASSQGQVYGYTY

SEQ ID NO: 513409 - protein, 11 aa, Homo sapiens
  CDR3 for alpha chain variable domain of TCR clone 256705 (TRAV1-1, TRAJ23)
CAVRQGGKLIF

SEQ ID NO: 513410 - protein, 14 aa, Homo sapiens
  CDR3 for beta chain variable domain of TCR clone 256705 (TRBV7-9, TRBJ2-5)
CASSLDTAQETQYF

SEQ ID NO: 513411 - protein, 10 aa, Homo sapiens
  CDR3 for alpha chain variable domain of TCR clone 256706 (TRAV12-1, TRAJ37)
GSSNTGKLIF

SEQ ID NO: 513412 - protein, 15 aa, Homo sapiens
  CDR3 for beta chain variable domain of TCR clone 256706 (TRBV19, TRBJ1-6)
CASSTQVAVGSPLHF

SEQ ID NO: 513413 - protein, 14 aa, Homo sapiens
  CDR3 for alpha chain variable domain of TCR clone 256707 (TRAV25, TRAJ35)
CARRMEGFGNVLHC

SEQ ID NO: 513414 - protein, 13 aa, Homo sapiens
  CDR3 for beta chain variable domain of TCR clone 256707 (TRBV7-2, TRBJ1-4)
CAGSFAGLEKLFF

SEQ ID NO: 513415 - protein, 16 aa, Homo sapiens
  CDR3 for alpha chain variable domain of TCR clone 256708 (TRAV1-2, TRAJ10)
CAVRGVLTGGGNKRTF

SEQ ID NO: 513416 - protein, 13 aa, Homo sapiens
  CDR3 for beta chain variable domain of TCR clone 256708 (TRBV20-1, TRBJ1-6)
CSAPLGVGSPLHF

SEQ ID NO: 513417 - protein, 11 aa, Homo sapiens
  CDR3 for alpha chain variable domain of TCR clone 256709 (TRAV2, TRAJ13)
CASGGYQKVTF

SEQ ID NO: 513418 - protein, 14 aa, Homo sapiens
  CDR3 for beta chain variable domain of TCR clone 256709 (TRBV15, TRBJ2-3)
CATRSGTSTDTQYF

SEQ ID NO: 513419 - protein, 14 aa, Homo sapiens
  CDR3 for alpha chain variable domain of TCR clone 256710 (TRAV26-1, TRAJ38)
CIADNAGNNRKLIW

SEQ ID NO: 513420 - protein, 16 aa, Homo sapiens
  CDR3 for beta chain variable domain of TCR clone 256710 (TRBV18, TRBJ1-2)
CASSPPERVTIYGYTF

SEQ ID NO: 513421 - protein, 15 aa, Homo sapiens
  CDR3 for alpha chain variable domain of TCR clone 256711 (TRAV27, TRAJ38)
CAARRNAGNNRKLIW

SEQ ID NO: 513422 - protein, 13 aa, Homo sapiens
  CDR3 for beta chain variable domain of TCR clone 256711 (TRBV19, TRBJ1-5)
CASSMRGYQPQHF

SEQ ID NO: 513423 - protein, 13 aa, Homo sapiens
  CDR3 for alpha chain variable domain of TCR clone 256712 (TRAV12-3, TRAJ4)
CAMTERGHNKLIF

SEQ ID NO: 513424 - protein, 17 aa, Homo sapiens
  CDR3 for beta chain variable domain of TCR clone 256712 (TRBV28, TRBJ2-3)
CASSLQVGPSSIDTQYF

SEQ ID NO: 513425 - protein, 15 aa, Homo sapiens
  CDR3 for alpha chain variable domain of TCR clone 256713 (TRAV12-1, TRAJ45)
CVVLSGGGGADGLTF

SEQ ID NO: 513426 - protein, 13 aa, Homo sapiens
  CDR3 for beta chain variable domain of TCR clone 256713 (TRBV7-3, TRBJ1-1)
CASSQDWGAEAIF

SEQ ID NO: 513427 - protein, 17 aa, Homo sapiens
  CDR3 for alpha chain variable domain of TCR clone 256714 (TRAV35, TRAJ52)
CAGQLAAGGTSYGKLTC

SEQ ID NO: 513428 - protein, 12 aa, Homo sapiens
  CDR3 for beta chain variable domain of TCR clone 256714 (TRBV20-1, TRBJ2-7)
CSAGRRQSEQYF

SEQ ID NO: 513429 - protein, 15 aa, Homo sapiens
  CDR3 for alpha chain variable domain of TCR clone 256715 (TRAV12-2, TRAJ53)
CSVNGGGGSNYKLTF

SEQ ID NO: 513430 - protein, 17 aa, Homo sapiens
  CDR3 for beta chain variable domain of TCR clone 256715 (TRBV7-3, TRBJ2-3)
RASSLMKRMRGADTQYF

SEQ ID NO: 513431 - protein, 15 aa, Homo sapiens
  CDR3 for alpha chain variable domain of TCR clone 256716 (TRAV16, TRAJ4)
CALEDPSGVYNKLIF

SEQ ID NO: 513432 - protein, 12 aa, Homo sapiens
  CDR3 for beta chain variable domain of TCR clone 256716 (TRBV7-3, TRBJ2-7)
CQQPSRGYEQYF

SEQ ID NO: 513433 - protein, 16 aa, Homo sapiens
  CDR3 for alpha chain variable domain of TCR clone 256717 (TRAV12-3, TRAJ45)
CAMGWGSGGGADGLTF

SEQ ID NO: 513434 - protein, 16 aa, Homo sapiens
  CDR3 for beta chain variable domain of TCR clone 256717 (TRBV25-1, TRBJ1-1)
CASSGDRDRGRIEAFF

SEQ ID NO: 513435 - protein, 16 aa, Homo sapiens
  CDR3 for alpha chain variable domain of TCR clone 256718 (TRAV23/DV6, TRAJ9)
CAASIGGNTGGFKTII

SEQ ID NO: 513436 - protein, 14 aa, Homo sapiens
  CDR3 for beta chain variable domain of TCR clone 256718 (TRBV7-2, TRBJ2-7)
CASSPKTSFYEQYF

SEQ ID NO: 513437 - protein, 14 aa, Homo sapiens
  CDR3 for alpha chain variable domain of TCR clone 256719 (TRAV17, TRAJ40)
CATALTSGTYKYIF

SEQ ID NO: 513438 - protein, 16 aa, Homo sapiens
  CDR3 for beta chain variable domain of TCR clone 256719 (TRBV12-4, TRBJ1-5)
CASSRPVGGSNQPQHF

SEQ ID NO: 513439 - protein, 14 aa, Homo sapiens
  CDR3 for alpha chain variable domain of TCR clone 256720 (TRAV13-1, TRAJ44)
CAAKATGTASKLTF

SEQ ID NO: 513440 - protein, 14 aa, Homo sapiens
  CDR3 for beta chain variable domain of TCR clone 256720 (TRBV25-1, TRBJ1-1)
CASPHLGGNTEAFF

SEQ ID NO: 513441 - protein, 14 aa, Homo sapiens
  CDR3 for alpha chain variable domain of TCR clone 256721 (TRAV1-2, TRAJ16)
CAVNRFSDGQTLLF

SEQ ID NO: 513442 - protein, 13 aa, Homo sapiens
  CDR3 for beta chain variable domain of TCR clone 256721 (TRBV24-1, TRBJ2-2)
CATSDWSTGELFF

SEQ ID NO: 513443 - protein, 15 aa, Homo sapiens
  CDR3 for alpha chain variable domain of TCR clone 256722 (TRAV29/DV5, TRAJ42)
CAAKPDGGSQGNLIF

SEQ ID NO: 513444 - protein, 15 aa, Homo sapiens
  CDR3 for beta chain variable domain of TCR clone 256722 (TRBV5-1, TRBJ2-2)
CASSSQGGNTGELFF

SEQ ID NO: 513445 - protein, 17 aa, Homo sapiens
  CDR3 for alpha chain variable domain of TCR clone 256723 (TRAV3, TRAJ6)
CAVRDGPRAGGSYIPTF

SEQ ID NO: 513446 - protein, 16 aa, Homo sapiens
  CDR3 for beta chain variable domain of TCR clone 256723 (TRBV6-5, TRBJ2-7)
CASSSDPTSGFYEQYF

SEQ ID NO: 513447 - protein, 15 aa, Homo sapiens
  CDR3 for alpha chain variable domain of TCR clone 256724 (TRAV8-3, TRAJ45)
CASSYSGGGADGLTF

SEQ ID NO: 513448 - protein, 12 aa, Homo sapiens
  CDR3 for beta chain variable domain of TCR clone 256724 (TRBV7-9, TRBJ1-4)
CAGSTDREKLFF

SEQ ID NO: 513449 - protein, 13 aa, Homo sapiens
  CDR3 for alpha chain variable domain of TCR clone 256725 (TRAV27, TRAJ6)
CAGGTRGSYIPTF

SEQ ID NO: 513450 - protein, 15 aa, Homo sapiens
  CDR3 for beta chain variable domain of TCR clone 256725 (TRBV5-5, TRBJ2-7)
CASSLAAPLAYEQYF

SEQ ID NO: 513451 - protein, 14 aa, Homo sapiens
  CDR3 for alpha chain variable domain of TCR clone 256726 (TRAV26-2, TRAJ54)
CILRDVRGAQKLVF

SEQ ID NO: 513452 - protein, 15 aa, Homo sapiens
  CDR3 for beta chain variable domain of TCR clone 256726 (TRBV10-3, TRBJ2-1)
CAIRNGTSGHNEQFF

SEQ ID NO: 513453 - protein, 14 aa, Homo sapiens
  CDR3 for alpha chain variable domain of TCR clone 256727 (TRAV1-2, TRAJ16)
CAVNRFSDGRKLLF

SEQ ID NO: 513454 - protein, 15 aa, Homo sapiens
  CDR3 for beta chain variable domain of TCR clone 256727 (TRBV12-4, TRBJ2-5)
SASSPPTGLQETQYF

SEQ ID NO: 513455 - protein, 12 aa, Homo sapiens
  CDR3 for alpha chain variable domain of TCR clone 256728 (TRAV36/DV7, TRAJ54)
CAVVRGAQKLVF

SEQ ID NO: 513456 - protein, 18 aa, Homo sapiens
  CDR3 for beta chain variable domain of TCR clone 256728 (TRBV20-1, TRBJ2-3)
CSASGLAGGPGTTDTQYV

SEQ ID NO: 513457 - protein, 13 aa, Homo sapiens
  CDR3 for alpha chain variable domain of TCR clone 256729 (TRAV16, TRAJ9)
YSLSNTGGSKTIF

SEQ ID NO: 513458 - protein, 14 aa, Homo sapiens
  CDR3 for beta chain variable domain of TCR clone 256729 (TRBV5-1, TRBJ2-1)
CASSLEGPVYEQFF

SEQ ID NO: 513459 - protein, 12 aa, Homo sapiens
  CDR3 for alpha chain variable domain of TCR clone 256730 (TRAV17, TRAJ12)
CATLRSSYELIF

SEQ ID NO: 513460 - protein, 16 aa, Homo sapiens
  CDR3 for beta chain variable domain of TCR clone 256730 (TRBV28, TRBJ2-7)
CASSLFVETGGPEQYF

SEQ ID NO: 513461 - protein, 14 aa, Homo sapiens
  CDR3 for alpha chain variable domain of TCR clone 256731 (TRAV1-2, TRAJ16)
CAVNRFSDGQKLLF

SEQ ID NO: 513462 - protein, 19 aa, Homo sapiens
  CDR3 for beta chain variable domain of TCR clone 256731 (TRBV7-2, TRBJ2-3)
CASSFLSRNWGGGTDTLYF

SEQ ID NO: 513463 - protein, 11 aa, Homo sapiens
  CDR3 for alpha chain variable domain of TCR clone 256732 (TRAV16, TRAJ31)
CALFNNTRLMF

SEQ ID NO: 513464 - protein, 15 aa, Homo sapiens
  CDR3 for beta chain variable domain of TCR clone 256732 (TRBV5-7, TRBJ2-7)
CASSLPGQVFYEQYF

SEQ ID NO: 513465 - protein, 15 aa, Homo sapiens
  CDR3 for alpha chain variable domain of TCR clone 256733 (TRAV13-1, TRAJ17)
CAASIEKAAGNKLTF

SEQ ID NO: 513466 - protein, 14 aa, Homo sapiens
  CDR3 for beta chain variable domain of TCR clone 256733 (TRBV7-9, TRBJ2-1)
CASSPRDSLYEQFF

SEQ ID NO: 513467 - protein, 13 aa, Homo sapiens
  CDR3 for alpha chain variable domain of TCR clone 256734 (TRAV13-1, TRAJ5)
CAARVTRRRALTF

SEQ ID NO: 513468 - protein, 15 aa, Homo sapiens
  CDR3 for beta chain variable domain of TCR clone 256734 (TRBV7-9, TRBJ2-7)
CASSPGGGLTYEQYF

SEQ ID NO: 513469 - protein, 16 aa, Homo sapiens
  CDR3 for alpha chain variable domain of TCR clone 256735 (TRAV30, TRAJ24)
CGPEIVDADSWGKFQF

SEQ ID NO: 513470 - protein, 14 aa, Homo sapiens
  CDR3 for beta chain variable domain of TCR clone 256735 (TRBV12-5, TRBJ2-5)
CASGSRTHQETQYY

SEQ ID NO: 513471 - protein, 11 aa, Homo sapiens
  CDR3 for alpha chain variable domain of TCR clone 256736 (TRAV1-2, TRAJ31)
CAVNNNARLMF

SEQ ID NO: 513472 - protein, 16 aa, Homo sapiens
  CDR3 for beta chain variable domain of TCR clone 256736 (TRBV28, TRBJ2-7)
CASSLFFETGGPEQYF

SEQ ID NO: 513473 - protein, 14 aa, Homo sapiens
  CDR3 for alpha chain variable domain of TCR clone 256737 (TRAV25, TRAJ22)
CAVRSSGSARQLTF

SEQ ID NO: 513474 - protein, 16 aa, Homo sapiens
  CDR3 for beta chain variable domain of TCR clone 256737 (TRBV4-2, TRBJ1-1)
CASSPSPGRAAHEALF

SEQ ID NO: 513475 - protein, 17 aa, Homo sapiens
  CDR3 for alpha chain variable domain of TCR clone 256738 (TRAV3, TRAJ6)
CAVRDGPRAGGSYIPTF

SEQ ID NO: 513476 - protein, 15 aa, Homo sapiens
  CDR3 for beta chain variable domain of TCR clone 256738 (TRBV6-1, TRBJ2-7)
CASSESMGDFYEQYF

SEQ ID NO: 513477 - protein, 15 aa, Homo sapiens
  CDR3 for alpha chain variable domain of TCR clone 256739 (TRAV26-1, TRAJ29)
CIVRVEGSGNTPLVF

SEQ ID NO: 513478 - protein, 16 aa, Homo sapiens
  CDR3 for beta chain variable domain of TCR clone 256739 (TRBV12-5, TRBJ2-5)
CASGTRTSGNQETQYF

SEQ ID NO: 513479 - protein, 14 aa, Homo sapiens
  CDR3 for alpha chain variable domain of TCR clone 256740 (TRAV12-3, TRAJ58)
CAMSTETRGSRSTF

SEQ ID NO: 513480 - protein, 12 aa, Homo sapiens
  CDR3 for beta chain variable domain of TCR clone 256740 (TRBV7-8, TRBJ2-7)
CASSLGDREQYF

SEQ ID NO: 513481 - protein, 15 aa, Homo sapiens
  CDR3 for alpha chain variable domain of TCR clone 256741 (TRAV12-2, TRAJ53)
CAVNGGGGSNYKLTF

SEQ ID NO: 513482 - protein, 15 aa, Homo sapiens
  CDR3 for beta chain variable domain of TCR clone 256741 (TRBV28, TRBJ1-3)
CASSMGWASGNTIYF

SEQ ID NO: 513483 - protein, 11 aa, Homo sapiens
  CDR3 for alpha chain variable domain of TCR clone 256742 (TRAV35, TRAJ30)
CAGPGDDKINF

SEQ ID NO: 513484 - protein, 14 aa, Homo sapiens
  CDR3 for beta chain variable domain of TCR clone 256742 (TRBV7-6, TRBJ1-6)
CASSQAGGGSPLHF

SEQ ID NO: 513485 - protein, 14 aa, Homo sapiens
  CDR3 for alpha chain variable domain of TCR clone 256743 (TRAV27, TRAJ37)
CRSQGSSNTGKLIF

SEQ ID NO: 513486 - protein, 13 aa, Homo sapiens
  CDR3 for beta chain variable domain of TCR clone 256743 (TRBV7-9, TRBJ1-2)
CASSLKQNYGYTF

SEQ ID NO: 513487 - protein, 11 aa, Homo sapiens
  CDR3 for alpha chain variable domain of TCR clone 256744 (TRAV3, TRAJ21)
CAVGNFNKFYF

SEQ ID NO: 513488 - protein, 14 aa, Homo sapiens
  CDR3 for beta chain variable domain of TCR clone 256744 (TRBV19, TRBJ1-1)
CASSIRGTGTEAFF

SEQ ID NO: 513489 - protein, 13 aa, Homo sapiens
  CDR3 for alpha chain variable domain of TCR clone 256745 (TRAV26-2, TRAJ47)
CILPMEYGNKLVF

SEQ ID NO: 513490 - protein, 14 aa, Homo sapiens
  CDR3 for beta chain variable domain of TCR clone 256745 (TRBV4-1, TRBJ2-7)
CASSRTGVAFEQYF

SEQ ID NO: 513491 - protein, 17 aa, Homo sapiens
  CDR3 for alpha chain variable domain of TCR clone 256746 (TRAV13-1, TRAJ52)
CAAGRNAGGTSYGKLTF

SEQ ID NO: 513492 - protein, 14 aa, Homo sapiens
  CDR3 for beta chain variable domain of TCR clone 256746 (TRBV2, TRBJ2-1)
CASRTGSSYNEQFF

SEQ ID NO: 513493 - protein, 15 aa, Homo sapiens
  CDR3 for alpha chain variable domain of TCR clone 256747 (TRAV16, TRAJ20)
CALKGGLRSDYKLSF

SEQ ID NO: 513494 - protein, 16 aa, Homo sapiens
  CDR3 for beta chain variable domain of TCR clone 256747 (TRBV11-3, TRBJ2-2)
CASSSRTSPGTGELLF

SEQ ID NO: 513495 - protein, 23 aa, Homo sapiens
  CDR3 for alpha chain variable domain of TCR clone 256748 (TRAV1-1, TRAJ29)
LLQELQMKDSASYFLGGNAPLVF

SEQ ID NO: 513496 - protein, 13 aa, Homo sapiens
  CDR3 for beta chain variable domain of TCR clone 256748 (TRBV25-1, TRBJ2-7)
CASSEDGDYEQYF

SEQ ID NO: 513497 - protein, 18 aa, Homo sapiens
  CDR3 for alpha chain variable domain of TCR clone 256749 (TRAV26-1, TRAJ56)
CIVRVASRETGANSKLTF

SEQ ID NO: 513498 - protein, 15 aa, Homo sapiens
  CDR3 for beta chain variable domain of TCR clone 256749 (TRBV7-9, TRBJ2-5)
CASSDTGRGRETQYF

SEQ ID NO: 513499 - protein, 15 aa, Homo sapiens
  CDR3 for alpha chain variable domain of TCR clone 256750 (TRAV3, TRAJ3)
CAVRDRDSSASKIIF

SEQ ID NO: 513500 - protein, 11 aa, Homo sapiens
  CDR3 for beta chain variable domain of TCR clone 256750 (TRBV29-1, TRBJ2-5)
CSEDRTGTQYF

SEQ ID NO: 513501 - protein, 14 aa, Homo sapiens
  CDR3 for alpha chain variable domain of TCR clone 256751 (TRAV12-3, TRAJ10)
SHLPLTGGGHKLTF

SEQ ID NO: 513502 - protein, 13 aa, Homo sapiens
  CDR3 for beta chain variable domain of TCR clone 256751 (TRBV20-1, TRBJ2-5)
CSARGDYQETQYF

SEQ ID NO: 513503 - protein, 14 aa, Homo sapiens
  CDR3 for alpha chain variable domain of TCR clone 256752 (TRAV1-2, TRAJ8)
CAVREDTGFQKLVL

SEQ ID NO: 513504 - protein, 17 aa, Homo sapiens
  CDR3 for beta chain variable domain of TCR clone 256752 (TRBV13, TRBJ2-3)
CASSLSRVAGGRNTQYF

SEQ ID NO: 513505 - protein, 13 aa, Homo sapiens
  CDR3 for alpha chain variable domain of TCR clone 256753 (TRAV27, TRAJ6)
CAGGTRGSYIPTF

SEQ ID NO: 513506 - protein, 18 aa, Homo sapiens
  CDR3 for beta chain variable domain of TCR clone 256753 (TRBV11-2, TRBJ2-3)
CASSLGGASRGAPNTQYF

SEQ ID NO: 513507 - protein, 14 aa, Homo sapiens
  CDR3 for alpha chain variable domain of TCR clone 256754 (TRAV1-2, TRAJ8)
CAVREDTGFQKLVF

SEQ ID NO: 513508 - protein, 13 aa, Homo sapiens
  CDR3 for beta chain variable domain of TCR clone 256754 (TRBV5-4, TRBJ1-1)
CASSVDLGTEAFF

SEQ ID NO: 513509 - protein, 10 aa, Homo sapiens
  CDR3 for alpha chain variable domain of TCR clone 256755 (TRAV1-2, TRAJ34)
CAVNNDKLIF

SEQ ID NO: 513510 - protein, 13 aa, Homo sapiens
  CDR3 for beta chain variable domain of TCR clone 256755 (TRBV10-1, TRBJ2-1)
CASSAGPDNEQFF

SEQ ID NO: 513511 - protein, 14 aa, Homo sapiens
  CDR3 for alpha chain variable domain of TCR clone 256756 (TRAV9-2, TRAJ39)
CALYIYNAGNMLTF

SEQ ID NO: 513512 - protein, 14 aa, Homo sapiens
  CDR3 for beta chain variable domain of TCR clone 256756 (TRBV7-9, TRBJ2-1)
CASSDNSGYNEQFF

SEQ ID NO: 513513 - protein, 10 aa, Homo sapiens
  CDR3 for alpha chain variable domain of TCR clone 256757 (TRAV36/DV7, TRAJ48)
CAVGNEKLTF

SEQ ID NO: 513514 - protein, 17 aa, Homo sapiens
  CDR3 for beta chain variable domain of TCR clone 256757 (TRBV11-2, TRBJ2-1)
CASILYPPGVEYNEQFF

SEQ ID NO: 513515 - protein, 22 aa, Homo sapiens
  CDR3 for alpha chain variable domain of TCR clone 256758 (TRAV40, )
CLLGDGIPDIQNPDPAVYQLRD

SEQ ID NO: 513516 - protein, 16 aa, Homo sapiens
  CDR3 for beta chain variable domain of TCR clone 256758 (TRBV20-1, TRBJ1-5)
CSAEIPGQQTNQPQHF

SEQ ID NO: 513517 - protein, 17 aa, Homo sapiens
  CDR3 for alpha chain variable domain of TCR clone 256759 (TRAV21, TRAJ37)
CAFWPKNGSSNTGKLIF

SEQ ID NO: 513518 - protein, 15 aa, Homo sapiens
  CDR3 for beta chain variable domain of TCR clone 256759 (TRBV7-2, TRBJ2-3)
CASSLAGAFIDTQYF

SEQ ID NO: 513519 - protein, 14 aa, Homo sapiens
  CDR3 for alpha chain variable domain of TCR clone 256760 (TRAV1-2, TRAJ8)
CAVREDTGFQKLVF

SEQ ID NO: 513520 - protein, 14 aa, Homo sapiens
  CDR3 for beta chain variable domain of TCR clone 256760 (TRBV6-1, TRBJ1-6)
CASSEGVGDSTLHF

SEQ ID NO: 513521 - protein, 13 aa, Homo sapiens
  CDR3 for alpha chain variable domain of TCR clone 256761 (TRAV8-6, TRAJ49)
CAVITNTGNQSYF

SEQ ID NO: 513522 - protein, 13 aa, Homo sapiens
  CDR3 for beta chain variable domain of TCR clone 256761 (TRBV20-1, TRBJ1-1)
CSARGGGNTEAFF

SEQ ID NO: 513523 - protein, 11 aa, Homo sapiens
  CDR3 for alpha chain variable domain of TCR clone 256762 (TRAV1-2, TRAJ20)
CAVANDYKLSF

SEQ ID NO: 513524 - protein, 18 aa, Homo sapiens
  CDR3 for beta chain variable domain of TCR clone 256762 (TRBV20-1, TRBJ2-6)
CSVETTPTHGSGANDLTF

SEQ ID NO: 513525 - protein, 16 aa, Homo sapiens
  CDR3 for alpha chain variable domain of TCR clone 256763 (TRAV8-4, TRAJ5)
CAVSPLTDTGRRALTF

SEQ ID NO: 513526 - protein, 14 aa, Homo sapiens
  CDR3 for beta chain variable domain of TCR clone 256763 (TRBV19, TRBJ1-6)
CTSSTDGWNSPLHF

SEQ ID NO: 513527 - protein, 13 aa, Homo sapiens
  CDR3 for alpha chain variable domain of TCR clone 256764 (TRAV27, TRAJ45)
CRSSGGGADGLTF

SEQ ID NO: 513528 - protein, 15 aa, Homo sapiens
  CDR3 for beta chain variable domain of TCR clone 256764 (TRBV6-1, TRBJ2-2)
CASSRLRGDTGELFF

SEQ ID NO: 513529 - protein, 13 aa, Homo sapiens
  CDR3 for alpha chain variable domain of TCR clone 256765 (TRAV35, TRAJ42)
CAGFPGSQGNLIF

SEQ ID NO: 513530 - protein, 16 aa, Homo sapiens
  CDR3 for beta chain variable domain of TCR clone 256765 (TRBV12-4, TRBJ1-5)
CASSRPVGGSNQPQHF

SEQ ID NO: 513531 - protein, 11 aa, Homo sapiens
  CDR3 for alpha chain variable domain of TCR clone 256766 (TRAV21, TRAJ31)
CAVRNNARLMF

SEQ ID NO: 513532 - protein, 15 aa, Homo sapiens
  CDR3 for beta chain variable domain of TCR clone 256766 (TRBV11-2, TRBJ2-7)
CASSPIGGKAYEQYF

SEQ ID NO: 513533 - protein, 14 aa, Homo sapiens
  CDR3 for alpha chain variable domain of TCR clone 256767 (TRAV14/DV4, TRAJ54)
CAMREAPGAQKLVF

SEQ ID NO: 513534 - protein, 10 aa, Homo sapiens
  CDR3 for beta chain variable domain of TCR clone 256767 (TRBV2, TRBJ2-5)
CASSAATQYF

SEQ ID NO: 513535 - protein, 16 aa, Homo sapiens
  CDR3 for alpha chain variable domain of TCR clone 256768 (TRAV12-2, TRAJ37)
CAVKEKGSSNTGKIIF

SEQ ID NO: 513536 - protein, 12 aa, Homo sapiens
  CDR3 for beta chain variable domain of TCR clone 256768 (TRBV10-1, TRBJ1-5)
CASSDSNQPQHF

SEQ ID NO: 513537 - protein, 14 aa, Homo sapiens
  CDR3 for alpha chain variable domain of TCR clone 256769 (TRAV35, TRAJ13)
CAGSPSGGYQKVTF

SEQ ID NO: 513538 - protein, 13 aa, Homo sapiens
  CDR3 for beta chain variable domain of TCR clone 256769 (TRBV20-1, TRBJ2-5)
CSARYTGEETQYF

SEQ ID NO: 513539 - protein, 16 aa, Homo sapiens
  CDR3 for alpha chain variable domain of TCR clone 256770 (TRAV12-1, TRAJ22)
WMVNTISSGSARQLTF

SEQ ID NO: 513540 - protein, 13 aa, Homo sapiens
  CDR3 for beta chain variable domain of TCR clone 256770 (TRBV19, TRBJ2-1)
CASNGGVFSEQFF

SEQ ID NO: 513541 - protein, 13 aa, Homo sapiens
  CDR3 for alpha chain variable domain of TCR clone 256771 (TRAV27, TRAJ6)
CAGGTRGSYIPTF

SEQ ID NO: 513542 - protein, 15 aa, Homo sapiens
  CDR3 for beta chain variable domain of TCR clone 256771 (TRBV5-5, TRBJ2-7)
CVSSLAAPLSYEQYF

SEQ ID NO: 513543 - protein, 14 aa, Homo sapiens
  CDR3 for alpha chain variable domain of TCR clone 256772 (TRAV1-2, TRAJ16)
CAVNRFSAGQKLLF

SEQ ID NO: 513544 - protein, 17 aa, Homo sapiens
  CDR3 for beta chain variable domain of TCR clone 256772 (TRBV28, TRBJ2-5)
CASSTPEWDALQETQYF

SEQ ID NO: 513545 - protein, 14 aa, Homo sapiens
  CDR3 for alpha chain variable domain of TCR clone 256773 (TRAV27, TRAJ22)
CAGLPSGSARQLTF

SEQ ID NO: 513546 - protein, 13 aa, Homo sapiens
  CDR3 for beta chain variable domain of TCR clone 256773 (TRBV4-2, TRBJ1-1)
CASSQAGNTEAFF

SEQ ID NO: 513547 - protein, 18 aa, Homo sapiens
  CDR3 for alpha chain variable domain of TCR clone 256774 (TRAV21, TRAJ52)
CAVRPSPAGGTSYGKLSF

SEQ ID NO: 513548 - protein, 19 aa, Homo sapiens
  CDR3 for beta chain variable domain of TCR clone 256774 (TRBV7-2, TRBJ2-3)
CASSFLSRNWGGGTGTQYF

SEQ ID NO: 513549 - protein, 17 aa, Homo sapiens
  CDR3 for alpha chain variable domain of TCR clone 256775 (TRAV21, TRAJ24)
CAGIRLRSTDSWGKLHF

SEQ ID NO: 513550 - protein, 15 aa, Homo sapiens
  CDR3 for beta chain variable domain of TCR clone 256775 (TRBV7-2, TRBJ2-3)
CASSPRGLSTDTQYF

SEQ ID NO: 513551 - protein, 15 aa, Homo sapiens
  CDR3 for alpha chain variable domain of TCR clone 256776 (TRAV3, TRAJ4)
CAVRDGTGGYNKLIF

SEQ ID NO: 513552 - protein, 16 aa, Homo sapiens
  CDR3 for beta chain variable domain of TCR clone 256776 (TRBV27, TRBJ2-2)
CASSSSAVSNTGELFF

SEQ ID NO: 513553 - protein, 13 aa, Homo sapiens
  CDR3 for alpha chain variable domain of TCR clone 256777 (TRAV17, TRAJ5)
CALRRTGRRALTF

SEQ ID NO: 513554 - protein, 15 aa, Homo sapiens
  CDR3 for beta chain variable domain of TCR clone 256777 (TRBV6-1, TRBJ1-5)
CASSELREGNQPQHF

SEQ ID NO: 513555 - protein, 18 aa, Homo sapiens
  CDR3 for alpha chain variable domain of TCR clone 256778 (TRAV9-2, TRAJ52)
RALSRHNAGGTSYGKLTF

SEQ ID NO: 513556 - protein, 13 aa, Homo sapiens
  CDR3 for beta chain variable domain of TCR clone 256778 (TRBV7-9, TRBJ1-2)
CASSLKQNYGYTF

SEQ ID NO: 513557 - protein, 14 aa, Homo sapiens
  CDR3 for alpha chain variable domain of TCR clone 256779 (TRAV26-1, TRAJ45)
YIVRVVGGADGLTF

SEQ ID NO: 513558 - protein, 16 aa, Homo sapiens
  CDR3 for beta chain variable domain of TCR clone 256779 (TRBV7-9, TRBJ1-1)
CASSLTQVRSNTEAFF

SEQ ID NO: 513559 - protein, 13 aa, Homo sapiens
  CDR3 for alpha chain variable domain of TCR clone 256780 (TRAV2, TRAJ40)
CAVVTSGTYKYIF

SEQ ID NO: 513560 - protein, 13 aa, Homo sapiens
  CDR3 for beta chain variable domain of TCR clone 256780 (TRBV7-3, TRBJ2-5)
CTSSSDREETQYF

SEQ ID NO: 513561 - protein, 14 aa, Homo sapiens
  CDR3 for alpha chain variable domain of TCR clone 256781 (TRAV12-1, TRAJ9)
CVVNRRTGGFKTIF

SEQ ID NO: 513562 - protein, 16 aa, Homo sapiens
  CDR3 for beta chain variable domain of TCR clone 256781 (TRBV19, TRBJ2-1)
CASSKAGPSSYNEQFF

SEQ ID NO: 513563 - protein, 16 aa, Homo sapiens
  CDR3 for alpha chain variable domain of TCR clone 256782 (TRAV14/DV4, TRAJ54)
CAMREGRIQGAQKLVF

SEQ ID NO: 513564 - protein, 16 aa, Homo sapiens
  CDR3 for beta chain variable domain of TCR clone 256782 (TRBV7-9, TRBJ2-1)
CASRDVAGGSYNEQFF

SEQ ID NO: 513565 - protein, 14 aa, Homo sapiens
  CDR3 for alpha chain variable domain of TCR clone 256783 (TRAV13-2, TRAJ39)
CAENKNNAGNMLTF

SEQ ID NO: 513566 - protein, 16 aa, Homo sapiens
  CDR3 for beta chain variable domain of TCR clone 256783 (TRBV20-1, TRBJ2-1)
CSASYPSGTGDDEQFF

SEQ ID NO: 513567 - protein, 14 aa, Homo sapiens
  CDR3 for alpha chain variable domain of TCR clone 256784 (TRAV9-2, TRAJ39)
CALYIYNAGNMLTF

SEQ ID NO: 513568 - protein, 16 aa, Homo sapiens
  CDR3 for beta chain variable domain of TCR clone 256784 (TRBV4-1, TRBJ2-5)
CASSQAIAASSATQYF

SEQ ID NO: 513569 - protein, 11 aa, Homo sapiens
  CDR3 for alpha chain variable domain of TCR clone 256785 (TRAV29/DV5, TRAJ37)
CATSNTGKLIF

SEQ ID NO: 513570 - protein, 13 aa, Homo sapiens
  CDR3 for beta chain variable domain of TCR clone 256785 (TRBV12-4, TRBJ2-3)
CASSSSLGGTQYF

SEQ ID NO: 513571 - protein, 14 aa, Homo sapiens
  CDR3 for alpha chain variable domain of TCR clone 256786 (TRAV35, TRAJ10)
CAGILTGGGNKLTF

SEQ ID NO: 513572 - protein, 16 aa, Homo sapiens
  CDR3 for beta chain variable domain of TCR clone 256786 (TRBV12-5, TRBJ2-5)
CASGPRTSGDQETQYF

SEQ ID NO: 513573 - protein, 13 aa, Homo sapiens
  CDR3 for alpha chain variable domain of TCR clone 256787 (TRAV3, TRAJ8)
CAVSNTGFQKLVF

SEQ ID NO: 513574 - protein, 15 aa, Homo sapiens
  CDR3 for beta chain variable domain of TCR clone 256787 (TRBV28, TRBJ2-5)
CASSSGRTIQETQYF

SEQ ID NO: 513575 - protein, 16 aa, Homo sapiens
  CDR3 for alpha chain variable domain of TCR clone 256788 (TRAV12-3, TRAJ53)
CAMSAGSGGSNYKLTF

SEQ ID NO: 513576 - protein, 13 aa, Homo sapiens
  CDR3 for beta chain variable domain of TCR clone 256788 (TRBV29-1, TRBJ2-3)
CSVGARGTDTQYF

SEQ ID NO: 513577 - protein, 22 aa, Homo sapiens
  CDR3 for alpha chain variable domain of TCR clone 256789 (TRAV27, TRAJ38)
CAGRFNAGNNHIQNPAPAVYQL

SEQ ID NO: 513578 - protein, 13 aa, Homo sapiens
  CDR3 for beta chain variable domain of TCR clone 256789 (TRBV20-1, TRBJ1-1)
CSARVGGNTEAFF

SEQ ID NO: 513579 - protein, 15 aa, Homo sapiens
  CDR3 for alpha chain variable domain of TCR clone 256790 (TRAV29/DV5, TRAJ53)
CAASARGGSNYKLTF

SEQ ID NO: 513580 - protein, 13 aa, Homo sapiens
  CDR3 for beta chain variable domain of TCR clone 256790 (TRBV12-4, TRBJ1-2)
CASSLRQGKGYTF

SEQ ID NO: 513581 - protein, 13 aa, Homo sapiens
  CDR3 for alpha chain variable domain of TCR clone 256791 (TRAV20, TRAJ37)
CAGCSSNTGKLIF

SEQ ID NO: 513582 - protein, 11 aa, Homo sapiens
  CDR3 for beta chain variable domain of TCR clone 256791 (TRBV12-4, TRBJ2-3)
CAGTATDAQYF

SEQ ID NO: 513583 - protein, 13 aa, Homo sapiens
  CDR3 for alpha chain variable domain of TCR clone 256792 (TRAV23/DV6, TRAJ58)
CAASEIGGSSLTF

SEQ ID NO: 513584 - protein, 15 aa, Homo sapiens
  CDR3 for beta chain variable domain of TCR clone 256792 (TRBV19, TRBJ1-1)
CASTSGQIQNTEAFF

SEQ ID NO: 513585 - protein, 12 aa, Homo sapiens
  CDR3 for alpha chain variable domain of TCR clone 256793 (TRAV30, TRAJ43)
CGTEERGNDMRF

SEQ ID NO: 513586 - protein, 14 aa, Homo sapiens
  CDR3 for beta chain variable domain of TCR clone 256793 (TRBV11-2, TRBJ2-3)
CASSRLARTDTQYF

SEQ ID NO: 513587 - protein, 15 aa, Homo sapiens
  CDR3 for alpha chain variable domain of TCR clone 256794 (TRAV2, TRAJ9)
CAAAALNTGGFKTIF

SEQ ID NO: 513588 - protein, 14 aa, Homo sapiens
  CDR3 for beta chain variable domain of TCR clone 256794 (TRBV7-8, TRBJ2-5)
CASSATGGQETQYF

SEQ ID NO: 513589 - protein, 13 aa, Homo sapiens
  CDR3 for alpha chain variable domain of TCR clone 256795 (TRAV2, TRAJ11)
CAVEEIRYSTLTF

SEQ ID NO: 513590 - protein, 17 aa, Homo sapiens
  CDR3 for beta chain variable domain of TCR clone 256795 (TRBV7-2, TRBJ2-1)
CASSRGTSGAVGWEQFF

SEQ ID NO: 513591 - protein, 17 aa, Homo sapiens
  CDR3 for alpha chain variable domain of TCR clone 256796 (TRAV27, TRAJ42)
CAERVIYYGGSQGNLIF

SEQ ID NO: 513592 - protein, 15 aa, Homo sapiens
  CDR3 for beta chain variable domain of TCR clone 256796 (TRBV12-4, TRBJ2-5)
CASSPPTGLQETQYF

SEQ ID NO: 513593 - protein, 13 aa, Homo sapiens
  CDR3 for alpha chain variable domain of TCR clone 256797 (TRAV1-2, TRAJ11)
CAVRDSGYSTLTF

SEQ ID NO: 513594 - protein, 18 aa, Homo sapiens
  CDR3 for beta chain variable domain of TCR clone 256797 (TRBV12-4, TRBJ2-2)
CASSLVAGTRGRTGELFF

SEQ ID NO: 513595 - protein, 13 aa, Homo sapiens
  CDR3 for alpha chain variable domain of TCR clone 256798 (TRAV13-2, TRAJ48)
CAEMDFGNEKLTF

SEQ ID NO: 513596 - protein, 14 aa, Homo sapiens
  CDR3 for beta chain variable domain of TCR clone 256798 (TRBV20-1, TRBJ1-1)
CSAQTRIGGTEAFF

SEQ ID NO: 513597 - protein, 16 aa, Homo sapiens
  CDR3 for alpha chain variable domain of TCR clone 256799 (TRAV3, TRAJ37)
CAVRGKGSGNTGKQIF

SEQ ID NO: 513598 - protein, 14 aa, Homo sapiens
  CDR3 for beta chain variable domain of TCR clone 256799 (TRBV7-2, TRBJ2-7)
CASSPKTSFYEQYS

SEQ ID NO: 513599 - protein, 15 aa, Homo sapiens
  CDR3 for alpha chain variable domain of TCR clone 256800 (TRAV17, TRAJ57)
CATGPSQGGSEKRGF

SEQ ID NO: 513600 - protein, 16 aa, Homo sapiens
  CDR3 for beta chain variable domain of TCR clone 256800 (TRBV12-4, TRBJ1-5)
CASSRPVGGSNQPQHF

SEQ ID NO: 513601 - protein, 13 aa, Homo sapiens
  CDR3 for alpha chain variable domain of TCR clone 256801 (TRAV27, TRAJ53)
CAGQGGSNYKLTF

SEQ ID NO: 513602 - protein, 12 aa, Homo sapiens
  CDR3 for beta chain variable domain of TCR clone 256801 (TRBV19, TRBJ2-1)
CASSMQDTEQFF

SEQ ID NO: 513603 - protein, 11 aa, Homo sapiens
  CDR3 for alpha chain variable domain of TCR clone 256802 (TRAV3, TRAJ17)
PRGAAGNKLTF

SEQ ID NO: 513604 - protein, 12 aa, Homo sapiens
  CDR3 for beta chain variable domain of TCR clone 256802 (TRBV11-2, TRBJ2-2)
CASSLGGGELVF

SEQ ID NO: 513605 - protein, 14 aa, Homo sapiens
  CDR3 for alpha chain variable domain of TCR clone 256803 (TRAV17, TRAJ35)
CATDRPGFGNVLHC

SEQ ID NO: 513606 - protein, 17 aa, Homo sapiens
  CDR3 for beta chain variable domain of TCR clone 256803 (TRBV5-1, TRBJ2-5)
CASAVTRQFGNKETQYF

SEQ ID NO: 513607 - protein, 13 aa, Homo sapiens
  CDR3 for alpha chain variable domain of TCR clone 256804 (TRAV12-2, TRAJ40)
CAVKRTGTYKYIF

SEQ ID NO: 513608 - protein, 13 aa, Homo sapiens
  CDR3 for beta chain variable domain of TCR clone 256804 (TRBV4-1, TRBJ2-1)
CASSRSINNEQFF

SEQ ID NO: 513609 - protein, 14 aa, Homo sapiens
  CDR3 for alpha chain variable domain of TCR clone 256805 (TRAV1-2, TRAJ16)
CAVNRFSDGQKMLF

SEQ ID NO: 513610 - protein, 11 aa, Homo sapiens
  CDR3 for beta chain variable domain of TCR clone 256805 (TRBV29-1, TRBJ2-5)
CSEDRTGTQYF

SEQ ID NO: 513611 - protein, 12 aa, Homo sapiens
  CDR3 for alpha chain variable domain of TCR clone 256806 (TRAV16, TRAJ15)
CALKPGRNCSDL

SEQ ID NO: 513612 - protein, 12 aa, Homo sapiens
  CDR3 for beta chain variable domain of TCR clone 256806 (TRBV12-4, TRBJ2-7)
CASSLGGYEQYF

SEQ ID NO: 513613 - protein, 14 aa, Homo sapiens
  CDR3 for alpha chain variable domain of TCR clone 256807 (TRAV13-2, TRAJ32)
CAESLGGATNKLIF

SEQ ID NO: 513614 - protein, 15 aa, Homo sapiens
  CDR3 for beta chain variable domain of TCR clone 256807 (TRBV20-1, TRBJ1-2)
CSARDSRGRNHGYTF

SEQ ID NO: 513615 - protein, 12 aa, Homo sapiens
  CDR3 for alpha chain variable domain of TCR clone 256808 (TRAV12-3, TRAJ17)
CAMTLTGNKLTF

SEQ ID NO: 513616 - protein, 16 aa, Homo sapiens
  CDR3 for beta chain variable domain of TCR clone 256808 (TRBV20-1, TRBJ2-3)
CSGEAGLAGGQDTQYF

SEQ ID NO: 513617 - protein, 14 aa, Homo sapiens
  CDR3 for alpha chain variable domain of TCR clone 256809 (TRAV35, TRAJ22)
CAGLRPGSARQLTF

SEQ ID NO: 513618 - protein, 12 aa, Homo sapiens
  CDR3 for beta chain variable domain of TCR clone 256809 (TRBV7-2, TRBJ2-1)
CASSPQDIEQFF

SEQ ID NO: 513619 - protein, 15 aa, Homo sapiens
  CDR3 for alpha chain variable domain of TCR clone 256810 (TRAV12-1, TRAJ44)
CVADLPTGTASKLTF

SEQ ID NO: 513620 - protein, 13 aa, Homo sapiens
  CDR3 for beta chain variable domain of TCR clone 256810 (TRBV6-5, TRBJ2-5)
CAIIPQGGETQYF

SEQ ID NO: 513621 - protein, 11 aa, Homo sapiens
  CDR3 for alpha chain variable domain of TCR clone 256811 (TRAV3, TRAJ21)
CAVGNFTKFYF

SEQ ID NO: 513622 - protein, 15 aa, Homo sapiens
  CDR3 for beta chain variable domain of TCR clone 256811 (TRBV28, TRBJ2-5)
CASSPGQGSIETQYF

SEQ ID NO: 513623 - protein, 13 aa, Homo sapiens
  CDR3 for alpha chain variable domain of TCR clone 256812 (TRAV8-6, TRAJ49)
CAVITNTGHQFYF

SEQ ID NO: 513624 - protein, 12 aa, Homo sapiens
  CDR3 for beta chain variable domain of TCR clone 256812 (TRBV12-4, TRBJ2-7)
CASSLGGYEQYF

SEQ ID NO: 513625 - protein, 17 aa, Homo sapiens
  CDR3 for alpha chain variable domain of TCR clone 256813 (TRAV21, TRAJ24)
CAGIRLRSTDSWGKSQF

SEQ ID NO: 513626 - protein, 15 aa, Homo sapiens
  CDR3 for beta chain variable domain of TCR clone 256813 (TRBV7-2, TRBJ2-3)
CASSPRGLSTDTQYF

SEQ ID NO: 513627 - protein, 18 aa, Homo sapiens
  CDR3 for alpha chain variable domain of TCR clone 256814 (TRAV9-2, TRAJ52)
CALSRHNAGGTSYGKLTF

SEQ ID NO: 513628 - protein, 15 aa, Homo sapiens
  CDR3 for beta chain variable domain of TCR clone 256814 (TRBV6-5, TRBJ2-1)
CASSYDAGAGNEQFF

SEQ ID NO: 513629 - protein, 15 aa, Homo sapiens
  CDR3 for alpha chain variable domain of TCR clone 256815 (TRAV26-1, TRAJ22)
CIVRVAFWFCKATDL

SEQ ID NO: 513630 - protein, 13 aa, Homo sapiens
  CDR3 for beta chain variable domain of TCR clone 256815 (TRBV7-9, TRBJ1-2)
CASSLKKNYGYTF

SEQ ID NO: 513631 - protein, 13 aa, Homo sapiens
  CDR3 for alpha chain variable domain of TCR clone 256816 (TRAV2, TRAJ12)
CAVGADSSYKLIF

SEQ ID NO: 513632 - protein, 13 aa, Homo sapiens
  CDR3 for beta chain variable domain of TCR clone 256816 (TRBV20-1, TRBJ2-1)
CSARASPRDEKFF

SEQ ID NO: 513633 - protein, 17 aa, Homo sapiens
  CDR3 for alpha chain variable domain of TCR clone 256817 (TRAV26-1, TRAJ53)
CIVRVDDSGGNNYKLTF

SEQ ID NO: 513634 - protein, 15 aa, Homo sapiens
  CDR3 for beta chain variable domain of TCR clone 256817 (TRBV20-1, TRBJ2-7)
CSARVPAAYFYEQYF

SEQ ID NO: 513635 - protein, 16 aa, Homo sapiens
  CDR3 for alpha chain variable domain of TCR clone 256818 (TRAV3, TRAJ6)
CAARDGMGRRKLHTYI

SEQ ID NO: 513636 - protein, 15 aa, Homo sapiens
  CDR3 for beta chain variable domain of TCR clone 256818 (TRBV9, TRBJ2-1)
CASSLAGSSYNEQFF

SEQ ID NO: 513637 - protein, 15 aa, Homo sapiens
  CDR3 for alpha chain variable domain of TCR clone 256819 (TRAV35, TRAJ40)
CAGQLGTSGTYKYIF

SEQ ID NO: 513638 - protein, 14 aa, Homo sapiens
  CDR3 for beta chain variable domain of TCR clone 256819 (TRBV7-3, TRBJ1-1)
CASSLKGGNTEAFF

SEQ ID NO: 513639 - protein, 17 aa, Homo sapiens
  CDR3 for alpha chain variable domain of TCR clone 256820 (TRAV3, TRAJ6)
CAVRDGPRAGGSYIPTF

SEQ ID NO: 513640 - protein, 13 aa, Homo sapiens
  CDR3 for beta chain variable domain of TCR clone 256820 (TRBV9, TRBJ1-1)
CASSLTGGGEAFF

SEQ ID NO: 513641 - protein, 19 aa, Homo sapiens
  CDR3 for alpha chain variable domain of TCR clone 256821 (TRAV1-1, TRAJ32)
CAVRVDELWWCYKQAHLWN

SEQ ID NO: 513642 - protein, 12 aa, Homo sapiens
  CDR3 for beta chain variable domain of TCR clone 256821 (TRBV7-8, TRBJ2-1)
CASSLGHNEQFF

SEQ ID NO: 513643 - protein, 13 aa, Homo sapiens
  CDR3 for alpha chain variable domain of TCR clone 256822 (TRAV8-6, TRAJ49)
CAVITNTVNKFYF

SEQ ID NO: 513644 - protein, 14 aa, Homo sapiens
  CDR3 for beta chain variable domain of TCR clone 256822 (TRBV5-1, TRBJ2-7)
CASSRGESLYEQYL

SEQ ID NO: 513645 - protein, 14 aa, Homo sapiens
  CDR3 for alpha chain variable domain of TCR clone 256823 (TRAV17, TRAJ35)
CATARPGFGNVLHC

SEQ ID NO: 513646 - protein, 19 aa, Homo sapiens
  CDR3 for beta chain variable domain of TCR clone 256823 (TRBV11-3, TRBJ2-2)
CASSTRPGAKTTNTGELFF

SEQ ID NO: 513647 - protein, 15 aa, Homo sapiens
  CDR3 for alpha chain variable domain of TCR clone 256824 (TRAV17, TRAJ48)
CATDETNFGNEKLTF

SEQ ID NO: 513648 - protein, 13 aa, Homo sapiens
  CDR3 for beta chain variable domain of TCR clone 256824 (TRBV12-4, TRBJ1-5)
CASSPDRAQTQHF

SEQ ID NO: 513649 - protein, 12 aa, Homo sapiens
  CDR3 for alpha chain variable domain of TCR clone 256825 (TRAV12-3, TRAJ20)
CAMVRGDYKRSF

SEQ ID NO: 513650 - protein, 12 aa, Homo sapiens
  CDR3 for beta chain variable domain of TCR clone 256825 (TRBV6-1, TRBJ2-7)
CASSDYSYEQYF

SEQ ID NO: 513651 - protein, 13 aa, Homo sapiens
  CDR3 for alpha chain variable domain of TCR clone 256826 (TRAV21, TRAJ20)
CAVGLRVDYKLSF

SEQ ID NO: 513652 - protein, 16 aa, Homo sapiens
  CDR3 for beta chain variable domain of TCR clone 256826 (TRBV6-1, TRBJ2-5)
CASSEALDRGAETQYF

SEQ ID NO: 513653 - protein, 17 aa, Homo sapiens
  CDR3 for alpha chain variable domain of TCR clone 256827 (TRAV3, TRAJ6)
CAVRDGPRAGGSYIPTL

SEQ ID NO: 513654 - protein, 14 aa, Homo sapiens
  CDR3 for beta chain variable domain of TCR clone 256827 (TRBV7-2, TRBJ2-7)
CASSPKTSFYEQFF

SEQ ID NO: 513655 - protein, 14 aa, Homo sapiens
  CDR3 for alpha chain variable domain of TCR clone 256828 (TRAV1-2, TRAJ8)
CAVREDTGFQKLVF

SEQ ID NO: 513656 - protein, 11 aa, Homo sapiens
  CDR3 for beta chain variable domain of TCR clone 256828 (TRBV12-4, TRBJ2-2)
CASSSAGELFF

SEQ ID NO: 513657 - protein, 12 aa, Homo sapiens
  CDR3 for alpha chain variable domain of TCR clone 256829 (TRAV12-1, TRAJ40)
CVVFSGTYKYIF

SEQ ID NO: 513658 - protein, 18 aa, Homo sapiens
  CDR3 for beta chain variable domain of TCR clone 256829 (TRBV11-2, TRBJ2-3)
CASSLGGASRGDPNTQYF

SEQ ID NO: 513659 - protein, 12 aa, Homo sapiens
  CDR3 for alpha chain variable domain of TCR clone 256830 (TRAV13-1, TRAJ49)
CAASPMGTSSIL

SEQ ID NO: 513660 - protein, 13 aa, Homo sapiens
  CDR3 for beta chain variable domain of TCR clone 256830 (TRBV20-1, TRBJ2-2)
CSASAAGTGELFF

SEQ ID NO: 513661 - protein, 14 aa, Homo sapiens
  CDR3 for alpha chain variable domain of TCR clone 256831 (TRAV12-2, TRAJ44)
CAVNKAGTASKLTF

SEQ ID NO: 513662 - protein, 16 aa, Homo sapiens
  CDR3 for beta chain variable domain of TCR clone 256831 (TRBV2, TRBJ2-3)
CASSTSVEGVTDTQYF

SEQ ID NO: 513663 - protein, 14 aa, Homo sapiens
  CDR3 for alpha chain variable domain of TCR clone 256832 (TRAV35, TRAJ10)
CAGILTGGGNKLTF

SEQ ID NO: 513664 - protein, 16 aa, Homo sapiens
  CDR3 for beta chain variable domain of TCR clone 256832 (TRBV12-5, TRBJ2-5)
CASGPRTSGNPETQYF

SEQ ID NO: 513665 - protein, 14 aa, Homo sapiens
  CDR3 for alpha chain variable domain of TCR clone 256833 (TRAV12-2, TRAJ13)
CAMKQTGGYQKVTF

SEQ ID NO: 513666 - protein, 15 aa, Homo sapiens
  CDR3 for beta chain variable domain of TCR clone 256833 (TRBV27, TRBJ2-1)
CASSNGGGSSNEQFF

SEQ ID NO: 513667 - protein, 16 aa, Homo sapiens
  CDR3 for alpha chain variable domain of TCR clone 256834 (TRAV30, TRAJ24)
CGTEIVDADSWGKFQF

SEQ ID NO: 513668 - protein, 14 aa, Homo sapiens
  CDR3 for beta chain variable domain of TCR clone 256834 (TRBV25-1, TRBJ1-4)
CASSKQGANEKLFF

SEQ ID NO: 513669 - protein, 11 aa, Homo sapiens
  CDR3 for alpha chain variable domain of TCR clone 256835 (TRAV23/DV6, TRAJ58)
CAARLLRGETS

SEQ ID NO: 513670 - protein, 16 aa, Homo sapiens
  CDR3 for beta chain variable domain of TCR clone 256835 (TRBV27, TRBJ2-1)
CASSSTGQGMNNEQFF

SEQ ID NO: 513671 - protein, 15 aa, Homo sapiens
  CDR3 for alpha chain variable domain of TCR clone 256836 (TRAV17, TRAJ23)
CATYAEDNQGGKLIF

SEQ ID NO: 513672 - protein, 12 aa, Homo sapiens
  CDR3 for beta chain variable domain of TCR clone 256836 (TRBV2, TRBJ2-1)
CTKQEGYNEQFF

SEQ ID NO: 513673 - protein, 14 aa, Homo sapiens
  CDR3 for alpha chain variable domain of TCR clone 256837 (TRAV1-2, TRAJ16)
CAVNRFSDGQKLLF

SEQ ID NO: 513674 - protein, 16 aa, Homo sapiens
  CDR3 for beta chain variable domain of TCR clone 256837 (TRBV15, TRBJ2-7)
CATSRDRGRRRGEQYF

SEQ ID NO: 513675 - protein, 15 aa, Homo sapiens
  CDR3 for alpha chain variable domain of TCR clone 256838 (TRAV14/DV4, TRAJ10)
CAMRELTGGGNKLTF

SEQ ID NO: 513676 - protein, 14 aa, Homo sapiens
  CDR3 for beta chain variable domain of TCR clone 256838 (TRBV25-1, TRBJ1-1)
CASTHLGGNTEAFF

SEQ ID NO: 513677 - protein, 14 aa, Homo sapiens
  CDR3 for alpha chain variable domain of TCR clone 256839 (TRAV29/DV5, TRAJ36)
CAARRKTGSNNLFF

SEQ ID NO: 513678 - protein, 12 aa, Homo sapiens
  CDR3 for beta chain variable domain of TCR clone 256839 (TRBV11-2, TRBJ2-1)
CASSPGNNEQFF

SEQ ID NO: 513679 - protein, 12 aa, Homo sapiens
  CDR3 for alpha chain variable domain of TCR clone 256840 (TRAV12-3, TRAJ17)
CAMTPTGNKLTF

SEQ ID NO: 513680 - protein, 16 aa, Homo sapiens
  CDR3 for beta chain variable domain of TCR clone 256840 (TRBV12-5, TRBJ2-5)
CASGPRTSGNQETQYF

SEQ ID NO: 513681 - protein, 11 aa, Homo sapiens
  CDR3 for alpha chain variable domain of TCR clone 256841 (TRAV2, TRAJ13)
CASGGYQKVTF

SEQ ID NO: 513682 - protein, 14 aa, Homo sapiens
  CDR3 for beta chain variable domain of TCR clone 256841 (TRBV25-1, TRBJ2-7)
CASSEYGRGYERYF

SEQ ID NO: 513683 - protein, 16 aa, Homo sapiens
  CDR3 for alpha chain variable domain of TCR clone 256842 (TRAV30, TRAJ24)
CGTEIVDADSWGKFQF

SEQ ID NO: 513684 - protein, 16 aa, Homo sapiens
  CDR3 for beta chain variable domain of TCR clone 256842 (TRBV7-9, TRBJ2-3)
CASRPVRISSTDTQYF

SEQ ID NO: 513685 - protein, 14 aa, Homo sapiens
  CDR3 for alpha chain variable domain of TCR clone 256843 (TRAV17, TRAJ57)
CATDPRGGSEKLVF

SEQ ID NO: 513686 - protein, 13 aa, Homo sapiens
  CDR3 for beta chain variable domain of TCR clone 256843 (TRBV19, TRBJ1-3)
CASRLSLGNTIYF

SEQ ID NO: 513687 - protein, 12 aa, Homo sapiens
  CDR3 for alpha chain variable domain of TCR clone 256844 (TRAV13-2, TRAJ8)
CAPWLGFQKLVF

SEQ ID NO: 513688 - protein, 17 aa, Homo sapiens
  CDR3 for beta chain variable domain of TCR clone 256844 (TRBV5-5, TRBJ1-2)
CASSLGSLDGQSEGYTF

SEQ ID NO: 513689 - protein, 14 aa, Homo sapiens
  CDR3 for alpha chain variable domain of TCR clone 256845 (TRAV12-1, TRAJ17)
FVVNYKAAGNKLTF

SEQ ID NO: 513690 - protein, 17 aa, Homo sapiens
  CDR3 for beta chain variable domain of TCR clone 256845 (TRBV20-1, TRBJ2-1)
RSASSSGLAGSYNEQFF

SEQ ID NO: 513691 - protein, 14 aa, Homo sapiens
  CDR3 for alpha chain variable domain of TCR clone 256846 (TRAV12-1, TRAJ3)
CVVSGYSSASKIIF

SEQ ID NO: 513692 - protein, 14 aa, Homo sapiens
  CDR3 for beta chain variable domain of TCR clone 256846 (TRBV6-6, TRBJ1-3)
CASSRQGSGNTICF

SEQ ID NO: 513693 - protein, 15 aa, Homo sapiens
  CDR3 for alpha chain variable domain of TCR clone 256847 (TRAV8-3, TRAJ34)
DAAEYFCSIPGKLIF

SEQ ID NO: 513694 - protein, 15 aa, Homo sapiens
  CDR3 for beta chain variable domain of TCR clone 256847 (TRBV5-7, TRBJ2-1)
CASSRRLAGDNEQFF

SEQ ID NO: 513695 - protein, 11 aa, Homo sapiens
  CDR3 for alpha chain variable domain of TCR clone 256848 (TRAV21, TRAJ33)
CAVLSNYQLIC

SEQ ID NO: 513696 - protein, 15 aa, Homo sapiens
  CDR3 for beta chain variable domain of TCR clone 256848 (TRBV11-2, TRBJ2-7)
CASSLMVGGSYEQYF

SEQ ID NO: 513697 - protein, 13 aa, Homo sapiens
  CDR3 for alpha chain variable domain of TCR clone 256849 (TRAV17, TRAJ5)
CAPMDTGRRALTF

SEQ ID NO: 513698 - protein, 16 aa, Homo sapiens
  CDR3 for beta chain variable domain of TCR clone 256849 (TRBV24-1, TRBJ2-1)
CATSGVAGANYNEQFF

SEQ ID NO: 513699 - protein, 12 aa, Homo sapiens
  CDR3 for alpha chain variable domain of TCR clone 256850 (TRAV1-2, TRAJ9)
CAGYTGGFKTIF

SEQ ID NO: 513700 - protein, 15 aa, Homo sapiens
  CDR3 for beta chain variable domain of TCR clone 256850 (TRBV11-2, TRBJ2-1)
CASSPTGQSLNEQFF

SEQ ID NO: 513701 - protein, 15 aa, Homo sapiens
  CDR3 for alpha chain variable domain of TCR clone 256851 (TRAV17, TRAJ57)
CATGPSPGGSDKLVF

SEQ ID NO: 513702 - protein, 14 aa, Homo sapiens
  CDR3 for beta chain variable domain of TCR clone 256851 (TRBV13, TRBJ2-5)
CASSLERVGETQYF

SEQ ID NO: 513703 - protein, 15 aa, Homo sapiens
  CDR3 for alpha chain variable domain of TCR clone 256852 (TRAV40, TRAJ45)
CLLGDLGGGADVLTF

SEQ ID NO: 513704 - protein, 13 aa, Homo sapiens
  CDR3 for beta chain variable domain of TCR clone 256852 (TRBV7-9, TRBJ1-2)
CASSLKQNYGYTF

SEQ ID NO: 513705 - protein, 11 aa, Homo sapiens
  CDR3 for alpha chain variable domain of TCR clone 256853 (TRAV3, TRAJ21)
CAVGNFNKLYF

SEQ ID NO: 513706 - protein, 17 aa, Homo sapiens
  CDR3 for beta chain variable domain of TCR clone 256853 (TRBV24-1, TRBJ2-1)
CATSDASTSGTYNEQFF

SEQ ID NO: 513707 - protein, 12 aa, Homo sapiens
  CDR3 for alpha chain variable domain of TCR clone 256854 (TRAV27, )
CAGRFNAGTTIS

SEQ ID NO: 513708 - protein, 13 aa, Homo sapiens
  CDR3 for beta chain variable domain of TCR clone 256854 (TRBV20-1, TRBJ1-1)
CSARGGGNTEAFF

SEQ ID NO: 513709 - protein, 14 aa, Homo sapiens
  CDR3 for alpha chain variable domain of TCR clone 256855 (TRAV9-2, TRAJ6)
CALSDPGGSYIPTF

SEQ ID NO: 513710 - protein, 16 aa, Homo sapiens
  CDR3 for beta chain variable domain of TCR clone 256855 (TRBV19, TRBJ2-2)
GASRSPGTGATGELFF

SEQ ID NO: 513711 - protein, 13 aa, Homo sapiens
  CDR3 for alpha chain variable domain of TCR clone 256856 (TRAV20, TRAJ34)
CAVSSYHTDKLIF

SEQ ID NO: 513712 - protein, 13 aa, Homo sapiens
  CDR3 for beta chain variable domain of TCR clone 256856 (TRBV7-9, TRBJ1-2)
CASSLKQNYGYTF

SEQ ID NO: 513713 - protein, 12 aa, Homo sapiens
  CDR3 for alpha chain variable domain of TCR clone 256857 (TRAV16, TRAJ26)
CAPEELWSEFRL

SEQ ID NO: 513714 - protein, 15 aa, Homo sapiens
  CDR3 for beta chain variable domain of TCR clone 256857 (TRBV7-2, TRBJ2-3)
CASSLTGTSTDTQYF

SEQ ID NO: 513715 - protein, 16 aa, Homo sapiens
  CDR3 for alpha chain variable domain of TCR clone 256858 (TRAV23/DV6, TRAJ21)
CAESSGGGTTSTNFTL

SEQ ID NO: 513716 - protein, 11 aa, Homo sapiens
  CDR3 for beta chain variable domain of TCR clone 256858 (TRBV7-8, TRBJ2-7)
CASSLSLEQYF

SEQ ID NO: 513717 - protein, 15 aa, Homo sapiens
  CDR3 for alpha chain variable domain of TCR clone 256859 (TRAV26-1, TRAJ23)
CIVRVLNNQGGKLIF

SEQ ID NO: 513718 - protein, 15 aa, Homo sapiens
  CDR3 for beta chain variable domain of TCR clone 256859 (TRBV6-1, TRBJ2-2)
CASSAGQGYTGELFF

SEQ ID NO: 513719 - protein, 14 aa, Homo sapiens
  CDR3 for alpha chain variable domain of TCR clone 256860 (TRAV1-2, TRAJ8)
CAVREETGFQKLVF

SEQ ID NO: 513720 - protein, 14 aa, Homo sapiens
  CDR3 for beta chain variable domain of TCR clone 256860 (TRBV25-1, TRBJ1-1)
CASTHLGGNTEAFF

SEQ ID NO: 513721 - protein, 15 aa, Homo sapiens
  CDR3 for alpha chain variable domain of TCR clone 256861 (TRAV17, TRAJ54)
CATEKLGQGAQKVEF

SEQ ID NO: 513722 - protein, 14 aa, Homo sapiens
  CDR3 for beta chain variable domain of TCR clone 256861 (TRBV6-6, TRBJ2-7)
CASSDSGAGYEQYF

SEQ ID NO: 513723 - protein, 14 aa, Homo sapiens
  CDR3 for alpha chain variable domain of TCR clone 256862 (TRAV12-3, TRAJ10)
SHLPLTGGGNKLTF

SEQ ID NO: 513724 - protein, 16 aa, Homo sapiens
  CDR3 for beta chain variable domain of TCR clone 256862 (TRBV5-1, TRBJ2-3)
CASSLALAVVSDTQYF

SEQ ID NO: 513725 - protein, 14 aa, Homo sapiens
  CDR3 for alpha chain variable domain of TCR clone 256863 (TRAV3, TRAJ34)
CAVRDINNTDKLIF

SEQ ID NO: 513726 - protein, 15 aa, Homo sapiens
  CDR3 for beta chain variable domain of TCR clone 256863 (TRBV9, TRBJ1-6)
CASSVAGTGDSPLHF

SEQ ID NO: 513727 - protein, 15 aa, Homo sapiens
  CDR3 for alpha chain variable domain of TCR clone 256864 (TRAV12-2, TRAJ53)
CAGNGGGGSNYKLTF

SEQ ID NO: 513728 - protein, 15 aa, Homo sapiens
  CDR3 for beta chain variable domain of TCR clone 256864 (TRBV2, TRBJ2-1)
CASSELAGSYNEQFF

SEQ ID NO: 513729 - protein, 13 aa, Homo sapiens
  CDR3 for alpha chain variable domain of TCR clone 256865 (TRAV16, TRAJ11)
CAITQSGYSTLTF

SEQ ID NO: 513730 - protein, 14 aa, Homo sapiens
  CDR3 for beta chain variable domain of TCR clone 256865 (TRBV19, TRBJ2-7)
CASSTTRSSYEQYF

SEQ ID NO: 513731 - protein, 14 aa, Homo sapiens
  CDR3 for alpha chain variable domain of TCR clone 256866 (TRAV2, TRAJ37)
CAVAFTCNTGKLIF

SEQ ID NO: 513732 - protein, 13 aa, Homo sapiens
  CDR3 for beta chain variable domain of TCR clone 256866 (TRBV29-1, TRBJ2-2)
CSTTGVNTGELFF

SEQ ID NO: 513733 - protein, 14 aa, Homo sapiens
  CDR3 for alpha chain variable domain of TCR clone 256867 (TRAV8-4, TRAJ13)
CAVTLSGGYQKVTF

SEQ ID NO: 513734 - protein, 14 aa, Homo sapiens
  CDR3 for beta chain variable domain of TCR clone 256867 (TRBV7-2, TRBJ1-2)
CASSQTGSTDGYTF

SEQ ID NO: 513735 - protein, 14 aa, Homo sapiens
  CDR3 for alpha chain variable domain of TCR clone 256868 (TRAV21, TRAJ38)
CAVANAGNNRKLIW

SEQ ID NO: 513736 - protein, 16 aa, Homo sapiens
  CDR3 for beta chain variable domain of TCR clone 256868 (TRBV5-4, TRBJ2-1)
CSSSLALAGAYNEQFF

SEQ ID NO: 513737 - protein, 16 aa, Homo sapiens
  CDR3 for alpha chain variable domain of TCR clone 256869 (TRAV12-3, TRAJ8)
CAMSLGPDTGFQKLVF

SEQ ID NO: 513738 - protein, 15 aa, Homo sapiens
  CDR3 for beta chain variable domain of TCR clone 256869 (TRBV11-3, TRBJ1-1)
CASSLGGPGDTEAFF

SEQ ID NO: 513739 - protein, 14 aa, Homo sapiens
  CDR3 for alpha chain variable domain of TCR clone 256870 (TRAV1-2, TRAJ8)
CAVREDTGFQTLVF

SEQ ID NO: 513740 - protein, 15 aa, Homo sapiens
  CDR3 for beta chain variable domain of TCR clone 256870 (TRBV6-3, TRBJ2-7)
CASSSPGTVFYEQYS

SEQ ID NO: 513741 - protein, 16 aa, Homo sapiens
  CDR3 for alpha chain variable domain of TCR clone 256871 (TRAV12-3, TRAJ53)
CAMSPGRGGSNYKLTF

SEQ ID NO: 513742 - protein, 17 aa, Homo sapiens
  CDR3 for beta chain variable domain of TCR clone 256871 (TRBV11-2, TRBJ2-1)
CASSLYPPGVEYNEQFF

SEQ ID NO: 513743 - protein, 14 aa, Homo sapiens
  CDR3 for alpha chain variable domain of TCR clone 256872 (TRAV8-3, TRAJ4)
CAVGAAGGYNKLIF

SEQ ID NO: 513744 - protein, 18 aa, Homo sapiens
  CDR3 for beta chain variable domain of TCR clone 256872 (TRBV20-1, TRBJ2-3)
CSASGLAGGPGTTDTQYF

SEQ ID NO: 513745 - protein, 16 aa, Homo sapiens
  CDR3 for alpha chain variable domain of TCR clone 256873 (TRAV12-3, TRAJ53)
CAMSPGSGGSNYRLTF

SEQ ID NO: 513746 - protein, 11 aa, Homo sapiens
  CDR3 for beta chain variable domain of TCR clone 256873 (TRBV29-1, TRBJ2-5)
CSEDRAGTQYF

SEQ ID NO: 513747 - protein, 14 aa, Homo sapiens
  CDR3 for alpha chain variable domain of TCR clone 256874 (TRAV13-2, TRAJ11)
CRESSYSGYSTLTF

SEQ ID NO: 513748 - protein, 16 aa, Homo sapiens
  CDR3 for beta chain variable domain of TCR clone 256874 (TRBV19, TRBJ1-1)
CASRFGGPVTGTEAFF

SEQ ID NO: 513749 - protein, 15 aa, Homo sapiens
  CDR3 for alpha chain variable domain of TCR clone 256875 (TRAV21, TRAJ53)
CATLNSGGSNYKLTF

SEQ ID NO: 513750 - protein, 15 aa, Homo sapiens
  CDR3 for beta chain variable domain of TCR clone 256875 (TRBV11-3, TRBJ2-2)
CASSFVRTDTGELFF

SEQ ID NO: 513751 - protein, 16 aa, Homo sapiens
  CDR3 for alpha chain variable domain of TCR clone 256876 (TRAV20, TRAJ22)
CTVQASSSGSARQLTF

SEQ ID NO: 513752 - protein, 13 aa, Homo sapiens
  CDR3 for beta chain variable domain of TCR clone 256876 (TRBV7-2, TRBJ2-5)
CASSQTSVETQYF

SEQ ID NO: 513753 - protein, 14 aa, Homo sapiens
  CDR3 for alpha chain variable domain of TCR clone 256877 (TRAV35, TRAJ13)
CVGSPSGGYQKVTF

SEQ ID NO: 513754 - protein, 14 aa, Homo sapiens
  CDR3 for beta chain variable domain of TCR clone 256877 (TRBV12-5, TRBJ2-5)
CASGSRTHQETQYF

SEQ ID NO: 513755 - protein, 13 aa, Homo sapiens
  CDR3 for alpha chain variable domain of TCR clone 256878 (TRAV8-3, TRAJ43)
CAVVPYNNNDMSF

SEQ ID NO: 513756 - protein, 17 aa, Homo sapiens
  CDR3 for beta chain variable domain of TCR clone 256878 (TRBV7-7, TRBJ1-1)
CASIGDRPNLGVTEAFF

SEQ ID NO: 513757 - protein, 15 aa, Homo sapiens
  CDR3 for alpha chain variable domain of TCR clone 256879 (TRAV3, TRAJ22)
CAVRDRGGYARQLTF

SEQ ID NO: 513758 - protein, 12 aa, Homo sapiens
  CDR3 for beta chain variable domain of TCR clone 256879 (TRBV7-8, TRBJ2-7)
CASSLGDREQYF

SEQ ID NO: 513759 - protein, 13 aa, Homo sapiens
  CDR3 for alpha chain variable domain of TCR clone 256880 (TRAV12-2, TRAJ20)
CAVYPSNDYKIRF

SEQ ID NO: 513760 - protein, 15 aa, Homo sapiens
  CDR3 for beta chain variable domain of TCR clone 256880 (TRBV27, TRBJ2-5)
CASSLYPRGGETQYF

SEQ ID NO: 513761 - protein, 15 aa, Homo sapiens
  CDR3 for alpha chain variable domain of TCR clone 256881 (TRAV12-1, TRAJ44)
CVVFVNTGTASKLTF

SEQ ID NO: 513762 - protein, 17 aa, Homo sapiens
  CDR3 for beta chain variable domain of TCR clone 256881 (TRBV7-8, TRBJ2-6)
CASSAGTGGAGTNVLTF

SEQ ID NO: 513763 - protein, 16 aa, Homo sapiens
  CDR3 for alpha chain variable domain of TCR clone 256882 (TRAV30, TRAJ24)
CGTEIVDADSWGNFQF

SEQ ID NO: 513764 - protein, 18 aa, Homo sapiens
  CDR3 for beta chain variable domain of TCR clone 256882 (TRBV7-9, TRBJ2-7)
CASSLTTSGSRTWYEQYF

SEQ ID NO: 513765 - protein, 14 aa, Homo sapiens
  CDR3 for alpha chain variable domain of TCR clone 256883 (TRAV26-1, TRAJ21)
CIVRPPYNFNKFYF

SEQ ID NO: 513766 - protein, 15 aa, Homo sapiens
  CDR3 for beta chain variable domain of TCR clone 256883 (TRBV4-2, TRBJ1-1)
CASSQENLPRTEAFF

SEQ ID NO: 513767 - protein, 14 aa, Homo sapiens
  CDR3 for alpha chain variable domain of TCR clone 256884 (TRAV36/DV7, TRAJ44)
CCGANTGNASKLTF

SEQ ID NO: 513768 - protein, 16 aa, Homo sapiens
  CDR3 for beta chain variable domain of TCR clone 256884 (TRBV7-9, TRBJ1-2)
CASSLGFSSGEDGYTF

SEQ ID NO: 513769 - protein, 17 aa, Homo sapiens
  CDR3 for alpha chain variable domain of TCR clone 256885 (TRAV12-2, TRAJ52)
CAVNPYAGGTSYGKLTF

SEQ ID NO: 513770 - protein, 16 aa, Homo sapiens
  CDR3 for beta chain variable domain of TCR clone 256885 (TRBV5-5, TRBJ2-2)
CASSGRREGTTGELFF

SEQ ID NO: 513771 - protein, 12 aa, Homo sapiens
  CDR3 for alpha chain variable domain of TCR clone 256886 (TRAV8-3, TRAJ20)
CAVGANDYKLSF

SEQ ID NO: 513772 - protein, 14 aa, Homo sapiens
  CDR3 for beta chain variable domain of TCR clone 256886 (TRBV5-1, TRBJ1-4)
CASSPLSLNEKLFF

SEQ ID NO: 513773 - protein, 16 aa, Homo sapiens
  CDR3 for alpha chain variable domain of TCR clone 256887 (TRAV21, TRAJ52)
CAVTNAGGTSYGKLTF

SEQ ID NO: 513774 - protein, 14 aa, Homo sapiens
  CDR3 for beta chain variable domain of TCR clone 256887 (TRBV5-7, TRBJ1-5)
CASSRTGGGQPQHF

SEQ ID NO: 513775 - protein, 13 aa, Homo sapiens
  CDR3 for alpha chain variable domain of TCR clone 256888 (TRAV3, TRAJ21)
CAVREPDFNKFYF

SEQ ID NO: 513776 - protein, 16 aa, Homo sapiens
  CDR3 for beta chain variable domain of TCR clone 256888 (TRBV7-8, TRBJ2-1)
CASSLQGTGRYNEQFF

SEQ ID NO: 513777 - protein, 16 aa, Homo sapiens
  CDR3 for alpha chain variable domain of TCR clone 256889 (TRAV12-3, TRAJ53)
CAMSPGSGGSNYKLTF

SEQ ID NO: 513778 - protein, 17 aa, Homo sapiens
  CDR3 for beta chain variable domain of TCR clone 256889 (TRBV7-8, TRBJ2-6)
CASSAGTGGAGANDLTF

SEQ ID NO: 513779 - protein, 12 aa, Homo sapiens
  CDR3 for alpha chain variable domain of TCR clone 256890 (TRAV16, TRAJ10)
CSRTGGGNKLTF

SEQ ID NO: 513780 - protein, 16 aa, Homo sapiens
  CDR3 for beta chain variable domain of TCR clone 256890 (TRBV19, TRBJ2-3)
CASSPGAASRTDTQYF

SEQ ID NO: 513781 - protein, 11 aa, Homo sapiens
  CDR3 for alpha chain variable domain of TCR clone 256891 (TRAV2, TRAJ13)
CASGGYQKVTF

SEQ ID NO: 513782 - protein, 14 aa, Homo sapiens
  CDR3 for beta chain variable domain of TCR clone 256891 (TRBV7-3, TRBJ2-1)
CASGLAGGTNEQFF

SEQ ID NO: 513783 - protein, 15 aa, Homo sapiens
  CDR3 for alpha chain variable domain of TCR clone 256892 (TRAV26-1, TRAJ38)
CIADNAGNNHIQNPD

SEQ ID NO: 513784 - protein, 13 aa, Homo sapiens
  CDR3 for beta chain variable domain of TCR clone 256892 (TRBV20-1, TRBJ1-1)
CSARGGGDTEAFF

SEQ ID NO: 513785 - protein, 11 aa, Homo sapiens
  CDR3 for alpha chain variable domain of TCR clone 256893 (TRAV23/DV6, TRAJ11)
CAVGGYGTLTF

SEQ ID NO: 513786 - protein, 15 aa, Homo sapiens
  CDR3 for beta chain variable domain of TCR clone 256893 (TRBV7-8, TRBJ2-5)
CASSFQSSGEETQYF

SEQ ID NO: 513787 - protein, 13 aa, Homo sapiens
  CDR3 for alpha chain variable domain of TCR clone 256894 (TRAV12-3, TRAJ21)
CAPGPHNFNKFYF

SEQ ID NO: 513788 - protein, 15 aa, Homo sapiens
  CDR3 for beta chain variable domain of TCR clone 256894 (TRBV12-4, TRBJ2-1)
CASSPLSGRNNEQFF

SEQ ID NO: 513789 - protein, 14 aa, Homo sapiens
  CDR3 for alpha chain variable domain of TCR clone 256895 (TRAV17, TRAJ11)
CATDTSRGYSTLTF

SEQ ID NO: 513790 - protein, 16 aa, Homo sapiens
  CDR3 for beta chain variable domain of TCR clone 256895 (TRBV20-1, TRBJ1-2)
CSASMGQGVANYGYTF

SEQ ID NO: 513791 - protein, 14 aa, Homo sapiens
  CDR3 for alpha chain variable domain of TCR clone 256896 (TRAV1-2, TRAJ17)
CAVRDMTAGNKRTF

SEQ ID NO: 513792 - protein, 15 aa, Homo sapiens
  CDR3 for beta chain variable domain of TCR clone 256896 (TRBV20-1, TRBJ2-7)
CSARDRVSGMDEQYF

SEQ ID NO: 513793 - protein, 12 aa, Homo sapiens
  CDR3 for alpha chain variable domain of TCR clone 256897 (TRAV27, TRAJ36)
CAGMTGANNLFF

SEQ ID NO: 513794 - protein, 14 aa, Homo sapiens
  CDR3 for beta chain variable domain of TCR clone 256897 (TRBV12-4, TRBJ2-3)
CASSLVPSTDKQYF

SEQ ID NO: 513795 - protein, 16 aa, Homo sapiens
  CDR3 for alpha chain variable domain of TCR clone 256898 (TRAV23/DV6, TRAJ9)
CAASIVGNTGGFKTIF

SEQ ID NO: 513796 - protein, 10 aa, Homo sapiens
  CDR3 for beta chain variable domain of TCR clone 256898 (TRBV20-1, TRBJ2-5)
TSGSLETQYF

SEQ ID NO: 513797 - protein, 13 aa, Homo sapiens
  CDR3 for alpha chain variable domain of TCR clone 256899 (TRAV9-2, TRAJ49)
CALRHFTGNQFYF

SEQ ID NO: 513798 - protein, 16 aa, Homo sapiens
  CDR3 for beta chain variable domain of TCR clone 256899 (TRBV7-9, TRBJ2-1)
CVSSPRLGSSYNKQFF

SEQ ID NO: 513799 - protein, 12 aa, Homo sapiens
  CDR3 for alpha chain variable domain of TCR clone 256900 (TRAV3, TRAJ20)
YAVRDGDYKLSF

SEQ ID NO: 513800 - protein, 16 aa, Homo sapiens
  CDR3 for beta chain variable domain of TCR clone 256900 (TRBV19, TRBJ2-1)
CASSKAGPSSYNEQFF

SEQ ID NO: 513801 - protein, 18 aa, Homo sapiens
  CDR3 for alpha chain variable domain of TCR clone 256901 (TRAV29/DV5, TRAJ53)
CSVLLCSKRGGSDYKLTF

SEQ ID NO: 513802 - protein, 17 aa, Homo sapiens
  CDR3 for beta chain variable domain of TCR clone 256901 (TRBV7-8, TRBJ2-6)
CASSAGTGGAGANDLTF

SEQ ID NO: 513803 - protein, 16 aa, Homo sapiens
  CDR3 for alpha chain variable domain of TCR clone 256902 (TRAV30, TRAJ24)
CGTEIVDADSWGKVQF

SEQ ID NO: 513804 - protein, 15 aa, Homo sapiens
  CDR3 for beta chain variable domain of TCR clone 256902 (TRBV11-3, TRBJ2-3)
CASLKDGREGDTQYF

SEQ ID NO: 513805 - protein, 12 aa, Homo sapiens
  CDR3 for alpha chain variable domain of TCR clone 256903 (TRAV21, TRAJ31)
CAVWGNNARLMF

SEQ ID NO: 513806 - protein, 16 aa, Homo sapiens
  CDR3 for beta chain variable domain of TCR clone 256903 (TRBV27, TRBJ2-5)
YASSYGRGGQKETQYF

SEQ ID NO: 513807 - protein, 16 aa, Homo sapiens
  CDR3 for alpha chain variable domain of TCR clone 256904 (TRAV3, TRAJ37)
CAVRVRGSGNTGKLIF

SEQ ID NO: 513808 - protein, 12 aa, Homo sapiens
  CDR3 for beta chain variable domain of TCR clone 256904 (TRBV7-9, TRBJ1-5)
CASSPQGQPQHF

SEQ ID NO: 513809 - protein, 13 aa, Homo sapiens
  CDR3 for alpha chain variable domain of TCR clone 256905 (TRAV38-1, TRAJ42)
CARWGGSQGNLIF

SEQ ID NO: 513810 - protein, 13 aa, Homo sapiens
  CDR3 for beta chain variable domain of TCR clone 256905 (TRBV12-4, TRBJ1-1)
CASSLGGTTEAFF

SEQ ID NO: 513811 - protein, 17 aa, Homo sapiens
  CDR3 for alpha chain variable domain of TCR clone 256906 (TRAV12-2, TRAJ48)
CAYNEKLTFGTGTRLTI

SEQ ID NO: 513812 - protein, 15 aa, Homo sapiens
  CDR3 for beta chain variable domain of TCR clone 256906 (TRBV19, TRBJ2-1)
CASSIQATSYNEQFF

SEQ ID NO: 513813 - protein, 16 aa, Homo sapiens
  CDR3 for alpha chain variable domain of TCR clone 256907 (TRAV13-1, TRAJ48)
CAASIFGNFGIEKLTF

SEQ ID NO: 513814 - protein, 14 aa, Homo sapiens
  CDR3 for beta chain variable domain of TCR clone 256907 (TRBV7-3, TRBJ1-1)
CASSLKGGNTEAFF

SEQ ID NO: 513815 - protein, 17 aa, Homo sapiens
  CDR3 for alpha chain variable domain of TCR clone 256908 (TRAV3, TRAJ6)
CAVIDGPRAVGSYIPTF

SEQ ID NO: 513816 - protein, 14 aa, Homo sapiens
  CDR3 for beta chain variable domain of TCR clone 256908 (TRBV7-2, TRBJ2-7)
CASSPKTSFYEQYF

SEQ ID NO: 513817 - protein, 12 aa, Homo sapiens
  CDR3 for alpha chain variable domain of TCR clone 256909 (TRAV12-2, TRAJ29)
CAVDSGNTPLVF

SEQ ID NO: 513818 - protein, 14 aa, Homo sapiens
  CDR3 for beta chain variable domain of TCR clone 256909 (TRBV11-2, TRBJ2-5)
CASSRTGGIETQYF

SEQ ID NO: 513819 - protein, 11 aa, Homo sapiens
  CDR3 for alpha chain variable domain of TCR clone 256910 (TRAV1-1, TRAJ23)
CAVRQGGKLIF

SEQ ID NO: 513820 - protein, 16 aa, Homo sapiens
  CDR3 for beta chain variable domain of TCR clone 256910 (TRBV20-1, TRBJ1-4)
CSAPGQCLLTNEKLFF

SEQ ID NO: 513821 - protein, 14 aa, Homo sapiens
  CDR3 for alpha chain variable domain of TCR clone 256911 (TRAV12-2, TRAJ40)
CAVKIPSGTYNYIF

SEQ ID NO: 513822 - protein, 13 aa, Homo sapiens
  CDR3 for beta chain variable domain of TCR clone 256911 (TRBV7-2, TRBJ1-5)
CASSPTSNQPQHF

SEQ ID NO: 513823 - protein, 14 aa, Homo sapiens
  CDR3 for alpha chain variable domain of TCR clone 256912 (TRAV12-3, TRAJ10)
SHLPLTGGGNKLTF

SEQ ID NO: 513824 - protein, 17 aa, Homo sapiens
  CDR3 for beta chain variable domain of TCR clone 256912 (TRBV13, TRBJ2-3)
CASSSLGTSGLTDTQYF

SEQ ID NO: 513825 - protein, 14 aa, Homo sapiens
  CDR3 for alpha chain variable domain of TCR clone 256913 (TRAV3, TRAJ8)
CAVSRNTGFQKLVF

SEQ ID NO: 513826 - protein, 12 aa, Homo sapiens
  CDR3 for beta chain variable domain of TCR clone 256913 (TRBV7-9, TRBJ2-7)
CASSLEGYEQYF

SEQ ID NO: 513827 - protein, 13 aa, Homo sapiens
  CDR3 for alpha chain variable domain of TCR clone 256914 (TRAV3, TRAJ15)
CAVRDQAGTALIF

SEQ ID NO: 513828 - protein, 14 aa, Homo sapiens
  CDR3 for beta chain variable domain of TCR clone 256914 (TRBV7-2, TRBJ2-7)
CASSPKTSFYEQYF

SEQ ID NO: 513829 - protein, 14 aa, Homo sapiens
  CDR3 for alpha chain variable domain of TCR clone 256915 (TRAV20, TRAJ42)
WAVQAGGSQGNLIF

SEQ ID NO: 513830 - protein, 14 aa, Homo sapiens
  CDR3 for beta chain variable domain of TCR clone 256915 (TRBV28, TRBJ1-2)
CASRIQGANYGYTF

SEQ ID NO: 513831 - protein, 13 aa, Homo sapiens
  CDR3 for alpha chain variable domain of TCR clone 256916 (TRAV8-6, TRAJ21)
CAVSPSSLSKFYF

SEQ ID NO: 513832 - protein, 14 aa, Homo sapiens
  CDR3 for beta chain variable domain of TCR clone 256916 (TRBV7-9, TRBJ2-5)
CASSLDTAKETQYF

SEQ ID NO: 513833 - protein, 16 aa, Homo sapiens
  CDR3 for alpha chain variable domain of TCR clone 256917 (TRAV26-1, TRAJ37)
CIYARHGSSNTGKLIF

SEQ ID NO: 513834 - protein, 16 aa, Homo sapiens
  CDR3 for beta chain variable domain of TCR clone 256917 (TRBV19, TRBJ2-4)
CATGGLAGGTKNTQYF

SEQ ID NO: 513835 - protein, 10 aa, Homo sapiens
  CDR3 for alpha chain variable domain of TCR clone 256918 (TRAV23/DV6, TRAJ57)
CAASSTLSQG

SEQ ID NO: 513836 - protein, 13 aa, Homo sapiens
  CDR3 for beta chain variable domain of TCR clone 256918 (TRBV7-6, TRBJ2-7)
CASSLDHTHEQYF

SEQ ID NO: 513837 - protein, 14 aa, Homo sapiens
  CDR3 for alpha chain variable domain of TCR clone 256919 (TRAV29/DV5, TRAJ45)
CAASFRGGADGFPF

SEQ ID NO: 513838 - protein, 11 aa, Homo sapiens
  CDR3 for beta chain variable domain of TCR clone 256919 (TRBV11-2, TRBJ2-2)
CASSLPGELFF

SEQ ID NO: 513839 - protein, 12 aa, Homo sapiens
  CDR3 for alpha chain variable domain of TCR clone 256920 (TRAV12-1, TRAJ23)
CVVNIPGGKLIF

SEQ ID NO: 513840 - protein, 16 aa, Homo sapiens
  CDR3 for beta chain variable domain of TCR clone 256920 (TRBV4-1, TRBJ2-6)
CASSQDGGPGANVLTF

SEQ ID NO: 513841 - protein, 13 aa, Homo sapiens
  CDR3 for alpha chain variable domain of TCR clone 256921 (TRAV12-3, TRAJ7)
CAMTPYGNNRPAF

SEQ ID NO: 513842 - protein, 12 aa, Homo sapiens
  CDR3 for beta chain variable domain of TCR clone 256921 (TRBV5-5, TRBJ2-5)
CASSYFGETQYF

SEQ ID NO: 513843 - protein, 10 aa, Homo sapiens
  CDR3 for alpha chain variable domain of TCR clone 256922 (TRAV26-2, TRAJ20)
CILGGYKLSF

SEQ ID NO: 513844 - protein, 16 aa, Homo sapiens
  CDR3 for beta chain variable domain of TCR clone 256922 (TRBV2, TRBJ2-1)
CASSVGGSLSYNEQFF

SEQ ID NO: 513845 - protein, 11 aa, Homo sapiens
  CDR3 for alpha chain variable domain of TCR clone 256923 (TRAV17, TRAJ31)
CATSNTARLMF

SEQ ID NO: 513846 - protein, 16 aa, Homo sapiens
  CDR3 for beta chain variable domain of TCR clone 256923 (TRBV7-8, TRBJ2-4)
CASSAERTLAKNIQYF

SEQ ID NO: 513847 - protein, 14 aa, Homo sapiens
  CDR3 for alpha chain variable domain of TCR clone 256924 (TRAV12-2, TRAJ45)
CAVYSGGGADRLTF

SEQ ID NO: 513848 - protein, 14 aa, Homo sapiens
  CDR3 for beta chain variable domain of TCR clone 256924 (TRBV6-5, TRBJ1-2)
CASTRGGGSDGYTF

SEQ ID NO: 513849 - protein, 15 aa, Homo sapiens
  CDR3 for alpha chain variable domain of TCR clone 256925 (TRAV8-4, TRAJ3)
CAVTGENLVQQCFQH

SEQ ID NO: 513850 - protein, 16 aa, Homo sapiens
  CDR3 for beta chain variable domain of TCR clone 256925 (TRBV4-2, TRBJ1-1)
CASSQAGFGMNTEAFF

SEQ ID NO: 513851 - protein, 13 aa, Homo sapiens
  CDR3 for alpha chain variable domain of TCR clone 256926 (TRAV2, TRAJ40)
CAVVTSGTYKYIF

SEQ ID NO: 513852 - protein, 15 aa, Homo sapiens
  CDR3 for beta chain variable domain of TCR clone 256926 (TRBV7-2, TRBJ1-5)
CASSFSAGINQPQHF

SEQ ID NO: 513853 - protein, 18 aa, Homo sapiens
  CDR3 for alpha chain variable domain of TCR clone 256927 (TRAV21, TRAJ52)
CAVRPSPAGGISYGKLTF

SEQ ID NO: 513854 - protein, 11 aa, Homo sapiens
  CDR3 for beta chain variable domain of TCR clone 256927 (TRBV7-9, TRBJ2-7)
CASSLNYEQYF

SEQ ID NO: 513855 - protein, 13 aa, Homo sapiens
  CDR3 for alpha chain variable domain of TCR clone 256928 (TRAV27, TRAJ41)
CAGEGNSGYALNF

SEQ ID NO: 513856 - protein, 14 aa, Homo sapiens
  CDR3 for beta chain variable domain of TCR clone 256928 (TRBV25-1, TRBJ1-1)
CASTHLGGYTEAFF

SEQ ID NO: 513857 - protein, 15 aa, Homo sapiens
  CDR3 for alpha chain variable domain of TCR clone 256929 (TRAV3, TRAJ4)
CAVRDGTGGYNKMIF

SEQ ID NO: 513858 - protein, 15 aa, Homo sapiens
  CDR3 for beta chain variable domain of TCR clone 256929 (TRBV27, TRBJ2-7)
CASSPDQGRLYEQYF

SEQ ID NO: 513859 - protein, 14 aa, Homo sapiens
  CDR3 for alpha chain variable domain of TCR clone 256930 (TRAV1-2, TRAJ16)
CAVNRFSDVQKLLF

SEQ ID NO: 513860 - protein, 16 aa, Homo sapiens
  CDR3 for beta chain variable domain of TCR clone 256930 (TRBV11-2, TRBJ1-2)
CASSLDTGGADYGYTF

SEQ ID NO: 513861 - protein, 12 aa, Homo sapiens
  CDR3 for alpha chain variable domain of TCR clone 256931 (TRAV1-2, TRAJ29)
CAVPSVNTPLVF

SEQ ID NO: 513862 - protein, 12 aa, Homo sapiens
  CDR3 for beta chain variable domain of TCR clone 256931 (TRBV7-9, TRBJ2-7)
CASSFGSYEQYF

SEQ ID NO: 513863 - protein, 17 aa, Homo sapiens
  CDR3 for alpha chain variable domain of TCR clone 256932 (TRAV12-2, TRAJ48)
CAVNEGGSNFGNEKLTF

SEQ ID NO: 513864 - protein, 14 aa, Homo sapiens
  CDR3 for beta chain variable domain of TCR clone 256932 (TRBV7-2, TRBJ2-7)
CASRSQGAAYEQYF

SEQ ID NO: 513865 - protein, 14 aa, Homo sapiens
  CDR3 for alpha chain variable domain of TCR clone 256933 (TRAV12-2, TRAJ44)
CAVNPAGTASKLTF

SEQ ID NO: 513866 - protein, 16 aa, Homo sapiens
  CDR3 for beta chain variable domain of TCR clone 256933 (TRBV2, TRBJ2-6)
CDSSEVGGAGANVLTF

SEQ ID NO: 513867 - protein, 12 aa, Homo sapiens
  CDR3 for alpha chain variable domain of TCR clone 256934 (TRAV1-1, TRAJ8)
CAGGTGFQKLVF

SEQ ID NO: 513868 - protein, 13 aa, Homo sapiens
  CDR3 for beta chain variable domain of TCR clone 256934 (TRBV12-4, TRBJ2-5)
CASSPGTEETQYF

SEQ ID NO: 513869 - protein, 13 aa, Homo sapiens
  CDR3 for alpha chain variable domain of TCR clone 256935 (TRAV21, TRAJ27)
CAARPGNAGKSIF

SEQ ID NO: 513870 - protein, 16 aa, Homo sapiens
  CDR3 for beta chain variable domain of TCR clone 256935 (TRBV20-1, TRBJ1-2)
CSASMGQGVANYGYTF

SEQ ID NO: 513871 - protein, 12 aa, Homo sapiens
  CDR3 for alpha chain variable domain of TCR clone 256936 (TRAV17, TRAJ39)
CATGAAGNMLTF

SEQ ID NO: 513872 - protein, 13 aa, Homo sapiens
  CDR3 for beta chain variable domain of TCR clone 256936 (TRBV7-7, TRBJ2-2)
CASSLTSAGELFF

SEQ ID NO: 513873 - protein, 15 aa, Homo sapiens
  CDR3 for alpha chain variable domain of TCR clone 256937 (TRAV3, TRAJ47)
CPVRDIGEYGNKLVF

SEQ ID NO: 513874 - protein, 14 aa, Homo sapiens
  CDR3 for beta chain variable domain of TCR clone 256937 (TRBV13, TRBJ2-5)
CASSLERVGETQYF

SEQ ID NO: 513875 - protein, 14 aa, Homo sapiens
  CDR3 for alpha chain variable domain of TCR clone 256938 (TRAV13-1, TRAJ44)
CAAKATGTASKLTF

SEQ ID NO: 513876 - protein, 11 aa, Homo sapiens
  CDR3 for beta chain variable domain of TCR clone 256938 (TRBV25-1, TRBJ2-1)
CASSEFKWQFF

SEQ ID NO: 513877 - protein, 13 aa, Homo sapiens
  CDR3 for alpha chain variable domain of TCR clone 256939 (TRAV13-1, TRAJ37)
CAAVSGNTGKLIF

SEQ ID NO: 513878 - protein, 16 aa, Homo sapiens
  CDR3 for beta chain variable domain of TCR clone 256939 (TRBV7-3, TRBJ2-2)
CASSLKRGTLSGELFF

SEQ ID NO: 513879 - protein, 16 aa, Homo sapiens
  CDR3 for alpha chain variable domain of TCR clone 256940 (TRAV21, TRAJ17)
CAGRPGEEAAGNKLTF

SEQ ID NO: 513880 - protein, 16 aa, Homo sapiens
  CDR3 for beta chain variable domain of TCR clone 256940 (TRBV2, TRBJ2-7)
CASSEPWTGPSYEQYF

SEQ ID NO: 513881 - protein, 15 aa, Homo sapiens
  CDR3 for alpha chain variable domain of TCR clone 256941 (TRAV27, TRAJ38)
CAARRNAGNNRKLIW

SEQ ID NO: 513882 - protein, 13 aa, Homo sapiens
  CDR3 for beta chain variable domain of TCR clone 256941 (TRBV12-5, TRBJ2-3)
CARSDRQSDTQYF

SEQ ID NO: 513883 - protein, 15 aa, Homo sapiens
  CDR3 for alpha chain variable domain of TCR clone 256942 (TRAV13-1, TRAJ17)
CAASIERAAGNKLTF

SEQ ID NO: 513884 - protein, 15 aa, Homo sapiens
  CDR3 for beta chain variable domain of TCR clone 256942 (TRBV6-3, TRBJ2-7)
CDSSSPGTVFYEQYF

SEQ ID NO: 513885 - protein, 15 aa, Homo sapiens
  CDR3 for alpha chain variable domain of TCR clone 256943 (TRAV19, TRAJ37)
CSPVGGSSNTGKLIF

SEQ ID NO: 513886 - protein, 15 aa, Homo sapiens
  CDR3 for beta chain variable domain of TCR clone 256943 (TRBV19, TRBJ1-1)
CASSGNSHPNTEAFF

SEQ ID NO: 513887 - protein, 17 aa, Homo sapiens
  CDR3 for alpha chain variable domain of TCR clone 256944 (TRAV3, TRAJ42)
CAVRDRDYGGSQGNLIF

SEQ ID NO: 513888 - protein, 15 aa, Homo sapiens
  CDR3 for beta chain variable domain of TCR clone 256944 (TRBV19, TRBJ2-7)
CASSPAGSGEALRYF

SEQ ID NO: 513889 - protein, 14 aa, Homo sapiens
  CDR3 for alpha chain variable domain of TCR clone 256945 (TRAV26-1, TRAJ45)
CIEVTGGSADGLTF

SEQ ID NO: 513890 - protein, 13 aa, Homo sapiens
  CDR3 for beta chain variable domain of TCR clone 256945 (TRBV7-6, TRBJ1-2)
CASSLVADYGYTF

SEQ ID NO: 513891 - protein, 15 aa, Homo sapiens
  CDR3 for alpha chain variable domain of TCR clone 256946 (TRAV17, TRAJ23)
CATDAEDNQGGKLIF

SEQ ID NO: 513892 - protein, 13 aa, Homo sapiens
  CDR3 for beta chain variable domain of TCR clone 256946 (TRBV10-3, TRBJ2-7)
CASKLAVNYEQYF

SEQ ID NO: 513893 - protein, 11 aa, Homo sapiens
  CDR3 for alpha chain variable domain of TCR clone 256947 (TRAV2, TRAJ23)
CAVETRGKLIF

SEQ ID NO: 513894 - protein, 15 aa, Homo sapiens
  CDR3 for beta chain variable domain of TCR clone 256947 (TRBV10-1, TRBJ2-3)
CASSATSGGFDTQYF

SEQ ID NO: 513895 - protein, 12 aa, Homo sapiens
  CDR3 for alpha chain variable domain of TCR clone 256948 (TRAV26-1, TRAJ43)
FIVRGNNNDMRF

SEQ ID NO: 513896 - protein, 13 aa, Homo sapiens
  CDR3 for beta chain variable domain of TCR clone 256948 (TRBV20-1, TRBJ2-3)
CSAIYPGADTQYF

SEQ ID NO: 513897 - protein, 10 aa, Homo sapiens
  CDR3 for alpha chain variable domain of TCR clone 256949 (TRAV8-4, TRAJ43)
CAVSADDMRF

SEQ ID NO: 513898 - protein, 16 aa, Homo sapiens
  CDR3 for beta chain variable domain of TCR clone 256949 (TRBV12-5, TRBJ2-5)
CASGPRASGNQETQYF

SEQ ID NO: 513899 - protein, 14 aa, Homo sapiens
  CDR3 for alpha chain variable domain of TCR clone 256950 (TRAV38-1, TRAJ45)
CAYYSGGGADGLTF

SEQ ID NO: 513900 - protein, 14 aa, Homo sapiens
  CDR3 for beta chain variable domain of TCR clone 256950 (TRBV25-1, TRBJ1-1)
CAGTHLGGNTEAFF

SEQ ID NO: 513901 - protein, 13 aa, Homo sapiens
  CDR3 for alpha chain variable domain of TCR clone 256951 (TRAV13-1, TRAJ39)
CSKYSNAGNMLTF

SEQ ID NO: 513902 - protein, 16 aa, Homo sapiens
  CDR3 for beta chain variable domain of TCR clone 256951 (TRBV20-1, TRBJ1-4)
CSAPGQGLLTNETLFF

SEQ ID NO: 513903 - protein, 12 aa, Homo sapiens
  CDR3 for alpha chain variable domain of TCR clone 256952 (TRAV4, TRAJ26)
CLVGDYGQNFVF

SEQ ID NO: 513904 - protein, 14 aa, Homo sapiens
  CDR3 for beta chain variable domain of TCR clone 256952 (TRBV6-1, TRBJ1-3)
CASVQGGGGNTMYF

SEQ ID NO: 513905 - protein, 14 aa, Homo sapiens
  CDR3 for alpha chain variable domain of TCR clone 256953 (TRAV13-1, TRAJ26)
CAASRGNYGQNFVL

SEQ ID NO: 513906 - protein, 14 aa, Homo sapiens
  CDR3 for beta chain variable domain of TCR clone 256953 (TRBV2, TRBJ2-7)
CASSLTSGGYEQYF

SEQ ID NO: 513907 - protein, 13 aa, Homo sapiens
  CDR3 for alpha chain variable domain of TCR clone 256954 (TRAV27, TRAJ6)
CAGGPRGSYIPTS

SEQ ID NO: 513908 - protein, 14 aa, Homo sapiens
  CDR3 for beta chain variable domain of TCR clone 256954 (TRBV6-3, TRBJ1-1)
CASSYQRRDTEAFF

SEQ ID NO: 513909 - protein, 11 aa, Homo sapiens
  CDR3 for alpha chain variable domain of TCR clone 256955 (TRAV2, TRAJ21)
CAVFNFNKFYF

SEQ ID NO: 513910 - protein, 16 aa, Homo sapiens
  CDR3 for beta chain variable domain of TCR clone 256955 (TRBV7-9, TRBJ2-1)
CASSDVAGGSYNEQFF

SEQ ID NO: 513911 - protein, 14 aa, Homo sapiens
  CDR3 for alpha chain variable domain of TCR clone 256956 (TRAV17, TRAJ15)
FATGPNQAGTALIL

SEQ ID NO: 513912 - protein, 15 aa, Homo sapiens
  CDR3 for beta chain variable domain of TCR clone 256956 (TRBV11-2, TRBJ2-2)
CASSSDRVNAGELFF

SEQ ID NO: 513913 - protein, 16 aa, Homo sapiens
  CDR3 for alpha chain variable domain of TCR clone 256957 (TRAV3, TRAJ37)
CAVRGKGSGNTGKLIF

SEQ ID NO: 513914 - protein, 16 aa, Homo sapiens
  CDR3 for beta chain variable domain of TCR clone 256957 (TRBV15, TRBJ2-7)
CATSRDRGRRRGEQYF

SEQ ID NO: 513915 - protein, 13 aa, Homo sapiens
  CDR3 for alpha chain variable domain of TCR clone 256958 (TRAV29/DV5, TRAJ31)
CAASRNNNARLMF

SEQ ID NO: 513916 - protein, 15 aa, Homo sapiens
  CDR3 for beta chain variable domain of TCR clone 256958 (TRBV7-8, TRBJ1-5)
CASSLEGSGNQPQHF

SEQ ID NO: 513917 - protein, 13 aa, Homo sapiens
  CDR3 for alpha chain variable domain of TCR clone 256959 (TRAV26-2, TRAJ37)
CIRGSSNTGKLIF

SEQ ID NO: 513918 - protein, 16 aa, Homo sapiens
  CDR3 for beta chain variable domain of TCR clone 256959 (TRBV7-2, TRBJ2-5)
CASSPGGARRGETQYC

SEQ ID NO: 513919 - protein, 14 aa, Homo sapiens
  CDR3 for alpha chain variable domain of TCR clone 256960 (TRAV12-2, TRAJ13)
CAVNKTGGYQKVTF

SEQ ID NO: 513920 - protein, 15 aa, Homo sapiens
  CDR3 for beta chain variable domain of TCR clone 256960 (TRBV20-1, TRBJ2-1)
CSARGIGGTYNEQFF

SEQ ID NO: 513921 - protein, 15 aa, Homo sapiens
  CDR3 for alpha chain variable domain of TCR clone 256961 (TRAV12-2, TRAJ33)
CAVRAPMDSNYQLIW

SEQ ID NO: 513922 - protein, 16 aa, Homo sapiens
  CDR3 for beta chain variable domain of TCR clone 256961 (TRBV20-1, TRBJ2-4)
CSARKDRGLYKNIQYF

SEQ ID NO: 513923 - protein, 17 aa, Homo sapiens
  CDR3 for alpha chain variable domain of TCR clone 256962 (TRAV26-1, TRAJ53)
CFVRVDDSGGSNYKLTF

SEQ ID NO: 513924 - protein, 15 aa, Homo sapiens
  CDR3 for beta chain variable domain of TCR clone 256962 (TRBV20-1, TRBJ2-7)
CSARVPAAYFYEQYF

SEQ ID NO: 513925 - protein, 13 aa, Homo sapiens
  CDR3 for alpha chain variable domain of TCR clone 256963 (TRAV21, TRAJ27)
CAARLGNAGKSTF

SEQ ID NO: 513926 - protein, 15 aa, Homo sapiens
  CDR3 for beta chain variable domain of TCR clone 256963 (TRBV11-3, TRBJ2-7)
CASSPGPASSYEQYF

SEQ ID NO: 513927 - protein, 17 aa, Homo sapiens
  CDR3 for alpha chain variable domain of TCR clone 256964 (TRAV3, TRAJ6)
CAVRDGPRAGGSYIPTF

SEQ ID NO: 513928 - protein, 16 aa, Homo sapiens
  CDR3 for beta chain variable domain of TCR clone 256964 (TRBV12-4, TRBJ2-7)
CASSWIGGTGTYEQYF

SEQ ID NO: 513929 - protein, 12 aa, Homo sapiens
  CDR3 for alpha chain variable domain of TCR clone 256965 (TRAV21, TRAJ33)
CAKMDSNYQLIW

SEQ ID NO: 513930 - protein, 14 aa, Homo sapiens
  CDR3 for beta chain variable domain of TCR clone 256965 (TRBV12-5, TRBJ2-5)
CASGSRTQQETQYF

SEQ ID NO: 513931 - protein, 14 aa, Homo sapiens
  CDR3 for alpha chain variable domain of TCR clone 256966 (TRAV12-3, TRAJ10)
SHLPLTGGGNKLTF

SEQ ID NO: 513932 - protein, 14 aa, Homo sapiens
  CDR3 for beta chain variable domain of TCR clone 256966 (TRBV6-3, TRBJ2-5)
CASSYSLREKTQYF

SEQ ID NO: 513933 - protein, 13 aa, Homo sapiens
  CDR3 for alpha chain variable domain of TCR clone 256967 (TRAV13-1, TRAJ13)
CAASKGGYQKVTF

SEQ ID NO: 513934 - protein, 14 aa, Homo sapiens
  CDR3 for beta chain variable domain of TCR clone 256967 (TRBV18, TRBJ1-2)
CASSLNRENYGYTF

SEQ ID NO: 513935 - protein, 18 aa, Homo sapiens
  CDR3 for alpha chain variable domain of TCR clone 256968 (TRAV13-2, TRAJ20)
CSYSTWGLSCLLVHKLSF

SEQ ID NO: 513936 - protein, 13 aa, Homo sapiens
  CDR3 for beta chain variable domain of TCR clone 256968 (TRBV5-1, TRBJ2-1)
CASRPFGYNEQFF

SEQ ID NO: 513937 - protein, 15 aa, Homo sapiens
  CDR3 for alpha chain variable domain of TCR clone 256969 (TRAV12-2, TRAJ53)
CAVNTGGGSNDKLTF

SEQ ID NO: 513938 - protein, 15 aa, Homo sapiens
  CDR3 for beta chain variable domain of TCR clone 256969 (TRBV5-1, TRBJ2-5)
CASSLGLGEIKTQYF

SEQ ID NO: 513939 - protein, 15 aa, Homo sapiens
  CDR3 for alpha chain variable domain of TCR clone 256970 (TRAV38-1, TRAJ57)
CAFWDSQGGSEKLVF

SEQ ID NO: 513940 - protein, 16 aa, Homo sapiens
  CDR3 for beta chain variable domain of TCR clone 256970 (TRBV10-3, TRBJ2-1)
CAIRGGGRGDYNEQFF

SEQ ID NO: 513941 - protein, 14 aa, Homo sapiens
  CDR3 for alpha chain variable domain of TCR clone 256971 (TRAV29/DV5, TRAJ36)
CAARRKTGANNLFF

SEQ ID NO: 513942 - protein, 11 aa, Homo sapiens
  CDR3 for beta chain variable domain of TCR clone 256971 (TRBV7-9, TRBJ2-3)
CASSPTDTQYF

SEQ ID NO: 513943 - protein, 15 aa, Homo sapiens
  CDR3 for alpha chain variable domain of TCR clone 256972 (TRAV12-3, TRAJ5)
CAMSGLGTGRRALTL

SEQ ID NO: 513944 - protein, 15 aa, Homo sapiens
  CDR3 for beta chain variable domain of TCR clone 256972 (TRBV19, TRBJ1-1)
CASTSGQIQNTEAFF

SEQ ID NO: 513945 - protein, 15 aa, Homo sapiens
  CDR3 for alpha chain variable domain of TCR clone 256973 (TRAV12-1, TRAJ44)
CVVDEYTGTASKLTF

SEQ ID NO: 513946 - protein, 14 aa, Homo sapiens
  CDR3 for beta chain variable domain of TCR clone 256973 (TRBV25-1, TRBJ1-1)
CASTHLGGNTEAFF

SEQ ID NO: 513947 - protein, 12 aa, Homo sapiens
  CDR3 for alpha chain variable domain of TCR clone 256974 (TRAV13-2, TRAJ8)
CAPWLGFQKLVF

SEQ ID NO: 513948 - protein, 17 aa, Homo sapiens
  CDR3 for beta chain variable domain of TCR clone 256974 (TRBV18, TRBJ1-5)
CASSPTMGQGTNQPQHF

SEQ ID NO: 513949 - protein, 20 aa, Homo sapiens
  CDR3 for alpha chain variable domain of TCR clone 256975 (TRAV26-1, TRAJ42)
CCVLLHRQTYYGGIQGNLIF

SEQ ID NO: 513950 - protein, 15 aa, Homo sapiens
  CDR3 for beta chain variable domain of TCR clone 256975 (TRBV7-3, TRBJ2-2)
CQQLKAGDLVGELFF

SEQ ID NO: 513951 - protein, 14 aa, Homo sapiens
  CDR3 for alpha chain variable domain of TCR clone 256976 (TRAV12-2, TRAJ17)
CAVNIKAARNKLTF

SEQ ID NO: 513952 - protein, 13 aa, Homo sapiens
  CDR3 for beta chain variable domain of TCR clone 256976 (TRBV4-1, TRBJ2-2)
CASSQENTGELFF

SEQ ID NO: 513953 - protein, 13 aa, Homo sapiens
  CDR3 for alpha chain variable domain of TCR clone 256977 (TRAV20, TRAJ37)
CAGCSSNTGQLIF

SEQ ID NO: 513954 - protein, 11 aa, Homo sapiens
  CDR3 for beta chain variable domain of TCR clone 256977 (TRBV12-4, TRBJ2-3)
WASTATDTQYF

SEQ ID NO: 513955 - protein, 14 aa, Homo sapiens
  CDR3 for alpha chain variable domain of TCR clone 256978 (TRAV1-2, TRAJ16)
CAVNRFSDGQKLLF

SEQ ID NO: 513956 - protein, 14 aa, Homo sapiens
  CDR3 for beta chain variable domain of TCR clone 256978 (TRBV7-2, TRBJ2-5)
CASNPLGQSETQYF

SEQ ID NO: 513957 - protein, 13 aa, Homo sapiens
  CDR3 for alpha chain variable domain of TCR clone 256979 (TRAV8-3, TRAJ48)
CAVVPFGNEKLTS

SEQ ID NO: 513958 - protein, 15 aa, Homo sapiens
  CDR3 for beta chain variable domain of TCR clone 256979 (TRBV11-2, TRBJ2-1)
CASSSPATRYNEQFF

SEQ ID NO: 513959 - protein, 12 aa, Homo sapiens
  CDR3 for alpha chain variable domain of TCR clone 256980 (TRAV12-3, TRAJ17)
CAMTLTGNKLTF

SEQ ID NO: 513960 - protein, 15 aa, Homo sapiens
  CDR3 for beta chain variable domain of TCR clone 256980 (TRBV20-1, TRBJ2-7)
CSTRDWVSGMDEQYF

SEQ ID NO: 513961 - protein, 16 aa, Homo sapiens
  CDR3 for alpha chain variable domain of TCR clone 256981 (TRAV12-1, TRAJ52)
RVVPPAGGTSYGKLTF

SEQ ID NO: 513962 - protein, 13 aa, Homo sapiens
  CDR3 for beta chain variable domain of TCR clone 256981 (TRBV9, TRBJ2-1)
CASSPSGGSEQFF

SEQ ID NO: 513963 - protein, 14 aa, Homo sapiens
  CDR3 for alpha chain variable domain of TCR clone 256982 (TRAV12-2, TRAJ11)
CAVEGGSGYSTLTF

SEQ ID NO: 513964 - protein, 16 aa, Homo sapiens
  CDR3 for beta chain variable domain of TCR clone 256982 (TRBV6-1, TRBJ1-2)
CASSGAWEGRSHGYTF

SEQ ID NO: 513965 - protein, 19 aa, Homo sapiens
  CDR3 for alpha chain variable domain of TCR clone 256983 (TRAV1-1, TRAJ13)
CLLLLRCEGESGGYQKVTF

SEQ ID NO: 513966 - protein, 19 aa, Homo sapiens
  CDR3 for beta chain variable domain of TCR clone 256983 (TRBV14, TRBJ2-1)
CASGRDQLWEAPEYNEQFF

SEQ ID NO: 513967 - protein, 15 aa, Homo sapiens
  CDR3 for alpha chain variable domain of TCR clone 256984 (TRAV21, TRAJ53)
CATLNSGCSNYKLTF

SEQ ID NO: 513968 - protein, 15 aa, Homo sapiens
  CDR3 for beta chain variable domain of TCR clone 256984 (TRBV7-2, TRBJ2-1)
CASSSGLAGGNEQFF

SEQ ID NO: 513969 - protein, 14 aa, Homo sapiens
  CDR3 for alpha chain variable domain of TCR clone 256985 (TRAV1-2, TRAJ16)
CAVNRFSDGQKLLC

SEQ ID NO: 513970 - protein, 12 aa, Homo sapiens
  CDR3 for beta chain variable domain of TCR clone 256985 (TRBV28, TRBJ2-6)
CAIQAGANDLTF

SEQ ID NO: 513971 - protein, 13 aa, Homo sapiens
  CDR3 for alpha chain variable domain of TCR clone 256986 (TRAV3, TRAJ21)
CAVREPDFNKFYF

SEQ ID NO: 513972 - protein, 13 aa, Homo sapiens
  CDR3 for beta chain variable domain of TCR clone 256986 (TRBV9, TRBJ2-1)
CASSLSGGNEQFF

SEQ ID NO: 513973 - protein, 13 aa, Homo sapiens
  CDR3 for alpha chain variable domain of TCR clone 256987 (TRAV27, TRAJ56)
CAGKPGANSKLTF

SEQ ID NO: 513974 - protein, 18 aa, Homo sapiens
  CDR3 for beta chain variable domain of TCR clone 256987 (TRBV11-2, TRBJ2-3)
CASSLGGASRGARNTQYF

SEQ ID NO: 513975 - protein, 15 aa, Homo sapiens
  CDR3 for alpha chain variable domain of TCR clone 256988 (TRAV8-3, TRAJ45)
CASSYSGGGADGLTF

SEQ ID NO: 513976 - protein, 15 aa, Homo sapiens
  CDR3 for beta chain variable domain of TCR clone 256988 (TRBV10-3, TRBJ1-1)
CAISDLGRANTEAFF

SEQ ID NO: 513977 - protein, 15 aa, Homo sapiens
  CDR3 for alpha chain variable domain of TCR clone 256989 (TRAV12-1, TRAJ4)
CVVNPFSGGHNKLIF

SEQ ID NO: 513978 - protein, 16 aa, Homo sapiens
  CDR3 for beta chain variable domain of TCR clone 256989 (TRBV5-1, TRBJ1-1)
CASSKTGTEVGTEAFF

SEQ ID NO: 513979 - protein, 12 aa, Homo sapiens
  CDR3 for alpha chain variable domain of TCR clone 256990 (TRAV16, TRAJ21)
CALLGNFNRFYF

SEQ ID NO: 513980 - protein, 13 aa, Homo sapiens
  CDR3 for beta chain variable domain of TCR clone 256990 (TRBV28, TRBJ2-7)
CASKAGGVYEQYF

SEQ ID NO: 513981 - protein, 12 aa, Homo sapiens
  CDR3 for alpha chain variable domain of TCR clone 256991 (TRAV12-3, TRAJ17)
CAMTLTGNKLTF

SEQ ID NO: 513982 - protein, 17 aa, Homo sapiens
  CDR3 for beta chain variable domain of TCR clone 256991 (TRBV7-9, TRBJ2-3)
CASSLEEAGAYPDTQYF

SEQ ID NO: 513983 - protein, 15 aa, Homo sapiens
  CDR3 for alpha chain variable domain of TCR clone 256992 (TRAV3, TRAJ22)
CAVRDRRGSARQLTF

SEQ ID NO: 513984 - protein, 13 aa, Homo sapiens
  CDR3 for beta chain variable domain of TCR clone 256992 (TRBV20-1, TRBJ2-2)
CSASAAGTGELFF

SEQ ID NO: 513985 - protein, 18 aa, Homo sapiens
  CDR3 for alpha chain variable domain of TCR clone 256993 (TRAV21, TRAJ52)
CAVRPSPAGGTSYGKLTF

SEQ ID NO: 513986 - protein, 16 aa, Homo sapiens
  CDR3 for beta chain variable domain of TCR clone 256993 (TRBV13, TRBJ2-3)
CQRPRRVAGGRNTQYF

SEQ ID NO: 513987 - protein, 17 aa, Homo sapiens
  CDR3 for alpha chain variable domain of TCR clone 256994 (TRAV26-2, TRAJ42)
CILREVGYGGSQGNIIF

SEQ ID NO: 513988 - protein, 16 aa, Homo sapiens
  CDR3 for beta chain variable domain of TCR clone 256994 (TRBV12-4, TRBJ2-7)
CASSLIGGTGTYEQYF

SEQ ID NO: 513989 - protein, 13 aa, Homo sapiens
  CDR3 for alpha chain variable domain of TCR clone 256995 (TRAV1-1, TRAJ23)
CAVVANKGGKLIF

SEQ ID NO: 513990 - protein, 12 aa, Homo sapiens
  CDR3 for beta chain variable domain of TCR clone 256995 (TRBV5-7, TRBJ1-1)
CASSLGRGKAFF

SEQ ID NO: 513991 - protein, 15 aa, Homo sapiens
  CDR3 for alpha chain variable domain of TCR clone 256996 (TRAV23/DV6, TRAJ13)
CAAWPGGGGYQQVTF

SEQ ID NO: 513992 - protein, 15 aa, Homo sapiens
  CDR3 for beta chain variable domain of TCR clone 256996 (TRBV20-1, TRBJ1-6)
CSARAASSYNSPLHF

SEQ ID NO: 513993 - protein, 19 aa, Homo sapiens
  CDR3 for alpha chain variable domain of TCR clone 256997 (TRAV3, TRAJ6)
CAVRDRNPSRSGGSYIPTF

SEQ ID NO: 513994 - protein, 14 aa, Homo sapiens
  CDR3 for beta chain variable domain of TCR clone 256997 (TRBV18, TRBJ2-7)
CQLSDLMDSYEQYF

SEQ ID NO: 513995 - protein, 19 aa, Homo sapiens
  CDR3 for alpha chain variable domain of TCR clone 256998 (TRAV2, TRAJ20)
ILQVREADAAVYRDCKLSF

SEQ ID NO: 513996 - protein, 15 aa, Homo sapiens
  CDR3 for beta chain variable domain of TCR clone 256998 (TRBV10-2, TRBJ2-5)
CASRGSGGPQETQYF

SEQ ID NO: 513997 - protein, 15 aa, Homo sapiens
  CDR3 for alpha chain variable domain of TCR clone 256999 (TRAV17, TRAJ35)
CATAFVIGFGNVLHC

SEQ ID NO: 513998 - protein, 15 aa, Homo sapiens
  CDR3 for beta chain variable domain of TCR clone 256999 (TRBV7-9, TRBJ2-7)
CANSLALAEAYEQYF

SEQ ID NO: 513999 - protein, 15 aa, Homo sapiens
  CDR3 for alpha chain variable domain of TCR clone 257000 (TRAV27, TRAJ17)
CRSTMIKAAGNKLTL

SEQ ID NO: 514000 - protein, 13 aa, Homo sapiens
  CDR3 for beta chain variable domain of TCR clone 257000 (TRBV18, TRBJ2-7)
CASQSGGGYEQYF

SEQ ID NO: 514001 - protein, 13 aa, Homo sapiens
  CDR3 for alpha chain variable domain of TCR clone 257001 (TRAV2, TRAJ15)
CAVASQAGTALIF

SEQ ID NO: 514002 - protein, 14 aa, Homo sapiens
  CDR3 for beta chain variable domain of TCR clone 257001 (TRBV12-4, TRBJ2-7)
CASTFGLSTYEQYF

SEQ ID NO: 514003 - protein, 14 aa, Homo sapiens
  CDR3 for alpha chain variable domain of TCR clone 257002 (TRAV1-1, TRAJ28)
CAAPSGAGSYQLTF

SEQ ID NO: 514004 - protein, 16 aa, Homo sapiens
  CDR3 for beta chain variable domain of TCR clone 257002 (TRBV7-3, TRBJ2-2)
CASSLKRGTLSGELFF

SEQ ID NO: 514005 - protein, 14 aa, Homo sapiens
  CDR3 for alpha chain variable domain of TCR clone 257003 (TRAV35, TRAJ50)
CAGHRKTSDDKVIF

SEQ ID NO: 514006 - protein, 17 aa, Homo sapiens
  CDR3 for beta chain variable domain of TCR clone 257003 (TRBV7-8, TRBJ2-6)
CASSAGTGGAGANVLTF

SEQ ID NO: 514007 - protein, 18 aa, Homo sapiens
  CDR3 for alpha chain variable domain of TCR clone 257004 (TRAV21, TRAJ52)
CAVRPSPAGGTSYGNLTF

SEQ ID NO: 514008 - protein, 11 aa, Homo sapiens
  CDR3 for beta chain variable domain of TCR clone 257004 (TRBV11-2, TRBJ2-2)
CASSLPGELFF

SEQ ID NO: 514009 - protein, 14 aa, Homo sapiens
  CDR3 for alpha chain variable domain of TCR clone 257005 (TRAV12-1, TRAJ43)
CVVNGRSNNNDMRF

SEQ ID NO: 514010 - protein, 13 aa, Homo sapiens
  CDR3 for beta chain variable domain of TCR clone 257005 (TRBV10-3, TRBJ2-7)
CASKLAGNYEQYF

SEQ ID NO: 514011 - protein, 15 aa, Homo sapiens
  CDR3 for alpha chain variable domain of TCR clone 257006 (TRAV3, TRAJ20)
CAVRDIKLSDYKLSF

SEQ ID NO: 514012 - protein, 15 aa, Homo sapiens
  CDR3 for beta chain variable domain of TCR clone 257006 (TRBV7-9, TRBJ1-6)
CASSSPGRGTSPLHF

SEQ ID NO: 514013 - protein, 13 aa, Homo sapiens
  CDR3 for alpha chain variable domain of TCR clone 257007 (TRAV12-2, TRAJ52)
CAVSGTSYGKLTF

SEQ ID NO: 514014 - protein, 13 aa, Homo sapiens
  CDR3 for beta chain variable domain of TCR clone 257007 (TRBV7-2, TRBJ2-2)
CASSLAVTGELFF

SEQ ID NO: 514015 - protein, 14 aa, Homo sapiens
  CDR3 for alpha chain variable domain of TCR clone 257008 (TRAV12-2, TRAJ17)
CAVLFKAAGNKLTF

SEQ ID NO: 514016 - protein, 13 aa, Homo sapiens
  CDR3 for beta chain variable domain of TCR clone 257008 (TRBV19, TRBJ1-2)
CAGSQGQVYGYTF

SEQ ID NO: 514017 - protein, 16 aa, Homo sapiens
  CDR3 for alpha chain variable domain of TCR clone 257009 (TRAV3, TRAJ10)
CAVRDMMAGGGNKLTV

SEQ ID NO: 514018 - protein, 15 aa, Homo sapiens
  CDR3 for beta chain variable domain of TCR clone 257009 (TRBV11-3, TRBJ2-7)
CASSPGPASSYEQYF

SEQ ID NO: 514019 - protein, 12 aa, Homo sapiens
  CDR3 for alpha chain variable domain of TCR clone 257010 (TRAV13-1, TRAJ21)
CAAKEGFNKFYF

SEQ ID NO: 514020 - protein, 18 aa, Homo sapiens
  CDR3 for beta chain variable domain of TCR clone 257010 (TRBV20-1, TRBJ2-6)
CSAETTPTHGSGANVMAF

SEQ ID NO: 514021 - protein, 14 aa, Homo sapiens
  CDR3 for alpha chain variable domain of TCR clone 257011 (TRAV13-2, TRAJ43)
CAEIPTYNNNDMRF

SEQ ID NO: 514022 - protein, 15 aa, Homo sapiens
  CDR3 for beta chain variable domain of TCR clone 257011 (TRBV7-9, TRBJ2-2)
CASGPLDIFPGELFF

SEQ ID NO: 514023 - protein, 14 aa, Homo sapiens
  CDR3 for alpha chain variable domain of TCR clone 257012 (TRAV12-2, TRAJ17)
CAALFKAAGNKLTF

SEQ ID NO: 514024 - protein, 14 aa, Homo sapiens
  CDR3 for beta chain variable domain of TCR clone 257012 (TRBV7-2, TRBJ1-2)
CASSQTGSTYGYTF

SEQ ID NO: 514025 - protein, 14 aa, Homo sapiens
  CDR3 for alpha chain variable domain of TCR clone 257013 (TRAV1-2, TRAJ16)
CAVNRISDGQKLLF

SEQ ID NO: 514026 - protein, 17 aa, Homo sapiens
  CDR3 for beta chain variable domain of TCR clone 257013 (TRBV7-3, TRBJ2-3)
RASSLMKRMRGADTQYF

SEQ ID NO: 514027 - protein, 13 aa, Homo sapiens
  CDR3 for alpha chain variable domain of TCR clone 257014 (TRAV21, TRAJ27)
CAARPGNAGKSTF

SEQ ID NO: 514028 - protein, 21 aa, Homo sapiens
  CDR3 for beta chain variable domain of TCR clone 257014 (TRBV7-6, TRBJ2-1)
SGTRPYIAVPAAWGGADEQFF

SEQ ID NO: 514029 - protein, 14 aa, Homo sapiens
  CDR3 for alpha chain variable domain of TCR clone 257015 (TRAV16, TRAJ33)
CALSAMDSNYQLIW

SEQ ID NO: 514030 - protein, 17 aa, Homo sapiens
  CDR3 for beta chain variable domain of TCR clone 257015 (TRBV25-1, TRBJ2-7)
CASSDARVVLSSYEQYF

SEQ ID NO: 514031 - protein, 10 aa, Homo sapiens
  CDR3 for alpha chain variable domain of TCR clone 257016 (TRAV23/DV6, TRAJ23)
CAASMKGKKP

SEQ ID NO: 514032 - protein, 14 aa, Homo sapiens
  CDR3 for beta chain variable domain of TCR clone 257016 (TRBV12-4, TRBJ1-2)
CASSFVGTAYGYTF

SEQ ID NO: 514033 - protein, 11 aa, Homo sapiens
  CDR3 for alpha chain variable domain of TCR clone 257017 (TRAV4, TRAJ31)
CLVGDNASPMF

SEQ ID NO: 514034 - protein, 16 aa, Homo sapiens
  CDR3 for beta chain variable domain of TCR clone 257017 (TRBV7-2, TRBJ2-5)
CASSSKWLSGQETQYF

SEQ ID NO: 514035 - protein, 15 aa, Homo sapiens
  CDR3 for alpha chain variable domain of TCR clone 257018 (TRAV12-1, TRAJ44)
CVVCVNTGTASKLTC

SEQ ID NO: 514036 - protein, 16 aa, Homo sapiens
  CDR3 for beta chain variable domain of TCR clone 257018 (TRBV20-1, TRBJ2-5)
CSTGGTSGGYMETQYF

SEQ ID NO: 514037 - protein, 16 aa, Homo sapiens
  CDR3 for alpha chain variable domain of TCR clone 257019 (TRAV26-1, TRAJ37)
CIVRGDGSGNTGKLIF

SEQ ID NO: 514038 - protein, 15 aa, Homo sapiens
  CDR3 for beta chain variable domain of TCR clone 257019 (TRBV2, TRBJ2-1)
CASSELAGSYNEQFF

SEQ ID NO: 514039 - protein, 14 aa, Homo sapiens
  CDR3 for alpha chain variable domain of TCR clone 257020 (TRAV1-2, TRAJ8)
CAVREDTGFQKLVF

SEQ ID NO: 514040 - protein, 15 aa, Homo sapiens
  CDR3 for beta chain variable domain of TCR clone 257020 (TRBV4-3, TRBJ2-7)
CASSQGGRGIYEQYF

SEQ ID NO: 514041 - protein, 14 aa, Homo sapiens
  CDR3 for alpha chain variable domain of TCR clone 257021 (TRAV12-2, TRAJ4)
CAEDLSGGYNKLIF

SEQ ID NO: 514042 - protein, 13 aa, Homo sapiens
  CDR3 for beta chain variable domain of TCR clone 257021 (TRBV7-9, TRBJ1-2)
CDSSLKQNYGYTF

SEQ ID NO: 514043 - protein, 18 aa, Homo sapiens
  CDR3 for alpha chain variable domain of TCR clone 257022 (TRAV21, TRAJ52)
CAVRPSPAGGTSYGKLTF

SEQ ID NO: 514044 - protein, 13 aa, Homo sapiens
  CDR3 for beta chain variable domain of TCR clone 257022 (TRBV29-1, TRBJ2-2)
CSVYREDTWELFF

SEQ ID NO: 514045 - protein, 14 aa, Homo sapiens
  CDR3 for alpha chain variable domain of TCR clone 257023 (TRAV17, TRAJ22)
CATVLSGYARQLTF

SEQ ID NO: 514046 - protein, 14 aa, Homo sapiens
  CDR3 for beta chain variable domain of TCR clone 257023 (TRBV19, TRBJ2-1)
CASPTFVLSGEQFF

SEQ ID NO: 514047 - protein, 15 aa, Homo sapiens
  CDR3 for alpha chain variable domain of TCR clone 257024 (TRAV27, TRAJ38)
CAGRFNAGNNRKLIW

SEQ ID NO: 514048 - protein, 12 aa, Homo sapiens
  CDR3 for beta chain variable domain of TCR clone 257024 (TRBV20-1, TRBJ2-1)
CSGQYTYNEQFF

SEQ ID NO: 514049 - protein, 14 aa, Homo sapiens
  CDR3 for alpha chain variable domain of TCR clone 257025 (TRAV12-3, TRAJ22)
CAMSLFGSARQLTF

SEQ ID NO: 514050 - protein, 11 aa, Homo sapiens
  CDR3 for beta chain variable domain of TCR clone 257025 (TRBV12-4, TRBJ2-2)
SASSSAGELFF

SEQ ID NO: 514051 - protein, 11 aa, Homo sapiens
  CDR3 for alpha chain variable domain of TCR clone 257026 (TRAV1-2, TRAJ20)
CAVANDYKLSF

SEQ ID NO: 514052 - protein, 16 aa, Homo sapiens
  CDR3 for beta chain variable domain of TCR clone 257026 (TRBV4-3, TRBJ1-6)
CASSQDPGVDNSPLHF

SEQ ID NO: 514053 - protein, 13 aa, Homo sapiens
  CDR3 for alpha chain variable domain of TCR clone 257027 (TRAV36/DV7, TRAJ7)
CAVERYGNNRLAF

SEQ ID NO: 514054 - protein, 13 aa, Homo sapiens
  CDR3 for beta chain variable domain of TCR clone 257027 (TRBV10-3, TRBJ2-7)
CASKLAVNYEQYF

SEQ ID NO: 514055 - protein, 13 aa, Homo sapiens
  CDR3 for alpha chain variable domain of TCR clone 257028 (TRAV36/DV7, TRAJ38)
CVANAGNNRKLLC

SEQ ID NO: 514056 - protein, 14 aa, Homo sapiens
  CDR3 for beta chain variable domain of TCR clone 257028 (TRBV7-2, TRBJ2-7)
CASSLRLEVNEQYF

SEQ ID NO: 514057 - protein, 13 aa, Homo sapiens
  CDR3 for alpha chain variable domain of TCR clone 257029 (TRAV21, TRAJ20)
CAVSRVGDYKLSF

SEQ ID NO: 514058 - protein, 13 aa, Homo sapiens
  CDR3 for beta chain variable domain of TCR clone 257029 (TRBV7-3, TRBJ1-1)
CASSPAGGREAFF

SEQ ID NO: 514059 - protein, 17 aa, Homo sapiens
  CDR3 for alpha chain variable domain of TCR clone 257030 (TRAV21, TRAJ52)
CAVGVNAGGTSYGKLTF

SEQ ID NO: 514060 - protein, 13 aa, Homo sapiens
  CDR3 for beta chain variable domain of TCR clone 257030 (TRBV5-1, TRBJ1-2)
CASSVQGNDGYTF

SEQ ID NO: 514061 - protein, 14 aa, Homo sapiens
  CDR3 for alpha chain variable domain of TCR clone 257031 (TRAV13-1, TRAJ35)
CAASNGGFGHVLHC

SEQ ID NO: 514062 - protein, 13 aa, Homo sapiens
  CDR3 for beta chain variable domain of TCR clone 257031 (TRBV7-3, TRBJ1-1)
CASSQDWGAEAFF

SEQ ID NO: 514063 - protein, 11 aa, Homo sapiens
  CDR3 for alpha chain variable domain of TCR clone 257032 (TRAV3, TRAJ21)
CAVGTLNKFYF

SEQ ID NO: 514064 - protein, 16 aa, Homo sapiens
  CDR3 for beta chain variable domain of TCR clone 257032 (TRBV19, TRBJ2-1)
CASSKAGPGSYNEQFF

SEQ ID NO: 514065 - protein, 14 aa, Homo sapiens
  CDR3 for alpha chain variable domain of TCR clone 257033 (TRAV17, TRAJ6)
CATNPAGGSYIPTF

SEQ ID NO: 514066 - protein, 13 aa, Homo sapiens
  CDR3 for beta chain variable domain of TCR clone 257033 (TRBV7-2, TRBJ2-5)
CASSQTSVETQYF

SEQ ID NO: 514067 - protein, 13 aa, Homo sapiens
  CDR3 for alpha chain variable domain of TCR clone 257034 (TRAV27, TRAJ6)
CAGGTRGSYIPTF

SEQ ID NO: 514068 - protein, 13 aa, Homo sapiens
  CDR3 for beta chain variable domain of TCR clone 257034 (TRBV12-4, TRBJ1-2)
CASSLRQGKGYTF

SEQ ID NO: 514069 - protein, 13 aa, Homo sapiens
  CDR3 for alpha chain variable domain of TCR clone 257035 (TRAV12-1, TRAJ26)
CVVRRNYGQNFVF

SEQ ID NO: 514070 - protein, 15 aa, Homo sapiens
  CDR3 for beta chain variable domain of TCR clone 257035 (TRBV28, TRBJ2-1)
CASSVIAGGRSEQFF

SEQ ID NO: 514071 - protein, 16 aa, Homo sapiens
  CDR3 for alpha chain variable domain of TCR clone 257036 (TRAV21, TRAJ17)
CAVRPGEEAAGNKLTF

SEQ ID NO: 514072 - protein, 11 aa, Homo sapiens
  CDR3 for beta chain variable domain of TCR clone 257036 (TRBV29-1, TRBJ2-5)
CSEDRTGTQYF

SEQ ID NO: 514073 - protein, 14 aa, Homo sapiens
  CDR3 for alpha chain variable domain of TCR clone 257037 (TRAV1-2, TRAJ16)
CAVNRFSDGQKLLF

SEQ ID NO: 514074 - protein, 15 aa, Homo sapiens
  CDR3 for beta chain variable domain of TCR clone 257037 (TRBV12-4, TRBJ1-2)
CASRLGVAGNHGYTF

SEQ ID NO: 514075 - protein, 14 aa, Homo sapiens
  CDR3 for alpha chain variable domain of TCR clone 257038 (TRAV12-2, TRAJ17)
CAVLFKAAGNKLTF

SEQ ID NO: 514076 - protein, 17 aa, Homo sapiens
  CDR3 for beta chain variable domain of TCR clone 257038 (TRBV20-1, TRBJ2-2)
CSASGSGQGGLTGVLFF

SEQ ID NO: 514077 - protein, 11 aa, Homo sapiens
  CDR3 for alpha chain variable domain of TCR clone 257039 (TRAV23/DV6, TRAJ49)
CAVAPVTSSIL

SEQ ID NO: 514078 - protein, 14 aa, Homo sapiens
  CDR3 for beta chain variable domain of TCR clone 257039 (TRBV19, TRBJ2-1)
CASPTFVLSGEQLF

SEQ ID NO: 514079 - protein, 15 aa, Homo sapiens
  CDR3 for alpha chain variable domain of TCR clone 257040 (TRAV17, TRAJ56)
CATDANTGANSKLTS

SEQ ID NO: 514080 - protein, 16 aa, Homo sapiens
  CDR3 for beta chain variable domain of TCR clone 257040 (TRBV7-3, TRBJ2-2)
CASSLKRGTLSGELFF

SEQ ID NO: 514081 - protein, 11 aa, Homo sapiens
  CDR3 for alpha chain variable domain of TCR clone 257041 (TRAV12-1, TRAJ30)
CVVNGQDKIIF

SEQ ID NO: 514082 - protein, 14 aa, Homo sapiens
  CDR3 for beta chain variable domain of TCR clone 257041 (TRBV7-8, TRBJ2-5)
CASSATGGQETQYF

SEQ ID NO: 514083 - protein, 15 aa, Homo sapiens
  CDR3 for alpha chain variable domain of TCR clone 257042 (TRAV12-3, TRAJ22)
CAMRTITGPARQLTF

SEQ ID NO: 514084 - protein, 16 aa, Homo sapiens
  CDR3 for beta chain variable domain of TCR clone 257042 (TRBV20-1, TRBJ2-2)
CSARRPGTGNTGELFF

SEQ ID NO: 514085 - protein, 14 aa, Homo sapiens
  CDR3 for alpha chain variable domain of TCR clone 257043 (TRAV9-2, TRAJ39)
CALYIYNAGTMLTF

SEQ ID NO: 514086 - protein, 14 aa, Homo sapiens
  CDR3 for beta chain variable domain of TCR clone 257043 (TRBV28, TRBJ1-2)
CASRIQGANYGYTF

SEQ ID NO: 514087 - protein, 16 aa, Homo sapiens
  CDR3 for alpha chain variable domain of TCR clone 257044 (TRAV3, TRAJ27)
CAVRDPQGTNAGKSTF

SEQ ID NO: 514088 - protein, 14 aa, Homo sapiens
  CDR3 for beta chain variable domain of TCR clone 257044 (TRBV18, TRBJ2-5)
CASSPGVSQETQYF

SEQ ID NO: 514089 - protein, 12 aa, Homo sapiens
  CDR3 for alpha chain variable domain of TCR clone 257045 (TRAV21, TRAJ17)
CAVIAAGNKLTF

SEQ ID NO: 514090 - protein, 14 aa, Homo sapiens
  CDR3 for beta chain variable domain of TCR clone 257045 (TRBV7-2, TRBJ2-7)
CASSPKTSFYEQYF

SEQ ID NO: 514091 - protein, 15 aa, Homo sapiens
  CDR3 for alpha chain variable domain of TCR clone 257046 (TRAV20, TRAJ22)
CAVGVSSGSARQLTF

SEQ ID NO: 514092 - protein, 14 aa, Homo sapiens
  CDR3 for beta chain variable domain of TCR clone 257046 (TRBV7-3, TRBJ2-2)
CASSSGGYTGELFF

SEQ ID NO: 514093 - protein, 18 aa, Homo sapiens
  CDR3 for alpha chain variable domain of TCR clone 257047 (TRAV21, TRAJ52)
CAVSPSPAGGTSYGKLTF

SEQ ID NO: 514094 - protein, 17 aa, Homo sapiens
  CDR3 for beta chain variable domain of TCR clone 257047 (TRBV13, TRBJ2-3)
CASSLFRVAGGRNTQYF

SEQ ID NO: 514095 - protein, 16 aa, Homo sapiens
  CDR3 for alpha chain variable domain of TCR clone 257048 (TRAV3, TRAJ10)
CAVRDMRAGGGNKLTF

SEQ ID NO: 514096 - protein, 16 aa, Homo sapiens
  CDR3 for beta chain variable domain of TCR clone 257048 (TRBV5-1, TRBJ2-1)
CASSHGLAGPQNEQFF

SEQ ID NO: 514097 - protein, 12 aa, Homo sapiens
  CDR3 for alpha chain variable domain of TCR clone 257049 (TRAV13-1, TRAJ21)
CAAKEGFNKFYF

SEQ ID NO: 514098 - protein, 12 aa, Homo sapiens
  CDR3 for beta chain variable domain of TCR clone 257049 (TRBV11-2, TRBJ2-5)
CASSLGQETQYF

SEQ ID NO: 514099 - protein, 11 aa, Homo sapiens
  CDR3 for alpha chain variable domain of TCR clone 257050 (TRAV3, TRAJ21)
CAVGNFNKFYF

SEQ ID NO: 514100 - protein, 16 aa, Homo sapiens
  CDR3 for beta chain variable domain of TCR clone 257050 (TRBV19, TRBJ2-1)
FASSKAGPRSYNEQFF

SEQ ID NO: 514101 - protein, 16 aa, Homo sapiens
  CDR3 for alpha chain variable domain of TCR clone 257051 (TRAV12-2, TRAJ45)
CAVKRNPGGGADGLTF

SEQ ID NO: 514102 - protein, 14 aa, Homo sapiens
  CDR3 for beta chain variable domain of TCR clone 257051 (TRBV11-1, TRBJ2-7)
CASSFRQGSYEQYF

SEQ ID NO: 514103 - protein, 14 aa, Homo sapiens
  CDR3 for alpha chain variable domain of TCR clone 257052 (TRAV1-2, TRAJ27)
CAVRPGTNAGKSTF

SEQ ID NO: 514104 - protein, 15 aa, Homo sapiens
  CDR3 for beta chain variable domain of TCR clone 257052 (TRBV18, TRBJ2-7)
CASSPLQGRTYEQYF

SEQ ID NO: 514105 - protein, 14 aa, Homo sapiens
  CDR3 for alpha chain variable domain of TCR clone 257053 (TRAV35, TRAJ33)
CAGSSQDSNDQLIW

SEQ ID NO: 514106 - protein, 15 aa, Homo sapiens
  CDR3 for beta chain variable domain of TCR clone 257053 (TRBV20-1, TRBJ2-7)
CSAESGTSGAYEQYF

SEQ ID NO: 514107 - protein, 12 aa, Homo sapiens
  CDR3 for alpha chain variable domain of TCR clone 257054 (TRAV13-1, TRAJ21)
CAAKEGFNKFYF

SEQ ID NO: 514108 - protein, 14 aa, Homo sapiens
  CDR3 for beta chain variable domain of TCR clone 257054 (TRBV2, TRBJ2-1)
CASSEALDGNEQFF

SEQ ID NO: 514109 - protein, 14 aa, Homo sapiens
  CDR3 for alpha chain variable domain of TCR clone 257055 (TRAV12-3, TRAJ42)
CAMNYGGSQGNLIF

SEQ ID NO: 514110 - protein, 15 aa, Homo sapiens
  CDR3 for beta chain variable domain of TCR clone 257055 (TRBV5-7, TRBJ1-5)
CASSYGKLWAQPQHF

SEQ ID NO: 514111 - protein, 13 aa, Homo sapiens
  CDR3 for alpha chain variable domain of TCR clone 257056 (TRAV13-1, TRAJ39)
CAASIWAGNMLTF

SEQ ID NO: 514112 - protein, 15 aa, Homo sapiens
  CDR3 for beta chain variable domain of TCR clone 257056 (TRBV7-9, TRBJ1-1)
CASSLLEQGGTEAYF

SEQ ID NO: 514113 - protein, 23 aa, Homo sapiens
  CDR3 for alpha chain variable domain of TCR clone 257057 (TRAV1-2, TRAJ26)
CAVRDLITMVRILSLVPEPDCPF

SEQ ID NO: 514114 - protein, 15 aa, Homo sapiens
  CDR3 for beta chain variable domain of TCR clone 257057 (TRBV9, TRBJ1-6)
CASSVAGTGDSPLHF

SEQ ID NO: 514115 - protein, 18 aa, Homo sapiens
  CDR3 for alpha chain variable domain of TCR clone 257058 (TRAV12-2, )
CAVEDIQNPDPAVYQLRD

SEQ ID NO: 514116 - protein, 15 aa, Homo sapiens
  CDR3 for beta chain variable domain of TCR clone 257058 (TRBV11-1, TRBJ2-7)
CASSLNYGASYEKYF

SEQ ID NO: 514117 - protein, 16 aa, Homo sapiens
  CDR3 for alpha chain variable domain of TCR clone 257059 (TRAV12-1, TRAJ53)
CVVTNVAGGSNYNLTF

SEQ ID NO: 514118 - protein, 16 aa, Homo sapiens
  CDR3 for beta chain variable domain of TCR clone 257059 (TRBV6-6, TRBJ2-3)
CASSYSHAGSTDTQYF

SEQ ID NO: 514119 - protein, 13 aa, Homo sapiens
  CDR3 for alpha chain variable domain of TCR clone 257060 (TRAV17, TRAJ29)
CATGPSGNTPLVF

SEQ ID NO: 514120 - protein, 14 aa, Homo sapiens
  CDR3 for beta chain variable domain of TCR clone 257060 (TRBV2, TRBJ1-6)
CASEVSSYNSALHF

SEQ ID NO: 514121 - protein, 15 aa, Homo sapiens
  CDR3 for alpha chain variable domain of TCR clone 257061 (TRAV12-2, TRAJ11)
CAVNLRNSGYSTLTF

SEQ ID NO: 514122 - protein, 16 aa, Homo sapiens
  CDR3 for beta chain variable domain of TCR clone 257061 (TRBV7-3, TRBJ2-2)
CASSLKRGTLTGELFF

SEQ ID NO: 514123 - protein, 15 aa, Homo sapiens
  CDR3 for alpha chain variable domain of TCR clone 257062 (TRAV26-1, TRAJ22)
CIVRVSFWFCKATDL

SEQ ID NO: 514124 - protein, 15 aa, Homo sapiens
  CDR3 for beta chain variable domain of TCR clone 257062 (TRBV7-2, TRBJ2-1)
CASSLVGSSYNEQFF

SEQ ID NO: 514125 - protein, 11 aa, Homo sapiens
  CDR3 for alpha chain variable domain of TCR clone 257063 (TRAV1-1, TRAJ23)
CAVRQGGKLIF

SEQ ID NO: 514126 - protein, 13 aa, Homo sapiens
  CDR3 for beta chain variable domain of TCR clone 257063 (TRBV19, TRBJ2-1)
CQSDFRLSGEQFF

SEQ ID NO: 514127 - protein, 14 aa, Homo sapiens
  CDR3 for alpha chain variable domain of TCR clone 257064 (TRAV1-2, TRAJ8)
CAVREDTGFQKLVF

SEQ ID NO: 514128 - protein, 14 aa, Homo sapiens
  CDR3 for beta chain variable domain of TCR clone 257064 (TRBV15, TRBJ1-1)
CASLQGGRNTEAFF

SEQ ID NO: 514129 - protein, 15 aa, Homo sapiens
  CDR3 for alpha chain variable domain of TCR clone 257065 (TRAV35, TRAJ38)
CVGFSNAGNNRKLIW

SEQ ID NO: 514130 - protein, 15 aa, Homo sapiens
  CDR3 for beta chain variable domain of TCR clone 257065 (TRBV7-8, TRBJ2-1)
CASSLAGGLYNEQFF

SEQ ID NO: 514131 - protein, 16 aa, Homo sapiens
  CDR3 for alpha chain variable domain of TCR clone 257066 (TRAV12-3, TRAJ53)
CAMSPGSGGSNYKLTF

SEQ ID NO: 514132 - protein, 13 aa, Homo sapiens
  CDR3 for beta chain variable domain of TCR clone 257066 (TRBV11-2, TRBJ2-5)
CASSSAGEETQYF

SEQ ID NO: 514133 - protein, 17 aa, Homo sapiens
  CDR3 for alpha chain variable domain of TCR clone 257067 (TRAV3, TRAJ6)
CAVRDSPRAGGSYIPTF

SEQ ID NO: 514134 - protein, 18 aa, Homo sapiens
  CDR3 for beta chain variable domain of TCR clone 257067 (TRBV7-3, TRBJ2-3)
CASSSTGTYPGSTDTQYF

SEQ ID NO: 514135 - protein, 14 aa, Homo sapiens
  CDR3 for alpha chain variable domain of TCR clone 257068 (TRAV1-2, TRAJ8)
CAVREDTGVQKLVF

SEQ ID NO: 514136 - protein, 15 aa, Homo sapiens
  CDR3 for beta chain variable domain of TCR clone 257068 (TRBV20-1, TRBJ1-1)
CSASRGVTGNTEAFF

SEQ ID NO: 514137 - protein, 23 aa, Homo sapiens
  CDR3 for alpha chain variable domain of TCR clone 257069 (TRAV8-6, TRAJ38)
CAVRNAGNNHIQNPDPAGYQLRD

SEQ ID NO: 514138 - protein, 13 aa, Homo sapiens
  CDR3 for beta chain variable domain of TCR clone 257069 (TRBV4-1, TRBJ1-1)
CASSQAGNTEAFF

SEQ ID NO: 514139 - protein, 23 aa, Homo sapiens
  CDR3 for alpha chain variable domain of TCR clone 257070 (TRAV8-3, )
CAVVTTRIPDIQNPDPAVSQLRD

SEQ ID NO: 514140 - protein, 14 aa, Homo sapiens
  CDR3 for beta chain variable domain of TCR clone 257070 (TRBV11-2, TRBJ2-7)
CASSPSTTSYEQDF

SEQ ID NO: 514141 - protein, 18 aa, Homo sapiens
  CDR3 for alpha chain variable domain of TCR clone 257071 (TRAV21, TRAJ52)
CAVRPSPAGGTSYGKLTF

SEQ ID NO: 514142 - protein, 14 aa, Homo sapiens
  CDR3 for beta chain variable domain of TCR clone 257071 (TRBV18, TRBJ2-5)
CASSPPGHQETQYF

SEQ ID NO: 514143 - protein, 16 aa, Homo sapiens
  CDR3 for alpha chain variable domain of TCR clone 257072 (TRAV16, TRAJ57)
CAPYLITQGGSEKLVF

SEQ ID NO: 514144 - protein, 17 aa, Homo sapiens
  CDR3 for beta chain variable domain of TCR clone 257072 (TRBV24-1, TRBJ2-4)
CATSDAEARGVRSMQYF

SEQ ID NO: 514145 - protein, 13 aa, Homo sapiens
  CDR3 for alpha chain variable domain of TCR clone 257073 (TRAV23/DV6, TRAJ47)
CAASMTRGNKLVF

SEQ ID NO: 514146 - protein, 14 aa, Homo sapiens
  CDR3 for beta chain variable domain of TCR clone 257073 (TRBV7-3, TRBJ1-1)
CASSLNGGNTEAFF

SEQ ID NO: 514147 - protein, 15 aa, Homo sapiens
  CDR3 for alpha chain variable domain of TCR clone 257074 (TRAV2, TRAJ24)
CAVVRLKNSWGKLQF

SEQ ID NO: 514148 - protein, 16 aa, Homo sapiens
  CDR3 for beta chain variable domain of TCR clone 257074 (TRBV7-7, TRBJ2-3)
CASTPGTSGSTDTQYF

SEQ ID NO: 514149 - protein, 14 aa, Homo sapiens
  CDR3 for alpha chain variable domain of TCR clone 257075 (TRAV8-6, TRAJ54)
CAVSDFQGAQKLVF

SEQ ID NO: 514150 - protein, 12 aa, Homo sapiens
  CDR3 for beta chain variable domain of TCR clone 257075 (TRBV11-2, TRBJ2-3)
CASRPGTDTQYF

SEQ ID NO: 514151 - protein, 12 aa, Homo sapiens
  CDR3 for alpha chain variable domain of TCR clone 257076 (TRAV12-3, TRAJ17)
CAMTLTGNKLTF

SEQ ID NO: 514152 - protein, 14 aa, Homo sapiens
  CDR3 for beta chain variable domain of TCR clone 257076 (TRBV11-2, TRBJ2-2)
CASSSDRVNAGELF

SEQ ID NO: 514153 - protein, 15 aa, Homo sapiens
  CDR3 for alpha chain variable domain of TCR clone 257077 (TRAV26-1, TRAJ29)
CIVRVTNSGNAPLVF

SEQ ID NO: 514154 - protein, 12 aa, Homo sapiens
  CDR3 for beta chain variable domain of TCR clone 257077 (TRBV20-1, TRBJ1-2)
CSASWQCYGYTF

SEQ ID NO: 514155 - protein, 17 aa, Homo sapiens
  CDR3 for alpha chain variable domain of TCR clone 257078 (TRAV3, TRAJ28)
CAVREAYSGAGSYQLTF

SEQ ID NO: 514156 - protein, 17 aa, Homo sapiens
  CDR3 for beta chain variable domain of TCR clone 257078 (TRBV20-1, TRBJ2-1)
CSASCSGLAGSYNEQFF

SEQ ID NO: 514157 - protein, 14 aa, Homo sapiens
  CDR3 for alpha chain variable domain of TCR clone 257079 (TRAV8-1, TRAJ23)
CAVGTYNQGGKLIF

SEQ ID NO: 514158 - protein, 13 aa, Homo sapiens
  CDR3 for beta chain variable domain of TCR clone 257079 (TRBV6-5, TRBJ2-5)
CASSPQGGETQYF

SEQ ID NO: 514159 - protein, 14 aa, Homo sapiens
  CDR3 for alpha chain variable domain of TCR clone 257080 (TRAV12-3, TRAJ10)
SHLPLTGGGNKLSF

SEQ ID NO: 514160 - protein, 15 aa, Homo sapiens
  CDR3 for beta chain variable domain of TCR clone 257080 (TRBV25-1, TRBJ2-4)
CASSETESAKNIQYF

SEQ ID NO: 514161 - protein, 14 aa, Homo sapiens
  CDR3 for alpha chain variable domain of TCR clone 257081 (TRAV12-3, TRAJ10)
SHLPLTGGGKKLTF

SEQ ID NO: 514162 - protein, 15 aa, Homo sapiens
  CDR3 for beta chain variable domain of TCR clone 257081 (TRBV7-9, TRBJ1-6)
CASSSPGRGNSPLDF

SEQ ID NO: 514163 - protein, 15 aa, Homo sapiens
  CDR3 for alpha chain variable domain of TCR clone 257082 (TRAV38-1, TRAJ57)
CAFMDSQGGSEKLVL

SEQ ID NO: 514164 - protein, 16 aa, Homo sapiens
  CDR3 for beta chain variable domain of TCR clone 257082 (TRBV10-3, TRBJ2-1)
CAIRGGGRGDYNEQFF

SEQ ID NO: 514165 - protein, 22 aa, Homo sapiens
  CDR3 for alpha chain variable domain of TCR clone 257083 (TRAV27, TRAJ38)
CAARRNAGNNHIQNPDPAVYQL

SEQ ID NO: 514166 - protein, 14 aa, Homo sapiens
  CDR3 for beta chain variable domain of TCR clone 257083 (TRBV20-1, TRBJ1-4)
CSAGDGSGWEKLFF

SEQ ID NO: 514167 - protein, 17 aa, Homo sapiens
  CDR3 for alpha chain variable domain of TCR clone 257084 (TRAV8-3, TRAJ50)
CAVGAVDNETSYDKLIF

SEQ ID NO: 514168 - protein, 13 aa, Homo sapiens
  CDR3 for beta chain variable domain of TCR clone 257084 (TRBV7-9, TRBJ2-2)
CASSSAGTGELFF

SEQ ID NO: 514169 - protein, 11 aa, Homo sapiens
  CDR3 for alpha chain variable domain of TCR clone 257085 (TRAV1-1, TRAJ23)
CAVRQGGKLIF

SEQ ID NO: 514170 - protein, 14 aa, Homo sapiens
  CDR3 for beta chain variable domain of TCR clone 257085 (TRBV5-5, TRBJ1-5)
CASSGQGVDQPQHF

SEQ ID NO: 514171 - protein, 14 aa, Homo sapiens
  CDR3 for alpha chain variable domain of TCR clone 257086 (TRAV1-2, TRAJ8)
CAVREDTGFQKLVF

SEQ ID NO: 514172 - protein, 15 aa, Homo sapiens
  CDR3 for beta chain variable domain of TCR clone 257086 (TRBV6-3, TRBJ2-7)
GASSSPGTVFYEQYV

SEQ ID NO: 514173 - protein, 18 aa, Homo sapiens
  CDR3 for alpha chain variable domain of TCR clone 257087 (TRAV21, TRAJ52)
CAVRPSPAGGTSYEKLTF

SEQ ID NO: 514174 - protein, 15 aa, Homo sapiens
  CDR3 for beta chain variable domain of TCR clone 257087 (TRBV20-1, TRBJ2-3)
CSAEPLAGHGDTQYF

SEQ ID NO: 514175 - protein, 18 aa, Homo sapiens
  CDR3 for alpha chain variable domain of TCR clone 257088 (TRAV12-3, TRAJ52)
CAMSVGGAGGTSYGKLTF

SEQ ID NO: 514176 - protein, 15 aa, Homo sapiens
  CDR3 for beta chain variable domain of TCR clone 257088 (TRBV25-1, TRBJ1-4)
CASSPGDSTNEKLFF

SEQ ID NO: 514177 - protein, 20 aa, Homo sapiens
  CDR3 for alpha chain variable domain of TCR clone 257089 (TRAV8-1, TRAJ5)
CAVKTEQPGRRAGEHLLLGV

SEQ ID NO: 514178 - protein, 15 aa, Homo sapiens
  CDR3 for beta chain variable domain of TCR clone 257089 (TRBV7-3, TRBJ2-1)
CASSLAGAGADEQFF

SEQ ID NO: 514179 - protein, 12 aa, Homo sapiens
  CDR3 for alpha chain variable domain of TCR clone 257090 (TRAV12-3, TRAJ17)
CAMTLTGNKPTF

SEQ ID NO: 514180 - protein, 15 aa, Homo sapiens
  CDR3 for beta chain variable domain of TCR clone 257090 (TRBV20-1, TRBJ2-7)
CSARDRVSGVDEQYF

SEQ ID NO: 514181 - protein, 17 aa, Homo sapiens
  CDR3 for alpha chain variable domain of TCR clone 257091 (TRAV3, TRAJ42)
CAVRDRDYGGSQGNLIS

SEQ ID NO: 514182 - protein, 12 aa, Homo sapiens
  CDR3 for beta chain variable domain of TCR clone 257091 (TRBV12-4, TRBJ2-7)
CASSLGGYEQYF

SEQ ID NO: 514183 - protein, 14 aa, Homo sapiens
  CDR3 for alpha chain variable domain of TCR clone 257092 (TRAV26-1, TRAJ49)
CIVRLSNTGNQFYF

SEQ ID NO: 514184 - protein, 15 aa, Homo sapiens
  CDR3 for beta chain variable domain of TCR clone 257092 (TRBV19, TRBJ1-1)
CASMGFRDVNTEAFF

SEQ ID NO: 514185 - protein, 12 aa, Homo sapiens
  CDR3 for alpha chain variable domain of TCR clone 257093 (TRAV8-3, TRAJ26)
CAGDNYGQNFVF

SEQ ID NO: 514186 - protein, 15 aa, Homo sapiens
  CDR3 for beta chain variable domain of TCR clone 257093 (TRBV15, TRBJ2-1)
CATSRVGGKYNEQFF

SEQ ID NO: 514187 - protein, 12 aa, Homo sapiens
  CDR3 for alpha chain variable domain of TCR clone 257094 (TRAV8-3, TRAJ43)
CAVGAGNNDMRF

SEQ ID NO: 514188 - protein, 18 aa, Homo sapiens
  CDR3 for beta chain variable domain of TCR clone 257094 (TRBV11-2, TRBJ2-3)
CASSLGGASRGAPNAQYF

SEQ ID NO: 514189 - protein, 12 aa, Homo sapiens
  CDR3 for alpha chain variable domain of TCR clone 257095 (TRAV8-6, TRAJ43)
LAVSNNNNDMRF

SEQ ID NO: 514190 - protein, 15 aa, Homo sapiens
  CDR3 for beta chain variable domain of TCR clone 257095 (TRBV7-3, TRBJ2-6)
CASSLGGSGANVLTF

SEQ ID NO: 514191 - protein, 14 aa, Homo sapiens
  CDR3 for alpha chain variable domain of TCR clone 257096 (TRAV27, TRAJ22)
CAGLPSGSARQLTF

SEQ ID NO: 514192 - protein, 12 aa, Homo sapiens
  CDR3 for beta chain variable domain of TCR clone 257096 (TRBV5-1, TRBJ1-2)
CASSQDTYGYTF

SEQ ID NO: 514193 - protein, 13 aa, Homo sapiens
  CDR3 for alpha chain variable domain of TCR clone 257097 (TRAV27, TRAJ3)
ASLRGSSASKIIF

SEQ ID NO: 514194 - protein, 15 aa, Homo sapiens
  CDR3 for beta chain variable domain of TCR clone 257097 (TRBV6-3, TRBJ2-7)
CASSSPGTVFYEQYF

SEQ ID NO: 514195 - protein, 13 aa, Homo sapiens
  CDR3 for alpha chain variable domain of TCR clone 257098 (TRAV12-2, TRAJ52)
CAVSGTSYGKLTF

SEQ ID NO: 514196 - protein, 15 aa, Homo sapiens
  CDR3 for beta chain variable domain of TCR clone 257098 (TRBV2, TRBJ2-7)
RASTLLGSGATEQYF

SEQ ID NO: 514197 - protein, 15 aa, Homo sapiens
  CDR3 for alpha chain variable domain of TCR clone 257099 (TRAV8-3, TRAJ45)
CASSYPGGGADGLTF

SEQ ID NO: 514198 - protein, 12 aa, Homo sapiens
  CDR3 for beta chain variable domain of TCR clone 257099 (TRBV12-4, TRBJ2-7)
CASSLGGYEQYF

SEQ ID NO: 514199 - protein, 13 aa, Homo sapiens
  CDR3 for alpha chain variable domain of TCR clone 257100 (TRAV12-3, TRAJ33)
CAMSVNRNYQLIW

SEQ ID NO: 514200 - protein, 12 aa, Homo sapiens
  CDR3 for beta chain variable domain of TCR clone 257100 (TRBV11-2, TRBJ2-2)
CASSLGGGELFF

SEQ ID NO: 514201 - protein, 15 aa, Homo sapiens
  CDR3 for alpha chain variable domain of TCR clone 257101 (TRAV14/DV4, TRAJ21)
CAMREEGYNFNKFYF

SEQ ID NO: 514202 - protein, 15 aa, Homo sapiens
  CDR3 for beta chain variable domain of TCR clone 257101 (TRBV15, TRBJ1-5)
CATSTTGVVNQLQHF

SEQ ID NO: 514203 - protein, 17 aa, Homo sapiens
  CDR3 for alpha chain variable domain of TCR clone 257102 (TRAV3, TRAJ6)
CAVRDGPRAGGSYIPTF

SEQ ID NO: 514204 - protein, 15 aa, Homo sapiens
  CDR3 for beta chain variable domain of TCR clone 257102 (TRBV7-8, TRBJ1-5)
CASSLEGSGNQPQHF

SEQ ID NO: 514205 - protein, 14 aa, Homo sapiens
  CDR3 for alpha chain variable domain of TCR clone 257103 (TRAV25, TRAJ35)
CARRMEGFGNVLHC

SEQ ID NO: 514206 - protein, 13 aa, Homo sapiens
  CDR3 for beta chain variable domain of TCR clone 257103 (TRBV7-2, TRBJ1-4)
CASSLAGLEKLLF

SEQ ID NO: 514207 - protein, 13 aa, Homo sapiens
  CDR3 for alpha chain variable domain of TCR clone 257104 (TRAV27, TRAJ41)
CAGEGDSGYALNF

SEQ ID NO: 514208 - protein, 15 aa, Homo sapiens
  CDR3 for beta chain variable domain of TCR clone 257104 (TRBV28, TRBJ2-5)
CASSSGRTIQETQYF

SEQ ID NO: 514209 - protein, 13 aa, Homo sapiens
  CDR3 for alpha chain variable domain of TCR clone 257105 (TRAV13-1, TRAJ6)
CARGSGGSYIPTS

SEQ ID NO: 514210 - protein, 15 aa, Homo sapiens
  CDR3 for beta chain variable domain of TCR clone 257105 (TRBV2, TRBJ2-1)
CASSELAGSYNEQFF

SEQ ID NO: 514211 - protein, 15 aa, Homo sapiens
  CDR3 for alpha chain variable domain of TCR clone 257106 (TRAV3, TRAJ9)
CAVRARNTGGFKTIF

SEQ ID NO: 514212 - protein, 15 aa, Homo sapiens
  CDR3 for beta chain variable domain of TCR clone 257106 (TRBV27, TRBJ1-1)
CASSPYADPYTEAFF

SEQ ID NO: 514213 - protein, 16 aa, Homo sapiens
  CDR3 for alpha chain variable domain of TCR clone 257107 (TRAV30, TRAJ24)
CGTEIVDADSSGKFQF

SEQ ID NO: 514214 - protein, 15 aa, Homo sapiens
  CDR3 for beta chain variable domain of TCR clone 257107 (TRBV28, TRBJ2-1)
CASSIIAGGRSDQFF

SEQ ID NO: 514215 - protein, 15 aa, Homo sapiens
  CDR3 for alpha chain variable domain of TCR clone 257108 (TRAV8-4, TRAJ48)
CAVSAAYFGNEKLTF

SEQ ID NO: 514216 - protein, 12 aa, Homo sapiens
  CDR3 for beta chain variable domain of TCR clone 257108 (TRBV3-1, TRBJ2-5)
CASSQRGETQFF

SEQ ID NO: 514217 - protein, 12 aa, Homo sapiens
  CDR3 for alpha chain variable domain of TCR clone 257109 (TRAV12-2, TRAJ10)
WGVTGGGNKLTF

SEQ ID NO: 514218 - protein, 15 aa, Homo sapiens
  CDR3 for beta chain variable domain of TCR clone 257109 (TRBV25-1, TRBJ1-4)
CASGKRIATNEKLFF

SEQ ID NO: 514219 - protein, 17 aa, Homo sapiens
  CDR3 for alpha chain variable domain of TCR clone 257110 (TRAV3, TRAJ28)
CAVREAYSGAGSYQLTF

SEQ ID NO: 514220 - protein, 20 aa, Homo sapiens
  CDR3 for beta chain variable domain of TCR clone 257110 (TRBV28, TRBJ2-1)
CASTPIGRSPGLAGGNEQFF

SEQ ID NO: 514221 - protein, 12 aa, Homo sapiens
  CDR3 for alpha chain variable domain of TCR clone 257111 (TRAV12-1, TRAJ40)
CEVYSGTYKYIF

SEQ ID NO: 514222 - protein, 17 aa, Homo sapiens
  CDR3 for beta chain variable domain of TCR clone 257111 (TRBV7-3, TRBJ2-3)
CASSPRGQGYGTDTQYF

SEQ ID NO: 514223 - protein, 14 aa, Homo sapiens
  CDR3 for alpha chain variable domain of TCR clone 257112 (TRAV1-2, TRAJ16)
CAVNRFSNGQKLLF

SEQ ID NO: 514224 - protein, 16 aa, Homo sapiens
  CDR3 for beta chain variable domain of TCR clone 257112 (TRBV19, TRBJ2-1)
CASSKAGPSSYNEQFF

SEQ ID NO: 514225 - protein, 15 aa, Homo sapiens
  CDR3 for alpha chain variable domain of TCR clone 257113 (TRAV8-4, TRAJ47)
YAVSDPEEYGNKLVF

SEQ ID NO: 514226 - protein, 15 aa, Homo sapiens
  CDR3 for beta chain variable domain of TCR clone 257113 (TRBV11-2, TRBJ2-1)
CASSLGPDSYNEQFF

SEQ ID NO: 514227 - protein, 16 aa, Homo sapiens
  CDR3 for alpha chain variable domain of TCR clone 257114 (TRAV12-2, TRAJ13)
CAVKKTGGTRKLPFEL

SEQ ID NO: 514228 - protein, 12 aa, Homo sapiens
  CDR3 for beta chain variable domain of TCR clone 257114 (TRBV12-4, TRBJ1-2)
CASSCIWLHLRF

SEQ ID NO: 514229 - protein, 14 aa, Homo sapiens
  CDR3 for alpha chain variable domain of TCR clone 257115 (TRAV2, TRAJ37)
CAVDFISNTGKLIF

SEQ ID NO: 514230 - protein, 14 aa, Homo sapiens
  CDR3 for beta chain variable domain of TCR clone 257115 (TRBV20-1, TRBJ2-7)
CSAPELAGVGEQYF

SEQ ID NO: 514231 - protein, 15 aa, Homo sapiens
  CDR3 for alpha chain variable domain of TCR clone 257116 (TRAV2, TRAJ13)
CATPPYSGGYQKVTF

SEQ ID NO: 514232 - protein, 13 aa, Homo sapiens
  CDR3 for beta chain variable domain of TCR clone 257116 (TRBV29-1, TRBJ2-1)
CSVEGGRVNEQFF

SEQ ID NO: 514233 - protein, 12 aa, Homo sapiens
  CDR3 for alpha chain variable domain of TCR clone 257117 (TRAV6, TRAJ9)
CALVTGGFKTIF

SEQ ID NO: 514234 - protein, 15 aa, Homo sapiens
  CDR3 for beta chain variable domain of TCR clone 257117 (TRBV7-3, TRBJ2-2)
VAQPCIQWNTGELFF

SEQ ID NO: 514235 - protein, 14 aa, Homo sapiens
  CDR3 for alpha chain variable domain of TCR clone 257118 (TRAV9-2, TRAJ39)
CALYIYNAGNMLTF

SEQ ID NO: 514236 - protein, 12 aa, Homo sapiens
  CDR3 for beta chain variable domain of TCR clone 257118 (TRBV5-5, TRBJ2-5)
CASSYFGEAQYF

SEQ ID NO: 514237 - protein, 13 aa, Homo sapiens
  CDR3 for alpha chain variable domain of TCR clone 257119 (TRAV12-2, TRAJ50)
CAVIVTSYDKVIF

SEQ ID NO: 514238 - protein, 14 aa, Homo sapiens
  CDR3 for beta chain variable domain of TCR clone 257119 (TRBV9, TRBJ2-1)
CASSIDPRGKEQFF

SEQ ID NO: 514239 - protein, 14 aa, Homo sapiens
  CDR3 for alpha chain variable domain of TCR clone 257120 (TRAV35, TRAJ50)
CAGHRKTSYDKVIF

SEQ ID NO: 514240 - protein, 16 aa, Homo sapiens
  CDR3 for beta chain variable domain of TCR clone 257120 (TRBV7-3, TRBJ2-2)
CASSLKRGTLSGELFF

SEQ ID NO: 514241 - protein, 13 aa, Homo sapiens
  CDR3 for alpha chain variable domain of TCR clone 257121 (TRAV36/DV7, TRAJ37)
CAVFSSNTGKLIC

SEQ ID NO: 514242 - protein, 15 aa, Homo sapiens
  CDR3 for beta chain variable domain of TCR clone 257121 (TRBV5-1, TRBJ2-2)
CASSSQGGNTGELFF

SEQ ID NO: 514243 - protein, 10 aa, Homo sapiens
  CDR3 for alpha chain variable domain of TCR clone 257122 (TRAV12-2, TRAJ41)
CAVTGYALNF

SEQ ID NO: 514244 - protein, 15 aa, Homo sapiens
  CDR3 for beta chain variable domain of TCR clone 257122 (TRBV4-2, TRBJ2-1)
CASSQDVGVAGEQFF

SEQ ID NO: 514245 - protein, 13 aa, Homo sapiens
  CDR3 for alpha chain variable domain of TCR clone 257123 (TRAV21, TRAJ27)
CAARPGNAGKSTF

SEQ ID NO: 514246 - protein, 14 aa, Homo sapiens
  CDR3 for beta chain variable domain of TCR clone 257123 (TRBV19, TRBJ2-1)
CASPTFVLSGGQFF

SEQ ID NO: 514247 - protein, 14 aa, Homo sapiens
  CDR3 for alpha chain variable domain of TCR clone 257124 (TRAV3, TRAJ17)
CAVSQGSCRQQANF

SEQ ID NO: 514248 - protein, 12 aa, Homo sapiens
  CDR3 for beta chain variable domain of TCR clone 257124 (TRBV7-9, TRBJ1-6)
CASSLMTSPLHF

SEQ ID NO: 514249 - protein, 15 aa, Homo sapiens
  CDR3 for alpha chain variable domain of TCR clone 257125 (TRAV34, TRAJ38)
CGADFTPGNNRKLIL

SEQ ID NO: 514250 - protein, 15 aa, Homo sapiens
  CDR3 for beta chain variable domain of TCR clone 257125 (TRBV24-1, TRBJ1-1)
CATSDRRGVNTEAFF

SEQ ID NO: 514251 - protein, 16 aa, Homo sapiens
  CDR3 for alpha chain variable domain of TCR clone 257126 (TRAV30, TRAJ24)
CGTEIVNADSWGKFQF

SEQ ID NO: 514252 - protein, 14 aa, Homo sapiens
  CDR3 for beta chain variable domain of TCR clone 257126 (TRBV7-2, TRBJ2-7)
CASSPKTSFYEQYF

SEQ ID NO: 514253 - protein, 15 aa, Homo sapiens
  CDR3 for alpha chain variable domain of TCR clone 257127 (TRAV20, TRAJ40)
CAVQRGASGTYKYIF

SEQ ID NO: 514254 - protein, 19 aa, Homo sapiens
  CDR3 for beta chain variable domain of TCR clone 257127 (TRBV28, TRBJ2-7)
CASSYSGTSRLGWVYEQYF

SEQ ID NO: 514255 - protein, 13 aa, Homo sapiens
  CDR3 for alpha chain variable domain of TCR clone 257128 (TRAV1-2, TRAJ20)
CAVPRSNDYKLSF

SEQ ID NO: 514256 - protein, 13 aa, Homo sapiens
  CDR3 for beta chain variable domain of TCR clone 257128 (TRBV20-1, TRBJ1-1)
CSARGGGNTEAFF

SEQ ID NO: 514257 - protein, 14 aa, Homo sapiens
  CDR3 for alpha chain variable domain of TCR clone 257129 (TRAV2, TRAJ9)
CAVEDRSGGFKTIF

SEQ ID NO: 514258 - protein, 15 aa, Homo sapiens
  CDR3 for beta chain variable domain of TCR clone 257129 (TRBV29-1, TRBJ2-1)
CSGRDRKSAYNEQFF

SEQ ID NO: 514259 - protein, 14 aa, Homo sapiens
  CDR3 for alpha chain variable domain of TCR clone 257130 (TRAV1-2, TRAJ8)
CAVREDTGFQKLVF

SEQ ID NO: 514260 - protein, 15 aa, Homo sapiens
  CDR3 for beta chain variable domain of TCR clone 257130 (TRBV7-9, TRBJ2-7)
CASSFGTSGAYEQYF

SEQ ID NO: 514261 - protein, 13 aa, Homo sapiens
  CDR3 for alpha chain variable domain of TCR clone 257131 (TRAV12-3, TRAJ13)
CAMSSGGYQKVTF

SEQ ID NO: 514262 - protein, 17 aa, Homo sapiens
  CDR3 for beta chain variable domain of TCR clone 257131 (TRBV4-1, TRBJ1-4)
CASSQEGPRGVEEKLFS

SEQ ID NO: 514263 - protein, 13 aa, Homo sapiens
  CDR3 for alpha chain variable domain of TCR clone 257132 (TRAV25, TRAJ10)
CAGRTGGGNKLTF

SEQ ID NO: 514264 - protein, 12 aa, Homo sapiens
  CDR3 for beta chain variable domain of TCR clone 257132 (TRBV5-4, TRBJ2-7)
CASSWAGQGENF

SEQ ID NO: 514265 - protein, 17 aa, Homo sapiens
  CDR3 for alpha chain variable domain of TCR clone 257133 (TRAV36/DV7, TRAJ52)
CAVAQRAGGTSYGKLTF

SEQ ID NO: 514266 - protein, 14 aa, Homo sapiens
  CDR3 for beta chain variable domain of TCR clone 257133 (TRBV2, TRBJ2-1)
CASRLIVGHDEQFF

SEQ ID NO: 514267 - protein, 13 aa, Homo sapiens
  CDR3 for alpha chain variable domain of TCR clone 257134 (TRAV21, TRAJ27)
CAARPGDAGKSTF

SEQ ID NO: 514268 - protein, 16 aa, Homo sapiens
  CDR3 for beta chain variable domain of TCR clone 257134 (TRBV20-1, TRBJ1-2)
CSASMGQGVANYGYTF

SEQ ID NO: 514269 - protein, 14 aa, Homo sapiens
  CDR3 for alpha chain variable domain of TCR clone 257135 (TRAV8-4, TRAJ17)
CAVSEGAAGNKPTF

SEQ ID NO: 514270 - protein, 13 aa, Homo sapiens
  CDR3 for beta chain variable domain of TCR clone 257135 (TRBV19, TRBJ2-1)
CASSMYRVNEQFF

SEQ ID NO: 514271 - protein, 14 aa, Homo sapiens
  CDR3 for alpha chain variable domain of TCR clone 257136 (TRAV17, TRAJ31)
CATVVRNNNARLMF

SEQ ID NO: 514272 - protein, 14 aa, Homo sapiens
  CDR3 for beta chain variable domain of TCR clone 257136 (TRBV12-4, TRBJ2-5)
CASSLWQTQETQYF

SEQ ID NO: 514273 - protein, 15 aa, Homo sapiens
  CDR3 for alpha chain variable domain of TCR clone 257137 (TRAV8-3, TRAJ45)
CASSYSGGGADGLTF

SEQ ID NO: 514274 - protein, 15 aa, Homo sapiens
  CDR3 for beta chain variable domain of TCR clone 257137 (TRBV27, TRBJ1-4)
CASSPRHATNDKLFF

SEQ ID NO: 514275 - protein, 11 aa, Homo sapiens
  CDR3 for alpha chain variable domain of TCR clone 257138 (TRAV1-1, TRAJ23)
CAVRQGGQLIF

SEQ ID NO: 514276 - protein, 14 aa, Homo sapiens
  CDR3 for beta chain variable domain of TCR clone 257138 (TRBV12-4, TRBJ1-1)
CASSLGTGGTEAFF

SEQ ID NO: 514277 - protein, 16 aa, Homo sapiens
  CDR3 for alpha chain variable domain of TCR clone 257139 (TRAV26-1, TRAJ28)
CIVRPYSGAGSYQLTF

SEQ ID NO: 514278 - protein, 18 aa, Homo sapiens
  CDR3 for beta chain variable domain of TCR clone 257139 (TRBV20-1, TRBJ2-2)
CSARYLTSGSMDTGELFF

SEQ ID NO: 514279 - protein, 17 aa, Homo sapiens
  CDR3 for alpha chain variable domain of TCR clone 257140 (TRAV3, TRAJ6)
CAARDGPRSGGSYIPTF

SEQ ID NO: 514280 - protein, 14 aa, Homo sapiens
  CDR3 for beta chain variable domain of TCR clone 257140 (TRBV7-2, TRBJ2-7)
CASSPKTSFYEQYF

SEQ ID NO: 514281 - protein, 13 aa, Homo sapiens
  CDR3 for alpha chain variable domain of TCR clone 257141 (TRAV6, TRAJ16)
CALDDSDGQKLLF

SEQ ID NO: 514282 - protein, 16 aa, Homo sapiens
  CDR3 for beta chain variable domain of TCR clone 257141 (TRBV7-8, TRBJ2-4)
CASSAERTLAKNIQYF

SEQ ID NO: 514283 - protein, 15 aa, Homo sapiens
  CDR3 for alpha chain variable domain of TCR clone 257142 (TRAV17, TRAJ4)
CATGTWSGGYNKLIF

SEQ ID NO: 514284 - protein, 14 aa, Homo sapiens
  CDR3 for beta chain variable domain of TCR clone 257142 (TRBV7-9, TRBJ2-7)
CASSLGGSSYEQYF

SEQ ID NO: 514285 - protein, 15 aa, Homo sapiens
  CDR3 for alpha chain variable domain of TCR clone 257143 (TRAV21, TRAJ38)
CAVRQDAGNNRKLIW

SEQ ID NO: 514286 - protein, 16 aa, Homo sapiens
  CDR3 for beta chain variable domain of TCR clone 257143 (TRBV4-2, TRBJ1-1)
CASRPLDGGGDPEAFF

SEQ ID NO: 514287 - protein, 16 aa, Homo sapiens
  CDR3 for alpha chain variable domain of TCR clone 257144 (TRAV8-3, TRAJ13)
CAVGAYPSGGYLKVTF

SEQ ID NO: 514288 - protein, 15 aa, Homo sapiens
  CDR3 for beta chain variable domain of TCR clone 257144 (TRBV19, TRBJ1-5)
CASSIVWADNQAQHF

SEQ ID NO: 514289 - protein, 10 aa, Homo sapiens
  CDR3 for alpha chain variable domain of TCR clone 257145 (TRAV20, TRAJ22)
CAAPSRQLTF

SEQ ID NO: 514290 - protein, 14 aa, Homo sapiens
  CDR3 for beta chain variable domain of TCR clone 257145 (TRBV19, TRBJ2-1)
CASSMGSGATEQFF

SEQ ID NO: 514291 - protein, 17 aa, Homo sapiens
  CDR3 for alpha chain variable domain of TCR clone 257146 (TRAV3, TRAJ42)
CAVRDRDYGGSQGKLIF

SEQ ID NO: 514292 - protein, 17 aa, Homo sapiens
  CDR3 for beta chain variable domain of TCR clone 257146 (TRBV7-9, TRBJ2-3)
CASSPTVAGDLTDTQYF

SEQ ID NO: 514293 - protein, 11 aa, Homo sapiens
  CDR3 for alpha chain variable domain of TCR clone 257147 (TRAV2, TRAJ13)
CASGGYQKVTF

SEQ ID NO: 514294 - protein, 16 aa, Homo sapiens
  CDR3 for beta chain variable domain of TCR clone 257147 (TRBV12-4, TRBJ2-3)
CASSLRLAETTDTQYF

SEQ ID NO: 514295 - protein, 14 aa, Homo sapiens
  CDR3 for alpha chain variable domain of TCR clone 257148 (TRAV12-2, TRAJ9)
CAVNMEGGGFKTIF

SEQ ID NO: 514296 - protein, 13 aa, Homo sapiens
  CDR3 for beta chain variable domain of TCR clone 257148 (TRBV7-7, TRBJ2-3)
CASSLSRADTQYF

SEQ ID NO: 514297 - protein, 13 aa, Homo sapiens
  CDR3 for alpha chain variable domain of TCR clone 257149 (TRAV3, TRAJ27)
CAVRPLGAGKSTF

SEQ ID NO: 514298 - protein, 13 aa, Homo sapiens
  CDR3 for beta chain variable domain of TCR clone 257149 (TRBV7-9, TRBJ2-3)
CASSPGSTDSQYF

SEQ ID NO: 514299 - protein, 12 aa, Homo sapiens
  CDR3 for alpha chain variable domain of TCR clone 257150 (TRAV21, TRAJ36)
CAVYTGANNLFF

SEQ ID NO: 514300 - protein, 15 aa, Homo sapiens
  CDR3 for beta chain variable domain of TCR clone 257150 (TRBV27, TRBJ2-1)
CASSNGGGSSNEQFF

SEQ ID NO: 514301 - protein, 14 aa, Homo sapiens
  CDR3 for alpha chain variable domain of TCR clone 257151 (TRAV12-2, TRAJ13)
CAVKKTGGYQKVTF

SEQ ID NO: 514302 - protein, 15 aa, Homo sapiens
  CDR3 for beta chain variable domain of TCR clone 257151 (TRBV12-4, TRBJ2-5)
CASSPPTGLQETQYL

SEQ ID NO: 514303 - protein, 11 aa, Homo sapiens
  CDR3 for alpha chain variable domain of TCR clone 257152 (TRAV2, TRAJ13)
CASGGYQKVTF

SEQ ID NO: 514304 - protein, 12 aa, Homo sapiens
  CDR3 for beta chain variable domain of TCR clone 257152 (TRBV4-2, TRBJ2-5)
CASGGAQETQYF

SEQ ID NO: 514305 - protein, 13 aa, Homo sapiens
  CDR3 for alpha chain variable domain of TCR clone 257153 (TRAV21, TRAJ26)
CAVLYNYGQNFVF

SEQ ID NO: 514306 - protein, 16 aa, Homo sapiens
  CDR3 for beta chain variable domain of TCR clone 257153 (TRBV29-1, TRBJ2-2)
CSVETRASGNTGELFF

SEQ ID NO: 514307 - protein, 17 aa, Homo sapiens
  CDR3 for alpha chain variable domain of TCR clone 257154 (TRAV3, TRAJ6)
CAVRDGPRPGGSYIPTF

SEQ ID NO: 514308 - protein, 17 aa, Homo sapiens
  CDR3 for beta chain variable domain of TCR clone 257154 (TRBV28, TRBJ2-5)
CASSTPEGDALQETQYF

SEQ ID NO: 514309 - protein, 14 aa, Homo sapiens
  CDR3 for alpha chain variable domain of TCR clone 257155 (TRAV1-2, TRAJ16)
CSVNRFSDGQKLLF

SEQ ID NO: 514310 - protein, 14 aa, Homo sapiens
  CDR3 for beta chain variable domain of TCR clone 257155 (TRBV20-1, TRBJ1-5)
CSAPGTGVGQPQHF

SEQ ID NO: 514311 - protein, 14 aa, Homo sapiens
  CDR3 for alpha chain variable domain of TCR clone 257156 (TRAV12-3, TRAJ54)
CAMRIIQGAQKLVF

SEQ ID NO: 514312 - protein, 16 aa, Homo sapiens
  CDR3 for beta chain variable domain of TCR clone 257156 (TRBV28, TRBJ2-1)
CASRVPASGRIGEQFV

SEQ ID NO: 514313 - protein, 18 aa, Homo sapiens
  CDR3 for alpha chain variable domain of TCR clone 257157 (TRAV26-1, TRAJ44)
CIVRVAGGGISTASKLTF

SEQ ID NO: 514314 - protein, 16 aa, Homo sapiens
  CDR3 for beta chain variable domain of TCR clone 257157 (TRBV20-1, TRBJ2-3)
CSAILPIGGLTDTQYF

SEQ ID NO: 514315 - protein, 13 aa, Homo sapiens
  CDR3 for alpha chain variable domain of TCR clone 257158 (TRAV3, TRAJ20)
CAVRSLNDYKLSF

SEQ ID NO: 514316 - protein, 14 aa, Homo sapiens
  CDR3 for beta chain variable domain of TCR clone 257158 (TRBV6-1, TRBJ1-3)
CASVQGGGGNTIYF

SEQ ID NO: 514317 - protein, 16 aa, Homo sapiens
  CDR3 for alpha chain variable domain of TCR clone 257159 (TRAV12-3, TRAJ53)
CAMSPGSGGSNYKMTF

SEQ ID NO: 514318 - protein, 12 aa, Homo sapiens
  CDR3 for beta chain variable domain of TCR clone 257159 (TRBV11-2, TRBJ2-2)
CASSLGGGELFF

SEQ ID NO: 514319 - protein, 23 aa, Homo sapiens
  CDR3 for alpha chain variable domain of TCR clone 257160 (TRAV3, TRAJ42)
CAVRDRDYGGSQGNLILEKALNF

SEQ ID NO: 514320 - protein, 13 aa, Homo sapiens
  CDR3 for beta chain variable domain of TCR clone 257160 (TRBV10-3, TRBJ2-7)
CASKLAVNYEQYF

SEQ ID NO: 514321 - protein, 15 aa, Homo sapiens
  CDR3 for alpha chain variable domain of TCR clone 257161 (TRAV30, TRAJ57)
CGTAIPQGGSEKLVF

SEQ ID NO: 514322 - protein, 12 aa, Homo sapiens
  CDR3 for beta chain variable domain of TCR clone 257161 (TRBV11-2, TRBJ2-1)
CASSPGNNEQFF

SEQ ID NO: 514323 - protein, 15 aa, Homo sapiens
  CDR3 for alpha chain variable domain of TCR clone 257162 (TRAV17, TRAJ16)
CATALRFSDGQKLLF

SEQ ID NO: 514324 - protein, 15 aa, Homo sapiens
  CDR3 for beta chain variable domain of TCR clone 257162 (TRBV20-1, TRBJ1-1)
CSASRGVTGNTEAYF

SEQ ID NO: 514325 - protein, 14 aa, Homo sapiens
  CDR3 for alpha chain variable domain of TCR clone 257163 (TRAV12-1, TRAJ5)
CAVNRSTGRRALTF

SEQ ID NO: 514326 - protein, 12 aa, Homo sapiens
  CDR3 for beta chain variable domain of TCR clone 257163 (TRBV19, TRBJ1-5)
CASSIAQQPQHF

SEQ ID NO: 514327 - protein, 14 aa, Homo sapiens
  CDR3 for alpha chain variable domain of TCR clone 257164 (TRAV12-2, TRAJ29)
CAVRRNSGKTPLVF

SEQ ID NO: 514328 - protein, 13 aa, Homo sapiens
  CDR3 for beta chain variable domain of TCR clone 257164 (TRBV12-4, TRBJ2-1)
CASSHYTDNEQFF

SEQ ID NO: 514329 - protein, 11 aa, Homo sapiens
  CDR3 for alpha chain variable domain of TCR clone 257165 (TRAV3, TRAJ21)
CAVGNFNKFYF

SEQ ID NO: 514330 - protein, 16 aa, Homo sapiens
  CDR3 for beta chain variable domain of TCR clone 257165 (TRBV7-6, TRBJ2-3)
CASSPLAGGSTDTKYF

SEQ ID NO: 514331 - protein, 12 aa, Homo sapiens
  CDR3 for alpha chain variable domain of TCR clone 257166 (TRAV12-3, TRAJ17)
CAMTLTGNKLTF

SEQ ID NO: 514332 - protein, 14 aa, Homo sapiens
  CDR3 for beta chain variable domain of TCR clone 257166 (TRBV4-1, TRBJ2-7)
CASSQEREHVEQYF

SEQ ID NO: 514333 - protein, 22 aa, Homo sapiens
  CDR3 for alpha chain variable domain of TCR clone 257167 (TRAV21, TRAJ35)
CAVMPIGFGNVLHCGSVPQVIV

SEQ ID NO: 514334 - protein, 12 aa, Homo sapiens
  CDR3 for beta chain variable domain of TCR clone 257167 (TRBV7-9, TRBJ2-7)
CASSIKREEQYF

SEQ ID NO: 514335 - protein, 12 aa, Homo sapiens
  CDR3 for alpha chain variable domain of TCR clone 257168 (TRAV13-1, TRAJ49)
CAAPNTGNQFYF

SEQ ID NO: 514336 - protein, 17 aa, Homo sapiens
  CDR3 for beta chain variable domain of TCR clone 257168 (TRBV25-1, TRBJ2-7)
CASSDARVVLSSYEQHF

SEQ ID NO: 514337 - protein, 21 aa, Homo sapiens
  CDR3 for alpha chain variable domain of TCR clone 257169 (TRAV26-1, TRAJ38)
CIADNAGNNHIQNPDPAVYQL

SEQ ID NO: 514338 - protein, 17 aa, Homo sapiens
  CDR3 for beta chain variable domain of TCR clone 257169 (TRBV12-4, TRBJ2-7)
CASSPIPRGVSSYEQYF

SEQ ID NO: 514339 - protein, 13 aa, Homo sapiens
  CDR3 for alpha chain variable domain of TCR clone 257170 (TRAV21, TRAJ27)
CAARPGNAGKSTF

SEQ ID NO: 514340 - protein, 13 aa, Homo sapiens
  CDR3 for beta chain variable domain of TCR clone 257170 (TRBV7-6, TRBJ1-5)
CASSQGPNRPQHF

SEQ ID NO: 514341 - protein, 14 aa, Homo sapiens
  CDR3 for alpha chain variable domain of TCR clone 257171 (TRAV12-2, TRAJ17)
CAVLFKAAGNKLTF

SEQ ID NO: 514342 - protein, 14 aa, Homo sapiens
  CDR3 for beta chain variable domain of TCR clone 257171 (TRBV29-1, TRBJ2-1)
CSVARGRWDNEQFF

SEQ ID NO: 514343 - protein, 14 aa, Homo sapiens
  CDR3 for alpha chain variable domain of TCR clone 257172 (TRAV16, TRAJ15)
CALSFNQAGTALIF

SEQ ID NO: 514344 - protein, 15 aa, Homo sapiens
  CDR3 for beta chain variable domain of TCR clone 257172 (TRBV7-2, TRBJ2-1)
CASSLVAGGHNEQFF

SEQ ID NO: 514345 - protein, 15 aa, Homo sapiens
  CDR3 for alpha chain variable domain of TCR clone 257173 (TRAV2, TRAJ28)
CAVPYSGAGSYQLTF

SEQ ID NO: 514346 - protein, 10 aa, Homo sapiens
  CDR3 for beta chain variable domain of TCR clone 257173 (TRBV23-1, TRBJ2-1)
KWSSYNEQLF

SEQ ID NO: 514347 - protein, 11 aa, Homo sapiens
  CDR3 for alpha chain variable domain of TCR clone 257174 (TRAV3, TRAJ32)
CAVREGIMVVL

SEQ ID NO: 514348 - protein, 16 aa, Homo sapiens
  CDR3 for beta chain variable domain of TCR clone 257174 (TRBV5-1, TRBJ2-1)
CASSGAGASDYNEQFF

SEQ ID NO: 514349 - protein, 15 aa, Homo sapiens
  CDR3 for alpha chain variable domain of TCR clone 257175 (TRAV12-2, TRAJ53)
CAVNVGGGSNYKLTF

SEQ ID NO: 514350 - protein, 12 aa, Homo sapiens
  CDR3 for beta chain variable domain of TCR clone 257175 (TRBV11-2, TRBJ2-2)
CASSLGGGELFF

SEQ ID NO: 514351 - protein, 18 aa, Homo sapiens
  CDR3 for alpha chain variable domain of TCR clone 257176 (TRAV12-3, TRAJ52)
CAMSVGGAGGTSYGKLTF

SEQ ID NO: 514352 - protein, 16 aa, Homo sapiens
  CDR3 for beta chain variable domain of TCR clone 257176 (TRBV7-3, TRBJ2-1)
CASSLEGYRSYNEQFF

SEQ ID NO: 514353 - protein, 12 aa, Homo sapiens
  CDR3 for alpha chain variable domain of TCR clone 257177 (TRAV13-2, TRAJ23)
CAERPRGGKLNF

SEQ ID NO: 514354 - protein, 15 aa, Homo sapiens
  CDR3 for beta chain variable domain of TCR clone 257177 (TRBV19, TRBJ1-2)
CASSVGQVLNYGYTF

SEQ ID NO: 514355 - protein, 13 aa, Homo sapiens
  CDR3 for alpha chain variable domain of TCR clone 257178 (TRAV13-2, TRAJ53)
CAENMGSNYKLTF

SEQ ID NO: 514356 - protein, 13 aa, Homo sapiens
  CDR3 for beta chain variable domain of TCR clone 257178 (TRBV4-1, TRBJ2-2)
CASSLENTGELFF

SEQ ID NO: 514357 - protein, 16 aa, Homo sapiens
  CDR3 for alpha chain variable domain of TCR clone 257179 (TRAV13-1, TRAJ48)
CAASIFGNFGNEKLTF

SEQ ID NO: 514358 - protein, 11 aa, Homo sapiens
  CDR3 for beta chain variable domain of TCR clone 257179 (TRBV11-2, TRBJ2-2)
CASSLPGELFF

SEQ ID NO: 514359 - protein, 15 aa, Homo sapiens
  CDR3 for alpha chain variable domain of TCR clone 257180 (TRAV13-1, TRAJ27)
CAARELNTNAGKSPF

SEQ ID NO: 514360 - protein, 14 aa, Homo sapiens
  CDR3 for beta chain variable domain of TCR clone 257180 (TRBV6-5, TRBJ1-2)
CASSYTRDRGRYTF

SEQ ID NO: 514361 - protein, 23 aa, Homo sapiens
  CDR3 for alpha chain variable domain of TCR clone 257181 (TRAV12-2, TRAJ22)
CAVGFRVHPGPPIVSGSARQLTF

SEQ ID NO: 514362 - protein, 13 aa, Homo sapiens
  CDR3 for beta chain variable domain of TCR clone 257181 (TRBV12-4, TRBJ1-2)
CDSSVDSNYGYTF

SEQ ID NO: 514363 - protein, 13 aa, Homo sapiens
  CDR3 for alpha chain variable domain of TCR clone 257182 (TRAV30, TRAJ24)
CGTVTDSWGKLQF

SEQ ID NO: 514364 - protein, 14 aa, Homo sapiens
  CDR3 for beta chain variable domain of TCR clone 257182 (TRBV7-3, TRBJ1-1)
CASSLKGGNTEAFF

SEQ ID NO: 514365 - protein, 12 aa, Homo sapiens
  CDR3 for alpha chain variable domain of TCR clone 257183 (TRAV21, TRAJ13)
TGPSGGYQKVTF

SEQ ID NO: 514366 - protein, 13 aa, Homo sapiens
  CDR3 for beta chain variable domain of TCR clone 257183 (TRBV12-4, TRBJ2-2)
CASSITGSGELFF

SEQ ID NO: 514367 - protein, 17 aa, Homo sapiens
  CDR3 for alpha chain variable domain of TCR clone 257184 (TRAV3, TRAJ42)
CAVRDRDYGGSQGNLIF

SEQ ID NO: 514368 - protein, 17 aa, Homo sapiens
  CDR3 for beta chain variable domain of TCR clone 257184 (TRBV7-9, TRBJ1-4)
CASSSGQLGGRSEKLFF

SEQ ID NO: 514369 - protein, 14 aa, Homo sapiens
  CDR3 for alpha chain variable domain of TCR clone 257185 (TRAV21, TRAJ28)
CAVGSGAGSYQLTF

SEQ ID NO: 514370 - protein, 16 aa, Homo sapiens
  CDR3 for beta chain variable domain of TCR clone 257185 (TRBV18, TRBJ1-4)
CASSPGPNGEKLFLAV

SEQ ID NO: 514371 - protein, 14 aa, Homo sapiens
  CDR3 for alpha chain variable domain of TCR clone 257186 (TRAV12-3, TRAJ10)
SHLPLTGGGNKLTF

SEQ ID NO: 514372 - protein, 17 aa, Homo sapiens
  CDR3 for beta chain variable domain of TCR clone 257186 (TRBV3-1, TRBJ2-5)
CASSQDTLAGGGETQYF

SEQ ID NO: 514373 - protein, 18 aa, Homo sapiens
  CDR3 for alpha chain variable domain of TCR clone 257187 (TRAV26-2, TRAJ54)
CILRDVEVGIQGAQKLVF

SEQ ID NO: 514374 - protein, 19 aa, Homo sapiens
  CDR3 for beta chain variable domain of TCR clone 257187 (TRBV28, TRBJ2-7)
CASSYSGTSRLGWVYEQYF

SEQ ID NO: 514375 - protein, 14 aa, Homo sapiens
  CDR3 for alpha chain variable domain of TCR clone 257188 (TRAV1-2, TRAJ16)
CAVNRFSDGQKLLF

SEQ ID NO: 514376 - protein, 15 aa, Homo sapiens
  CDR3 for beta chain variable domain of TCR clone 257188 (TRBV5-1, TRBJ2-2)
CASSSQGGNTGELLF

SEQ ID NO: 514377 - protein, 14 aa, Homo sapiens
  CDR3 for alpha chain variable domain of TCR clone 257189 (TRAV13-2, TRAJ17)
CAVNSKAAGNKLTF

SEQ ID NO: 514378 - protein, 11 aa, Homo sapiens
  CDR3 for beta chain variable domain of TCR clone 257189 (TRBV6-3, TRBJ2-3)
CATGQADTQYF

SEQ ID NO: 514379 - protein, 13 aa, Homo sapiens
  CDR3 for alpha chain variable domain of TCR clone 257190 (TRAV12-2, TRAJ3)
CAFQYSGASKIIF

SEQ ID NO: 514380 - protein, 11 aa, Homo sapiens
  CDR3 for beta chain variable domain of TCR clone 257190 (TRBV20-1, TRBJ2-3)
CSGTSSTTQYF

SEQ ID NO: 514381 - protein, 14 aa, Homo sapiens
  CDR3 for alpha chain variable domain of TCR clone 257191 (TRAV2, TRAJ37)
CAVDFTSNTGKLIF

SEQ ID NO: 514382 - protein, 16 aa, Homo sapiens
  CDR3 for beta chain variable domain of TCR clone 257191 (TRBV20-1, TRBJ1-4)
CSARPYGGELNEKLFF

SEQ ID NO: 514383 - protein, 11 aa, Homo sapiens
  CDR3 for alpha chain variable domain of TCR clone 257192 (TRAV12-3, TRAJ49)
CAAKTGNQFYF

SEQ ID NO: 514384 - protein, 12 aa, Homo sapiens
  CDR3 for beta chain variable domain of TCR clone 257192 (TRBV6-3, TRBJ2-7)
CASSEPGFEQYF

SEQ ID NO: 514385 - protein, 14 aa, Homo sapiens
  CDR3 for alpha chain variable domain of TCR clone 257193 (TRAV12-1, TRAJ9)
CVVTGYTGGFKTVF

SEQ ID NO: 514386 - protein, 13 aa, Homo sapiens
  CDR3 for beta chain variable domain of TCR clone 257193 (TRBV20-1, TRBJ1-1)
CSARAGGNTEAFF

SEQ ID NO: 514387 - protein, 15 aa, Homo sapiens
  CDR3 for alpha chain variable domain of TCR clone 257194 (TRAV38-1, TRAJ37)
CAFIFGSGNTGKLVF

SEQ ID NO: 514388 - protein, 16 aa, Homo sapiens
  CDR3 for beta chain variable domain of TCR clone 257194 (TRBV6-1, TRBJ2-3)
CASSEVIGQGTDTQYF

SEQ ID NO: 514389 - protein, 14 aa, Homo sapiens
  CDR3 for alpha chain variable domain of TCR clone 257195 (TRAV1-2, TRAJ8)
CAVGEDTGFQKLVF

SEQ ID NO: 514390 - protein, 15 aa, Homo sapiens
  CDR3 for beta chain variable domain of TCR clone 257195 (TRBV10-3, TRBJ1-1)
CAINEAGTGGTEAFF

SEQ ID NO: 514391 - protein, 14 aa, Homo sapiens
  CDR3 for alpha chain variable domain of TCR clone 257196 (TRAV12-2, TRAJ45)
CALPERGGADGLTF

SEQ ID NO: 514392 - protein, 14 aa, Homo sapiens
  CDR3 for beta chain variable domain of TCR clone 257196 (TRBV19, TRBJ2-1)
CASPTFVLSGEQFF

SEQ ID NO: 514393 - protein, 14 aa, Homo sapiens
  CDR3 for alpha chain variable domain of TCR clone 257197 (TRAV23/DV6, TRAJ6)
CAASRSGGSYIPTL

SEQ ID NO: 514394 - protein, 15 aa, Homo sapiens
  CDR3 for beta chain variable domain of TCR clone 257197 (TRBV29-1, TRBJ2-1)
CSGRDRKSSYNEQFF

SEQ ID NO: 514395 - protein, 12 aa, Homo sapiens
  CDR3 for alpha chain variable domain of TCR clone 257198 (TRAV13-1, TRAJ21)
CAAKEGFNKFYF

SEQ ID NO: 514396 - protein, 13 aa, Homo sapiens
  CDR3 for beta chain variable domain of TCR clone 257198 (TRBV19, TRBJ2-7)
CASSPRQSYEQHF

SEQ ID NO: 514397 - protein, 15 aa, Homo sapiens
  CDR3 for alpha chain variable domain of TCR clone 257199 (TRAV13-1, TRAJ27)
CAARELNTNAGKSTF

SEQ ID NO: 514398 - protein, 15 aa, Homo sapiens
  CDR3 for beta chain variable domain of TCR clone 257199 (TRBV7-9, TRBJ1-6)
CASSSPGRGNSPLHF

SEQ ID NO: 514399 - protein, 15 aa, Homo sapiens
  CDR3 for alpha chain variable domain of TCR clone 257200 (TRAV38-1, TRAJ37)
CAFIHGSGNTGKLIF

SEQ ID NO: 514400 - protein, 15 aa, Homo sapiens
  CDR3 for beta chain variable domain of TCR clone 257200 (TRBV7-2, TRBJ2-7)
CASSLKGALTYEQYF

SEQ ID NO: 514401 - protein, 15 aa, Homo sapiens
  CDR3 for alpha chain variable domain of TCR clone 257201 (TRAV13-2, TRAJ22)
CAENSRPGSARQLTF

SEQ ID NO: 514402 - protein, 13 aa, Homo sapiens
  CDR3 for beta chain variable domain of TCR clone 257201 (TRBV7-3, TRBJ1-1)
CASSQDWGAEAFF

SEQ ID NO: 514403 - protein, 15 aa, Homo sapiens
  CDR3 for alpha chain variable domain of TCR clone 257202 (TRAV26-1, TRAJ42)
FIVRVKRGSQGNPIF

SEQ ID NO: 514404 - protein, 14 aa, Homo sapiens
  CDR3 for beta chain variable domain of TCR clone 257202 (TRBV19, TRBJ2-2)
CATTGHANTGELFF

SEQ ID NO: 514405 - protein, 14 aa, Homo sapiens
  CDR3 for alpha chain variable domain of TCR clone 257203 (TRAV1-2, TRAJ8)
CAVREDPGFQKLVF

SEQ ID NO: 514406 - protein, 16 aa, Homo sapiens
  CDR3 for beta chain variable domain of TCR clone 257203 (TRBV10-3, TRBJ2-6)
CAISTSGDLGANVLTF

SEQ ID NO: 514407 - protein, 15 aa, Homo sapiens
  CDR3 for alpha chain variable domain of TCR clone 257204 (TRAV8-3, TRAJ45)
CASSYSGGVADGLTF

SEQ ID NO: 514408 - protein, 13 aa, Homo sapiens
  CDR3 for beta chain variable domain of TCR clone 257204 (TRBV7-9, TRBJ2-7)
CASSFAGAYEQYF

SEQ ID NO: 514409 - protein, 14 aa, Homo sapiens
  CDR3 for alpha chain variable domain of TCR clone 257205 (TRAV12-2, TRAJ13)
CAVTRTGGYQKVTF

SEQ ID NO: 514410 - protein, 12 aa, Homo sapiens
  CDR3 for beta chain variable domain of TCR clone 257205 (TRBV12-4, TRBJ1-2)
CASSFIWLHLRF

SEQ ID NO: 514411 - protein, 13 aa, Homo sapiens
  CDR3 for alpha chain variable domain of TCR clone 257206 (TRAV20, TRAJ37)
CAGCSSNTGKRIF

SEQ ID NO: 514412 - protein, 11 aa, Homo sapiens
  CDR3 for beta chain variable domain of TCR clone 257206 (TRBV12-3, TRBJ2-3)
CASPATDTQYF

SEQ ID NO: 514413 - protein, 12 aa, Homo sapiens
  CDR3 for alpha chain variable domain of TCR clone 257207 (TRAV13-1, TRAJ21)
CAAKEGFNKFYF

SEQ ID NO: 514414 - protein, 17 aa, Homo sapiens
  CDR3 for beta chain variable domain of TCR clone 257207 (TRBV20-1, TRBJ2-1)
CSAGSSGLAGSYNEQFF

SEQ ID NO: 514415 - protein, 12 aa, Homo sapiens
  CDR3 for alpha chain variable domain of TCR clone 257208 (TRAV13-2, TRAJ39)
CAENNAGNMLTF

SEQ ID NO: 514416 - protein, 13 aa, Homo sapiens
  CDR3 for beta chain variable domain of TCR clone 257208 (TRBV19, TRBJ1-1)
CASSLSNGGEAFF

SEQ ID NO: 514417 - protein, 13 aa, Homo sapiens
  CDR3 for alpha chain variable domain of TCR clone 257209 (TRAV8-2, TRAJ34)
CVVSDRRTDTLIF

SEQ ID NO: 514418 - protein, 15 aa, Homo sapiens
  CDR3 for beta chain variable domain of TCR clone 257209 (TRBV20-1, TRBJ2-3)
CSARVVGGSTDTQYF

SEQ ID NO: 514419 - protein, 16 aa, Homo sapiens
  CDR3 for alpha chain variable domain of TCR clone 257210 (TRAV30, TRAJ24)
CGTEIVDADSWGKFQF

SEQ ID NO: 514420 - protein, 14 aa, Homo sapiens
  CDR3 for beta chain variable domain of TCR clone 257210 (TRBV18, TRBJ2-3)
CASSLGGGSDTQYF

SEQ ID NO: 514421 - protein, 15 aa, Homo sapiens
  CDR3 for alpha chain variable domain of TCR clone 257211 (TRAV20, TRAJ58)
CAVQDLETSGTRLTF

SEQ ID NO: 514422 - protein, 13 aa, Homo sapiens
  CDR3 for beta chain variable domain of TCR clone 257211 (TRBV20-1, TRBJ1-1)
CSARGGGNTEDFF

SEQ ID NO: 514423 - protein, 13 aa, Homo sapiens
  CDR3 for alpha chain variable domain of TCR clone 257212 (TRAV35, TRAJ32)
CAGVGGATNKLIF

SEQ ID NO: 514424 - protein, 14 aa, Homo sapiens
  CDR3 for beta chain variable domain of TCR clone 257212 (TRBV12-5, TRBJ2-5)
CASGSRTHQETQYF

SEQ ID NO: 514425 - protein, 14 aa, Homo sapiens
  CDR3 for alpha chain variable domain of TCR clone 257213 (TRAV13-2, TRAJ10)
CAETFTVGGNKLTF

SEQ ID NO: 514426 - protein, 16 aa, Homo sapiens
  CDR3 for beta chain variable domain of TCR clone 257213 (TRBV18, TRBJ2-7)
CASSPMSQGISYEQYF

SEQ ID NO: 514427 - protein, 14 aa, Homo sapiens
  CDR3 for alpha chain variable domain of TCR clone 257214 (TRAV14/DV4, TRAJ42)
CPRGSLRSQGNLIF

SEQ ID NO: 514428 - protein, 15 aa, Homo sapiens
  CDR3 for beta chain variable domain of TCR clone 257214 (TRBV19, TRBJ2-4)
CASRGPRRGENIQYF

SEQ ID NO: 514429 - protein, 12 aa, Homo sapiens
  CDR3 for alpha chain variable domain of TCR clone 257215 (TRAV8-4, TRAJ43)
CAVSVNNNDMRF

SEQ ID NO: 514430 - protein, 13 aa, Homo sapiens
  CDR3 for beta chain variable domain of TCR clone 257215 (TRBV7-3, TRBJ1-2)
CASSLERGYGYTF

SEQ ID NO: 514431 - protein, 14 aa, Homo sapiens
  CDR3 for alpha chain variable domain of TCR clone 257216 (TRAV12-2, TRAJ9)
CAVNMEGEGFKTIF

SEQ ID NO: 514432 - protein, 14 aa, Homo sapiens
  CDR3 for beta chain variable domain of TCR clone 257216 (TRBV27, TRBJ2-5)
CASSSLKGWETQYF

SEQ ID NO: 514433 - protein, 13 aa, Homo sapiens
  CDR3 for alpha chain variable domain of TCR clone 257217 (TRAV2, TRAJ40)
CALVTSGTYKYIF

SEQ ID NO: 514434 - protein, 17 aa, Homo sapiens
  CDR3 for beta chain variable domain of TCR clone 257217 (TRBV11-2, TRBJ2-1)
CASSLYPPGVEYNEQFF

SEQ ID NO: 514435 - protein, 20 aa, Homo sapiens
  CDR3 for alpha chain variable domain of TCR clone 257218 (TRAV23/DV6, TRAJ3)
CAATTFALGGAVLPRSSLDQ

SEQ ID NO: 514436 - protein, 15 aa, Homo sapiens
  CDR3 for beta chain variable domain of TCR clone 257218 (TRBV19, TRBJ1-6)
CASSTQGAVGSPLHF

SEQ ID NO: 514437 - protein, 12 aa, Homo sapiens
  CDR3 for alpha chain variable domain of TCR clone 257219 (TRAV21, TRAJ33)
CAKMDSNYQLIW

SEQ ID NO: 514438 - protein, 13 aa, Homo sapiens
  CDR3 for beta chain variable domain of TCR clone 257219 (TRBV2, TRBJ2-7)
CASSVGGSGEQYF

SEQ ID NO: 514439 - protein, 16 aa, Homo sapiens
  CDR3 for alpha chain variable domain of TCR clone 257220 (TRAV35, TRAJ28)
CAGYLHSGAGSYQLTF

SEQ ID NO: 514440 - protein, 16 aa, Homo sapiens
  CDR3 for beta chain variable domain of TCR clone 257220 (TRBV5-1, TRBJ2-1)
CASSHGLAGPQNEQFF

SEQ ID NO: 514441 - protein, 15 aa, Homo sapiens
  CDR3 for alpha chain variable domain of TCR clone 257221 (TRAV1-2, TRAJ24)
CAVRGSTDSWGKFQF

SEQ ID NO: 514442 - protein, 16 aa, Homo sapiens
  CDR3 for beta chain variable domain of TCR clone 257221 (TRBV20-1, TRBJ2-1)
CSAATQGPVAYNEQFF

SEQ ID NO: 514443 - protein, 13 aa, Homo sapiens
  CDR3 for alpha chain variable domain of TCR clone 257222 (TRAV21, TRAJ37)
CAVSSGNTGKLIF

SEQ ID NO: 514444 - protein, 17 aa, Homo sapiens
  CDR3 for beta chain variable domain of TCR clone 257222 (TRBV5-1, TRBJ2-5)
CASSLLGLAADQETQYF

SEQ ID NO: 514445 - protein, 14 aa, Homo sapiens
  CDR3 for alpha chain variable domain of TCR clone 257223 (TRAV38-1, TRAJ48)
CAFMANFGNEKLTF

SEQ ID NO: 514446 - protein, 16 aa, Homo sapiens
  CDR3 for beta chain variable domain of TCR clone 257223 (TRBV29-1, TRBJ2-7)
CSVEDAEDGTAYEQYF

SEQ ID NO: 514447 - protein, 14 aa, Homo sapiens
  CDR3 for alpha chain variable domain of TCR clone 257224 (TRAV29/DV5, TRAJ36)
CAARRKTGATNLIF

SEQ ID NO: 514448 - protein, 13 aa, Homo sapiens
  CDR3 for beta chain variable domain of TCR clone 257224 (TRBV15, TRBJ1-2)
CATSMTANYGYTF

SEQ ID NO: 514449 - protein, 15 aa, Homo sapiens
  CDR3 for alpha chain variable domain of TCR clone 257225 (TRAV21, TRAJ53)
CATLNSGGSNYKLTF

SEQ ID NO: 514450 - protein, 16 aa, Homo sapiens
  CDR3 for beta chain variable domain of TCR clone 257225 (TRBV29-1, TRBJ1-2)
CSVEANRDIANYGYTL

SEQ ID NO: 514451 - protein, 13 aa, Homo sapiens
  CDR3 for alpha chain variable domain of TCR clone 257226 (TRAV16, TRAJ54)
CALKVRGAQKLVF

SEQ ID NO: 514452 - protein, 15 aa, Homo sapiens
  CDR3 for beta chain variable domain of TCR clone 257226 (TRBV27, TRBJ2-1)
CASSNGGGSSNEQFF

SEQ ID NO: 514453 - protein, 13 aa, Homo sapiens
  CDR3 for alpha chain variable domain of TCR clone 257227 (TRAV29/DV5, TRAJ31)
CAATRNNNARLMF

SEQ ID NO: 514454 - protein, 12 aa, Homo sapiens
  CDR3 for beta chain variable domain of TCR clone 257227 (TRBV14, TRBJ2-5)
CASSHLKETQYF

SEQ ID NO: 514455 - protein, 13 aa, Homo sapiens
  CDR3 for alpha chain variable domain of TCR clone 257228 (TRAV20, TRAJ9)
CAVPDTGGFKTIF

SEQ ID NO: 514456 - protein, 15 aa, Homo sapiens
  CDR3 for beta chain variable domain of TCR clone 257228 (TRBV27, TRBJ2-7)
RASSKAGRGGYKQYF

SEQ ID NO: 514457 - protein, 12 aa, Homo sapiens
  CDR3 for alpha chain variable domain of TCR clone 257229 (TRAV29/DV5, TRAJ49)
CSATDTGNQFYF

SEQ ID NO: 514458 - protein, 12 aa, Homo sapiens
  CDR3 for beta chain variable domain of TCR clone 257229 (TRBV12-4, TRBJ2-7)
CASSLGGYELYF

SEQ ID NO: 514459 - protein, 13 aa, Homo sapiens
  CDR3 for alpha chain variable domain of TCR clone 257230 (TRAV8-3, TRAJ43)
CAVVPYNNNDMRF

SEQ ID NO: 514460 - protein, 11 aa, Homo sapiens
  CDR3 for beta chain variable domain of TCR clone 257230 (TRBV28, TRBJ2-1)
CASRRVNEQFF

SEQ ID NO: 514461 - protein, 15 aa, Homo sapiens
  CDR3 for alpha chain variable domain of TCR clone 257231 (TRAV4, TRAJ39)
CLVGPNNNAGNMLTF

SEQ ID NO: 514462 - protein, 16 aa, Homo sapiens
  CDR3 for beta chain variable domain of TCR clone 257231 (TRBV4-3, TRBJ1-2)
CASSQDLTGALGGYTF

SEQ ID NO: 514463 - protein, 17 aa, Homo sapiens
  CDR3 for alpha chain variable domain of TCR clone 257232 (TRAV3, TRAJ42)
CAVRDRDDGGSQGNLIF

SEQ ID NO: 514464 - protein, 15 aa, Homo sapiens
  CDR3 for beta chain variable domain of TCR clone 257232 (TRBV2, TRBJ2-7)
CASSEGLAGSYEQYF

SEQ ID NO: 514465 - protein, 23 aa, Homo sapiens
  CDR3 for alpha chain variable domain of TCR clone 257233 (TRAV12-2, TRAJ36)
SLLIRDSQPSDSATLERANNLFF

SEQ ID NO: 514466 - protein, 13 aa, Homo sapiens
  CDR3 for beta chain variable domain of TCR clone 257233 (TRBV7-3, TRBJ1-1)
CASSQDWGAEAFF

SEQ ID NO: 514467 - protein, 14 aa, Homo sapiens
  CDR3 for alpha chain variable domain of TCR clone 257234 (TRAV2, TRAJ9)
CAVEDRSGGFKTIF

SEQ ID NO: 514468 - protein, 17 aa, Homo sapiens
  CDR3 for beta chain variable domain of TCR clone 257234 (TRBV5-7, TRBJ1-5)
CASSYGKLWISPSILVM

SEQ ID NO: 514469 - protein, 17 aa, Homo sapiens
  CDR3 for alpha chain variable domain of TCR clone 257235 (TRAV23/DV6, TRAJ57)
CAASSTLSQCGSEKLVC

SEQ ID NO: 514470 - protein, 14 aa, Homo sapiens
  CDR3 for beta chain variable domain of TCR clone 257235 (TRBV25-1, TRBJ1-1)
CASTHLGGNTEAFF

SEQ ID NO: 514471 - protein, 15 aa, Homo sapiens
  CDR3 for alpha chain variable domain of TCR clone 257236 (TRAV16, TRAJ23)
CALSGPYNQGGKLIF

SEQ ID NO: 514472 - protein, 16 aa, Homo sapiens
  CDR3 for beta chain variable domain of TCR clone 257236 (TRBV29-1, TRBJ1-2)
CSVEANRDIANYGYTF

SEQ ID NO: 514473 - protein, 11 aa, Homo sapiens
  CDR3 for alpha chain variable domain of TCR clone 257237 (TRAV2, TRAJ33)
CAVDSNYQLIW

SEQ ID NO: 514474 - protein, 15 aa, Homo sapiens
  CDR3 for beta chain variable domain of TCR clone 257237 (TRBV7-2, TRBJ2-2)
CASSLAGGLTGELFF

SEQ ID NO: 514475 - protein, 14 aa, Homo sapiens
  CDR3 for alpha chain variable domain of TCR clone 257238 (TRAV13-1, TRAJ35)
CAASKGGLGDVLHC

SEQ ID NO: 514476 - protein, 13 aa, Homo sapiens
  CDR3 for beta chain variable domain of TCR clone 257238 (TRBV7-3, TRBJ1-1)
CASSQDWGAEAFF

SEQ ID NO: 514477 - protein, 14 aa, Homo sapiens
  CDR3 for alpha chain variable domain of TCR clone 257239 (TRAV13-2, TRAJ17)
CAENSKAAGNKLTF

SEQ ID NO: 514478 - protein, 15 aa, Homo sapiens
  CDR3 for beta chain variable domain of TCR clone 257239 (TRBV4-2, TRBJ1-2)
CASSRNTGAGYGYTF

SEQ ID NO: 514479 - protein, 13 aa, Homo sapiens
  CDR3 for alpha chain variable domain of TCR clone 257240 (TRAV35, TRAJ33)
CAGQLYGVYQLIW

SEQ ID NO: 514480 - protein, 14 aa, Homo sapiens
  CDR3 for beta chain variable domain of TCR clone 257240 (TRBV7-2, TRBJ1-1)
CASSLGGAGTGAFC

SEQ ID NO: 514481 - protein, 14 aa, Homo sapiens
  CDR3 for alpha chain variable domain of TCR clone 257241 (TRAV3, TRAJ21)
CALGRGSTNFTLDL

SEQ ID NO: 514482 - protein, 14 aa, Homo sapiens
  CDR3 for beta chain variable domain of TCR clone 257241 (TRBV7-9, TRBJ2-4)
CARSLAMGGNIQYF

SEQ ID NO: 514483 - protein, 14 aa, Homo sapiens
  CDR3 for alpha chain variable domain of TCR clone 257242 (TRAV17, TRAJ32)
CATDPGGATKKLIF

SEQ ID NO: 514484 - protein, 14 aa, Homo sapiens
  CDR3 for beta chain variable domain of TCR clone 257242 (TRBV2, TRBJ1-5)
CASSENRGGQPQHF

SEQ ID NO: 514485 - protein, 13 aa, Homo sapiens
  CDR3 for alpha chain variable domain of TCR clone 257243 (TRAV30, TRAJ24)
CGTVTDSWGKLQF

SEQ ID NO: 514486 - protein, 15 aa, Homo sapiens
  CDR3 for beta chain variable domain of TCR clone 257243 (TRBV4-1, TRBJ2-1)
CASSQDPGNYNAQFF

SEQ ID NO: 514487 - protein, 13 aa, Homo sapiens
  CDR3 for alpha chain variable domain of TCR clone 257244 (TRAV21, TRAJ27)
CAARPGTAGKSTF

SEQ ID NO: 514488 - protein, 13 aa, Homo sapiens
  CDR3 for beta chain variable domain of TCR clone 257244 (TRBV5-1, TRBJ2-7)
CASSATGGNEQYF

SEQ ID NO: 514489 - protein, 14 aa, Homo sapiens
  CDR3 for alpha chain variable domain of TCR clone 257245 (TRAV38-1, TRAJ57)
CAFMNTGGSEKLVF

SEQ ID NO: 514490 - protein, 12 aa, Homo sapiens
  CDR3 for beta chain variable domain of TCR clone 257245 (TRBV20-1, TRBJ1-5)
CSTSQGNQPQRF

SEQ ID NO: 514491 - protein, 21 aa, Homo sapiens
  CDR3 for alpha chain variable domain of TCR clone 257246 (TRAV1-1, TRAJ6)
CLLLLRCERLERTGGSDIPTF

SEQ ID NO: 514492 - protein, 13 aa, Homo sapiens
  CDR3 for beta chain variable domain of TCR clone 257246 (TRBV10-2, TRBJ2-7)
CASGASGGYEQYF

SEQ ID NO: 514493 - protein, 12 aa, Homo sapiens
  CDR3 for alpha chain variable domain of TCR clone 257247 (TRAV9-2, TRAJ36)
CALKKGANNPFF

SEQ ID NO: 514494 - protein, 16 aa, Homo sapiens
  CDR3 for beta chain variable domain of TCR clone 257247 (TRBV20-1, TRBJ1-4)
CSAPGQGLLTNEKLFF

SEQ ID NO: 514495 - protein, 11 aa, Homo sapiens
  CDR3 for alpha chain variable domain of TCR clone 257248 (TRAV12-2, TRAJ33)
CAVGSNYQLIW

SEQ ID NO: 514496 - protein, 16 aa, Homo sapiens
  CDR3 for beta chain variable domain of TCR clone 257248 (TRBV27, TRBJ2-7)
CPSSSERRDSAYEQYF

SEQ ID NO: 514497 - protein, 17 aa, Homo sapiens
  CDR3 for alpha chain variable domain of TCR clone 257249 (TRAV35, TRAJ52)
CAGQLAAGGTSYGKLTF

SEQ ID NO: 514498 - protein, 12 aa, Homo sapiens
  CDR3 for beta chain variable domain of TCR clone 257249 (TRBV20-1, TRBJ2-7)
CSAGRRQSERYF

SEQ ID NO: 514499 - protein, 15 aa, Homo sapiens
  CDR3 for alpha chain variable domain of TCR clone 257250 (TRAV12-2, TRAJ53)
CAVNGGGGSNYKLTC

SEQ ID NO: 514500 - protein, 13 aa, Homo sapiens
  CDR3 for beta chain variable domain of TCR clone 257250 (TRBV3-1, TRBJ1-1)
CASSPGVITEAFF

SEQ ID NO: 514501 - protein, 11 aa, Homo sapiens
  CDR3 for alpha chain variable domain of TCR clone 257251 (TRAV26-1, TRAJ37)
CIVRVGRKLIF

SEQ ID NO: 514502 - protein, 13 aa, Homo sapiens
  CDR3 for beta chain variable domain of TCR clone 257251 (TRBV7-2, TRBJ2-7)
CQQLTSGQGPQYF

SEQ ID NO: 514503 - protein, 15 aa, Homo sapiens
  CDR3 for alpha chain variable domain of TCR clone 257252 (TRAV3, TRAJ22)
CAVRDRGGSDRQLTF

SEQ ID NO: 514504 - protein, 13 aa, Homo sapiens
  CDR3 for beta chain variable domain of TCR clone 257252 (TRBV7-3, TRBJ2-1)
CASSPVACNEQFF

SEQ ID NO: 514505 - protein, 12 aa, Homo sapiens
  CDR3 for alpha chain variable domain of TCR clone 257253 (TRAV38-1, TRAJ32)
CAPLCATNKLIF

SEQ ID NO: 514506 - protein, 14 aa, Homo sapiens
  CDR3 for beta chain variable domain of TCR clone 257253 (TRBV29-1, TRBJ2-5)
CSVETSGSGETQYF

SEQ ID NO: 514507 - protein, 13 aa, Homo sapiens
  CDR3 for alpha chain variable domain of TCR clone 257254 (TRAV3, TRAJ15)
CAVRDQAGTALIF

SEQ ID NO: 514508 - protein, 17 aa, Homo sapiens
  CDR3 for beta chain variable domain of TCR clone 257254 (TRBV28, TRBJ1-1)
CASSLSGTGYENTEAFF

SEQ ID NO: 514509 - protein, 18 aa, Homo sapiens
  CDR3 for alpha chain variable domain of TCR clone 257255 (TRAV26-1, TRAJ5)
CIVRVVPPRDTGRRALTV

SEQ ID NO: 514510 - protein, 15 aa, Homo sapiens
  CDR3 for beta chain variable domain of TCR clone 257255 (TRBV7-9, TRBJ2-7)
CASSLPMGQANEQYF

SEQ ID NO: 514511 - protein, 14 aa, Homo sapiens
  CDR3 for alpha chain variable domain of TCR clone 257256 (TRAV35, TRAJ54)
CAGYLIQGAQRLVF

SEQ ID NO: 514512 - protein, 14 aa, Homo sapiens
  CDR3 for beta chain variable domain of TCR clone 257256 (TRBV7-2, TRBJ2-5)
CASSVGWAEETQYF

SEQ ID NO: 514513 - protein, 15 aa, Homo sapiens
  CDR3 for alpha chain variable domain of TCR clone 257257 (TRAV12-3, TRAJ58)
CAMRRQETSGSRLTF

SEQ ID NO: 514514 - protein, 12 aa, Homo sapiens
  CDR3 for beta chain variable domain of TCR clone 257257 (TRBV11-2, TRBJ2-2)
CASSLPTGELFF

SEQ ID NO: 514515 - protein, 14 aa, Homo sapiens
  CDR3 for alpha chain variable domain of TCR clone 257258 (TRAV13-1, TRAJ35)
FAASKGGFGNGLHC

SEQ ID NO: 514516 - protein, 13 aa, Homo sapiens
  CDR3 for beta chain variable domain of TCR clone 257258 (TRBV7-3, TRBJ1-1)
CASSQDWGAEAFF

SEQ ID NO: 514517 - protein, 13 aa, Homo sapiens
  CDR3 for alpha chain variable domain of TCR clone 257259 (TRAV13-1, TRAJ5)
CAAEHTGRRALTF

SEQ ID NO: 514518 - protein, 14 aa, Homo sapiens
  CDR3 for beta chain variable domain of TCR clone 257259 (TRBV7-9, TRBJ2-1)
CASSPRDSLYEQFF

SEQ ID NO: 514519 - protein, 11 aa, Homo sapiens
  CDR3 for alpha chain variable domain of TCR clone 257260 (TRAV12-2, TRAJ26)
CAVNNGQNFVF

SEQ ID NO: 514520 - protein, 11 aa, Homo sapiens
  CDR3 for beta chain variable domain of TCR clone 257260 (TRBV12-4, TRBJ2-5)
CASSLQGAQYF

SEQ ID NO: 514521 - protein, 11 aa, Homo sapiens
  CDR3 for alpha chain variable domain of TCR clone 257261 (TRAV35, TRAJ30)
CAGPGDDKIIF

SEQ ID NO: 514522 - protein, 18 aa, Homo sapiens
  CDR3 for beta chain variable domain of TCR clone 257261 (TRBV7-6, TRBJ2-1)
CASSPRTSGISSYNEQFF

SEQ ID NO: 514523 - protein, 14 aa, Homo sapiens
  CDR3 for alpha chain variable domain of TCR clone 257262 (TRAV8-4, TRAJ9)
CAVRINTGGFKTIF

SEQ ID NO: 514524 - protein, 15 aa, Homo sapiens
  CDR3 for beta chain variable domain of TCR clone 257262 (TRBV4-3, TRBJ2-1)
CASSQESAIYNEQFF

SEQ ID NO: 514525 - protein, 14 aa, Homo sapiens
  CDR3 for alpha chain variable domain of TCR clone 257263 (TRAV2, TRAJ20)
CAVDLRKHDYKLSF

SEQ ID NO: 514526 - protein, 14 aa, Homo sapiens
  CDR3 for beta chain variable domain of TCR clone 257263 (TRBV12-4, TRBJ2-5)
CASSLWQKQETQYF

SEQ ID NO: 514527 - protein, 14 aa, Homo sapiens
  CDR3 for alpha chain variable domain of TCR clone 257264 (TRAV35, TRAJ33)
CAGSSQDSNYQLIW

SEQ ID NO: 514528 - protein, 15 aa, Homo sapiens
  CDR3 for beta chain variable domain of TCR clone 257264 (TRBV7-3, TRBJ2-1)
CASSPTGGGEVEQFF

SEQ ID NO: 514529 - protein, 16 aa, Homo sapiens
  CDR3 for alpha chain variable domain of TCR clone 257265 (TRAV1-2, TRAJ10)
CAVRGVLTGGGNKLTF

SEQ ID NO: 514530 - protein, 15 aa, Homo sapiens
  CDR3 for beta chain variable domain of TCR clone 257265 (TRBV7-2, TRBJ2-2)
CASSFQRGETGELFF

SEQ ID NO: 514531 - protein, 13 aa, Homo sapiens
  CDR3 for alpha chain variable domain of TCR clone 257266 (TRAV8-3, TRAJ36)
CAVGATGANNLFF

SEQ ID NO: 514532 - protein, 13 aa, Homo sapiens
  CDR3 for beta chain variable domain of TCR clone 257266 (TRBV11-2, TRBJ1-4)
CASSPGTLEKLFF

SEQ ID NO: 514533 - protein, 12 aa, Homo sapiens
  CDR3 for alpha chain variable domain of TCR clone 257267 (TRAV23/DV6, TRAJ30)
CAASKGDDKIIF

SEQ ID NO: 514534 - protein, 14 aa, Homo sapiens
  CDR3 for beta chain variable domain of TCR clone 257267 (TRBV4-2, TRBJ2-1)
CASGLDRAYNEQFF

SEQ ID NO: 514535 - protein, 14 aa, Homo sapiens
  CDR3 for alpha chain variable domain of TCR clone 257268 (TRAV3, TRAJ9)
CAVRLNTGGFKTVF

SEQ ID NO: 514536 - protein, 15 aa, Homo sapiens
  CDR3 for beta chain variable domain of TCR clone 257268 (TRBV7-2, TRBJ2-1)
CASSLASGRVNEQSF

SEQ ID NO: 514537 - protein, 16 aa, Homo sapiens
  CDR3 for alpha chain variable domain of TCR clone 257269 (TRAV1-2, TRAJ18)
CAVRVERGSTLGRLDF

SEQ ID NO: 514538 - protein, 16 aa, Homo sapiens
  CDR3 for beta chain variable domain of TCR clone 257269 (TRBV20-1, TRBJ2-7)
CSASTSGRLSSYEQYF

SEQ ID NO: 514539 - protein, 13 aa, Homo sapiens
  CDR3 for alpha chain variable domain of TCR clone 257270 (TRAV12-2, TRAJ20)
CAVNRLDDYTLSF

SEQ ID NO: 514540 - protein, 12 aa, Homo sapiens
  CDR3 for beta chain variable domain of TCR clone 257270 (TRBV19, TRBJ2-1)
CASSQISNEQFF

SEQ ID NO: 514541 - protein, 14 aa, Homo sapiens
  CDR3 for alpha chain variable domain of TCR clone 257271 (TRAV1-2, TRAJ8)
CAVREGTGFQKLVF

SEQ ID NO: 514542 - protein, 16 aa, Homo sapiens
  CDR3 for beta chain variable domain of TCR clone 257271 (TRBV12-4, TRBJ1-5)
CASSRPVGGSNQTQHF

SEQ ID NO: 514543 - protein, 16 aa, Homo sapiens
  CDR3 for alpha chain variable domain of TCR clone 257272 (TRAV12-1, TRAJ8)
CVVNGRGNTGFQKLVF

SEQ ID NO: 514544 - protein, 15 aa, Homo sapiens
  CDR3 for beta chain variable domain of TCR clone 257272 (TRBV5-1, TRBJ2-5)
CASSLGLAEQETQYF

SEQ ID NO: 514545 - protein, 12 aa, Homo sapiens
  CDR3 for alpha chain variable domain of TCR clone 257273 (TRAV8-3, TRAJ26)
CAGDNYGQNFVF

SEQ ID NO: 514546 - protein, 15 aa, Homo sapiens
  CDR3 for beta chain variable domain of TCR clone 257273 (TRBV9, TRBJ2-1)
CASSLAGSSNNEQFF

SEQ ID NO: 514547 - protein, 13 aa, Homo sapiens
  CDR3 for alpha chain variable domain of TCR clone 257274 (TRAV2, TRAJ40)
CAVVTSGTYKYIF

SEQ ID NO: 514548 - protein, 15 aa, Homo sapiens
  CDR3 for beta chain variable domain of TCR clone 257274 (TRBV19, TRBJ2-4)
CASSGPRRGENIQYF

SEQ ID NO: 514549 - protein, 16 aa, Homo sapiens
  CDR3 for alpha chain variable domain of TCR clone 257275 (TRAV23/DV6, TRAJ12)
CAAIDLGAVDSSYKLI

SEQ ID NO: 514550 - protein, 15 aa, Homo sapiens
  CDR3 for beta chain variable domain of TCR clone 257275 (TRBV12-4, TRBJ2-5)
CASTLNSGRGETQYF

SEQ ID NO: 514551 - protein, 15 aa, Homo sapiens
  CDR3 for alpha chain variable domain of TCR clone 257276 (TRAV25, TRAJ53)
CPTSNSGGSNYKLTF

SEQ ID NO: 514552 - protein, 14 aa, Homo sapiens
  CDR3 for beta chain variable domain of TCR clone 257276 (TRBV4-2, TRBJ2-1)
CASGLDRAYNEQFF

SEQ ID NO: 514553 - protein, 12 aa, Homo sapiens
  CDR3 for alpha chain variable domain of TCR clone 257277 (TRAV8-4, TRAJ43)
CAVSVNNNEMRF

SEQ ID NO: 514554 - protein, 17 aa, Homo sapiens
  CDR3 for beta chain variable domain of TCR clone 257277 (TRBV20-1, TRBJ2-2)
CSASGSGQGGLTGELVF

SEQ ID NO: 514555 - protein, 11 aa, Homo sapiens
  CDR3 for alpha chain variable domain of TCR clone 257278 (TRAV21, TRAJ11)
CAVNGYSTLTF

SEQ ID NO: 514556 - protein, 16 aa, Homo sapiens
  CDR3 for beta chain variable domain of TCR clone 257278 (TRBV7-9, TRBJ2-3)
CASSPWREVGTDTQYF

SEQ ID NO: 514557 - protein, 14 aa, Homo sapiens
  CDR3 for alpha chain variable domain of TCR clone 257279 (TRAV3, TRAJ37)
CAVKESGNTGKLIF

SEQ ID NO: 514558 - protein, 14 aa, Homo sapiens
  CDR3 for beta chain variable domain of TCR clone 257279 (TRBV2, TRBJ1-5)
CDSSENRGGQPQHF

SEQ ID NO: 514559 - protein, 17 aa, Homo sapiens
  CDR3 for alpha chain variable domain of TCR clone 257280 (TRAV12-2, TRAJ52)
CAVNPYAGGTSYGKLTF

SEQ ID NO: 514560 - protein, 14 aa, Homo sapiens
  CDR3 for beta chain variable domain of TCR clone 257280 (TRBV4-1, TRBJ2-2)
CASSQAVNTGELFF

SEQ ID NO: 514561 - protein, 13 aa, Homo sapiens
  CDR3 for alpha chain variable domain of TCR clone 257281 (TRAV13-1, TRAJ20)
CAARVSHDYKLSF

SEQ ID NO: 514562 - protein, 16 aa, Homo sapiens
  CDR3 for beta chain variable domain of TCR clone 257281 (TRBV11-1, TRBJ1-1)
CATNPRDRAFNTEAFF

SEQ ID NO: 514563 - protein, 12 aa, Homo sapiens
  CDR3 for alpha chain variable domain of TCR clone 257282 (TRAV35, TRAJ30)
CAGLNRDDKIIF

SEQ ID NO: 514564 - protein, 12 aa, Homo sapiens
  CDR3 for beta chain variable domain of TCR clone 257282 (TRBV11-2, TRBJ2-5)
CASGPPAETQYF

SEQ ID NO: 514565 - protein, 16 aa, Homo sapiens
  CDR3 for alpha chain variable domain of TCR clone 257283 (TRAV3, TRAJ21)
GAVRDIERGNFNKCYF

SEQ ID NO: 514566 - protein, 13 aa, Homo sapiens
  CDR3 for beta chain variable domain of TCR clone 257283 (TRBV27, TRBJ2-7)
CASSLTTGYEQYF

SEQ ID NO: 514567 - protein, 12 aa, Homo sapiens
  CDR3 for alpha chain variable domain of TCR clone 257284 (TRAV12-1, TRAJ34)
CVVAGATDKLIF

SEQ ID NO: 514568 - protein, 12 aa, Homo sapiens
  CDR3 for beta chain variable domain of TCR clone 257284 (TRBV7-9, TRBJ1-1)
CASSLVKGEAFF

SEQ ID NO: 514569 - protein, 12 aa, Homo sapiens
  CDR3 for alpha chain variable domain of TCR clone 257285 (TRAV2, TRAJ33)
CAFMDSNYQLIW

SEQ ID NO: 514570 - protein, 13 aa, Homo sapiens
  CDR3 for beta chain variable domain of TCR clone 257285 (TRBV7-3, TRBJ2-1)
CASSPVAYNEQFF

SEQ ID NO: 514571 - protein, 15 aa, Homo sapiens
  CDR3 for alpha chain variable domain of TCR clone 257286 (TRAV21, TRAJ53)
CATLTSGGSNYKLTF

SEQ ID NO: 514572 - protein, 14 aa, Homo sapiens
  CDR3 for beta chain variable domain of TCR clone 257286 (TRBV15, TRBJ1-2)
CATSRASVNYGYTF

SEQ ID NO: 514573 - protein, 16 aa, Homo sapiens
  CDR3 for alpha chain variable domain of TCR clone 257287 (TRAV4, TRAJ22)
CLVGDLYAGSARQLTF

SEQ ID NO: 514574 - protein, 13 aa, Homo sapiens
  CDR3 for beta chain variable domain of TCR clone 257287 (TRBV20-1, TRBJ2-5)
CSARGDYQETQYF

SEQ ID NO: 514575 - protein, 23 aa, Homo sapiens
  CDR3 for alpha chain variable domain of TCR clone 257288 (TRAV8-6, TRAJ38)
CAVRNAGNNHIQNPDPAVYQLRD

SEQ ID NO: 514576 - protein, 15 aa, Homo sapiens
  CDR3 for beta chain variable domain of TCR clone 257288 (TRBV4-1, TRBJ2-2)
CASSEGQGITGELLF

SEQ ID NO: 514577 - protein, 16 aa, Homo sapiens
  CDR3 for alpha chain variable domain of TCR clone 257289 (TRAV38-1, TRAJ56)
CAFMKRQTGANSKLTF

SEQ ID NO: 514578 - protein, 14 aa, Homo sapiens
  CDR3 for beta chain variable domain of TCR clone 257289 (TRBV7-8, TRBJ2-3)
CASSLEAGTDTQYF

SEQ ID NO: 514579 - protein, 14 aa, Homo sapiens
  CDR3 for alpha chain variable domain of TCR clone 257290 (TRAV1-2, TRAJ16)
CAVNRFSGGQKLLF

SEQ ID NO: 514580 - protein, 14 aa, Homo sapiens
  CDR3 for beta chain variable domain of TCR clone 257290 (TRBV12-5, TRBJ2-5)
CASGSRTHQETQYF

SEQ ID NO: 514581 - protein, 13 aa, Homo sapiens
  CDR3 for alpha chain variable domain of TCR clone 257291 (TRAV35, TRAJ48)
CAGHEFGNEKLTF

SEQ ID NO: 514582 - protein, 16 aa, Homo sapiens
  CDR3 for beta chain variable domain of TCR clone 257291 (TRBV19, TRBJ2-1)
CASSKAGPSSYNEQFF

SEQ ID NO: 514583 - protein, 15 aa, Homo sapiens
  CDR3 for alpha chain variable domain of TCR clone 257292 (TRAV21, TRAJ10)
CAVPLLTGGGNKLTF

SEQ ID NO: 514584 - protein, 14 aa, Homo sapiens
  CDR3 for beta chain variable domain of TCR clone 257292 (TRBV12-4, TRBJ1-1)
CASSLGTGGTEAFV

SEQ ID NO: 514585 - protein, 12 aa, Homo sapiens
  CDR3 for alpha chain variable domain of TCR clone 257293 (TRAV17, TRAJ21)
CALRYSFNKFYF

SEQ ID NO: 514586 - protein, 13 aa, Homo sapiens
  CDR3 for beta chain variable domain of TCR clone 257293 (TRBV24-1, TRBJ2-5)
CATSTGGTETQYF

SEQ ID NO: 514587 - protein, 15 aa, Homo sapiens
  CDR3 for alpha chain variable domain of TCR clone 257294 (TRAV36/DV7, TRAJ54)
GAVEKPVQGAQKLVF

SEQ ID NO: 514588 - protein, 14 aa, Homo sapiens
  CDR3 for beta chain variable domain of TCR clone 257294 (TRBV4-3, TRBJ2-2)
CASSQGHVTGELFF

SEQ ID NO: 514589 - protein, 12 aa, Homo sapiens
  CDR3 for alpha chain variable domain of TCR clone 257295 (TRAV36/DV7, TRAJ26)
CAVDNYGQNFVF

SEQ ID NO: 514590 - protein, 14 aa, Homo sapiens
  CDR3 for beta chain variable domain of TCR clone 257295 (TRBV11-1, TRBJ2-7)
CASSFRQGSYEQYF

SEQ ID NO: 514591 - protein, 14 aa, Homo sapiens
  CDR3 for alpha chain variable domain of TCR clone 257296 (TRAV1-2, TRAJ16)
CAVNRFSDGQKLLF

SEQ ID NO: 514592 - protein, 14 aa, Homo sapiens
  CDR3 for beta chain variable domain of TCR clone 257296 (TRBV13, TRBJ2-5)
CASSLGRGQETKYF

SEQ ID NO: 514593 - protein, 12 aa, Homo sapiens
  CDR3 for alpha chain variable domain of TCR clone 257297 (TRAV1-2, TRAJ29)
CAVRNLNTPLVS

SEQ ID NO: 514594 - protein, 16 aa, Homo sapiens
  CDR3 for beta chain variable domain of TCR clone 257297 (TRBV27, TRBJ2-2)
CASSFRGLVRTGELFF

SEQ ID NO: 514595 - protein, 16 aa, Homo sapiens
  CDR3 for alpha chain variable domain of TCR clone 257298 (TRAV12-3, TRAJ53)
CAMSPGSGGSSYKLTF

SEQ ID NO: 514596 - protein, 13 aa, Homo sapiens
  CDR3 for beta chain variable domain of TCR clone 257298 (TRBV4-1, TRBJ2-1)
CASSQEVQYEQFF

SEQ ID NO: 514597 - protein, 13 aa, Homo sapiens
  CDR3 for alpha chain variable domain of TCR clone 257299 (TRAV17, TRAJ34)
CATDLSNTDKLIF

SEQ ID NO: 514598 - protein, 15 aa, Homo sapiens
  CDR3 for beta chain variable domain of TCR clone 257299 (TRBV20-1, TRBJ2-3)
CSATGTSGFTDTQYF

SEQ ID NO: 514599 - protein, 16 aa, Homo sapiens
  CDR3 for alpha chain variable domain of TCR clone 257300 (TRAV3, TRAJ37)
CAVRPHGSGNTGKLIF

SEQ ID NO: 514600 - protein, 11 aa, Homo sapiens
  CDR3 for beta chain variable domain of TCR clone 257300 (TRBV10-3, TRBJ2-7)
RAISEGLEQYF

SEQ ID NO: 514601 - protein, 12 aa, Homo sapiens
  CDR3 for alpha chain variable domain of TCR clone 257301 (TRAV8-3, TRAJ26)
CAGDNYGQNFVF

SEQ ID NO: 514602 - protein, 16 aa, Homo sapiens
  CDR3 for beta chain variable domain of TCR clone 257301 (TRBV12-4, TRBJ1-5)
CASRQPVEGSNQPQHF

SEQ ID NO: 514603 - protein, 16 aa, Homo sapiens
  CDR3 for alpha chain variable domain of TCR clone 257302 (TRAV13-2, TRAJ23)
CAESPLGRNQGGKLIF

SEQ ID NO: 514604 - protein, 16 aa, Homo sapiens
  CDR3 for beta chain variable domain of TCR clone 257302 (TRBV6-1, TRBJ2-5)
CASSDTLDRGAETQYF

SEQ ID NO: 514605 - protein, 13 aa, Homo sapiens
  CDR3 for alpha chain variable domain of TCR clone 257303 (TRAV13-2, TRAJ13)
CAERPGGYRKVTF

SEQ ID NO: 514606 - protein, 15 aa, Homo sapiens
  CDR3 for beta chain variable domain of TCR clone 257303 (TRBV11-3, TRBJ2-7)
CASSPGPASSYEQYF

SEQ ID NO: 514607 - protein, 12 aa, Homo sapiens
  CDR3 for alpha chain variable domain of TCR clone 257304 (TRAV20, TRAJ56)
CAVTGANSKLTF

SEQ ID NO: 514608 - protein, 14 aa, Homo sapiens
  CDR3 for beta chain variable domain of TCR clone 257304 (TRBV10-2, TRBJ1-5)
CASSSTGRNQPQHF

SEQ ID NO: 514609 - protein, 14 aa, Homo sapiens
  CDR3 for alpha chain variable domain of TCR clone 257305 (TRAV38-1, TRAJ31)
CAFMKHDNNARLMF

SEQ ID NO: 514610 - protein, 12 aa, Homo sapiens
  CDR3 for beta chain variable domain of TCR clone 257305 (TRBV23-1, TRBJ2-1)
PATGPTYNEQFF

SEQ ID NO: 514611 - protein, 14 aa, Homo sapiens
  CDR3 for alpha chain variable domain of TCR clone 257306 (TRAV12-2, TRAJ13)
CAVNPSGGYQKVTV

SEQ ID NO: 514612 - protein, 13 aa, Homo sapiens
  CDR3 for beta chain variable domain of TCR clone 257306 (TRBV20-1, TRBJ1-6)
CSAKLGGTSPLHF

SEQ ID NO: 514613 - protein, 12 aa, Homo sapiens
  CDR3 for alpha chain variable domain of TCR clone 257307 (TRAV2, TRAJ9)
CAVGAGGFKTIF

SEQ ID NO: 514614 - protein, 14 aa, Homo sapiens
  CDR3 for beta chain variable domain of TCR clone 257307 (TRBV19, TRBJ1-5)
CASRAPDSFLSQHF

SEQ ID NO: 514615 - protein, 19 aa, Homo sapiens
  CDR3 for alpha chain variable domain of TCR clone 257308 (TRAV26-1, TRAJ28)
CIFRVAHAYSGAVSYQLTF

SEQ ID NO: 514616 - protein, 17 aa, Homo sapiens
  CDR3 for beta chain variable domain of TCR clone 257308 (TRBV4-1, TRBJ1-4)
CASSKEGPRGVEEKLFF

SEQ ID NO: 514617 - protein, 16 aa, Homo sapiens
  CDR3 for alpha chain variable domain of TCR clone 257309 (TRAV3, TRAJ10)
CAVRDMRAGGGNKLTF

SEQ ID NO: 514618 - protein, 15 aa, Homo sapiens
  CDR3 for beta chain variable domain of TCR clone 257309 (TRBV4-1, TRBJ2-7)
CASSQNTGRLYEQYF

SEQ ID NO: 514619 - protein, 15 aa, Homo sapiens
  CDR3 for alpha chain variable domain of TCR clone 257310 (TRAV21, TRAJ38)
CAVRQDAGNNRKLIW

SEQ ID NO: 514620 - protein, 15 aa, Homo sapiens
  CDR3 for beta chain variable domain of TCR clone 257310 (TRBV6-1, TRBJ2-1)
CASSEAAYSYNEQFF

SEQ ID NO: 514621 - protein, 15 aa, Homo sapiens
  CDR3 for alpha chain variable domain of TCR clone 257311 (TRAV8-2, TRAJ40)
CVVFGTTSGTYKYIF

SEQ ID NO: 514622 - protein, 16 aa, Homo sapiens
  CDR3 for beta chain variable domain of TCR clone 257311 (TRBV7-3, TRBJ2-1)
CASSLEGYRAYNEQFF

SEQ ID NO: 514623 - protein, 14 aa, Homo sapiens
  CDR3 for alpha chain variable domain of TCR clone 257312 (TRAV1-2, TRAJ16)
CAVNRFSDGQKLLF

SEQ ID NO: 514624 - protein, 15 aa, Homo sapiens
  CDR3 for beta chain variable domain of TCR clone 257312 (TRBV9, TRBJ1-6)
CASSVAGTGDSTLHF

SEQ ID NO: 514625 - protein, 13 aa, Homo sapiens
  CDR3 for alpha chain variable domain of TCR clone 257313 (TRAV27, TRAJ41)
CAGEGNSGYALNF

SEQ ID NO: 514626 - protein, 14 aa, Homo sapiens
  CDR3 for beta chain variable domain of TCR clone 257313 (TRBV4-1, TRBJ1-1)
CASSRSGQSFEAFL

SEQ ID NO: 514627 - protein, 14 aa, Homo sapiens
  CDR3 for alpha chain variable domain of TCR clone 257314 (TRAV1-2, TRAJ16)
CAVNRFSYGQKLLF

SEQ ID NO: 514628 - protein, 14 aa, Homo sapiens
  CDR3 for beta chain variable domain of TCR clone 257314 (TRBV6-1, TRBJ2-2)
CASTWQGNTGELFF

SEQ ID NO: 514629 - protein, 14 aa, Homo sapiens
  CDR3 for alpha chain variable domain of TCR clone 257315 (TRAV1-2, TRAJ8)
CALREDTGFQKLVF

SEQ ID NO: 514630 - protein, 15 aa, Homo sapiens
  CDR3 for beta chain variable domain of TCR clone 257315 (TRBV20-1, TRBJ2-7)
CSARGPLAGGREQYF

SEQ ID NO: 514631 - protein, 22 aa, Homo sapiens
  CDR3 for alpha chain variable domain of TCR clone 257316 (TRAV3, TRAJ38)
CAVRDCLNAGNNHIQNPDPAVF

SEQ ID NO: 514632 - protein, 14 aa, Homo sapiens
  CDR3 for beta chain variable domain of TCR clone 257316 (TRBV5-5, TRBJ1-5)
CASSGQGVDQPQHF

SEQ ID NO: 514633 - protein, 14 aa, Homo sapiens
  CDR3 for alpha chain variable domain of TCR clone 257317 (TRAV13-2, TRAJ17)
CAENSKAAGNKLTF

SEQ ID NO: 514634 - protein, 14 aa, Homo sapiens
  CDR3 for beta chain variable domain of TCR clone 257317 (TRBV4-1, TRBJ2-2)
CASSQAVNTEELFF

SEQ ID NO: 514635 - protein, 11 aa, Homo sapiens
  CDR3 for alpha chain variable domain of TCR clone 257318 (TRAV12-2, TRAJ30)
CAVGRDDQIIF

SEQ ID NO: 514636 - protein, 14 aa, Homo sapiens
  CDR3 for beta chain variable domain of TCR clone 257318 (TRBV6-1, TRBJ1-3)
CASVQGGGGNTIYF

SEQ ID NO: 514637 - protein, 11 aa, Homo sapiens
  CDR3 for alpha chain variable domain of TCR clone 257319 (TRAV1-2, TRAJ40)
CAVPGTYKYIF

SEQ ID NO: 514638 - protein, 17 aa, Homo sapiens
  CDR3 for beta chain variable domain of TCR clone 257319 (TRBV7-3, TRBJ2-3)
CASSPGGLAGFGDTQYF

SEQ ID NO: 514639 - protein, 12 aa, Homo sapiens
  CDR3 for alpha chain variable domain of TCR clone 257320 (TRAV12-3, TRAJ17)
CAMTLTGNKLTF

SEQ ID NO: 514640 - protein, 15 aa, Homo sapiens
  CDR3 for beta chain variable domain of TCR clone 257320 (TRBV6-4, TRBJ2-1)
CASSSGTSGYNEQFF

SEQ ID NO: 514641 - protein, 14 aa, Homo sapiens
  CDR3 for alpha chain variable domain of TCR clone 257321 (TRAV27, TRAJ36)
CTGPPKRGANNLFF

SEQ ID NO: 514642 - protein, 15 aa, Homo sapiens
  CDR3 for beta chain variable domain of TCR clone 257321 (TRBV18, TRBJ2-7)
CASSPASTPNYEQYF

SEQ ID NO: 514643 - protein, 17 aa, Homo sapiens
  CDR3 for alpha chain variable domain of TCR clone 257322 (TRAV23/DV6, TRAJ57)
CAASSTLSQGGSEKLVF

SEQ ID NO: 514644 - protein, 17 aa, Homo sapiens
  CDR3 for beta chain variable domain of TCR clone 257322 (TRBV11-2, TRBJ2-1)
CASSLYPPGVEYNEQFF

SEQ ID NO: 514645 - protein, 22 aa, Homo sapiens
  CDR3 for alpha chain variable domain of TCR clone 257323 (TRAV26-1, TRAJ38)
CIADNAGNNHIQNPDPAVYQLR

SEQ ID NO: 514646 - protein, 17 aa, Homo sapiens
  CDR3 for beta chain variable domain of TCR clone 257323 (TRBV11-2, TRBJ2-6)
CASSQRDIFSGANVLTF

SEQ ID NO: 514647 - protein, 11 aa, Homo sapiens
  CDR3 for alpha chain variable domain of TCR clone 257324 (TRAV21, TRAJ11)
CAVNGYSTLTF

SEQ ID NO: 514648 - protein, 14 aa, Homo sapiens
  CDR3 for beta chain variable domain of TCR clone 257324 (TRBV7-2, TRBJ2-7)
CASRSQGAAYEQYF

SEQ ID NO: 514649 - protein, 11 aa, Homo sapiens
  CDR3 for alpha chain variable domain of TCR clone 257325 (TRAV13-1, TRAJ30)
CAASRDDKIIF

SEQ ID NO: 514650 - protein, 13 aa, Homo sapiens
  CDR3 for beta chain variable domain of TCR clone 257325 (TRBV7-7, TRBJ2-5)
RASSRSGQETQYF

SEQ ID NO: 514651 - protein, 15 aa, Homo sapiens
  CDR3 for alpha chain variable domain of TCR clone 257326 (TRAV1-2, TRAJ9)
CAVRDDGTGGFKTIF

SEQ ID NO: 514652 - protein, 17 aa, Homo sapiens
  CDR3 for beta chain variable domain of TCR clone 257326 (TRBV20-1, TRBJ2-1)
YSASSSGLAGSYNEQFF

SEQ ID NO: 514653 - protein, 14 aa, Homo sapiens
  CDR3 for alpha chain variable domain of TCR clone 257327 (TRAV8-6, TRAJ8)
CAVNENTGFQKLVF

SEQ ID NO: 514654 - protein, 14 aa, Homo sapiens
  CDR3 for beta chain variable domain of TCR clone 257327 (TRBV12-5, TRBJ2-5)
CASGPRTHQETQYF

SEQ ID NO: 514655 - protein, 15 aa, Homo sapiens
  CDR3 for alpha chain variable domain of TCR clone 257328 (TRAV8-3, TRAJ45)
CASSYSGGGADGLTF

SEQ ID NO: 514656 - protein, 16 aa, Homo sapiens
  CDR3 for beta chain variable domain of TCR clone 257328 (TRBV7-3, TRBJ2-3)
CASSLGLAGVADTQYF

SEQ ID NO: 514657 - protein, 19 aa, Homo sapiens
  CDR3 for alpha chain variable domain of TCR clone 257329 (TRAV8-6, TRAJ45)
CAVSDLTEDSGGGADGLTF

SEQ ID NO: 514658 - protein, 14 aa, Homo sapiens
  CDR3 for beta chain variable domain of TCR clone 257329 (TRBV13, TRBJ2-5)
CASSLERVGETQYF

SEQ ID NO: 514659 - protein, 14 aa, Homo sapiens
  CDR3 for alpha chain variable domain of TCR clone 257330 (TRAV1-2, TRAJ16)
CAVNRFSDGQTLLF

SEQ ID NO: 514660 - protein, 14 aa, Homo sapiens
  CDR3 for beta chain variable domain of TCR clone 257330 (TRBV7-9, TRBJ2-3)
CASSLEAGTDTQYF

SEQ ID NO: 514661 - protein, 16 aa, Homo sapiens
  CDR3 for alpha chain variable domain of TCR clone 257331 (TRAV12-3, TRAJ53)
CAMSPGSGGSNYKLTF

SEQ ID NO: 514662 - protein, 10 aa, Homo sapiens
  CDR3 for beta chain variable domain of TCR clone 257331 (TRBV2, TRBJ2-5)
CASSAATQYF

SEQ ID NO: 514663 - protein, 11 aa, Homo sapiens
  CDR3 for alpha chain variable domain of TCR clone 257332 (TRAV21, TRAJ34)
CAHYKTDKLIF

SEQ ID NO: 514664 - protein, 11 aa, Homo sapiens
  CDR3 for beta chain variable domain of TCR clone 257332 (TRBV29-1, TRBJ2-5)
CSEDRTGTQYF

SEQ ID NO: 514665 - protein, 13 aa, Homo sapiens
  CDR3 for alpha chain variable domain of TCR clone 257333 (TRAV36/DV7, TRAJ30)
CAVEPVRDDKIIF

SEQ ID NO: 514666 - protein, 16 aa, Homo sapiens
  CDR3 for beta chain variable domain of TCR clone 257333 (TRBV7-3, TRBJ2-2)
CASSLKRGTLSGELFF

SEQ ID NO: 514667 - protein, 14 aa, Homo sapiens
  CDR3 for alpha chain variable domain of TCR clone 257334 (TRAV13-1, TRAJ40)
CAASMTSGTYKYIF

SEQ ID NO: 514668 - protein, 15 aa, Homo sapiens
  CDR3 for beta chain variable domain of TCR clone 257334 (TRBV7-3, TRBJ2-1)
WASSPTGGGEVEQFF

SEQ ID NO: 514669 - protein, 14 aa, Homo sapiens
  CDR3 for alpha chain variable domain of TCR clone 257335 (TRAV13-2, TRAJ11)
CAETGNSGYSTLTF

SEQ ID NO: 514670 - protein, 11 aa, Homo sapiens
  CDR3 for beta chain variable domain of TCR clone 257335 (TRBV10-3, TRBJ2-7)
CAFSEGLEQYF

SEQ ID NO: 514671 - protein, 16 aa, Homo sapiens
  CDR3 for alpha chain variable domain of TCR clone 257336 (TRAV3, TRAJ3)
CAVGDRAKSSASNIIF

SEQ ID NO: 514672 - protein, 13 aa, Homo sapiens
  CDR3 for beta chain variable domain of TCR clone 257336 (TRBV10-3, TRBJ2-7)
CASKLAVNYEQYF

SEQ ID NO: 514673 - protein, 16 aa, Homo sapiens
  CDR3 for alpha chain variable domain of TCR clone 257337 (TRAV30, TRAJ24)
CGTEIVDADSWGKLQF

SEQ ID NO: 514674 - protein, 15 aa, Homo sapiens
  CDR3 for beta chain variable domain of TCR clone 257337 (TRBV20-1, TRBJ2-6)
CSARDRGPGANVLTF

SEQ ID NO: 514675 - protein, 13 aa, Homo sapiens
  CDR3 for alpha chain variable domain of TCR clone 257338 (TRAV3, TRAJ21)
CALREPDFNKFYF

SEQ ID NO: 514676 - protein, 14 aa, Homo sapiens
  CDR3 for beta chain variable domain of TCR clone 257338 (TRBV4-2, TRBJ2-1)
CASGLDRAYNEQFF

SEQ ID NO: 514677 - protein, 14 aa, Homo sapiens
  CDR3 for alpha chain variable domain of TCR clone 257339 (TRAV35, TRAJ33)
CAGSSQDSNYQLIW

SEQ ID NO: 514678 - protein, 15 aa, Homo sapiens
  CDR3 for beta chain variable domain of TCR clone 257339 (TRBV5-1, TRBJ1-4)
FAPAAWKYGNEKLFF

SEQ ID NO: 514679 - protein, 15 aa, Homo sapiens
  CDR3 for alpha chain variable domain of TCR clone 257340 (TRAV17, TRAJ45)
CSTAYSGGGADGLTF

SEQ ID NO: 514680 - protein, 11 aa, Homo sapiens
  CDR3 for beta chain variable domain of TCR clone 257340 (TRBV7-8, TRBJ2-7)
CASSLSLEQYF

SEQ ID NO: 514681 - protein, 12 aa, Homo sapiens
  CDR3 for alpha chain variable domain of TCR clone 257341 (TRAV20, TRAJ23)
CAVDNQGGKLIF

SEQ ID NO: 514682 - protein, 12 aa, Homo sapiens
  CDR3 for beta chain variable domain of TCR clone 257341 (TRBV7-8, TRBJ2-7)
CASSLGDREQYF

SEQ ID NO: 514683 - protein, 18 aa, Homo sapiens
  CDR3 for alpha chain variable domain of TCR clone 257342 (TRAV13-1, TRAJ52)
CAASKRSAGGTSYGKLTF

SEQ ID NO: 514684 - protein, 12 aa, Homo sapiens
  CDR3 for beta chain variable domain of TCR clone 257342 (TRBV20-1, TRBJ2-3)
CSARVGTDAQYF

SEQ ID NO: 514685 - protein, 11 aa, Homo sapiens
  CDR3 for alpha chain variable domain of TCR clone 257343 (TRAV2, TRAJ33)
CAVESNYQLIW

SEQ ID NO: 514686 - protein, 15 aa, Homo sapiens
  CDR3 for beta chain variable domain of TCR clone 257343 (TRBV29-1, TRBJ2-7)
CSVEFFDRGSYEQYF

SEQ ID NO: 514687 - protein, 15 aa, Homo sapiens
  CDR3 for alpha chain variable domain of TCR clone 257344 (TRAV13-2, TRAJ10)
RAENRDTGGGNKLTF

SEQ ID NO: 514688 - protein, 16 aa, Homo sapiens
  CDR3 for beta chain variable domain of TCR clone 257344 (TRBV2, TRBJ1-3)
CASSRTGGSTGNTIYF

SEQ ID NO: 514689 - protein, 11 aa, Homo sapiens
  CDR3 for alpha chain variable domain of TCR clone 257345 (TRAV12-2, TRAJ31)
CAILNKARLMF

SEQ ID NO: 514690 - protein, 13 aa, Homo sapiens
  CDR3 for beta chain variable domain of TCR clone 257345 (TRBV20-1, TRBJ1-1)
CSARLGQGTEAFF

SEQ ID NO: 514691 - protein, 13 aa, Homo sapiens
  CDR3 for alpha chain variable domain of TCR clone 257346 (TRAV23/DV6, TRAJ27)
CAASKPMQAHQPL

SEQ ID NO: 514692 - protein, 14 aa, Homo sapiens
  CDR3 for beta chain variable domain of TCR clone 257346 (TRBV5-4, TRBJ1-1)
CASSLDSRRDEAFF

SEQ ID NO: 514693 - protein, 14 aa, Homo sapiens
  CDR3 for alpha chain variable domain of TCR clone 257347 (TRAV2, TRAJ37)
CAVDFTSNTRKLIF

SEQ ID NO: 514694 - protein, 15 aa, Homo sapiens
  CDR3 for beta chain variable domain of TCR clone 257347 (TRBV20-1, TRBJ1-1)
CSASQGVTGNTEAFF

SEQ ID NO: 514695 - protein, 15 aa, Homo sapiens
  CDR3 for alpha chain variable domain of TCR clone 257348 (TRAV26-1, TRAJ44)
CIVRANTGTASKLTF

SEQ ID NO: 514696 - protein, 14 aa, Homo sapiens
  CDR3 for beta chain variable domain of TCR clone 257348 (TRBV12-4, TRBJ2-7)
CASSPAGLKYEQYF

SEQ ID NO: 514697 - protein, 13 aa, Homo sapiens
  CDR3 for alpha chain variable domain of TCR clone 257349 (TRAV21, TRAJ20)
CAVGLRVDYKLSC

SEQ ID NO: 514698 - protein, 15 aa, Homo sapiens
  CDR3 for beta chain variable domain of TCR clone 257349 (TRBV27, TRBJ2-1)
CASSNGGGSSNEQFF

SEQ ID NO: 514699 - protein, 13 aa, Homo sapiens
  CDR3 for alpha chain variable domain of TCR clone 257350 (TRAV21, TRAJ27)
CAARPGNAGKSTF

SEQ ID NO: 514700 - protein, 11 aa, Homo sapiens
  CDR3 for beta chain variable domain of TCR clone 257350 (TRBV7-9, TRBJ2-3)
CASSGPDTQYF

SEQ ID NO: 514701 - protein, 16 aa, Homo sapiens
  CDR3 for alpha chain variable domain of TCR clone 257351 (TRAV1-2, TRAJ10)
CAVRGVLTGGGNKLTF

SEQ ID NO: 514702 - protein, 20 aa, Homo sapiens
  CDR3 for beta chain variable domain of TCR clone 257351 (TRBV7-8, TRBJ2-2)
CASGHLFPGPTIHITGELFF

SEQ ID NO: 514703 - protein, 15 aa, Homo sapiens
  CDR3 for alpha chain variable domain of TCR clone 257352 (TRAV3, TRAJ24)
CAVRDKMTDGGNCRL

SEQ ID NO: 514704 - protein, 14 aa, Homo sapiens
  CDR3 for beta chain variable domain of TCR clone 257352 (TRBV7-2, TRBJ2-3)
CASSQTGSSYTQYF

SEQ ID NO: 514705 - protein, 16 aa, Homo sapiens
  CDR3 for alpha chain variable domain of TCR clone 257353 (TRAV12-2, TRAJ10)
CAVNRVLTGGGNKLTF

SEQ ID NO: 514706 - protein, 14 aa, Homo sapiens
  CDR3 for beta chain variable domain of TCR clone 257353 (TRBV6-5, TRBJ2-7)
CASSPHRGLREQYF

SEQ ID NO: 514707 - protein, 14 aa, Homo sapiens
  CDR3 for alpha chain variable domain of TCR clone 257354 (TRAV12-3, TRAJ42)
CAMSYGGSQGNLIF

SEQ ID NO: 514708 - protein, 15 aa, Homo sapiens
  CDR3 for beta chain variable domain of TCR clone 257354 (TRBV5-7, TRBJ1-5)
CASSYGKLWDQPQHF

SEQ ID NO: 514709 - protein, 16 aa, Homo sapiens
  CDR3 for alpha chain variable domain of TCR clone 257355 (TRAV12-2, TRAJ32)
CAVNLGQGGPTNKLIF

SEQ ID NO: 514710 - protein, 15 aa, Homo sapiens
  CDR3 for beta chain variable domain of TCR clone 257355 (TRBV20-1, TRBJ2-7)
CSARGPLAGGREQYF

SEQ ID NO: 514711 - protein, 12 aa, Homo sapiens
  CDR3 for alpha chain variable domain of TCR clone 257356 (TRAV12-1, TRAJ34)
CVVTFNTDKLIF

SEQ ID NO: 514712 - protein, 14 aa, Homo sapiens
  CDR3 for beta chain variable domain of TCR clone 257356 (TRBV19, TRBJ1-1)
CASLRTGVNTEAFF

SEQ ID NO: 514713 - protein, 14 aa, Homo sapiens
  CDR3 for alpha chain variable domain of TCR clone 257357 (TRAV1-2, TRAJ16)
CAVNRFSDGQKLLF

SEQ ID NO: 514714 - protein, 15 aa, Homo sapiens
  CDR3 for beta chain variable domain of TCR clone 257357 (TRBV20-1, TRBJ2-7)
CSARVRVSGMDEQYF

SEQ ID NO: 514715 - protein, 14 aa, Homo sapiens
  CDR3 for alpha chain variable domain of TCR clone 257358 (TRAV12-1, TRAJ12)
CVVTRMDSSYKLIL

SEQ ID NO: 514716 - protein, 13 aa, Homo sapiens
  CDR3 for beta chain variable domain of TCR clone 257358 (TRBV20-1, TRBJ1-1)
CSARGGGNTETFF

SEQ ID NO: 514717 - protein, 13 aa, Homo sapiens
  CDR3 for alpha chain variable domain of TCR clone 257359 (TRAV12-1, TRAJ39)
CVVPQRAGNMLTF

SEQ ID NO: 514718 - protein, 16 aa, Homo sapiens
  CDR3 for beta chain variable domain of TCR clone 257359 (TRBV11-2, TRBJ2-3)
CASSSRTSGGAGTQYF

SEQ ID NO: 514719 - protein, 13 aa, Homo sapiens
  CDR3 for alpha chain variable domain of TCR clone 257360 (TRAV12-2, TRAJ18)
CAVRGSTLGRLYF

SEQ ID NO: 514720 - protein, 16 aa, Homo sapiens
  CDR3 for beta chain variable domain of TCR clone 257360 (TRBV4-1, TRBJ2-3)
CASSQSTSGAEDTQYF

SEQ ID NO: 514721 - protein, 13 aa, Homo sapiens
  CDR3 for alpha chain variable domain of TCR clone 257361 (TRAV2, TRAJ23)
CAVMGNQGGKLIF

SEQ ID NO: 514722 - protein, 15 aa, Homo sapiens
  CDR3 for beta chain variable domain of TCR clone 257361 (TRBV11-2, TRBJ2-1)
CASSYSTIAYNEQFF

SEQ ID NO: 514723 - protein, 14 aa, Homo sapiens
  CDR3 for alpha chain variable domain of TCR clone 257362 (TRAV1-2, TRAJ8)
CAVREDTGFQKLVF

SEQ ID NO: 514724 - protein, 15 aa, Homo sapiens
  CDR3 for beta chain variable domain of TCR clone 257362 (TRBV6-3, TRBJ2-7)
CTSSSPGTVFYVQYF

SEQ ID NO: 514725 - protein, 15 aa, Homo sapiens
  CDR3 for alpha chain variable domain of TCR clone 257363 (TRAV2, TRAJ9)
CAVEDRGTGGFKTIF

SEQ ID NO: 514726 - protein, 12 aa, Homo sapiens
  CDR3 for beta chain variable domain of TCR clone 257363 (TRBV7-9, TRBJ2-7)
CASSLEGYEQYF

SEQ ID NO: 514727 - protein, 14 aa, Homo sapiens
  CDR3 for alpha chain variable domain of TCR clone 257364 (TRAV9-2, TRAJ39)
CALYIYNAGNLLTF

SEQ ID NO: 514728 - protein, 13 aa, Homo sapiens
  CDR3 for beta chain variable domain of TCR clone 257364 (TRBV11-3, TRBJ1-1)
CASSRQPNTEAFF

SEQ ID NO: 514729 - protein, 12 aa, Homo sapiens
  CDR3 for alpha chain variable domain of TCR clone 257365 (TRAV13-1, TRAJ20)
CAASMGDYKLSF

SEQ ID NO: 514730 - protein, 13 aa, Homo sapiens
  CDR3 for beta chain variable domain of TCR clone 257365 (TRBV19, TRBJ2-2)
CASKVSAAGELFF

SEQ ID NO: 514731 - protein, 13 aa, Homo sapiens
  CDR3 for alpha chain variable domain of TCR clone 257366 (TRAV21, TRAJ27)
CAVRPGNAGKSTF

SEQ ID NO: 514732 - protein, 14 aa, Homo sapiens
  CDR3 for beta chain variable domain of TCR clone 257366 (TRBV7-6, TRBJ2-3)
CASSLGTVTDTQYC

SEQ ID NO: 514733 - protein, 15 aa, Homo sapiens
  CDR3 for alpha chain variable domain of TCR clone 257367 (TRAV12-3, TRAJ6)
CAMSATTGGSYIPTF

SEQ ID NO: 514734 - protein, 12 aa, Homo sapiens
  CDR3 for beta chain variable domain of TCR clone 257367 (TRBV12-5, TRBJ2-5)
CASGQGVETQYF

SEQ ID NO: 514735 - protein, 14 aa, Homo sapiens
  CDR3 for alpha chain variable domain of TCR clone 257368 (TRAV38-1, TRAJ40)
CALRPTSGTYKYIF

SEQ ID NO: 514736 - protein, 13 aa, Homo sapiens
  CDR3 for beta chain variable domain of TCR clone 257368 (TRBV7-3, TRBJ1-1)
CASSQDWGAEAFL

SEQ ID NO: 514737 - protein, 14 aa, Homo sapiens
  CDR3 for alpha chain variable domain of TCR clone 257369 (TRAV38-1, TRAJ28)
CAFTSGAGSYQLTF

SEQ ID NO: 514738 - protein, 18 aa, Homo sapiens
  CDR3 for beta chain variable domain of TCR clone 257369 (TRBV7-9, TRBJ1-1)
CASSNPWDTMGMNTEAFF

SEQ ID NO: 514739 - protein, 18 aa, Homo sapiens
  CDR3 for alpha chain variable domain of TCR clone 257370 (TRAV21, TRAJ53)
CAVKGGENSGGSNYKLTF

SEQ ID NO: 514740 - protein, 13 aa, Homo sapiens
  CDR3 for beta chain variable domain of TCR clone 257370 (TRBV12-4, TRBJ1-1)
CASSPGTGFEAFV

SEQ ID NO: 514741 - protein, 13 aa, Homo sapiens
  CDR3 for alpha chain variable domain of TCR clone 257371 (TRAV3, TRAJ27)
CAVRPLGAGKLTF

SEQ ID NO: 514742 - protein, 13 aa, Homo sapiens
  CDR3 for beta chain variable domain of TCR clone 257371 (TRBV7-2, TRBJ2-2)
CASSLAVTGELFF

SEQ ID NO: 514743 - protein, 14 aa, Homo sapiens
  CDR3 for alpha chain variable domain of TCR clone 257372 (TRAV12-3, TRAJ29)
CAMILLSGNTPLVF

SEQ ID NO: 514744 - protein, 16 aa, Homo sapiens
  CDR3 for beta chain variable domain of TCR clone 257372 (TRBV28, TRBJ2-7)
CAISSGTSGRGYEQYF

SEQ ID NO: 514745 - protein, 14 aa, Homo sapiens
  CDR3 for alpha chain variable domain of TCR clone 257373 (TRAV17, TRAJ11)
CATDARSGYSTLTF

SEQ ID NO: 514746 - protein, 16 aa, Homo sapiens
  CDR3 for beta chain variable domain of TCR clone 257373 (TRBV14, TRBJ1-5)
CASSLSRVHNNQPQHF

SEQ ID NO: 514747 - protein, 13 aa, Homo sapiens
  CDR3 for alpha chain variable domain of TCR clone 257374 (TRAV29/DV5, TRAJ31)
CAASRNNNARLMF

SEQ ID NO: 514748 - protein, 12 aa, Homo sapiens
  CDR3 for beta chain variable domain of TCR clone 257374 (TRBV6-3, TRBJ2-1)
CASSGSYNEQFF

SEQ ID NO: 514749 - protein, 15 aa, Homo sapiens
  CDR3 for alpha chain variable domain of TCR clone 257375 (TRAV35, TRAJ40)
CAGQLGTSGTYKYIF

SEQ ID NO: 514750 - protein, 22 aa, Homo sapiens
  CDR3 for beta chain variable domain of TCR clone 257375 (TRBV7-3, TRBJ2-7)
GGTQPCISEPASSSGTGLEQYF

SEQ ID NO: 514751 - protein, 19 aa, Homo sapiens
  CDR3 for alpha chain variable domain of TCR clone 257376 (TRAV38-2/DV8, TRAJ45)
CAYRRSYEYSGGGADGLTF

SEQ ID NO: 514752 - protein, 13 aa, Homo sapiens
  CDR3 for beta chain variable domain of TCR clone 257376 (TRBV20-1, TRBJ1-1)
CSARVGGNTEAFF

SEQ ID NO: 514753 - protein, 13 aa, Homo sapiens
  CDR3 for alpha chain variable domain of TCR clone 257377 (TRAV21, TRAJ57)
CAVTQGGSEKPVF

SEQ ID NO: 514754 - protein, 16 aa, Homo sapiens
  CDR3 for beta chain variable domain of TCR clone 257377 (TRBV29-1, TRBJ2-7)
CSVEAAEDGTAYEQYF

SEQ ID NO: 514755 - protein, 10 aa, Homo sapiens
  CDR3 for alpha chain variable domain of TCR clone 257378 (TRAV26-1, TRAJ22)
CIVSLNFFWF

SEQ ID NO: 514756 - protein, 15 aa, Homo sapiens
  CDR3 for beta chain variable domain of TCR clone 257378 (TRBV10-1, TRBJ2-3)
CASSATSGGFDTQYF

SEQ ID NO: 514757 - protein, 12 aa, Homo sapiens
  CDR3 for alpha chain variable domain of TCR clone 257379 (TRAV12-3, TRAJ17)
CAMTLTGNKLTF

SEQ ID NO: 514758 - protein, 15 aa, Homo sapiens
  CDR3 for beta chain variable domain of TCR clone 257379 (TRBV2, TRBJ2-2)
CASSGFGAGTGELFF

SEQ ID NO: 514759 - protein, 13 aa, Homo sapiens
  CDR3 for alpha chain variable domain of TCR clone 257380 (TRAV13-2, TRAJ16)
CADARTDGQKLLF

SEQ ID NO: 514760 - protein, 14 aa, Homo sapiens
  CDR3 for beta chain variable domain of TCR clone 257380 (TRBV7-9, TRBJ2-3)
CASSLEDGTDTQYF

SEQ ID NO: 514761 - protein, 16 aa, Homo sapiens
  CDR3 for alpha chain variable domain of TCR clone 257381 (TRAV14/DV4, TRAJ53)
CAMREGGGGSNYKLTF

SEQ ID NO: 514762 - protein, 20 aa, Homo sapiens
  CDR3 for beta chain variable domain of TCR clone 257381 (TRBV28, TRBJ2-1)
CASTPIGRSPGLAGGNEQFF

SEQ ID NO: 514763 - protein, 12 aa, Homo sapiens
  CDR3 for alpha chain variable domain of TCR clone 257382 (TRAV8-3, TRAJ20)
CAVGANDYKLSF

SEQ ID NO: 514764 - protein, 16 aa, Homo sapiens
  CDR3 for beta chain variable domain of TCR clone 257382 (TRBV19, TRBJ1-1)
CASRFGGPVTGTEAFF

SEQ ID NO: 514765 - protein, 13 aa, Homo sapiens
  CDR3 for alpha chain variable domain of TCR clone 257383 (TRAV1-2, TRAJ24)
CAVTTDSWGKLQF

SEQ ID NO: 514766 - protein, 15 aa, Homo sapiens
  CDR3 for beta chain variable domain of TCR clone 257383 (TRBV2, TRBJ2-5)
CASTRDGGPQETQYF

SEQ ID NO: 514767 - protein, 11 aa, Homo sapiens
  CDR3 for alpha chain variable domain of TCR clone 257384 (TRAV2, TRAJ38)
CAAGDNRKLIW

SEQ ID NO: 514768 - protein, 14 aa, Homo sapiens
  CDR3 for beta chain variable domain of TCR clone 257384 (TRBV4-1, TRBJ2-2)
CASSQAVNTGELFF

SEQ ID NO: 514769 - protein, 15 aa, Homo sapiens
  CDR3 for alpha chain variable domain of TCR clone 257385 (TRAV27, TRAJ38)
CAARRNAGNNRKLIW

SEQ ID NO: 514770 - protein, 14 aa, Homo sapiens
  CDR3 for beta chain variable domain of TCR clone 257385 (TRBV7-2, TRBJ2-7)
CASSLKTSFYEQYF

SEQ ID NO: 514771 - protein, 14 aa, Homo sapiens
  CDR3 for alpha chain variable domain of TCR clone 257386 (TRAV2, TRAJ22)
CAVGRGGSARQLTF

SEQ ID NO: 514772 - protein, 13 aa, Homo sapiens
  CDR3 for beta chain variable domain of TCR clone 257386 (TRBV12-4, TRBJ2-1)
CASSLAENNEQFF

SEQ ID NO: 514773 - protein, 16 aa, Homo sapiens
  CDR3 for alpha chain variable domain of TCR clone 257387 (TRAV30, TRAJ24)
CGTEIVDADSWGKFQF

SEQ ID NO: 514774 - protein, 15 aa, Homo sapiens
  CDR3 for beta chain variable domain of TCR clone 257387 (TRBV27, TRBJ2-1)
CDSSNGGGSSNEQFF

SEQ ID NO: 514775 - protein, 12 aa, Homo sapiens
  CDR3 for alpha chain variable domain of TCR clone 257388 (TRAV13-1, TRAJ21)
CAAKEGFNKFYF

SEQ ID NO: 514776 - protein, 14 aa, Homo sapiens
  CDR3 for beta chain variable domain of TCR clone 257388 (TRBV5-4, TRBJ1-1)
WASSLDSRRDEAFV

SEQ ID NO: 514777 - protein, 14 aa, Homo sapiens
  CDR3 for alpha chain variable domain of TCR clone 257389 (TRAV21, TRAJ52)
CGRAGGTSYGKLTF

SEQ ID NO: 514778 - protein, 14 aa, Homo sapiens
  CDR3 for beta chain variable domain of TCR clone 257389 (TRBV19, TRBJ1-2)
CGSSVLGYNYGYTF

SEQ ID NO: 514779 - protein, 14 aa, Homo sapiens
  CDR3 for alpha chain variable domain of TCR clone 257390 (TRAV17, TRAJ40)
CATALTSGTYKYIF

SEQ ID NO: 514780 - protein, 11 aa, Homo sapiens
  CDR3 for beta chain variable domain of TCR clone 257390 (TRBV11-2, TRBJ2-2)
CASSLPGELFF

SEQ ID NO: 514781 - protein, 14 aa, Homo sapiens
  CDR3 for alpha chain variable domain of TCR clone 257391 (TRAV12-3, TRAJ56)
CAMSVTGANSKLTF

SEQ ID NO: 514782 - protein, 17 aa, Homo sapiens
  CDR3 for beta chain variable domain of TCR clone 257391 (TRBV20-1, TRBJ2-3)
CSASLLGQGGSADTQYF

SEQ ID NO: 514783 - protein, 17 aa, Homo sapiens
  CDR3 for alpha chain variable domain of TCR clone 257392 (TRAV35, TRAJ52)
CAGQLAAGGASYGKLTF

SEQ ID NO: 514784 - protein, 12 aa, Homo sapiens
  CDR3 for beta chain variable domain of TCR clone 257392 (TRBV20-1, TRBJ2-7)
CSAGRRQSEQYF

SEQ ID NO: 514785 - protein, 15 aa, Homo sapiens
  CDR3 for alpha chain variable domain of TCR clone 257393 (TRAV12-1, TRAJ4)
CVVNPFSGGYNKLIF

SEQ ID NO: 514786 - protein, 13 aa, Homo sapiens
  CDR3 for beta chain variable domain of TCR clone 257393 (TRBV4-1, TRBJ2-2)
CASSQENTGELFF

SEQ ID NO: 514787 - protein, 16 aa, Homo sapiens
  CDR3 for alpha chain variable domain of TCR clone 257394 (TRAV30, TRAJ24)
CGTEIVDADSWGKFQF

SEQ ID NO: 514788 - protein, 14 aa, Homo sapiens
  CDR3 for beta chain variable domain of TCR clone 257394 (TRBV18, TRBJ2-7)
CASSPTGGAYEQYL

SEQ ID NO: 514789 - protein, 12 aa, Homo sapiens
  CDR3 for alpha chain variable domain of TCR clone 257395 (TRAV26-2, TRAJ21)
CILKGNFNKFYF

SEQ ID NO: 514790 - protein, 16 aa, Homo sapiens
  CDR3 for beta chain variable domain of TCR clone 257395 (TRBV11-2, TRBJ2-7)
CASSPTTGGVSYEQYF

SEQ ID NO: 514791 - protein, 16 aa, Homo sapiens
  CDR3 for alpha chain variable domain of TCR clone 257396 (TRAV3, TRAJ37)
CAVRVRGSGNTGKLIF

SEQ ID NO: 514792 - protein, 14 aa, Homo sapiens
  CDR3 for beta chain variable domain of TCR clone 257396 (TRBV25-1, TRBJ1-1)
CASTHLGGNTEAFF

SEQ ID NO: 514793 - protein, 17 aa, Homo sapiens
  CDR3 for alpha chain variable domain of TCR clone 257397 (TRAV3, TRAJ6)
CAVRDGPRPGGSYIPTF

SEQ ID NO: 514794 - protein, 14 aa, Homo sapiens
  CDR3 for beta chain variable domain of TCR clone 257397 (TRBV7-3, TRBJ2-1)
CASSTSGGWDEQFF

SEQ ID NO: 514795 - protein, 12 aa, Homo sapiens
  CDR3 for alpha chain variable domain of TCR clone 257398 (TRAV8-3, TRAJ26)
CAGDNYGQNFGF

SEQ ID NO: 514796 - protein, 17 aa, Homo sapiens
  CDR3 for beta chain variable domain of TCR clone 257398 (TRBV7-8, TRBJ2-6)
CASSAGTGGAGANVLTF

SEQ ID NO: 514797 - protein, 17 aa, Homo sapiens
  CDR3 for alpha chain variable domain of TCR clone 257399 (TRAV26-1, TRAJ37)
CIVRVITVSSNTGKLIF

SEQ ID NO: 514798 - protein, 15 aa, Homo sapiens
  CDR3 for beta chain variable domain of TCR clone 257399 (TRBV9, TRBJ1-6)
CASRVAGTGDSPLHC

SEQ ID NO: 514799 - protein, 15 aa, Homo sapiens
  CDR3 for alpha chain variable domain of TCR clone 257400 (TRAV12-2, TRAJ9)
CAVNGGYTGGFKTIF

SEQ ID NO: 514800 - protein, 17 aa, Homo sapiens
  CDR3 for beta chain variable domain of TCR clone 257400 (TRBV4-1, TRBJ2-1)
CAISHRDSGSSYNEQFF

SEQ ID NO: 514801 - protein, 12 aa, Homo sapiens
  CDR3 for alpha chain variable domain of TCR clone 257401 (TRAV8-3, TRAJ26)
CAGDNYGQNFVF

SEQ ID NO: 514802 - protein, 19 aa, Homo sapiens
  CDR3 for beta chain variable domain of TCR clone 257401 (TRBV7-9, TRBJ2-6)
CASSLESATVLPGANVLTF

SEQ ID NO: 514803 - protein, 13 aa, Homo sapiens
  CDR3 for alpha chain variable domain of TCR clone 257402 (TRAV27, TRAJ3)
ASLRGSSVSKIIF

SEQ ID NO: 514804 - protein, 15 aa, Homo sapiens
  CDR3 for beta chain variable domain of TCR clone 257402 (TRBV28, TRBJ1-3)
CASSMGWASGNTIYF

SEQ ID NO: 514805 - protein, 18 aa, Homo sapiens
  CDR3 for alpha chain variable domain of TCR clone 257403 (TRAV12-1, TRAJ52)
CVVKLINAGGTSYGKLTF

SEQ ID NO: 514806 - protein, 16 aa, Homo sapiens
  CDR3 for beta chain variable domain of TCR clone 257403 (TRBV7-6, TRBJ2-7)
CASSGGTGALPYEQYF

SEQ ID NO: 514807 - protein, 15 aa, Homo sapiens
  CDR3 for alpha chain variable domain of TCR clone 257404 (TRAV8-3, TRAJ15)
CAVGAPNQAGTALIF

SEQ ID NO: 514808 - protein, 13 aa, Homo sapiens
  CDR3 for beta chain variable domain of TCR clone 257404 (TRBV20-1, TRBJ2-1)
QSKRRGLLNEQFF

SEQ ID NO: 514809 - protein, 15 aa, Homo sapiens
  CDR3 for alpha chain variable domain of TCR clone 257405 (TRAV1-2, TRAJ9)
CAVRDDGTGGFKTIF

SEQ ID NO: 514810 - protein, 16 aa, Homo sapiens
  CDR3 for beta chain variable domain of TCR clone 257405 (TRBV5-1, TRBJ2-1)
CASSIRSGGSYNEQFF

SEQ ID NO: 514811 - protein, 17 aa, Homo sapiens
  CDR3 for alpha chain variable domain of TCR clone 257406 (TRAV12-2, TRAJ6)
CAPQGPPRAGGSYIPTF

SEQ ID NO: 514812 - protein, 16 aa, Homo sapiens
  CDR3 for beta chain variable domain of TCR clone 257406 (TRBV19, TRBJ2-2)
CASSTARASNTGEPFF

SEQ ID NO: 514813 - protein, 16 aa, Homo sapiens
  CDR3 for alpha chain variable domain of TCR clone 257407 (TRAV22, TRAJ45)
CAVERGKRGGADGLTF

SEQ ID NO: 514814 - protein, 16 aa, Homo sapiens
  CDR3 for beta chain variable domain of TCR clone 257407 (TRBV5-1, TRBJ2-5)
CASSLRRTSGQDTQYF

SEQ ID NO: 514815 - protein, 12 aa, Homo sapiens
  CDR3 for alpha chain variable domain of TCR clone 257408 (TRAV8-6, TRAJ57)
CAVQGGSEKLVF

SEQ ID NO: 514816 - protein, 11 aa, Homo sapiens
  CDR3 for beta chain variable domain of TCR clone 257408 (TRBV19, TRBJ1-1)
CASSIGSQAFF

SEQ ID NO: 514817 - protein, 16 aa, Homo sapiens
  CDR3 for alpha chain variable domain of TCR clone 257409 (TRAV3, TRAJ37)
CAVRPHGSGNTGKLIF

SEQ ID NO: 514818 - protein, 18 aa, Homo sapiens
  CDR3 for beta chain variable domain of TCR clone 257409 (TRBV5-1, TRBJ1-6)
CASSRSGQGTARGSPLHF

SEQ ID NO: 514819 - protein, 14 aa, Homo sapiens
  CDR3 for alpha chain variable domain of TCR clone 257410 (TRAV12-3, TRAJ9)
CAMSPNTGGCKTSF

SEQ ID NO: 514820 - protein, 12 aa, Homo sapiens
  CDR3 for beta chain variable domain of TCR clone 257410 (TRBV19, TRBJ1-5)
CASSIAQQPQHF

SEQ ID NO: 514821 - protein, 12 aa, Homo sapiens
  CDR3 for alpha chain variable domain of TCR clone 257411 (TRAV12-3, TRAJ20)
CAMVRGDYKLSF

SEQ ID NO: 514822 - protein, 14 aa, Homo sapiens
  CDR3 for beta chain variable domain of TCR clone 257411 (TRBV13, TRBJ2-7)
CASSLKGASYEQYF

SEQ ID NO: 514823 - protein, 13 aa, Homo sapiens
  CDR3 for alpha chain variable domain of TCR clone 257412 (TRAV36/DV7, TRAJ54)
CAVDIQGAQKLVF

SEQ ID NO: 514824 - protein, 16 aa, Homo sapiens
  CDR3 for beta chain variable domain of TCR clone 257412 (TRBV27, TRBJ2-5)
CASSYGPGGQKETQYF

SEQ ID NO: 514825 - protein, 17 aa, Homo sapiens
  CDR3 for alpha chain variable domain of TCR clone 257413 (TRAV3, TRAJ42)
CAVRDRDYGGSQGNLIF

SEQ ID NO: 514826 - protein, 13 aa, Homo sapiens
  CDR3 for beta chain variable domain of TCR clone 257413 (TRBV12-4, TRBJ2-7)
CASSPTETYEQYF

SEQ ID NO: 514827 - protein, 15 aa, Homo sapiens
  CDR3 for alpha chain variable domain of TCR clone 257414 (TRAV12-3, TRAJ6)
CAMSATSGGSYIPTF

SEQ ID NO: 514828 - protein, 14 aa, Homo sapiens
  CDR3 for beta chain variable domain of TCR clone 257414 (TRBV11-2, TRBJ1-5)
CASSLDRGRQPQHF

SEQ ID NO: 514829 - protein, 12 aa, Homo sapiens
  CDR3 for alpha chain variable domain of TCR clone 257415 (TRAV12-1, TRAJ40)
CVVYSGTYKYIF

SEQ ID NO: 514830 - protein, 17 aa, Homo sapiens
  CDR3 for beta chain variable domain of TCR clone 257415 (TRBV11-3, TRBJ2-3)
CQQLRGASRGAPNTQYF

SEQ ID NO: 514831 - protein, 14 aa, Homo sapiens
  CDR3 for alpha chain variable domain of TCR clone 257416 (TRAV1-1, TRAJ27)
CAVIYNTNAGKSTF

SEQ ID NO: 514832 - protein, 15 aa, Homo sapiens
  CDR3 for beta chain variable domain of TCR clone 257416 (TRBV7-2, TRBJ2-1)
CASSSGLAGGNEQCF

SEQ ID NO: 514833 - protein, 13 aa, Homo sapiens
  CDR3 for alpha chain variable domain of TCR clone 257417 (TRAV12-3, TRAJ54)
CAMFSQGAQKLVF

SEQ ID NO: 514834 - protein, 16 aa, Homo sapiens
  CDR3 for beta chain variable domain of TCR clone 257417 (TRBV7-6, TRBJ2-3)
CASSPRRGGLGDTQYF

SEQ ID NO: 514835 - protein, 18 aa, Homo sapiens
  CDR3 for alpha chain variable domain of TCR clone 257418 (TRAV17, TRAJ45)
CATSLDLYSGGGADGLTL

SEQ ID NO: 514836 - protein, 13 aa, Homo sapiens
  CDR3 for beta chain variable domain of TCR clone 257418 (TRBV10-3, TRBJ2-7)
CASKLAVNYEQYF

SEQ ID NO: 514837 - protein, 15 aa, Homo sapiens
  CDR3 for alpha chain variable domain of TCR clone 257419 (TRAV9-2, TRAJ8)
CALRGLNPGFQKLVF

SEQ ID NO: 514838 - protein, 20 aa, Homo sapiens
  CDR3 for beta chain variable domain of TCR clone 257419 (TRBV7-8, TRBJ2-2)
CASSHLFPGPTIHITGELFF

SEQ ID NO: 514839 - protein, 16 aa, Homo sapiens
  CDR3 for alpha chain variable domain of TCR clone 257420 (TRAV14/DV4, TRAJ54)
CAMREGRIQGAQKLVF

SEQ ID NO: 514840 - protein, 14 aa, Homo sapiens
  CDR3 for beta chain variable domain of TCR clone 257420 (TRBV4-1, TRBJ2-2)
CASSQAVNSGELFF

SEQ ID NO: 514841 - protein, 13 aa, Homo sapiens
  CDR3 for alpha chain variable domain of TCR clone 257421 (TRAV2, TRAJ15)
CAVASQAGTALIF

SEQ ID NO: 514842 - protein, 14 aa, Homo sapiens
  CDR3 for beta chain variable domain of TCR clone 257421 (TRBV4-1, TRBJ2-7)
CASSPVARGDEQYF

SEQ ID NO: 514843 - protein, 18 aa, Homo sapiens
  CDR3 for alpha chain variable domain of TCR clone 257422 (TRAV26-2, TRAJ45)
CILRLWGYSGGGADGLTF

SEQ ID NO: 514844 - protein, 17 aa, Homo sapiens
  CDR3 for beta chain variable domain of TCR clone 257422 (TRBV28, TRBJ2-3)
CATSPTPAGGRVDTQYF

SEQ ID NO: 514845 - protein, 11 aa, Homo sapiens
  CDR3 for alpha chain variable domain of TCR clone 257423 (TRAV2, TRAJ4)
CAVGWYSKLIF

SEQ ID NO: 514846 - protein, 15 aa, Homo sapiens
  CDR3 for beta chain variable domain of TCR clone 257423 (TRBV7-2, TRBJ2-2)
CASSFQRGETGELFF

SEQ ID NO: 514847 - protein, 16 aa, Homo sapiens
  CDR3 for alpha chain variable domain of TCR clone 257424 (TRAV8-3, TRAJ13)
CAVGAYPSVGYQKVTF

SEQ ID NO: 514848 - protein, 14 aa, Homo sapiens
  CDR3 for beta chain variable domain of TCR clone 257424 (TRBV18, TRBJ2-5)
CASSPRASSETQYF

SEQ ID NO: 514849 - protein, 14 aa, Homo sapiens
  CDR3 for alpha chain variable domain of TCR clone 257425 (TRAV13-2, TRAJ6)
CAERGSGGSSIPTF

SEQ ID NO: 514850 - protein, 13 aa, Homo sapiens
  CDR3 for beta chain variable domain of TCR clone 257425 (TRBV19, TRBJ1-2)
CASSQGQVYGYTF

SEQ ID NO: 514851 - protein, 14 aa, Homo sapiens
  CDR3 for alpha chain variable domain of TCR clone 257426 (TRAV34, TRAJ44)
CGADGIGTASKLTF

SEQ ID NO: 514852 - protein, 17 aa, Homo sapiens
  CDR3 for beta chain variable domain of TCR clone 257426 (TRBV11-2, TRBJ2-1)
CASSLYPPGVEYNEQFF

SEQ ID NO: 514853 - protein, 13 aa, Homo sapiens
  CDR3 for alpha chain variable domain of TCR clone 257427 (TRAV8-3, TRAJ28)
CAVGAVGSYQLTF

SEQ ID NO: 514854 - protein, 14 aa, Homo sapiens
  CDR3 for beta chain variable domain of TCR clone 257427 (TRBV7-2, TRBJ2-7)
CASSLPPGQGPQYF

SEQ ID NO: 514855 - protein, 16 aa, Homo sapiens
  CDR3 for alpha chain variable domain of TCR clone 257428 (TRAV27, TRAJ13)
CARAKSDFGGYQKVTF

SEQ ID NO: 514856 - protein, 15 aa, Homo sapiens
  CDR3 for beta chain variable domain of TCR clone 257428 (TRBV29-1, TRBJ2-1)
CSVGRHALFYNEQFF

SEQ ID NO: 514857 - protein, 11 aa, Homo sapiens
  CDR3 for alpha chain variable domain of TCR clone 257429 (TRAV23/DV6, TRAJ43)
CAASSGNDMGF

SEQ ID NO: 514858 - protein, 14 aa, Homo sapiens
  CDR3 for beta chain variable domain of TCR clone 257429 (TRBV4-1, TRBJ1-2)
CASSQDPLPYGYTF

SEQ ID NO: 514859 - protein, 19 aa, Homo sapiens
  CDR3 for alpha chain variable domain of TCR clone 257430 (TRAV26-1, TRAJ29)
CCVLLHRQSRGIRNTPLVF

SEQ ID NO: 514860 - protein, 15 aa, Homo sapiens
  CDR3 for beta chain variable domain of TCR clone 257430 (TRBV7-9, TRBJ1-5)
CASSQGHQPSQPQHF

SEQ ID NO: 514861 - protein, 18 aa, Homo sapiens
  CDR3 for alpha chain variable domain of TCR clone 257431 (TRAV26-2, TRAJ54)
CILRDVELGIQGAQKRVF

SEQ ID NO: 514862 - protein, 17 aa, Homo sapiens
  CDR3 for beta chain variable domain of TCR clone 257431 (TRBV20-1, TRBJ1-5)
CSASLSPGQGGNQPQHF

SEQ ID NO: 514863 - protein, 17 aa, Homo sapiens
  CDR3 for alpha chain variable domain of TCR clone 257432 (TRAV26-1, TRAJ10)
CIVSFRGLTGGGNKLTF

SEQ ID NO: 514864 - protein, 13 aa, Homo sapiens
  CDR3 for beta chain variable domain of TCR clone 257432 (TRBV20-1, TRBJ2-3)
CSASRQVADTQYF

SEQ ID NO: 514865 - protein, 13 aa, Homo sapiens
  CDR3 for alpha chain variable domain of TCR clone 257433 (TRAV3, TRAJ26)
CAVSRGYGQNLVF

SEQ ID NO: 514866 - protein, 15 aa, Homo sapiens
  CDR3 for beta chain variable domain of TCR clone 257433 (TRBV27, TRBJ2-1)
CASSLARGAYNEQFF

SEQ ID NO: 514867 - protein, 14 aa, Homo sapiens
  CDR3 for alpha chain variable domain of TCR clone 257434 (TRAV3, TRAJ9)
CAVGGNTGGFKTIF

SEQ ID NO: 514868 - protein, 14 aa, Homo sapiens
  CDR3 for beta chain variable domain of TCR clone 257434 (TRBV15, TRBJ2-1)
CATSGVEDYNEQFF

SEQ ID NO: 514869 - protein, 14 aa, Homo sapiens
  CDR3 for alpha chain variable domain of TCR clone 257435 (TRAV1-2, TRAJ16)
CAVNRVSDGQKLLF

SEQ ID NO: 514870 - protein, 16 aa, Homo sapiens
  CDR3 for beta chain variable domain of TCR clone 257435 (TRBV4-2, TRBJ1-1)
CASSQAGFGMNTEAFF

SEQ ID NO: 514871 - protein, 12 aa, Homo sapiens
  CDR3 for alpha chain variable domain of TCR clone 257436 (TRAV21, TRAJ8)
CALNTGFQKPVF

SEQ ID NO: 514872 - protein, 15 aa, Homo sapiens
  CDR3 for beta chain variable domain of TCR clone 257436 (TRBV7-2, TRBJ2-5)
CASSLRGASGETQYF

SEQ ID NO: 514873 - protein, 16 aa, Homo sapiens
  CDR3 for alpha chain variable domain of TCR clone 257437 (TRAV8-1, TRAJ40)
CAVNGGGRSGNYKYIF

SEQ ID NO: 514874 - protein, 15 aa, Homo sapiens
  CDR3 for beta chain variable domain of TCR clone 257437 (TRBV27, TRBJ2-5)
CASSPPGQGAETQYF

SEQ ID NO: 514875 - protein, 13 aa, Homo sapiens
  CDR3 for alpha chain variable domain of TCR clone 257438 (TRAV12-2, TRAJ20)
CVVYPSNDYKLSF

SEQ ID NO: 514876 - protein, 15 aa, Homo sapiens
  CDR3 for beta chain variable domain of TCR clone 257438 (TRBV6-1, TRBJ2-5)
CASSEGWGIQETQYF

SEQ ID NO: 514877 - protein, 14 aa, Homo sapiens
  CDR3 for alpha chain variable domain of TCR clone 257439 (TRAV3, TRAJ29)
CAVRRYSGNTPLVF

SEQ ID NO: 514878 - protein, 15 aa, Homo sapiens
  CDR3 for beta chain variable domain of TCR clone 257439 (TRBV7-3, TRBJ2-2)
CASSETGQGTGELFF

SEQ ID NO: 514879 - protein, 14 aa, Homo sapiens
  CDR3 for alpha chain variable domain of TCR clone 257440 (TRAV12-1, TRAJ6)
CVVPTSGGSYIPTF

SEQ ID NO: 514880 - protein, 16 aa, Homo sapiens
  CDR3 for beta chain variable domain of TCR clone 257440 (TRBV2, TRBJ2-7)
CASSEPCTGPSYEQYF

SEQ ID NO: 514881 - protein, 12 aa, Homo sapiens
  CDR3 for alpha chain variable domain of TCR clone 257441 (TRAV20, TRAJ45)
CAVRGGADGLTF

SEQ ID NO: 514882 - protein, 14 aa, Homo sapiens
  CDR3 for beta chain variable domain of TCR clone 257441 (TRBV20-1, TRBJ2-7)
CSAKRGRSSYEQYV

SEQ ID NO: 514883 - protein, 19 aa, Homo sapiens
  CDR3 for alpha chain variable domain of TCR clone 257442 (TRAV26-1, TRAJ52)
CIVRTHRNAGGTSYGKLTF

SEQ ID NO: 514884 - protein, 15 aa, Homo sapiens
  CDR3 for beta chain variable domain of TCR clone 257442 (TRBV29-1, TRBJ2-1)
CSGRDRKSSYNEQFF

SEQ ID NO: 514885 - protein, 13 aa, Homo sapiens
  CDR3 for alpha chain variable domain of TCR clone 257443 (TRAV12-3, TRAJ7)
CAMTPYGNNRLAF

SEQ ID NO: 514886 - protein, 16 aa, Homo sapiens
  CDR3 for beta chain variable domain of TCR clone 257443 (TRBV7-9, TRBJ2-3)
CASSPWREVGTDTQYF

SEQ ID NO: 514887 - protein, 14 aa, Homo sapiens
  CDR3 for alpha chain variable domain of TCR clone 257444 (TRAV26-1, TRAJ45)
CIEVTGGGADGLTF

SEQ ID NO: 514888 - protein, 13 aa, Homo sapiens
  CDR3 for beta chain variable domain of TCR clone 257444 (TRBV7-6, TRBJ1-2)
CASSLVADYGYTC

SEQ ID NO: 514889 - protein, 15 aa, Homo sapiens
  CDR3 for alpha chain variable domain of TCR clone 257445 (TRAV21, TRAJ53)
CATLNSGGSNNKLTF

SEQ ID NO: 514890 - protein, 12 aa, Homo sapiens
  CDR3 for beta chain variable domain of TCR clone 257445 (TRBV14, TRBJ2-4)
CASSNLKSIQYF

SEQ ID NO: 514891 - protein, 10 aa, Homo sapiens
  CDR3 for alpha chain variable domain of TCR clone 257446 (TRAV23/DV6, TRAJ22)
CAASSRGNRF

SEQ ID NO: 514892 - protein, 15 aa, Homo sapiens
  CDR3 for beta chain variable domain of TCR clone 257446 (TRBV10-3, TRBJ2-3)
CAIDTSGRRTDTQYF

SEQ ID NO: 514893 - protein, 14 aa, Homo sapiens
  CDR3 for alpha chain variable domain of TCR clone 257447 (TRAV12-2, TRAJ24)
CAVTPADSWGKLQF

SEQ ID NO: 514894 - protein, 13 aa, Homo sapiens
  CDR3 for beta chain variable domain of TCR clone 257447 (TRBV7-9, TRBJ1-2)
CASSLKQNYGDTF

SEQ ID NO: 514895 - protein, 13 aa, Homo sapiens
  CDR3 for alpha chain variable domain of TCR clone 257448 (TRAV27, TRAJ6)
CAGGTRGSYIPTF

SEQ ID NO: 514896 - protein, 14 aa, Homo sapiens
  CDR3 for beta chain variable domain of TCR clone 257448 (TRBV7-2, TRBJ2-1)
CASSRGGARNEQFF

SEQ ID NO: 514897 - protein, 12 aa, Homo sapiens
  CDR3 for alpha chain variable domain of TCR clone 257449 (TRAV13-1, TRAJ21)
CAAKEGFNKFYF

SEQ ID NO: 514898 - protein, 15 aa, Homo sapiens
  CDR3 for beta chain variable domain of TCR clone 257449 (TRBV7-7, TRBJ2-5)
CASSQLERAEDTQYF

SEQ ID NO: 514899 - protein, 15 aa, Homo sapiens
  CDR3 for alpha chain variable domain of TCR clone 257450 (TRAV20, TRAJ42)
CAVQARGGSQGNLIF

SEQ ID NO: 514900 - protein, 12 aa, Homo sapiens
  CDR3 for beta chain variable domain of TCR clone 257450 (TRBV11-2, TRBJ2-2)
CASSLGGGELFF

SEQ ID NO: 514901 - protein, 14 aa, Homo sapiens
  CDR3 for alpha chain variable domain of TCR clone 257451 (TRAV12-1, TRAJ9)
CVVTGDTGGFKTIF

SEQ ID NO: 514902 - protein, 16 aa, Homo sapiens
  CDR3 for beta chain variable domain of TCR clone 257451 (TRBV29-1, TRBJ1-2)
CSVEANRYIANYGYTF

SEQ ID NO: 514903 - protein, 14 aa, Homo sapiens
  CDR3 for alpha chain variable domain of TCR clone 257452 (TRAV12-2, TRAJ13)
CAVKKTGGYQKVTF

SEQ ID NO: 514904 - protein, 14 aa, Homo sapiens
  CDR3 for beta chain variable domain of TCR clone 257452 (TRBV19, TRBJ2-1)
RASPTFVLSGEQFF

SEQ ID NO: 514905 - protein, 14 aa, Homo sapiens
  CDR3 for alpha chain variable domain of TCR clone 257453 (TRAV8-3, TRAJ4)
CAVGAAGGYNKLIF

SEQ ID NO: 514906 - protein, 15 aa, Homo sapiens
  CDR3 for beta chain variable domain of TCR clone 257453 (TRBV6-5, TRBJ2-1)
CASSYDAGAGNEQFY

SEQ ID NO: 514907 - protein, 12 aa, Homo sapiens
  CDR3 for alpha chain variable domain of TCR clone 257454 (TRAV16, TRAJ10)
CSRTGGGNKLTF

SEQ ID NO: 514908 - protein, 14 aa, Homo sapiens
  CDR3 for beta chain variable domain of TCR clone 257454 (TRBV7-2, TRBJ1-2)
CASSQTGSTYGYAF

SEQ ID NO: 514909 - protein, 12 aa, Homo sapiens
  CDR3 for alpha chain variable domain of TCR clone 257455 (TRAV27, TRAJ34)
CAVAKNTDKLIF

SEQ ID NO: 514910 - protein, 13 aa, Homo sapiens
  CDR3 for beta chain variable domain of TCR clone 257455 (TRBV4-1, TRBJ2-1)
CASSQEVQYEQFF

SEQ ID NO: 514911 - protein, 11 aa, Homo sapiens
  CDR3 for alpha chain variable domain of TCR clone 257456 (TRAV21, TRAJ34)
CAVTNTDKLIF

SEQ ID NO: 514912 - protein, 12 aa, Homo sapiens
  CDR3 for beta chain variable domain of TCR clone 257456 (TRBV7-2, TRBJ2-5)
CASSQYQETQYF

SEQ ID NO: 514913 - protein, 13 aa, Homo sapiens
  CDR3 for alpha chain variable domain of TCR clone 257457 (TRAV17, TRAJ9)
CATDYTGGFKTSF

SEQ ID NO: 514914 - protein, 13 aa, Homo sapiens
  CDR3 for beta chain variable domain of TCR clone 257457 (TRBV10-3, TRBJ2-7)
CAISEMGGYEQYF

SEQ ID NO: 514915 - protein, 15 aa, Homo sapiens
  CDR3 for alpha chain variable domain of TCR clone 257458 (TRAV8-6, TRAJ37)
RAVIFSSGNTGKLIF

SEQ ID NO: 514916 - protein, 15 aa, Homo sapiens
  CDR3 for beta chain variable domain of TCR clone 257458 (TRBV25-1, TRBJ2-4)
CASSETESAKNIQYF

SEQ ID NO: 514917 - protein, 11 aa, Homo sapiens
  CDR3 for alpha chain variable domain of TCR clone 257459 (TRAV21, TRAJ27)
CAVRMQANQPL

SEQ ID NO: 514918 - protein, 16 aa, Homo sapiens
  CDR3 for beta chain variable domain of TCR clone 257459 (TRBV5-1, TRBJ1-1)
CASSSGGNSLNTEAFF

SEQ ID NO: 514919 - protein, 12 aa, Homo sapiens
  CDR3 for alpha chain variable domain of TCR clone 257460 (TRAV35, TRAJ49)
CAGWNTGNQFYF

SEQ ID NO: 514920 - protein, 16 aa, Homo sapiens
  CDR3 for beta chain variable domain of TCR clone 257460 (TRBV5-1, TRBJ2-2)
CASSLWDSTNTRELFF

SEQ ID NO: 514921 - protein, 12 aa, Homo sapiens
  CDR3 for alpha chain variable domain of TCR clone 257461 (TRAV9-2, TRAJ36)
CALKKGANNLFF

SEQ ID NO: 514922 - protein, 14 aa, Homo sapiens
  CDR3 for beta chain variable domain of TCR clone 257461 (TRBV19, TRBJ2-1)
FASPTFVLSGEQFF

SEQ ID NO: 514923 - protein, 19 aa, Homo sapiens
  CDR3 for alpha chain variable domain of TCR clone 257462 (TRAV38-1, TRAJ53)
CAFMKHGLESGGSNYKLTF

SEQ ID NO: 514924 - protein, 14 aa, Homo sapiens
  CDR3 for beta chain variable domain of TCR clone 257462 (TRBV4-2, TRBJ2-7)
CASSQDGRKGEQHF

SEQ ID NO: 514925 - protein, 18 aa, Homo sapiens
  CDR3 for alpha chain variable domain of TCR clone 257463 (TRAV26-1, TRAJ52)
CIVRVEGAGGTSYGKLTF

SEQ ID NO: 514926 - protein, 12 aa, Homo sapiens
  CDR3 for beta chain variable domain of TCR clone 257463 (TRBV11-2, TRBJ2-2)
CASSLGGGELFF

SEQ ID NO: 514927 - protein, 15 aa, Homo sapiens
  CDR3 for alpha chain variable domain of TCR clone 257464 (TRAV13-1, TRAJ44)
CAASRGGGTASKLTF

SEQ ID NO: 514928 - protein, 18 aa, Homo sapiens
  CDR3 for beta chain variable domain of TCR clone 257464 (TRBV7-2, TRBJ2-5)
CASSPRGSSETCTSGQAR

SEQ ID NO: 514929 - protein, 14 aa, Homo sapiens
  CDR3 for alpha chain variable domain of TCR clone 257465 (TRAV2, TRAJ9)
CAVEDRSGGFKTIF

SEQ ID NO: 514930 - protein, 13 aa, Homo sapiens
  CDR3 for beta chain variable domain of TCR clone 257465 (TRBV5-1, TRBJ1-2)
CASSFQDGYGYAF

SEQ ID NO: 514931 - protein, 15 aa, Homo sapiens
  CDR3 for alpha chain variable domain of TCR clone 257466 (TRAV17, TRAJ4)
CATGTWSGGYNKLIF

SEQ ID NO: 514932 - protein, 13 aa, Homo sapiens
  CDR3 for beta chain variable domain of TCR clone 257466 (TRBV6-6, TRBJ2-7)
SASSPKHLAEQYF

SEQ ID NO: 514933 - protein, 13 aa, Homo sapiens
  CDR3 for alpha chain variable domain of TCR clone 257467 (TRAV16, TRAJ31)
CALGANNNARLMF

SEQ ID NO: 514934 - protein, 17 aa, Homo sapiens
  CDR3 for beta chain variable domain of TCR clone 257467 (TRBV12-4, TRBJ2-1)
CASSPGLAGGRINEQFF

SEQ ID NO: 514935 - protein, 15 aa, Homo sapiens
  CDR3 for alpha chain variable domain of TCR clone 257468 (TRAV12-3, TRAJ6)
CAMSATTGGSYIPTF

SEQ ID NO: 514936 - protein, 14 aa, Homo sapiens
  CDR3 for beta chain variable domain of TCR clone 257468 (TRBV19, TRBJ2-1)
CASPTVVLSGEQFF

SEQ ID NO: 514937 - protein, 17 aa, Homo sapiens
  CDR3 for alpha chain variable domain of TCR clone 257469 (TRAV13-1, TRAJ28)
CAASHPYSGAGSYQLTF

SEQ ID NO: 514938 - protein, 14 aa, Homo sapiens
  CDR3 for beta chain variable domain of TCR clone 257469 (TRBV25-1, TRBJ1-1)
CASTHLGGNTEAFF

SEQ ID NO: 514939 - protein, 14 aa, Homo sapiens
  CDR3 for alpha chain variable domain of TCR clone 257470 (TRAV13-1, TRAJ9)
CAASALTGGLKTIL

SEQ ID NO: 514940 - protein, 16 aa, Homo sapiens
  CDR3 for beta chain variable domain of TCR clone 257470 (TRBV7-8, TRBJ2-4)
CASSAERTLAKNIQYF

SEQ ID NO: 514941 - protein, 13 aa, Homo sapiens
  CDR3 for alpha chain variable domain of TCR clone 257471 (TRAV3, TRAJ4)
CAVRDGGYNKLIF

SEQ ID NO: 514942 - protein, 12 aa, Homo sapiens
  CDR3 for beta chain variable domain of TCR clone 257471 (TRBV11-2, TRBJ2-2)
CASSLGSGELFF

SEQ ID NO: 514943 - protein, 18 aa, Homo sapiens
  CDR3 for alpha chain variable domain of TCR clone 257472 (TRAV21, TRAJ52)
CAVRPSPAGGTSCGKLTF

SEQ ID NO: 514944 - protein, 14 aa, Homo sapiens
  CDR3 for beta chain variable domain of TCR clone 257472 (TRBV7-2, TRBJ2-1)
CASSLEGGYNEQFF

SEQ ID NO: 514945 - protein, 17 aa, Homo sapiens
  CDR3 for alpha chain variable domain of TCR clone 257473 (TRAV3, TRAJ6)
CAARDGPRAGGSYIPTF

SEQ ID NO: 514946 - protein, 14 aa, Homo sapiens
  CDR3 for beta chain variable domain of TCR clone 257473 (TRBV7-2, TRBJ2-7)
CASSPKTSFYEQYF

SEQ ID NO: 514947 - protein, 15 aa, Homo sapiens
  CDR3 for alpha chain variable domain of TCR clone 257474 (TRAV12-1, TRAJ42)
CVVTRGGGSQGNLIF

SEQ ID NO: 514948 - protein, 13 aa, Homo sapiens
  CDR3 for beta chain variable domain of TCR clone 257474 (TRBV27, TRBJ2-7)
CASSLTTGYEQYF

SEQ ID NO: 514949 - protein, 23 aa, Homo sapiens
  CDR3 for alpha chain variable domain of TCR clone 257475 (TRAV26-1, TRAJ38)
CIVRPLNAGNNHIQNPEPAVYQL

SEQ ID NO: 514950 - protein, 13 aa, Homo sapiens
  CDR3 for beta chain variable domain of TCR clone 257475 (TRBV18, TRBJ1-1)
CASSPNGDTEAFF

SEQ ID NO: 514951 - protein, 17 aa, Homo sapiens
  CDR3 for alpha chain variable domain of TCR clone 257476 (TRAV27, TRAJ26)
CAGARAPLDNYGQNFVF

SEQ ID NO: 514952 - protein, 17 aa, Homo sapiens
  CDR3 for beta chain variable domain of TCR clone 257476 (TRBV11-2, TRBJ2-1)
CASSLYPPGVEYNEQFF

SEQ ID NO: 514953 - protein, 15 aa, Homo sapiens
  CDR3 for alpha chain variable domain of TCR clone 257477 (TRAV17, TRAJ16)
CATALRFSDGQKLLS

SEQ ID NO: 514954 - protein, 15 aa, Homo sapiens
  CDR3 for beta chain variable domain of TCR clone 257477 (TRBV13, TRBJ1-5)
CASSFGQGGVQPQHF

SEQ ID NO: 514955 - protein, 14 aa, Homo sapiens
  CDR3 for alpha chain variable domain of TCR clone 257478 (TRAV1-2, TRAJ16)
CAVNRFSDGPKLLF

SEQ ID NO: 514956 - protein, 13 aa, Homo sapiens
  CDR3 for beta chain variable domain of TCR clone 257478 (TRBV9, TRBJ2-1)
CASSPSGGSEQFF

SEQ ID NO: 514957 - protein, 17 aa, Homo sapiens
  CDR3 for alpha chain variable domain of TCR clone 257479 (TRAV38-2/DV8, TRAJ23)
CALSRKLIIGQGTELSV

SEQ ID NO: 514958 - protein, 17 aa, Homo sapiens
  CDR3 for beta chain variable domain of TCR clone 257479 (TRBV5-4, TRBJ2-1)
CASSSAGGRGPYNEQFF

SEQ ID NO: 514959 - protein, 16 aa, Homo sapiens
  CDR3 for alpha chain variable domain of TCR clone 257480 (TRAV3, TRAJ37)
CAVRGKGSGNKGKQIF

SEQ ID NO: 514960 - protein, 13 aa, Homo sapiens
  CDR3 for beta chain variable domain of TCR clone 257480 (TRBV4-2, TRBJ1-1)
CASSQAGNTEAFF

SEQ ID NO: 514961 - protein, 16 aa, Homo sapiens
  CDR3 for alpha chain variable domain of TCR clone 257481 (TRAV21, TRAJ37)
CAVRPRGSSNTGKLIF

SEQ ID NO: 514962 - protein, 13 aa, Homo sapiens
  CDR3 for beta chain variable domain of TCR clone 257481 (TRBV7-9, TRBJ2-5)
CASLWPGQETQYF

SEQ ID NO: 514963 - protein, 16 aa, Homo sapiens
  CDR3 for alpha chain variable domain of TCR clone 257482 (TRAV13-1, TRAJ45)
CEARGSRKGGADGLTF

SEQ ID NO: 514964 - protein, 13 aa, Homo sapiens
  CDR3 for beta chain variable domain of TCR clone 257482 (TRBV12-4, TRBJ2-5)
CASRKRGKETQYF

SEQ ID NO: 514965 - protein, 12 aa, Homo sapiens
  CDR3 for alpha chain variable domain of TCR clone 257483 (TRAV8-6, TRAJ43)
CAVSNNNNDMRF

SEQ ID NO: 514966 - protein, 15 aa, Homo sapiens
  CDR3 for beta chain variable domain of TCR clone 257483 (TRBV7-3, TRBJ2-6)
CVSSLGGSGANVLTF

SEQ ID NO: 514967 - protein, 12 aa, Homo sapiens
  CDR3 for alpha chain variable domain of TCR clone 257484 (TRAV17, TRAJ39)
CATGAAGNMLTF

SEQ ID NO: 514968 - protein, 14 aa, Homo sapiens
  CDR3 for beta chain variable domain of TCR clone 257484 (TRBV7-9, TRBJ1-2)
CASIRQGANYGYTF

SEQ ID NO: 514969 - protein, 16 aa, Homo sapiens
  CDR3 for alpha chain variable domain of TCR clone 257485 (TRAV12-1, TRAJ43)
CVVNPHRFGAGTRLTV

SEQ ID NO: 514970 - protein, 12 aa, Homo sapiens
  CDR3 for beta chain variable domain of TCR clone 257485 (TRBV11-2, TRBJ2-3)
GASRGAPNTQYF

SEQ ID NO: 514971 - protein, 14 aa, Homo sapiens
  CDR3 for alpha chain variable domain of TCR clone 257486 (TRAV12-2, TRAJ13)
CAVKKTGGYQKVTF

SEQ ID NO: 514972 - protein, 16 aa, Homo sapiens
  CDR3 for beta chain variable domain of TCR clone 257486 (TRBV4-2, TRBJ2-4)
CASSQELRRANNMQYF

SEQ ID NO: 514973 - protein, 14 aa, Homo sapiens
  CDR3 for alpha chain variable domain of TCR clone 257487 (TRAV1-2, TRAJ16)
CAVNRISDGQKLLF

SEQ ID NO: 514974 - protein, 14 aa, Homo sapiens
  CDR3 for beta chain variable domain of TCR clone 257487 (TRBV20-1, TRBJ2-7)
CSARRSGSSYEQYF

SEQ ID NO: 514975 - protein, 14 aa, Homo sapiens
  CDR3 for alpha chain variable domain of TCR clone 257488 (TRAV12-1, TRAJ3)
CCAARYSSASKIIF

SEQ ID NO: 514976 - protein, 15 aa, Homo sapiens
  CDR3 for beta chain variable domain of TCR clone 257488 (TRBV7-2, TRBJ2-6)
CASSREGSGANVLTF

SEQ ID NO: 514977 - protein, 17 aa, Homo sapiens
  CDR3 for alpha chain variable domain of TCR clone 257489 (TRAV38-1, TRAJ45)
CAFMKHYMGGGSDGLTF

SEQ ID NO: 514978 - protein, 19 aa, Homo sapiens
  CDR3 for beta chain variable domain of TCR clone 257489 (TRBV6-1, TRBJ2-5)
CASSEQGLAGGLYQETQYF

SEQ ID NO: 514979 - protein, 12 aa, Homo sapiens
  CDR3 for alpha chain variable domain of TCR clone 257490 (TRAV21, TRAJ45)
CATGGGADGLTF

SEQ ID NO: 514980 - protein, 15 aa, Homo sapiens
  CDR3 for beta chain variable domain of TCR clone 257490 (TRBV2, TRBJ2-7)
CASSEGLARSYEQYF

SEQ ID NO: 514981 - protein, 13 aa, Homo sapiens
  CDR3 for alpha chain variable domain of TCR clone 257491 (TRAV27, TRAJ41)
CAGEGNYGYALNF

SEQ ID NO: 514982 - protein, 12 aa, Homo sapiens
  CDR3 for beta chain variable domain of TCR clone 257491 (TRBV28, TRBJ2-7)
CASSFSSYEQYF

SEQ ID NO: 514983 - protein, 14 aa, Homo sapiens
  CDR3 for alpha chain variable domain of TCR clone 257492 (TRAV1-2, TRAJ8)
CAVREDTGFQKLVF

SEQ ID NO: 514984 - protein, 17 aa, Homo sapiens
  CDR3 for beta chain variable domain of TCR clone 257492 (TRBV11-3, TRBJ2-3)
CASSLGLTGGGTDTQYF

SEQ ID NO: 514985 - protein, 14 aa, Homo sapiens
  CDR3 for alpha chain variable domain of TCR clone 257493 (TRAV8-3, TRAJ12)
CAVGARDSSYNLIF

SEQ ID NO: 514986 - protein, 16 aa, Homo sapiens
  CDR3 for beta chain variable domain of TCR clone 257493 (TRBV11-2, TRBJ2-7)
CASSPLAGGPRYEQYF

SEQ ID NO: 514987 - protein, 11 aa, Homo sapiens
  CDR3 for alpha chain variable domain of TCR clone 257494 (TRAV2, TRAJ13)
CASGGYQKVTF

SEQ ID NO: 514988 - protein, 13 aa, Homo sapiens
  CDR3 for beta chain variable domain of TCR clone 257494 (TRBV7-2, TRBJ2-5)
CASSQTSVETQYF

SEQ ID NO: 514989 - protein, 16 aa, Homo sapiens
  CDR3 for alpha chain variable domain of TCR clone 257495 (TRAV8-3, TRAJ8)
CAVPRDGNTGFRKLVF

SEQ ID NO: 514990 - protein, 15 aa, Homo sapiens
  CDR3 for beta chain variable domain of TCR clone 257495 (TRBV11-3, TRBJ2-3)
CASSAGTVVTNTQYF

SEQ ID NO: 514991 - protein, 13 aa, Homo sapiens
  CDR3 for alpha chain variable domain of TCR clone 257496 (TRAV1-2, TRAJ9)
CAALNTGGFKTIF

SEQ ID NO: 514992 - protein, 13 aa, Homo sapiens
  CDR3 for beta chain variable domain of TCR clone 257496 (TRBV19, TRBJ1-2)
CASSVPGQDDYTY

SEQ ID NO: 514993 - protein, 13 aa, Homo sapiens
  CDR3 for alpha chain variable domain of TCR clone 257497 (TRAV12-3, TRAJ43)
CAMIRPNNNDSRF

SEQ ID NO: 514994 - protein, 12 aa, Homo sapiens
  CDR3 for beta chain variable domain of TCR clone 257497 (TRBV11-2, TRBJ2-5)
CASSLGQETQYF

SEQ ID NO: 514995 - protein, 15 aa, Homo sapiens
  CDR3 for alpha chain variable domain of TCR clone 257498 (TRAV21, TRAJ53)
CATLNSGGRNYKLTF

SEQ ID NO: 514996 - protein, 16 aa, Homo sapiens
  CDR3 for beta chain variable domain of TCR clone 257498 (TRBV20-1, TRBJ1-4)
CSAPGQGLLTNEKLFF

SEQ ID NO: 514997 - protein, 13 aa, Homo sapiens
  CDR3 for alpha chain variable domain of TCR clone 257499 (TRAV9-2, TRAJ49)
CALIQIGGNQFYF

SEQ ID NO: 514998 - protein, 13 aa, Homo sapiens
  CDR3 for beta chain variable domain of TCR clone 257499 (TRBV4-2, TRBJ1-1)
CASSQAGNTEAFS

SEQ ID NO: 514999 - protein, 15 aa, Homo sapiens
  CDR3 for alpha chain variable domain of TCR clone 257500 (TRAV17, TRAJ57)
CSTGPSQGGYEKLVF

SEQ ID NO: 515000 - protein, 14 aa, Homo sapiens
  CDR3 for beta chain variable domain of TCR clone 257500 (TRBV12-5, TRBJ2-5)
CASGSRTHQETQYF

SEQ ID NO: 515001 - protein, 16 aa, Homo sapiens
  CDR3 for alpha chain variable domain of TCR clone 257501 (TRAV30, TRAJ24)
CGTEIVDADNWGKFQF

SEQ ID NO: 515002 - protein, 15 aa, Homo sapiens
  CDR3 for beta chain variable domain of TCR clone 257501 (TRBV20-1, TRBJ2-6)
CSARDRGPGANVLTF

SEQ ID NO: 515003 - protein, 18 aa, Homo sapiens
  CDR3 for alpha chain variable domain of TCR clone 257502 (TRAV13-1, TRAJ52)
CVAKNPNAGGTSYGKLTF

SEQ ID NO: 515004 - protein, 14 aa, Homo sapiens
  CDR3 for beta chain variable domain of TCR clone 257502 (TRBV6-5, TRBJ1-1)
CASSFGQGLTEAFF

SEQ ID NO: 515005 - protein, 12 aa, Homo sapiens
  CDR3 for alpha chain variable domain of TCR clone 257503 (TRAV29/DV5, TRAJ34)
CAASGNTDKLIF

SEQ ID NO: 515006 - protein, 16 aa, Homo sapiens
  CDR3 for beta chain variable domain of TCR clone 257503 (TRBV4-2, TRBJ1-1)
CASRPLDGGGDTEAFF

SEQ ID NO: 515007 - protein, 15 aa, Homo sapiens
  CDR3 for alpha chain variable domain of TCR clone 257504 (TRAV12-3, TRAJ6)
CAMSATTGGSYIPTF

SEQ ID NO: 515008 - protein, 16 aa, Homo sapiens
  CDR3 for beta chain variable domain of TCR clone 257504 (TRBV20-1, TRBJ1-2)
SSASMGQGVANYGYTF

SEQ ID NO: 515009 - protein, 18 aa, Homo sapiens
  CDR3 for alpha chain variable domain of TCR clone 257505 (TRAV12-1, TRAJ52)
CVVKLINAGGTSYGKLTF

SEQ ID NO: 515010 - protein, 13 aa, Homo sapiens
  CDR3 for beta chain variable domain of TCR clone 257505 (TRBV7-9, TRBJ1-2)
CASSLKQNYGYTF

SEQ ID NO: 515011 - protein, 14 aa, Homo sapiens
  CDR3 for alpha chain variable domain of TCR clone 257506 (TRAV26-1, TRAJ38)
CIADNAGNNRKLIW

SEQ ID NO: 515012 - protein, 15 aa, Homo sapiens
  CDR3 for beta chain variable domain of TCR clone 257506 (TRBV7-3, TRBJ2-3)
CQQQTSGGRTDTQYF

SEQ ID NO: 515013 - protein, 13 aa, Homo sapiens
  CDR3 for alpha chain variable domain of TCR clone 257507 (TRAV20, TRAJ37)
CAGCSSNTGKLIF

SEQ ID NO: 515014 - protein, 14 aa, Homo sapiens
  CDR3 for beta chain variable domain of TCR clone 257507 (TRBV7-9, TRBJ2-1)
CASRPTGLRNEQFF

SEQ ID NO: 515015 - protein, 16 aa, Homo sapiens
  CDR3 for alpha chain variable domain of TCR clone 257508 (TRAV38-1, TRAJ37)
CAFKGVGSSNTGKLIF

SEQ ID NO: 515016 - protein, 13 aa, Homo sapiens
  CDR3 for beta chain variable domain of TCR clone 257508 (TRBV12-4, TRBJ2-5)
CASSLFRRETQYF

SEQ ID NO: 515017 - protein, 17 aa, Homo sapiens
  CDR3 for alpha chain variable domain of TCR clone 257509 (TRAV23/DV6, TRAJ57)
CAAGSTLSQGGSEKLVF

SEQ ID NO: 515018 - protein, 14 aa, Homo sapiens
  CDR3 for beta chain variable domain of TCR clone 257509 (TRBV25-1, TRBJ1-1)
CASTHLGGNTEALF

SEQ ID NO: 515019 - protein, 15 aa, Homo sapiens
  CDR3 for alpha chain variable domain of TCR clone 257510 (TRAV1-2, TRAJ12)
CAVIPEVDSSYKLIF

SEQ ID NO: 515020 - protein, 12 aa, Homo sapiens
  CDR3 for beta chain variable domain of TCR clone 257510 (TRBV12-4, TRBJ2-7)
CASSLGGYKQYF

SEQ ID NO: 515021 - protein, 13 aa, Homo sapiens
  CDR3 for alpha chain variable domain of TCR clone 257511 (TRAV17, TRAJ39)
CATDYGAGTMLTF

SEQ ID NO: 515022 - protein, 15 aa, Homo sapiens
  CDR3 for beta chain variable domain of TCR clone 257511 (TRBV10-1, TRBJ1-1)
CASSESQGGNTEAFF

SEQ ID NO: 515023 - protein, 12 aa, Homo sapiens
  CDR3 for alpha chain variable domain of TCR clone 257512 (TRAV17, TRAJ29)
CATDSGNTPLVF

SEQ ID NO: 515024 - protein, 15 aa, Homo sapiens
  CDR3 for beta chain variable domain of TCR clone 257512 (TRBV18, TRBJ2-7)
CASSPSSTGNYEQYF

SEQ ID NO: 515025 - protein, 14 aa, Homo sapiens
  CDR3 for alpha chain variable domain of TCR clone 257513 (TRAV12-2, TRAJ13)
FAVKKTGGYQQVTF

SEQ ID NO: 515026 - protein, 14 aa, Homo sapiens
  CDR3 for beta chain variable domain of TCR clone 257513 (TRBV7-6, TRBJ2-3)
CASSLGTVTDTQYF

SEQ ID NO: 515027 - protein, 15 aa, Homo sapiens
  CDR3 for alpha chain variable domain of TCR clone 257514 (TRAV26-1, TRAJ40)
CIVRANTGTASKLTF

SEQ ID NO: 515028 - protein, 14 aa, Homo sapiens
  CDR3 for beta chain variable domain of TCR clone 257514 (TRBV25-1, TRBJ1-1)
CASTHLGGNTEAFF

SEQ ID NO: 515029 - protein, 13 aa, Homo sapiens
  CDR3 for alpha chain variable domain of TCR clone 257515 (TRAV8-3, TRAJ28)
CAVGAVGSYKLTF

SEQ ID NO: 515030 - protein, 17 aa, Homo sapiens
  CDR3 for beta chain variable domain of TCR clone 257515 (TRBV11-2, TRBJ2-1)
CASSLYPPGVEYNEQFF

SEQ ID NO: 515031 - protein, 13 aa, Homo sapiens
  CDR3 for alpha chain variable domain of TCR clone 257516 (TRAV3, TRAJ27)
CAVRPLGAGKSTF

SEQ ID NO: 515032 - protein, 14 aa, Homo sapiens
  CDR3 for beta chain variable domain of TCR clone 257516 (TRBV7-2, TRBJ2-5)
CASSPRGSSETQYF

SEQ ID NO: 515033 - protein, 15 aa, Homo sapiens
  CDR3 for alpha chain variable domain of TCR clone 257517 (TRAV1-2, TRAJ28)
CAVQYSGAGSYQLTF

SEQ ID NO: 515034 - protein, 13 aa, Homo sapiens
  CDR3 for beta chain variable domain of TCR clone 257517 (TRBV4-2, TRBJ1-1)
CTSSQAGNTEAFF

SEQ ID NO: 515035 - protein, 11 aa, Homo sapiens
  CDR3 for alpha chain variable domain of TCR clone 257518 (TRAV20, TRAJ23)
CACNQGGKLIF

SEQ ID NO: 515036 - protein, 18 aa, Homo sapiens
  CDR3 for beta chain variable domain of TCR clone 257518 (TRBV7-8, TRBJ2-1)
CASSPAEGLAGGLNEQFF

SEQ ID NO: 515037 - protein, 14 aa, Homo sapiens
  CDR3 for alpha chain variable domain of TCR clone 257519 (TRAV12-2, TRAJ4)
CAVSSSGGYNKLIF

SEQ ID NO: 515038 - protein, 13 aa, Homo sapiens
  CDR3 for beta chain variable domain of TCR clone 257519 (TRBV10-3, TRBJ2-5)
CAMTSGAGETQYS

SEQ ID NO: 515039 - protein, 12 aa, Homo sapiens
  CDR3 for alpha chain variable domain of TCR clone 257520 (TRAV38-2/DV8, TRAJ48)
CALLSGNEKLPF

SEQ ID NO: 515040 - protein, 14 aa, Homo sapiens
  CDR3 for beta chain variable domain of TCR clone 257520 (TRBV11-2, TRBJ2-3)
CASSRLARTDTQYF

SEQ ID NO: 515041 - protein, 11 aa, Homo sapiens
  CDR3 for alpha chain variable domain of TCR clone 257521 (TRAV12-3, TRAJ43)
CAMSVSNDMRF

SEQ ID NO: 515042 - protein, 15 aa, Homo sapiens
  CDR3 for beta chain variable domain of TCR clone 257521 (TRBV2, TRBJ2-1)
CASSELAGSYNEQFF

SEQ ID NO: 515043 - protein, 16 aa, Homo sapiens
  CDR3 for alpha chain variable domain of TCR clone 257522 (TRAV14/DV4, TRAJ54)
CAMREGRIQGAQKLVF

SEQ ID NO: 515044 - protein, 14 aa, Homo sapiens
  CDR3 for beta chain variable domain of TCR clone 257522 (TRBV11-2, TRBJ2-3)
CASSLGGGANTQYF

SEQ ID NO: 515045 - protein, 15 aa, Homo sapiens
  CDR3 for alpha chain variable domain of TCR clone 257523 (TRAV17, TRAJ57)
CATGPSPGGSEKLVF

SEQ ID NO: 515046 - protein, 16 aa, Homo sapiens
  CDR3 for beta chain variable domain of TCR clone 257523 (TRBV12-4, TRBJ1-5)
CASSRPVGGSNQPQDF

SEQ ID NO: 515047 - protein, 16 aa, Homo sapiens
  CDR3 for alpha chain variable domain of TCR clone 257524 (TRAV12-3, TRAJ58)
CAMTDTEETSGSRLTF

SEQ ID NO: 515048 - protein, 22 aa, Homo sapiens
  CDR3 for beta chain variable domain of TCR clone 257524 (TRBV23-1, TRBJ2-7)
CARSRRLDSGRGYVGGGYEQYF

SEQ ID NO: 515049 - protein, 17 aa, Homo sapiens
  CDR3 for alpha chain variable domain of TCR clone 257525 (TRAV1-1, TRAJ4)
CALYNKLIFGAGTRLAV

SEQ ID NO: 515050 - protein, 16 aa, Homo sapiens
  CDR3 for beta chain variable domain of TCR clone 257525 (TRBV7-3, TRBJ2-2)
CASSLKRGTLSRELFF

SEQ ID NO: 515051 - protein, 16 aa, Homo sapiens
  CDR3 for alpha chain variable domain of TCR clone 257526 (TRAV14/DV4, TRAJ53)
CAMREGGGGSNYKLTF

SEQ ID NO: 515052 - protein, 12 aa, Homo sapiens
  CDR3 for beta chain variable domain of TCR clone 257526 (TRBV20-1, TRBJ2-1)
CSAQYTYNEQFF

SEQ ID NO: 515053 - protein, 15 aa, Homo sapiens
  CDR3 for alpha chain variable domain of TCR clone 257527 (TRAV34, TRAJ38)
RGADFTPGNNRKLIW

SEQ ID NO: 515054 - protein, 16 aa, Homo sapiens
  CDR3 for beta chain variable domain of TCR clone 257527 (TRBV12-5, TRBJ2-5)
CASGPRTSGKQETQYF

SEQ ID NO: 515055 - protein, 15 aa, Homo sapiens
  CDR3 for alpha chain variable domain of TCR clone 257528 (TRAV8-4, TRAJ12)
CAVSDRVDSSDKLIF

SEQ ID NO: 515056 - protein, 15 aa, Homo sapiens
  CDR3 for beta chain variable domain of TCR clone 257528 (TRBV11-3, TRBJ2-1)
CASSLAGQTYNEQFF

SEQ ID NO: 515057 - protein, 14 aa, Homo sapiens
  CDR3 for alpha chain variable domain of TCR clone 257529 (TRAV1-1, TRAJ27)
CAVIYNTHAGKSTF

SEQ ID NO: 515058 - protein, 14 aa, Homo sapiens
  CDR3 for beta chain variable domain of TCR clone 257529 (TRBV6-5, TRBJ1-2)
CASSYDGTGGGYTF

SEQ ID NO: 515059 - protein, 15 aa, Homo sapiens
  CDR3 for alpha chain variable domain of TCR clone 257530 (TRAV35, TRAJ40)
CAGQLGTSGTYKYIF

SEQ ID NO: 515060 - protein, 14 aa, Homo sapiens
  CDR3 for beta chain variable domain of TCR clone 257530 (TRBV7-3, TRBJ2-1)
CASSFAGGANEQFF

SEQ ID NO: 515061 - protein, 14 aa, Homo sapiens
  CDR3 for alpha chain variable domain of TCR clone 257531 (TRAV38-1, TRAJ40)
CALRPTSGTYKYIF

SEQ ID NO: 515062 - protein, 15 aa, Homo sapiens
  CDR3 for beta chain variable domain of TCR clone 257531 (TRBV7-8, TRBJ1-1)
CASSLGDSRNTEAFF

SEQ ID NO: 515063 - protein, 16 aa, Homo sapiens
  CDR3 for alpha chain variable domain of TCR clone 257532 (TRAV1-2, TRAJ16)
CAVNRFSDGRSCSLQG

SEQ ID NO: 515064 - protein, 13 aa, Homo sapiens
  CDR3 for beta chain variable domain of TCR clone 257532 (TRBV10-3, TRBJ1-2)
CAISERDSYGYTF

SEQ ID NO: 515065 - protein, 16 aa, Homo sapiens
  CDR3 for alpha chain variable domain of TCR clone 257533 (TRAV12-3, TRAJ53)
CAMSPGSGGSNYKLTF

SEQ ID NO: 515066 - protein, 13 aa, Homo sapiens
  CDR3 for beta chain variable domain of TCR clone 257533 (TRBV11-2, TRBJ1-1)
CASSLGRNTEAFF

SEQ ID NO: 515067 - protein, 15 aa, Homo sapiens
  CDR3 for alpha chain variable domain of TCR clone 257534 (TRAV17, TRAJ13)
CATTAGSGGYQKVTF

SEQ ID NO: 515068 - protein, 17 aa, Homo sapiens
  CDR3 for beta chain variable domain of TCR clone 257534 (TRBV11-2, TRBJ2-1)
CASSLYPPGVEYNEQFF

SEQ ID NO: 515069 - protein, 13 aa, Homo sapiens
  CDR3 for alpha chain variable domain of TCR clone 257535 (TRAV17, TRAJ22)
CAGRRGSARQLTF

SEQ ID NO: 515070 - protein, 14 aa, Homo sapiens
  CDR3 for beta chain variable domain of TCR clone 257535 (TRBV11-2, TRBJ2-3)
CASSRLARTDTQYF

SEQ ID NO: 515071 - protein, 18 aa, Homo sapiens
  CDR3 for alpha chain variable domain of TCR clone 257536 (TRAV26-2, TRAJ45)
CILRVDKYSVGGADGLTF

SEQ ID NO: 515072 - protein, 16 aa, Homo sapiens
  CDR3 for beta chain variable domain of TCR clone 257536 (TRBV2, TRBJ1-4)
CASNLLQGATNEKLFF

SEQ ID NO: 515073 - protein, 16 aa, Homo sapiens
  CDR3 for alpha chain variable domain of TCR clone 257537 (TRAV16, TRAJ21)
CACGWATTSPNFTLDL

SEQ ID NO: 515074 - protein, 15 aa, Homo sapiens
  CDR3 for beta chain variable domain of TCR clone 257537 (TRBV19, TRBJ2-1)
CASSIQATSYNEQVF

SEQ ID NO: 515075 - protein, 14 aa, Homo sapiens
  CDR3 for alpha chain variable domain of TCR clone 257538 (TRAV8-1, TRAJ23)
CAVGTGNQGGKLIF

SEQ ID NO: 515076 - protein, 16 aa, Homo sapiens
  CDR3 for beta chain variable domain of TCR clone 257538 (TRBV18, TRBJ1-5)
CASSPSTGNSNQPQHF

SEQ ID NO: 515077 - protein, 12 aa, Homo sapiens
  CDR3 for alpha chain variable domain of TCR clone 257539 (TRAV8-3, TRAJ20)
CAVGANDYELSF

SEQ ID NO: 515078 - protein, 13 aa, Homo sapiens
  CDR3 for beta chain variable domain of TCR clone 257539 (TRBV19, TRBJ1-3)
CASRLSLGNTIYF

SEQ ID NO: 515079 - protein, 14 aa, Homo sapiens
  CDR3 for alpha chain variable domain of TCR clone 257540 (TRAV12-2, TRAJ15)
CAPHTGQAGTALIF

SEQ ID NO: 515080 - protein, 15 aa, Homo sapiens
  CDR3 for beta chain variable domain of TCR clone 257540 (TRBV4-1, TRBJ1-4)
CASSDTGGTNEKLFF

SEQ ID NO: 515081 - protein, 18 aa, Homo sapiens
  CDR3 for alpha chain variable domain of TCR clone 257541 (TRAV26-1, TRAJ23)
CIVRVGLEVGNPGGKLIF

SEQ ID NO: 515082 - protein, 15 aa, Homo sapiens
  CDR3 for beta chain variable domain of TCR clone 257541 (TRBV9, TRBJ1-6)
CASSVAGTGDSPLHF

SEQ ID NO: 515083 - protein, 14 aa, Homo sapiens
  CDR3 for alpha chain variable domain of TCR clone 257542 (TRAV16, TRAJ33)
CALSAMDSNYQLIW

SEQ ID NO: 515084 - protein, 13 aa, Homo sapiens
  CDR3 for beta chain variable domain of TCR clone 257542 (TRBV7-9, TRBJ2-7)
CASSLPLTYEQYF

SEQ ID NO: 515085 - protein, 15 aa, Homo sapiens
  CDR3 for alpha chain variable domain of TCR clone 257543 (TRAV8-2, TRAJ40)
CVVLGTTSGTYKYIF

SEQ ID NO: 515086 - protein, 15 aa, Homo sapiens
  CDR3 for beta chain variable domain of TCR clone 257543 (TRBV19, TRBJ1-6)
CASSTQWAVGSPLHF

SEQ ID NO: 515087 - protein, 15 aa, Homo sapiens
  CDR3 for alpha chain variable domain of TCR clone 257544 (TRAV21, TRAJ38)
CAVRQDAGNNRKLIW

SEQ ID NO: 515088 - protein, 16 aa, Homo sapiens
  CDR3 for beta chain variable domain of TCR clone 257544 (TRBV4-2, TRBJ1-1)
CASRALDGGGDTEAFF

SEQ ID NO: 515089 - protein, 13 aa, Homo sapiens
  CDR3 for alpha chain variable domain of TCR clone 257545 (TRAV29/DV5, TRAJ47)
CAASAAYGNNLVF

SEQ ID NO: 515090 - protein, 15 aa, Homo sapiens
  CDR3 for beta chain variable domain of TCR clone 257545 (TRBV7-9, TRBJ1-4)
CASSARTGGNEKLFF

SEQ ID NO: 515091 - protein, 12 aa, Homo sapiens
  CDR3 for alpha chain variable domain of TCR clone 257546 (TRAV8-3, TRAJ26)
CAGDNYGQNFVF

SEQ ID NO: 515092 - protein, 15 aa, Homo sapiens
  CDR3 for beta chain variable domain of TCR clone 257546 (TRBV5-1, TRBJ2-3)
CTSSVTSGSTDTQYF

SEQ ID NO: 515093 - protein, 12 aa, Homo sapiens
  CDR3 for alpha chain variable domain of TCR clone 257547 (TRAV1-1, TRAJ24)
CAATDSWGKLQF

SEQ ID NO: 515094 - protein, 18 aa, Homo sapiens
  CDR3 for beta chain variable domain of TCR clone 257547 (TRBV7-9, TRBJ2-7)
CASSLTTSGSRTWYEQYF

SEQ ID NO: 515095 - protein, 13 aa, Homo sapiens
  CDR3 for alpha chain variable domain of TCR clone 257548 (TRAV2, TRAJ16)
CAVERSDGQKLLF

SEQ ID NO: 515096 - protein, 15 aa, Homo sapiens
  CDR3 for beta chain variable domain of TCR clone 257548 (TRBV20-1, TRBJ2-5)
CNAIKGQGSQETQYF

SEQ ID NO: 515097 - protein, 14 aa, Homo sapiens
  CDR3 for alpha chain variable domain of TCR clone 257549 (TRAV12-2, TRAJ11)
CAVRKNSGYSSLTF

SEQ ID NO: 515098 - protein, 14 aa, Homo sapiens
  CDR3 for beta chain variable domain of TCR clone 257549 (TRBV7-2, TRBJ2-5)
CASWQERFRETQYF

SEQ ID NO: 515099 - protein, 17 aa, Homo sapiens
  CDR3 for alpha chain variable domain of TCR clone 257550 (TRAV13-1, TRAJ52)
CAAGRNAGGTSYGKLTF

SEQ ID NO: 515100 - protein, 16 aa, Homo sapiens
  CDR3 for beta chain variable domain of TCR clone 257550 (TRBV2, TRBJ2-3)
CASSTSVEGVTDTQYF

SEQ ID NO: 515101 - protein, 13 aa, Homo sapiens
  CDR3 for alpha chain variable domain of TCR clone 257551 (TRAV8-4, TRAJ48)
CAVTNFGNEKLTF

SEQ ID NO: 515102 - protein, 14 aa, Homo sapiens
  CDR3 for beta chain variable domain of TCR clone 257551 (TRBV6-5, TRBJ1-2)
CASSYDGTGGGYTF

SEQ ID NO: 515103 - protein, 14 aa, Homo sapiens
  CDR3 for alpha chain variable domain of TCR clone 257552 (TRAV1-1, TRAJ28)
CAAPSGAGSYQLTF

SEQ ID NO: 515104 - protein, 14 aa, Homo sapiens
  CDR3 for beta chain variable domain of TCR clone 257552 (TRBV7-9, TRBJ2-5)
CASSPAQDQETQYF

SEQ ID NO: 515105 - protein, 16 aa, Homo sapiens
  CDR3 for alpha chain variable domain of TCR clone 257553 (TRAV16, TRAJ42)
CARKMNYGGSKGNLIF

SEQ ID NO: 515106 - protein, 13 aa, Homo sapiens
  CDR3 for beta chain variable domain of TCR clone 257553 (TRBV20-1, TRBJ2-7)
CSASPPSSYEQYF

SEQ ID NO: 515107 - protein, 11 aa, Homo sapiens
  CDR3 for alpha chain variable domain of TCR clone 257554 (TRAV12-3, TRAJ41)
CAMNAREALNF

SEQ ID NO: 515108 - protein, 14 aa, Homo sapiens
  CDR3 for beta chain variable domain of TCR clone 257554 (TRBV7-2, TRBJ2-7)
CASSLRWEVNEQYF

SEQ ID NO: 515109 - protein, 16 aa, Homo sapiens
  CDR3 for alpha chain variable domain of TCR clone 257555 (TRAV1-2, TRAJ10)
CAVRGVLTVGGNKLTF

SEQ ID NO: 515110 - protein, 14 aa, Homo sapiens
  CDR3 for beta chain variable domain of TCR clone 257555 (TRBV25-1, TRBJ1-1)
CASTHLGGNTEAFF

SEQ ID NO: 515111 - protein, 17 aa, Homo sapiens
  CDR3 for alpha chain variable domain of TCR clone 257556 (TRAV3, TRAJ29)
CAVRDSDSEFRKHTSCL

SEQ ID NO: 515112 - protein, 14 aa, Homo sapiens
  CDR3 for beta chain variable domain of TCR clone 257556 (TRBV7-2, TRBJ2-7)
CASRSQGAAYEQYF

SEQ ID NO: 515113 - protein, 15 aa, Homo sapiens
  CDR3 for alpha chain variable domain of TCR clone 257557 (TRAV3, TRAJ36)
CAVRASQTGANNLFF

SEQ ID NO: 515114 - protein, 15 aa, Homo sapiens
  CDR3 for beta chain variable domain of TCR clone 257557 (TRBV28, TRBJ2-1)
CASSIIAGGRSEQFF

SEQ ID NO: 515115 - protein, 14 aa, Homo sapiens
  CDR3 for alpha chain variable domain of TCR clone 257558 (TRAV20, TRAJ42)
CAVQAGGSQGNLIF

SEQ ID NO: 515116 - protein, 19 aa, Homo sapiens
  CDR3 for beta chain variable domain of TCR clone 257558 (TRBV7-2, TRBJ2-3)
CASSFLSRNWGGGTDTQYF

SEQ ID NO: 515117 - protein, 12 aa, Homo sapiens
  CDR3 for alpha chain variable domain of TCR clone 257559 (TRAV8-3, TRAJ20)
CAVDFNDYKLSF

SEQ ID NO: 515118 - protein, 12 aa, Homo sapiens
  CDR3 for beta chain variable domain of TCR clone 257559 (TRBV29-1, TRBJ2-3)
CSVTGGVDTQYF

SEQ ID NO: 515119 - protein, 15 aa, Homo sapiens
  CDR3 for alpha chain variable domain of TCR clone 257560 (TRAV2, TRAJ28)
CAVPYSGAGSYQLTF

SEQ ID NO: 515120 - protein, 16 aa, Homo sapiens
  CDR3 for beta chain variable domain of TCR clone 257560 (TRBV12-4, TRBJ1-5)
CASSRPVGGSNQPQHF

SEQ ID NO: 515121 - protein, 12 aa, Homo sapiens
  CDR3 for alpha chain variable domain of TCR clone 257561 (TRAV17, TRAJ12)
CATLRSSYKLIF

SEQ ID NO: 515122 - protein, 12 aa, Homo sapiens
  CDR3 for beta chain variable domain of TCR clone 257561 (TRBV5-4, TRBJ2-5)
CASSSTRETQYF

SEQ ID NO: 515123 - protein, 13 aa, Homo sapiens
  CDR3 for alpha chain variable domain of TCR clone 257562 (TRAV8-3, TRAJ43)
CAVVPYTNNDMRF

SEQ ID NO: 515124 - protein, 17 aa, Homo sapiens
  CDR3 for beta chain variable domain of TCR clone 257562 (TRBV7-7, TRBJ1-1)
CASIGDRPNLGVTEAFF

SEQ ID NO: 515125 - protein, 12 aa, Homo sapiens
  CDR3 for alpha chain variable domain of TCR clone 257563 (TRAV3, TRAJ20)
CAVRDGDYKLSF

SEQ ID NO: 515126 - protein, 15 aa, Homo sapiens
  CDR3 for beta chain variable domain of TCR clone 257563 (TRBV11-2, TRBJ2-1)
CASSLGPDSYNEQFF

SEQ ID NO: 515127 - protein, 14 aa, Homo sapiens
  CDR3 for alpha chain variable domain of TCR clone 257564 (TRAV8-3, TRAJ9)
CAVVYNTGGFRTIF

SEQ ID NO: 515128 - protein, 14 aa, Homo sapiens
  CDR3 for beta chain variable domain of TCR clone 257564 (TRBV7-3, TRBJ2-2)
CASSSGGYTGELFF

SEQ ID NO: 515129 - protein, 12 aa, Homo sapiens
  CDR3 for alpha chain variable domain of TCR clone 257565 (TRAV12-3, TRAJ5)
CAMDTGRRALTF

SEQ ID NO: 515130 - protein, 13 aa, Homo sapiens
  CDR3 for beta chain variable domain of TCR clone 257565 (TRBV19, TRBJ1-2)
CASSVPGQDGYTF

SEQ ID NO: 515131 - protein, 18 aa, Homo sapiens
  CDR3 for alpha chain variable domain of TCR clone 257566 (TRAV21, TRAJ52)
CAVRPSPAGGTSYGKLAF

SEQ ID NO: 515132 - protein, 15 aa, Homo sapiens
  CDR3 for beta chain variable domain of TCR clone 257566 (TRBV20-1, TRBJ2-7)
CSARDRVSGMDEQYF

SEQ ID NO: 515133 - protein, 16 aa, Homo sapiens
  CDR3 for alpha chain variable domain of TCR clone 257567 (TRAV12-3, TRAJ53)
CAMSPGSGGSNYKLTF

SEQ ID NO: 515134 - protein, 16 aa, Homo sapiens
  CDR3 for beta chain variable domain of TCR clone 257567 (TRBV4-2, TRBJ1-1)
CASSQAEFGMNTEAFF

SEQ ID NO: 515135 - protein, 18 aa, Homo sapiens
  CDR3 for alpha chain variable domain of TCR clone 257568 (TRAV13-1, TRAJ52)
CAAKNPNAGGTSYAKLTF

SEQ ID NO: 515136 - protein, 15 aa, Homo sapiens
  CDR3 for beta chain variable domain of TCR clone 257568 (TRBV6-1, TRBJ2-3)
CASSERGGITDTQYF

SEQ ID NO: 515137 - protein, 15 aa, Homo sapiens
  CDR3 for alpha chain variable domain of TCR clone 257569 (TRAV25, TRAJ52)
CAGRPGGTSYGKLTF

SEQ ID NO: 515138 - protein, 15 aa, Homo sapiens
  CDR3 for beta chain variable domain of TCR clone 257569 (TRBV7-6, TRBJ2-5)
CASGKPTGPQETQYF

SEQ ID NO: 515139 - protein, 16 aa, Homo sapiens
  CDR3 for alpha chain variable domain of TCR clone 257570 (TRAV12-3, TRAJ53)
CAMSVGSGGSNYKLTF

SEQ ID NO: 515140 - protein, 16 aa, Homo sapiens
  CDR3 for beta chain variable domain of TCR clone 257570 (TRBV13, TRBJ2-2)
CASSPRTGEHTGELFF

SEQ ID NO: 515141 - protein, 15 aa, Homo sapiens
  CDR3 for alpha chain variable domain of TCR clone 257571 (TRAV12-3, TRAJ6)
CAMSATTGGSYIPTF

SEQ ID NO: 515142 - protein, 10 aa, Homo sapiens
  CDR3 for beta chain variable domain of TCR clone 257571 (TRBV10-3, TRBJ2-7)
CAATSNEQYF

SEQ ID NO: 515143 - protein, 15 aa, Homo sapiens
  CDR3 for alpha chain variable domain of TCR clone 257572 (TRAV26-1, TRAJ44)
CIVRANTGTASKLTF

SEQ ID NO: 515144 - protein, 18 aa, Homo sapiens
  CDR3 for beta chain variable domain of TCR clone 257572 (TRBV2, TRBJ2-1)
CTSVPAGRGLPSYNEQFF

SEQ ID NO: 515145 - protein, 13 aa, Homo sapiens
  CDR3 for alpha chain variable domain of TCR clone 257573 (TRAV29/DV5, TRAJ37)
CAAVPVNTGKLIF

SEQ ID NO: 515146 - protein, 13 aa, Homo sapiens
  CDR3 for beta chain variable domain of TCR clone 257573 (TRBV28, TRBJ2-7)
CASSPTLKREQYF

SEQ ID NO: 515147 - protein, 17 aa, Homo sapiens
  CDR3 for alpha chain variable domain of TCR clone 257574 (TRAV27, TRAJ42)
CAERVIYYGGSQGNLIF

SEQ ID NO: 515148 - protein, 18 aa, Homo sapiens
  CDR3 for beta chain variable domain of TCR clone 257574 (TRBV11-2, TRBJ2-3)
CASSLGGASRGAPNTQYF

SEQ ID NO: 515149 - protein, 13 aa, Homo sapiens
  CDR3 for alpha chain variable domain of TCR clone 257575 (TRAV27, TRAJ45)
CRSSGGGADGLTF

SEQ ID NO: 515150 - protein, 13 aa, Homo sapiens
  CDR3 for beta chain variable domain of TCR clone 257575 (TRBV5-1, TRBJ1-1)
CASSLEPRYEAFF

SEQ ID NO: 515151 - protein, 14 aa, Homo sapiens
  CDR3 for alpha chain variable domain of TCR clone 257576 (TRAV4, TRAJ10)
CHVGDTGGGNKLTF

SEQ ID NO: 515152 - protein, 13 aa, Homo sapiens
  CDR3 for beta chain variable domain of TCR clone 257576 (TRBV10-2, TRBJ2-5)
CASSVGPQETQYF

SEQ ID NO: 515153 - protein, 11 aa, Homo sapiens
  CDR3 for alpha chain variable domain of TCR clone 257577 (TRAV12-3, TRAJ49)
CAANTGNQFYF

SEQ ID NO: 515154 - protein, 13 aa, Homo sapiens
  CDR3 for beta chain variable domain of TCR clone 257577 (TRBV7-3, TRBJ2-5)
CASSSDREETQYF

SEQ ID NO: 515155 - protein, 12 aa, Homo sapiens
  CDR3 for alpha chain variable domain of TCR clone 257578 (TRAV25, TRAJ11)
CAGYSGYSTLTF

SEQ ID NO: 515156 - protein, 12 aa, Homo sapiens
  CDR3 for beta chain variable domain of TCR clone 257578 (TRBV29-1, TRBJ2-3)
CSVTGGADTQYF

SEQ ID NO: 515157 - protein, 13 aa, Homo sapiens
  CDR3 for alpha chain variable domain of TCR clone 257579 (TRAV12-2, TRAJ7)
CAVNLYGNNRLAF

SEQ ID NO: 515158 - protein, 14 aa, Homo sapiens
  CDR3 for beta chain variable domain of TCR clone 257579 (TRBV25-1, TRBJ1-2)
CASSEATGAYGYTF

SEQ ID NO: 515159 - protein, 11 aa, Homo sapiens
  CDR3 for alpha chain variable domain of TCR clone 257580 (TRAV12-2, TRAJ29)
CAVTLRSPLVF

SEQ ID NO: 515160 - protein, 16 aa, Homo sapiens
  CDR3 for beta chain variable domain of TCR clone 257580 (TRBV29-1, TRBJ2-2)
CSVDTRASGNTGELFF

SEQ ID NO: 515161 - protein, 16 aa, Homo sapiens
  CDR3 for alpha chain variable domain of TCR clone 257581 (TRAV13-1, TRAJ18)
CAASRMRGSTMGRLYF

SEQ ID NO: 515162 - protein, 15 aa, Homo sapiens
  CDR3 for beta chain variable domain of TCR clone 257581 (TRBV29-1, TRBJ2-1)
CSVGRHALFYNEQFF

SEQ ID NO: 515163 - protein, 18 aa, Homo sapiens
  CDR3 for alpha chain variable domain of TCR clone 257582 (TRAV26-2, TRAJ45)
CILRVDKYSGGGAHGLTF

SEQ ID NO: 515164 - protein, 16 aa, Homo sapiens
  CDR3 for beta chain variable domain of TCR clone 257582 (TRBV2, TRBJ1-4)
CASNLLQGATSEKLFF

SEQ ID NO: 515165 - protein, 13 aa, Homo sapiens
  CDR3 for alpha chain variable domain of TCR clone 257583 (TRAV12-2, TRAJ9)
CAVKWAGGFKTIF

SEQ ID NO: 515166 - protein, 15 aa, Homo sapiens
  CDR3 for beta chain variable domain of TCR clone 257583 (TRBV5-1, TRBJ1-4)
CASSLTADSDEKLFF

SEQ ID NO: 515167 - protein, 14 aa, Homo sapiens
  CDR3 for alpha chain variable domain of TCR clone 257584 (TRAV1-2, TRAJ16)
CAVNRFSDGQKLLF

SEQ ID NO: 515168 - protein, 14 aa, Homo sapiens
  CDR3 for beta chain variable domain of TCR clone 257584 (TRBV18, TRBJ1-5)
CASSRQQRNQPQHF

SEQ ID NO: 515169 - protein, 14 aa, Homo sapiens
  CDR3 for alpha chain variable domain of TCR clone 257585 (TRAV17, TRAJ22)
CATSPSGSARQLTF

SEQ ID NO: 515170 - protein, 15 aa, Homo sapiens
  CDR3 for beta chain variable domain of TCR clone 257585 (TRBV4-1, TRBJ2-5)
CASSQWDVYQETQYF

SEQ ID NO: 515171 - protein, 17 aa, Homo sapiens
  CDR3 for alpha chain variable domain of TCR clone 257586 (TRAV3, TRAJ12)
CAVRDGGRMDSSYKLIF

SEQ ID NO: 515172 - protein, 15 aa, Homo sapiens
  CDR3 for beta chain variable domain of TCR clone 257586 (TRBV12-4, TRBJ2-5)
CASSPPTGLQETQYF

SEQ ID NO: 515173 - protein, 15 aa, Homo sapiens
  CDR3 for alpha chain variable domain of TCR clone 257587 (TRAV3, TRAJ20)
CAVRDIKLSDYSLSF

SEQ ID NO: 515174 - protein, 18 aa, Homo sapiens
  CDR3 for beta chain variable domain of TCR clone 257587 (TRBV20-1, TRBJ2-5)
CSQTGDSGRLGGKETQYF

SEQ ID NO: 515175 - protein, 14 aa, Homo sapiens
  CDR3 for alpha chain variable domain of TCR clone 257588 (TRAV1-2, TRAJ16)
CAVNRFSDGQKLLF

SEQ ID NO: 515176 - protein, 11 aa, Homo sapiens
  CDR3 for beta chain variable domain of TCR clone 257588 (TRBV12-4, TRBJ2-3)
CASTAADTQYF

SEQ ID NO: 515177 - protein, 11 aa, Homo sapiens
  CDR3 for alpha chain variable domain of TCR clone 257589 (TRAV17, TRAJ39)
CATNPYNMLTF

SEQ ID NO: 515178 - protein, 13 aa, Homo sapiens
  CDR3 for beta chain variable domain of TCR clone 257589 (TRBV7-8, TRBJ2-1)
CASARDAVDEQFF

SEQ ID NO: 515179 - protein, 13 aa, Homo sapiens
  CDR3 for alpha chain variable domain of TCR clone 257590 (TRAV21, TRAJ20)
CAVGLRVDYKLSF

SEQ ID NO: 515180 - protein, 13 aa, Homo sapiens
  CDR3 for beta chain variable domain of TCR clone 257590 (TRBV6-1, TRBJ1-1)
CASRRQGNTGAFF

SEQ ID NO: 515181 - protein, 16 aa, Homo sapiens
  CDR3 for alpha chain variable domain of TCR clone 257591 (TRAV1-2, TRAJ10)
CAVRGVLTGGGNKLTL

SEQ ID NO: 515182 - protein, 12 aa, Homo sapiens
  CDR3 for beta chain variable domain of TCR clone 257591 (TRBV7-8, TRBJ2-7)
CASGLGGREQYF

SEQ ID NO: 515183 - protein, 14 aa, Homo sapiens
  CDR3 for alpha chain variable domain of TCR clone 257592 (TRAV4, TRAJ6)
CLVGKAGGSYIPTF

SEQ ID NO: 515184 - protein, 16 aa, Homo sapiens
  CDR3 for beta chain variable domain of TCR clone 257592 (TRBV7-6, TRBJ2-1)
CASSLNEGPSYNEQFF

SEQ ID NO: 515185 - protein, 12 aa, Homo sapiens
  CDR3 for alpha chain variable domain of TCR clone 257593 (TRAV30, TRAJ43)
CGTEERGYDMRF

SEQ ID NO: 515186 - protein, 17 aa, Homo sapiens
  CDR3 for beta chain variable domain of TCR clone 257593 (TRBV11-2, TRBJ2-1)
CASSLYPPGVEYNEQFF

SEQ ID NO: 515187 - protein, 12 aa, Homo sapiens
  CDR3 for alpha chain variable domain of TCR clone 257594 (TRAV13-1, TRAJ27)
CAAKSDAGKSTF

SEQ ID NO: 515188 - protein, 14 aa, Homo sapiens
  CDR3 for beta chain variable domain of TCR clone 257594 (TRBV20-1, TRBJ2-3)
CSARGGTSTDTQCF

SEQ ID NO: 515189 - protein, 14 aa, Homo sapiens
  CDR3 for alpha chain variable domain of TCR clone 257595 (TRAV1-2, TRAJ16)
CAVNRFSDGQKLLF

SEQ ID NO: 515190 - protein, 16 aa, Homo sapiens
  CDR3 for beta chain variable domain of TCR clone 257595 (TRBV11-2, TRBJ1-1)
CASSLRHGGEHSKAFF

SEQ ID NO: 515191 - protein, 15 aa, Homo sapiens
  CDR3 for alpha chain variable domain of TCR clone 257596 (TRAV21, TRAJ53)
CATLNSGGGNYKLTF

SEQ ID NO: 515192 - protein, 14 aa, Homo sapiens
  CDR3 for beta chain variable domain of TCR clone 257596 (TRBV15, TRBJ1-2)
CATSRASVNYGYTF

SEQ ID NO: 515193 - protein, 14 aa, Homo sapiens
  CDR3 for alpha chain variable domain of TCR clone 257597 (TRAV13-1, TRAJ6)
CAESITGGSYIPTF

SEQ ID NO: 515194 - protein, 14 aa, Homo sapiens
  CDR3 for beta chain variable domain of TCR clone 257597 (TRBV6-3, TRBJ2-1)
CASLHSAYYNEQFF

SEQ ID NO: 515195 - protein, 17 aa, Homo sapiens
  CDR3 for alpha chain variable domain of TCR clone 257598 (TRAV3, TRAJ37)
CAVRDMRKPGNTGKLIF

SEQ ID NO: 515196 - protein, 14 aa, Homo sapiens
  CDR3 for beta chain variable domain of TCR clone 257598 (TRBV7-2, TRBJ2-7)
CASSPKTSFYEQYF

SEQ ID NO: 515197 - protein, 12 aa, Homo sapiens
  CDR3 for alpha chain variable domain of TCR clone 257599 (TRAV12-3, TRAJ17)
CAMTLTGNKLTF

SEQ ID NO: 515198 - protein, 14 aa, Homo sapiens
  CDR3 for beta chain variable domain of TCR clone 257599 (TRBV7-2, TRBJ2-7)
CARSPKTSFYEQYF

SEQ ID NO: 515199 - protein, 16 aa, Homo sapiens
  CDR3 for alpha chain variable domain of TCR clone 257600 (TRAV17, TRAJ28)
CATASVSGAGSYQLTF

SEQ ID NO: 515200 - protein, 15 aa, Homo sapiens
  CDR3 for beta chain variable domain of TCR clone 257600 (TRBV7-9, TRBJ1-4)
CASSARTGGNEKLFF

SEQ ID NO: 515201 - protein, 16 aa, Homo sapiens
  CDR3 for alpha chain variable domain of TCR clone 257601 (TRAV8-1, TRAJ18)
CAVNAGRGSTLGRLYF

SEQ ID NO: 515202 - protein, 15 aa, Homo sapiens
  CDR3 for beta chain variable domain of TCR clone 257601 (TRBV6-6, TRBJ2-5)
CASSPGGGLEETQYF

SEQ ID NO: 515203 - protein, 12 aa, Homo sapiens
  CDR3 for alpha chain variable domain of TCR clone 257602 (TRAV22, TRAJ29)
CAPPSGNIPLVF

SEQ ID NO: 515204 - protein, 14 aa, Homo sapiens
  CDR3 for beta chain variable domain of TCR clone 257602 (TRBV11-2, TRBJ2-7)
CASSLGAGAYEQYF

SEQ ID NO: 515205 - protein, 15 aa, Homo sapiens
  CDR3 for alpha chain variable domain of TCR clone 257603 (TRAV21, TRAJ53)
CATLNSGGGNYKLTF

SEQ ID NO: 515206 - protein, 13 aa, Homo sapiens
  CDR3 for beta chain variable domain of TCR clone 257603 (TRBV4-1, TRBJ2-2)
CASSQENTGELFF

SEQ ID NO: 515207 - protein, 15 aa, Homo sapiens
  CDR3 for alpha chain variable domain of TCR clone 257604 (TRAV3, TRAJ5)
CAVRDLDTGRRALTF

SEQ ID NO: 515208 - protein, 13 aa, Homo sapiens
  CDR3 for beta chain variable domain of TCR clone 257604 (TRBV12-4, TRBJ2-7)
CASSPTETDEQYI

SEQ ID NO: 515209 - protein, 13 aa, Homo sapiens
  CDR3 for alpha chain variable domain of TCR clone 257605 (TRAV23/DV6, TRAJ58)
FAARLIRGSRLTF

SEQ ID NO: 515210 - protein, 13 aa, Homo sapiens
  CDR3 for beta chain variable domain of TCR clone 257605 (TRBV2, TRBJ1-6)
CADSGSYNSPLHF

SEQ ID NO: 515211 - protein, 13 aa, Homo sapiens
  CDR3 for alpha chain variable domain of TCR clone 257606 (TRAV8-3, TRAJ36)
CAVGATGANNLFF

SEQ ID NO: 515212 - protein, 17 aa, Homo sapiens
  CDR3 for beta chain variable domain of TCR clone 257606 (TRBV15, TRBJ1-4)
CATSRYGTGDPNEKLFF

SEQ ID NO: 515213 - protein, 14 aa, Homo sapiens
  CDR3 for alpha chain variable domain of TCR clone 257607 (TRAV23/DV6, TRAJ4)
CAAPSSGGYNKLIF

SEQ ID NO: 515214 - protein, 16 aa, Homo sapiens
  CDR3 for beta chain variable domain of TCR clone 257607 (TRBV19, TRBJ1-1)
CASRFGGPVTGTQAFF

SEQ ID NO: 515215 - protein, 15 aa, Homo sapiens
  CDR3 for alpha chain variable domain of TCR clone 257608 (TRAV17, TRAJ34)
CATDLITPTSSSLGL

SEQ ID NO: 515216 - protein, 12 aa, Homo sapiens
  CDR3 for beta chain variable domain of TCR clone 257608 (TRBV11-2, TRBJ2-2)
CASSLGGGELFF

SEQ ID NO: 515217 - protein, 17 aa, Homo sapiens
  CDR3 for alpha chain variable domain of TCR clone 257609 (TRAV3, TRAJ38)
CAVRDCLNAGNNCKLIW

SEQ ID NO: 515218 - protein, 15 aa, Homo sapiens
  CDR3 for beta chain variable domain of TCR clone 257609 (TRBV7-3, TRBJ1-1)
CASSLSYYMNTEAFF

SEQ ID NO: 515219 - protein, 14 aa, Homo sapiens
  CDR3 for alpha chain variable domain of TCR clone 257610 (TRAV8-2, TRAJ11)
CVVREKSGYSTITF

SEQ ID NO: 515220 - protein, 16 aa, Homo sapiens
  CDR3 for beta chain variable domain of TCR clone 257610 (TRBV28, TRBJ2-1)
CASSSPEYPRDNEQFF

SEQ ID NO: 515221 - protein, 17 aa, Homo sapiens
  CDR3 for alpha chain variable domain of TCR clone 257611 (TRAV4, )
CLVDIQNPDPAVYQLRD

SEQ ID NO: 515222 - protein, 13 aa, Homo sapiens
  CDR3 for beta chain variable domain of TCR clone 257611 (TRBV10-3, TRBJ2-1)
CAGMDPTNNEQFF

SEQ ID NO: 515223 - protein, 11 aa, Homo sapiens
  CDR3 for alpha chain variable domain of TCR clone 257612 (TRAV8-6, TRAJ34)
CAVWNTDKLIF

SEQ ID NO: 515224 - protein, 17 aa, Homo sapiens
  CDR3 for beta chain variable domain of TCR clone 257612 (TRBV2, TRBJ2-7)
CASSQALTGWDSYEQYF

SEQ ID NO: 515225 - protein, 14 aa, Homo sapiens
  CDR3 for alpha chain variable domain of TCR clone 257613 (TRAV12-3, TRAJ54)
CAMRGIQGAQKLVF

SEQ ID NO: 515226 - protein, 14 aa, Homo sapiens
  CDR3 for beta chain variable domain of TCR clone 257613 (TRBV6-1, TRBJ2-1)
CASAKDGFYNEQFF

SEQ ID NO: 515227 - protein, 14 aa, Homo sapiens
  CDR3 for alpha chain variable domain of TCR clone 257614 (TRAV1-2, TRAJ8)
CAVREDTGFQELVF

SEQ ID NO: 515228 - protein, 17 aa, Homo sapiens
  CDR3 for beta chain variable domain of TCR clone 257614 (TRBV20-1, TRBJ2-2)
CSASGSGQGGLTGELFF

SEQ ID NO: 515229 - protein, 12 aa, Homo sapiens
  CDR3 for alpha chain variable domain of TCR clone 257615 (TRAV17, TRAJ10)
CANTGGGNKLTF

SEQ ID NO: 515230 - protein, 17 aa, Homo sapiens
  CDR3 for beta chain variable domain of TCR clone 257615 (TRBV19, TRBJ2-7)
CASSISFYDSYPYEQYF

SEQ ID NO: 515231 - protein, 17 aa, Homo sapiens
  CDR3 for alpha chain variable domain of TCR clone 257616 (TRAV1-2, TRAJ8)
CAVRDPDENTGVQKLVF

SEQ ID NO: 515232 - protein, 16 aa, Homo sapiens
  CDR3 for beta chain variable domain of TCR clone 257616 (TRBV7-9, TRBJ2-2)
CASSGFGGANTGELFS

SEQ ID NO: 515233 - protein, 12 aa, Homo sapiens
  CDR3 for alpha chain variable domain of TCR clone 257617 (TRAV12-3, TRAJ17)
CAMTLTGNKLTF

SEQ ID NO: 515234 - protein, 15 aa, Homo sapiens
  CDR3 for beta chain variable domain of TCR clone 257617 (TRBV10-2, TRBJ2-6)
CAISEQGTGANVLTF

SEQ ID NO: 515235 - protein, 12 aa, Homo sapiens
  CDR3 for alpha chain variable domain of TCR clone 257618 (TRAV21, TRAJ33)
CAKMDSNHQLIW

SEQ ID NO: 515236 - protein, 14 aa, Homo sapiens
  CDR3 for beta chain variable domain of TCR clone 257618 (TRBV2, TRBJ2-7)
CANSLTSGGYEQYF

SEQ ID NO: 515237 - protein, 14 aa, Homo sapiens
  CDR3 for alpha chain variable domain of TCR clone 257619 (TRAV27, TRAJ36)
CAGPPKRGANNLFF

SEQ ID NO: 515238 - protein, 15 aa, Homo sapiens
  CDR3 for beta chain variable domain of TCR clone 257619 (TRBV18, TRBJ2-7)
CASSPASTPNYEQYV

SEQ ID NO: 515239 - protein, 14 aa, Homo sapiens
  CDR3 for alpha chain variable domain of TCR clone 257620 (TRAV1-2, TRAJ16)
CAVNRFSDGQKLLF

SEQ ID NO: 515240 - protein, 15 aa, Homo sapiens
  CDR3 for beta chain variable domain of TCR clone 257620 (TRBV4-3, TRBJ2-3)
CASSPGGFSTDTQYF

SEQ ID NO: 515241 - protein, 14 aa, Homo sapiens
  CDR3 for alpha chain variable domain of TCR clone 257621 (TRAV9-2, TRAJ39)
CALYIYNAGNMLTF

SEQ ID NO: 515242 - protein, 14 aa, Homo sapiens
  CDR3 for beta chain variable domain of TCR clone 257621 (TRBV28, TRBJ2-3)
CASRSRDSTDTQYF

SEQ ID NO: 515243 - protein, 22 aa, Homo sapiens
  CDR3 for alpha chain variable domain of TCR clone 257622 (TRAV27, )
CAVRTQIPNIQNPDPAVYQLRY

SEQ ID NO: 515244 - protein, 16 aa, Homo sapiens
  CDR3 for beta chain variable domain of TCR clone 257622 (TRBV5-1, TRBJ2-3)
CASSLGLAVYTDTQYF

SEQ ID NO: 515245 - protein, 14 aa, Homo sapiens
  CDR3 for alpha chain variable domain of TCR clone 257623 (TRAV12-2, TRAJ15)
CAPHTGQAGTALIF

SEQ ID NO: 515246 - protein, 13 aa, Homo sapiens
  CDR3 for beta chain variable domain of TCR clone 257623 (TRBV15, TRBJ1-6)
CATSGGLNSPLYF

SEQ ID NO: 515247 - protein, 14 aa, Homo sapiens
  CDR3 for alpha chain variable domain of TCR clone 257624 (TRAV20, TRAJ56)
CAVQFGGANSKLTF

SEQ ID NO: 515248 - protein, 14 aa, Homo sapiens
  CDR3 for beta chain variable domain of TCR clone 257624 (TRBV20-1, TRBJ2-7)
CSAKRGRSSFEQYF

SEQ ID NO: 515249 - protein, 13 aa, Homo sapiens
  CDR3 for alpha chain variable domain of TCR clone 257625 (TRAV2, TRAJ36)
CAVDQTGANNLFF

SEQ ID NO: 515250 - protein, 12 aa, Homo sapiens
  CDR3 for beta chain variable domain of TCR clone 257625 (TRBV19, TRBJ1-1)
YASMNRYTEAFF

SEQ ID NO: 515251 - protein, 13 aa, Homo sapiens
  CDR3 for alpha chain variable domain of TCR clone 257626 (TRAV19, TRAJ57)
CALLQVGSEKLVF

SEQ ID NO: 515252 - protein, 10 aa, Homo sapiens
  CDR3 for beta chain variable domain of TCR clone 257626 (TRBV20-1, TRBJ2-5)
CSARFETQYF

SEQ ID NO: 515253 - protein, 17 aa, Homo sapiens
  CDR3 for alpha chain variable domain of TCR clone 257627 (TRAV3, TRAJ7)
CAVRDMSPLEGTTDSLL

SEQ ID NO: 515254 - protein, 14 aa, Homo sapiens
  CDR3 for beta chain variable domain of TCR clone 257627 (TRBV7-2, TRBJ2-7)
CASRSQGAAYEQYF

SEQ ID NO: 515255 - protein, 14 aa, Homo sapiens
  CDR3 for alpha chain variable domain of TCR clone 257628 (TRAV1-1, TRAJ27)
CAVIYNTNAGKSTF

SEQ ID NO: 515256 - protein, 15 aa, Homo sapiens
  CDR3 for beta chain variable domain of TCR clone 257628 (TRBV7-2, TRBJ2-5)
CASSFLRGGEETQYF

SEQ ID NO: 515257 - protein, 17 aa, Homo sapiens
  CDR3 for alpha chain variable domain of TCR clone 257629 (TRAV3, TRAJ6)
CAVRDGPRAGGSYIPTF

SEQ ID NO: 515258 - protein, 15 aa, Homo sapiens
  CDR3 for beta chain variable domain of TCR clone 257629 (TRBV15, TRBJ2-3)
CATSRDPRGTDTPYF

SEQ ID NO: 515259 - protein, 13 aa, Homo sapiens
  CDR3 for alpha chain variable domain of TCR clone 257630 (TRAV29/DV5, TRAJ48)
CAASSFGNVKLTF

SEQ ID NO: 515260 - protein, 14 aa, Homo sapiens
  CDR3 for beta chain variable domain of TCR clone 257630 (TRBV3-1, TRBJ2-2)
CASSQDWVQGELFF

SEQ ID NO: 515261 - protein, 19 aa, Homo sapiens
  CDR3 for alpha chain variable domain of TCR clone 257631 (TRAV26-1, TRAJ52)
CIVRAHRNAGGTSYGKLTF

SEQ ID NO: 515262 - protein, 13 aa, Homo sapiens
  CDR3 for beta chain variable domain of TCR clone 257631 (TRBV19, TRBJ2-7)
CASRKACGSEQYF

SEQ ID NO: 515263 - protein, 15 aa, Homo sapiens
  CDR3 for alpha chain variable domain of TCR clone 257632 (TRAV27, TRAJ22)
TAPGWKSGSARQLTF

SEQ ID NO: 515264 - protein, 17 aa, Homo sapiens
  CDR3 for beta chain variable domain of TCR clone 257632 (TRBV5-5, TRBJ1-1)
CASSLRFRGLMNTEAFF

SEQ ID NO: 515265 - protein, 22 aa, Homo sapiens
  CDR3 for alpha chain variable domain of TCR clone 257633 (TRAV26-1, TRAJ38)
CIADNAGNNHIQNPDPAVYHLR

SEQ ID NO: 515266 - protein, 13 aa, Homo sapiens
  CDR3 for beta chain variable domain of TCR clone 257633 (TRBV20-1, TRBJ1-1)
CSARGGGNTEAFF

SEQ ID NO: 515267 - protein, 13 aa, Homo sapiens
  CDR3 for alpha chain variable domain of TCR clone 257634 (TRAV26-1, TRAJ54)
CIVRVKGAQKLVF

SEQ ID NO: 515268 - protein, 17 aa, Homo sapiens
  CDR3 for beta chain variable domain of TCR clone 257634 (TRBV2, TRBJ1-6)
CASSLRSGGLMTSPLHF

SEQ ID NO: 515269 - protein, 13 aa, Homo sapiens
  CDR3 for alpha chain variable domain of TCR clone 257635 (TRAV35, TRAJ32)
CAGVGGATNKLIF

SEQ ID NO: 515270 - protein, 14 aa, Homo sapiens
  CDR3 for beta chain variable domain of TCR clone 257635 (TRBV7-3, TRBJ1-1)
CASSLGTGYTEAFF

SEQ ID NO: 515271 - protein, 12 aa, Homo sapiens
  CDR3 for alpha chain variable domain of TCR clone 257636 (TRAV12-3, TRAJ17)
CAMTLTGNKLTV

SEQ ID NO: 515272 - protein, 14 aa, Homo sapiens
  CDR3 for beta chain variable domain of TCR clone 257636 (TRBV12-4, TRBJ2-3)
CASSGQGSTDTQYF

SEQ ID NO: 515273 - protein, 15 aa, Homo sapiens
  CDR3 for alpha chain variable domain of TCR clone 257637 (TRAV21, TRAJ40)
CAVRPQTSGTYTYIF

SEQ ID NO: 515274 - protein, 13 aa, Homo sapiens
  CDR3 for beta chain variable domain of TCR clone 257637 (TRBV7-9, TRBJ1-2)
CASSLEQNYGYTF

SEQ ID NO: 515275 - protein, 11 aa, Homo sapiens
  CDR3 for alpha chain variable domain of TCR clone 257638 (TRAV17, TRAJ9)
CGFTGGFKTVF

SEQ ID NO: 515276 - protein, 13 aa, Homo sapiens
  CDR3 for beta chain variable domain of TCR clone 257638 (TRBV7-9, TRBJ2-2)
CSSLVQDTGELFF

SEQ ID NO: 515277 - protein, 14 aa, Homo sapiens
  CDR3 for alpha chain variable domain of TCR clone 257639 (TRAV25, TRAJ53)
CAWPPGGSNYKLTF

SEQ ID NO: 515278 - protein, 13 aa, Homo sapiens
  CDR3 for beta chain variable domain of TCR clone 257639 (TRBV12-4, TRBJ1-5)
CASSPDRAQPQHF

SEQ ID NO: 515279 - protein, 16 aa, Homo sapiens
  CDR3 for alpha chain variable domain of TCR clone 257640 (TRAV21, TRAJ37)
CAVRTAGSSNTGKLIF

SEQ ID NO: 515280 - protein, 12 aa, Homo sapiens
  CDR3 for beta chain variable domain of TCR clone 257640 (TRBV19, TRBJ2-1)
CASSMQDTEQFF

SEQ ID NO: 515281 - protein, 14 aa, Homo sapiens
  CDR3 for alpha chain variable domain of TCR clone 257641 (TRAV1-2, TRAJ8)
CAVREDTGFQKLVF

SEQ ID NO: 515282 - protein, 15 aa, Homo sapiens
  CDR3 for beta chain variable domain of TCR clone 257641 (TRBV5-5, TRBJ2-2)
CASSRQASGAGELFF

SEQ ID NO: 515283 - protein, 18 aa, Homo sapiens
  CDR3 for alpha chain variable domain of TCR clone 257642 (TRAV13-1, TRAJ52)
CAAKNPHAGGTSYRKLTF

SEQ ID NO: 515284 - protein, 16 aa, Homo sapiens
  CDR3 for beta chain variable domain of TCR clone 257642 (TRBV27, TRBJ2-2)
CASSFRGLVRTGELFF

SEQ ID NO: 515285 - protein, 13 aa, Homo sapiens
  CDR3 for alpha chain variable domain of TCR clone 257643 (TRAV2, TRAJ40)
CAVVTSGTYKYIF

SEQ ID NO: 515286 - protein, 14 aa, Homo sapiens
  CDR3 for beta chain variable domain of TCR clone 257643 (TRBV6-5, TRBJ1-4)
CASSYRAAEEKLFF

SEQ ID NO: 515287 - protein, 16 aa, Homo sapiens
  CDR3 for alpha chain variable domain of TCR clone 257644 (TRAV3, TRAJ21)
CAVRDIERGNFNKFYF

SEQ ID NO: 515288 - protein, 16 aa, Homo sapiens
  CDR3 for beta chain variable domain of TCR clone 257644 (TRBV6-4, TRBJ1-2)
CASSEAVGDPNYGYTF

SEQ ID NO: 515289 - protein, 12 aa, Homo sapiens
  CDR3 for alpha chain variable domain of TCR clone 257645 (TRAV1-1, TRAJ43)
CAPRVSSNDMRC

SEQ ID NO: 515290 - protein, 17 aa, Homo sapiens
  CDR3 for beta chain variable domain of TCR clone 257645 (TRBV5-1, TRBJ2-7)
CASSLGTLQPTSSTSGR

SEQ ID NO: 515291 - protein, 13 aa, Homo sapiens
  CDR3 for alpha chain variable domain of TCR clone 257646 (TRAV3, TRAJ3)
CAVADSSASKIIF

SEQ ID NO: 515292 - protein, 16 aa, Homo sapiens
  CDR3 for beta chain variable domain of TCR clone 257646 (TRBV5-1, TRBJ2-3)
CASSLGLAVYIDTQYF

SEQ ID NO: 515293 - protein, 14 aa, Homo sapiens
  CDR3 for alpha chain variable domain of TCR clone 257647 (TRAV13-1, TRAJ35)
CAASKGGFGNVLHC

SEQ ID NO: 515294 - protein, 15 aa, Homo sapiens
  CDR3 for beta chain variable domain of TCR clone 257647 (TRBV20-1, TRBJ2-7)
CSARDRVSGMDEQYF

SEQ ID NO: 515295 - protein, 12 aa, Homo sapiens
  CDR3 for alpha chain variable domain of TCR clone 257648 (TRAV13-1, TRAJ49)
GAASPMGNKFYF

SEQ ID NO: 515296 - protein, 13 aa, Homo sapiens
  CDR3 for beta chain variable domain of TCR clone 257648 (TRBV20-1, TRBJ2-2)
CSASAAGTGELFF

SEQ ID NO: 515297 - protein, 15 aa, Homo sapiens
  CDR3 for alpha chain variable domain of TCR clone 257649 (TRAV21, TRAJ52)
CAVRGGGTSYGKLTF

SEQ ID NO: 515298 - protein, 15 aa, Homo sapiens
  CDR3 for beta chain variable domain of TCR clone 257649 (TRBV7-2, TRBJ1-2)
CASSLVSGGDYGYTF

SEQ ID NO: 515299 - protein, 13 aa, Homo sapiens
  CDR3 for alpha chain variable domain of TCR clone 257650 (TRAV8-1, TRAJ30)
CAVIMIRDDKIIF

SEQ ID NO: 515300 - protein, 14 aa, Homo sapiens
  CDR3 for beta chain variable domain of TCR clone 257650 (TRBV7-2, TRBJ1-6)
CASSLQGANSPLHF

SEQ ID NO: 515301 - protein, 13 aa, Homo sapiens
  CDR3 for alpha chain variable domain of TCR clone 257651 (TRAV8-3, TRAJ40)
CAVGAQYLRNLQI

SEQ ID NO: 515302 - protein, 12 aa, Homo sapiens
  CDR3 for beta chain variable domain of TCR clone 257651 (TRBV11-2, TRBJ2-2)
CASSLGGGELFF

SEQ ID NO: 515303 - protein, 12 aa, Homo sapiens
  CDR3 for alpha chain variable domain of TCR clone 257652 (TRAV25, TRAJ38)
CAGTGNNRKLIW

SEQ ID NO: 515304 - protein, 15 aa, Homo sapiens
  CDR3 for beta chain variable domain of TCR clone 257652 (TRBV20-1, TRBJ2-7)
CSARDRVSGMDEQYF

SEQ ID NO: 515305 - protein, 14 aa, Homo sapiens
  CDR3 for alpha chain variable domain of TCR clone 257653 (TRAV12-1, TRAJ17)
CVVNPKAAGNKLTF

SEQ ID NO: 515306 - protein, 15 aa, Homo sapiens
  CDR3 for beta chain variable domain of TCR clone 257653 (TRBV7-2, TRBJ2-3)
CASSLAGAFIDTQYC

SEQ ID NO: 515307 - protein, 14 aa, Homo sapiens
  CDR3 for alpha chain variable domain of TCR clone 257654 (TRAV13-1, TRAJ44)
CAAKAAGTASKLTF

SEQ ID NO: 515308 - protein, 17 aa, Homo sapiens
  CDR3 for beta chain variable domain of TCR clone 257654 (TRBV11-2, TRBJ2-1)
CASSLYPPGVEYNEQFF

SEQ ID NO: 515309 - protein, 14 aa, Homo sapiens
  CDR3 for alpha chain variable domain of TCR clone 257655 (TRAV8-3, TRAJ6)
CAVGASGGSDIPTF

SEQ ID NO: 515310 - protein, 17 aa, Homo sapiens
  CDR3 for beta chain variable domain of TCR clone 257655 (TRBV18, TRBJ2-2)
CASSPADPWQNTGELFF

SEQ ID NO: 515311 - protein, 14 aa, Homo sapiens
  CDR3 for alpha chain variable domain of TCR clone 257656 (TRAV13-1, TRAJ35)
CAASKGGVGNVLHC

SEQ ID NO: 515312 - protein, 13 aa, Homo sapiens
  CDR3 for beta chain variable domain of TCR clone 257656 (TRBV7-3, TRBJ1-1)
CASSQDWGAESFF

SEQ ID NO: 515313 - protein, 13 aa, Homo sapiens
  CDR3 for alpha chain variable domain of TCR clone 257657 (TRAV23/DV6, TRAJ22)
CAPYSGAARQLTF

SEQ ID NO: 515314 - protein, 15 aa, Homo sapiens
  CDR3 for beta chain variable domain of TCR clone 257657 (TRBV11-2, TRBJ1-6)
CASSLDPWAVSPLHF

SEQ ID NO: 515315 - protein, 12 aa, Homo sapiens
  CDR3 for alpha chain variable domain of TCR clone 257658 (TRAV29/DV5, TRAJ15)
CASNQAGTALIF

SEQ ID NO: 515316 - protein, 15 aa, Homo sapiens
  CDR3 for beta chain variable domain of TCR clone 257658 (TRBV11-2, TRBJ2-2)
CASSSDSVNAGELFF

SEQ ID NO: 515317 - protein, 12 aa, Homo sapiens
  CDR3 for alpha chain variable domain of TCR clone 257659 (TRAV29/DV5, TRAJ34)
CAASGNTDKLIF

SEQ ID NO: 515318 - protein, 16 aa, Homo sapiens
  CDR3 for beta chain variable domain of TCR clone 257659 (TRBV12-4, TRBJ1-5)
RASRQPVEGSNQPQHF

SEQ ID NO: 515319 - protein, 16 aa, Homo sapiens
  CDR3 for alpha chain variable domain of TCR clone 257660 (TRAV3, TRAJ37)
CAGRVRGSGNTGKLIF

SEQ ID NO: 515320 - protein, 13 aa, Homo sapiens
  CDR3 for beta chain variable domain of TCR clone 257660 (TRBV7-9, TRBJ1-2)
CASSLKQDYGYTF

SEQ ID NO: 515321 - protein, 15 aa, Homo sapiens
  CDR3 for alpha chain variable domain of TCR clone 257661 (TRAV8-2, TRAJ40)
CVVLGTTSGTYKYIF

SEQ ID NO: 515322 - protein, 17 aa, Homo sapiens
  CDR3 for beta chain variable domain of TCR clone 257661 (TRBV11-3, TRBJ2-3)
CASSLGLTGGGTDTQYF

SEQ ID NO: 515323 - protein, 12 aa, Homo sapiens
  CDR3 for alpha chain variable domain of TCR clone 257662 (TRAV13-2, TRAJ16)
CAASPDGQKLLF

SEQ ID NO: 515324 - protein, 13 aa, Homo sapiens
  CDR3 for beta chain variable domain of TCR clone 257662 (TRBV7-9, TRBJ1-2)
CASSLKQNYGYTF

SEQ ID NO: 515325 - protein, 14 aa, Homo sapiens
  CDR3 for alpha chain variable domain of TCR clone 257663 (TRAV1-2, TRAJ10)
CAVRVTGGGNKLTF

SEQ ID NO: 515326 - protein, 12 aa, Homo sapiens
  CDR3 for beta chain variable domain of TCR clone 257663 (TRBV5-4, TRBJ1-1)
CASSFEQTEAFF

SEQ ID NO: 515327 - protein, 13 aa, Homo sapiens
  CDR3 for alpha chain variable domain of TCR clone 257664 (TRAV2, TRAJ36)
CAVDLTGANNLFF

SEQ ID NO: 515328 - protein, 12 aa, Homo sapiens
  CDR3 for beta chain variable domain of TCR clone 257664 (TRBV19, TRBJ1-1)
CASMNRYTEAFF

SEQ ID NO: 515329 - protein, 13 aa, Homo sapiens
  CDR3 for alpha chain variable domain of TCR clone 257665 (TRAV26-1, TRAJ34)
CIVRPWITDKLIF

SEQ ID NO: 515330 - protein, 13 aa, Homo sapiens
  CDR3 for beta chain variable domain of TCR clone 257665 (TRBV5-1, TRBJ2-1)
CASSLGSHNEQFF

SEQ ID NO: 515331 - protein, 12 aa, Homo sapiens
  CDR3 for alpha chain variable domain of TCR clone 257666 (TRAV21, TRAJ31)
CAVSPARGRLMF

SEQ ID NO: 515332 - protein, 16 aa, Homo sapiens
  CDR3 for beta chain variable domain of TCR clone 257666 (TRBV12-5, TRBJ2-5)
CASGPRTSGNQETQYF

SEQ ID NO: 515333 - protein, 14 aa, Homo sapiens
  CDR3 for alpha chain variable domain of TCR clone 257667 (TRAV8-3, TRAJ15)
CAVGLNQAGTALIF

SEQ ID NO: 515334 - protein, 15 aa, Homo sapiens
  CDR3 for beta chain variable domain of TCR clone 257667 (TRBV18, TRBJ2-6)
CASSPSYAGANGLTF

SEQ ID NO: 515335 - protein, 13 aa, Homo sapiens
  CDR3 for alpha chain variable domain of TCR clone 257668 (TRAV2, TRAJ15)
CAVGGQAGTALIF

SEQ ID NO: 515336 - protein, 16 aa, Homo sapiens
  CDR3 for beta chain variable domain of TCR clone 257668 (TRBV6-4, TRBJ2-3)
CASSDRGDSSTDTHYF

SEQ ID NO: 515337 - protein, 11 aa, Homo sapiens
  CDR3 for alpha chain variable domain of TCR clone 257669 (TRAV2, TRAJ23)
CAVETRGKRIF

SEQ ID NO: 515338 - protein, 17 aa, Homo sapiens
  CDR3 for beta chain variable domain of TCR clone 257669 (TRBV20-1, TRBJ2-1)
CSASSSGLAGSYNEQFF

SEQ ID NO: 515339 - protein, 14 aa, Homo sapiens
  CDR3 for alpha chain variable domain of TCR clone 257670 (TRAV26-1, TRAJ16)
CIAVPFSDGQKLLF

SEQ ID NO: 515340 - protein, 15 aa, Homo sapiens
  CDR3 for beta chain variable domain of TCR clone 257670 (TRBV7-3, TRBJ2-2)
CASSETGQGTGELFF

SEQ ID NO: 515341 - protein, 11 aa, Homo sapiens
  CDR3 for alpha chain variable domain of TCR clone 257671 (TRAV2, TRAJ13)
CASGGYQKVTF

SEQ ID NO: 515342 - protein, 13 aa, Homo sapiens
  CDR3 for beta chain variable domain of TCR clone 257671 (TRBV12-4, TRBJ1-2)
CASSLRQGRGYTF

SEQ ID NO: 515343 - protein, 13 aa, Homo sapiens
  CDR3 for alpha chain variable domain of TCR clone 257672 (TRAV12-1, TRAJ20)
CVGQRFNDYKLSF

SEQ ID NO: 515344 - protein, 14 aa, Homo sapiens
  CDR3 for beta chain variable domain of TCR clone 257672 (TRBV6-3, TRBJ1-5)
CASSYSRFAQPQHF

SEQ ID NO: 515345 - protein, 15 aa, Homo sapiens
  CDR3 for alpha chain variable domain of TCR clone 257673 (TRAV17, TRAJ16)
CATALRFSDGQKLLF

SEQ ID NO: 515346 - protein, 15 aa, Homo sapiens
  CDR3 for beta chain variable domain of TCR clone 257673 (TRBV28, TRBJ2-4)
CASRGLAGVKNIQYF

SEQ ID NO: 515347 - protein, 14 aa, Homo sapiens
  CDR3 for alpha chain variable domain of TCR clone 257674 (TRAV12-2, TRAJ13)
CAVKKTGGYQKVTF

SEQ ID NO: 515348 - protein, 14 aa, Homo sapiens
  CDR3 for beta chain variable domain of TCR clone 257674 (TRBV5-1, TRBJ2-7)
CASSRGESLYEQSF

SEQ ID NO: 515349 - protein, 11 aa, Homo sapiens
  CDR3 for alpha chain variable domain of TCR clone 257675 (TRAV17, TRAJ36)
CAPTGANNLFF

SEQ ID NO: 515350 - protein, 12 aa, Homo sapiens
  CDR3 for beta chain variable domain of TCR clone 257675 (TRBV12-4, TRBJ2-7)
CASSLGGYEQYF

SEQ ID NO: 515351 - protein, 12 aa, Homo sapiens
  CDR3 for alpha chain variable domain of TCR clone 257676 (TRAV21, TRAJ29)
CAVTSGNTPLVF

SEQ ID NO: 515352 - protein, 12 aa, Homo sapiens
  CDR3 for beta chain variable domain of TCR clone 257676 (TRBV12-4, TRBJ2-7)
CASSLGGYEQYF

SEQ ID NO: 515353 - protein, 13 aa, Homo sapiens
  CDR3 for alpha chain variable domain of TCR clone 257677 (TRAV3, TRAJ21)
CAVREPDFNKFYF

SEQ ID NO: 515354 - protein, 13 aa, Homo sapiens
  CDR3 for beta chain variable domain of TCR clone 257677 (TRBV9, TRBJ2-1)
YASSPSGGNEQFF

SEQ ID NO: 515355 - protein, 15 aa, Homo sapiens
  CDR3 for alpha chain variable domain of TCR clone 257678 (TRAV17, TRAJ57)
CATGPSQDGSEKLVF

SEQ ID NO: 515356 - protein, 12 aa, Homo sapiens
  CDR3 for beta chain variable domain of TCR clone 257678 (TRBV12-4, TRBJ2-7)
CASSLGGYEQYF

SEQ ID NO: 515357 - protein, 15 aa, Homo sapiens
  CDR3 for alpha chain variable domain of TCR clone 257679 (TRAV27, TRAJ24)
CAGGTSADSWGKLQF

SEQ ID NO: 515358 - protein, 16 aa, Homo sapiens
  CDR3 for beta chain variable domain of TCR clone 257679 (TRBV12-4, TRBJ2-5)
CASSWRPSGDLETQYF

SEQ ID NO: 515359 - protein, 14 aa, Homo sapiens
  CDR3 for alpha chain variable domain of TCR clone 257680 (TRAV1-2, TRAJ16)
CAVNRFSDGQKLLF

SEQ ID NO: 515360 - protein, 12 aa, Homo sapiens
  CDR3 for beta chain variable domain of TCR clone 257680 (TRBV24-1, TRBJ1-1)
CATLYPDTEAFV

SEQ ID NO: 515361 - protein, 16 aa, Homo sapiens
  CDR3 for alpha chain variable domain of TCR clone 257681 (TRAV39, TRAJ53)
CAVDAGSGGSNYKLTF

SEQ ID NO: 515362 - protein, 16 aa, Homo sapiens
  CDR3 for beta chain variable domain of TCR clone 257681 (TRBV12-4, TRBJ2-2)
CASSVWIVGNTGELFF

SEQ ID NO: 515363 - protein, 12 aa, Homo sapiens
  CDR3 for alpha chain variable domain of TCR clone 257682 (TRAV12-2, TRAJ47)
CAVVEYGNKLVF

SEQ ID NO: 515364 - protein, 15 aa, Homo sapiens
  CDR3 for beta chain variable domain of TCR clone 257682 (TRBV28, TRBJ2-1)
CASSIIAGGRSEQFF

SEQ ID NO: 515365 - protein, 14 aa, Homo sapiens
  CDR3 for alpha chain variable domain of TCR clone 257683 (TRAV1-2, TRAJ16)
CAGNRFSDGQKMPF

SEQ ID NO: 515366 - protein, 15 aa, Homo sapiens
  CDR3 for beta chain variable domain of TCR clone 257683 (TRBV7-2, TRBJ2-1)
CASSSGLAGGNEQFF

SEQ ID NO: 515367 - protein, 15 aa, Homo sapiens
  CDR3 for alpha chain variable domain of TCR clone 257684 (TRAV12-3, TRAJ6)
CAMSATTGGSYIPTF

SEQ ID NO: 515368 - protein, 13 aa, Homo sapiens
  CDR3 for beta chain variable domain of TCR clone 257684 (TRBV5-1, TRBJ2-4)
CASSLEGGMNQYF

SEQ ID NO: 515369 - protein, 14 aa, Homo sapiens
  CDR3 for alpha chain variable domain of TCR clone 257685 (TRAV26-1, TRAJ30)
CIVRPRNRDDKIIV

SEQ ID NO: 515370 - protein, 15 aa, Homo sapiens
  CDR3 for beta chain variable domain of TCR clone 257685 (TRBV19, TRBJ2-1)
CASSSPGVPLDEQFF

SEQ ID NO: 515371 - protein, 13 aa, Homo sapiens
  CDR3 for alpha chain variable domain of TCR clone 257686 (TRAV2, TRAJ40)
CAVVTSGTYKYIF

SEQ ID NO: 515372 - protein, 15 aa, Homo sapiens
  CDR3 for beta chain variable domain of TCR clone 257686 (TRBV20-1, TRBJ2-7)
CSARDPTEVGHEQYF

SEQ ID NO: 515373 - protein, 14 aa, Homo sapiens
  CDR3 for alpha chain variable domain of TCR clone 257687 (TRAV3, TRAJ9)
GAVRGNTGGFKTIF

SEQ ID NO: 515374 - protein, 14 aa, Homo sapiens
  CDR3 for beta chain variable domain of TCR clone 257687 (TRBV15, TRBJ2-1)
CATSGVEDYNEQFF

SEQ ID NO: 515375 - protein, 14 aa, Homo sapiens
  CDR3 for alpha chain variable domain of TCR clone 257688 (TRAV21, TRAJ45)
CAVSSGGGADGLTF

SEQ ID NO: 515376 - protein, 15 aa, Homo sapiens
  CDR3 for beta chain variable domain of TCR clone 257688 (TRBV10-2, TRBJ2-6)
CASSEQGTGANDLTF

SEQ ID NO: 515377 - protein, 15 aa, Homo sapiens
  CDR3 for alpha chain variable domain of TCR clone 257689 (TRAV25, TRAJ41)
CAGPWNSNTGYALNF

SEQ ID NO: 515378 - protein, 13 aa, Homo sapiens
  CDR3 for beta chain variable domain of TCR clone 257689 (TRBV15, TRBJ1-1)
CATSRGIQARAFF

SEQ ID NO: 515379 - protein, 12 aa, Homo sapiens
  CDR3 for alpha chain variable domain of TCR clone 257690 (TRAV12-3, TRAJ17)
CAMTLTGNKLTF

SEQ ID NO: 515380 - protein, 19 aa, Homo sapiens
  CDR3 for beta chain variable domain of TCR clone 257690 (TRBV6-3, TRBJ1-2)
CASSYSKGRTGPPNYGYTF

SEQ ID NO: 515381 - protein, 13 aa, Homo sapiens
  CDR3 for alpha chain variable domain of TCR clone 257691 (TRAV23/DV6, TRAJ47)
CAASMTRGNKLVF

SEQ ID NO: 515382 - protein, 13 aa, Homo sapiens
  CDR3 for beta chain variable domain of TCR clone 257691 (TRBV9, TRBJ2-2)
CASSTISSGELFF

SEQ ID NO: 515383 - protein, 19 aa, Homo sapiens
  CDR3 for alpha chain variable domain of TCR clone 257692 (TRAV26-1, TRAJ52)
CIVRAHRNSVGTSYGKLTF

SEQ ID NO: 515384 - protein, 15 aa, Homo sapiens
  CDR3 for beta chain variable domain of TCR clone 257692 (TRBV29-1, TRBJ2-1)
CSGRDRKSSYNEQFC

SEQ ID NO: 515385 - protein, 18 aa, Homo sapiens
  CDR3 for alpha chain variable domain of TCR clone 257693 (TRAV26-2, TRAJ18)
CILRDVNHRGSTLGRLYF

SEQ ID NO: 515386 - protein, 14 aa, Homo sapiens
  CDR3 for beta chain variable domain of TCR clone 257693 (TRBV4-1, TRBJ2-1)
YASRTSGVFHEQFV

SEQ ID NO: 515387 - protein, 14 aa, Homo sapiens
  CDR3 for alpha chain variable domain of TCR clone 257694 (TRAV2, TRAJ41)
CAVGTSNSGYALNF

SEQ ID NO: 515388 - protein, 20 aa, Homo sapiens
  CDR3 for beta chain variable domain of TCR clone 257694 (TRBV7-8, TRBJ2-2)
WASSHLVPGPTIHITGELFF

SEQ ID NO: 515389 - protein, 12 aa, Homo sapiens
  CDR3 for alpha chain variable domain of TCR clone 257695 (TRAV9-2, TRAJ36)
CALKKGANNLFF

SEQ ID NO: 515390 - protein, 13 aa, Homo sapiens
  CDR3 for beta chain variable domain of TCR clone 257695 (TRBV27, TRBJ1-1)
CASSLSIVAEAFF

SEQ ID NO: 515391 - protein, 17 aa, Homo sapiens
  CDR3 for alpha chain variable domain of TCR clone 257696 (TRAV3, TRAJ6)
CAVRDGPRAGGSYIPTF

SEQ ID NO: 515392 - protein, 14 aa, Homo sapiens
  CDR3 for beta chain variable domain of TCR clone 257696 (TRBV6-1, TRBJ1-3)
CASVQGGGGNTLYF

SEQ ID NO: 515393 - protein, 14 aa, Homo sapiens
  CDR3 for alpha chain variable domain of TCR clone 257697 (TRAV14/DV4, TRAJ58)
CAMMKETSGSRLTF

SEQ ID NO: 515394 - protein, 14 aa, Homo sapiens
  CDR3 for beta chain variable domain of TCR clone 257697 (TRBV10-3, TRBJ1-1)
CAISDTDRGVEAFF

SEQ ID NO: 515395 - protein, 14 aa, Homo sapiens
  CDR3 for alpha chain variable domain of TCR clone 257698 (TRAV1-2, TRAJ8)
CAVREDTGFQKLVF

SEQ ID NO: 515396 - protein, 14 aa, Homo sapiens
  CDR3 for beta chain variable domain of TCR clone 257698 (TRBV6-1, TRBJ1-3)
CASVQGGGWKHHIF

SEQ ID NO: 515397 - protein, 13 aa, Homo sapiens
  CDR3 for alpha chain variable domain of TCR clone 257699 (TRAV12-2, TRAJ18)
CAVRGSTLERLYF

SEQ ID NO: 515398 - protein, 20 aa, Homo sapiens
  CDR3 for beta chain variable domain of TCR clone 257699 (TRBV7-8, TRBJ2-2)
CASSHLFPGPTIHVTGELFF

SEQ ID NO: 515399 - protein, 16 aa, Homo sapiens
  CDR3 for alpha chain variable domain of TCR clone 257700 (TRAV30, TRAJ24)
CGTEIVDADSWGKFQF

SEQ ID NO: 515400 - protein, 15 aa, Homo sapiens
  CDR3 for beta chain variable domain of TCR clone 257700 (TRBV7-2, TRBJ2-7)
CASSLGIGNDYEQYF

SEQ ID NO: 515401 - protein, 14 aa, Homo sapiens
  CDR3 for alpha chain variable domain of TCR clone 257701 (TRAV1-2, TRAJ16)
CAVNRFSDGPNLLF

SEQ ID NO: 515402 - protein, 16 aa, Homo sapiens
  CDR3 for beta chain variable domain of TCR clone 257701 (TRBV7-2, TRBJ2-7)
CASSLDLSGGAYEQYF

SEQ ID NO: 515403 - protein, 14 aa, Homo sapiens
  CDR3 for alpha chain variable domain of TCR clone 257702 (TRAV12-1, TRAJ30)
CVVNIGGRDGKIIF

SEQ ID NO: 515404 - protein, 14 aa, Homo sapiens
  CDR3 for beta chain variable domain of TCR clone 257702 (TRBV7-6, TRBJ2-3)
CASSLWTVTDTQYF

SEQ ID NO: 515405 - protein, 13 aa, Homo sapiens
  CDR3 for alpha chain variable domain of TCR clone 257703 (TRAV16, TRAJ34)
CALISYNTDKLIF

SEQ ID NO: 515406 - protein, 16 aa, Homo sapiens
  CDR3 for beta chain variable domain of TCR clone 257703 (TRBV19, TRBJ1-1)
CASRFGGPVTGTEAFF

SEQ ID NO: 515407 - protein, 11 aa, Homo sapiens
  CDR3 for alpha chain variable domain of TCR clone 257704 (TRAV2, TRAJ33)
CAVESNYQLIW

SEQ ID NO: 515408 - protein, 15 aa, Homo sapiens
  CDR3 for beta chain variable domain of TCR clone 257704 (TRBV19, TRBJ1-1)
RASTSGQIQDTEAFF

SEQ ID NO: 515409 - protein, 18 aa, Homo sapiens
  CDR3 for alpha chain variable domain of TCR clone 257705 (TRAV29/DV5, TRAJ52)
CAAGFRGAGGTSYGTLQF

SEQ ID NO: 515410 - protein, 16 aa, Homo sapiens
  CDR3 for beta chain variable domain of TCR clone 257705 (TRBV7-3, TRBJ2-2)
CASSLKRGTLSGELFF

SEQ ID NO: 515411 - protein, 15 aa, Homo sapiens
  CDR3 for alpha chain variable domain of TCR clone 257706 (TRAV3, TRAJ32)
CAFSSYGGATNKLIF

SEQ ID NO: 515412 - protein, 13 aa, Homo sapiens
  CDR3 for beta chain variable domain of TCR clone 257706 (TRBV20-1, TRBJ2-7)
CSARPSTNYEQYF

SEQ ID NO: 515413 - protein, 14 aa, Homo sapiens
  CDR3 for alpha chain variable domain of TCR clone 257707 (TRAV1-2, TRAJ8)
CAVREDTGFQRLVF

SEQ ID NO: 515414 - protein, 13 aa, Homo sapiens
  CDR3 for beta chain variable domain of TCR clone 257707 (TRBV7-2, TRBJ2-2)
CASSLAVTGELFF

SEQ ID NO: 515415 - protein, 14 aa, Homo sapiens
  CDR3 for alpha chain variable domain of TCR clone 257708 (TRAV1-2, TRAJ16)
CAVNRFSDCQKLLF

SEQ ID NO: 515416 - protein, 14 aa, Homo sapiens
  CDR3 for beta chain variable domain of TCR clone 257708 (TRBV2, TRBJ2-1)
CASSDRAYYNEQFF

SEQ ID NO: 515417 - protein, 17 aa, Homo sapiens
  CDR3 for alpha chain variable domain of TCR clone 257709 (TRAV4, TRAJ18)
CLVGERSVGSTLGRLYF

SEQ ID NO: 515418 - protein, 15 aa, Homo sapiens
  CDR3 for beta chain variable domain of TCR clone 257709 (TRBV4-1, TRBJ1-2)
CASSQGQGAAYGYTF

SEQ ID NO: 515419 - protein, 17 aa, Homo sapiens
  CDR3 for alpha chain variable domain of TCR clone 257710 (TRAV4, TRAJ42)
CLVGVLNYGGSQGNLIF

SEQ ID NO: 515420 - protein, 12 aa, Homo sapiens
  CDR3 for beta chain variable domain of TCR clone 257710 (TRBV20-1, TRBJ2-1)
CSAQYTYTEQFF

SEQ ID NO: 515421 - protein, 16 aa, Homo sapiens
  CDR3 for alpha chain variable domain of TCR clone 257711 (TRAV26-1, TRAJ28)
CIVRVGLWGWELPTHF

SEQ ID NO: 515422 - protein, 16 aa, Homo sapiens
  CDR3 for beta chain variable domain of TCR clone 257711 (TRBV20-1, TRBJ1-2)
CSASMGQGVANYGYTV

SEQ ID NO: 515423 - protein, 16 aa, Homo sapiens
  CDR3 for alpha chain variable domain of TCR clone 257712 (TRAV14/DV4, TRAJ37)
CAMREYGSGNTGKLIF

SEQ ID NO: 515424 - protein, 13 aa, Homo sapiens
  CDR3 for beta chain variable domain of TCR clone 257712 (TRBV12-4, TRBJ1-5)
CASSPDRAQPQHF

SEQ ID NO: 515425 - protein, 14 aa, Homo sapiens
  CDR3 for alpha chain variable domain of TCR clone 257713 (TRAV12-2, TRAJ17)
CAVNIKAAGNKLTF

SEQ ID NO: 515426 - protein, 16 aa, Homo sapiens
  CDR3 for beta chain variable domain of TCR clone 257713 (TRBV27, TRBJ2-2)
CASSFRGLVRTGELFF

SEQ ID NO: 515427 - protein, 15 aa, Homo sapiens
  CDR3 for alpha chain variable domain of TCR clone 257714 (TRAV8-3, TRAJ27)
CAVGPSRTNADKSTF

SEQ ID NO: 515428 - protein, 15 aa, Homo sapiens
  CDR3 for beta chain variable domain of TCR clone 257714 (TRBV7-2, TRBJ2-1)
CASSSGLAGGNEQFF

SEQ ID NO: 515429 - protein, 14 aa, Homo sapiens
  CDR3 for alpha chain variable domain of TCR clone 257715 (TRAV1-2, TRAJ16)
CAVNRFSDGQKLLF

SEQ ID NO: 515430 - protein, 16 aa, Homo sapiens
  CDR3 for beta chain variable domain of TCR clone 257715 (TRBV12-5, TRBJ2-5)
CASGPRTSGNQETQYC

SEQ ID NO: 515431 - protein, 15 aa, Homo sapiens
  CDR3 for alpha chain variable domain of TCR clone 257716 (TRAV3, TRAJ40)
CAVRDGHGGTYKYIF

SEQ ID NO: 515432 - protein, 16 aa, Homo sapiens
  CDR3 for beta chain variable domain of TCR clone 257716 (TRBV5-1, TRBJ1-1)
CASSSGGNSLNTEAFF

SEQ ID NO: 515433 - protein, 12 aa, Homo sapiens
  CDR3 for alpha chain variable domain of TCR clone 257717 (TRAV12-3, TRAJ17)
CAMTLTSNKLTF

SEQ ID NO: 515434 - protein, 15 aa, Homo sapiens
  CDR3 for beta chain variable domain of TCR clone 257717 (TRBV20-1, TRBJ2-7)
CSARDRVSGMDEQCF

SEQ ID NO: 515435 - protein, 15 aa, Homo sapiens
  CDR3 for alpha chain variable domain of TCR clone 257718 (TRAV2, TRAJ11)
CAVGGRNSGYSTLTF

SEQ ID NO: 515436 - protein, 14 aa, Homo sapiens
  CDR3 for beta chain variable domain of TCR clone 257718 (TRBV7-2, TRBJ2-7)
CASSLYPGRYEQYF

SEQ ID NO: 515437 - protein, 16 aa, Homo sapiens
  CDR3 for alpha chain variable domain of TCR clone 257719 (TRAV8-3, TRAJ22)
CAVDLLGPGSARQLTF

SEQ ID NO: 515438 - protein, 14 aa, Homo sapiens
  CDR3 for beta chain variable domain of TCR clone 257719 (TRBV11-2, TRBJ2-7)
CASSLELEGDEQYF

SEQ ID NO: 515439 - protein, 15 aa, Homo sapiens
  CDR3 for alpha chain variable domain of TCR clone 257720 (TRAV12-1, TRAJ44)
CVVFVNTGTASKLIF

SEQ ID NO: 515440 - protein, 17 aa, Homo sapiens
  CDR3 for beta chain variable domain of TCR clone 257720 (TRBV7-8, TRBJ2-6)
CASSAGTGGAGANVLTF

SEQ ID NO: 515441 - protein, 12 aa, Homo sapiens
  CDR3 for alpha chain variable domain of TCR clone 257721 (TRAV21, TRAJ20)
CAVRGNDYTLSF

SEQ ID NO: 515442 - protein, 14 aa, Homo sapiens
  CDR3 for beta chain variable domain of TCR clone 257721 (TRBV7-8, TRBJ2-7)
CASSQTQGADEQYF

SEQ ID NO: 515443 - protein, 12 aa, Homo sapiens
  CDR3 for alpha chain variable domain of TCR clone 257722 (TRAV8-6, TRAJ7)
CAVFYGNNRLAF

SEQ ID NO: 515444 - protein, 13 aa, Homo sapiens
  CDR3 for beta chain variable domain of TCR clone 257722 (TRBV7-9, TRBJ1-2)
CASSLKQNYGYTF

SEQ ID NO: 515445 - protein, 17 aa, Homo sapiens
  CDR3 for alpha chain variable domain of TCR clone 257723 (TRAV17, TRAJ28)
CATDPRRGGAGSYQLTF

SEQ ID NO: 515446 - protein, 13 aa, Homo sapiens
  CDR3 for beta chain variable domain of TCR clone 257723 (TRBV19, TRBJ1-3)
CASRLSLGNTIYF

SEQ ID NO: 515447 - protein, 17 aa, Homo sapiens
  CDR3 for alpha chain variable domain of TCR clone 257724 (TRAV8-6, TRAJ58)
CAESSWVGETSGSRLTF

SEQ ID NO: 515448 - protein, 14 aa, Homo sapiens
  CDR3 for beta chain variable domain of TCR clone 257724 (TRBV4-2, TRBJ2-1)
CASGLDRAYNEQFF

SEQ ID NO: 515449 - protein, 12 aa, Homo sapiens
  CDR3 for alpha chain variable domain of TCR clone 257725 (TRAV41, TRAJ45)
CAVGRGADGLTF

SEQ ID NO: 515450 - protein, 16 aa, Homo sapiens
  CDR3 for beta chain variable domain of TCR clone 257725 (TRBV9, TRBJ2-2)
CASSAMGKGNTGELFF

SEQ ID NO: 515451 - protein, 15 aa, Homo sapiens
  CDR3 for alpha chain variable domain of TCR clone 257726 (TRAV12-3, TRAJ17)
CAMSPSLAAGNKLTF

SEQ ID NO: 515452 - protein, 14 aa, Homo sapiens
  CDR3 for beta chain variable domain of TCR clone 257726 (TRBV7-2, TRBJ2-2)
CASRGQGAAGELFF

SEQ ID NO: 515453 - protein, 16 aa, Homo sapiens
  CDR3 for alpha chain variable domain of TCR clone 257727 (TRAV12-3, TRAJ53)
CAMSPGSGGSNYKLPF

SEQ ID NO: 515454 - protein, 11 aa, Homo sapiens
  CDR3 for beta chain variable domain of TCR clone 257727 (TRBV29-1, TRBJ2-5)
CSEDRAGTQYF

SEQ ID NO: 515455 - protein, 13 aa, Homo sapiens
  CDR3 for alpha chain variable domain of TCR clone 257728 (TRAV39, TRAJ40)
CAVYTSGTYKYIF

SEQ ID NO: 515456 - protein, 16 aa, Homo sapiens
  CDR3 for beta chain variable domain of TCR clone 257728 (TRBV19, TRBJ2-2)
CASSPSGGLNTGELFF

SEQ ID NO: 515457 - protein, 14 aa, Homo sapiens
  CDR3 for alpha chain variable domain of TCR clone 257729 (TRAV1-2, TRAJ8)
CAVREDTGFQKLVF

SEQ ID NO: 515458 - protein, 16 aa, Homo sapiens
  CDR3 for beta chain variable domain of TCR clone 257729 (TRBV6-1, TRBJ2-5)
CASSETLDRGAETQYV

SEQ ID NO: 515459 - protein, 12 aa, Homo sapiens
  CDR3 for alpha chain variable domain of TCR clone 257730 (TRAV10, TRAJ6)
CVVSEGSYIPTF

SEQ ID NO: 515460 - protein, 15 aa, Homo sapiens
  CDR3 for beta chain variable domain of TCR clone 257730 (TRBV7-9, TRBJ1-5)
CASSQGHQPNQPQHF

SEQ ID NO: 515461 - protein, 15 aa, Homo sapiens
  CDR3 for alpha chain variable domain of TCR clone 257731 (TRAV12-2, TRAJ23)
CAVKPIYNQGGKLIF

SEQ ID NO: 515462 - protein, 14 aa, Homo sapiens
  CDR3 for beta chain variable domain of TCR clone 257731 (TRBV15, TRBJ2-3)
CATRSGTSTDTQYF

SEQ ID NO: 515463 - protein, 15 aa, Homo sapiens
  CDR3 for alpha chain variable domain of TCR clone 257732 (TRAV3, TRAJ22)
CAVRDRGGSARQLTF

SEQ ID NO: 515464 - protein, 13 aa, Homo sapiens
  CDR3 for beta chain variable domain of TCR clone 257732 (TRBV20-1, TRBJ1-1)
CSARVRGNTEAFF

SEQ ID NO: 515465 - protein, 12 aa, Homo sapiens
  CDR3 for alpha chain variable domain of TCR clone 257733 (TRAV30, TRAJ43)
CGTEERGNDMRF

SEQ ID NO: 515466 - protein, 17 aa, Homo sapiens
  CDR3 for beta chain variable domain of TCR clone 257733 (TRBV11-2, TRBJ2-1)
CASSLYPPGVEYNQQFF

SEQ ID NO: 515467 - protein, 14 aa, Homo sapiens
  CDR3 for alpha chain variable domain of TCR clone 257734 (TRAV16, TRAJ48)
CALTPGFGNEKLTF

SEQ ID NO: 515468 - protein, 14 aa, Homo sapiens
  CDR3 for beta chain variable domain of TCR clone 257734 (TRBV13, TRBJ2-5)
CASSLGRGQETQYF

SEQ ID NO: 515469 - protein, 23 aa, Homo sapiens
  CDR3 for alpha chain variable domain of TCR clone 257735 (TRAV8-3, TRAJ38)
CAVGGSNAGNNHIQNPDPAVYQL

SEQ ID NO: 515470 - protein, 15 aa, Homo sapiens
  CDR3 for beta chain variable domain of TCR clone 257735 (TRBV11-3, TRBJ1-3)
CASSLFGPSGNTIYF

SEQ ID NO: 515471 - protein, 14 aa, Homo sapiens
  CDR3 for alpha chain variable domain of TCR clone 257736 (TRAV1-1, TRAJ27)
CAVIYNTNAGKSTF

SEQ ID NO: 515472 - protein, 15 aa, Homo sapiens
  CDR3 for beta chain variable domain of TCR clone 257736 (TRBV7-2, TRBJ2-1)
CASSSGLAGGNERFF

SEQ ID NO: 515473 - protein, 17 aa, Homo sapiens
  CDR3 for alpha chain variable domain of TCR clone 257737 (TRAV3, TRAJ6)
CAARDGPRAGGSYISTF

SEQ ID NO: 515474 - protein, 14 aa, Homo sapiens
  CDR3 for beta chain variable domain of TCR clone 257737 (TRBV7-2, TRBJ2-7)
CASSPKTSFYEQYF

SEQ ID NO: 515475 - protein, 22 aa, Homo sapiens
  CDR3 for alpha chain variable domain of TCR clone 257738 (TRAV12-1, TRAJ30)
CVVNIGGEMKRPSLEKGHDFIF

SEQ ID NO: 515476 - protein, 14 aa, Homo sapiens
  CDR3 for beta chain variable domain of TCR clone 257738 (TRBV20-1, TRBJ2-1)
CSAQIGGSANEQFF

SEQ ID NO: 515477 - protein, 14 aa, Homo sapiens
  CDR3 for alpha chain variable domain of TCR clone 257739 (TRAV3, TRAJ9)
CAVRLNTGGFKTIF

SEQ ID NO: 515478 - protein, 16 aa, Homo sapiens
  CDR3 for beta chain variable domain of TCR clone 257739 (TRBV12-5, TRBJ2-5)
FASGPRTSGNQETQYF

SEQ ID NO: 515479 - protein, 11 aa, Homo sapiens
  CDR3 for alpha chain variable domain of TCR clone 257740 (TRAV1-1, TRAJ20)
CAVFNDYKLSL

SEQ ID NO: 515480 - protein, 14 aa, Homo sapiens
  CDR3 for beta chain variable domain of TCR clone 257740 (TRBV19, TRBJ2-1)
CASSKDRGQDEQFF

SEQ ID NO: 515481 - protein, 14 aa, Homo sapiens
  CDR3 for alpha chain variable domain of TCR clone 257741 (TRAV1-2, TRAJ16)
CAVNRFSDGQKLLF

SEQ ID NO: 515482 - protein, 12 aa, Homo sapiens
  CDR3 for beta chain variable domain of TCR clone 257741 (TRBV12-4, TRBJ2-1)
CASSLQGSEQFF

SEQ ID NO: 515483 - protein, 15 aa, Homo sapiens
  CDR3 for alpha chain variable domain of TCR clone 257742 (TRAV26-1, TRAJ22)
CIVRVSFWFCKATDL

SEQ ID NO: 515484 - protein, 12 aa, Homo sapiens
  CDR3 for beta chain variable domain of TCR clone 257742 (TRBV28, TRBJ1-6)
CASTHSNSPLHF

SEQ ID NO: 515485 - protein, 16 aa, Homo sapiens
  CDR3 for alpha chain variable domain of TCR clone 257743 (TRAV3, TRAJ37)
CAVRPHCSGNTGKLIS

SEQ ID NO: 515486 - protein, 16 aa, Homo sapiens
  CDR3 for beta chain variable domain of TCR clone 257743 (TRBV9, TRBJ1-2)
CASSVEEKVSPYGYTF

SEQ ID NO: 515487 - protein, 14 aa, Homo sapiens
  CDR3 for alpha chain variable domain of TCR clone 257744 (TRAV8-3, TRAJ17)
CAVGAQAAGNKLTF

SEQ ID NO: 515488 - protein, 11 aa, Homo sapiens
  CDR3 for beta chain variable domain of TCR clone 257744 (TRBV29-1, TRBJ1-4)
CSVSSGEKLCF

SEQ ID NO: 515489 - protein, 14 aa, Homo sapiens
  CDR3 for alpha chain variable domain of TCR clone 257745 (TRAV1-2, TRAJ16)
CAVNRFSDGQKLLF

SEQ ID NO: 515490 - protein, 15 aa, Homo sapiens
  CDR3 for beta chain variable domain of TCR clone 257745 (TRBV7-2, TRBJ2-5)
CASSLGLGGLETQYF

SEQ ID NO: 515491 - protein, 17 aa, Homo sapiens
  CDR3 for alpha chain variable domain of TCR clone 257746 (TRAV3, TRAJ6)
CAVRDGARAGGSYVPTF

SEQ ID NO: 515492 - protein, 15 aa, Homo sapiens
  CDR3 for beta chain variable domain of TCR clone 257746 (TRBV11-3, TRBJ2-7)
CASSPGPASSYEQYF

SEQ ID NO: 515493 - protein, 11 aa, Homo sapiens
  CDR3 for alpha chain variable domain of TCR clone 257747 (TRAV13-1, TRAJ39)
CASHAGNMLTF

SEQ ID NO: 515494 - protein, 19 aa, Homo sapiens
  CDR3 for beta chain variable domain of TCR clone 257747 (TRBV4-1, TRBJ2-7)
CASSRDPLGVRGGSSTSGR

SEQ ID NO: 515495 - protein, 15 aa, Homo sapiens
  CDR3 for alpha chain variable domain of TCR clone 257748 (TRAV8-3, TRAJ45)
CASSYSGGGADGLTF

SEQ ID NO: 515496 - protein, 16 aa, Homo sapiens
  CDR3 for beta chain variable domain of TCR clone 257748 (TRBV4-1, TRBJ1-4)
CASSQDLRRGGEKLFF

SEQ ID NO: 515497 - protein, 14 aa, Homo sapiens
  CDR3 for alpha chain variable domain of TCR clone 257749 (TRAV9-2, TRAJ9)
CALSLIGGGFKTIF

SEQ ID NO: 515498 - protein, 18 aa, Homo sapiens
  CDR3 for beta chain variable domain of TCR clone 257749 (TRBV28, TRBJ2-6)
CASSLAGRAVYGANVLTF

SEQ ID NO: 515499 - protein, 16 aa, Homo sapiens
  CDR3 for alpha chain variable domain of TCR clone 257750 (TRAV17, TRAJ52)
CSTGIIGGTSYGKLTF

SEQ ID NO: 515500 - protein, 14 aa, Homo sapiens
  CDR3 for beta chain variable domain of TCR clone 257750 (TRBV7-3, TRBJ2-2)
CASSSGGYTGELFF

SEQ ID NO: 515501 - protein, 13 aa, Homo sapiens
  CDR3 for alpha chain variable domain of TCR clone 257751 (TRAV27, TRAJ41)
CAGEGNSGDALNF

SEQ ID NO: 515502 - protein, 14 aa, Homo sapiens
  CDR3 for beta chain variable domain of TCR clone 257751 (TRBV7-2, TRBJ1-1)
CASSFLTGTTEAVF

SEQ ID NO: 515503 - protein, 18 aa, Homo sapiens
  CDR3 for alpha chain variable domain of TCR clone 257752 (TRAV12-3, TRAJ52)
CAMSRTNAGGTSYGKLTF

SEQ ID NO: 515504 - protein, 12 aa, Homo sapiens
  CDR3 for beta chain variable domain of TCR clone 257752 (TRBV11-2, TRBJ2-2)
CAISLGGGELFF

SEQ ID NO: 515505 - protein, 13 aa, Homo sapiens
  CDR3 for alpha chain variable domain of TCR clone 257753 (TRAV27, TRAJ6)
FAGGTRGSYIPTF

SEQ ID NO: 515506 - protein, 14 aa, Homo sapiens
  CDR3 for beta chain variable domain of TCR clone 257753 (TRBV4-3, TRBJ1-5)
CASSQGGQGWPQHF

SEQ ID NO: 515507 - protein, 13 aa, Homo sapiens
  CDR3 for alpha chain variable domain of TCR clone 257754 (TRAV13-1, TRAJ5)
CAASDTGRRALTF

SEQ ID NO: 515508 - protein, 14 aa, Homo sapiens
  CDR3 for beta chain variable domain of TCR clone 257754 (TRBV4-2, TRBJ2-1)
CASGLGRAYNEQFF

SEQ ID NO: 515509 - protein, 14 aa, Homo sapiens
  CDR3 for alpha chain variable domain of TCR clone 257755 (TRAV1-2, TRAJ16)
CAVNRFSDGQKLLF

SEQ ID NO: 515510 - protein, 12 aa, Homo sapiens
  CDR3 for beta chain variable domain of TCR clone 257755 (TRBV6-1, TRBJ1-1)
CASSDSNTEAFF

SEQ ID NO: 515511 - protein, 11 aa, Homo sapiens
  CDR3 for alpha chain variable domain of TCR clone 257756 (TRAV2, TRAJ13)
CASGGYQKVTF

SEQ ID NO: 515512 - protein, 13 aa, Homo sapiens
  CDR3 for beta chain variable domain of TCR clone 257756 (TRBV28, TRBJ2-3)
CASSLPQVDTQYF

SEQ ID NO: 515513 - protein, 11 aa, Homo sapiens
  CDR3 for alpha chain variable domain of TCR clone 257757 (TRAV21, TRAJ48)
CAVDGKEKLTF

SEQ ID NO: 515514 - protein, 16 aa, Homo sapiens
  CDR3 for beta chain variable domain of TCR clone 257757 (TRBV12-4, TRBJ1-5)
CASSSGPRGSNQPQHF

SEQ ID NO: 515515 - protein, 11 aa, Homo sapiens
  CDR3 for alpha chain variable domain of TCR clone 257758 (TRAV35, TRAJ34)
CWARNTDKLIF

SEQ ID NO: 515516 - protein, 15 aa, Homo sapiens
  CDR3 for beta chain variable domain of TCR clone 257758 (TRBV2, TRBJ2-7)
CASSEGLARSYEQYF

SEQ ID NO: 515517 - protein, 13 aa, Homo sapiens
  CDR3 for alpha chain variable domain of TCR clone 257759 (TRAV22, TRAJ26)
SAVEHNYGQNFVF

SEQ ID NO: 515518 - protein, 16 aa, Homo sapiens
  CDR3 for beta chain variable domain of TCR clone 257759 (TRBV7-2, TRBJ2-6)
CASSERRASGANVLTF

SEQ ID NO: 515519 - protein, 11 aa, Homo sapiens
  CDR3 for alpha chain variable domain of TCR clone 257760 (TRAV13-1, TRAJ30)
CAASRDDKIIF

SEQ ID NO: 515520 - protein, 19 aa, Homo sapiens
  CDR3 for beta chain variable domain of TCR clone 257760 (TRBV4-1, TRBJ1-1)
CASSRIILTPRGVNTEAFF

SEQ ID NO: 515521 - protein, 15 aa, Homo sapiens
  CDR3 for alpha chain variable domain of TCR clone 257761 (TRAV17, TRAJ57)
CATGPSQGGSAKLVF

SEQ ID NO: 515522 - protein, 16 aa, Homo sapiens
  CDR3 for beta chain variable domain of TCR clone 257761 (TRBV12-4, TRBJ1-5)
CASSRPVGGSNQPQHL

SEQ ID NO: 515523 - protein, 12 aa, Homo sapiens
  CDR3 for alpha chain variable domain of TCR clone 257762 (TRAV13-1, TRAJ49)
CAASIRSNQCYF

SEQ ID NO: 515524 - protein, 14 aa, Homo sapiens
  CDR3 for beta chain variable domain of TCR clone 257762 (TRBV7-2, TRBJ2-1)
CASSPGLAGNEQFF

SEQ ID NO: 515525 - protein, 11 aa, Homo sapiens
  CDR3 for alpha chain variable domain of TCR clone 257763 (TRAV17, TRAJ36)
CAPTGANNLFF

SEQ ID NO: 515526 - protein, 12 aa, Homo sapiens
  CDR3 for beta chain variable domain of TCR clone 257763 (TRBV29-1, TRBJ2-3)
CSVVLGVDTQYF

SEQ ID NO: 515527 - protein, 14 aa, Homo sapiens
  CDR3 for alpha chain variable domain of TCR clone 257764 (TRAV38-1, TRAJ40)
CALRPTSGTYKYIF

SEQ ID NO: 515528 - protein, 13 aa, Homo sapiens
  CDR3 for beta chain variable domain of TCR clone 257764 (TRBV12-4, TRBJ1-5)
CASSPDRAQPQHF

SEQ ID NO: 515529 - protein, 16 aa, Homo sapiens
  CDR3 for alpha chain variable domain of TCR clone 257765 (TRAV12-3, TRAJ18)
CAMRGSRGSTLGRLYF

SEQ ID NO: 515530 - protein, 13 aa, Homo sapiens
  CDR3 for beta chain variable domain of TCR clone 257765 (TRBV13, TRBJ2-7)
CQQLKGASYEQYF

SEQ ID NO: 515531 - protein, 15 aa, Homo sapiens
  CDR3 for alpha chain variable domain of TCR clone 257766 (TRAV2, TRAJ13)
CATPSYSGGYHKVTF

SEQ ID NO: 515532 - protein, 14 aa, Homo sapiens
  CDR3 for beta chain variable domain of TCR clone 257766 (TRBV4-2, TRBJ2-1)
CASGLDRAYNEQFF

SEQ ID NO: 515533 - protein, 15 aa, Homo sapiens
  CDR3 for alpha chain variable domain of TCR clone 257767 (TRAV12-2, TRAJ53)
CAVNGGGGSNYKLTF

SEQ ID NO: 515534 - protein, 14 aa, Homo sapiens
  CDR3 for beta chain variable domain of TCR clone 257767 (TRBV7-8, TRBJ1-2)
CASSPDSLSYSYTF

SEQ ID NO: 515535 - protein, 14 aa, Homo sapiens
  CDR3 for alpha chain variable domain of TCR clone 257768 (TRAV16, TRAJ33)
CALSAMDSNYQLIW

SEQ ID NO: 515536 - protein, 13 aa, Homo sapiens
  CDR3 for beta chain variable domain of TCR clone 257768 (TRBV7-8, TRBJ2-7)
RRVRLTEMGEQYF

SEQ ID NO: 515537 - protein, 16 aa, Homo sapiens
  CDR3 for alpha chain variable domain of TCR clone 257769 (TRAV30, TRAJ24)
CGTEIVDADSWGKFQF

SEQ ID NO: 515538 - protein, 18 aa, Homo sapiens
  CDR3 for beta chain variable domain of TCR clone 257769 (TRBV7-8, TRBJ2-5)
CASSPFSRAGGLLETQYF

SEQ ID NO: 515539 - protein, 15 aa, Homo sapiens
  CDR3 for alpha chain variable domain of TCR clone 257770 (TRAV3, TRAJ32)
CAVSRYGGATNKLIF

SEQ ID NO: 515540 - protein, 14 aa, Homo sapiens
  CDR3 for beta chain variable domain of TCR clone 257770 (TRBV25-1, TRBJ1-1)
CASTHLGGNTEAFF

SEQ ID NO: 515541 - protein, 14 aa, Homo sapiens
  CDR3 for alpha chain variable domain of TCR clone 257771 (TRAV12-3, TRAJ31)
CAMRLRNNNARLMF

SEQ ID NO: 515542 - protein, 16 aa, Homo sapiens
  CDR3 for beta chain variable domain of TCR clone 257771 (TRBV11-3, TRBJ2-5)
CASSSVVAGSTETQYF

SEQ ID NO: 515543 - protein, 13 aa, Homo sapiens
  CDR3 for alpha chain variable domain of TCR clone 257772 (TRAV30, TRAJ49)
CGTERQPVTSSIL

SEQ ID NO: 515544 - protein, 13 aa, Homo sapiens
  CDR3 for beta chain variable domain of TCR clone 257772 (TRBV7-2, TRBJ2-2)
CASSLAVTGELFF

SEQ ID NO: 515545 - protein, 10 aa, Homo sapiens
  CDR3 for alpha chain variable domain of TCR clone 257773 (TRAV1-2, TRAJ31)
CVSEDARLMF

SEQ ID NO: 515546 - protein, 14 aa, Homo sapiens
  CDR3 for beta chain variable domain of TCR clone 257773 (TRBV19, TRBJ2-1)
CASPTFVLSGVQFF

SEQ ID NO: 515547 - protein, 15 aa, Homo sapiens
  CDR3 for alpha chain variable domain of TCR clone 257774 (TRAV2, TRAJ9)
CAVAALNTGGFKTIF

SEQ ID NO: 515548 - protein, 15 aa, Homo sapiens
  CDR3 for beta chain variable domain of TCR clone 257774 (TRBV12-4, TRBJ2-5)
CASSLGGQGRETQYF

SEQ ID NO: 515549 - protein, 17 aa, Homo sapiens
  CDR3 for alpha chain variable domain of TCR clone 257775 (TRAV3, TRAJ42)
CAVRDRDYGGSQGNLIF

SEQ ID NO: 515550 - protein, 12 aa, Homo sapiens
  CDR3 for beta chain variable domain of TCR clone 257775 (TRBV6-3, TRBJ2-7)
CASSEPGFEQYF

SEQ ID NO: 515551 - protein, 15 aa, Homo sapiens
  CDR3 for alpha chain variable domain of TCR clone 257776 (TRAV14/DV4, TRAJ48)
CSMREGNAGNEKLTF

SEQ ID NO: 515552 - protein, 14 aa, Homo sapiens
  CDR3 for beta chain variable domain of TCR clone 257776 (TRBV28, TRBJ1-5)
CASSGQALYQPQHF

SEQ ID NO: 515553 - protein, 14 aa, Homo sapiens
  CDR3 for alpha chain variable domain of TCR clone 257777 (TRAV12-3, TRAJ41)
CTMSAGNSGYALNF

SEQ ID NO: 515554 - protein, 12 aa, Homo sapiens
  CDR3 for beta chain variable domain of TCR clone 257777 (TRBV19, TRBJ2-1)
CASSMQDTEQFF

SEQ ID NO: 515555 - protein, 15 aa, Homo sapiens
  CDR3 for alpha chain variable domain of TCR clone 257778 (TRAV8-3, TRAJ37)
CAVGAPSSNTGRLIF

SEQ ID NO: 515556 - protein, 15 aa, Homo sapiens
  CDR3 for beta chain variable domain of TCR clone 257778 (TRBV11-2, TRBJ1-2)
CASSQMRGLNYGYTF

SEQ ID NO: 515557 - protein, 17 aa, Homo sapiens
  CDR3 for alpha chain variable domain of TCR clone 257779 (TRAV13-1, TRAJ31)
CAPRDRPMFGDGTQLVV

SEQ ID NO: 515558 - protein, 12 aa, Homo sapiens
  CDR3 for beta chain variable domain of TCR clone 257779 (TRBV7-9, TRBJ2-7)
CASSLEGYGQYF

SEQ ID NO: 515559 - protein, 15 aa, Homo sapiens
  CDR3 for alpha chain variable domain of TCR clone 257780 (TRAV2, TRAJ37)
CAVEDVSSNTGKLIF

SEQ ID NO: 515560 - protein, 13 aa, Homo sapiens
  CDR3 for beta chain variable domain of TCR clone 257780 (TRBV20-1, TRBJ1-6)
CSTFREGNSPLHF

SEQ ID NO: 515561 - protein, 16 aa, Homo sapiens
  CDR3 for alpha chain variable domain of TCR clone 257781 (TRAV30, TRAJ24)
CGTEIVDADSWGKFQF

SEQ ID NO: 515562 - protein, 19 aa, Homo sapiens
  CDR3 for beta chain variable domain of TCR clone 257781 (TRBV25-1, TRBJ2-2)
CAILVYRVDRGRKTEELFF

SEQ ID NO: 515563 - protein, 14 aa, Homo sapiens
  CDR3 for alpha chain variable domain of TCR clone 257782 (TRAV3, TRAJ22)
CAVRDSGSARQLTF

SEQ ID NO: 515564 - protein, 15 aa, Homo sapiens
  CDR3 for beta chain variable domain of TCR clone 257782 (TRBV11-2, TRBJ2-5)
CASSLASYSGETQHF

SEQ ID NO: 515565 - protein, 13 aa, Homo sapiens
  CDR3 for alpha chain variable domain of TCR clone 257783 (TRAV22, TRAJ12)
CAGRLDSSYKLIF

SEQ ID NO: 515566 - protein, 15 aa, Homo sapiens
  CDR3 for beta chain variable domain of TCR clone 257783 (TRBV10-1, TRBJ2-1)
CASSEWRGTYNEQFF

SEQ ID NO: 515567 - protein, 12 aa, Homo sapiens
  CDR3 for alpha chain variable domain of TCR clone 257784 (TRAV27, TRAJ9)
CAGESGGFKTIF

SEQ ID NO: 515568 - protein, 15 aa, Homo sapiens
  CDR3 for beta chain variable domain of TCR clone 257784 (TRBV7-6, TRBJ1-5)
CASSQSSGINQPQHF

SEQ ID NO: 515569 - protein, 12 aa, Homo sapiens
  CDR3 for alpha chain variable domain of TCR clone 257785 (TRAV20, TRAJ39)
CAVGNAGNMLTL

SEQ ID NO: 515570 - protein, 16 aa, Homo sapiens
  CDR3 for beta chain variable domain of TCR clone 257785 (TRBV15, TRBJ1-2)
CATSRGPRTGGGGYTF

SEQ ID NO: 515571 - protein, 18 aa, Homo sapiens
  CDR3 for alpha chain variable domain of TCR clone 257786 (TRAV23/DV6, TRAJ21)
CAASSGGGTNSTNFTLDL

SEQ ID NO: 515572 - protein, 11 aa, Homo sapiens
  CDR3 for beta chain variable domain of TCR clone 257786 (TRBV7-8, TRBJ2-7)
CASSLSLEQYF

SEQ ID NO: 515573 - protein, 15 aa, Homo sapiens
  CDR3 for alpha chain variable domain of TCR clone 257787 (TRAV8-2, TRAJ15)
CVVTMGNQSGNALIF

SEQ ID NO: 515574 - protein, 12 aa, Homo sapiens
  CDR3 for beta chain variable domain of TCR clone 257787 (TRBV6-1, TRBJ2-7)
CASSDYSYEQYF

SEQ ID NO: 515575 - protein, 14 aa, Homo sapiens
  CDR3 for alpha chain variable domain of TCR clone 257788 (TRAV12-2, TRAJ40)
CAVKIPSGTYKYIF

SEQ ID NO: 515576 - protein, 15 aa, Homo sapiens
  CDR3 for beta chain variable domain of TCR clone 257788 (TRBV11-3, TRBJ2-3)
CASLKDGREGDTQHF

SEQ ID NO: 515577 - protein, 13 aa, Homo sapiens
  CDR3 for alpha chain variable domain of TCR clone 257789 (TRAV26-1, TRAJ48)
CIVRVVGDEKLTF

SEQ ID NO: 515578 - protein, 11 aa, Homo sapiens
  CDR3 for beta chain variable domain of TCR clone 257789 (TRBV3-1, TRBJ2-7)
CASTSLGEQYF

SEQ ID NO: 515579 - protein, 12 aa, Homo sapiens
  CDR3 for alpha chain variable domain of TCR clone 257790 (TRAV12-3, TRAJ17)
CAMTLTGNKLTF

SEQ ID NO: 515580 - protein, 13 aa, Homo sapiens
  CDR3 for beta chain variable domain of TCR clone 257790 (TRBV5-1, TRBJ2-7)
CASSLEDNQEQYF

SEQ ID NO: 515581 - protein, 14 aa, Homo sapiens
  CDR3 for alpha chain variable domain of TCR clone 257791 (TRAV26-1, TRAJ38)
CIAGNAGNNRKLIW

SEQ ID NO: 515582 - protein, 17 aa, Homo sapiens
  CDR3 for beta chain variable domain of TCR clone 257791 (TRBV15, TRBJ1-1)
CATSRVGGADGDTEALF

SEQ ID NO: 515583 - protein, 15 aa, Homo sapiens
  CDR3 for alpha chain variable domain of TCR clone 257792 (TRAV3, TRAJ4)
CAVRDGTGGYNKLIF

SEQ ID NO: 515584 - protein, 13 aa, Homo sapiens
  CDR3 for beta chain variable domain of TCR clone 257792 (TRBV12-5, TRBJ1-2)
CASGGRTGNGYTF

SEQ ID NO: 515585 - protein, 17 aa, Homo sapiens
  CDR3 for alpha chain variable domain of TCR clone 257793 (TRAV3, TRAJ6)
CAMRDGPRAGGSYIPTF

SEQ ID NO: 515586 - protein, 14 aa, Homo sapiens
  CDR3 for beta chain variable domain of TCR clone 257793 (TRBV7-2, TRBJ2-7)
CASSPKTSFYEQFF

SEQ ID NO: 515587 - protein, 12 aa, Homo sapiens
  CDR3 for alpha chain variable domain of TCR clone 257794 (TRAV23/DV6, TRAJ17)
CAAKAAGNKLTF

SEQ ID NO: 515588 - protein, 14 aa, Homo sapiens
  CDR3 for beta chain variable domain of TCR clone 257794 (TRBV28, TRBJ1-1)
CASSPRARWAEAFF

SEQ ID NO: 515589 - protein, 17 aa, Homo sapiens
  CDR3 for alpha chain variable domain of TCR clone 257795 (TRAV26-1, TRAJ53)
CIVRVDDSGGNNYKLKF

SEQ ID NO: 515590 - protein, 15 aa, Homo sapiens
  CDR3 for beta chain variable domain of TCR clone 257795 (TRBV20-1, TRBJ2-7)
CSARVPAAYFYEQYF

SEQ ID NO: 515591 - protein, 15 aa, Homo sapiens
  CDR3 for alpha chain variable domain of TCR clone 257796 (TRAV14/DV4, TRAJ28)
CAKLFSGAVSYQLTF

SEQ ID NO: 515592 - protein, 13 aa, Homo sapiens
  CDR3 for beta chain variable domain of TCR clone 257796 (TRBV12-4, TRBJ2-7)
CASSFVPTAEQYF

SEQ ID NO: 515593 - protein, 15 aa, Homo sapiens
  CDR3 for alpha chain variable domain of TCR clone 257797 (TRAV26-1, TRAJ42)
CIVRVKGGSQGNLIF

SEQ ID NO: 515594 - protein, 12 aa, Homo sapiens
  CDR3 for beta chain variable domain of TCR clone 257797 (TRBV19, TRBJ2-5)
CASSISEETQYF

SEQ ID NO: 515595 - protein, 12 aa, Homo sapiens
  CDR3 for alpha chain variable domain of TCR clone 257798 (TRAV21, TRAJ31)
CVLAGNNARLMF

SEQ ID NO: 515596 - protein, 15 aa, Homo sapiens
  CDR3 for beta chain variable domain of TCR clone 257798 (TRBV7-3, TRBJ2-1)
CASSPTGGGEVEQFF

SEQ ID NO: 515597 - protein, 14 aa, Homo sapiens
  CDR3 for alpha chain variable domain of TCR clone 257799 (TRAV1-2, TRAJ8)
CAVRADTGFQKLVF

SEQ ID NO: 515598 - protein, 16 aa, Homo sapiens
  CDR3 for beta chain variable domain of TCR clone 257799 (TRBV19, TRBJ2-3)
CASGTGPNDGTDTQYF

SEQ ID NO: 515599 - protein, 11 aa, Homo sapiens
  CDR3 for alpha chain variable domain of TCR clone 257800 (TRAV8-3, TRAJ42)
CAVGQGCIMEE

SEQ ID NO: 515600 - protein, 11 aa, Homo sapiens
  CDR3 for beta chain variable domain of TCR clone 257800 (TRBV7-2, TRBJ2-3)
CASSSSDTQYF

SEQ ID NO: 515601 - protein, 16 aa, Homo sapiens
  CDR3 for alpha chain variable domain of TCR clone 257801 (TRAV14/DV4, TRAJ53)
CAMREGGGGSNYKLTF

SEQ ID NO: 515602 - protein, 14 aa, Homo sapiens
  CDR3 for beta chain variable domain of TCR clone 257801 (TRBV18, TRBJ2-7)
CASSPRGGAYEQYF

SEQ ID NO: 515603 - protein, 16 aa, Homo sapiens
  CDR3 for alpha chain variable domain of TCR clone 257802 (TRAV8-3, TRAJ22)
CAVDLLGPGSARHLPF

SEQ ID NO: 515604 - protein, 14 aa, Homo sapiens
  CDR3 for beta chain variable domain of TCR clone 257802 (TRBV11-2, TRBJ2-7)
CASSLELEGYEQYF

SEQ ID NO: 515605 - protein, 14 aa, Homo sapiens
  CDR3 for alpha chain variable domain of TCR clone 257803 (TRAV2, TRAJ9)
CAVEDRSGGFKTNF

SEQ ID NO: 515606 - protein, 12 aa, Homo sapiens
  CDR3 for beta chain variable domain of TCR clone 257803 (TRBV11-2, TRBJ2-2)
CASSLGGGELFF

SEQ ID NO: 515607 - protein, 12 aa, Homo sapiens
  CDR3 for alpha chain variable domain of TCR clone 257804 (TRAV16, TRAJ17)
CAPSAAGNKLTF

SEQ ID NO: 515608 - protein, 13 aa, Homo sapiens
  CDR3 for beta chain variable domain of TCR clone 257804 (TRBV20-1, TRBJ1-1)
CSARGGGNTEAFF

SEQ ID NO: 515609 - protein, 12 aa, Homo sapiens
  CDR3 for alpha chain variable domain of TCR clone 257805 (TRAV16, TRAJ10)
CSRTGGGNKLTF

SEQ ID NO: 515610 - protein, 19 aa, Homo sapiens
  CDR3 for beta chain variable domain of TCR clone 257805 (TRBV7-9, TRBJ2-1)
CASSTTRASGRSSYNEQFF

SEQ ID NO: 515611 - protein, 13 aa, Homo sapiens
  CDR3 for alpha chain variable domain of TCR clone 257806 (TRAV16, TRAJ34)
CALSPYNTDKLIF

SEQ ID NO: 515612 - protein, 14 aa, Homo sapiens
  CDR3 for beta chain variable domain of TCR clone 257806 (TRBV12-5, TRBJ2-5)
CASGSRTHQETQYF

SEQ ID NO: 515613 - protein, 14 aa, Homo sapiens
  CDR3 for alpha chain variable domain of TCR clone 257807 (TRAV1-2, TRAJ27)
CAVRSGTNAGKSTF

SEQ ID NO: 515614 - protein, 15 aa, Homo sapiens
  CDR3 for beta chain variable domain of TCR clone 257807 (TRBV18, TRBJ2-7)
CASSPLQGRPYEQYF

SEQ ID NO: 515615 - protein, 15 aa, Homo sapiens
  CDR3 for alpha chain variable domain of TCR clone 257808 (TRAV3, TRAJ12)
CAVRDIRDSSYKLIF

SEQ ID NO: 515616 - protein, 15 aa, Homo sapiens
  CDR3 for beta chain variable domain of TCR clone 257808 (TRBV27, TRBJ2-7)
CASSIRNEQGYEQYF

SEQ ID NO: 515617 - protein, 16 aa, Homo sapiens
  CDR3 for alpha chain variable domain of TCR clone 257809 (TRAV12-2, TRAJ18)
CAVTTDRGSTLGRLYF

SEQ ID NO: 515618 - protein, 13 aa, Homo sapiens
  CDR3 for beta chain variable domain of TCR clone 257809 (TRBV7-2, TRBJ1-5)
CASSLAEGGANEF

SEQ ID NO: 515619 - protein, 15 aa, Homo sapiens
  CDR3 for alpha chain variable domain of TCR clone 257810 (TRAV14/DV4, TRAJ27)
CAMREGLTNAGKSTF

SEQ ID NO: 515620 - protein, 14 aa, Homo sapiens
  CDR3 for beta chain variable domain of TCR clone 257810 (TRBV7-3, TRBJ2-3)
CASSPGASRDTQYF

SEQ ID NO: 515621 - protein, 15 aa, Homo sapiens
  CDR3 for alpha chain variable domain of TCR clone 257811 (TRAV26-1, TRAJ44)
CIVRANTGTSSKLTF

SEQ ID NO: 515622 - protein, 17 aa, Homo sapiens
  CDR3 for beta chain variable domain of TCR clone 257811 (TRBV28, TRBJ2-5)
CASSTPEGDALQETQYF

SEQ ID NO: 515623 - protein, 12 aa, Homo sapiens
  CDR3 for alpha chain variable domain of TCR clone 257812 (TRAV21, TRAJ33)
CAKMDSNYQLIG

SEQ ID NO: 515624 - protein, 18 aa, Homo sapiens
  CDR3 for beta chain variable domain of TCR clone 257812 (TRBV15, TRBJ2-3)
CATSRDGARSWDTDTQYF

SEQ ID NO: 515625 - protein, 15 aa, Homo sapiens
  CDR3 for alpha chain variable domain of TCR clone 257813 (TRAV17, TRAJ20)
CATDGGGSNDYKLSF

SEQ ID NO: 515626 - protein, 12 aa, Homo sapiens
  CDR3 for beta chain variable domain of TCR clone 257813 (TRBV11-2, TRBJ2-2)
CASSLGGGELFF

SEQ ID NO: 515627 - protein, 16 aa, Homo sapiens
  CDR3 for alpha chain variable domain of TCR clone 257814 (TRAV30, TRAJ24)
CGTEIVDADNWGKFQF

SEQ ID NO: 515628 - protein, 13 aa, Homo sapiens
  CDR3 for beta chain variable domain of TCR clone 257814 (TRBV18, TRBJ1-2)
CASSASATEGYTF

SEQ ID NO: 515629 - protein, 13 aa, Homo sapiens
  CDR3 for alpha chain variable domain of TCR clone 257815 (TRAV3, TRAJ43)
RAVRDTRGGDMRF

SEQ ID NO: 515630 - protein, 15 aa, Homo sapiens
  CDR3 for beta chain variable domain of TCR clone 257815 (TRBV6-5, TRBJ1-5)
CASSDSRRSNQPQHF

SEQ ID NO: 515631 - protein, 16 aa, Homo sapiens
  CDR3 for alpha chain variable domain of TCR clone 257816 (TRAV13-1, TRAJ10)
CAASRKRREEETNSPL

SEQ ID NO: 515632 - protein, 16 aa, Homo sapiens
  CDR3 for beta chain variable domain of TCR clone 257816 (TRBV7-3, TRBJ2-2)
CASSLKRGTLSGELFF

SEQ ID NO: 515633 - protein, 14 aa, Homo sapiens
  CDR3 for alpha chain variable domain of TCR clone 257817 (TRAV9-2, TRAJ39)
CALYIYNAGNMLTF

SEQ ID NO: 515634 - protein, 16 aa, Homo sapiens
  CDR3 for beta chain variable domain of TCR clone 257817 (TRBV7-3, TRBJ2-1)
CASSSIRRAPTMSSSS

SEQ ID NO: 515635 - protein, 13 aa, Homo sapiens
  CDR3 for alpha chain variable domain of TCR clone 257818 (TRAV2, TRAJ40)
CAVVTSGTYKYIF

SEQ ID NO: 515636 - protein, 17 aa, Homo sapiens
  CDR3 for beta chain variable domain of TCR clone 257818 (TRBV19, TRBJ2-6)
CASSTGQVFSGANVLTF

SEQ ID NO: 515637 - protein, 15 aa, Homo sapiens
  CDR3 for alpha chain variable domain of TCR clone 257819 (TRAV26-2, TRAJ50)
CILRDEETSYDKVIF

SEQ ID NO: 515638 - protein, 13 aa, Homo sapiens
  CDR3 for beta chain variable domain of TCR clone 257819 (TRBV19, TRBJ1-3)
CASRLSLGNTIYF

SEQ ID NO: 515639 - protein, 11 aa, Homo sapiens
  CDR3 for alpha chain variable domain of TCR clone 257820 (TRAV12-2, TRAJ31)
CAVTRWAKLMF

SEQ ID NO: 515640 - protein, 15 aa, Homo sapiens
  CDR3 for beta chain variable domain of TCR clone 257820 (TRBV19, TRBJ2-7)
CASGIGGGLVNEQYF

SEQ ID NO: 515641 - protein, 12 aa, Homo sapiens
  CDR3 for alpha chain variable domain of TCR clone 257821 (TRAV12-3, TRAJ17)
CAMTLTGNKLTF

SEQ ID NO: 515642 - protein, 14 aa, Homo sapiens
  CDR3 for beta chain variable domain of TCR clone 257821 (TRBV12-5, TRBJ2-5)
CASGSRTHQENQYF

SEQ ID NO: 515643 - protein, 10 aa, Homo sapiens
  CDR3 for alpha chain variable domain of TCR clone 257822 (TRAV23/DV6, TRAJ57)
CAASSTLSQG

SEQ ID NO: 515644 - protein, 15 aa, Homo sapiens
  CDR3 for beta chain variable domain of TCR clone 257822 (TRBV6-5, TRBJ1-2)
CASSYSQAFNYGYTF

SEQ ID NO: 515645 - protein, 11 aa, Homo sapiens
  CDR3 for alpha chain variable domain of TCR clone 257823 (TRAV13-1, TRAJ15)
CAATTGTALIF

SEQ ID NO: 515646 - protein, 13 aa, Homo sapiens
  CDR3 for beta chain variable domain of TCR clone 257823 (TRBV7-2, TRBJ2-1)
CASSLGVYNEQFF

SEQ ID NO: 515647 - protein, 18 aa, Homo sapiens
  CDR3 for alpha chain variable domain of TCR clone 257824 (TRAV13-2, TRAJ52)
CAETPLNAGGTSYGKLTF

SEQ ID NO: 515648 - protein, 14 aa, Homo sapiens
  CDR3 for beta chain variable domain of TCR clone 257824 (TRBV6-1, TRBJ1-3)
CASVQGGGGNTIYF

SEQ ID NO: 515649 - protein, 15 aa, Homo sapiens
  CDR3 for alpha chain variable domain of TCR clone 257825 (TRAV21, TRAJ32)
CAVNSYGGATNKLTF

SEQ ID NO: 515650 - protein, 18 aa, Homo sapiens
  CDR3 for beta chain variable domain of TCR clone 257825 (TRBV7-9, TRBJ2-1)
CASSTGLAEGSSYNEQFF

SEQ ID NO: 515651 - protein, 14 aa, Homo sapiens
  CDR3 for alpha chain variable domain of TCR clone 257826 (TRAV9-2, TRAJ49)
CALSDPGTGNQFYF

SEQ ID NO: 515652 - protein, 15 aa, Homo sapiens
  CDR3 for beta chain variable domain of TCR clone 257826 (TRBV6-3, TRBJ2-7)
CASSSPGTVFYEQYF

SEQ ID NO: 515653 - protein, 12 aa, Homo sapiens
  CDR3 for alpha chain variable domain of TCR clone 257827 (TRAV12-1, TRAJ40)
CVVYSGTYNYIF

SEQ ID NO: 515654 - protein, 15 aa, Homo sapiens
  CDR3 for beta chain variable domain of TCR clone 257827 (TRBV27, TRBJ1-6)
CASSFDRGLGSPLHF

SEQ ID NO: 515655 - protein, 18 aa, Homo sapiens
  CDR3 for alpha chain variable domain of TCR clone 257828 (TRAV21, TRAJ52)
CAVRPSPAGGTSYGKLTF

SEQ ID NO: 515656 - protein, 13 aa, Homo sapiens
  CDR3 for beta chain variable domain of TCR clone 257828 (TRBV11-2, TRBJ1-5)
CASSFGRNQPQHF

SEQ ID NO: 515657 - protein, 14 aa, Homo sapiens
  CDR3 for alpha chain variable domain of TCR clone 257829 (TRAV38-1, TRAJ29)
CAFITPSGNTPPVL

SEQ ID NO: 515658 - protein, 14 aa, Homo sapiens
  CDR3 for beta chain variable domain of TCR clone 257829 (TRBV18, TRBJ2-7)
CASSPRGGAYEQYF

SEQ ID NO: 515659 - protein, 13 aa, Homo sapiens
  CDR3 for alpha chain variable domain of TCR clone 257830 (TRAV17, TRAJ29)
CATFGSGNTPLVF

SEQ ID NO: 515660 - protein, 13 aa, Homo sapiens
  CDR3 for beta chain variable domain of TCR clone 257830 (TRBV18, TRBJ1-1)
CASSGGRNTEAFF

SEQ ID NO: 515661 - protein, 15 aa, Homo sapiens
  CDR3 for alpha chain variable domain of TCR clone 257831 (TRAV27, TRAJ53)
CAGGDSGGSNYKLTF

SEQ ID NO: 515662 - protein, 12 aa, Homo sapiens
  CDR3 for beta chain variable domain of TCR clone 257831 (TRBV11-2, TRBJ2-2)
CASSLGGGELFF

SEQ ID NO: 515663 - protein, 16 aa, Homo sapiens
  CDR3 for alpha chain variable domain of TCR clone 257832 (TRAV16, TRAJ57)
CALYLITQGGSEKLVC

SEQ ID NO: 515664 - protein, 17 aa, Homo sapiens
  CDR3 for beta chain variable domain of TCR clone 257832 (TRBV24-1, TRBJ2-4)
CATSDAEARGVRNIQYF

SEQ ID NO: 515665 - protein, 14 aa, Homo sapiens
  CDR3 for alpha chain variable domain of TCR clone 257833 (TRAV26-1, TRAJ45)
CIVREGGGADGLTF

SEQ ID NO: 515666 - protein, 14 aa, Homo sapiens
  CDR3 for beta chain variable domain of TCR clone 257833 (TRBV2, TRBJ1-2)
CASNEGTGPYGYIF

SEQ ID NO: 515667 - protein, 14 aa, Homo sapiens
  CDR3 for alpha chain variable domain of TCR clone 257834 (TRAV16, TRAJ26)
CALSGCNYGPNFVF

SEQ ID NO: 515668 - protein, 14 aa, Homo sapiens
  CDR3 for beta chain variable domain of TCR clone 257834 (TRBV28, TRBJ2-2)
CASTRRSGDGELFF

SEQ ID NO: 515669 - protein, 15 aa, Homo sapiens
  CDR3 for alpha chain variable domain of TCR clone 257835 (TRAV8-4, TRAJ3)
CAVTGENLVQKCFQD

SEQ ID NO: 515670 - protein, 16 aa, Homo sapiens
  CDR3 for beta chain variable domain of TCR clone 257835 (TRBV4-2, TRBJ1-1)
CASSQAGFGMNTEAFF

SEQ ID NO: 515671 - protein, 21 aa, Homo sapiens
  CDR3 for alpha chain variable domain of TCR clone 257836 (TRAV26-1, TRAJ38)
CIADNAGNNHIQNPDPAVYQL

SEQ ID NO: 515672 - protein, 15 aa, Homo sapiens
  CDR3 for beta chain variable domain of TCR clone 257836 (TRBV7-9, TRBJ1-5)
CASSQGHQPNQPQHF

SEQ ID NO: 515673 - protein, 11 aa, Homo sapiens
  CDR3 for alpha chain variable domain of TCR clone 257837 (TRAV12-3, TRAJ43)
CAMSVSNDIRF

SEQ ID NO: 515674 - protein, 15 aa, Homo sapiens
  CDR3 for beta chain variable domain of TCR clone 257837 (TRBV19, TRBJ1-1)
CASTSGQIQNTEAFF

SEQ ID NO: 515675 - protein, 14 aa, Homo sapiens
  CDR3 for alpha chain variable domain of TCR clone 257838 (TRAV30, TRAJ33)
CGTVAPRSNYQLIW

SEQ ID NO: 515676 - protein, 16 aa, Homo sapiens
  CDR3 for beta chain variable domain of TCR clone 257838 (TRBV11-2, TRBJ2-1)
CASSPRLAGVYNEQFF

SEQ ID NO: 515677 - protein, 11 aa, Homo sapiens
  CDR3 for alpha chain variable domain of TCR clone 257839 (TRAV17, TRAJ9)
CATTGGFKTIF

SEQ ID NO: 515678 - protein, 16 aa, Homo sapiens
  CDR3 for beta chain variable domain of TCR clone 257839 (TRBV15, TRBJ2-3)
CATSRDLGIVTDTQYF

SEQ ID NO: 515679 - protein, 12 aa, Homo sapiens
  CDR3 for alpha chain variable domain of TCR clone 257840 (TRAV12-3, TRAJ17)
CSMTLTGNKLTF

SEQ ID NO: 515680 - protein, 14 aa, Homo sapiens
  CDR3 for beta chain variable domain of TCR clone 257840 (TRBV19, TRBJ2-1)
CASPTFVLSGEQFF

SEQ ID NO: 515681 - protein, 13 aa, Homo sapiens
  CDR3 for alpha chain variable domain of TCR clone 257841 (TRAV21, TRAJ45)
CAAPGGGADGLTF

SEQ ID NO: 515682 - protein, 13 aa, Homo sapiens
  CDR3 for beta chain variable domain of TCR clone 257841 (TRBV4-2, TRBJ1-1)
CASSQAGNTEAFF

SEQ ID NO: 515683 - protein, 14 aa, Homo sapiens
  CDR3 for alpha chain variable domain of TCR clone 257842 (TRAV8-1, TRAJ34)
CAVITTYNTDKLVF

SEQ ID NO: 515684 - protein, 14 aa, Homo sapiens
  CDR3 for beta chain variable domain of TCR clone 257842 (TRBV11-3, TRBJ1-3)
CASSHNGQGNTIYF

SEQ ID NO: 515685 - protein, 17 aa, Homo sapiens
  CDR3 for alpha chain variable domain of TCR clone 257843 (TRAV12-2, TRAJ4)
CAVNVRPVSGGYNKLIV

SEQ ID NO: 515686 - protein, 17 aa, Homo sapiens
  CDR3 for beta chain variable domain of TCR clone 257843 (TRBV6-3, TRBJ2-1)
CASSYSSGTRGLDEQFF

SEQ ID NO: 515687 - protein, 11 aa, Homo sapiens
  CDR3 for alpha chain variable domain of TCR clone 257844 (TRAV1-2, TRAJ20)
CAVSNDYKLSF

SEQ ID NO: 515688 - protein, 15 aa, Homo sapiens
  CDR3 for beta chain variable domain of TCR clone 257844 (TRBV5-1, TRBJ2-2)
CASSSQGGSTGELFF

SEQ ID NO: 515689 - protein, 14 aa, Homo sapiens
  CDR3 for alpha chain variable domain of TCR clone 257845 (TRAV1-2, TRAJ16)
CAVNRFSDGQKLLF

SEQ ID NO: 515690 - protein, 14 aa, Homo sapiens
  CDR3 for beta chain variable domain of TCR clone 257845 (TRBV4-1, TRBJ1-6)
CASSPGSDSSPLHF

SEQ ID NO: 515691 - protein, 14 aa, Homo sapiens
  CDR3 for alpha chain variable domain of TCR clone 257846 (TRAV35, TRAJ22)
CAGLRLGSARQLTF

SEQ ID NO: 515692 - protein, 15 aa, Homo sapiens
  CDR3 for beta chain variable domain of TCR clone 257846 (TRBV12-4, TRBJ2-5)
CASSPPTGLQETLYF

SEQ ID NO: 515693 - protein, 14 aa, Homo sapiens
  CDR3 for alpha chain variable domain of TCR clone 257847 (TRAV35, TRAJ33)
CAGSSQDSNYQLIW

SEQ ID NO: 515694 - protein, 14 aa, Homo sapiens
  CDR3 for beta chain variable domain of TCR clone 257847 (TRBV27, TRBJ2-1)
CASSLRGSYNEQFF

SEQ ID NO: 515695 - protein, 18 aa, Homo sapiens
  CDR3 for alpha chain variable domain of TCR clone 257848 (TRAV13-1, TRAJ52)
CAAKNPNAGRTSYGKLTF

SEQ ID NO: 515696 - protein, 15 aa, Homo sapiens
  CDR3 for beta chain variable domain of TCR clone 257848 (TRBV6-1, TRBJ2-3)
CASSERGGITDTQYF

SEQ ID NO: 515697 - protein, 21 aa, Homo sapiens
  CDR3 for alpha chain variable domain of TCR clone 257849 (TRAV20, )
CAVTGANNIQNPDPAVYQLRD

SEQ ID NO: 515698 - protein, 15 aa, Homo sapiens
  CDR3 for beta chain variable domain of TCR clone 257849 (TRBV20-1, TRBJ2-7)
CSARDRVSGMDEQYF

SEQ ID NO: 515699 - protein, 14 aa, Homo sapiens
  CDR3 for alpha chain variable domain of TCR clone 257850 (TRAV2, TRAJ9)
CAVEDRSGGFKTIF

SEQ ID NO: 515700 - protein, 13 aa, Homo sapiens
  CDR3 for beta chain variable domain of TCR clone 257850 (TRBV12-4, TRBJ1-2)
CASTMTSNYGYTF

SEQ ID NO: 515701 - protein, 12 aa, Homo sapiens
  CDR3 for alpha chain variable domain of TCR clone 257851 (TRAV12-3, TRAJ17)
CAMTLTGNKLTF

SEQ ID NO: 515702 - protein, 13 aa, Homo sapiens
  CDR3 for beta chain variable domain of TCR clone 257851 (TRBV12-4, TRBJ2-5)
CASSPGTVETQYF

SEQ ID NO: 515703 - protein, 13 aa, Homo sapiens
  CDR3 for alpha chain variable domain of TCR clone 257852 (TRAV2, TRAJ15)
CAVASQAGTALIF

SEQ ID NO: 515704 - protein, 11 aa, Homo sapiens
  CDR3 for beta chain variable domain of TCR clone 257852 (TRBV29-1, TRBJ2-5)
CSVASGETQYF

SEQ ID NO: 515705 - protein, 14 aa, Homo sapiens
  CDR3 for alpha chain variable domain of TCR clone 257853 (TRAV12-2, TRAJ44)
CAVNPAGTASKLNF

SEQ ID NO: 515706 - protein, 13 aa, Homo sapiens
  CDR3 for beta chain variable domain of TCR clone 257853 (TRBV20-1, TRBJ1-6)
CSAPLGVGSPLHF

SEQ ID NO: 515707 - protein, 13 aa, Homo sapiens
  CDR3 for alpha chain variable domain of TCR clone 257854 (TRAV8-6, TRAJ32)
CAVSDRAPNKLIF

SEQ ID NO: 515708 - protein, 13 aa, Homo sapiens
  CDR3 for beta chain variable domain of TCR clone 257854 (TRBV11-2, TRBJ2-7)
CASSLDLGYEQYF

SEQ ID NO: 515709 - protein, 20 aa, Homo sapiens
  CDR3 for alpha chain variable domain of TCR clone 257855 (TRAV12-1, TRAJ42)
SSVIQPPTSVKGGSQGNLIF

SEQ ID NO: 515710 - protein, 18 aa, Homo sapiens
  CDR3 for beta chain variable domain of TCR clone 257855 (TRBV6-6, TRBJ1-3)
CASSYSKWDSISGNTIYF

SEQ ID NO: 515711 - protein, 11 aa, Homo sapiens
  CDR3 for alpha chain variable domain of TCR clone 257856 (TRAV3, TRAJ20)
CAVRPSVTTTS

SEQ ID NO: 515712 - protein, 15 aa, Homo sapiens
  CDR3 for beta chain variable domain of TCR clone 257856 (TRBV6-5, TRBJ2-1)
RASSYDAGAGNEQFF

SEQ ID NO: 515713 - protein, 14 aa, Homo sapiens
  CDR3 for alpha chain variable domain of TCR clone 257857 (TRAV13-1, TRAJ26)
CPASSAHYGQNFVF

SEQ ID NO: 515714 - protein, 17 aa, Homo sapiens
  CDR3 for beta chain variable domain of TCR clone 257857 (TRBV25-1, TRBJ2-5)
CASSRRGGRGGQETQYF

SEQ ID NO: 515715 - protein, 16 aa, Homo sapiens
  CDR3 for alpha chain variable domain of TCR clone 257858 (TRAV14/DV4, TRAJ54)
CAMREGRIQGSQKLVF

SEQ ID NO: 515716 - protein, 18 aa, Homo sapiens
  CDR3 for beta chain variable domain of TCR clone 257858 (TRBV18, TRBJ1-3)
CASSPRGGAGPSGNTIYF

SEQ ID NO: 515717 - protein, 12 aa, Homo sapiens
  CDR3 for alpha chain variable domain of TCR clone 257859 (TRAV12-3, TRAJ17)
CAMTLTGNKLTF

SEQ ID NO: 515718 - protein, 16 aa, Homo sapiens
  CDR3 for beta chain variable domain of TCR clone 257859 (TRBV4-1, TRBJ2-5)
CASSSGLAGVLGTQYF

SEQ ID NO: 515719 - protein, 13 aa, Homo sapiens
  CDR3 for alpha chain variable domain of TCR clone 257860 (TRAV2, TRAJ21)
CAVADLNFNKFYF

SEQ ID NO: 515720 - protein, 14 aa, Homo sapiens
  CDR3 for beta chain variable domain of TCR clone 257860 (TRBV18, TRBJ1-2)
CASSPDRVVYGYTF

SEQ ID NO: 515721 - protein, 17 aa, Homo sapiens
  CDR3 for alpha chain variable domain of TCR clone 257861 (TRAV8-2, TRAJ17)
SVVSDRRFKAAGNKLTF

SEQ ID NO: 515722 - protein, 18 aa, Homo sapiens
  CDR3 for beta chain variable domain of TCR clone 257861 (TRBV7-9, TRBJ2-7)
CASSLTTSGSRTWYEQYF

SEQ ID NO: 515723 - protein, 16 aa, Homo sapiens
  CDR3 for alpha chain variable domain of TCR clone 257862 (TRAV30, TRAJ24)
CGTEIVDADSWGKFQF

SEQ ID NO: 515724 - protein, 16 aa, Homo sapiens
  CDR3 for beta chain variable domain of TCR clone 257862 (TRBV2, TRBJ1-3)
CASSGGAGRPGNTIYF

SEQ ID NO: 515725 - protein, 12 aa, Homo sapiens
  CDR3 for alpha chain variable domain of TCR clone 257863 (TRAV21, TRAJ17)
CAMTLTGNKLTF

SEQ ID NO: 515726 - protein, 15 aa, Homo sapiens
  CDR3 for beta chain variable domain of TCR clone 257863 (TRBV20-1, TRBJ2-7)
CSARDRVSGMEEQYF

SEQ ID NO: 515727 - protein, 13 aa, Homo sapiens
  CDR3 for alpha chain variable domain of TCR clone 257864 (TRAV2, TRAJ21)
CALEDLNFNKFYF

SEQ ID NO: 515728 - protein, 15 aa, Homo sapiens
  CDR3 for beta chain variable domain of TCR clone 257864 (TRBV28, TRBJ2-5)
CASSPGQGSIETQYF

SEQ ID NO: 515729 - protein, 14 aa, Homo sapiens
  CDR3 for alpha chain variable domain of TCR clone 257865 (TRAV38-1, TRAJ29)
CAFITPSGNTPLVF

SEQ ID NO: 515730 - protein, 13 aa, Homo sapiens
  CDR3 for beta chain variable domain of TCR clone 257865 (TRBV7-8, TRBJ2-1)
CASSLERLGEQFF

SEQ ID NO: 515731 - protein, 12 aa, Homo sapiens
  CDR3 for alpha chain variable domain of TCR clone 257866 (TRAV12-3, TRAJ17)
CAMTLTGNKLNF

SEQ ID NO: 515732 - protein, 15 aa, Homo sapiens
  CDR3 for beta chain variable domain of TCR clone 257866 (TRBV20-1, TRBJ2-7)
CSARDRVAGMDEQYF

SEQ ID NO: 515733 - protein, 14 aa, Homo sapiens
  CDR3 for alpha chain variable domain of TCR clone 257867 (TRAV26-1, TRAJ34)
CIVRVAYNTDKLIF

SEQ ID NO: 515734 - protein, 15 aa, Homo sapiens
  CDR3 for beta chain variable domain of TCR clone 257867 (TRBV7-2, TRBJ2-5)
CASSGILAGAETQYF

SEQ ID NO: 515735 - protein, 14 aa, Homo sapiens
  CDR3 for alpha chain variable domain of TCR clone 257868 (TRAV20, TRAJ29)
CAVQAWVGNTPLVF

SEQ ID NO: 515736 - protein, 18 aa, Homo sapiens
  CDR3 for beta chain variable domain of TCR clone 257868 (TRBV12-4, TRBJ2-2)
CASSLVAGTRGRTGELFF

SEQ ID NO: 515737 - protein, 13 aa, Homo sapiens
  CDR3 for alpha chain variable domain of TCR clone 257869 (TRAV8-3, TRAJ36)
CAVGATGANNLFF

SEQ ID NO: 515738 - protein, 15 aa, Homo sapiens
  CDR3 for beta chain variable domain of TCR clone 257869 (TRBV15, TRBJ1-4)
CATSRDMGSYEKLFF

SEQ ID NO: 515739 - protein, 12 aa, Homo sapiens
  CDR3 for alpha chain variable domain of TCR clone 257870 (TRAV17, TRAJ20)
CATDSNDYKLSF

SEQ ID NO: 515740 - protein, 16 aa, Homo sapiens
  CDR3 for beta chain variable domain of TCR clone 257870 (TRBV7-2, TRBJ1-2)
CASSSNPDRRGHGYTF

SEQ ID NO: 515741 - protein, 16 aa, Homo sapiens
  CDR3 for alpha chain variable domain of TCR clone 257871 (TRAV30, TRAJ24)
CGTEIVDADSWGKFQC

SEQ ID NO: 515742 - protein, 14 aa, Homo sapiens
  CDR3 for beta chain variable domain of TCR clone 257871 (TRBV7-9, TRBJ2-1)
CASSPRDSLYEQFF

SEQ ID NO: 515743 - protein, 16 aa, Homo sapiens
  CDR3 for alpha chain variable domain of TCR clone 257872 (TRAV3, TRAJ21)
CAVRDIERGNFNKFYF

SEQ ID NO: 515744 - protein, 14 aa, Homo sapiens
  CDR3 for beta chain variable domain of TCR clone 257872 (TRBV20-1, TRBJ2-3)
CSARGGTSTDTQYF

SEQ ID NO: 515745 - protein, 13 aa, Homo sapiens
  CDR3 for alpha chain variable domain of TCR clone 257873 (TRAV12-1, TRAJ7)
CVVNMRGNNRLAF

SEQ ID NO: 515746 - protein, 14 aa, Homo sapiens
  CDR3 for beta chain variable domain of TCR clone 257873 (TRBV11-2, TRBJ1-2)
CASSLYRGNYGYTF

SEQ ID NO: 515747 - protein, 17 aa, Homo sapiens
  CDR3 for alpha chain variable domain of TCR clone 257874 (TRAV1-1, TRAJ32)
CAVRVDELWWCYKQAHL

SEQ ID NO: 515748 - protein, 13 aa, Homo sapiens
  CDR3 for beta chain variable domain of TCR clone 257874 (TRBV5-4, TRBJ2-3)
CQPGAGGADTQYF

SEQ ID NO: 515749 - protein, 12 aa, Homo sapiens
  CDR3 for alpha chain variable domain of TCR clone 257875 (TRAV12-3, TRAJ17)
CAMTLTGNKLTF

SEQ ID NO: 515750 - protein, 13 aa, Homo sapiens
  CDR3 for beta chain variable domain of TCR clone 257875 (TRBV27, TRBJ2-1)
CASRTLGVGEQFV

SEQ ID NO: 515751 - protein, 14 aa, Homo sapiens
  CDR3 for alpha chain variable domain of TCR clone 257876 (TRAV12-1, TRAJ38)
RVVNDAGNNRKLIW

SEQ ID NO: 515752 - protein, 14 aa, Homo sapiens
  CDR3 for beta chain variable domain of TCR clone 257876 (TRBV19, TRBJ1-5)
CASSIVQGIQPQHF

SEQ ID NO: 515753 - protein, 15 aa, Homo sapiens
  CDR3 for alpha chain variable domain of TCR clone 257877 (TRAV29/DV5, TRAJ42)
CAAKTDGGSQGNLIF

SEQ ID NO: 515754 - protein, 13 aa, Homo sapiens
  CDR3 for beta chain variable domain of TCR clone 257877 (TRBV15, TRBJ1-6)
CATSGGLNSPLHF

SEQ ID NO: 515755 - protein, 12 aa, Homo sapiens
  CDR3 for alpha chain variable domain of TCR clone 257878 (TRAV12-1, TRAJ40)
CVFYSGTYKYIF

SEQ ID NO: 515756 - protein, 13 aa, Homo sapiens
  CDR3 for beta chain variable domain of TCR clone 257878 (TRBV7-2, TRBJ1-1)
CASNLKGAKVAFF

SEQ ID NO: 515757 - protein, 13 aa, Homo sapiens
  CDR3 for alpha chain variable domain of TCR clone 257879 (TRAV21, TRAJ10)
CAVHTGGGNKLTF

SEQ ID NO: 515758 - protein, 22 aa, Homo sapiens
  CDR3 for beta chain variable domain of TCR clone 257879 (TRBV19, TRBJ2-1)
CASSVRDRVTGTSGRIYNEQFF

SEQ ID NO: 515759 - protein, 12 aa, Homo sapiens
  CDR3 for alpha chain variable domain of TCR clone 257880 (TRAV12-3, TRAJ17)
CAMTLTGNKLTF

SEQ ID NO: 515760 - protein, 13 aa, Homo sapiens
  CDR3 for beta chain variable domain of TCR clone 257880 (TRBV7-2, TRBJ2-2)
CASSLAVTGELFF

SEQ ID NO: 515761 - protein, 13 aa, Homo sapiens
  CDR3 for alpha chain variable domain of TCR clone 257881 (TRAV36/DV7, TRAJ57)
RAVVLGGSEKLVF

SEQ ID NO: 515762 - protein, 14 aa, Homo sapiens
  CDR3 for beta chain variable domain of TCR clone 257881 (TRBV4-1, TRBJ1-2)
CASGQDGQVRGYTF

SEQ ID NO: 515763 - protein, 12 aa, Homo sapiens
  CDR3 for alpha chain variable domain of TCR clone 257882 (TRAV21, TRAJ31)
CVLAGNNARLMF

SEQ ID NO: 515764 - protein, 13 aa, Homo sapiens
  CDR3 for beta chain variable domain of TCR clone 257882 (TRBV5-5, TRBJ1-2)
CASSFWRGEDYTF

SEQ ID NO: 515765 - protein, 15 aa, Homo sapiens
  CDR3 for alpha chain variable domain of TCR clone 257883 (TRAV17, TRAJ44)
CATERGTGTASKLTF

SEQ ID NO: 515766 - protein, 15 aa, Homo sapiens
  CDR3 for beta chain variable domain of TCR clone 257883 (TRBV4-1, TRBJ2-3)
CASSQVVAGADTQYF

SEQ ID NO: 515767 - protein, 14 aa, Homo sapiens
  CDR3 for alpha chain variable domain of TCR clone 257884 (TRAV12-2, TRAJ40)
CAVKIPSSTYKYIF

SEQ ID NO: 515768 - protein, 17 aa, Homo sapiens
  CDR3 for beta chain variable domain of TCR clone 257884 (TRBV13, TRBJ2-3)
CASSLSRVAGGRNTQYF

SEQ ID NO: 515769 - protein, 14 aa, Homo sapiens
  CDR3 for alpha chain variable domain of TCR clone 257885 (TRAV12-3, TRAJ22)
CAMSLFGSARQLTF

SEQ ID NO: 515770 - protein, 11 aa, Homo sapiens
  CDR3 for beta chain variable domain of TCR clone 257885 (TRBV12-4, TRBJ2-2)
CSSSSAGELFF

SEQ ID NO: 515771 - protein, 11 aa, Homo sapiens
  CDR3 for alpha chain variable domain of TCR clone 257886 (TRAV2, TRAJ13)
CASGGYQKATF

SEQ ID NO: 515772 - protein, 20 aa, Homo sapiens
  CDR3 for beta chain variable domain of TCR clone 257886 (TRBV7-8, TRBJ2-2)
CASSHLFPGPTIHITGELFF

SEQ ID NO: 515773 - protein, 13 aa, Homo sapiens
  CDR3 for alpha chain variable domain of TCR clone 257887 (TRAV17, TRAJ9)
CATGSTGGFKTIF

SEQ ID NO: 515774 - protein, 14 aa, Homo sapiens
  CDR3 for beta chain variable domain of TCR clone 257887 (TRBV7-8, TRBJ2-7)
CASAFRGGPNEQYF

SEQ ID NO: 515775 - protein, 15 aa, Homo sapiens
  CDR3 for alpha chain variable domain of TCR clone 257888 (TRAV8-3, TRAJ45)
CASSYSGGGADGLTF

SEQ ID NO: 515776 - protein, 11 aa, Homo sapiens
  CDR3 for beta chain variable domain of TCR clone 257888 (TRBV7-9, TRBJ2-2)
CASSGFGVRTP

SEQ ID NO: 515777 - protein, 12 aa, Homo sapiens
  CDR3 for alpha chain variable domain of TCR clone 257889 (TRAV17, TRAJ20)
CATDSNDYQLSF

SEQ ID NO: 515778 - protein, 13 aa, Homo sapiens
  CDR3 for beta chain variable domain of TCR clone 257889 (TRBV7-3, TRBJ1-1)
CASSQDWGAEAFF

SEQ ID NO: 515779 - protein, 15 aa, Homo sapiens
  CDR3 for alpha chain variable domain of TCR clone 257890 (TRAV8-2, TRAJ40)
SVVLGTTSGTYKYIF

SEQ ID NO: 515780 - protein, 20 aa, Homo sapiens
  CDR3 for beta chain variable domain of TCR clone 257890 (TRBV28, TRBJ2-1)
CASTPIGRSPGLAGGNEQFL

SEQ ID NO: 515781 - protein, 15 aa, Homo sapiens
  CDR3 for alpha chain variable domain of TCR clone 257891 (TRAV34, TRAJ38)
CGADFTPGNNRKLIW

SEQ ID NO: 515782 - protein, 16 aa, Homo sapiens
  CDR3 for beta chain variable domain of TCR clone 257891 (TRBV6-1, TRBJ2-3)
CASSEVIGQGTETQYF

SEQ ID NO: 515783 - protein, 13 aa, Homo sapiens
  CDR3 for alpha chain variable domain of TCR clone 257892 (TRAV12-2, TRAJ42)
CAVKRGSQGNLIF

SEQ ID NO: 515784 - protein, 14 aa, Homo sapiens
  CDR3 for beta chain variable domain of TCR clone 257892 (TRBV25-1, TRBJ1-1)
CASTHLGGNTEAFF

SEQ ID NO: 515785 - protein, 14 aa, Homo sapiens
  CDR3 for alpha chain variable domain of TCR clone 257893 (TRAV12-2, TRAJ13)
CAVKKTGGYQKVTF

SEQ ID NO: 515786 - protein, 13 aa, Homo sapiens
  CDR3 for beta chain variable domain of TCR clone 257893 (TRBV7-9, TRBJ2-5)
CASTPVGQETQYF

SEQ ID NO: 515787 - protein, 16 aa, Homo sapiens
  CDR3 for alpha chain variable domain of TCR clone 257894 (TRAV30, TRAJ24)
CGTEIVDADSWGTFQF

SEQ ID NO: 515788 - protein, 14 aa, Homo sapiens
  CDR3 for beta chain variable domain of TCR clone 257894 (TRBV12-5, TRBJ2-5)
CASGSRTHRETQYF

SEQ ID NO: 515789 - protein, 15 aa, Homo sapiens
  CDR3 for alpha chain variable domain of TCR clone 257895 (TRAV1-2, TRAJ28)
CAVQYSGAGSYQLTF

SEQ ID NO: 515790 - protein, 14 aa, Homo sapiens
  CDR3 for beta chain variable domain of TCR clone 257895 (TRBV19, TRBJ2-7)
CASSIFAGTYEQYF

SEQ ID NO: 515791 - protein, 14 aa, Homo sapiens
  CDR3 for alpha chain variable domain of TCR clone 257896 (TRAV13-1, TRAJ44)
CAAKATGTASKLTF

SEQ ID NO: 515792 - protein, 15 aa, Homo sapiens
  CDR3 for beta chain variable domain of TCR clone 257896 (TRBV20-1, TRBJ2-7)
CSARVPAAYFYEQYF

SEQ ID NO: 515793 - protein, 14 aa, Homo sapiens
  CDR3 for alpha chain variable domain of TCR clone 257897 (TRAV9-2, TRAJ9)
CALSENTGGFKTIF

SEQ ID NO: 515794 - protein, 15 aa, Homo sapiens
  CDR3 for beta chain variable domain of TCR clone 257897 (TRBV28, TRBJ2-7)
CASSLISGGSYEQYF

SEQ ID NO: 515795 - protein, 11 aa, Homo sapiens
  CDR3 for alpha chain variable domain of TCR clone 257898 (TRAV23/DV6, TRAJ48)
CAPRWGEKLTF

SEQ ID NO: 515796 - protein, 13 aa, Homo sapiens
  CDR3 for beta chain variable domain of TCR clone 257898 (TRBV12-4, TRBJ2-5)
CASSPRTEETQYF

SEQ ID NO: 515797 - protein, 14 aa, Homo sapiens
  CDR3 for alpha chain variable domain of TCR clone 257899 (TRAV12-3, TRAJ37)
CVSEGSSNTGKLIF

SEQ ID NO: 515798 - protein, 14 aa, Homo sapiens
  CDR3 for beta chain variable domain of TCR clone 257899 (TRBV20-1, TRBJ1-1)
CSAQTRIGDTEAFF

SEQ ID NO: 515799 - protein, 14 aa, Homo sapiens
  CDR3 for alpha chain variable domain of TCR clone 257900 (TRAV12-3, TRAJ10)
SHLPLTGGGNKLTF

SEQ ID NO: 515800 - protein, 14 aa, Homo sapiens
  CDR3 for beta chain variable domain of TCR clone 257900 (TRBV5-1, TRBJ2-3)
CASSLGRDLGPQYF

SEQ ID NO: 515801 - protein, 13 aa, Homo sapiens
  CDR3 for alpha chain variable domain of TCR clone 257901 (TRAV16, TRAJ29)
CALSRRGNTPLVF

SEQ ID NO: 515802 - protein, 13 aa, Homo sapiens
  CDR3 for beta chain variable domain of TCR clone 257901 (TRBV7-9, TRBJ1-2)
CASSLKQNYGYTF

SEQ ID NO: 515803 - protein, 12 aa, Homo sapiens
  CDR3 for alpha chain variable domain of TCR clone 257902 (TRAV3, TRAJ31)
CAAQRANARLMF

SEQ ID NO: 515804 - protein, 14 aa, Homo sapiens
  CDR3 for beta chain variable domain of TCR clone 257902 (TRBV18, TRBJ2-3)
CASSGLADTDTQYF

SEQ ID NO: 515805 - protein, 17 aa, Homo sapiens
  CDR3 for alpha chain variable domain of TCR clone 257903 (TRAV4, TRAJ13)
CLVGVQGSSGGYQKVTF

SEQ ID NO: 515806 - protein, 13 aa, Homo sapiens
  CDR3 for beta chain variable domain of TCR clone 257903 (TRBV10-3, TRBJ2-7)
CASKLAVNHEQYF

SEQ ID NO: 515807 - protein, 13 aa, Homo sapiens
  CDR3 for alpha chain variable domain of TCR clone 257904 (TRAV13-1, TRAJ6)
CAASKGGSYIPTF

SEQ ID NO: 515808 - protein, 14 aa, Homo sapiens
  CDR3 for beta chain variable domain of TCR clone 257904 (TRBV7-2, TRBJ2-1)
CASSLGVGYNEQFV

SEQ ID NO: 515809 - protein, 12 aa, Homo sapiens
  CDR3 for alpha chain variable domain of TCR clone 257905 (TRAV21, TRAJ33)
CAKMDSNYQLIW

SEQ ID NO: 515810 - protein, 13 aa, Homo sapiens
  CDR3 for beta chain variable domain of TCR clone 257905 (TRBV7-3, TRBJ2-7)
CASSKRRGGEQYF

SEQ ID NO: 515811 - protein, 15 aa, Homo sapiens
  CDR3 for alpha chain variable domain of TCR clone 257906 (TRAV4, TRAJ42)
CLVGGYGGSEGNLIF

SEQ ID NO: 515812 - protein, 16 aa, Homo sapiens
  CDR3 for beta chain variable domain of TCR clone 257906 (TRBV27, TRBJ1-1)
CASSTRTGGVGTEAFF

SEQ ID NO: 515813 - protein, 14 aa, Homo sapiens
  CDR3 for alpha chain variable domain of TCR clone 257907 (TRAV12-3, TRAJ33)
CAMSEEDSNYKLIW

SEQ ID NO: 515814 - protein, 14 aa, Homo sapiens
  CDR3 for beta chain variable domain of TCR clone 257907 (TRBV3-1, TRBJ2-1)
CASSQAVYLGEQFF

SEQ ID NO: 515815 - protein, 14 aa, Homo sapiens
  CDR3 for alpha chain variable domain of TCR clone 257908 (TRAV12-3, TRAJ10)
SHLPLTGGGNKLTF

SEQ ID NO: 515816 - protein, 15 aa, Homo sapiens
  CDR3 for beta chain variable domain of TCR clone 257908 (TRBV24-1, TRBJ1-4)
CATSDPQGADEKLFF

SEQ ID NO: 515817 - protein, 14 aa, Homo sapiens
  CDR3 for alpha chain variable domain of TCR clone 257909 (TRAV29/DV5, TRAJ57)
CAARSQGESERLVF

SEQ ID NO: 515818 - protein, 15 aa, Homo sapiens
  CDR3 for beta chain variable domain of TCR clone 257909 (TRBV28, TRBJ2-4)
CAAGSGTLLMGIQYF

SEQ ID NO: 515819 - protein, 15 aa, Homo sapiens
  CDR3 for alpha chain variable domain of TCR clone 257910 (TRAV17, TRAJ57)
CATGPSQGGSEKLGF

SEQ ID NO: 515820 - protein, 16 aa, Homo sapiens
  CDR3 for beta chain variable domain of TCR clone 257910 (TRBV12-4, TRBJ1-5)
CASSRPVGGSNQAQHF

SEQ ID NO: 515821 - protein, 11 aa, Homo sapiens
  CDR3 for alpha chain variable domain of TCR clone 257911 (TRAV13-1, TRAJ11)
CAARGYSTLTF

SEQ ID NO: 515822 - protein, 15 aa, Homo sapiens
  CDR3 for beta chain variable domain of TCR clone 257911 (TRBV9, TRBJ1-6)
CASSVAGTRDSPLHV

SEQ ID NO: 515823 - protein, 10 aa, Homo sapiens
  CDR3 for alpha chain variable domain of TCR clone 257912 (TRAV30, TRAJ48)
CGIGNEKLTF

SEQ ID NO: 515824 - protein, 14 aa, Homo sapiens
  CDR3 for beta chain variable domain of TCR clone 257912 (TRBV20-1, TRBJ2-4)
CSASGRVGENIQYF

SEQ ID NO: 515825 - protein, 17 aa, Homo sapiens
  CDR3 for alpha chain variable domain of TCR clone 257913 (TRAV27, TRAJ26)
CAGARAPLDNYGPNFFF

SEQ ID NO: 515826 - protein, 15 aa, Homo sapiens
  CDR3 for beta chain variable domain of TCR clone 257913 (TRBV11-2, TRBJ2-5)
CASSPRSGGLETQYF

SEQ ID NO: 515827 - protein, 16 aa, Homo sapiens
  CDR3 for alpha chain variable domain of TCR clone 257914 (TRAV13-1, TRAJ48)
CSKYRETNFGNEKLTF

SEQ ID NO: 515828 - protein, 17 aa, Homo sapiens
  CDR3 for beta chain variable domain of TCR clone 257914 (TRBV28, TRBJ2-1)
CASSSARQALTYNEQFF

SEQ ID NO: 515829 - protein, 15 aa, Homo sapiens
  CDR3 for alpha chain variable domain of TCR clone 257915 (TRAV13-2, TRAJ45)
CAESDSGGGADGLTF

SEQ ID NO: 515830 - protein, 17 aa, Homo sapiens
  CDR3 for beta chain variable domain of TCR clone 257915 (TRBV27, TRBJ1-6)
CASSLDQLSSYNSTLHF

SEQ ID NO: 515831 - protein, 13 aa, Homo sapiens
  CDR3 for alpha chain variable domain of TCR clone 257916 (TRAV16, TRAJ10)
CAPAREDETNSPL

SEQ ID NO: 515832 - protein, 15 aa, Homo sapiens
  CDR3 for beta chain variable domain of TCR clone 257916 (TRBV6-3, TRBJ2-7)
CASSSPGTVFYEQYF

SEQ ID NO: 515833 - protein, 11 aa, Homo sapiens
  CDR3 for alpha chain variable domain of TCR clone 257917 (TRAV1-2, TRAJ20)
CAVSNDYKLSF

SEQ ID NO: 515834 - protein, 13 aa, Homo sapiens
  CDR3 for beta chain variable domain of TCR clone 257917 (TRBV7-6, TRBJ1-2)
CASSLVADYGYTF

SEQ ID NO: 515835 - protein, 14 aa, Homo sapiens
  CDR3 for alpha chain variable domain of TCR clone 257918 (TRAV1-2, TRAJ8)
CAVREDTGFKKLVF

SEQ ID NO: 515836 - protein, 15 aa, Homo sapiens
  CDR3 for beta chain variable domain of TCR clone 257918 (TRBV6-3, TRBJ2-7)
RASSSPGTVFYEQYF

SEQ ID NO: 515837 - protein, 13 aa, Homo sapiens
  CDR3 for alpha chain variable domain of TCR clone 257919 (TRAV35, TRAJ21)
CAGQLSNFNKFYF

SEQ ID NO: 515838 - protein, 11 aa, Homo sapiens
  CDR3 for beta chain variable domain of TCR clone 257919 (TRBV7-6, TRBJ2-5)
CASSAPETQYF

SEQ ID NO: 515839 - protein, 12 aa, Homo sapiens
  CDR3 for alpha chain variable domain of TCR clone 257920 (TRAV8-6, TRAJ36)
CAVSDWLGQTTS

SEQ ID NO: 515840 - protein, 14 aa, Homo sapiens
  CDR3 for beta chain variable domain of TCR clone 257920 (TRBV11-2, TRBJ2-7)
CASSLGAGAYEQYF

SEQ ID NO: 515841 - protein, 18 aa, Homo sapiens
  CDR3 for alpha chain variable domain of TCR clone 257921 (TRAV21, TRAJ53)
CAVKGGGNSGGSNYKLTF

SEQ ID NO: 515842 - protein, 12 aa, Homo sapiens
  CDR3 for beta chain variable domain of TCR clone 257921 (TRBV11-2, TRBJ2-2)
CASSLGGGELFF

SEQ ID NO: 515843 - protein, 15 aa, Homo sapiens
  CDR3 for alpha chain variable domain of TCR clone 257922 (TRAV21, TRAJ24)
CAARSSTDSWGKLQF

SEQ ID NO: 515844 - protein, 14 aa, Homo sapiens
  CDR3 for beta chain variable domain of TCR clone 257922 (TRBV19, TRBJ2-1)
CASSPGLAPNEQFF

SEQ ID NO: 515845 - protein, 14 aa, Homo sapiens
  CDR3 for alpha chain variable domain of TCR clone 257923 (TRAV12-2, TRAJ5)
CAMNRSTGRRALTF

SEQ ID NO: 515846 - protein, 15 aa, Homo sapiens
  CDR3 for beta chain variable domain of TCR clone 257923 (TRBV15, TRBJ1-5)
CATSREQGGNQPQHF

SEQ ID NO: 515847 - protein, 11 aa, Homo sapiens
  CDR3 for alpha chain variable domain of TCR clone 257924 (TRAV1-1, TRAJ23)
CAVRQGGKLIF

SEQ ID NO: 515848 - protein, 20 aa, Homo sapiens
  CDR3 for beta chain variable domain of TCR clone 257924 (TRBV7-8, TRBJ2-2)
CASSHLFPGPTINIAGELFF

SEQ ID NO: 515849 - protein, 13 aa, Homo sapiens
  CDR3 for alpha chain variable domain of TCR clone 257925 (TRAV27, TRAJ8)
SAGGPTGFQKLVF

SEQ ID NO: 515850 - protein, 15 aa, Homo sapiens
  CDR3 for beta chain variable domain of TCR clone 257925 (TRBV5-1, TRBJ2-1)
CASSPPRAPYNEQFF

SEQ ID NO: 515851 - protein, 14 aa, Homo sapiens
  CDR3 for alpha chain variable domain of TCR clone 257926 (TRAV1-2, TRAJ8)
CAVREDTGFQKLVF

SEQ ID NO: 515852 - protein, 13 aa, Homo sapiens
  CDR3 for beta chain variable domain of TCR clone 257926 (TRBV12-4, TRBJ1-2)
CASSSGLTVRSTF

SEQ ID NO: 515853 - protein, 15 aa, Homo sapiens
  CDR3 for alpha chain variable domain of TCR clone 257927 (TRAV12-2, TRAJ43)
CAFDMRFGAGTRLTV

SEQ ID NO: 515854 - protein, 21 aa, Homo sapiens
  CDR3 for beta chain variable domain of TCR clone 257927 (TRBV9, TRBJ2-5)
CASRGRLAGGPEDPVLRARHA

SEQ ID NO: 515855 - protein, 15 aa, Homo sapiens
  CDR3 for alpha chain variable domain of TCR clone 257928 (TRAV8-1, TRAJ6)
CAVNAGAGGSYIPTL

SEQ ID NO: 515856 - protein, 14 aa, Homo sapiens
  CDR3 for beta chain variable domain of TCR clone 257928 (TRBV25-1, TRBJ1-6)
CASSLSADISPLHF

SEQ ID NO: 515857 - protein, 12 aa, Homo sapiens
  CDR3 for alpha chain variable domain of TCR clone 257929 (TRAV3, TRAJ43)
CCERGRNNDMRF

SEQ ID NO: 515858 - protein, 12 aa, Homo sapiens
  CDR3 for beta chain variable domain of TCR clone 257929 (TRBV5-1, TRBJ2-7)
CASSLDSYEQYY

SEQ ID NO: 515859 - protein, 14 aa, Homo sapiens
  CDR3 for alpha chain variable domain of TCR clone 257930 (TRAV8-3, TRAJ44)
CAVGNTGTASKLTF

SEQ ID NO: 515860 - protein, 15 aa, Homo sapiens
  CDR3 for beta chain variable domain of TCR clone 257930 (TRBV11-2, TRBJ2-1)
CASSLTSGGYNEQFF

SEQ ID NO: 515861 - protein, 12 aa, Homo sapiens
  CDR3 for alpha chain variable domain of TCR clone 257931 (TRAV12-1, TRAJ40)
CVVYSGTYKYIF

SEQ ID NO: 515862 - protein, 14 aa, Homo sapiens
  CDR3 for beta chain variable domain of TCR clone 257931 (TRBV5-1, TRBJ1-1)
CASSLAVGSGEAFF

SEQ ID NO: 515863 - protein, 15 aa, Homo sapiens
  CDR3 for alpha chain variable domain of TCR clone 257932 (TRAV35, TRAJ58)
CAGRRQETSGSRLTF

SEQ ID NO: 515864 - protein, 16 aa, Homo sapiens
  CDR3 for beta chain variable domain of TCR clone 257932 (TRBV2, TRBJ2-1)
CASSANPRDWQAEQFF

SEQ ID NO: 515865 - protein, 14 aa, Homo sapiens
  CDR3 for alpha chain variable domain of TCR clone 257933 (TRAV3, TRAJ34)
CAVRARGTPTNSSF

SEQ ID NO: 515866 - protein, 15 aa, Homo sapiens
  CDR3 for beta chain variable domain of TCR clone 257933 (TRBV6-3, TRBJ2-7)
CASSSPGTVFYEQYF

SEQ ID NO: 515867 - protein, 11 aa, Homo sapiens
  CDR3 for alpha chain variable domain of TCR clone 257934 (TRAV12-3, TRAJ43)
CAMSVSNDMRF

SEQ ID NO: 515868 - protein, 13 aa, Homo sapiens
  CDR3 for beta chain variable domain of TCR clone 257934 (TRBV20-1, TRBJ1-1)
CSAPLGGGTEEVF

SEQ ID NO: 515869 - protein, 14 aa, Homo sapiens
  CDR3 for alpha chain variable domain of TCR clone 257935 (TRAV13-1, TRAJ26)
CAASSAHYGQNFVL

SEQ ID NO: 515870 - protein, 17 aa, Homo sapiens
  CDR3 for beta chain variable domain of TCR clone 257935 (TRBV25-1, TRBJ2-5)
CASSRRGGRGGQETQYL

SEQ ID NO: 515871 - protein, 14 aa, Homo sapiens
  CDR3 for alpha chain variable domain of TCR clone 257936 (TRAV13-1, TRAJ35)
CAASKGGLGNVLHC

SEQ ID NO: 515872 - protein, 15 aa, Homo sapiens
  CDR3 for beta chain variable domain of TCR clone 257936 (TRBV7-3, TRBJ2-1)
CASSLGQGPFGEQFF

SEQ ID NO: 515873 - protein, 14 aa, Homo sapiens
  CDR3 for alpha chain variable domain of TCR clone 257937 (TRAV12-3, TRAJ29)
CAMILLSGNTPLVF

SEQ ID NO: 515874 - protein, 16 aa, Homo sapiens
  CDR3 for beta chain variable domain of TCR clone 257937 (TRBV28, TRBJ2-7)
CASTSGTSGRGYEQYF

SEQ ID NO: 515875 - protein, 12 aa, Homo sapiens
  CDR3 for alpha chain variable domain of TCR clone 257938 (TRAV3, TRAJ39)
CAVIEWSNMLTF

SEQ ID NO: 515876 - protein, 14 aa, Homo sapiens
  CDR3 for beta chain variable domain of TCR clone 257938 (TRBV7-8, TRBJ2-3)
CGSSFPDGQDTQYF

SEQ ID NO: 515877 - protein, 14 aa, Homo sapiens
  CDR3 for alpha chain variable domain of TCR clone 257939 (TRAV21, TRAJ35)
CAAMPKGFGNALHC

SEQ ID NO: 515878 - protein, 12 aa, Homo sapiens
  CDR3 for beta chain variable domain of TCR clone 257939 (TRBV7-9, TRBJ2-7)
CASSIKREEQYF

SEQ ID NO: 515879 - protein, 12 aa, Homo sapiens
  CDR3 for alpha chain variable domain of TCR clone 257940 (TRAV12-3, TRAJ40)
CAMSSGTYKYIF

SEQ ID NO: 515880 - protein, 16 aa, Homo sapiens
  CDR3 for beta chain variable domain of TCR clone 257940 (TRBV7-9, TRBJ1-2)
CASSLGFSSGEDGYTF

SEQ ID NO: 515881 - protein, 11 aa, Homo sapiens
  CDR3 for alpha chain variable domain of TCR clone 257941 (TRAV21, TRAJ48)
CAVDGNEKLTF

SEQ ID NO: 515882 - protein, 16 aa, Homo sapiens
  CDR3 for beta chain variable domain of TCR clone 257941 (TRBV24-1, TRBJ2-3)
CATSDPGTGATDTQYF

SEQ ID NO: 515883 - protein, 14 aa, Homo sapiens
  CDR3 for alpha chain variable domain of TCR clone 257942 (TRAV16, TRAJ15)
CALSFNQAGTALLF

SEQ ID NO: 515884 - protein, 16 aa, Homo sapiens
  CDR3 for beta chain variable domain of TCR clone 257942 (TRBV9, TRBJ2-7)
CASSAGPDRSPYEQYF

SEQ ID NO: 515885 - protein, 13 aa, Homo sapiens
  CDR3 for alpha chain variable domain of TCR clone 257943 (TRAV2, TRAJ16)
CAVERSYGQKLLF

SEQ ID NO: 515886 - protein, 15 aa, Homo sapiens
  CDR3 for beta chain variable domain of TCR clone 257943 (TRBV20-1, TRBJ2-5)
CSAIKGQGSQETQYF

SEQ ID NO: 515887 - protein, 14 aa, Homo sapiens
  CDR3 for alpha chain variable domain of TCR clone 257944 (TRAV12-1, TRAJ30)
CVVNIGNRDDKIIF

SEQ ID NO: 515888 - protein, 17 aa, Homo sapiens
  CDR3 for beta chain variable domain of TCR clone 257944 (TRBV13, TRBJ2-3)
CASSLSRVAGGRNTQYF

SEQ ID NO: 515889 - protein, 11 aa, Homo sapiens
  CDR3 for alpha chain variable domain of TCR clone 257945 (TRAV26-1, TRAJ27)
CIDPNAGKSTF

SEQ ID NO: 515890 - protein, 18 aa, Homo sapiens
  CDR3 for beta chain variable domain of TCR clone 257945 (TRBV7-9, TRBJ2-6)
CASSFPGAGSSGANVLTF

SEQ ID NO: 515891 - protein, 14 aa, Homo sapiens
  CDR3 for alpha chain variable domain of TCR clone 257946 (TRAV12-2, TRAJ13)
CAVKKTGGYQKVTF

SEQ ID NO: 515892 - protein, 15 aa, Homo sapiens
  CDR3 for beta chain variable domain of TCR clone 257946 (TRBV2, TRBJ2-1)
CASSVTSEGTDEQFF

SEQ ID NO: 515893 - protein, 12 aa, Homo sapiens
  CDR3 for alpha chain variable domain of TCR clone 257947 (TRAV3, TRAJ27)
CAVRDKVGKSTF

SEQ ID NO: 515894 - protein, 14 aa, Homo sapiens
  CDR3 for beta chain variable domain of TCR clone 257947 (TRBV5-1, TRBJ1-2)
CASSVDSTNYGYTF

SEQ ID NO: 515895 - protein, 19 aa, Homo sapiens
  CDR3 for alpha chain variable domain of TCR clone 257948 (TRAV26-1, TRAJ38)
CIADNAGNNHIQNPDPAVY

SEQ ID NO: 515896 - protein, 13 aa, Homo sapiens
  CDR3 for beta chain variable domain of TCR clone 257948 (TRBV20-1, TRBJ1-1)
SSARGGGNTEAFF

SEQ ID NO: 515897 - protein, 12 aa, Homo sapiens
  CDR3 for alpha chain variable domain of TCR clone 257949 (TRAV21, TRAJ30)
CAVMNRDDKIIF

SEQ ID NO: 515898 - protein, 17 aa, Homo sapiens
  CDR3 for beta chain variable domain of TCR clone 257949 (TRBV5-1, TRBJ1-1)
CASRPIRTGGVNTEDFF

SEQ ID NO: 515899 - protein, 16 aa, Homo sapiens
  CDR3 for alpha chain variable domain of TCR clone 257950 (TRAV16, TRAJ42)
CARKMNYGGSQVNLIF

SEQ ID NO: 515900 - protein, 13 aa, Homo sapiens
  CDR3 for beta chain variable domain of TCR clone 257950 (TRBV20-1, TRBJ2-7)
CSASPPSSYEQYF

SEQ ID NO: 515901 - protein, 15 aa, Homo sapiens
  CDR3 for alpha chain variable domain of TCR clone 257951 (TRAV8-6, TRAJ9)
CAVSDRNTGGFKTIF

SEQ ID NO: 515902 - protein, 16 aa, Homo sapiens
  CDR3 for beta chain variable domain of TCR clone 257951 (TRBV19, TRBJ2-3)
CASSPEWDRGTDTQYF

SEQ ID NO: 515903 - protein, 11 aa, Homo sapiens
  CDR3 for alpha chain variable domain of TCR clone 257952 (TRAV2, TRAJ33)
CAVDSNYQLIW

SEQ ID NO: 515904 - protein, 16 aa, Homo sapiens
  CDR3 for beta chain variable domain of TCR clone 257952 (TRBV10-3, TRBJ2-7)
CAISADFADRPYEQYF

SEQ ID NO: 515905 - protein, 18 aa, Homo sapiens
  CDR3 for alpha chain variable domain of TCR clone 257953 (TRAV21, TRAJ52)
CAVRPSPAGGTSYGKLTL

SEQ ID NO: 515906 - protein, 14 aa, Homo sapiens
  CDR3 for beta chain variable domain of TCR clone 257953 (TRBV19, TRBJ1-5)
CASSLGPGGEPQHF

SEQ ID NO: 515907 - protein, 11 aa, Homo sapiens
  CDR3 for alpha chain variable domain of TCR clone 257954 (TRAV4, TRAJ31)
CLVGDNARLMF

SEQ ID NO: 515908 - protein, 14 aa, Homo sapiens
  CDR3 for beta chain variable domain of TCR clone 257954 (TRBV7-9, TRBJ2-3)
CASSSQGVRDTQYF

SEQ ID NO: 515909 - protein, 14 aa, Homo sapiens
  CDR3 for alpha chain variable domain of TCR clone 257955 (TRAV12-2, TRAJ11)
CAVEGGSGYSTLTF

SEQ ID NO: 515910 - protein, 13 aa, Homo sapiens
  CDR3 for beta chain variable domain of TCR clone 257955 (TRBV10-2, TRBJ2-6)
CASKSAGANVLTF

SEQ ID NO: 515911 - protein, 12 aa, Homo sapiens
  CDR3 for alpha chain variable domain of TCR clone 257956 (TRAV35, TRAJ49)
CAGWNTGNQFYF

SEQ ID NO: 515912 - protein, 11 aa, Homo sapiens
  CDR3 for beta chain variable domain of TCR clone 257956 (TRBV5-1, TRBJ2-2)
CASSLGHHEHR

SEQ ID NO: 515913 - protein, 13 aa, Homo sapiens
  CDR3 for alpha chain variable domain of TCR clone 257957 (TRAV21, TRAJ27)
CAARPGNAGKLTF

SEQ ID NO: 515914 - protein, 12 aa, Homo sapiens
  CDR3 for beta chain variable domain of TCR clone 257957 (TRBV6-5, TRBJ2-1)
CASRTETAEQFF

SEQ ID NO: 515915 - protein, 16 aa, Homo sapiens
  CDR3 for alpha chain variable domain of TCR clone 257958 (TRAV3, TRAJ42)
CAVRDIEGGSQGNLIL

SEQ ID NO: 515916 - protein, 14 aa, Homo sapiens
  CDR3 for beta chain variable domain of TCR clone 257958 (TRBV18, TRBJ1-1)
CASSPPTGRTEAFF

SEQ ID NO: 515917 - protein, 11 aa, Homo sapiens
  CDR3 for alpha chain variable domain of TCR clone 257959 (TRAV27, TRAJ40)
SLTSGTYKYIF

SEQ ID NO: 515918 - protein, 13 aa, Homo sapiens
  CDR3 for beta chain variable domain of TCR clone 257959 (TRBV2, TRBJ2-5)
CASGSPYQETQYF

SEQ ID NO: 515919 - protein, 15 aa, Homo sapiens
  CDR3 for alpha chain variable domain of TCR clone 257960 (TRAV3, TRAJ32)
CSVSSYGGATNKLIF

SEQ ID NO: 515920 - protein, 16 aa, Homo sapiens
  CDR3 for beta chain variable domain of TCR clone 257960 (TRBV5-1, TRBJ2-5)
CASSLSLAGAQETQYF

SEQ ID NO: 515921 - protein, 13 aa, Homo sapiens
  CDR3 for alpha chain variable domain of TCR clone 257961 (TRAV21, TRAJ10)
CAVRPGGGNKLTF

SEQ ID NO: 515922 - protein, 14 aa, Homo sapiens
  CDR3 for beta chain variable domain of TCR clone 257961 (TRBV5-4, TRBJ2-7)
WASSADAGAYEQYF

SEQ ID NO: 515923 - protein, 15 aa, Homo sapiens
  CDR3 for alpha chain variable domain of TCR clone 257962 (TRAV20, TRAJ43)
CAVQAGKSSNNDMRF

SEQ ID NO: 515924 - protein, 15 aa, Homo sapiens
  CDR3 for beta chain variable domain of TCR clone 257962 (TRBV6-5, TRBJ2-1)
CASSYDAGAGNEQFF

SEQ ID NO: 515925 - protein, 11 aa, Homo sapiens
  CDR3 for alpha chain variable domain of TCR clone 257963 (TRAV12-3, TRAJ49)
CAANTGNQFYF

SEQ ID NO: 515926 - protein, 13 aa, Homo sapiens
  CDR3 for beta chain variable domain of TCR clone 257963 (TRBV7-3, TRBJ1-1)
CASSQDWGAEAFF

SEQ ID NO: 515927 - protein, 15 aa, Homo sapiens
  CDR3 for alpha chain variable domain of TCR clone 257964 (TRAV1-2, TRAJ12)
CAVIPEVDSSYKLIF

SEQ ID NO: 515928 - protein, 15 aa, Homo sapiens
  CDR3 for beta chain variable domain of TCR clone 257964 (TRBV7-2, TRBJ2-1)
CASSSGLAGGNEQFF

SEQ ID NO: 515929 - protein, 16 aa, Homo sapiens
  CDR3 for alpha chain variable domain of TCR clone 257965 (TRAV12-3, TRAJ10)
CAMKKGITGGGNKLTF

SEQ ID NO: 515930 - protein, 19 aa, Homo sapiens
  CDR3 for beta chain variable domain of TCR clone 257965 (TRBV7-3, TRBJ1-2)
CASSFPQGNDGELWLHLRF

SEQ ID NO: 515931 - protein, 17 aa, Homo sapiens
  CDR3 for alpha chain variable domain of TCR clone 257966 (TRAV8-6, TRAJ8)
CAVKEGIENTGLQKLVF

SEQ ID NO: 515932 - protein, 12 aa, Homo sapiens
  CDR3 for beta chain variable domain of TCR clone 257966 (TRBV19, TRBJ1-4)
CASKDWPGGLCF

SEQ ID NO: 515933 - protein, 13 aa, Homo sapiens
  CDR3 for alpha chain variable domain of TCR clone 257967 (TRAV20, TRAJ56)
CAGQAGANSKLTF

SEQ ID NO: 515934 - protein, 14 aa, Homo sapiens
  CDR3 for beta chain variable domain of TCR clone 257967 (TRBV28, TRBJ1-1)
CASSPRTRWAEAFF

SEQ ID NO: 515935 - protein, 16 aa, Homo sapiens
  CDR3 for alpha chain variable domain of TCR clone 257968 (TRAV23/DV6, TRAJ57)
CSKLYPFSCGSEKLVF

SEQ ID NO: 515936 - protein, 14 aa, Homo sapiens
  CDR3 for beta chain variable domain of TCR clone 257968 (TRBV25-1, TRBJ1-1)
CASTHLGGNTEAFF

SEQ ID NO: 515937 - protein, 10 aa, Homo sapiens
  CDR3 for alpha chain variable domain of TCR clone 257969 (TRAV13-2, TRAJ49)
CADTGNQFNF

SEQ ID NO: 515938 - protein, 13 aa, Homo sapiens
  CDR3 for beta chain variable domain of TCR clone 257969 (TRBV10-3, TRBJ1-2)
CAISERDSYGYTF

SEQ ID NO: 515939 - protein, 13 aa, Homo sapiens
  CDR3 for alpha chain variable domain of TCR clone 257970 (TRAV21, TRAJ27)
CAARPGNAGKSAF

SEQ ID NO: 515940 - protein, 14 aa, Homo sapiens
  CDR3 for beta chain variable domain of TCR clone 257970 (TRBV4-1, TRBJ1-3)
CASSQVTGLNTIYF

SEQ ID NO: 515941 - protein, 14 aa, Homo sapiens
  CDR3 for alpha chain variable domain of TCR clone 257971 (TRAV27, TRAJ50)
AGVGRGTSYDKVIF

SEQ ID NO: 515942 - protein, 14 aa, Homo sapiens
  CDR3 for beta chain variable domain of TCR clone 257971 (TRBV7-2, TRBJ1-1)
CASSFYDLNTEAFF

SEQ ID NO: 515943 - protein, 18 aa, Homo sapiens
  CDR3 for alpha chain variable domain of TCR clone 257972 (TRAV26-2, TRAJ54)
CILRDVEVGIQGAQKLVF

SEQ ID NO: 515944 - protein, 13 aa, Homo sapiens
  CDR3 for beta chain variable domain of TCR clone 257972 (TRBV5-1, TRBJ2-7)
CASSLEVGSGQYF

SEQ ID NO: 515945 - protein, 11 aa, Homo sapiens
  CDR3 for alpha chain variable domain of TCR clone 257973 (TRAV12-2, TRAJ39)
CALNNMLTFGG

SEQ ID NO: 515946 - protein, 16 aa, Homo sapiens
  CDR3 for beta chain variable domain of TCR clone 257973 (TRBV9, TRBJ2-7)
CASSAGPDRSPYEQYF

SEQ ID NO: 515947 - protein, 15 aa, Homo sapiens
  CDR3 for alpha chain variable domain of TCR clone 257974 (TRAV13-1, TRAJ48)
CAASTPVGGDEKLTF

SEQ ID NO: 515948 - protein, 15 aa, Homo sapiens
  CDR3 for beta chain variable domain of TCR clone 257974 (TRBV2, TRBJ2-1)
CASRESGGAYNEQFF

SEQ ID NO: 515949 - protein, 14 aa, Homo sapiens
  CDR3 for alpha chain variable domain of TCR clone 257975 (TRAV26-1, TRAJ38)
CIADNAGNNRKLTW

SEQ ID NO: 515950 - protein, 14 aa, Homo sapiens
  CDR3 for beta chain variable domain of TCR clone 257975 (TRBV12-5, TRBJ2-5)
CASGSRTHQETQYF

SEQ ID NO: 515951 - protein, 14 aa, Homo sapiens
  CDR3 for alpha chain variable domain of TCR clone 257976 (TRAV12-2, TRAJ40)
CAVKIPSGTYKYIF

SEQ ID NO: 515952 - protein, 14 aa, Homo sapiens
  CDR3 for beta chain variable domain of TCR clone 257976 (TRBV20-1, TRBJ2-5)
CSARDGRAGETQYF

SEQ ID NO: 515953 - protein, 12 aa, Homo sapiens
  CDR3 for alpha chain variable domain of TCR clone 257977 (TRAV13-2, TRAJ8)
CAPWLGFQKLVF

SEQ ID NO: 515954 - protein, 15 aa, Homo sapiens
  CDR3 for beta chain variable domain of TCR clone 257977 (TRBV5-1, TRBJ2-7)
CASSLAPSGGYEQYF

SEQ ID NO: 515955 - protein, 14 aa, Homo sapiens
  CDR3 for alpha chain variable domain of TCR clone 257978 (TRAV21, TRAJ45)
CAVSSGGGADGLTF

SEQ ID NO: 515956 - protein, 15 aa, Homo sapiens
  CDR3 for beta chain variable domain of TCR clone 257978 (TRBV19, TRBJ1-5)
CASSIVWADNQPQHF

SEQ ID NO: 515957 - protein, 14 aa, Homo sapiens
  CDR3 for alpha chain variable domain of TCR clone 257979 (TRAV12-2, TRAJ13)
CAVKKTGGYQKVTF

SEQ ID NO: 515958 - protein, 15 aa, Homo sapiens
  CDR3 for beta chain variable domain of TCR clone 257979 (TRBV27, TRBJ2-1)
CASSNGGGSYNEQLF

SEQ ID NO: 515959 - protein, 17 aa, Homo sapiens
  CDR3 for alpha chain variable domain of TCR clone 257980 (TRAV3, TRAJ38)
CAVRDCLNAGNNRKLIW

SEQ ID NO: 515960 - protein, 13 aa, Homo sapiens
  CDR3 for beta chain variable domain of TCR clone 257980 (TRBV7-2, TRBJ1-5)
CASSFARNQPQHF

SEQ ID NO: 515961 - protein, 14 aa, Homo sapiens
  CDR3 for alpha chain variable domain of TCR clone 257981 (TRAV1-2, TRAJ16)
CAVNRFSDGQKLLF

SEQ ID NO: 515962 - protein, 15 aa, Homo sapiens
  CDR3 for beta chain variable domain of TCR clone 257981 (TRBV19, TRBJ1-2)
CASSTKTDTNYGYTF

SEQ ID NO: 515963 - protein, 11 aa, Homo sapiens
  CDR3 for alpha chain variable domain of TCR clone 257982 (TRAV2, TRAJ33)
CAVDSNYQLIW

SEQ ID NO: 515964 - protein, 14 aa, Homo sapiens
  CDR3 for beta chain variable domain of TCR clone 257982 (TRBV28, TRBJ1-1)
CASKTGILNTEAFF

SEQ ID NO: 515965 - protein, 13 aa, Homo sapiens
  CDR3 for alpha chain variable domain of TCR clone 257983 (TRAV21, TRAJ27)
CAQWGGNAGKSTF

SEQ ID NO: 515966 - protein, 14 aa, Homo sapiens
  CDR3 for beta chain variable domain of TCR clone 257983 (TRBV2, TRBJ2-3)
CAVGGTISTDTQYV

SEQ ID NO: 515967 - protein, 15 aa, Homo sapiens
  CDR3 for alpha chain variable domain of TCR clone 257984 (TRAV3, TRAJ20)
CAVRDINLSDYKLSF

SEQ ID NO: 515968 - protein, 18 aa, Homo sapiens
  CDR3 for beta chain variable domain of TCR clone 257984 (TRBV20-1, TRBJ2-5)
CSQTGDSGRLGGKETQYF

SEQ ID NO: 515969 - protein, 19 aa, Homo sapiens
  CDR3 for alpha chain variable domain of TCR clone 257985 (TRAV1-2, TRAJ26)
CLLPLCCERPDNYVQNFVL

SEQ ID NO: 515970 - protein, 11 aa, Homo sapiens
  CDR3 for beta chain variable domain of TCR clone 257985 (TRBV29-1, TRBJ2-5)
CSEDRTGTQYF

SEQ ID NO: 515971 - protein, 16 aa, Homo sapiens
  CDR3 for alpha chain variable domain of TCR clone 257986 (TRAV12-2, TRAJ13)
CAVKKTGGYQKVTLEL

SEQ ID NO: 515972 - protein, 16 aa, Homo sapiens
  CDR3 for beta chain variable domain of TCR clone 257986 (TRBV29-1, TRBJ2-7)
CSVEVVGTSGSYEQYF

SEQ ID NO: 515973 - protein, 11 aa, Homo sapiens
  CDR3 for alpha chain variable domain of TCR clone 257987 (TRAV8-3, TRAJ18)
CAVGGRQRLNP

SEQ ID NO: 515974 - protein, 12 aa, Homo sapiens
  CDR3 for beta chain variable domain of TCR clone 257987 (TRBV28, TRBJ2-6)
CAIQAGANALTF

SEQ ID NO: 515975 - protein, 15 aa, Homo sapiens
  CDR3 for alpha chain variable domain of TCR clone 257988 (TRAV27, TRAJ38)
CAARRNAGNNRKLIW

SEQ ID NO: 515976 - protein, 14 aa, Homo sapiens
  CDR3 for beta chain variable domain of TCR clone 257988 (TRBV7-3, TRBJ2-2)
CASSSGGYTGELFF

SEQ ID NO: 515977 - protein, 14 aa, Homo sapiens
  CDR3 for alpha chain variable domain of TCR clone 257989 (TRAV16, TRAJ33)
CALSAMDSNYKLIW

SEQ ID NO: 515978 - protein, 17 aa, Homo sapiens
  CDR3 for beta chain variable domain of TCR clone 257989 (TRBV25-1, TRBJ2-7)
CASSDARVVFSSYEQYF

SEQ ID NO: 515979 - protein, 15 aa, Homo sapiens
  CDR3 for alpha chain variable domain of TCR clone 257990 (TRAV27, TRAJ38)
CAARRNAGNNRKLIW

SEQ ID NO: 515980 - protein, 15 aa, Homo sapiens
  CDR3 for beta chain variable domain of TCR clone 257990 (TRBV6-3, TRBJ2-2)
CASSFLATLTGELFF

SEQ ID NO: 515981 - protein, 14 aa, Homo sapiens
  CDR3 for alpha chain variable domain of TCR clone 257991 (TRAV26-1, TRAJ15)
CIEAGNQAGTALII

SEQ ID NO: 515982 - protein, 16 aa, Homo sapiens
  CDR3 for beta chain variable domain of TCR clone 257991 (TRBV27, TRBJ2-7)
CASSWLGGRGSYEQYF

SEQ ID NO: 515983 - protein, 14 aa, Homo sapiens
  CDR3 for alpha chain variable domain of TCR clone 257992 (TRAV26-1, TRAJ38)
CIADNAGNNRKLLW

SEQ ID NO: 515984 - protein, 13 aa, Homo sapiens
  CDR3 for beta chain variable domain of TCR clone 257992 (TRBV20-1, TRBJ1-1)
CGARGGGNTDAFF

SEQ ID NO: 515985 - protein, 15 aa, Homo sapiens
  CDR3 for alpha chain variable domain of TCR clone 257993 (TRAV38-1, TRAJ37)
RAFIFGSGNTGKLIF

SEQ ID NO: 515986 - protein, 12 aa, Homo sapiens
  CDR3 for beta chain variable domain of TCR clone 257993 (TRBV7-9, TRBJ2-7)
CASSLEGYEQYF

SEQ ID NO: 515987 - protein, 14 aa, Homo sapiens
  CDR3 for alpha chain variable domain of TCR clone 257994 (TRAV13-2, TRAJ17)
CAENSKAAGNKLTF

SEQ ID NO: 515988 - protein, 12 aa, Homo sapiens
  CDR3 for beta chain variable domain of TCR clone 257994 (TRBV12-4, TRBJ2-1)
CASSLQGSEQFF

SEQ ID NO: 515989 - protein, 13 aa, Homo sapiens
  CDR3 for alpha chain variable domain of TCR clone 257995 (TRAV27, TRAJ45)
CMSSGGGADGLTF

SEQ ID NO: 515990 - protein, 10 aa, Homo sapiens
  CDR3 for beta chain variable domain of TCR clone 257995 (TRBV11-2, TRBJ2-1)
PGVEYNEQFF

SEQ ID NO: 515991 - protein, 13 aa, Homo sapiens
  CDR3 for alpha chain variable domain of TCR clone 257996 (TRAV1-1, TRAJ9)
CAAKNTGGFKTIF

SEQ ID NO: 515992 - protein, 14 aa, Homo sapiens
  CDR3 for beta chain variable domain of TCR clone 257996 (TRBV7-3, TRBJ2-1)
CASSLAGRTNEQFF

SEQ ID NO: 515993 - protein, 12 aa, Homo sapiens
  CDR3 for alpha chain variable domain of TCR clone 257997 (TRAV13-1, TRAJ21)
CAAKEGFNKFYF

SEQ ID NO: 515994 - protein, 14 aa, Homo sapiens
  CDR3 for beta chain variable domain of TCR clone 257997 (TRBV20-1, TRBJ2-1)
CSARTMSSYNEQFF

SEQ ID NO: 515995 - protein, 12 aa, Homo sapiens
  CDR3 for alpha chain variable domain of TCR clone 257998 (TRAV12-3, TRAJ17)
YAMTLTGNKLTF

SEQ ID NO: 515996 - protein, 20 aa, Homo sapiens
  CDR3 for beta chain variable domain of TCR clone 257998 (TRBV7-8, TRBJ2-2)
CASSHLFPGPTIHITGELFF

SEQ ID NO: 515997 - protein, 14 aa, Homo sapiens
  CDR3 for alpha chain variable domain of TCR clone 257999 (TRAV12-2, TRAJ11)
CAVEGGSGYSTLTF

SEQ ID NO: 515998 - protein, 14 aa, Homo sapiens
  CDR3 for beta chain variable domain of TCR clone 257999 (TRBV7-9, TRBJ1-1)
CASTPLQSYTEAFF

SEQ ID NO: 515999 - protein, 14 aa, Homo sapiens
  CDR3 for alpha chain variable domain of TCR clone 258000 (TRAV1-2, TRAJ8)
CAVREDTGFQKLVF

SEQ ID NO: 516000 - protein, 16 aa, Homo sapiens
  CDR3 for beta chain variable domain of TCR clone 258000 (TRBV4-2, TRBJ2-7)
CASSQEELAGTYEQYF

SEQ ID NO: 516001 - protein, 17 aa, Homo sapiens
  CDR3 for alpha chain variable domain of TCR clone 258001 (TRAV3, TRAJ6)
CAVSRRTDTGGSYIPTF

SEQ ID NO: 516002 - protein, 17 aa, Homo sapiens
  CDR3 for beta chain variable domain of TCR clone 258001 (TRBV7-2, TRBJ2-3)
CQQLRNEPGPEADTQYF

SEQ ID NO: 516003 - protein, 12 aa, Homo sapiens
  CDR3 for alpha chain variable domain of TCR clone 258002 (TRAV1-1, TRAJ39)
CAVPVVGNMLTF

SEQ ID NO: 516004 - protein, 15 aa, Homo sapiens
  CDR3 for beta chain variable domain of TCR clone 258002 (TRBV19, TRBJ1-6)
CASSTQGGVGSPLHF

SEQ ID NO: 516005 - protein, 11 aa, Homo sapiens
  CDR3 for alpha chain variable domain of TCR clone 258003 (TRAV21, TRAJ34)
CAVTNTDKLIF

SEQ ID NO: 516006 - protein, 17 aa, Homo sapiens
  CDR3 for beta chain variable domain of TCR clone 258003 (TRBV20-1, TRBJ2-1)
CSATSPSGGPPTMSSSS

SEQ ID NO: 516007 - protein, 12 aa, Homo sapiens
  CDR3 for alpha chain variable domain of TCR clone 258004 (TRAV35, TRAJ49)
CAGWNTGNQFYF

SEQ ID NO: 516008 - protein, 16 aa, Homo sapiens
  CDR3 for beta chain variable domain of TCR clone 258004 (TRBV5-1, TRBJ2-2)
CASSLWDTTKTGELFF

SEQ ID NO: 516009 - protein, 14 aa, Homo sapiens
  CDR3 for alpha chain variable domain of TCR clone 258005 (TRAV4, TRAJ17)
CLVGDMAAGTKLTF

SEQ ID NO: 516010 - protein, 14 aa, Homo sapiens
  CDR3 for beta chain variable domain of TCR clone 258005 (TRBV7-6, TRBJ2-3)
CASSLGTVTDTQYF

SEQ ID NO: 516011 - protein, 17 aa, Homo sapiens
  CDR3 for alpha chain variable domain of TCR clone 258006 (TRAV3, TRAJ6)
CAVRDGPRAGGSYIPTF

SEQ ID NO: 516012 - protein, 14 aa, Homo sapiens
  CDR3 for beta chain variable domain of TCR clone 258006 (TRBV7-2, TRBJ2-7)
CARSTKTSFYEQYF

SEQ ID NO: 516013 - protein, 15 aa, Homo sapiens
  CDR3 for alpha chain variable domain of TCR clone 258007 (TRAV8-3, TRAJ40)
CAAPSMGSGTYKYIF

SEQ ID NO: 516014 - protein, 16 aa, Homo sapiens
  CDR3 for beta chain variable domain of TCR clone 258007 (TRBV7-3, TRBJ2-3)
CASSLSGYRPEDTQYF

SEQ ID NO: 516015 - protein, 14 aa, Homo sapiens
  CDR3 for alpha chain variable domain of TCR clone 258008 (TRAV17, TRAJ4)
CATAPLGGYNKLIF

SEQ ID NO: 516016 - protein, 13 aa, Homo sapiens
  CDR3 for beta chain variable domain of TCR clone 258008 (TRBV12-4, TRBJ1-3)
CASSLASGNTLYF

SEQ ID NO: 516017 - protein, 14 aa, Homo sapiens
  CDR3 for alpha chain variable domain of TCR clone 258009 (TRAV1-2, TRAJ16)
CAVNRFSDGPKLLF

SEQ ID NO: 516018 - protein, 15 aa, Homo sapiens
  CDR3 for beta chain variable domain of TCR clone 258009 (TRBV12-5, TRBJ2-2)
CASGRLGGNTGELFF

SEQ ID NO: 516019 - protein, 12 aa, Homo sapiens
  CDR3 for alpha chain variable domain of TCR clone 258010 (TRAV12-3, TRAJ17)
CAMTLTGNKLTL

SEQ ID NO: 516020 - protein, 15 aa, Homo sapiens
  CDR3 for beta chain variable domain of TCR clone 258010 (TRBV20-1, TRBJ2-7)
CSARDRVSGMGEQYF

SEQ ID NO: 516021 - protein, 16 aa, Homo sapiens
  CDR3 for alpha chain variable domain of TCR clone 258011 (TRAV3, TRAJ10)
CAVRDMRAGGGNKLPF

SEQ ID NO: 516022 - protein, 15 aa, Homo sapiens
  CDR3 for beta chain variable domain of TCR clone 258011 (TRBV20-1, TRBJ2-1)
CSASSAGSSYNEQFF

SEQ ID NO: 516023 - protein, 16 aa, Homo sapiens
  CDR3 for alpha chain variable domain of TCR clone 258012 (TRAV30, TRAJ24)
CGTEIVDADSWGKFQF

SEQ ID NO: 516024 - protein, 18 aa, Homo sapiens
  CDR3 for beta chain variable domain of TCR clone 258012 (TRBV6-6, TRBJ1-3)
CASSYSKWDSISGNTIYF

SEQ ID NO: 516025 - protein, 16 aa, Homo sapiens
  CDR3 for alpha chain variable domain of TCR clone 258013 (TRAV3, TRAJ37)
CAVRPHGSGTTGKLIF

SEQ ID NO: 516026 - protein, 13 aa, Homo sapiens
  CDR3 for beta chain variable domain of TCR clone 258013 (TRBV2, TRBJ1-5)
CASGTGGYQPQHF

SEQ ID NO: 516027 - protein, 14 aa, Homo sapiens
  CDR3 for alpha chain variable domain of TCR clone 258014 (TRAV8-3, TRAJ4)
CAVGASGGYNKLIF

SEQ ID NO: 516028 - protein, 13 aa, Homo sapiens
  CDR3 for beta chain variable domain of TCR clone 258014 (TRBV18, TRBJ2-5)
CASSLQGQETQYI

SEQ ID NO: 516029 - protein, 23 aa, Homo sapiens
  CDR3 for alpha chain variable domain of TCR clone 258015 (TRAV36/DV7, TRAJ45)
SQPPRPETRPSTPQGEEVHGLTF

SEQ ID NO: 516030 - protein, 13 aa, Homo sapiens
  CDR3 for beta chain variable domain of TCR clone 258015 (TRBV28, TRBJ2-7)
CASSPSGTYEQYF

SEQ ID NO: 516031 - protein, 13 aa, Homo sapiens
  CDR3 for alpha chain variable domain of TCR clone 258016 (TRAV27, TRAJ11)
CSGGGSGYSTLTF

SEQ ID NO: 516032 - protein, 15 aa, Homo sapiens
  CDR3 for beta chain variable domain of TCR clone 258016 (TRBV5-1, TRBJ1-1)
CASSLGQGRFAEAFF

SEQ ID NO: 516033 - protein, 11 aa, Homo sapiens
  CDR3 for alpha chain variable domain of TCR clone 258017 (TRAV2, TRAJ21)
CAVFNFNIFYF

SEQ ID NO: 516034 - protein, 14 aa, Homo sapiens
  CDR3 for beta chain variable domain of TCR clone 258017 (TRBV15, TRBJ2-3)
CATRSGTSTDTQYF

SEQ ID NO: 516035 - protein, 15 aa, Homo sapiens
  CDR3 for alpha chain variable domain of TCR clone 258018 (TRAV34, TRAJ38)
CGADFTPGNNRTLIW

SEQ ID NO: 516036 - protein, 16 aa, Homo sapiens
  CDR3 for beta chain variable domain of TCR clone 258018 (TRBV12-5, TRBJ2-5)
CASGPRTSGNQETQYC

SEQ ID NO: 516037 - protein, 13 aa, Homo sapiens
  CDR3 for alpha chain variable domain of TCR clone 258019 (TRAV20, TRAJ48)
CAVQGVGNEKLTF

SEQ ID NO: 516038 - protein, 14 aa, Homo sapiens
  CDR3 for beta chain variable domain of TCR clone 258019 (TRBV27, TRBJ2-7)
CANSFRDGPYEQYF

SEQ ID NO: 516039 - protein, 17 aa, Homo sapiens
  CDR3 for alpha chain variable domain of TCR clone 258020 (TRAV3, TRAJ42)
CAVRDRAYGGSQGNLIF

SEQ ID NO: 516040 - protein, 15 aa, Homo sapiens
  CDR3 for beta chain variable domain of TCR clone 258020 (TRBV27, TRBJ1-6)
CASSFDRGLGSPLHF

SEQ ID NO: 516041 - protein, 14 aa, Homo sapiens
  CDR3 for alpha chain variable domain of TCR clone 258021 (TRAV16, TRAJ44)
CALSTTGTASKLTF

SEQ ID NO: 516042 - protein, 14 aa, Homo sapiens
  CDR3 for beta chain variable domain of TCR clone 258021 (TRBV20-1, TRBJ2-7)
CRAISREASYEQYF

SEQ ID NO: 516043 - protein, 17 aa, Homo sapiens
  CDR3 for alpha chain variable domain of TCR clone 258022 (TRAV12-1, TRAJ42)
CVVMRMNYGGSQGNLTF

SEQ ID NO: 516044 - protein, 13 aa, Homo sapiens
  CDR3 for beta chain variable domain of TCR clone 258022 (TRBV7-2, TRBJ1-1)
CASSLARPAEAFF

SEQ ID NO: 516045 - protein, 14 aa, Homo sapiens
  CDR3 for alpha chain variable domain of TCR clone 258023 (TRAV8-6, TRAJ5)
CAVSVDTGRRALTF

SEQ ID NO: 516046 - protein, 22 aa, Homo sapiens
  CDR3 for beta chain variable domain of TCR clone 258023 (TRBV6-1, TRBJ1-3)
CASVQGGGWKHHIFWRGKLAHC

SEQ ID NO: 516047 - protein, 16 aa, Homo sapiens
  CDR3 for alpha chain variable domain of TCR clone 258024 (TRAV8-3, TRAJ44)
CAVGPLNTCTASKLTF

SEQ ID NO: 516048 - protein, 18 aa, Homo sapiens
  CDR3 for beta chain variable domain of TCR clone 258024 (TRBV3-1, TRBJ2-1)
CASSQDLPGRPLFDEQFF

SEQ ID NO: 516049 - protein, 14 aa, Homo sapiens
  CDR3 for alpha chain variable domain of TCR clone 258025 (TRAV17, TRAJ9)
CATDENTGGFKTIF

SEQ ID NO: 516050 - protein, 15 aa, Homo sapiens
  CDR3 for beta chain variable domain of TCR clone 258025 (TRBV6-3, TRBJ2-7)
CASSSPGTVFYEQYF

SEQ ID NO: 516051 - protein, 13 aa, Homo sapiens
  CDR3 for alpha chain variable domain of TCR clone 258026 (TRAV17, TRAJ9)
CATDYTGGFKTIF

SEQ ID NO: 516052 - protein, 16 aa, Homo sapiens
  CDR3 for beta chain variable domain of TCR clone 258026 (TRBV20-1, TRBJ2-5)
CSARDSSGGLGETQYF

SEQ ID NO: 516053 - protein, 17 aa, Homo sapiens
  CDR3 for alpha chain variable domain of TCR clone 258027 (TRAV17, TRAJ28)
CATDPRRGGAGSYQLTY

SEQ ID NO: 516054 - protein, 16 aa, Homo sapiens
  CDR3 for beta chain variable domain of TCR clone 258027 (TRBV25-1, TRBJ1-1)
CASSGDRDRGRIEAFF

SEQ ID NO: 516055 - protein, 14 aa, Homo sapiens
  CDR3 for alpha chain variable domain of TCR clone 258028 (TRAV2, TRAJ29)
CAVESYSGNTHLDF

SEQ ID NO: 516056 - protein, 15 aa, Homo sapiens
  CDR3 for beta chain variable domain of TCR clone 258028 (TRBV19, TRBJ2-5)
CASSIARARGETQYF

SEQ ID NO: 516057 - protein, 17 aa, Homo sapiens
  CDR3 for alpha chain variable domain of TCR clone 258029 (TRAV13-2, TRAJ42)
CAEKGKNYGGSQGNLIF

SEQ ID NO: 516058 - protein, 15 aa, Homo sapiens
  CDR3 for beta chain variable domain of TCR clone 258029 (TRBV4-1, TRBJ2-7)
CASSQQGQGFDEQYF

SEQ ID NO: 516059 - protein, 15 aa, Homo sapiens
  CDR3 for alpha chain variable domain of TCR clone 258030 (TRAV38-2/DV8, TRAJ57)
CAYKSGLGGSEKLVF

SEQ ID NO: 516060 - protein, 16 aa, Homo sapiens
  CDR3 for beta chain variable domain of TCR clone 258030 (TRBV28, TRBJ1-5)
CASSCRGGYSNQPQHF

SEQ ID NO: 516061 - protein, 14 aa, Homo sapiens
  CDR3 for alpha chain variable domain of TCR clone 258031 (TRAV29/DV5, TRAJ17)
CAASGKAAGNKQTF

SEQ ID NO: 516062 - protein, 14 aa, Homo sapiens
  CDR3 for beta chain variable domain of TCR clone 258031 (TRBV20-1, TRBJ1-1)
CSAQTRIGGTEAFF

SEQ ID NO: 516063 - protein, 14 aa, Homo sapiens
  CDR3 for alpha chain variable domain of TCR clone 258032 (TRAV13-1, TRAJ35)
CAASKGGFGNVLHC

SEQ ID NO: 516064 - protein, 16 aa, Homo sapiens
  CDR3 for beta chain variable domain of TCR clone 258032 (TRBV7-3, TRBJ2-2)
CDSSLKRGTLSGELFF

SEQ ID NO: 516065 - protein, 14 aa, Homo sapiens
  CDR3 for alpha chain variable domain of TCR clone 258033 (TRAV1-2, TRAJ8)
CAVREDTGFQKLLF

SEQ ID NO: 516066 - protein, 16 aa, Homo sapiens
  CDR3 for beta chain variable domain of TCR clone 258033 (TRBV27, TRBJ2-2)
CASSFRGLVRTGELFF

SEQ ID NO: 516067 - protein, 14 aa, Homo sapiens
  CDR3 for alpha chain variable domain of TCR clone 258034 (TRAV2, TRAJ37)
LAVDFTSNTGKLIF

SEQ ID NO: 516068 - protein, 13 aa, Homo sapiens
  CDR3 for beta chain variable domain of TCR clone 258034 (TRBV12-4, TRBJ1-1)
CASSPGTGFEAFF

SEQ ID NO: 516069 - protein, 14 aa, Homo sapiens
  CDR3 for alpha chain variable domain of TCR clone 258035 (TRAV1-2, TRAJ16)
CAFNRFSDGQKLLF

SEQ ID NO: 516070 - protein, 14 aa, Homo sapiens
  CDR3 for beta chain variable domain of TCR clone 258035 (TRBV10-2, TRBJ1-5)
CASSSTGRNQPQHF

SEQ ID NO: 516071 - protein, 12 aa, Homo sapiens
  CDR3 for alpha chain variable domain of TCR clone 258036 (TRAV12-3, TRAJ17)
CAMTLTGNKLTF

SEQ ID NO: 516072 - protein, 16 aa, Homo sapiens
  CDR3 for beta chain variable domain of TCR clone 258036 (TRBV13, TRBJ2-2)
CASSPRTGERTGELFF

SEQ ID NO: 516073 - protein, 11 aa, Homo sapiens
  CDR3 for alpha chain variable domain of TCR clone 258037 (TRAV3, TRAJ21)
CAVGNFNKFYF

SEQ ID NO: 516074 - protein, 15 aa, Homo sapiens
  CDR3 for beta chain variable domain of TCR clone 258037 (TRBV2, TRBJ2-2)
CASSRETVGTGELFF

SEQ ID NO: 516075 - protein, 12 aa, Homo sapiens
  CDR3 for alpha chain variable domain of TCR clone 258038 (TRAV25, TRAJ31)
CAGHLNNARLMF

SEQ ID NO: 516076 - protein, 16 aa, Homo sapiens
  CDR3 for beta chain variable domain of TCR clone 258038 (TRBV7-6, TRBJ2-1)
CASSAPGPSSYNEQFF

SEQ ID NO: 516077 - protein, 16 aa, Homo sapiens
  CDR3 for alpha chain variable domain of TCR clone 258039 (TRAV3, TRAJ21)
CAVRDIERGNFNKFYV

SEQ ID NO: 516078 - protein, 13 aa, Homo sapiens
  CDR3 for beta chain variable domain of TCR clone 258039 (TRBV27, TRBJ2-7)
CASSLTTGYEQYF

SEQ ID NO: 516079 - protein, 17 aa, Homo sapiens
  CDR3 for alpha chain variable domain of TCR clone 258040 (TRAV8-6, TRAJ8)
CAVKEGIVNTGFQKPVF

SEQ ID NO: 516080 - protein, 12 aa, Homo sapiens
  CDR3 for beta chain variable domain of TCR clone 258040 (TRBV19, TRBJ1-4)
CASKDWPGGLFF

SEQ ID NO: 516081 - protein, 17 aa, Homo sapiens
  CDR3 for alpha chain variable domain of TCR clone 258041 (TRAV3, TRAJ38)
CAVRDCLNAGNNRKLIW

SEQ ID NO: 516082 - protein, 16 aa, Homo sapiens
  CDR3 for beta chain variable domain of TCR clone 258041 (TRBV11-2, TRBJ1-2)
CASSLDTGGADYGYTF

SEQ ID NO: 516083 - protein, 17 aa, Homo sapiens
  CDR3 for alpha chain variable domain of TCR clone 258042 (TRAV13-1, TRAJ52)
CAAGRNAGGTSYAKLTF

SEQ ID NO: 516084 - protein, 15 aa, Homo sapiens
  CDR3 for beta chain variable domain of TCR clone 258042 (TRBV6-3, TRBJ2-7)
CASSSPGTVFYEQYF

SEQ ID NO: 516085 - protein, 12 aa, Homo sapiens
  CDR3 for alpha chain variable domain of TCR clone 258043 (TRAV12-2, TRAJ10)
WGVTGGGNKLTF

SEQ ID NO: 516086 - protein, 16 aa, Homo sapiens
  CDR3 for beta chain variable domain of TCR clone 258043 (TRBV6-4, TRBJ1-2)
CASSEAVGDPNYGYAL

SEQ ID NO: 516087 - protein, 13 aa, Homo sapiens
  CDR3 for alpha chain variable domain of TCR clone 258044 (TRAV25, TRAJ10)
CAGRTGGGNKLTF

SEQ ID NO: 516088 - protein, 13 aa, Homo sapiens
  CDR3 for beta chain variable domain of TCR clone 258044 (TRBV10-3, TRBJ2-7)
CASKLAVNYEQYF

SEQ ID NO: 516089 - protein, 14 aa, Homo sapiens
  CDR3 for alpha chain variable domain of TCR clone 258045 (TRAV12-1, TRAJ39)
CVVNFNNAGNMLTF

SEQ ID NO: 516090 - protein, 14 aa, Homo sapiens
  CDR3 for beta chain variable domain of TCR clone 258045 (TRBV12-4, TRBJ1-1)
CASSLGTGGTEASF

SEQ ID NO: 516091 - protein, 12 aa, Homo sapiens
  CDR3 for alpha chain variable domain of TCR clone 258046 (TRAV8-6, TRAJ4)
CAVSDHPNKLIF

SEQ ID NO: 516092 - protein, 16 aa, Homo sapiens
  CDR3 for beta chain variable domain of TCR clone 258046 (TRBV19, TRBJ2-2)
CASSTARASNTGELFF

SEQ ID NO: 516093 - protein, 18 aa, Homo sapiens
  CDR3 for alpha chain variable domain of TCR clone 258047 (TRAV21, TRAJ52)
CAVRPSPAGGTIYGKLTF

SEQ ID NO: 516094 - protein, 17 aa, Homo sapiens
  CDR3 for beta chain variable domain of TCR clone 258047 (TRBV13, TRBJ2-3)
RASSLSRVAGGRNTQYF

SEQ ID NO: 516095 - protein, 12 aa, Homo sapiens
  CDR3 for alpha chain variable domain of TCR clone 258048 (TRAV26-2, TRAJ21)
CILKGNFNKFYF

SEQ ID NO: 516096 - protein, 16 aa, Homo sapiens
  CDR3 for beta chain variable domain of TCR clone 258048 (TRBV5-3, TRBJ2-2)
CARSFGTGTNTGELFF

SEQ ID NO: 516097 - protein, 17 aa, Homo sapiens
  CDR3 for alpha chain variable domain of TCR clone 258049 (TRAV17, TRAJ24)
CATANSMTTDSWGKLQF

SEQ ID NO: 516098 - protein, 14 aa, Homo sapiens
  CDR3 for beta chain variable domain of TCR clone 258049 (TRBV19, TRBJ2-1)
CASPTFVLSGEQFF

SEQ ID NO: 516099 - protein, 14 aa, Homo sapiens
  CDR3 for alpha chain variable domain of TCR clone 258050 (TRAV12-3, TRAJ13)
CAMTNSGGYQKVTF

SEQ ID NO: 516100 - protein, 13 aa, Homo sapiens
  CDR3 for beta chain variable domain of TCR clone 258050 (TRBV29-1, TRBJ2-5)
CSARDRVEETQYF

SEQ ID NO: 516101 - protein, 14 aa, Homo sapiens
  CDR3 for alpha chain variable domain of TCR clone 258051 (TRAV16, TRAJ33)
CALSAMDSNYQLLW

SEQ ID NO: 516102 - protein, 15 aa, Homo sapiens
  CDR3 for beta chain variable domain of TCR clone 258051 (TRBV5-1, TRBJ2-1)
CASSPPRAPYNEQFF

SEQ ID NO: 516103 - protein, 14 aa, Homo sapiens
  CDR3 for alpha chain variable domain of TCR clone 258052 (TRAV12-2, TRAJ5)
CAVNRSTGRRALTF

SEQ ID NO: 516104 - protein, 15 aa, Homo sapiens
  CDR3 for beta chain variable domain of TCR clone 258052 (TRBV27, TRBJ2-1)
CASSKGGGSSNEQFF

SEQ ID NO: 516105 - protein, 16 aa, Homo sapiens
  CDR3 for alpha chain variable domain of TCR clone 258053 (TRAV26-1, TRAJ23)
CIARPRFYNQGGKLIF

SEQ ID NO: 516106 - protein, 13 aa, Homo sapiens
  CDR3 for beta chain variable domain of TCR clone 258053 (TRBV20-1, TRBJ1-1)
CSARGGGNTEAFF

SEQ ID NO: 516107 - protein, 13 aa, Homo sapiens
  CDR3 for alpha chain variable domain of TCR clone 258054 (TRAV1-1, TRAJ9)
CAAKNTGGFKTIF

SEQ ID NO: 516108 - protein, 15 aa, Homo sapiens
  CDR3 for beta chain variable domain of TCR clone 258054 (TRBV6-5, TRBJ2-1)
CASRGDFDSYNEQFF

SEQ ID NO: 516109 - protein, 12 aa, Homo sapiens
  CDR3 for alpha chain variable domain of TCR clone 258055 (TRAV12-1, TRAJ20)
CVVNPDGYKPSF

SEQ ID NO: 516110 - protein, 12 aa, Homo sapiens
  CDR3 for beta chain variable domain of TCR clone 258055 (TRBV11-2, TRBJ2-2)
CASSLGGGELFF

SEQ ID NO: 516111 - protein, 14 aa, Homo sapiens
  CDR3 for alpha chain variable domain of TCR clone 258056 (TRAV17, TRAJ57)
CATDPQGGSEKLAF

SEQ ID NO: 516112 - protein, 18 aa, Homo sapiens
  CDR3 for beta chain variable domain of TCR clone 258056 (TRBV25-1, TRBJ2-1)
CASSESRAGGPGYNEQFF

SEQ ID NO: 516113 - protein, 17 aa, Homo sapiens
  CDR3 for alpha chain variable domain of TCR clone 258057 (TRAV1-2, TRAJ27)
CAVRDKTGDTNAGKSTF

SEQ ID NO: 516114 - protein, 17 aa, Homo sapiens
  CDR3 for beta chain variable domain of TCR clone 258057 (TRBV7-3, TRBJ2-3)
CASSLMKRMRGADTQYF

SEQ ID NO: 516115 - protein, 18 aa, Homo sapiens
  CDR3 for alpha chain variable domain of TCR clone 258058 (TRAV26-1, TRAJ23)
CIVRAGLEVWNKGGKLIF

SEQ ID NO: 516116 - protein, 14 aa, Homo sapiens
  CDR3 for beta chain variable domain of TCR clone 258058 (TRBV7-6, TRBJ2-3)
CASSLGTVTDTQYF

SEQ ID NO: 516117 - protein, 17 aa, Homo sapiens
  CDR3 for alpha chain variable domain of TCR clone 258059 (TRAV23/DV6, )
CAADIQNPDPAVYQLRD

SEQ ID NO: 516118 - protein, 17 aa, Homo sapiens
  CDR3 for beta chain variable domain of TCR clone 258059 (TRBV7-8, TRBJ2-6)
CASSAGTGGAGANVLTF

SEQ ID NO: 516119 - protein, 14 aa, Homo sapiens
  CDR3 for alpha chain variable domain of TCR clone 258060 (TRAV13-1, TRAJ35)
CVASKGGFGNVLHC

SEQ ID NO: 516120 - protein, 15 aa, Homo sapiens
  CDR3 for beta chain variable domain of TCR clone 258060 (TRBV7-9, TRBJ1-6)
CASSSPGRGNSPLHF

SEQ ID NO: 516121 - protein, 16 aa, Homo sapiens
  CDR3 for alpha chain variable domain of TCR clone 258061 (TRAV12-2, TRAJ10)
CAVNRVLTGGGNKLTF

SEQ ID NO: 516122 - protein, 13 aa, Homo sapiens
  CDR3 for beta chain variable domain of TCR clone 258061 (TRBV4-1, TRBJ2-5)
CASSLTRGETQYF

SEQ ID NO: 516123 - protein, 15 aa, Homo sapiens
  CDR3 for alpha chain variable domain of TCR clone 258062 (TRAV3, TRAJ5)
CAVRDLDMGRRALTF

SEQ ID NO: 516124 - protein, 13 aa, Homo sapiens
  CDR3 for beta chain variable domain of TCR clone 258062 (TRBV20-1, TRBJ2-5)
CSARDSKQATQYF

SEQ ID NO: 516125 - protein, 16 aa, Homo sapiens
  CDR3 for alpha chain variable domain of TCR clone 258063 (TRAV3, TRAJ18)
CAVRDGRGSTLVRLYF

SEQ ID NO: 516126 - protein, 17 aa, Homo sapiens
  CDR3 for beta chain variable domain of TCR clone 258063 (TRBV5-1, TRBJ2-3)
CASSKIGLVDRTDTQYF

SEQ ID NO: 516127 - protein, 14 aa, Homo sapiens
  CDR3 for alpha chain variable domain of TCR clone 258064 (TRAV16, TRAJ29)
CALTRNSGNTPLVF

SEQ ID NO: 516128 - protein, 14 aa, Homo sapiens
  CDR3 for beta chain variable domain of TCR clone 258064 (TRBV11-2, TRBJ2-7)
CASSLGAGAYEQYF

SEQ ID NO: 516129 - protein, 11 aa, Homo sapiens
  CDR3 for alpha chain variable domain of TCR clone 258065 (TRAV2, TRAJ33)
CAVESNYQLIW

SEQ ID NO: 516130 - protein, 13 aa, Homo sapiens
  CDR3 for beta chain variable domain of TCR clone 258065 (TRBV7-3, TRBJ2-3)
CASSDQIGETQYF

SEQ ID NO: 516131 - protein, 15 aa, Homo sapiens
  CDR3 for alpha chain variable domain of TCR clone 258066 (TRAV1-2, TRAJ30)
CAVRPHGNSDDKIIF

SEQ ID NO: 516132 - protein, 13 aa, Homo sapiens
  CDR3 for beta chain variable domain of TCR clone 258066 (TRBV19, TRBJ1-2)
CASSVPGQDGYTF

SEQ ID NO: 516133 - protein, 14 aa, Homo sapiens
  CDR3 for alpha chain variable domain of TCR clone 258067 (TRAV1-1, TRAJ27)
CAVIYNTNAGKSTF

SEQ ID NO: 516134 - protein, 14 aa, Homo sapiens
  CDR3 for beta chain variable domain of TCR clone 258067 (TRBV7-8, TRBJ2-5)
CASSATGGQETQYF

SEQ ID NO: 516135 - protein, 14 aa, Homo sapiens
  CDR3 for alpha chain variable domain of TCR clone 258068 (TRAV12-3, TRAJ22)
CAMSLFGSARQLTF

SEQ ID NO: 516136 - protein, 12 aa, Homo sapiens
  CDR3 for beta chain variable domain of TCR clone 258068 (TRBV12-4, TRBJ2-1)
CASSPGRSEQFF

SEQ ID NO: 516137 - protein, 13 aa, Homo sapiens
  CDR3 for alpha chain variable domain of TCR clone 258069 (TRAV12-2, TRAJ9)
CAVKWAGGFKTIF

SEQ ID NO: 516138 - protein, 15 aa, Homo sapiens
  CDR3 for beta chain variable domain of TCR clone 258069 (TRBV5-1, TRBJ1-4)
CASSLTEDSDEKLFF

SEQ ID NO: 516139 - protein, 14 aa, Homo sapiens
  CDR3 for alpha chain variable domain of TCR clone 258070 (TRAV21, TRAJ45)
CAVSSGGGADGLTF

SEQ ID NO: 516140 - protein, 15 aa, Homo sapiens
  CDR3 for beta chain variable domain of TCR clone 258070 (TRBV9, TRBJ1-6)
CASSVAGTGDSPLHF

SEQ ID NO: 516141 - protein, 16 aa, Homo sapiens
  CDR3 for alpha chain variable domain of TCR clone 258071 (TRAV3, TRAJ32)
CCERMNYGGATNKLIF

SEQ ID NO: 516142 - protein, 13 aa, Homo sapiens
  CDR3 for beta chain variable domain of TCR clone 258071 (TRBV2, TRBJ1-1)
CASSEGGNTEAFF

SEQ ID NO: 516143 - protein, 12 aa, Homo sapiens
  CDR3 for alpha chain variable domain of TCR clone 258072 (TRAV12-3, TRAJ17)
CAMTLTGNKLTF

SEQ ID NO: 516144 - protein, 16 aa, Homo sapiens
  CDR3 for beta chain variable domain of TCR clone 258072 (TRBV2, TRBJ1-5)
CTSGSTGSNFGQAQHF

SEQ ID NO: 516145 - protein, 12 aa, Homo sapiens
  CDR3 for alpha chain variable domain of TCR clone 258073 (TRAV8-3, TRAJ26)
CAGDNYGQNFVF

SEQ ID NO: 516146 - protein, 12 aa, Homo sapiens
  CDR3 for beta chain variable domain of TCR clone 258073 (TRBV11-2, TRBJ2-1)
CASSPGNNEQFV

SEQ ID NO: 516147 - protein, 14 aa, Homo sapiens
  CDR3 for alpha chain variable domain of TCR clone 258074 (TRAV1-2, TRAJ16)
CAVNRFSDGQELLF

SEQ ID NO: 516148 - protein, 16 aa, Homo sapiens
  CDR3 for beta chain variable domain of TCR clone 258074 (TRBV7-3, TRBJ2-2)
CASSLKRGTLSGELFF

SEQ ID NO: 516149 - protein, 16 aa, Homo sapiens
  CDR3 for alpha chain variable domain of TCR clone 258075 (TRAV3, TRAJ37)
CAVRDSGSGNTGKLLF

SEQ ID NO: 516150 - protein, 12 aa, Homo sapiens
  CDR3 for beta chain variable domain of TCR clone 258075 (TRBV7-2, TRBJ2-5)
CASSLYQETQYF

SEQ ID NO: 516151 - protein, 10 aa, Homo sapiens
  CDR3 for alpha chain variable domain of TCR clone 258076 (TRAV13-1, TRAJ34)
CADINRQAHL

SEQ ID NO: 516152 - protein, 14 aa, Homo sapiens
  CDR3 for beta chain variable domain of TCR clone 258076 (TRBV25-1, TRBJ1-1)
CASTHLGGNTEAFF

SEQ ID NO: 516153 - protein, 14 aa, Homo sapiens
  CDR3 for alpha chain variable domain of TCR clone 258077 (TRAV8-3, TRAJ6)
CAVGASGGSYIPTF

SEQ ID NO: 516154 - protein, 17 aa, Homo sapiens
  CDR3 for beta chain variable domain of TCR clone 258077 (TRBV18, TRBJ2-2)
CASSPSDPWQNTGELFC

SEQ ID NO: 516155 - protein, 12 aa, Homo sapiens
  CDR3 for alpha chain variable domain of TCR clone 258078 (TRAV12-2, TRAJ10)
WGVTGGGNKLTF

SEQ ID NO: 516156 - protein, 20 aa, Homo sapiens
  CDR3 for beta chain variable domain of TCR clone 258078 (TRBV19, TRBJ2-1)
CASSISRTVTSTRLNNEHFF

SEQ ID NO: 516157 - protein, 15 aa, Homo sapiens
  CDR3 for alpha chain variable domain of TCR clone 258079 (TRAV26-1, TRAJ44)
CIARVPFGTASKLTF

SEQ ID NO: 516158 - protein, 15 aa, Homo sapiens
  CDR3 for beta chain variable domain of TCR clone 258079 (TRBV20-1, TRBJ1-1)
CSARRGVTGNTEAFF

SEQ ID NO: 516159 - protein, 11 aa, Homo sapiens
  CDR3 for alpha chain variable domain of TCR clone 258080 (TRAV22, TRAJ47)
CAVLYGNKLVF

SEQ ID NO: 516160 - protein, 17 aa, Homo sapiens
  CDR3 for beta chain variable domain of TCR clone 258080 (TRBV6-5, TRBJ1-4)
CASRETGGLATNEKLFF

SEQ ID NO: 516161 - protein, 17 aa, Homo sapiens
  CDR3 for alpha chain variable domain of TCR clone 258081 (TRAV38-1, TRAJ45)
CAFMKHYMGGGADGLTF

SEQ ID NO: 516162 - protein, 16 aa, Homo sapiens
  CDR3 for beta chain variable domain of TCR clone 258081 (TRBV20-1, TRBJ1-4)
CSAPGQGLLTNEKLFF

SEQ ID NO: 516163 - protein, 14 aa, Homo sapiens
  CDR3 for alpha chain variable domain of TCR clone 258082 (TRAV3, TRAJ7)
CAVREEESEQQTRF

SEQ ID NO: 516164 - protein, 12 aa, Homo sapiens
  CDR3 for beta chain variable domain of TCR clone 258082 (TRBV7-8, TRBJ2-7)
CASSLGDREQYF

SEQ ID NO: 516165 - protein, 13 aa, Homo sapiens
  CDR3 for alpha chain variable domain of TCR clone 258083 (TRAV39, TRAJ33)
CAANPDSNYQLIW

SEQ ID NO: 516166 - protein, 13 aa, Homo sapiens
  CDR3 for beta chain variable domain of TCR clone 258083 (TRBV18, TRBJ1-1)
CASSGGRNTEASF

SEQ ID NO: 516167 - protein, 15 aa, Homo sapiens
  CDR3 for alpha chain variable domain of TCR clone 258084 (TRAV2, TRAJ24)
CAVVRLKNSWGKLQF

SEQ ID NO: 516168 - protein, 16 aa, Homo sapiens
  CDR3 for beta chain variable domain of TCR clone 258084 (TRBV7-7, TRBJ2-3)
CASSPGTSGSTDAQYF

SEQ ID NO: 516169 - protein, 13 aa, Homo sapiens
  CDR3 for alpha chain variable domain of TCR clone 258085 (TRAV20, TRAJ53)
CCAGGGSNYRLTF

SEQ ID NO: 516170 - protein, 12 aa, Homo sapiens
  CDR3 for beta chain variable domain of TCR clone 258085 (TRBV3-1, TRBJ2-2)
CASSLFPGELFF

SEQ ID NO: 516171 - protein, 15 aa, Homo sapiens
  CDR3 for alpha chain variable domain of TCR clone 258086 (TRAV12-1, TRAJ15)
CVVTRANQAGTALIF

SEQ ID NO: 516172 - protein, 14 aa, Homo sapiens
  CDR3 for beta chain variable domain of TCR clone 258086 (TRBV5-1, TRBJ1-1)
CASSLVSISTEAFF

SEQ ID NO: 516173 - protein, 15 aa, Homo sapiens
  CDR3 for alpha chain variable domain of TCR clone 258087 (TRAV23/DV6, TRAJ13)
CAAWPGGGGYQKVTF

SEQ ID NO: 516174 - protein, 15 aa, Homo sapiens
  CDR3 for beta chain variable domain of TCR clone 258087 (TRBV6-3, TRBJ2-7)
CASSSPGTVFYEQYF

SEQ ID NO: 516175 - protein, 15 aa, Homo sapiens
  CDR3 for alpha chain variable domain of TCR clone 258088 (TRAV12-2, TRAJ43)
CAFDMRFGAGTRLTV

SEQ ID NO: 516176 - protein, 17 aa, Homo sapiens
  CDR3 for beta chain variable domain of TCR clone 258088 (TRBV13, TRBJ2-3)
WASSLSRVAGGRNTQYF

SEQ ID NO: 516177 - protein, 12 aa, Homo sapiens
  CDR3 for alpha chain variable domain of TCR clone 258089 (TRAV17, TRAJ12)
CATLRSSYKLIF

SEQ ID NO: 516178 - protein, 16 aa, Homo sapiens
  CDR3 for beta chain variable domain of TCR clone 258089 (TRBV28, TRBJ2-7)
CASSLFFATGGPEQYF

SEQ ID NO: 516179 - protein, 13 aa, Homo sapiens
  CDR3 for alpha chain variable domain of TCR clone 258090 (TRAV17, TRAJ5)
CAPMDTGRRVLTF

SEQ ID NO: 516180 - protein, 15 aa, Homo sapiens
  CDR3 for beta chain variable domain of TCR clone 258090 (TRBV6-6, TRBJ2-5)
CASSPGGGLEETQYF

SEQ ID NO: 516181 - protein, 12 aa, Homo sapiens
  CDR3 for alpha chain variable domain of TCR clone 258091 (TRAV13-1, TRAJ53)
CAAGGSNYKLTF

SEQ ID NO: 516182 - protein, 15 aa, Homo sapiens
  CDR3 for beta chain variable domain of TCR clone 258091 (TRBV7-2, TRBJ2-1)
GASSSGLAGGNEQYF

SEQ ID NO: 516183 - protein, 15 aa, Homo sapiens
  CDR3 for alpha chain variable domain of TCR clone 258092 (TRAV2, TRAJ11)
CAVGGRNSGYSTPTF

SEQ ID NO: 516184 - protein, 14 aa, Homo sapiens
  CDR3 for beta chain variable domain of TCR clone 258092 (TRBV4-1, TRBJ2-2)
CASSQAVNTGELFF

SEQ ID NO: 516185 - protein, 14 aa, Homo sapiens
  CDR3 for alpha chain variable domain of TCR clone 258093 (TRAV16, TRAJ33)
CALSATDSNYQLIW

SEQ ID NO: 516186 - protein, 14 aa, Homo sapiens
  CDR3 for beta chain variable domain of TCR clone 258093 (TRBV9, TRBJ2-7)
CASSVGVGSYEQYF

SEQ ID NO: 516187 - protein, 13 aa, Homo sapiens
  CDR3 for alpha chain variable domain of TCR clone 258094 (TRAV12-2, TRAJ18)
CAVRGSTLGRLYF

SEQ ID NO: 516188 - protein, 13 aa, Homo sapiens
  CDR3 for beta chain variable domain of TCR clone 258094 (TRBV24-1, TRBJ1-4)
CATNNGRSEKLFF

SEQ ID NO: 516189 - protein, 14 aa, Homo sapiens
  CDR3 for alpha chain variable domain of TCR clone 258095 (TRAV12-3, TRAJ10)
SHLHLTGGGNKLTF

SEQ ID NO: 516190 - protein, 16 aa, Homo sapiens
  CDR3 for beta chain variable domain of TCR clone 258095 (TRBV12-4, TRBJ2-5)
CASSWRPSGDLETQYF

SEQ ID NO: 516191 - protein, 23 aa, Homo sapiens
  CDR3 for alpha chain variable domain of TCR clone 258096 (TRAV8-3, )
CSVVTTRIPDIQNPDPAVYQLRD

SEQ ID NO: 516192 - protein, 14 aa, Homo sapiens
  CDR3 for beta chain variable domain of TCR clone 258096 (TRBV11-2, TRBJ2-7)
CASSPSTTSYEQYF

SEQ ID NO: 516193 - protein, 16 aa, Homo sapiens
  CDR3 for alpha chain variable domain of TCR clone 258097 (TRAV17, TRAJ36)
CATVSLNWGKQPLLWY

SEQ ID NO: 516194 - protein, 13 aa, Homo sapiens
  CDR3 for beta chain variable domain of TCR clone 258097 (TRBV4-1, TRBJ1-1)
CASSQLGTGEAFF

SEQ ID NO: 516195 - protein, 13 aa, Homo sapiens
  CDR3 for alpha chain variable domain of TCR clone 258098 (TRAV1-1, TRAJ9)
CASKNTGGFKTIS

SEQ ID NO: 516196 - protein, 14 aa, Homo sapiens
  CDR3 for beta chain variable domain of TCR clone 258098 (TRBV20-1, TRBJ2-1)
CSAQIGGSANEQFF

SEQ ID NO: 516197 - protein, 12 aa, Homo sapiens
  CDR3 for alpha chain variable domain of TCR clone 258099 (TRAV17, TRAJ49)
CATVTTGNQFYF

SEQ ID NO: 516198 - protein, 16 aa, Homo sapiens
  CDR3 for beta chain variable domain of TCR clone 258099 (TRBV13, TRBJ2-2)
CASSPRTGEHTGELFF

SEQ ID NO: 516199 - protein, 13 aa, Homo sapiens
  CDR3 for alpha chain variable domain of TCR clone 258100 (TRAV29/DV5, TRAJ54)
CAAHLQGAQKLVF

SEQ ID NO: 516200 - protein, 15 aa, Homo sapiens
  CDR3 for beta chain variable domain of TCR clone 258100 (TRBV28, TRBJ2-1)
CASRVGLDEYNEQFF

SEQ ID NO: 516201 - protein, 11 aa, Homo sapiens
  CDR3 for alpha chain variable domain of TCR clone 258101 (TRAV35, TRAJ31)
CAESGDARLMF

SEQ ID NO: 516202 - protein, 16 aa, Homo sapiens
  CDR3 for beta chain variable domain of TCR clone 258101 (TRBV7-9, TRBJ1-2)
CASSLGFSSGEDGYTF

SEQ ID NO: 516203 - protein, 13 aa, Homo sapiens
  CDR3 for alpha chain variable domain of TCR clone 258102 (TRAV13-2, TRAJ48)
CAEMDFGNEKLTF

SEQ ID NO: 516204 - protein, 16 aa, Homo sapiens
  CDR3 for beta chain variable domain of TCR clone 258102 (TRBV28, TRBJ2-5)
CASSFSPAGGWETQYF

SEQ ID NO: 516205 - protein, 13 aa, Homo sapiens
  CDR3 for alpha chain variable domain of TCR clone 258103 (TRAV35, TRAJ57)
CWSPQGGSEKLVF

SEQ ID NO: 516206 - protein, 18 aa, Homo sapiens
  CDR3 for beta chain variable domain of TCR clone 258103 (TRBV6-6, TRBJ1-3)
CASSYSKWDSIYGNTIYF

SEQ ID NO: 516207 - protein, 13 aa, Homo sapiens
  CDR3 for alpha chain variable domain of TCR clone 258104 (TRAV2, TRAJ13)
CCPNSGGYQKFTF

SEQ ID NO: 516208 - protein, 14 aa, Homo sapiens
  CDR3 for beta chain variable domain of TCR clone 258104 (TRBV19, TRBJ2-1)
CASEVTGARNEQFF

SEQ ID NO: 516209 - protein, 12 aa, Homo sapiens
  CDR3 for alpha chain variable domain of TCR clone 258105 (TRAV22, TRAJ29)
CAPASGNTPLVF

SEQ ID NO: 516210 - protein, 14 aa, Homo sapiens
  CDR3 for beta chain variable domain of TCR clone 258105 (TRBV11-2, TRBJ2-7)
CASSLGAGAYEQCF

SEQ ID NO: 516211 - protein, 15 aa, Homo sapiens
  CDR3 for alpha chain variable domain of TCR clone 258106 (TRAV25, TRAJ53)
CPTSNRGGSNYKLTV

SEQ ID NO: 516212 - protein, 14 aa, Homo sapiens
  CDR3 for beta chain variable domain of TCR clone 258106 (TRBV11-2, TRBJ2-3)
CASSRLARTDTQYF

SEQ ID NO: 516213 - protein, 18 aa, Homo sapiens
  CDR3 for alpha chain variable domain of TCR clone 258107 (TRAV21, TRAJ52)
CAVRPSPAGGASYGKLTF

SEQ ID NO: 516214 - protein, 17 aa, Homo sapiens
  CDR3 for beta chain variable domain of TCR clone 258107 (TRBV25-1, TRBJ2-1)
CASSAYGQGRGVYEQFF

SEQ ID NO: 516215 - protein, 14 aa, Homo sapiens
  CDR3 for alpha chain variable domain of TCR clone 258108 (TRAV1-2, TRAJ16)
CAVNRFSDGQKLFF

SEQ ID NO: 516216 - protein, 14 aa, Homo sapiens
  CDR3 for beta chain variable domain of TCR clone 258108 (TRBV25-1, TRBJ1-1)
CASTHLGGNTEAFF

SEQ ID NO: 516217 - protein, 15 aa, Homo sapiens
  CDR3 for alpha chain variable domain of TCR clone 258109 (TRAV21, TRAJ24)
CAARSSTDSWGKLQF

SEQ ID NO: 516218 - protein, 15 aa, Homo sapiens
  CDR3 for beta chain variable domain of TCR clone 258109 (TRBV7-8, TRBJ2-5)
CASSDAAGSQETQYF

SEQ ID NO: 516219 - protein, 15 aa, Homo sapiens
  CDR3 for alpha chain variable domain of TCR clone 258110 (TRAV12-3, TRAJ6)
CAMSATTGGSYIPTF

SEQ ID NO: 516220 - protein, 14 aa, Homo sapiens
  CDR3 for beta chain variable domain of TCR clone 258110 (TRBV28, TRBJ1-1)
CASSPRTRWAEAFF

SEQ ID NO: 516221 - protein, 11 aa, Homo sapiens
  CDR3 for alpha chain variable domain of TCR clone 258111 (TRAV8-4, TRAJ26)
CAGGEGQNLVF

SEQ ID NO: 516222 - protein, 17 aa, Homo sapiens
  CDR3 for beta chain variable domain of TCR clone 258111 (TRBV7-9, TRBJ2-3)
CASSLTVAGDLTDTQYF

SEQ ID NO: 516223 - protein, 13 aa, Homo sapiens
  CDR3 for alpha chain variable domain of TCR clone 258112 (TRAV21, TRAJ36)
CAVIKTGPNNLFF

SEQ ID NO: 516224 - protein, 10 aa, Homo sapiens
  CDR3 for beta chain variable domain of TCR clone 258112 (TRBV29-1, TRBJ2-3)
NAGGRDTQYF

SEQ ID NO: 516225 - protein, 13 aa, Homo sapiens
  CDR3 for alpha chain variable domain of TCR clone 258113 (TRAV35, TRAJ47)
CAGSGEYGNKLVF

SEQ ID NO: 516226 - protein, 13 aa, Homo sapiens
  CDR3 for beta chain variable domain of TCR clone 258113 (TRBV4-1, TRBJ2-2)
CASSQENTGELFF

SEQ ID NO: 516227 - protein, 11 aa, Homo sapiens
  CDR3 for alpha chain variable domain of TCR clone 258114 (TRAV21, TRAJ4)
HDSGGYNKLIF

SEQ ID NO: 516228 - protein, 13 aa, Homo sapiens
  CDR3 for beta chain variable domain of TCR clone 258114 (TRBV7-3, TRBJ2-5)
CASSLTAGETQYF

SEQ ID NO: 516229 - protein, 11 aa, Homo sapiens
  CDR3 for alpha chain variable domain of TCR clone 258115 (TRAV1-1, TRAJ23)
CAVRQGGKLIF

SEQ ID NO: 516230 - protein, 20 aa, Homo sapiens
  CDR3 for beta chain variable domain of TCR clone 258115 (TRBV7-8, TRBJ2-2)
CASSHLFPGPTFPITGELFF

SEQ ID NO: 516231 - protein, 14 aa, Homo sapiens
  CDR3 for alpha chain variable domain of TCR clone 258116 (TRAV12-1, TRAJ33)
CVVNPEDSHYQLIW

SEQ ID NO: 516232 - protein, 15 aa, Homo sapiens
  CDR3 for beta chain variable domain of TCR clone 258116 (TRBV10-3, TRBJ2-1)
CAIRNGTSGHNEQFF

SEQ ID NO: 516233 - protein, 15 aa, Homo sapiens
  CDR3 for alpha chain variable domain of TCR clone 258117 (TRAV3, TRAJ5)
CAVRDLDTGRRALTF

SEQ ID NO: 516234 - protein, 16 aa, Homo sapiens
  CDR3 for beta chain variable domain of TCR clone 258117 (TRBV20-1, TRBJ1-1)
CSARALTQGMNTEAFF

SEQ ID NO: 516235 - protein, 13 aa, Homo sapiens
  CDR3 for alpha chain variable domain of TCR clone 258118 (TRAV8-3, TRAJ48)
CAVVPFGNEKLTF

SEQ ID NO: 516236 - protein, 19 aa, Homo sapiens
  CDR3 for beta chain variable domain of TCR clone 258118 (TRBV25-1, TRBJ2-2)
CAILVYRVDKGRKTGELFF

SEQ ID NO: 516237 - protein, 12 aa, Homo sapiens
  CDR3 for alpha chain variable domain of TCR clone 258119 (TRAV17, TRAJ49)
CATVTTGNQFYF

SEQ ID NO: 516238 - protein, 15 aa, Homo sapiens
  CDR3 for beta chain variable domain of TCR clone 258119 (TRBV7-3, TRBJ2-2)
CASSETGQGTGELFF

SEQ ID NO: 516239 - protein, 12 aa, Homo sapiens
  CDR3 for alpha chain variable domain of TCR clone 258120 (TRAV17, TRAJ57)
CATDGGSEKLVF

SEQ ID NO: 516240 - protein, 15 aa, Homo sapiens
  CDR3 for beta chain variable domain of TCR clone 258120 (TRBV11-1, TRBJ2-1)
CASSLFRDTYNEQFF

SEQ ID NO: 516241 - protein, 15 aa, Homo sapiens
  CDR3 for alpha chain variable domain of TCR clone 258121 (TRAV12-2, TRAJ53)
CAVNGGEGSNYKLTF

SEQ ID NO: 516242 - protein, 12 aa, Homo sapiens
  CDR3 for beta chain variable domain of TCR clone 258121 (TRBV27, TRBJ1-6)
CASKLCQGPLHF

SEQ ID NO: 516243 - protein, 14 aa, Homo sapiens
  CDR3 for alpha chain variable domain of TCR clone 258122 (TRAV8-4, TRAJ23)
CAVSAPGSGGKLMF

SEQ ID NO: 516244 - protein, 17 aa, Homo sapiens
  CDR3 for beta chain variable domain of TCR clone 258122 (TRBV4-3, TRBJ2-3)
CASSQDPLAGAVDTQYF

SEQ ID NO: 516245 - protein, 16 aa, Homo sapiens
  CDR3 for alpha chain variable domain of TCR clone 258123 (TRAV30, TRAJ24)
CGTEIVYADGWGKFQF

SEQ ID NO: 516246 - protein, 14 aa, Homo sapiens
  CDR3 for beta chain variable domain of TCR clone 258123 (TRBV12-5, TRBJ2-5)
CASGSRTHQETQYF

SEQ ID NO: 516247 - protein, 11 aa, Homo sapiens
  CDR3 for alpha chain variable domain of TCR clone 258124 (TRAV13-2, TRAJ45)
VTGGGADGLTF

SEQ ID NO: 516248 - protein, 16 aa, Homo sapiens
  CDR3 for beta chain variable domain of TCR clone 258124 (TRBV20-1, TRBJ1-4)
CSAPGQGLLTNEKLFF

SEQ ID NO: 516249 - protein, 18 aa, Homo sapiens
  CDR3 for alpha chain variable domain of TCR clone 258125 (TRAV21, TRAJ52)
CAVRPSPAGGTSYGKLTF

SEQ ID NO: 516250 - protein, 15 aa, Homo sapiens
  CDR3 for beta chain variable domain of TCR clone 258125 (TRBV7-9, TRBJ1-5)
CASSQGHQPTQPQHF

SEQ ID NO: 516251 - protein, 11 aa, Homo sapiens
  CDR3 for alpha chain variable domain of TCR clone 258126 (TRAV3, TRAJ21)
CAVGNFNKFYF

SEQ ID NO: 516252 - protein, 15 aa, Homo sapiens
  CDR3 for beta chain variable domain of TCR clone 258126 (TRBV5-7, TRBJ2-7)
CASSLGPGRGHEQYF

SEQ ID NO: 516253 - protein, 16 aa, Homo sapiens
  CDR3 for alpha chain variable domain of TCR clone 258127 (TRAV12-1, TRAJ12)
CVVDTLLTDSSYKLIF

SEQ ID NO: 516254 - protein, 13 aa, Homo sapiens
  CDR3 for beta chain variable domain of TCR clone 258127 (TRBV11-2, TRBJ2-1)
CASSSEAYNEQFF

SEQ ID NO: 516255 - protein, 13 aa, Homo sapiens
  CDR3 for alpha chain variable domain of TCR clone 258128 (TRAV35, TRAJ32)
CAGVGGATNKLIF

SEQ ID NO: 516256 - protein, 17 aa, Homo sapiens
  CDR3 for beta chain variable domain of TCR clone 258128 (TRBV4-3, TRBJ2-1)
CASSQFSSGRASDEQFF

SEQ ID NO: 516257 - protein, 15 aa, Homo sapiens
  CDR3 for alpha chain variable domain of TCR clone 258129 (TRAV12-2, TRAJ53)
CAVNGGGGSNYKLTF

SEQ ID NO: 516258 - protein, 13 aa, Homo sapiens
  CDR3 for beta chain variable domain of TCR clone 258129 (TRBV19, TRBJ1-5)
CASSMRGYQPQHF

SEQ ID NO: 516259 - protein, 13 aa, Homo sapiens
  CDR3 for alpha chain variable domain of TCR clone 258130 (TRAV20, TRAJ37)
CAGCSSNTGKLIF

SEQ ID NO: 516260 - protein, 10 aa, Homo sapiens
  CDR3 for beta chain variable domain of TCR clone 258130 (TRBV4-2, TRBJ2-3)
CASSTRYAGF

SEQ ID NO: 516261 - protein, 14 aa, Homo sapiens
  CDR3 for alpha chain variable domain of TCR clone 258131 (TRAV16, TRAJ29)
CALTRNSGNTPLVF

SEQ ID NO: 516262 - protein, 11 aa, Homo sapiens
  CDR3 for beta chain variable domain of TCR clone 258131 (TRBV24-1, TRBJ2-3)
CATSDLDTQYF

SEQ ID NO: 516263 - protein, 13 aa, Homo sapiens
  CDR3 for alpha chain variable domain of TCR clone 258132 (TRAV13-1, TRAJ5)
CAASDTGRRALTF

SEQ ID NO: 516264 - protein, 12 aa, Homo sapiens
  CDR3 for beta chain variable domain of TCR clone 258132 (TRBV28, TRBJ2-3)
CASSLSRDTQYC

SEQ ID NO: 516265 - protein, 13 aa, Homo sapiens
  CDR3 for alpha chain variable domain of TCR clone 258133 (TRAV21, TRAJ45)
CAVMGGGADGLTF

SEQ ID NO: 516266 - protein, 15 aa, Homo sapiens
  CDR3 for beta chain variable domain of TCR clone 258133 (TRBV4-1, TRBJ1-2)
CASSQGQGAAYGYTF

SEQ ID NO: 516267 - protein, 16 aa, Homo sapiens
  CDR3 for alpha chain variable domain of TCR clone 258134 (TRAV27, TRAJ45)
CAGAPSQEEVLTDSPL

SEQ ID NO: 516268 - protein, 12 aa, Homo sapiens
  CDR3 for beta chain variable domain of TCR clone 258134 (TRBV24-1, TRBJ2-7)
CATSDPGYEQYF

SEQ ID NO: 516269 - protein, 15 aa, Homo sapiens
  CDR3 for alpha chain variable domain of TCR clone 258135 (TRAV12-2, TRAJ53)
CAVNGGGGSNYKLTF

SEQ ID NO: 516270 - protein, 14 aa, Homo sapiens
  CDR3 for beta chain variable domain of TCR clone 258135 (TRBV18, TRBJ2-5)
CASSPGVSQETQYF

SEQ ID NO: 516271 - protein, 13 aa, Homo sapiens
  CDR3 for alpha chain variable domain of TCR clone 258136 (TRAV12-3, TRAJ33)
CAMSVNSNYQLIW

SEQ ID NO: 516272 - protein, 13 aa, Homo sapiens
  CDR3 for beta chain variable domain of TCR clone 258136 (TRBV7-2, TRBJ2-2)
SASSLAVTGELFF

SEQ ID NO: 516273 - protein, 14 aa, Homo sapiens
  CDR3 for alpha chain variable domain of TCR clone 258137 (TRAV27, TRAJ45)
CAGAPEEVLTDSPF

SEQ ID NO: 516274 - protein, 17 aa, Homo sapiens
  CDR3 for beta chain variable domain of TCR clone 258137 (TRBV11-2, TRBJ2-1)
CASSLYPPGVEYNEQFF

SEQ ID NO: 516275 - protein, 14 aa, Homo sapiens
  CDR3 for alpha chain variable domain of TCR clone 258138 (TRAV26-1, TRAJ38)
CIADNAGNNRKLIW

SEQ ID NO: 516276 - protein, 16 aa, Homo sapiens
  CDR3 for beta chain variable domain of TCR clone 258138 (TRBV7-6, TRBJ1-6)
CASSLSSRIGDSPLHF

SEQ ID NO: 516277 - protein, 16 aa, Homo sapiens
  CDR3 for alpha chain variable domain of TCR clone 258139 (TRAV30, TRAJ24)
CGTEIVDADSWWKFQF

SEQ ID NO: 516278 - protein, 15 aa, Homo sapiens
  CDR3 for beta chain variable domain of TCR clone 258139 (TRBV28, TRBJ2-1)
CASSRSSGGVDEQFF

SEQ ID NO: 516279 - protein, 13 aa, Homo sapiens
  CDR3 for alpha chain variable domain of TCR clone 258140 (TRAV21, TRAJ27)
CAARPGNAGKSTF

SEQ ID NO: 516280 - protein, 13 aa, Homo sapiens
  CDR3 for beta chain variable domain of TCR clone 258140 (TRBV7-6, TRBJ2-1)
CQQLRGGADEQFF

SEQ ID NO: 516281 - protein, 11 aa, Homo sapiens
  CDR3 for alpha chain variable domain of TCR clone 258141 (TRAV3, TRAJ21)
CAVGNFNKFYF

SEQ ID NO: 516282 - protein, 19 aa, Homo sapiens
  CDR3 for beta chain variable domain of TCR clone 258141 (TRBV7-2, TRBJ2-5)
CASGTSGGTPPLGSETQYF

SEQ ID NO: 516283 - protein, 13 aa, Homo sapiens
  CDR3 for alpha chain variable domain of TCR clone 258142 (TRAV23/DV6, TRAJ12)
FAPRVDSSYKLIF

SEQ ID NO: 516284 - protein, 12 aa, Homo sapiens
  CDR3 for beta chain variable domain of TCR clone 258142 (TRBV7-6, TRBJ2-5)
CASSLSQETQCF

SEQ ID NO: 516285 - protein, 13 aa, Homo sapiens
  CDR3 for alpha chain variable domain of TCR clone 258143 (TRAV20, TRAJ20)
CAVQNPHAYKLSF

SEQ ID NO: 516286 - protein, 12 aa, Homo sapiens
  CDR3 for beta chain variable domain of TCR clone 258143 (TRBV18, TRBJ2-7)
CASSPNNNEQYF

SEQ ID NO: 516287 - protein, 16 aa, Homo sapiens
  CDR3 for alpha chain variable domain of TCR clone 258144 (TRAV26-1, TRAJ37)
CIVRGDGSGNTGKLIF

SEQ ID NO: 516288 - protein, 14 aa, Homo sapiens
  CDR3 for beta chain variable domain of TCR clone 258144 (TRBV7-8, TRBJ2-7)
CASSPRDRVYEQYF

SEQ ID NO: 516289 - protein, 14 aa, Homo sapiens
  CDR3 for alpha chain variable domain of TCR clone 258145 (TRAV12-2, TRAJ44)
CAVNPAGTASKLTF

SEQ ID NO: 516290 - protein, 14 aa, Homo sapiens
  CDR3 for beta chain variable domain of TCR clone 258145 (TRBV5-1, TRBJ2-7)
CASSRGESLYEQYF

SEQ ID NO: 516291 - protein, 15 aa, Homo sapiens
  CDR3 for alpha chain variable domain of TCR clone 258146 (TRAV3, TRAJ4)
CAVRDGTGGYNQLIF

SEQ ID NO: 516292 - protein, 13 aa, Homo sapiens
  CDR3 for beta chain variable domain of TCR clone 258146 (TRBV12-5, TRBJ1-2)
CASGVRTGNGYTF

SEQ ID NO: 516293 - protein, 15 aa, Homo sapiens
  CDR3 for alpha chain variable domain of TCR clone 258147 (TRAV8-4, TRAJ37)
CAVSTRSGNTGKLIF

SEQ ID NO: 516294 - protein, 14 aa, Homo sapiens
  CDR3 for beta chain variable domain of TCR clone 258147 (TRBV7-8, TRBJ2-7)
CASSPRDRVYEQYF

SEQ ID NO: 516295 - protein, 13 aa, Homo sapiens
  CDR3 for alpha chain variable domain of TCR clone 258148 (TRAV8-4, TRAJ10)
CAAFTGGGNKLTF

SEQ ID NO: 516296 - protein, 12 aa, Homo sapiens
  CDR3 for beta chain variable domain of TCR clone 258148 (TRBV27, TRBJ2-2)
CASKLFTGELFF

SEQ ID NO: 516297 - protein, 11 aa, Homo sapiens
  CDR3 for alpha chain variable domain of TCR clone 258149 (TRAV17, TRAJ9)
CGFTGGFKTIF

SEQ ID NO: 516298 - protein, 19 aa, Homo sapiens
  CDR3 for beta chain variable domain of TCR clone 258149 (TRBV4-1, TRBJ2-1)
CASSQGPLPGLGSRNEQFF

SEQ ID NO: 516299 - protein, 15 aa, Homo sapiens
  CDR3 for alpha chain variable domain of TCR clone 258150 (TRAV38-2/DV8, TRAJ26)
CAYRSRDNYGQYFVF

SEQ ID NO: 516300 - protein, 14 aa, Homo sapiens
  CDR3 for beta chain variable domain of TCR clone 258150 (TRBV29-1, TRBJ1-3)
CSVADRVVGNTIYF

SEQ ID NO: 516301 - protein, 15 aa, Homo sapiens
  CDR3 for alpha chain variable domain of TCR clone 258151 (TRAV2, TRAJ28)
CAVPYSGAGSYQLTF

SEQ ID NO: 516302 - protein, 17 aa, Homo sapiens
  CDR3 for beta chain variable domain of TCR clone 258151 (TRBV20-1, TRBJ2-4)
CSAGDWASGGRENIQYF

SEQ ID NO: 516303 - protein, 17 aa, Homo sapiens
  CDR3 for alpha chain variable domain of TCR clone 258152 (TRAV4, TRAJ18)
CLVGERSVGSTLGRLYF

SEQ ID NO: 516304 - protein, 13 aa, Homo sapiens
  CDR3 for beta chain variable domain of TCR clone 258152 (TRBV7-2, TRBJ2-5)
CASSQTSVETQYF

SEQ ID NO: 516305 - protein, 16 aa, Homo sapiens
  CDR3 for alpha chain variable domain of TCR clone 258153 (TRAV1-2, TRAJ10)
CAVRGVLTGGGNKLTF

SEQ ID NO: 516306 - protein, 14 aa, Homo sapiens
  CDR3 for beta chain variable domain of TCR clone 258153 (TRBV7-9, TRBJ2-5)
CASSLDTAQETQYF

SEQ ID NO: 516307 - protein, 11 aa, Homo sapiens
  CDR3 for alpha chain variable domain of TCR clone 258154 (TRAV12-2, TRAJ33)
CAVTSNYQLIW

SEQ ID NO: 516308 - protein, 13 aa, Homo sapiens
  CDR3 for beta chain variable domain of TCR clone 258154 (TRBV12-4, TRBJ2-2)
CQQPGANTGELFF

SEQ ID NO: 516309 - protein, 14 aa, Homo sapiens
  CDR3 for alpha chain variable domain of TCR clone 258155 (TRAV8-3, TRAJ4)
CAVGAAGGYNKLIF

SEQ ID NO: 516310 - protein, 15 aa, Homo sapiens
  CDR3 for beta chain variable domain of TCR clone 258155 (TRBV28, TRBJ1-2)
CASSGSEQRAFGYTF

SEQ ID NO: 516311 - protein, 15 aa, Homo sapiens
  CDR3 for alpha chain variable domain of TCR clone 258156 (TRAV17, TRAJ35)
CATAFVIGFWNLLHC

SEQ ID NO: 516312 - protein, 15 aa, Homo sapiens
  CDR3 for beta chain variable domain of TCR clone 258156 (TRBV7-9, TRBJ2-7)
CASSLALAEAYEQYF

SEQ ID NO: 516313 - protein, 12 aa, Homo sapiens
  CDR3 for alpha chain variable domain of TCR clone 258157 (TRAV13-1, TRAJ49)
CAASPMGNQFYF

SEQ ID NO: 516314 - protein, 20 aa, Homo sapiens
  CDR3 for beta chain variable domain of TCR clone 258157 (TRBV7-8, TRBJ2-2)
CASSHLFPGPTIHITGELFF

SEQ ID NO: 516315 - protein, 16 aa, Homo sapiens
  CDR3 for alpha chain variable domain of TCR clone 258158 (TRAV30, TRAJ24)
CGTDIVDADSWGKFQF

SEQ ID NO: 516316 - protein, 17 aa, Homo sapiens
  CDR3 for beta chain variable domain of TCR clone 258158 (TRBV20-1, TRBJ2-1)
CSAPPRLAGTRYNEQFF

SEQ ID NO: 516317 - protein, 14 aa, Homo sapiens
  CDR3 for alpha chain variable domain of TCR clone 258159 (TRAV12-2, TRAJ13)
CAVKKTGGYQTVTF

SEQ ID NO: 516318 - protein, 14 aa, Homo sapiens
  CDR3 for beta chain variable domain of TCR clone 258159 (TRBV19, TRBJ2-1)
CASPTFVLSSEQFF

SEQ ID NO: 516319 - protein, 15 aa, Homo sapiens
  CDR3 for alpha chain variable domain of TCR clone 258160 (TRAV26-1, TRAJ56)
CIVRVDNGANSKLTL

SEQ ID NO: 516320 - protein, 14 aa, Homo sapiens
  CDR3 for beta chain variable domain of TCR clone 258160 (TRBV5-1, TRBJ2-7)
CASSRGESLYEQYF

SEQ ID NO: 516321 - protein, 10 aa, Homo sapiens
  CDR3 for alpha chain variable domain of TCR clone 258161 (TRAV13-2, TRAJ40)
CAKGKYIFGT

SEQ ID NO: 516322 - protein, 13 aa, Homo sapiens
  CDR3 for beta chain variable domain of TCR clone 258161 (TRBV27, TRBJ1-4)
CASSLMGDEKLFF

SEQ ID NO: 516323 - protein, 13 aa, Homo sapiens
  CDR3 for alpha chain variable domain of TCR clone 258162 (TRAV12-3, TRAJ9)
CAMRNTGGFKTIF

SEQ ID NO: 516324 - protein, 14 aa, Homo sapiens
  CDR3 for beta chain variable domain of TCR clone 258162 (TRBV11-2, TRBJ2-7)
CDSSSTGEGYEQYF

SEQ ID NO: 516325 - protein, 15 aa, Homo sapiens
  CDR3 for alpha chain variable domain of TCR clone 258163 (TRAV1-2, TRAJ45)
CAVRDSGGGADGLTF

SEQ ID NO: 516326 - protein, 15 aa, Homo sapiens
  CDR3 for beta chain variable domain of TCR clone 258163 (TRBV20-1, TRBJ2-7)
CSARDRVSGMDEQYI

SEQ ID NO: 516327 - protein, 14 aa, Homo sapiens
  CDR3 for alpha chain variable domain of TCR clone 258164 (TRAV35, TRAJ13)
CAGSPSGGYQKVTF

SEQ ID NO: 516328 - protein, 18 aa, Homo sapiens
  CDR3 for beta chain variable domain of TCR clone 258164 (TRBV12-4, TRBJ2-4)
CASSRTGAVDVAKNIQYF

SEQ ID NO: 516329 - protein, 13 aa, Homo sapiens
  CDR3 for alpha chain variable domain of TCR clone 258165 (TRAV8-4, TRAJ9)
CAVSETGGFKNIF

SEQ ID NO: 516330 - protein, 14 aa, Homo sapiens
  CDR3 for beta chain variable domain of TCR clone 258165 (TRBV18, TRBJ2-3)
CASSGLADTDTQYF

SEQ ID NO: 516331 - protein, 12 aa, Homo sapiens
  CDR3 for alpha chain variable domain of TCR clone 258166 (TRAV36/DV7, TRAJ54)
CAVVRGAQKLVF

SEQ ID NO: 516332 - protein, 18 aa, Homo sapiens
  CDR3 for beta chain variable domain of TCR clone 258166 (TRBV12-4, TRBJ2-2)
CASSLVAGTRGRTGELFF

SEQ ID NO: 516333 - protein, 16 aa, Homo sapiens
  CDR3 for alpha chain variable domain of TCR clone 258167 (TRAV1-2, TRAJ10)
CAVRGVLTGGGNKLTF

SEQ ID NO: 516334 - protein, 15 aa, Homo sapiens
  CDR3 for beta chain variable domain of TCR clone 258167 (TRBV15, TRBJ1-2)
CATSRVRASGSGYTF

SEQ ID NO: 516335 - protein, 17 aa, Homo sapiens
  CDR3 for alpha chain variable domain of TCR clone 258168 (TRAV23/DV6, TRAJ9)
CAASLSPPNTGGFKHIF

SEQ ID NO: 516336 - protein, 18 aa, Homo sapiens
  CDR3 for beta chain variable domain of TCR clone 258168 (TRBV4-1, TRBJ2-7)
CASSQDTGAGSGLNEQYF

SEQ ID NO: 516337 - protein, 13 aa, Homo sapiens
  CDR3 for alpha chain variable domain of TCR clone 258169 (TRAV2, TRAJ40)
CAVVTSGTYKYLF

SEQ ID NO: 516338 - protein, 16 aa, Homo sapiens
  CDR3 for beta chain variable domain of TCR clone 258169 (TRBV7-9, TRBJ1-3)
CASSLGAGSSGNTIYF

SEQ ID NO: 516339 - protein, 14 aa, Homo sapiens
  CDR3 for alpha chain variable domain of TCR clone 258170 (TRAV4, TRAJ23)
CLVGSYNQGGKLIF

SEQ ID NO: 516340 - protein, 15 aa, Homo sapiens
  CDR3 for beta chain variable domain of TCR clone 258170 (TRBV6-1, TRBJ2-1)
CASSEAAYSYNEQFF

SEQ ID NO: 516341 - protein, 16 aa, Homo sapiens
  CDR3 for alpha chain variable domain of TCR clone 258171 (TRAV16, TRAJ42)
CALRGYYGGSQGNLIF

SEQ ID NO: 516342 - protein, 14 aa, Homo sapiens
  CDR3 for beta chain variable domain of TCR clone 258171 (TRBV3-1, TRBJ2-5)
CASSQAVRQETQYF

SEQ ID NO: 516343 - protein, 11 aa, Homo sapiens
  CDR3 for alpha chain variable domain of TCR clone 258172 (TRAV21, TRAJ48)
CAVDGTEKLTF

SEQ ID NO: 516344 - protein, 16 aa, Homo sapiens
  CDR3 for beta chain variable domain of TCR clone 258172 (TRBV19, TRBJ2-1)
CASSSKGTRSYKEQFF

SEQ ID NO: 516345 - protein, 15 aa, Homo sapiens
  CDR3 for alpha chain variable domain of TCR clone 258173 (TRAV8-2, TRAJ9)
CVVSDPGTGGFKTIF

SEQ ID NO: 516346 - protein, 11 aa, Homo sapiens
  CDR3 for beta chain variable domain of TCR clone 258173 (TRBV11-2, TRBJ2-2)
CASSLPGELFF

SEQ ID NO: 516347 - protein, 15 aa, Homo sapiens
  CDR3 for alpha chain variable domain of TCR clone 258174 (TRAV3, TRAJ4)
CAVRDGTGGYNKLIF

SEQ ID NO: 516348 - protein, 17 aa, Homo sapiens
  CDR3 for beta chain variable domain of TCR clone 258174 (TRBV4-1, TRBJ2-7)
CASSQPTSGSRGYEQYF

SEQ ID NO: 516349 - protein, 17 aa, Homo sapiens
  CDR3 for alpha chain variable domain of TCR clone 258175 (TRAV13-1, TRAJ31)
CAPRDRLMFGDGTQLVV

SEQ ID NO: 516350 - protein, 12 aa, Homo sapiens
  CDR3 for beta chain variable domain of TCR clone 258175 (TRBV7-9, TRBJ1-5)
CASSPQGQPQHF

SEQ ID NO: 516351 - protein, 14 aa, Homo sapiens
  CDR3 for alpha chain variable domain of TCR clone 258176 (TRAV26-1, TRAJ38)
CIADNAGNNRKLIW

SEQ ID NO: 516352 - protein, 13 aa, Homo sapiens
  CDR3 for beta chain variable domain of TCR clone 258176 (TRBV15, TRBJ1-6)
CATSGGRNSALHF

SEQ ID NO: 516353 - protein, 14 aa, Homo sapiens
  CDR3 for alpha chain variable domain of TCR clone 258177 (TRAV8-6, TRAJ48)
CAVSESFGNEKLTF

SEQ ID NO: 516354 - protein, 17 aa, Homo sapiens
  CDR3 for beta chain variable domain of TCR clone 258177 (TRBV11-2, TRBJ2-1)
CASSLYPPGVEYNEQFF

SEQ ID NO: 516355 - protein, 14 aa, Homo sapiens
  CDR3 for alpha chain variable domain of TCR clone 258178 (TRAV26-1, TRAJ57)
CIRAGQGGSEKLVF

SEQ ID NO: 516356 - protein, 13 aa, Homo sapiens
  CDR3 for beta chain variable domain of TCR clone 258178 (TRBV19, TRBJ2-7)
CASSLTTSYEQYL

SEQ ID NO: 516357 - protein, 13 aa, Homo sapiens
  CDR3 for alpha chain variable domain of TCR clone 258179 (TRAV13-2, TRAJ48)
CAEMDFGNEKLTF

SEQ ID NO: 516358 - protein, 14 aa, Homo sapiens
  CDR3 for beta chain variable domain of TCR clone 258179 (TRBV7-9, TRBJ2-1)
CASSPRDSLYEQFF

SEQ ID NO: 516359 - protein, 13 aa, Homo sapiens
  CDR3 for alpha chain variable domain of TCR clone 258180 (TRAV1-2, TRAJ9)
CAVLNTGGFKTIF

SEQ ID NO: 516360 - protein, 16 aa, Homo sapiens
  CDR3 for beta chain variable domain of TCR clone 258180 (TRBV20-1, TRBJ1-4)
CSARPYGGELNEKLFF

SEQ ID NO: 516361 - protein, 14 aa, Homo sapiens
  CDR3 for alpha chain variable domain of TCR clone 258181 (TRAV1-2, TRAJ8)
FAVREDTGFQKLVF

SEQ ID NO: 516362 - protein, 15 aa, Homo sapiens
  CDR3 for beta chain variable domain of TCR clone 258181 (TRBV12-4, TRBJ2-5)
CASSPPTGLQETQYF

SEQ ID NO: 516363 - protein, 15 aa, Homo sapiens
  CDR3 for alpha chain variable domain of TCR clone 258182 (TRAV21, TRAJ24)
CAARSSTDSWGKFSL

SEQ ID NO: 516364 - protein, 13 aa, Homo sapiens
  CDR3 for beta chain variable domain of TCR clone 258182 (TRBV11-2, TRBJ2-5)
CASSSTGEETQYF

SEQ ID NO: 516365 - protein, 15 aa, Homo sapiens
  CDR3 for alpha chain variable domain of TCR clone 258183 (TRAV19, TRAJ9)
CALSEARTGGVKTIF

SEQ ID NO: 516366 - protein, 17 aa, Homo sapiens
  CDR3 for beta chain variable domain of TCR clone 258183 (TRBV28, TRBJ2-5)
CASSTPEGDALQETRYF

SEQ ID NO: 516367 - protein, 14 aa, Homo sapiens
  CDR3 for alpha chain variable domain of TCR clone 258184 (TRAV30, TRAJ33)
CGTVAPRSNYQLIW

SEQ ID NO: 516368 - protein, 16 aa, Homo sapiens
  CDR3 for beta chain variable domain of TCR clone 258184 (TRBV3-1, TRBJ2-5)
CASSPGQFNGFGTQDF

SEQ ID NO: 516369 - protein, 12 aa, Homo sapiens
  CDR3 for alpha chain variable domain of TCR clone 258185 (TRAV12-2, TRAJ31)
CAVNTHDARLMF

SEQ ID NO: 516370 - protein, 17 aa, Homo sapiens
  CDR3 for beta chain variable domain of TCR clone 258185 (TRBV20-1, TRBJ1-6)
CSARGGYTFSYNSPLHF

SEQ ID NO: 516371 - protein, 21 aa, Homo sapiens
  CDR3 for alpha chain variable domain of TCR clone 258186 (TRAV1-1, TRAJ6)
CLLLMRCERLERTGGSYIPTF

SEQ ID NO: 516372 - protein, 13 aa, Homo sapiens
  CDR3 for beta chain variable domain of TCR clone 258186 (TRBV10-2, TRBJ2-7)
CASGASGGYEQYF

SEQ ID NO: 516373 - protein, 14 aa, Homo sapiens
  CDR3 for alpha chain variable domain of TCR clone 258187 (TRAV20, TRAJ56)
CAVQFGGANSKLTF

SEQ ID NO: 516374 - protein, 14 aa, Homo sapiens
  CDR3 for beta chain variable domain of TCR clone 258187 (TRBV5-1, TRBJ2-7)
CASSRGESLYEQYF

SEQ ID NO: 516375 - protein, 14 aa, Homo sapiens
  CDR3 for alpha chain variable domain of TCR clone 258188 (TRAV12-2, TRAJ40)
CAVKIPSGTYEYIF

SEQ ID NO: 516376 - protein, 15 aa, Homo sapiens
  CDR3 for beta chain variable domain of TCR clone 258188 (TRBV7-8, TRBJ2-7)
CASSLGTGNPYEQYF

SEQ ID NO: 516377 - protein, 13 aa, Homo sapiens
  CDR3 for alpha chain variable domain of TCR clone 258189 (TRAV17, TRAJ5)
CATMDTGRRALPF

SEQ ID NO: 516378 - protein, 15 aa, Homo sapiens
  CDR3 for beta chain variable domain of TCR clone 258189 (TRBV20-1, TRBJ2-5)
CSATRTSGSLETQYF

SEQ ID NO: 516379 - protein, 14 aa, Homo sapiens
  CDR3 for alpha chain variable domain of TCR clone 258190 (TRAV13-1, TRAJ35)
CAASKGGVGNVLHC

SEQ ID NO: 516380 - protein, 13 aa, Homo sapiens
  CDR3 for beta chain variable domain of TCR clone 258190 (TRBV7-3, TRBJ1-1)
CASSQDWVAEAFF

SEQ ID NO: 516381 - protein, 19 aa, Homo sapiens
  CDR3 for alpha chain variable domain of TCR clone 258191 (TRAV29/DV5, TRAJ49)
CSVLLCSKLTVDTGNQFYF

SEQ ID NO: 516382 - protein, 13 aa, Homo sapiens
  CDR3 for beta chain variable domain of TCR clone 258191 (TRBV25-1, TRBJ1-2)
CASSEAGASGYTF

SEQ ID NO: 516383 - protein, 14 aa, Homo sapiens
  CDR3 for alpha chain variable domain of TCR clone 258192 (TRAV29/DV5, TRAJ4)
CAATVLGGYNKLIF

SEQ ID NO: 516384 - protein, 17 aa, Homo sapiens
  CDR3 for beta chain variable domain of TCR clone 258192 (TRBV11-2, TRBJ2-1)
CASSLYPPGVEYNAQFF

SEQ ID NO: 516385 - protein, 14 aa, Homo sapiens
  CDR3 for alpha chain variable domain of TCR clone 258193 (TRAV1-2, TRAJ16)
CAVNGFSDGQKLLF

SEQ ID NO: 516386 - protein, 13 aa, Homo sapiens
  CDR3 for beta chain variable domain of TCR clone 258193 (TRBV10-3, TRBJ2-7)
CASKLAVNYEQYF

SEQ ID NO: 516387 - protein, 14 aa, Homo sapiens
  CDR3 for alpha chain variable domain of TCR clone 258194 (TRAV3, TRAJ21)
CAVRDKYNFNKFYF

SEQ ID NO: 516388 - protein, 14 aa, Homo sapiens
  CDR3 for beta chain variable domain of TCR clone 258194 (TRBV27, TRBJ2-3)
CAGRDSPITDTQYF

SEQ ID NO: 516389 - protein, 14 aa, Homo sapiens
  CDR3 for alpha chain variable domain of TCR clone 258195 (TRAV16, TRAJ42)
CALSGMGSQGNLIF

SEQ ID NO: 516390 - protein, 15 aa, Homo sapiens
  CDR3 for beta chain variable domain of TCR clone 258195 (TRBV7-8, TRBJ2-7)
CASSLERAGSYEQYF

SEQ ID NO: 516391 - protein, 14 aa, Homo sapiens
  CDR3 for alpha chain variable domain of TCR clone 258196 (TRAV26-1, TRAJ54)
CIVRRTQGAQKLVF

SEQ ID NO: 516392 - protein, 15 aa, Homo sapiens
  CDR3 for beta chain variable domain of TCR clone 258196 (TRBV6-1, TRBJ2-3)
CASSERGGITDTQYF

SEQ ID NO: 516393 - protein, 15 aa, Homo sapiens
  CDR3 for alpha chain variable domain of TCR clone 258197 (TRAV12-1, TRAJ44)
CVADLPTGTASKLTF

SEQ ID NO: 516394 - protein, 13 aa, Homo sapiens
  CDR3 for beta chain variable domain of TCR clone 258197 (TRBV6-5, TRBJ2-5)
CASSPQRGETQYF

SEQ ID NO: 516395 - protein, 17 aa, Homo sapiens
  CDR3 for alpha chain variable domain of TCR clone 258198 (TRAV13-1, TRAJ52)
CAASSGAVGTSYGKLTF

SEQ ID NO: 516396 - protein, 12 aa, Homo sapiens
  CDR3 for beta chain variable domain of TCR clone 258198 (TRBV7-8, TRBJ2-7)
CASSLGDREQYF

SEQ ID NO: 516397 - protein, 12 aa, Homo sapiens
  CDR3 for alpha chain variable domain of TCR clone 258199 (TRAV2, TRAJ36)
CAEFTGANNLFF

SEQ ID NO: 516398 - protein, 18 aa, Homo sapiens
  CDR3 for beta chain variable domain of TCR clone 258199 (TRBV19, TRBJ1-1)
CASSIDGGDYTGNTEAFF

SEQ ID NO: 516399 - protein, 11 aa, Homo sapiens
  CDR3 for alpha chain variable domain of TCR clone 258200 (TRAV25, TRAJ47)
CAGLYVNKLVF

SEQ ID NO: 516400 - protein, 14 aa, Homo sapiens
  CDR3 for beta chain variable domain of TCR clone 258200 (TRBV19, TRBJ2-1)
CASKEGVQVNEQFF

SEQ ID NO: 516401 - protein, 18 aa, Homo sapiens
  CDR3 for alpha chain variable domain of TCR clone 258201 (TRAV26-1, TRAJ23)
CIVRVGLEVWNQGGKRIF

SEQ ID NO: 516402 - protein, 16 aa, Homo sapiens
  CDR3 for beta chain variable domain of TCR clone 258201 (TRBV25-1, TRBJ2-3)
CASSEFGGGRTDTQYF

SEQ ID NO: 516403 - protein, 16 aa, Homo sapiens
  CDR3 for alpha chain variable domain of TCR clone 258202 (TRAV26-1, TRAJ37)
CIVRGDGSGNTGKLIF

SEQ ID NO: 516404 - protein, 17 aa, Homo sapiens
  CDR3 for beta chain variable domain of TCR clone 258202 (TRBV4-1, TRBJ2-7)
CASSRDPLGVRGGDQYF

SEQ ID NO: 516405 - protein, 11 aa, Homo sapiens
  CDR3 for alpha chain variable domain of TCR clone 258203 (TRAV21, TRAJ39)
LLVNAGNMLTF

SEQ ID NO: 516406 - protein, 16 aa, Homo sapiens
  CDR3 for beta chain variable domain of TCR clone 258203 (TRBV9, TRBJ2-7)
CASSVGLGGGTYEQHF

SEQ ID NO: 516407 - protein, 13 aa, Homo sapiens
  CDR3 for alpha chain variable domain of TCR clone 258204 (TRAV2, TRAJ40)
CAVVTSGTYKYIF

SEQ ID NO: 516408 - protein, 14 aa, Homo sapiens
  CDR3 for beta chain variable domain of TCR clone 258204 (TRBV19, TRBJ2-1)
CASPTCVLSGEQFS

SEQ ID NO: 516409 - protein, 12 aa, Homo sapiens
  CDR3 for alpha chain variable domain of TCR clone 258205 (TRAV1-1, TRAJ8)
CAGGTGFQKLVF

SEQ ID NO: 516410 - protein, 20 aa, Homo sapiens
  CDR3 for beta chain variable domain of TCR clone 258205 (TRBV28, TRBJ2-1)
CASTPIGRSPGLAGGNEQFF

SEQ ID NO: 516411 - protein, 12 aa, Homo sapiens
  CDR3 for alpha chain variable domain of TCR clone 258206 (TRAV12-2, TRAJ21)
CAVNRNSNKFYF

SEQ ID NO: 516412 - protein, 14 aa, Homo sapiens
  CDR3 for beta chain variable domain of TCR clone 258206 (TRBV12-4, TRBJ2-3)
CASSLSGATDTQYF

SEQ ID NO: 516413 - protein, 14 aa, Homo sapiens
  CDR3 for alpha chain variable domain of TCR clone 258207 (TRAV27, TRAJ36)
CAGPPKRGANNLFF

SEQ ID NO: 516414 - protein, 13 aa, Homo sapiens
  CDR3 for beta chain variable domain of TCR clone 258207 (TRBV7-9, TRBJ1-2)
CASSLKQNYGYTF

SEQ ID NO: 516415 - protein, 13 aa, Homo sapiens
  CDR3 for alpha chain variable domain of TCR clone 258208 (TRAV8-3, TRAJ36)
CAVGATGANNLFF

SEQ ID NO: 516416 - protein, 13 aa, Homo sapiens
  CDR3 for beta chain variable domain of TCR clone 258208 (TRBV5-1, TRBJ2-1)
CASSLGSYNEQFF

SEQ ID NO: 516417 - protein, 13 aa, Homo sapiens
  CDR3 for alpha chain variable domain of TCR clone 258209 (TRAV8-3, TRAJ44)
CAVVPGTASKLTY

SEQ ID NO: 516418 - protein, 14 aa, Homo sapiens
  CDR3 for beta chain variable domain of TCR clone 258209 (TRBV11-2, TRBJ2-3)
CASSRLARTDTQYF

SEQ ID NO: 516419 - protein, 14 aa, Homo sapiens
  CDR3 for alpha chain variable domain of TCR clone 258210 (TRAV17, TRAJ57)
CATDPQGGSDKLVF

SEQ ID NO: 516420 - protein, 20 aa, Homo sapiens
  CDR3 for beta chain variable domain of TCR clone 258210 (TRBV28, TRBJ2-1)
CASTPIGRSPGLAGGNEQFF

SEQ ID NO: 516421 - protein, 11 aa, Homo sapiens
  CDR3 for alpha chain variable domain of TCR clone 258211 (TRAV16, TRAJ49)
CALRSVNQFYF

SEQ ID NO: 516422 - protein, 16 aa, Homo sapiens
  CDR3 for beta chain variable domain of TCR clone 258211 (TRBV20-1, TRBJ1-5)
CSARDVGGGWIQPQHF

SEQ ID NO: 516423 - protein, 13 aa, Homo sapiens
  CDR3 for alpha chain variable domain of TCR clone 258212 (TRAV12-3, TRAJ13)
CAMGTGGYQKVTF

SEQ ID NO: 516424 - protein, 15 aa, Homo sapiens
  CDR3 for beta chain variable domain of TCR clone 258212 (TRBV7-2, TRBJ2-1)
CASSSGLAGGNEQFF

SEQ ID NO: 516425 - protein, 15 aa, Homo sapiens
  CDR3 for alpha chain variable domain of TCR clone 258213 (TRAV2, TRAJ9)
CAVEDRGTGGFKTIF

SEQ ID NO: 516426 - protein, 14 aa, Homo sapiens
  CDR3 for beta chain variable domain of TCR clone 258213 (TRBV19, TRBJ2-1)
CASPTVVLSGEQFF

SEQ ID NO: 516427 - protein, 12 aa, Homo sapiens
  CDR3 for alpha chain variable domain of TCR clone 258214 (TRAV12-3, TRAJ17)
CAMTLTGNKLTF

SEQ ID NO: 516428 - protein, 16 aa, Homo sapiens
  CDR3 for beta chain variable domain of TCR clone 258214 (TRBV20-1, TRBJ2-6)
CSASSQGYDGANVLTF

SEQ ID NO: 516429 - protein, 11 aa, Homo sapiens
  CDR3 for alpha chain variable domain of TCR clone 258215 (TRAV12-2, TRAJ31)
CAILNNARLMF

SEQ ID NO: 516430 - protein, 17 aa, Homo sapiens
  CDR3 for beta chain variable domain of TCR clone 258215 (TRBV13, TRBJ2-3)
CASSLSRVAGGRNTQYF

SEQ ID NO: 516431 - protein, 14 aa, Homo sapiens
  CDR3 for alpha chain variable domain of TCR clone 258216 (TRAV12-1, TRAJ30)
CVVHIGGRDDKIIF

SEQ ID NO: 516432 - protein, 13 aa, Homo sapiens
  CDR3 for beta chain variable domain of TCR clone 258216 (TRBV12-5, TRBJ2-1)
CASGLGRGNEQFF

SEQ ID NO: 516433 - protein, 13 aa, Homo sapiens
  CDR3 for alpha chain variable domain of TCR clone 258217 (TRAV21, TRAJ57)
CAVTQGGSANLVF

SEQ ID NO: 516434 - protein, 16 aa, Homo sapiens
  CDR3 for beta chain variable domain of TCR clone 258217 (TRBV29-1, TRBJ2-7)
CSVEDAEDGTAYEQYF

SEQ ID NO: 516435 - protein, 12 aa, Homo sapiens
  CDR3 for alpha chain variable domain of TCR clone 258218 (TRAV12-2, TRAJ10)
WGVTGGGNKLTF

SEQ ID NO: 516436 - protein, 16 aa, Homo sapiens
  CDR3 for beta chain variable domain of TCR clone 258218 (TRBV4-1, TRBJ1-4)
CASSQDLRRGGEKLFF

SEQ ID NO: 516437 - protein, 14 aa, Homo sapiens
  CDR3 for alpha chain variable domain of TCR clone 258219 (TRAV17, TRAJ54)
CATDANQGAQKLVF

SEQ ID NO: 516438 - protein, 14 aa, Homo sapiens
  CDR3 for beta chain variable domain of TCR clone 258219 (TRBV25-1, TRBJ1-1)
CASPHLGGNTEAFF

SEQ ID NO: 516439 - protein, 12 aa, Homo sapiens
  CDR3 for alpha chain variable domain of TCR clone 258220 (TRAV12-3, TRAJ17)
CAMTLTGTKLTF

SEQ ID NO: 516440 - protein, 16 aa, Homo sapiens
  CDR3 for beta chain variable domain of TCR clone 258220 (TRBV20-1, TRBJ2-7)
CSARDRVSGMDEQYFG

SEQ ID NO: 516441 - protein, 15 aa, Homo sapiens
  CDR3 for alpha chain variable domain of TCR clone 258221 (TRAV14/DV4, TRAJ26)
CAMREGQHYGQNFVF

SEQ ID NO: 516442 - protein, 13 aa, Homo sapiens
  CDR3 for beta chain variable domain of TCR clone 258221 (TRBV24-1, TRBJ2-2)
CATSDWSTGELFF

SEQ ID NO: 516443 - protein, 15 aa, Homo sapiens
  CDR3 for alpha chain variable domain of TCR clone 258222 (TRAV38-1, TRAJ37)
CAFIFGSGNPGKLIF

SEQ ID NO: 516444 - protein, 16 aa, Homo sapiens
  CDR3 for beta chain variable domain of TCR clone 258222 (TRBV6-1, TRBJ2-3)
CASSEVIGQGTDTQYF

SEQ ID NO: 516445 - protein, 14 aa, Homo sapiens
  CDR3 for alpha chain variable domain of TCR clone 258223 (TRAV12-2, TRAJ13)
CAVKKTGGYQKVTF

SEQ ID NO: 516446 - protein, 17 aa, Homo sapiens
  CDR3 for beta chain variable domain of TCR clone 258223 (TRBV25-1, TRBJ2-1)
CASSAYGQGRGVYEQFF

SEQ ID NO: 516447 - protein, 15 aa, Homo sapiens
  CDR3 for alpha chain variable domain of TCR clone 258224 (TRAV21, TRAJ53)
CATLNSGGSNYKLTF

SEQ ID NO: 516448 - protein, 14 aa, Homo sapiens
  CDR3 for beta chain variable domain of TCR clone 258224 (TRBV2, TRBJ1-1)
CASRSGTMNTEAFF

SEQ ID NO: 516449 - protein, 18 aa, Homo sapiens
  CDR3 for alpha chain variable domain of TCR clone 258225 (TRAV13-1, TRAJ52)
CAASKRSAGGTSYGSLHF

SEQ ID NO: 516450 - protein, 13 aa, Homo sapiens
  CDR3 for beta chain variable domain of TCR clone 258225 (TRBV12-4, TRBJ1-2)
CASSLRQGKGYTF

SEQ ID NO: 516451 - protein, 14 aa, Homo sapiens
  CDR3 for alpha chain variable domain of TCR clone 258226 (TRAV12-3, TRAJ10)
SHLPLKGGGNKLTF

SEQ ID NO: 516452 - protein, 14 aa, Homo sapiens
  CDR3 for beta chain variable domain of TCR clone 258226 (TRBV10-3, TRBJ2-7)
CHQCGTSETYEQYF

SEQ ID NO: 516453 - protein, 19 aa, Homo sapiens
  CDR3 for alpha chain variable domain of TCR clone 258227 (TRAV1-2, TRAJ26)
CLLPLCCERPDNYGQNFVF

SEQ ID NO: 516454 - protein, 15 aa, Homo sapiens
  CDR3 for beta chain variable domain of TCR clone 258227 (TRBV7-2, TRBJ2-7)
CASSTPGLTRGEQYF

SEQ ID NO: 516455 - protein, 14 aa, Homo sapiens
  CDR3 for alpha chain variable domain of TCR clone 258228 (TRAV8-4, TRAJ23)
CAVSAPGSGGKPSF

SEQ ID NO: 516456 - protein, 17 aa, Homo sapiens
  CDR3 for beta chain variable domain of TCR clone 258228 (TRBV4-3, TRBJ2-3)
CASSQDPLAGAVDTQYF

SEQ ID NO: 516457 - protein, 13 aa, Homo sapiens
  CDR3 for alpha chain variable domain of TCR clone 258229 (TRAV12-1, TRAJ31)
CVVNMNNNARLMF

SEQ ID NO: 516458 - protein, 15 aa, Homo sapiens
  CDR3 for beta chain variable domain of TCR clone 258229 (TRBV4-1, TRBJ1-2)
CASSQGQGAVYGYTF

SEQ ID NO: 516459 - protein, 13 aa, Homo sapiens
  CDR3 for alpha chain variable domain of TCR clone 258230 (TRAV21, TRAJ10)
CAVPTGGGNKLTF

SEQ ID NO: 516460 - protein, 17 aa, Homo sapiens
  CDR3 for beta chain variable domain of TCR clone 258230 (TRBV10-3, TRBJ2-4)
CTSVPSVNKGSKNIQYF

SEQ ID NO: 516461 - protein, 14 aa, Homo sapiens
  CDR3 for alpha chain variable domain of TCR clone 258231 (TRAV12-2, TRAJ40)
CAVKVPSGSYKYIF

SEQ ID NO: 516462 - protein, 14 aa, Homo sapiens
  CDR3 for beta chain variable domain of TCR clone 258231 (TRBV15, TRBJ2-3)
CATSRGGSTDTQYF

SEQ ID NO: 516463 - protein, 11 aa, Homo sapiens
  CDR3 for alpha chain variable domain of TCR clone 258232 (TRAV1-2, TRAJ31)
CAVNNNARLMF

SEQ ID NO: 516464 - protein, 13 aa, Homo sapiens
  CDR3 for beta chain variable domain of TCR clone 258232 (TRBV19, TRBJ2-7)
CASSMGSWPEQYF

SEQ ID NO: 516465 - protein, 10 aa, Homo sapiens
  CDR3 for alpha chain variable domain of TCR clone 258233 (TRAV16, TRAJ22)
SAMYLRQLTF

SEQ ID NO: 516466 - protein, 13 aa, Homo sapiens
  CDR3 for beta chain variable domain of TCR clone 258233 (TRBV7-9, TRBJ1-4)
CASSLPGIEKLFF

SEQ ID NO: 516467 - protein, 14 aa, Homo sapiens
  CDR3 for alpha chain variable domain of TCR clone 258234 (TRAV8-6, TRAJ52)
CAVIGGTSYGKLTF

SEQ ID NO: 516468 - protein, 15 aa, Homo sapiens
  CDR3 for beta chain variable domain of TCR clone 258234 (TRBV11-2, TRBJ2-5)
CASSLGAGGVETQYV

SEQ ID NO: 516469 - protein, 13 aa, Homo sapiens
  CDR3 for alpha chain variable domain of TCR clone 258235 (TRAV12-1, TRAJ21)
CVVIGDHFNKFYF

SEQ ID NO: 516470 - protein, 14 aa, Homo sapiens
  CDR3 for beta chain variable domain of TCR clone 258235 (TRBV7-3, TRBJ2-2)
CASSLYPLTGELFF

SEQ ID NO: 516471 - protein, 18 aa, Homo sapiens
  CDR3 for alpha chain variable domain of TCR clone 258236 (TRAV26-2, TRAJ54)
CLLRDVEVGIQGAQKLVF

SEQ ID NO: 516472 - protein, 16 aa, Homo sapiens
  CDR3 for beta chain variable domain of TCR clone 258236 (TRBV6-1, TRBJ2-5)
CASSETLDRGAETQYF

SEQ ID NO: 516473 - protein, 19 aa, Homo sapiens
  CDR3 for alpha chain variable domain of TCR clone 258237 (TRAV2, TRAJ20)
ILQVREADAAVYRDCKLSF

SEQ ID NO: 516474 - protein, 13 aa, Homo sapiens
  CDR3 for beta chain variable domain of TCR clone 258237 (TRBV6-4, TRBJ2-1)
CASSASVNNEQFF

SEQ ID NO: 516475 - protein, 13 aa, Homo sapiens
  CDR3 for alpha chain variable domain of TCR clone 258238 (TRAV26-1, TRAJ48)
CLVRVVGDEKLTF

SEQ ID NO: 516476 - protein, 19 aa, Homo sapiens
  CDR3 for beta chain variable domain of TCR clone 258238 (TRBV11-3, TRBJ2-2)
CASSTRPGAKATNTGELFF

SEQ ID NO: 516477 - protein, 11 aa, Homo sapiens
  CDR3 for alpha chain variable domain of TCR clone 258239 (TRAV1-2, TRAJ20)
CAVANDYKLSF

SEQ ID NO: 516478 - protein, 14 aa, Homo sapiens
  CDR3 for beta chain variable domain of TCR clone 258239 (TRBV7-9, TRBJ1-1)
CASTPLQSYTEAVF

SEQ ID NO: 516479 - protein, 14 aa, Homo sapiens
  CDR3 for alpha chain variable domain of TCR clone 258240 (TRAV12-3, TRAJ10)
SHLPLTGGGNKLTF

SEQ ID NO: 516480 - protein, 12 aa, Homo sapiens
  CDR3 for beta chain variable domain of TCR clone 258240 (TRBV7-3, TRBJ2-5)
CASSSQGGTQYF

SEQ ID NO: 516481 - protein, 14 aa, Homo sapiens
  CDR3 for alpha chain variable domain of TCR clone 258241 (TRAV12-2, TRAJ17)
CAVLFKAAGNKLTF

SEQ ID NO: 516482 - protein, 14 aa, Homo sapiens
  CDR3 for beta chain variable domain of TCR clone 258241 (TRBV6-1, TRBJ1-3)
CASEQGGGGNTIYF

SEQ ID NO: 516483 - protein, 13 aa, Homo sapiens
  CDR3 for alpha chain variable domain of TCR clone 258242 (TRAV3, TRAJ21)
CAVREPDFNKFYF

SEQ ID NO: 516484 - protein, 18 aa, Homo sapiens
  CDR3 for beta chain variable domain of TCR clone 258242 (TRBV11-2, TRBJ2-3)
CASSLGGASRGAPNKQYF

SEQ ID NO: 516485 - protein, 12 aa, Homo sapiens
  CDR3 for alpha chain variable domain of TCR clone 258243 (TRAV2, TRAJ31)
CAVADNNARLMF

SEQ ID NO: 516486 - protein, 14 aa, Homo sapiens
  CDR3 for beta chain variable domain of TCR clone 258243 (TRBV28, TRBJ1-5)
CASSRTGLNQPQHC

SEQ ID NO: 516487 - protein, 10 aa, Homo sapiens
  CDR3 for alpha chain variable domain of TCR clone 258244 (TRAV1-2, TRAJ31)
CAFFDAGLMF

SEQ ID NO: 516488 - protein, 15 aa, Homo sapiens
  CDR3 for beta chain variable domain of TCR clone 258244 (TRBV4-1, TRBJ1-4)
CASSDTGGTNEKLFF

SEQ ID NO: 516489 - protein, 13 aa, Homo sapiens
  CDR3 for alpha chain variable domain of TCR clone 258245 (TRAV13-1, TRAJ13)
CAASKWGYQKVTF

SEQ ID NO: 516490 - protein, 16 aa, Homo sapiens
  CDR3 for beta chain variable domain of TCR clone 258245 (TRBV18, TRBJ1-2)
CASSPPERVTIYGYTF

SEQ ID NO: 516491 - protein, 14 aa, Homo sapiens
  CDR3 for alpha chain variable domain of TCR clone 258246 (TRAV12-2, TRAJ13)
CAVKKTVGYQKVTF

SEQ ID NO: 516492 - protein, 13 aa, Homo sapiens
  CDR3 for beta chain variable domain of TCR clone 258246 (TRBV12-5, TRBJ2-1)
CASGLGRGNEQFF

SEQ ID NO: 516493 - protein, 13 aa, Homo sapiens
  CDR3 for alpha chain variable domain of TCR clone 258247 (TRAV16, TRAJ34)
CALSGRNTDKLIF

SEQ ID NO: 516494 - protein, 15 aa, Homo sapiens
  CDR3 for beta chain variable domain of TCR clone 258247 (TRBV27, TRBJ2-1)
CASSNGGGSSNEQFF

SEQ ID NO: 516495 - protein, 13 aa, Homo sapiens
  CDR3 for alpha chain variable domain of TCR clone 258248 (TRAV2, TRAJ47)
CAVDREYGNKLAF

SEQ ID NO: 516496 - protein, 17 aa, Homo sapiens
  CDR3 for beta chain variable domain of TCR clone 258248 (TRBV15, TRBJ1-5)
CATSRVKGIYSNQPQHF

SEQ ID NO: 516497 - protein, 15 aa, Homo sapiens
  CDR3 for alpha chain variable domain of TCR clone 258249 (TRAV8-6, TRAJ50)
CAVSVRRTSYDKVIF

SEQ ID NO: 516498 - protein, 15 aa, Homo sapiens
  CDR3 for beta chain variable domain of TCR clone 258249 (TRBV20-1, TRBJ2-7)
CSARDRVSGMDEQYF

SEQ ID NO: 516499 - protein, 15 aa, Homo sapiens
  CDR3 for alpha chain variable domain of TCR clone 258250 (TRAV2, TRAJ9)
CAVDDRGTGGFKTIF

SEQ ID NO: 516500 - protein, 16 aa, Homo sapiens
  CDR3 for beta chain variable domain of TCR clone 258250 (TRBV12-5, TRBJ2-5)
CASGPRTSGNQENQYF

SEQ ID NO: 516501 - protein, 12 aa, Homo sapiens
  CDR3 for alpha chain variable domain of TCR clone 258251 (TRAV2, TRAJ23)
CAVEDVGGKLIF

SEQ ID NO: 516502 - protein, 15 aa, Homo sapiens
  CDR3 for beta chain variable domain of TCR clone 258251 (TRBV7-2, TRBJ1-1)
CASSFAGDRDTEAFF

SEQ ID NO: 516503 - protein, 14 aa, Homo sapiens
  CDR3 for alpha chain variable domain of TCR clone 258252 (TRAV8-2, TRAJ37)
CVVSISGNTGKLIF

SEQ ID NO: 516504 - protein, 17 aa, Homo sapiens
  CDR3 for beta chain variable domain of TCR clone 258252 (TRBV5-1, TRBJ1-6)
CASSPSLQGSDNSPLHF

SEQ ID NO: 516505 - protein, 11 aa, Homo sapiens
  CDR3 for alpha chain variable domain of TCR clone 258253 (TRAV3, TRAJ13)
CAVTSYQKVTF

SEQ ID NO: 516506 - protein, 15 aa, Homo sapiens
  CDR3 for beta chain variable domain of TCR clone 258253 (TRBV7-9, TRBJ2-7)
CASSSSGLAVYDQYF

SEQ ID NO: 516507 - protein, 14 aa, Homo sapiens
  CDR3 for alpha chain variable domain of TCR clone 258254 (TRAV35, TRAJ42)
CAGRYGGSQGNLIF

SEQ ID NO: 516508 - protein, 14 aa, Homo sapiens
  CDR3 for beta chain variable domain of TCR clone 258254 (TRBV7-6, TRBJ2-3)
CASSVAGGTDTQYF

SEQ ID NO: 516509 - protein, 11 aa, Homo sapiens
  CDR3 for alpha chain variable domain of TCR clone 258255 (TRAV3, TRAJ21)
CAVGNFNKFCF

SEQ ID NO: 516510 - protein, 13 aa, Homo sapiens
  CDR3 for beta chain variable domain of TCR clone 258255 (TRBV20-1, TRBJ2-5)
CSARGDYQEAQYF

SEQ ID NO: 516511 - protein, 15 aa, Homo sapiens
  CDR3 for alpha chain variable domain of TCR clone 258256 (TRAV21, TRAJ52)
CAVRGGGTSYGKLTF

SEQ ID NO: 516512 - protein, 15 aa, Homo sapiens
  CDR3 for beta chain variable domain of TCR clone 258256 (TRBV18, TRBJ1-5)
CASSLSDRSNQPQHF

SEQ ID NO: 516513 - protein, 13 aa, Homo sapiens
  CDR3 for alpha chain variable domain of TCR clone 258257 (TRAV21, TRAJ20)
CAVGLRVDYKLSF

SEQ ID NO: 516514 - protein, 15 aa, Homo sapiens
  CDR3 for beta chain variable domain of TCR clone 258257 (TRBV28, TRBJ2-5)
CASSSGRTIQETQYF

SEQ ID NO: 516515 - protein, 14 aa, Homo sapiens
  CDR3 for alpha chain variable domain of TCR clone 258258 (TRAV12-3, TRAJ15)
CATIPPQAGTALIF

SEQ ID NO: 516516 - protein, 14 aa, Homo sapiens
  CDR3 for beta chain variable domain of TCR clone 258258 (TRBV20-1, TRBJ2-2)
CSARKRLATGELFF

SEQ ID NO: 516517 - protein, 14 aa, Homo sapiens
  CDR3 for alpha chain variable domain of TCR clone 258259 (TRAV1-2, TRAJ16)
CAVNRFSDGQKLLF

SEQ ID NO: 516518 - protein, 16 aa, Homo sapiens
  CDR3 for beta chain variable domain of TCR clone 258259 (TRBV27, TRBJ2-2)
CAGSFRGLVRTGELFF

SEQ ID NO: 516519 - protein, 14 aa, Homo sapiens
  CDR3 for alpha chain variable domain of TCR clone 258260 (TRAV1-2, TRAJ16)
YAVNRFSDGQKLLF

SEQ ID NO: 516520 - protein, 13 aa, Homo sapiens
  CDR3 for beta chain variable domain of TCR clone 258260 (TRBV24-1, TRBJ2-2)
CATSDWSTGELFF

SEQ ID NO: 516521 - protein, 12 aa, Homo sapiens
  CDR3 for alpha chain variable domain of TCR clone 258261 (TRAV2, TRAJ12)
CARMDSSYKLIF

SEQ ID NO: 516522 - protein, 14 aa, Homo sapiens
  CDR3 for beta chain variable domain of TCR clone 258261 (TRBV12-4, TRBJ2-5)
CASSLRGVDETQYF

SEQ ID NO: 516523 - protein, 13 aa, Homo sapiens
  CDR3 for alpha chain variable domain of TCR clone 258262 (TRAV1-1, TRAJ31)
CASYLNNNARLMF

SEQ ID NO: 516524 - protein, 13 aa, Homo sapiens
  CDR3 for beta chain variable domain of TCR clone 258262 (TRBV15, TRBJ1-6)
CATSGGLNSALHF

SEQ ID NO: 516525 - protein, 15 aa, Homo sapiens
  CDR3 for alpha chain variable domain of TCR clone 258263 (TRAV13-1, TRAJ17)
CAASIERAAGNKLTF

SEQ ID NO: 516526 - protein, 12 aa, Homo sapiens
  CDR3 for beta chain variable domain of TCR clone 258263 (TRBV14, TRBJ2-7)
CASSLYKDEQYF

SEQ ID NO: 516527 - protein, 15 aa, Homo sapiens
  CDR3 for alpha chain variable domain of TCR clone 258264 (TRAV21, TRAJ32)
CAVNYYGGAKNKLIF

SEQ ID NO: 516528 - protein, 18 aa, Homo sapiens
  CDR3 for beta chain variable domain of TCR clone 258264 (TRBV7-9, TRBJ2-1)
CASSTGLAGGSSYNEQFF

SEQ ID NO: 516529 - protein, 15 aa, Homo sapiens
  CDR3 for alpha chain variable domain of TCR clone 258265 (TRAV1-2, TRAJ30)
CAVRPHGTRDDKIIF

SEQ ID NO: 516530 - protein, 13 aa, Homo sapiens
  CDR3 for beta chain variable domain of TCR clone 258265 (TRBV4-1, TRBJ2-7)
CASSQGKAYEQYF

SEQ ID NO: 516531 - protein, 22 aa, Homo sapiens
  CDR3 for alpha chain variable domain of TCR clone 258266 (TRAV27, )
CAARRHAGNNHIQNPDPAVYQL

SEQ ID NO: 516532 - protein, 13 aa, Homo sapiens
  CDR3 for beta chain variable domain of TCR clone 258266 (TRBV12-5, TRBJ2-3)
CASGDRQSDTQYF

SEQ ID NO: 516533 - protein, 11 aa, Homo sapiens
  CDR3 for alpha chain variable domain of TCR clone 258267 (TRAV17, TRAJ31)
CATDRTARLMF

SEQ ID NO: 516534 - protein, 13 aa, Homo sapiens
  CDR3 for beta chain variable domain of TCR clone 258267 (TRBV7-9, TRBJ1-2)
CASSLKQNYGYTF

SEQ ID NO: 516535 - protein, 13 aa, Homo sapiens
  CDR3 for alpha chain variable domain of TCR clone 258268 (TRAV21, TRAJ27)
CAARPGNAGKSTF

SEQ ID NO: 516536 - protein, 14 aa, Homo sapiens
  CDR3 for beta chain variable domain of TCR clone 258268 (TRBV20-1, TRBJ2-1)
CSAAGSGEYNEQLF

SEQ ID NO: 516537 - protein, 12 aa, Homo sapiens
  CDR3 for alpha chain variable domain of TCR clone 258269 (TRAV3, TRAJ20)
CAVRDPNYKLSF

SEQ ID NO: 516538 - protein, 13 aa, Homo sapiens
  CDR3 for beta chain variable domain of TCR clone 258269 (TRBV9, TRBJ2-1)
CASSVGQGGEQFF

SEQ ID NO: 516539 - protein, 14 aa, Homo sapiens
  CDR3 for alpha chain variable domain of TCR clone 258270 (TRAV16, TRAJ39)
CAISKNNAGNMLTF

SEQ ID NO: 516540 - protein, 16 aa, Homo sapiens
  CDR3 for beta chain variable domain of TCR clone 258270 (TRBV6-6, TRBJ2-1)
CASSYSFSGSYNEQFF

SEQ ID NO: 516541 - protein, 14 aa, Homo sapiens
  CDR3 for alpha chain variable domain of TCR clone 258271 (TRAV2, TRAJ37)
CAVDFTSNTGKLIF

SEQ ID NO: 516542 - protein, 13 aa, Homo sapiens
  CDR3 for beta chain variable domain of TCR clone 258271 (TRBV7-3, TRBJ1-1)
CASSLTQGTEAFF

SEQ ID NO: 516543 - protein, 16 aa, Homo sapiens
  CDR3 for alpha chain variable domain of TCR clone 258272 (TRAV20, TRAJ53)
CAVQGNSGGSNYKLTF

SEQ ID NO: 516544 - protein, 16 aa, Homo sapiens
  CDR3 for beta chain variable domain of TCR clone 258272 (TRBV4-2, TRBJ2-5)
CASSQELVGSQETQYF

SEQ ID NO: 516545 - protein, 14 aa, Homo sapiens
  CDR3 for alpha chain variable domain of TCR clone 258273 (TRAV23/DV6, TRAJ40)
CAASLTSGTYKYIF

SEQ ID NO: 516546 - protein, 13 aa, Homo sapiens
  CDR3 for beta chain variable domain of TCR clone 258273 (TRBV12-4, TRBJ1-2)
CASSSGLTVISTF

SEQ ID NO: 516547 - protein, 13 aa, Homo sapiens
  CDR3 for alpha chain variable domain of TCR clone 258274 (TRAV12-1, TRAJ26)
GVVRRNYGQNFVF

SEQ ID NO: 516548 - protein, 15 aa, Homo sapiens
  CDR3 for beta chain variable domain of TCR clone 258274 (TRBV28, TRBJ2-1)
CASSIIAGGRSEQFF

SEQ ID NO: 516549 - protein, 15 aa, Homo sapiens
  CDR3 for alpha chain variable domain of TCR clone 258275 (TRAV26-1, TRAJ29)
CIVRVEGSGNTPLAS

SEQ ID NO: 516550 - protein, 14 aa, Homo sapiens
  CDR3 for beta chain variable domain of TCR clone 258275 (TRBV18, TRBJ2-5)
CASSPGVSQETQYF

SEQ ID NO: 516551 - protein, 14 aa, Homo sapiens
  CDR3 for alpha chain variable domain of TCR clone 258276 (TRAV3, TRAJ16)
CCERLKSDGQKLLF

SEQ ID NO: 516552 - protein, 15 aa, Homo sapiens
  CDR3 for beta chain variable domain of TCR clone 258276 (TRBV28, TRBJ2-7)
CASSPGGRGLYEQYF

SEQ ID NO: 516553 - protein, 14 aa, Homo sapiens
  CDR3 for alpha chain variable domain of TCR clone 258277 (TRAV1-2, TRAJ8)
CAVREDTGFQKLVF

SEQ ID NO: 516554 - protein, 14 aa, Homo sapiens
  CDR3 for beta chain variable domain of TCR clone 258277 (TRBV11-2, TRBJ2-3)
CASSRLARTDMQYF

SEQ ID NO: 516555 - protein, 13 aa, Homo sapiens
  CDR3 for alpha chain variable domain of TCR clone 258278 (TRAV17, TRAJ11)
CATRSSGYSTLTF

SEQ ID NO: 516556 - protein, 14 aa, Homo sapiens
  CDR3 for beta chain variable domain of TCR clone 258278 (TRBV20-1, TRBJ2-1)
CSPNDEASYNEQFF

SEQ ID NO: 516557 - protein, 10 aa, Homo sapiens
  CDR3 for alpha chain variable domain of TCR clone 258279 (TRAV17, TRAJ52)
CATEAGGTSY

SEQ ID NO: 516558 - protein, 14 aa, Homo sapiens
  CDR3 for beta chain variable domain of TCR clone 258279 (TRBV28, TRBJ1-5)
CASSLGVLVKPQHF

SEQ ID NO: 516559 - protein, 16 aa, Homo sapiens
  CDR3 for alpha chain variable domain of TCR clone 258280 (TRAV8-3, TRAJ45)
CAVGDGSGGGADGLTF

SEQ ID NO: 516560 - protein, 16 aa, Homo sapiens
  CDR3 for beta chain variable domain of TCR clone 258280 (TRBV12-4, TRBJ1-5)
CASSSGPRGSNQPQHF

SEQ ID NO: 516561 - protein, 13 aa, Homo sapiens
  CDR3 for alpha chain variable domain of TCR clone 258281 (TRAV8-3, TRAJ48)
CAVVPFGNEKLTF

SEQ ID NO: 516562 - protein, 16 aa, Homo sapiens
  CDR3 for beta chain variable domain of TCR clone 258281 (TRBV5-1, TRBJ2-7)
CASSLEGLAGLYEQYL

SEQ ID NO: 516563 - protein, 14 aa, Homo sapiens
  CDR3 for alpha chain variable domain of TCR clone 258282 (TRAV2, TRAJ9)
CAVEDRSGGFKTIF

SEQ ID NO: 516564 - protein, 15 aa, Homo sapiens
  CDR3 for beta chain variable domain of TCR clone 258282 (TRBV6-5, TRBJ2-1)
CASSYDAGEGNEQFF

SEQ ID NO: 516565 - protein, 17 aa, Homo sapiens
  CDR3 for alpha chain variable domain of TCR clone 258283 (TRAV3, TRAJ6)
CAVRDGPRAGGSYILKF

SEQ ID NO: 516566 - protein, 14 aa, Homo sapiens
  CDR3 for beta chain variable domain of TCR clone 258283 (TRBV7-2, TRBJ2-7)
CASSPKTSFYEQYF

SEQ ID NO: 516567 - protein, 12 aa, Homo sapiens
  CDR3 for alpha chain variable domain of TCR clone 258284 (TRAV12-3, TRAJ17)
CAMTLTGNNLTF

SEQ ID NO: 516568 - protein, 14 aa, Homo sapiens
  CDR3 for beta chain variable domain of TCR clone 258284 (TRBV4-1, TRBJ2-2)
CASSQAVNTGELFF

SEQ ID NO: 516569 - protein, 16 aa, Homo sapiens
  CDR3 for alpha chain variable domain of TCR clone 258285 (TRAV30, TRAJ24)
CGTEIVGADSWGKFLF

SEQ ID NO: 516570 - protein, 17 aa, Homo sapiens
  CDR3 for beta chain variable domain of TCR clone 258285 (TRBV20-1, TRBJ2-2)
CSASGSGQGGLTGELFF

SEQ ID NO: 516571 - protein, 15 aa, Homo sapiens
  CDR3 for alpha chain variable domain of TCR clone 258286 (TRAV21, TRAJ24)
CAARSSTDSWGKLQF

SEQ ID NO: 516572 - protein, 11 aa, Homo sapiens
  CDR3 for beta chain variable domain of TCR clone 258286 (TRBV3-1, TRBJ2-7)
CASTSLGEQYF

SEQ ID NO: 516573 - protein, 16 aa, Homo sapiens
  CDR3 for alpha chain variable domain of TCR clone 258287 (TRAV3, TRAJ10)
CAMRDMRAGGGNKLTF

SEQ ID NO: 516574 - protein, 15 aa, Homo sapiens
  CDR3 for beta chain variable domain of TCR clone 258287 (TRBV5-1, TRBJ2-1)
CASSPPRAPYNEQFF

SEQ ID NO: 516575 - protein, 15 aa, Homo sapiens
  CDR3 for alpha chain variable domain of TCR clone 258288 (TRAV25, TRAJ52)
CAGTSGGTSYGKLTF

SEQ ID NO: 516576 - protein, 16 aa, Homo sapiens
  CDR3 for beta chain variable domain of TCR clone 258288 (TRBV15, TRBJ1-2)
SATSRGPRTGGGGYTF

SEQ ID NO: 516577 - protein, 12 aa, Homo sapiens
  CDR3 for alpha chain variable domain of TCR clone 258289 (TRAV12-2, TRAJ36)
CAAPRGANNLFF

SEQ ID NO: 516578 - protein, 13 aa, Homo sapiens
  CDR3 for beta chain variable domain of TCR clone 258289 (TRBV7-9, TRBJ1-2)
CASSLKQNYGYTF

SEQ ID NO: 516579 - protein, 11 aa, Homo sapiens
  CDR3 for alpha chain variable domain of TCR clone 258290 (TRAV12-3, TRAJ41)
CAMNAREALNF

SEQ ID NO: 516580 - protein, 16 aa, Homo sapiens
  CDR3 for beta chain variable domain of TCR clone 258290 (TRBV7-8, TRBJ2-3)
CASSTEGQRETDTQYS

SEQ ID NO: 516581 - protein, 14 aa, Homo sapiens
  CDR3 for alpha chain variable domain of TCR clone 258291 (TRAV17, TRAJ57)
CATDPQGGSEKPVF

SEQ ID NO: 516582 - protein, 14 aa, Homo sapiens
  CDR3 for beta chain variable domain of TCR clone 258291 (TRBV13, TRBJ2-7)
CASSLKGASYEQYF

SEQ ID NO: 516583 - protein, 14 aa, Homo sapiens
  CDR3 for alpha chain variable domain of TCR clone 258292 (TRAV12-2, TRAJ13)
CAVKKTGGYQKVTF

SEQ ID NO: 516584 - protein, 15 aa, Homo sapiens
  CDR3 for beta chain variable domain of TCR clone 258292 (TRBV10-3, TRBJ2-3)
CAISEALSSTDTQYF

SEQ ID NO: 516585 - protein, 18 aa, Homo sapiens
  CDR3 for alpha chain variable domain of TCR clone 258293 (TRAV21, TRAJ52)
CAVRPSPAGGPSYGKLTF

SEQ ID NO: 516586 - protein, 15 aa, Homo sapiens
  CDR3 for beta chain variable domain of TCR clone 258293 (TRBV7-9, TRBJ2-7)
FASSSSGLAVYEQYF

SEQ ID NO: 516587 - protein, 13 aa, Homo sapiens
  CDR3 for alpha chain variable domain of TCR clone 258294 (TRAV30, TRAJ24)
CGTVTDSWGKLQL

SEQ ID NO: 516588 - protein, 14 aa, Homo sapiens
  CDR3 for beta chain variable domain of TCR clone 258294 (TRBV25-1, TRBJ1-4)
CQQSRDSTNEKLFF

SEQ ID NO: 516589 - protein, 12 aa, Homo sapiens
  CDR3 for alpha chain variable domain of TCR clone 258295 (TRAV35, TRAJ43)
CASAYNNNDMRF

SEQ ID NO: 516590 - protein, 14 aa, Homo sapiens
  CDR3 for beta chain variable domain of TCR clone 258295 (TRBV2, TRBJ2-2)
CASSWEGATGELFF

SEQ ID NO: 516591 - protein, 14 aa, Homo sapiens
  CDR3 for alpha chain variable domain of TCR clone 258296 (TRAV16, TRAJ44)
CALSTTGTASKFTF

SEQ ID NO: 516592 - protein, 14 aa, Homo sapiens
  CDR3 for beta chain variable domain of TCR clone 258296 (TRBV20-1, TRBJ2-7)
CSAISREASYEQYF

SEQ ID NO: 516593 - protein, 14 aa, Homo sapiens
  CDR3 for alpha chain variable domain of TCR clone 258297 (TRAV23/DV6, TRAJ12)
CAASRMDSSYKLIF

SEQ ID NO: 516594 - protein, 13 aa, Homo sapiens
  CDR3 for beta chain variable domain of TCR clone 258297 (TRBV24-1, TRBJ2-1)
CATSAGPYNEQFF

SEQ ID NO: 516595 - protein, 16 aa, Homo sapiens
  CDR3 for alpha chain variable domain of TCR clone 258298 (TRAV30, TRAJ24)
FGTEIVDADSWGKFQF

SEQ ID NO: 516596 - protein, 14 aa, Homo sapiens
  CDR3 for beta chain variable domain of TCR clone 258298 (TRBV9, TRBJ2-4)
CASSPSGTSGFQYF

SEQ ID NO: 516597 - protein, 17 aa, Homo sapiens
  CDR3 for alpha chain variable domain of TCR clone 258299 (TRAV20, TRAJ4)
CAVQLVLFSGGYNKLIF

SEQ ID NO: 516598 - protein, 14 aa, Homo sapiens
  CDR3 for beta chain variable domain of TCR clone 258299 (TRBV27, TRBJ1-2)
CASSLRRTNYGYTF

SEQ ID NO: 516599 - protein, 14 aa, Homo sapiens
  CDR3 for alpha chain variable domain of TCR clone 258300 (TRAV8-6, TRAJ34)
CAVSDLGNTDKLIF

SEQ ID NO: 516600 - protein, 15 aa, Homo sapiens
  CDR3 for beta chain variable domain of TCR clone 258300 (TRBV2, TRBJ2-7)
CASSEGLARSYEQYF

SEQ ID NO: 516601 - protein, 15 aa, Homo sapiens
  CDR3 for alpha chain variable domain of TCR clone 258301 (TRAV3, TRAJ20)
CAVRDIKLSDYKLSF

SEQ ID NO: 516602 - protein, 15 aa, Homo sapiens
  CDR3 for beta chain variable domain of TCR clone 258301 (TRBV7-9, TRBJ1-6)
CATSSPGRGNSPHHF

SEQ ID NO: 516603 - protein, 16 aa, Homo sapiens
  CDR3 for alpha chain variable domain of TCR clone 258302 (TRAV20, TRAJ10)
CAVLRGLTGGGNKLTF

SEQ ID NO: 516604 - protein, 14 aa, Homo sapiens
  CDR3 for beta chain variable domain of TCR clone 258302 (TRBV19, TRBJ1-5)
CASRAPDSFLSQHV

SEQ ID NO: 516605 - protein, 14 aa, Homo sapiens
  CDR3 for alpha chain variable domain of TCR clone 258303 (TRAV9-2, TRAJ39)
CALYIYNAGNMLTF

SEQ ID NO: 516606 - protein, 17 aa, Homo sapiens
  CDR3 for beta chain variable domain of TCR clone 258303 (TRBV4-1, TRBJ1-4)
CASSQEGPRGVEEKLFF

SEQ ID NO: 516607 - protein, 12 aa, Homo sapiens
  CDR3 for alpha chain variable domain of TCR clone 258304 (TRAV13-2, TRAJ8)
CAPWLGFQKLVF

SEQ ID NO: 516608 - protein, 16 aa, Homo sapiens
  CDR3 for beta chain variable domain of TCR clone 258304 (TRBV19, TRBJ1-1)
CASSPTRFWPGTEAFF

SEQ ID NO: 516609 - protein, 16 aa, Homo sapiens
  CDR3 for alpha chain variable domain of TCR clone 258305 (TRAV17, TRAJ52)
CATGIIGSTSYGKLTF

SEQ ID NO: 516610 - protein, 14 aa, Homo sapiens
  CDR3 for beta chain variable domain of TCR clone 258305 (TRBV7-3, TRBJ2-2)
CASSSGGYTGELFF

SEQ ID NO: 516611 - protein, 15 aa, Homo sapiens
  CDR3 for alpha chain variable domain of TCR clone 258306 (TRAV3, TRAJ22)
CAVRDRGGSARQLTF

SEQ ID NO: 516612 - protein, 14 aa, Homo sapiens
  CDR3 for beta chain variable domain of TCR clone 258306 (TRBV5-1, TRBJ2-7)
CASSLVRGSGEQYF

SEQ ID NO: 516613 - protein, 14 aa, Homo sapiens
  CDR3 for alpha chain variable domain of TCR clone 258307 (TRAV8-4, TRAJ17)
CAVSDQAAGNKLTF

SEQ ID NO: 516614 - protein, 17 aa, Homo sapiens
  CDR3 for beta chain variable domain of TCR clone 258307 (TRBV7-8, TRBJ2-6)
CASSAGTGGAGANVLTF

SEQ ID NO: 516615 - protein, 12 aa, Homo sapiens
  CDR3 for alpha chain variable domain of TCR clone 258308 (TRAV21, TRAJ33)
CAKIYSNYQLIW

SEQ ID NO: 516616 - protein, 14 aa, Homo sapiens
  CDR3 for beta chain variable domain of TCR clone 258308 (TRBV2, TRBJ2-7)
CASSLTSGGYEQYF

SEQ ID NO: 516617 - protein, 13 aa, Homo sapiens
  CDR3 for alpha chain variable domain of TCR clone 258309 (TRAV2, TRAJ24)
CAVPTDSWGKLQF

SEQ ID NO: 516618 - protein, 11 aa, Homo sapiens
  CDR3 for beta chain variable domain of TCR clone 258309 (TRBV7-2, TRBJ2-7)
CASSRTYEQYF

SEQ ID NO: 516619 - protein, 13 aa, Homo sapiens
  CDR3 for alpha chain variable domain of TCR clone 258310 (TRAV23/DV6, TRAJ22)
CAPYSCSARQLTF

SEQ ID NO: 516620 - protein, 13 aa, Homo sapiens
  CDR3 for beta chain variable domain of TCR clone 258310 (TRBV6-1, TRBJ1-1)
CASSRQGNTEAFF

SEQ ID NO: 516621 - protein, 15 aa, Homo sapiens
  CDR3 for alpha chain variable domain of TCR clone 258311 (TRAV17, TRAJ57)
CATGPSQGGSEKLVF

SEQ ID NO: 516622 - protein, 14 aa, Homo sapiens
  CDR3 for beta chain variable domain of TCR clone 258311 (TRBV12-5, TRBJ2-5)
CASGSRTHQETQYC

SEQ ID NO: 516623 - protein, 11 aa, Homo sapiens
  CDR3 for alpha chain variable domain of TCR clone 258312 (TRAV21, TRAJ39)
LLVNAGNMLTF

SEQ ID NO: 516624 - protein, 14 aa, Homo sapiens
  CDR3 for beta chain variable domain of TCR clone 258312 (TRBV11-2, TRBJ2-3)
CASSRLARTDTQYF

SEQ ID NO: 516625 - protein, 21 aa, Homo sapiens
  CDR3 for alpha chain variable domain of TCR clone 258313 (TRAV25, TRAJ7)
TATQTTDVGTYFSPGNNRLAF

SEQ ID NO: 516626 - protein, 14 aa, Homo sapiens
  CDR3 for beta chain variable domain of TCR clone 258313 (TRBV11-2, TRBJ2-2)
CASSLGLRVRELFF

SEQ ID NO: 516627 - protein, 14 aa, Homo sapiens
  CDR3 for alpha chain variable domain of TCR clone 258314 (TRAV3, TRAJ36)
CAVRDGTGANNLFY

SEQ ID NO: 516628 - protein, 16 aa, Homo sapiens
  CDR3 for beta chain variable domain of TCR clone 258314 (TRBV20-1, TRBJ2-6)
CSAREGPGVGANVLTF

SEQ ID NO: 516629 - protein, 12 aa, Homo sapiens
  CDR3 for alpha chain variable domain of TCR clone 258315 (TRAV12-3, TRAJ17)
CAMTLTGNKQTF

SEQ ID NO: 516630 - protein, 15 aa, Homo sapiens
  CDR3 for beta chain variable domain of TCR clone 258315 (TRBV20-1, TRBJ2-7)
CSARGRVSGMDEQYF

SEQ ID NO: 516631 - protein, 13 aa, Homo sapiens
  CDR3 for alpha chain variable domain of TCR clone 258316 (TRAV27, TRAJ49)
CAPRPYTGNQFYF

SEQ ID NO: 516632 - protein, 16 aa, Homo sapiens
  CDR3 for beta chain variable domain of TCR clone 258316 (TRBV4-1, TRBJ1-2)
CASSQDAGQVLYGYIF

SEQ ID NO: 516633 - protein, 14 aa, Homo sapiens
  CDR3 for alpha chain variable domain of TCR clone 258317 (TRAV12-1, TRAJ38)
CVVHNAGNNRKLIW

SEQ ID NO: 516634 - protein, 12 aa, Homo sapiens
  CDR3 for beta chain variable domain of TCR clone 258317 (TRBV11-2, TRBJ2-2)
CASSLGGGELFF

SEQ ID NO: 516635 - protein, 14 aa, Homo sapiens
  CDR3 for alpha chain variable domain of TCR clone 258318 (TRAV27, TRAJ22)
CAGVSVLGKRQLTF

SEQ ID NO: 516636 - protein, 11 aa, Homo sapiens
  CDR3 for beta chain variable domain of TCR clone 258318 (TRBV11-2, TRBJ1-1)
CASSINTEAFF

SEQ ID NO: 516637 - protein, 14 aa, Homo sapiens
  CDR3 for alpha chain variable domain of TCR clone 258319 (TRAV29/DV5, TRAJ36)
CAARRKTGENNLFF

SEQ ID NO: 516638 - protein, 12 aa, Homo sapiens
  CDR3 for beta chain variable domain of TCR clone 258319 (TRBV12-5, TRBJ2-5)
CASGQGVETQYF

SEQ ID NO: 516639 - protein, 13 aa, Homo sapiens
  CDR3 for alpha chain variable domain of TCR clone 258320 (TRAV13-2, TRAJ13)
CAERPGGYQKVTF

SEQ ID NO: 516640 - protein, 15 aa, Homo sapiens
  CDR3 for beta chain variable domain of TCR clone 258320 (TRBV9, TRBJ1-6)
CASSVAGTGDSPLHF

SEQ ID NO: 516641 - protein, 16 aa, Homo sapiens
  CDR3 for alpha chain variable domain of TCR clone 258321 (TRAV30, TRAJ24)
CGTEIVDADSWGKFQF

SEQ ID NO: 516642 - protein, 16 aa, Homo sapiens
  CDR3 for beta chain variable domain of TCR clone 258321 (TRBV7-3, TRBJ2-2)
FASSLKRGTLSGELFF

SEQ ID NO: 516643 - protein, 14 aa, Homo sapiens
  CDR3 for alpha chain variable domain of TCR clone 258322 (TRAV23/DV6, TRAJ13)
CAASETGGYQKVTF

SEQ ID NO: 516644 - protein, 16 aa, Homo sapiens
  CDR3 for beta chain variable domain of TCR clone 258322 (TRBV5-1, TRBJ1-3)
CASSPWAPSSGNTIYC

SEQ ID NO: 516645 - protein, 13 aa, Homo sapiens
  CDR3 for alpha chain variable domain of TCR clone 258323 (TRAV30, TRAJ20)
CGTEDRSDYKLSF

SEQ ID NO: 516646 - protein, 15 aa, Homo sapiens
  CDR3 for beta chain variable domain of TCR clone 258323 (TRBV2, TRBJ1-2)
CASTQLQDSNYGYTF

SEQ ID NO: 516647 - protein, 16 aa, Homo sapiens
  CDR3 for alpha chain variable domain of TCR clone 258324 (TRAV30, TRAJ24)
CDTEIVDADSWGKFQF

SEQ ID NO: 516648 - protein, 13 aa, Homo sapiens
  CDR3 for beta chain variable domain of TCR clone 258324 (TRBV18, TRBJ1-2)
CASSASATEGYTF

SEQ ID NO: 516649 - protein, 15 aa, Homo sapiens
  CDR3 for alpha chain variable domain of TCR clone 258325 (TRAV30, TRAJ57)
CGTAIPQGGSEKLAF

SEQ ID NO: 516650 - protein, 17 aa, Homo sapiens
  CDR3 for beta chain variable domain of TCR clone 258325 (TRBV11-2, TRBJ2-1)
CASSLYPPGVEYNEQFF

SEQ ID NO: 516651 - protein, 13 aa, Homo sapiens
  CDR3 for alpha chain variable domain of TCR clone 258326 (TRAV4, TRAJ33)
CLVGDMNNYQLIW

SEQ ID NO: 516652 - protein, 20 aa, Homo sapiens
  CDR3 for beta chain variable domain of TCR clone 258326 (TRBV28, TRBJ2-1)
CASTPIGRSPGLAGGNEQFF

SEQ ID NO: 516653 - protein, 16 aa, Homo sapiens
  CDR3 for alpha chain variable domain of TCR clone 258327 (TRAV3, TRAJ37)
CAVRPHGSGNTGKLIF

SEQ ID NO: 516654 - protein, 15 aa, Homo sapiens
  CDR3 for beta chain variable domain of TCR clone 258327 (TRBV5-5, TRBJ2-7)
CASSLAAPLSYEQYV

SEQ ID NO: 516655 - protein, 17 aa, Homo sapiens
  CDR3 for alpha chain variable domain of TCR clone 258328 (TRAV38-2/DV8, TRAJ23)
CALSRKLIFGQGTELSV

SEQ ID NO: 516656 - protein, 17 aa, Homo sapiens
  CDR3 for beta chain variable domain of TCR clone 258328 (TRBV5-4, TRBJ2-1)
SASSSAGGRGPYNEQFF

SEQ ID NO: 516657 - protein, 18 aa, Homo sapiens
  CDR3 for alpha chain variable domain of TCR clone 258329 (TRAV21, TRAJ52)
CAVRPSPAGGTSYGKLTF

SEQ ID NO: 516658 - protein, 16 aa, Homo sapiens
  CDR3 for beta chain variable domain of TCR clone 258329 (TRBV19, TRBJ2-2)
CASSAAGTGGTGELFF

SEQ ID NO: 516659 - protein, 12 aa, Homo sapiens
  CDR3 for alpha chain variable domain of TCR clone 258330 (TRAV1-1, TRAJ8)
CAGGTGFQKLVF

SEQ ID NO: 516660 - protein, 13 aa, Homo sapiens
  CDR3 for beta chain variable domain of TCR clone 258330 (TRBV12-5, TRBJ2-3)
CASGDRQSDTQYF

SEQ ID NO: 516661 - protein, 17 aa, Homo sapiens
  CDR3 for alpha chain variable domain of TCR clone 258331 (TRAV4, TRAJ42)
CLVGVLNYGVSQGNLIF

SEQ ID NO: 516662 - protein, 12 aa, Homo sapiens
  CDR3 for beta chain variable domain of TCR clone 258331 (TRBV20-1, TRBJ2-1)
CSAQYTYNEQFF

SEQ ID NO: 516663 - protein, 14 aa, Homo sapiens
  CDR3 for alpha chain variable domain of TCR clone 258332 (TRAV2, TRAJ9)
CAVEYRSGGFKTIF

SEQ ID NO: 516664 - protein, 18 aa, Homo sapiens
  CDR3 for beta chain variable domain of TCR clone 258332 (TRBV11-2, TRBJ2-3)
CASSLGGASRGAPNTQYF

SEQ ID NO: 516665 - protein, 12 aa, Homo sapiens
  CDR3 for alpha chain variable domain of TCR clone 258333 (TRAV12-3, TRAJ17)
CAMTLTGNKLTF

SEQ ID NO: 516666 - protein, 14 aa, Homo sapiens
  CDR3 for beta chain variable domain of TCR clone 258333 (TRBV18, TRBJ1-4)
CASSPGPNGEKLFF

SEQ ID NO: 516667 - protein, 14 aa, Homo sapiens
  CDR3 for alpha chain variable domain of TCR clone 258334 (TRAV12-2, TRAJ53)
CAVKGGGSNDKLTF

SEQ ID NO: 516668 - protein, 14 aa, Homo sapiens
  CDR3 for beta chain variable domain of TCR clone 258334 (TRBV19, TRBJ2-1)
CASPTFVLSGEQFF

SEQ ID NO: 516669 - protein, 14 aa, Homo sapiens
  CDR3 for alpha chain variable domain of TCR clone 258335 (TRAV2, TRAJ9)
CAVEPNTGGFKTIF

SEQ ID NO: 516670 - protein, 13 aa, Homo sapiens
  CDR3 for beta chain variable domain of TCR clone 258335 (TRBV20-1, TRBJ2-1)
CSASTGTSNEQFF

SEQ ID NO: 516671 - protein, 12 aa, Homo sapiens
  CDR3 for alpha chain variable domain of TCR clone 258336 (TRAV1-2, TRAJ37)
CAFPGNTGKLIF

SEQ ID NO: 516672 - protein, 15 aa, Homo sapiens
  CDR3 for beta chain variable domain of TCR clone 258336 (TRBV9, TRBJ1-6)
CASSVAGTGDSPLHF

SEQ ID NO: 516673 - protein, 13 aa, Homo sapiens
  CDR3 for alpha chain variable domain of TCR clone 258337 (TRAV12-2, TRAJ39)
CAVNNNAGNMLTF

SEQ ID NO: 516674 - protein, 16 aa, Homo sapiens
  CDR3 for beta chain variable domain of TCR clone 258337 (TRBV13, TRBJ2-2)
CASSPRTGEHTGELFF

SEQ ID NO: 516675 - protein, 12 aa, Homo sapiens
  CDR3 for alpha chain variable domain of TCR clone 258338 (TRAV17, TRAJ57)
CATDGGSEKLVF

SEQ ID NO: 516676 - protein, 12 aa, Homo sapiens
  CDR3 for beta chain variable domain of TCR clone 258338 (TRBV29-1, TRBJ2-2)
CSVDKYPGELFF

SEQ ID NO: 516677 - protein, 15 aa, Homo sapiens
  CDR3 for alpha chain variable domain of TCR clone 258339 (TRAV25, TRAJ52)
CAGRPGGTSYGKLTF

SEQ ID NO: 516678 - protein, 16 aa, Homo sapiens
  CDR3 for beta chain variable domain of TCR clone 258339 (TRBV11-2, TRBJ2-7)
CASSTVTAPKTYEQYF

SEQ ID NO: 516679 - protein, 19 aa, Homo sapiens
  CDR3 for alpha chain variable domain of TCR clone 258340 (TRAV3, TRAJ6)
CAVRDRNPSGSGGSYIPTF

SEQ ID NO: 516680 - protein, 15 aa, Homo sapiens
  CDR3 for beta chain variable domain of TCR clone 258340 (TRBV18, TRBJ2-7)
CASSPTFMDSYEQYF

SEQ ID NO: 516681 - protein, 14 aa, Homo sapiens
  CDR3 for alpha chain variable domain of TCR clone 258341 (TRAV8-4, TRAJ17)
CAVSDQAAGNKLTF

SEQ ID NO: 516682 - protein, 12 aa, Homo sapiens
  CDR3 for beta chain variable domain of TCR clone 258341 (TRBV19, TRBJ1-5)
CASSIAQQPQHF

SEQ ID NO: 516683 - protein, 12 aa, Homo sapiens
  CDR3 for alpha chain variable domain of TCR clone 258342 (TRAV36/DV7, TRAJ54)
CAVVRGAQKLVF

SEQ ID NO: 516684 - protein, 12 aa, Homo sapiens
  CDR3 for beta chain variable domain of TCR clone 258342 (TRBV12-4, TRBJ2-7)
CASSLGGHEQYF

SEQ ID NO: 516685 - protein, 14 aa, Homo sapiens
  CDR3 for alpha chain variable domain of TCR clone 258343 (TRAV20, TRAJ17)
CAVQARAACNKLTF

SEQ ID NO: 516686 - protein, 13 aa, Homo sapiens
  CDR3 for beta chain variable domain of TCR clone 258343 (TRBV19, TRBJ1-2)
CASSPTLNYGYTF

SEQ ID NO: 516687 - protein, 10 aa, Homo sapiens
  CDR3 for alpha chain variable domain of TCR clone 258344 (TRAV1-2, TRAJ23)
CAAQGGKLIF

SEQ ID NO: 516688 - protein, 16 aa, Homo sapiens
  CDR3 for beta chain variable domain of TCR clone 258344 (TRBV11-2, TRBJ1-1)
CASSLRQGGEHSKAFF

SEQ ID NO: 516689 - protein, 13 aa, Homo sapiens
  CDR3 for alpha chain variable domain of TCR clone 258345 (TRAV13-2, TRAJ53)
CAENMGSNYKLTF

SEQ ID NO: 516690 - protein, 15 aa, Homo sapiens
  CDR3 for beta chain variable domain of TCR clone 258345 (TRBV27, TRBJ2-1)
CASSNGGGSSNEKFF

SEQ ID NO: 516691 - protein, 14 aa, Homo sapiens
  CDR3 for alpha chain variable domain of TCR clone 258346 (TRAV17, TRAJ15)
CATTTNQAGTALIF

SEQ ID NO: 516692 - protein, 16 aa, Homo sapiens
  CDR3 for beta chain variable domain of TCR clone 258346 (TRBV4-1, TRBJ2-7)
CASSRGDILNAYEQYF

SEQ ID NO: 516693 - protein, 16 aa, Homo sapiens
  CDR3 for alpha chain variable domain of TCR clone 258347 (TRAV1-1, TRAJ27)
CAFSETPMQANQPLVM

SEQ ID NO: 516694 - protein, 17 aa, Homo sapiens
  CDR3 for beta chain variable domain of TCR clone 258347 (TRBV20-1, TRBJ2-3)
CSARDPKGVSATDTQYF

SEQ ID NO: 516695 - protein, 14 aa, Homo sapiens
  CDR3 for alpha chain variable domain of TCR clone 258348 (TRAV13-2, TRAJ15)
CAENPNQDGTALTF

SEQ ID NO: 516696 - protein, 16 aa, Homo sapiens
  CDR3 for beta chain variable domain of TCR clone 258348 (TRBV12-4, TRBJ1-2)
CASSPTATGKTRGYTF

SEQ ID NO: 516697 - protein, 13 aa, Homo sapiens
  CDR3 for alpha chain variable domain of TCR clone 258349 (TRAV1-2, TRAJ9)
CAALNTGGFKTIF

SEQ ID NO: 516698 - protein, 12 aa, Homo sapiens
  CDR3 for beta chain variable domain of TCR clone 258349 (TRBV11-2, TRBJ2-2)
CASSLPTGDLFF

SEQ ID NO: 516699 - protein, 14 aa, Homo sapiens
  CDR3 for alpha chain variable domain of TCR clone 258350 (TRAV23/DV6, TRAJ57)
CAASNQGGSEKLVF

SEQ ID NO: 516700 - protein, 14 aa, Homo sapiens
  CDR3 for beta chain variable domain of TCR clone 258350 (TRBV20-1, TRBJ2-1)
CSAQIGGSANEQFF

SEQ ID NO: 516701 - protein, 12 aa, Homo sapiens
  CDR3 for alpha chain variable domain of TCR clone 258351 (TRAV1-1, TRAJ8)
CAGGTGFQKLVF

SEQ ID NO: 516702 - protein, 17 aa, Homo sapiens
  CDR3 for beta chain variable domain of TCR clone 258351 (TRBV25-1, TRBJ2-5)
CASSRRGGRGGQETQYF

SEQ ID NO: 516703 - protein, 14 aa, Homo sapiens
  CDR3 for alpha chain variable domain of TCR clone 258352 (TRAV2, TRAJ37)
CAVDFTSNTGKLIF

SEQ ID NO: 516704 - protein, 15 aa, Homo sapiens
  CDR3 for beta chain variable domain of TCR clone 258352 (TRBV7-3, TRBJ2-1)
CASSYFRGTYNEQFF

SEQ ID NO: 516705 - protein, 12 aa, Homo sapiens
  CDR3 for alpha chain variable domain of TCR clone 258353 (TRAV13-1, TRAJ48)
CAANFGNEKLTF

SEQ ID NO: 516706 - protein, 16 aa, Homo sapiens
  CDR3 for beta chain variable domain of TCR clone 258353 (TRBV19, TRBJ2-1)
CASSKAGPSSYNEQFF

SEQ ID NO: 516707 - protein, 14 aa, Homo sapiens
  CDR3 for alpha chain variable domain of TCR clone 258354 (TRAV23/DV6, TRAJ13)
CAASETGGYQKVTL

SEQ ID NO: 516708 - protein, 16 aa, Homo sapiens
  CDR3 for beta chain variable domain of TCR clone 258354 (TRBV5-1, TRBJ1-3)
CASSPWAPSSGNTIYF

SEQ ID NO: 516709 - protein, 17 aa, Homo sapiens
  CDR3 for alpha chain variable domain of TCR clone 258355 (TRAV3, TRAJ6)
CAVRDSPRAGGSYIPTF

SEQ ID NO: 516710 - protein, 14 aa, Homo sapiens
  CDR3 for beta chain variable domain of TCR clone 258355 (TRBV7-2, TRBJ2-7)
CASSPKTSFYEKYF

SEQ ID NO: 516711 - protein, 14 aa, Homo sapiens
  CDR3 for alpha chain variable domain of TCR clone 258356 (TRAV12-1, TRAJ12)
CVVTSGDSSYKLIF

SEQ ID NO: 516712 - protein, 15 aa, Homo sapiens
  CDR3 for beta chain variable domain of TCR clone 258356 (TRBV19, TRBJ1-5)
CASSIVWADNQPQHF

SEQ ID NO: 516713 - protein, 17 aa, Homo sapiens
  CDR3 for alpha chain variable domain of TCR clone 258357 (TRAV17, TRAJ24)
CATANSMTTDSWGKLQF

SEQ ID NO: 516714 - protein, 14 aa, Homo sapiens
  CDR3 for beta chain variable domain of TCR clone 258357 (TRBV7-2, TRBJ2-2)
CASRGQGAAGELFF

SEQ ID NO: 516715 - protein, 12 aa, Homo sapiens
  CDR3 for alpha chain variable domain of TCR clone 258358 (TRAV3, TRAJ43)
CAVRDPNNDMRF

SEQ ID NO: 516716 - protein, 14 aa, Homo sapiens
  CDR3 for beta chain variable domain of TCR clone 258358 (TRBV13, TRBJ2-5)
CASSLGPRGETQYF

SEQ ID NO: 516717 - protein, 14 aa, Homo sapiens
  CDR3 for alpha chain variable domain of TCR clone 258359 (TRAV1-2, TRAJ6)
CAVRSSGGSYIPTF

SEQ ID NO: 516718 - protein, 18 aa, Homo sapiens
  CDR3 for beta chain variable domain of TCR clone 258359 (TRBV20-1, TRBJ2-3)
CSAYGLAGGPGTTDTRYF

SEQ ID NO: 516719 - protein, 13 aa, Homo sapiens
  CDR3 for alpha chain variable domain of TCR clone 258360 (TRAV35, TRAJ42)
CAGFPGSKGNLVV

SEQ ID NO: 516720 - protein, 14 aa, Homo sapiens
  CDR3 for beta chain variable domain of TCR clone 258360 (TRBV4-1, TRBJ2-2)
CASSQAVNTGELFF

SEQ ID NO: 516721 - protein, 12 aa, Homo sapiens
  CDR3 for alpha chain variable domain of TCR clone 258361 (TRAV12-3, TRAJ17)
CAMTLTGNKLTF

SEQ ID NO: 516722 - protein, 15 aa, Homo sapiens
  CDR3 for beta chain variable domain of TCR clone 258361 (TRBV19, TRBJ2-1)
CASSILGEGRNEQVF

SEQ ID NO: 516723 - protein, 13 aa, Homo sapiens
  CDR3 for alpha chain variable domain of TCR clone 258362 (TRAV26-1, TRAJ30)
CIVNMNRDDKIIF

SEQ ID NO: 516724 - protein, 16 aa, Homo sapiens
  CDR3 for beta chain variable domain of TCR clone 258362 (TRBV16, TRBJ2-7)
CSSSRPAGESSYEQYF

SEQ ID NO: 516725 - protein, 13 aa, Homo sapiens
  CDR3 for alpha chain variable domain of TCR clone 258363 (TRAV35, TRAJ48)
CWVSNFGNEKLTF

SEQ ID NO: 516726 - protein, 13 aa, Homo sapiens
  CDR3 for beta chain variable domain of TCR clone 258363 (TRBV15, TRBJ2-7)
CATSTTGHYEQYF

SEQ ID NO: 516727 - protein, 16 aa, Homo sapiens
  CDR3 for alpha chain variable domain of TCR clone 258364 (TRAV3, TRAJ37)
CAVRGKGSGHTGKLIF

SEQ ID NO: 516728 - protein, 12 aa, Homo sapiens
  CDR3 for beta chain variable domain of TCR clone 258364 (TRBV12-4, TRBJ2-3)
CASSTLPDTQYF

SEQ ID NO: 516729 - protein, 13 aa, Homo sapiens
  CDR3 for alpha chain variable domain of TCR clone 258365 (TRAV2, TRAJ40)
CAVVPSGTYKYIF

SEQ ID NO: 516730 - protein, 14 aa, Homo sapiens
  CDR3 for beta chain variable domain of TCR clone 258365 (TRBV19, TRBJ2-1)
CAGPTFVLSGEQFF

SEQ ID NO: 516731 - protein, 14 aa, Homo sapiens
  CDR3 for alpha chain variable domain of TCR clone 258366 (TRAV12-3, TRAJ10)
SHLPLTGGGNKLTF

SEQ ID NO: 516732 - protein, 14 aa, Homo sapiens
  CDR3 for beta chain variable domain of TCR clone 258366 (TRBV6-1, TRBJ1-3)
CPSVQGGGGNTIYF

SEQ ID NO: 516733 - protein, 12 aa, Homo sapiens
  CDR3 for alpha chain variable domain of TCR clone 258367 (TRAV27, TRAJ41)
CAEGDSGYALNF

SEQ ID NO: 516734 - protein, 16 aa, Homo sapiens
  CDR3 for beta chain variable domain of TCR clone 258367 (TRBV7-3, TRBJ2-2)
CASSLKRGTLSGELFF

SEQ ID NO: 516735 - protein, 14 aa, Homo sapiens
  CDR3 for alpha chain variable domain of TCR clone 258368 (TRAV12-2, TRAJ9)
CAVSFGTGGFKPIF

SEQ ID NO: 516736 - protein, 18 aa, Homo sapiens
  CDR3 for beta chain variable domain of TCR clone 258368 (TRBV3-1, TRBJ2-7)
CASSRISAGGRSSYEQYF

SEQ ID NO: 516737 - protein, 14 aa, Homo sapiens
  CDR3 for alpha chain variable domain of TCR clone 258369 (TRAV12-2, TRAJ13)
CAVKKTGGYQQVTF

SEQ ID NO: 516738 - protein, 15 aa, Homo sapiens
  CDR3 for beta chain variable domain of TCR clone 258369 (TRBV9, TRBJ1-6)
CASSVAGTGDSPLHF

SEQ ID NO: 516739 - protein, 17 aa, Homo sapiens
  CDR3 for alpha chain variable domain of TCR clone 258370 (TRAV3, TRAJ38)
CAARDGLNAGNNRKLMW

SEQ ID NO: 516740 - protein, 14 aa, Homo sapiens
  CDR3 for beta chain variable domain of TCR clone 258370 (TRBV5-5, TRBJ1-5)
CASSGQGVDQPQHF

SEQ ID NO: 516741 - protein, 13 aa, Homo sapiens
  CDR3 for alpha chain variable domain of TCR clone 258371 (TRAV23/DV6, TRAJ10)
ASVLTVGGNKLTF

SEQ ID NO: 516742 - protein, 13 aa, Homo sapiens
  CDR3 for beta chain variable domain of TCR clone 258371 (TRBV11-1, TRBJ1-2)
CASVGSWGYGYTF

SEQ ID NO: 516743 - protein, 12 aa, Homo sapiens
  CDR3 for alpha chain variable domain of TCR clone 258372 (TRAV35, TRAJ30)
CAGQLADDKIIF

SEQ ID NO: 516744 - protein, 13 aa, Homo sapiens
  CDR3 for beta chain variable domain of TCR clone 258372 (TRBV7-3, TRBJ1-1)
CASSQDWGAEAFF

SEQ ID NO: 516745 - protein, 12 aa, Homo sapiens
  CDR3 for alpha chain variable domain of TCR clone 258373 (TRAV17, TRAJ57)
CATDGGSEKLVF

SEQ ID NO: 516746 - protein, 13 aa, Homo sapiens
  CDR3 for beta chain variable domain of TCR clone 258373 (TRBV7-9, TRBJ2-7)
LASSFAGAYEQYF

SEQ ID NO: 516747 - protein, 15 aa, Homo sapiens
  CDR3 for alpha chain variable domain of TCR clone 258374 (TRAV17, TRAJ22)
CATVAPSGSARQLTF

SEQ ID NO: 516748 - protein, 16 aa, Homo sapiens
  CDR3 for beta chain variable domain of TCR clone 258374 (TRBV10-3, TRBJ2-7)
CAISADFADRPYEQYF

SEQ ID NO: 516749 - protein, 14 aa, Homo sapiens
  CDR3 for alpha chain variable domain of TCR clone 258375 (TRAV8-3, TRAJ9)
CAMVYSTGGFKPIF

SEQ ID NO: 516750 - protein, 14 aa, Homo sapiens
  CDR3 for beta chain variable domain of TCR clone 258375 (TRBV7-3, TRBJ2-2)
CASSSGGYTGELFF

SEQ ID NO: 516751 - protein, 15 aa, Homo sapiens
  CDR3 for alpha chain variable domain of TCR clone 258376 (TRAV3, TRAJ3)
CCERPRYSSASKIIF

SEQ ID NO: 516752 - protein, 16 aa, Homo sapiens
  CDR3 for beta chain variable domain of TCR clone 258376 (TRBV19, TRBJ1-5)
CASSIDRVGPRQPQHF

SEQ ID NO: 516753 - protein, 14 aa, Homo sapiens
  CDR3 for alpha chain variable domain of TCR clone 258377 (TRAV1-2, TRAJ23)
CAVSIYNQGGKLIF

SEQ ID NO: 516754 - protein, 13 aa, Homo sapiens
  CDR3 for beta chain variable domain of TCR clone 258377 (TRBV12-4, TRBJ1-2)
CASSLRQGKGYTF

SEQ ID NO: 516755 - protein, 15 aa, Homo sapiens
  CDR3 for alpha chain variable domain of TCR clone 258378 (TRAV3, TRAJ7)
CAVRDKDNGNNRLAF

SEQ ID NO: 516756 - protein, 19 aa, Homo sapiens
  CDR3 for beta chain variable domain of TCR clone 258378 (TRBV5-8, TRBJ2-3)
CASSFLGTSGRHRTDTQYF

SEQ ID NO: 516757 - protein, 12 aa, Homo sapiens
  CDR3 for alpha chain variable domain of TCR clone 258379 (TRAV21, TRAJ42)
CAVGGSQGNLIF

SEQ ID NO: 516758 - protein, 14 aa, Homo sapiens
  CDR3 for beta chain variable domain of TCR clone 258379 (TRBV12-4, TRBJ1-1)
CASSLGRGGTEAFF

SEQ ID NO: 516759 - protein, 13 aa, Homo sapiens
  CDR3 for alpha chain variable domain of TCR clone 258380 (TRAV27, TRAJ11)
CAGARSGYSTLTF

SEQ ID NO: 516760 - protein, 14 aa, Homo sapiens
  CDR3 for beta chain variable domain of TCR clone 258380 (TRBV4-2, TRBJ1-5)
CASSRDRGNQPQHF

SEQ ID NO: 516761 - protein, 15 aa, Homo sapiens
  CDR3 for alpha chain variable domain of TCR clone 258381 (TRAV8-4, TRAJ10)
CAVSDGPGGGNKLTF

SEQ ID NO: 516762 - protein, 13 aa, Homo sapiens
  CDR3 for beta chain variable domain of TCR clone 258381 (TRBV11-3, TRBJ2-5)
CASSFSSQETQYF

SEQ ID NO: 516763 - protein, 12 aa, Homo sapiens
  CDR3 for alpha chain variable domain of TCR clone 258382 (TRAV27, TRAJ9)
CAGESGGFKTIF

SEQ ID NO: 516764 - protein, 14 aa, Homo sapiens
  CDR3 for beta chain variable domain of TCR clone 258382 (TRBV6-1, TRBJ1-3)
CASVQGGGGNTIYF

SEQ ID NO: 516765 - protein, 14 aa, Homo sapiens
  CDR3 for alpha chain variable domain of TCR clone 258383 (TRAV1-2, TRAJ8)
CAVRDPPGFQKLVF

SEQ ID NO: 516766 - protein, 15 aa, Homo sapiens
  CDR3 for beta chain variable domain of TCR clone 258383 (TRBV5-1, TRBJ2-7)
CASSWNPAGSYEQYF

SEQ ID NO: 516767 - protein, 13 aa, Homo sapiens
  CDR3 for alpha chain variable domain of TCR clone 258384 (TRAV13-2, TRAJ48)
CAEMDSGNGKLTF

SEQ ID NO: 516768 - protein, 15 aa, Homo sapiens
  CDR3 for beta chain variable domain of TCR clone 258384 (TRBV7-9, TRBJ1-6)
CASSSPGRGNSPLHF

SEQ ID NO: 516769 - protein, 14 aa, Homo sapiens
  CDR3 for alpha chain variable domain of TCR clone 258385 (TRAV29/DV5, TRAJ4)
CAATVLGGYNKLIF

SEQ ID NO: 516770 - protein, 17 aa, Homo sapiens
  CDR3 for beta chain variable domain of TCR clone 258385 (TRBV11-2, TRBJ2-1)
CASSLCPPGVEYNEQFF

SEQ ID NO: 516771 - protein, 14 aa, Homo sapiens
  CDR3 for alpha chain variable domain of TCR clone 258386 (TRAV1-2, TRAJ16)
CAVNRFSDGRKLLF

SEQ ID NO: 516772 - protein, 16 aa, Homo sapiens
  CDR3 for beta chain variable domain of TCR clone 258386 (TRBV19, TRBJ2-3)
CASSPEWDRGTDTQYF

SEQ ID NO: 516773 - protein, 14 aa, Homo sapiens
  CDR3 for alpha chain variable domain of TCR clone 258387 (TRAV38-1, TRAJ45)
CASHSGGGADGLTF

SEQ ID NO: 516774 - protein, 15 aa, Homo sapiens
  CDR3 for beta chain variable domain of TCR clone 258387 (TRBV7-6, TRBJ2-1)
CASSSLAGEGNEQFF

SEQ ID NO: 516775 - protein, 13 aa, Homo sapiens
  CDR3 for alpha chain variable domain of TCR clone 258388 (TRAV17, TRAJ34)
CATDLYNTDKLIF

SEQ ID NO: 516776 - protein, 12 aa, Homo sapiens
  CDR3 for beta chain variable domain of TCR clone 258388 (TRBV14, TRBJ1-1)
CASSQLKGLAFF

SEQ ID NO: 516777 - protein, 13 aa, Homo sapiens
  CDR3 for alpha chain variable domain of TCR clone 258389 (TRAV36/DV7, TRAJ54)
CAVDIHGAQKLLF

SEQ ID NO: 516778 - protein, 14 aa, Homo sapiens
  CDR3 for beta chain variable domain of TCR clone 258389 (TRBV19, TRBJ2-7)
CASNFRDTFTGMYF

SEQ ID NO: 516779 - protein, 16 aa, Homo sapiens
  CDR3 for alpha chain variable domain of TCR clone 258390 (TRAV4, TRAJ22)
CLVGDLYSGSARQLTF

SEQ ID NO: 516780 - protein, 17 aa, Homo sapiens
  CDR3 for beta chain variable domain of TCR clone 258390 (TRBV11-2, TRBJ2-1)
CASSLYPPGVEDNEQFF

SEQ ID NO: 516781 - protein, 15 aa, Homo sapiens
  CDR3 for alpha chain variable domain of TCR clone 258391 (TRAV1-2, TRAJ28)
CAVQYSGAGSYQLTF

SEQ ID NO: 516782 - protein, 16 aa, Homo sapiens
  CDR3 for beta chain variable domain of TCR clone 258391 (TRBV28, TRBJ2-7)
CASSPWVATGDLSQYF

SEQ ID NO: 516783 - protein, 13 aa, Homo sapiens
  CDR3 for alpha chain variable domain of TCR clone 258392 (TRAV12-2, TRAJ39)
CAVNNNAGNLLTF

SEQ ID NO: 516784 - protein, 13 aa, Homo sapiens
  CDR3 for beta chain variable domain of TCR clone 258392 (TRBV2, TRBJ1-5)
CATAGPGNQHQHF

SEQ ID NO: 516785 - protein, 14 aa, Homo sapiens
  CDR3 for alpha chain variable domain of TCR clone 258393 (TRAV3, TRAJ21)
CAVRDAYNFNKFYF

SEQ ID NO: 516786 - protein, 17 aa, Homo sapiens
  CDR3 for beta chain variable domain of TCR clone 258393 (TRBV20-1, TRBJ1-6)
CSARGGSTFSYNSPLLF

SEQ ID NO: 516787 - protein, 16 aa, Homo sapiens
  CDR3 for alpha chain variable domain of TCR clone 258394 (TRAV3, TRAJ10)
CAVRDMRAGGGNKLTF

SEQ ID NO: 516788 - protein, 16 aa, Homo sapiens
  CDR3 for beta chain variable domain of TCR clone 258394 (TRBV2, TRBJ2-1)
CASSVGGSLSYSEQFF

SEQ ID NO: 516789 - protein, 15 aa, Homo sapiens
  CDR3 for alpha chain variable domain of TCR clone 258395 (TRAV13-1, TRAJ44)
CAASRGGGTASKLTF

SEQ ID NO: 516790 - protein, 12 aa, Homo sapiens
  CDR3 for beta chain variable domain of TCR clone 258395 (TRBV6-3, TRBJ2-7)
CASSRQGYEQYF

SEQ ID NO: 516791 - protein, 14 aa, Homo sapiens
  CDR3 for alpha chain variable domain of TCR clone 258396 (TRAV1-2, TRAJ16)
RAVNRFSDGQKLLF

SEQ ID NO: 516792 - protein, 15 aa, Homo sapiens
  CDR3 for beta chain variable domain of TCR clone 258396 (TRBV7-9, TRBJ2-2)
CASGPLDTFPGELFF

SEQ ID NO: 516793 - protein, 11 aa, Homo sapiens
  CDR3 for alpha chain variable domain of TCR clone 258397 (TRAV21, TRAJ34)
CAHYNTDKLIF

SEQ ID NO: 516794 - protein, 13 aa, Homo sapiens
  CDR3 for beta chain variable domain of TCR clone 258397 (TRBV7-6, TRBJ1-2)
CASSLVADHGDTF

SEQ ID NO: 516795 - protein, 14 aa, Homo sapiens
  CDR3 for alpha chain variable domain of TCR clone 258398 (TRAV1-2, TRAJ8)
CAVREDTGFQKLVF

SEQ ID NO: 516796 - protein, 13 aa, Homo sapiens
  CDR3 for beta chain variable domain of TCR clone 258398 (TRBV4-1, TRBJ2-1)
CASSQEVQYEQFF

SEQ ID NO: 516797 - protein, 13 aa, Homo sapiens
  CDR3 for alpha chain variable domain of TCR clone 258399 (TRAV12-1, TRAJ34)
CGEPLRNTDKLIF

SEQ ID NO: 516798 - protein, 15 aa, Homo sapiens
  CDR3 for beta chain variable domain of TCR clone 258399 (TRBV3-1, TRBJ2-2)
CASSQEWTRAGELFF

SEQ ID NO: 516799 - protein, 17 aa, Homo sapiens
  CDR3 for alpha chain variable domain of TCR clone 258400 (TRAV4, TRAJ13)
CHVGVQGSSGGYQKVTF

SEQ ID NO: 516800 - protein, 14 aa, Homo sapiens
  CDR3 for beta chain variable domain of TCR clone 258400 (TRBV7-2, TRBJ2-7)
CASSPKTSFYEQYF

SEQ ID NO: 516801 - protein, 14 aa, Homo sapiens
  CDR3 for alpha chain variable domain of TCR clone 258401 (TRAV1-2, TRAJ8)
CAVREDTGFQKLVF

SEQ ID NO: 516802 - protein, 16 aa, Homo sapiens
  CDR3 for beta chain variable domain of TCR clone 258401 (TRBV7-2, TRBJ2-5)
CASSQFPTGGEETQYF

SEQ ID NO: 516803 - protein, 15 aa, Homo sapiens
  CDR3 for alpha chain variable domain of TCR clone 258402 (TRAV8-3, TRAJ40)
CAVGPYTSGTYNYIF

SEQ ID NO: 516804 - protein, 18 aa, Homo sapiens
  CDR3 for beta chain variable domain of TCR clone 258402 (TRBV7-2, TRBJ2-7)
CASRLDPGVDRASSTSGR

SEQ ID NO: 516805 - protein, 14 aa, Homo sapiens
  CDR3 for alpha chain variable domain of TCR clone 258403 (TRAV23/DV6, TRAJ22)
CAASVSGSARQLTF

SEQ ID NO: 516806 - protein, 16 aa, Homo sapiens
  CDR3 for beta chain variable domain of TCR clone 258403 (TRBV19, TRBJ2-2)
CASSFPGQGPAGELFF

SEQ ID NO: 516807 - protein, 15 aa, Homo sapiens
  CDR3 for alpha chain variable domain of TCR clone 258404 (TRAV36/DV7, TRAJ53)
CALEGSGGSNYKLTF

SEQ ID NO: 516808 - protein, 16 aa, Homo sapiens
  CDR3 for beta chain variable domain of TCR clone 258404 (TRBV27, TRBJ2-2)
CASSLSGFWVTGELFF

SEQ ID NO: 516809 - protein, 13 aa, Homo sapiens
  CDR3 for alpha chain variable domain of TCR clone 258405 (TRAV25, TRAJ24)
CAGRTDSWGKFQF

SEQ ID NO: 516810 - protein, 16 aa, Homo sapiens
  CDR3 for beta chain variable domain of TCR clone 258405 (TRBV28, TRBJ2-3)
CASSLFTGVSTDTQYF

SEQ ID NO: 516811 - protein, 14 aa, Homo sapiens
  CDR3 for alpha chain variable domain of TCR clone 258406 (TRAV3, TRAJ21)
CAVRDAYNFNKFYF

SEQ ID NO: 516812 - protein, 14 aa, Homo sapiens
  CDR3 for beta chain variable domain of TCR clone 258406 (TRBV23-1, TRBJ1-1)
CASSQRPLKGGAFF

SEQ ID NO: 516813 - protein, 17 aa, Homo sapiens
  CDR3 for alpha chain variable domain of TCR clone 258407 (TRAV3, TRAJ38)
CAVRDCLNAGNNRKLIL

SEQ ID NO: 516814 - protein, 14 aa, Homo sapiens
  CDR3 for beta chain variable domain of TCR clone 258407 (TRBV5-5, TRBJ1-5)
CASSGQGVDQPQHF

SEQ ID NO: 516815 - protein, 21 aa, Homo sapiens
  CDR3 for alpha chain variable domain of TCR clone 258408 (TRAV1-2, TRAJ18)
CAVRGEAQPWGGYTLEEELSL

SEQ ID NO: 516816 - protein, 15 aa, Homo sapiens
  CDR3 for beta chain variable domain of TCR clone 258408 (TRBV9, TRBJ1-6)
CASSVAGTGDSPLHF

SEQ ID NO: 516817 - protein, 14 aa, Homo sapiens
  CDR3 for alpha chain variable domain of TCR clone 258409 (TRAV16, TRAJ57)
CALSGQGGSEKLVF

SEQ ID NO: 516818 - protein, 13 aa, Homo sapiens
  CDR3 for beta chain variable domain of TCR clone 258409 (TRBV5-4, TRBJ2-1)
CASSLQCPREQFF

SEQ ID NO: 516819 - protein, 15 aa, Homo sapiens
  CDR3 for alpha chain variable domain of TCR clone 258410 (TRAV17, TRAJ6)
CATDIPSGGSYIPTF

SEQ ID NO: 516820 - protein, 16 aa, Homo sapiens
  CDR3 for beta chain variable domain of TCR clone 258410 (TRBV4-1, TRBJ2-7)
CASSEDPTGYSYEQYF

SEQ ID NO: 516821 - protein, 16 aa, Homo sapiens
  CDR3 for alpha chain variable domain of TCR clone 258411 (TRAV30, TRAJ24)
RGTEIVDADSWGKFQF

SEQ ID NO: 516822 - protein, 13 aa, Homo sapiens
  CDR3 for beta chain variable domain of TCR clone 258411 (TRBV10-3, TRBJ1-2)
CAISERDSYGYTF

SEQ ID NO: 516823 - protein, 12 aa, Homo sapiens
  CDR3 for alpha chain variable domain of TCR clone 258412 (TRAV12-3, TRAJ20)
CAMVRGDYKLSF

SEQ ID NO: 516824 - protein, 15 aa, Homo sapiens
  CDR3 for beta chain variable domain of TCR clone 258412 (TRBV6-1, TRBJ2-3)
CASSERGGITDTQYF

SEQ ID NO: 516825 - protein, 13 aa, Homo sapiens
  CDR3 for alpha chain variable domain of TCR clone 258413 (TRAV36/DV7, TRAJ37)
CAVFSSNTGKQIF

SEQ ID NO: 516826 - protein, 13 aa, Homo sapiens
  CDR3 for beta chain variable domain of TCR clone 258413 (TRBV7-9, TRBJ2-5)
CQQLSGGEETQYF

SEQ ID NO: 516827 - protein, 17 aa, Homo sapiens
  CDR3 for alpha chain variable domain of TCR clone 258414 (TRAV13-1, TRAJ53)
CAASWKSSGGSNYKLTF

SEQ ID NO: 516828 - protein, 23 aa, Homo sapiens
  CDR3 for beta chain variable domain of TCR clone 258414 (TRBV7-9, TRBJ2-1)
GHVSLGQQPQPGGPTTLLNEQFF

SEQ ID NO: 516829 - protein, 18 aa, Homo sapiens
  CDR3 for alpha chain variable domain of TCR clone 258415 (TRAV12-3, TRAJ52)
CAMSRTNAGGTSYGKLTF

SEQ ID NO: 516830 - protein, 13 aa, Homo sapiens
  CDR3 for beta chain variable domain of TCR clone 258415 (TRBV12-4, TRBJ1-1)
CASSLGGTTEAFF

SEQ ID NO: 516831 - protein, 14 aa, Homo sapiens
  CDR3 for alpha chain variable domain of TCR clone 258416 (TRAV1-2, TRAJ8)
CAVREDTGFQKLLF

SEQ ID NO: 516832 - protein, 16 aa, Homo sapiens
  CDR3 for beta chain variable domain of TCR clone 258416 (TRBV5-1, TRBJ2-2)
CASSLWDTTNTGELFF

SEQ ID NO: 516833 - protein, 13 aa, Homo sapiens
  CDR3 for alpha chain variable domain of TCR clone 258417 (TRAV29/DV5, TRAJ29)
CAARAAGNTPLVF

SEQ ID NO: 516834 - protein, 14 aa, Homo sapiens
  CDR3 for beta chain variable domain of TCR clone 258417 (TRBV19, TRBJ2-3)
CASSAPRGTDTQYF

SEQ ID NO: 516835 - protein, 13 aa, Homo sapiens
  CDR3 for alpha chain variable domain of TCR clone 258418 (TRAV29/DV5, TRAJ54)
CAAHLQGAQKPVF

SEQ ID NO: 516836 - protein, 16 aa, Homo sapiens
  CDR3 for beta chain variable domain of TCR clone 258418 (TRBV7-2, TRBJ2-7)
CASSFPLAGGPLEQYF

SEQ ID NO: 516837 - protein, 13 aa, Homo sapiens
  CDR3 for alpha chain variable domain of TCR clone 258419 (TRAV26-1, TRAJ29)
CIVRRSGNTPLVF

SEQ ID NO: 516838 - protein, 16 aa, Homo sapiens
  CDR3 for beta chain variable domain of TCR clone 258419 (TRBV11-2, TRBJ2-7)
CASSLAPTGDNYEQYF

SEQ ID NO: 516839 - protein, 13 aa, Homo sapiens
  CDR3 for alpha chain variable domain of TCR clone 258420 (TRAV12-1, TRAJ33)
CGDAPDSNYQLIW

SEQ ID NO: 516840 - protein, 20 aa, Homo sapiens
  CDR3 for beta chain variable domain of TCR clone 258420 (TRBV11-2, TRBJ2-2)
LRTRPCISVPAALEAGSCFF

SEQ ID NO: 516841 - protein, 15 aa, Homo sapiens
  CDR3 for alpha chain variable domain of TCR clone 258421 (TRAV21, TRAJ53)
CATLNSGGSNYKLKF

SEQ ID NO: 516842 - protein, 14 aa, Homo sapiens
  CDR3 for beta chain variable domain of TCR clone 258421 (TRBV23-1, TRBJ2-5)
CASSFLRSQETQYF

SEQ ID NO: 516843 - protein, 14 aa, Homo sapiens
  CDR3 for alpha chain variable domain of TCR clone 258422 (TRAV16, TRAJ16)
CALSVLSDGQKLLF

SEQ ID NO: 516844 - protein, 14 aa, Homo sapiens
  CDR3 for beta chain variable domain of TCR clone 258422 (TRBV12-5, TRBJ2-5)
CASGSRTHQETQYF

SEQ ID NO: 516845 - protein, 14 aa, Homo sapiens
  CDR3 for alpha chain variable domain of TCR clone 258423 (TRAV13-1, TRAJ44)
CAAKATGNASKLTF

SEQ ID NO: 516846 - protein, 17 aa, Homo sapiens
  CDR3 for beta chain variable domain of TCR clone 258423 (TRBV7-3, TRBJ2-3)
CASSSMKRMRGADTQYF

SEQ ID NO: 516847 - protein, 12 aa, Homo sapiens
  CDR3 for alpha chain variable domain of TCR clone 258424 (TRAV2, TRAJ32)
CAVGGATNKLIF

SEQ ID NO: 516848 - protein, 14 aa, Homo sapiens
  CDR3 for beta chain variable domain of TCR clone 258424 (TRBV2, TRBJ1-5)
CASSGTVSNQPQHF

SEQ ID NO: 516849 - protein, 13 aa, Homo sapiens
  CDR3 for alpha chain variable domain of TCR clone 258425 (TRAV8-3, TRAJ28)
CAVGAVGSYQLTF

SEQ ID NO: 516850 - protein, 15 aa, Homo sapiens
  CDR3 for beta chain variable domain of TCR clone 258425 (TRBV7-9, TRBJ2-1)
CASTHGTGIYNEQFF

SEQ ID NO: 516851 - protein, 15 aa, Homo sapiens
  CDR3 for alpha chain variable domain of TCR clone 258426 (TRAV13-1, TRAJ5)
CAASPRGHGQESNYF

SEQ ID NO: 516852 - protein, 17 aa, Homo sapiens
  CDR3 for beta chain variable domain of TCR clone 258426 (TRBV3-1, TRBJ2-2)
CASSQFRDKVDTGELFF

SEQ ID NO: 516853 - protein, 18 aa, Homo sapiens
  CDR3 for alpha chain variable domain of TCR clone 258427 (TRAV26-1, TRAJ23)
CIVGVGLEVWNQGGKLIF

SEQ ID NO: 516854 - protein, 19 aa, Homo sapiens
  CDR3 for beta chain variable domain of TCR clone 258427 (TRBV25-1, TRBJ2-2)
CAILVYRVDRGRKTGELFF

SEQ ID NO: 516855 - protein, 15 aa, Homo sapiens
  CDR3 for alpha chain variable domain of TCR clone 258428 (TRAV8-3, TRAJ11)
CAVGLLNSGYSTLTF

SEQ ID NO: 516856 - protein, 16 aa, Homo sapiens
  CDR3 for beta chain variable domain of TCR clone 258428 (TRBV7-3, TRBJ2-2)
CASSVKRGTLSGELFF

SEQ ID NO: 516857 - protein, 18 aa, Homo sapiens
  CDR3 for alpha chain variable domain of TCR clone 258429 (TRAV12-2, )
CAVEDIQNPDPAVYQLRD

SEQ ID NO: 516858 - protein, 15 aa, Homo sapiens
  CDR3 for beta chain variable domain of TCR clone 258429 (TRBV5-1, TRBJ2-3)
CASSVTSGSTDTQYF

SEQ ID NO: 516859 - protein, 14 aa, Homo sapiens
  CDR3 for alpha chain variable domain of TCR clone 258430 (TRAV17, TRAJ15)
CAATTNQAGTALIF

SEQ ID NO: 516860 - protein, 16 aa, Homo sapiens
  CDR3 for beta chain variable domain of TCR clone 258430 (TRBV4-1, TRBJ2-7)
CASSRGDILNSYEQYF

SEQ ID NO: 516861 - protein, 10 aa, Homo sapiens
  CDR3 for alpha chain variable domain of TCR clone 258431 (TRAV23/DV6, TRAJ57)
CAASSTLSQG

SEQ ID NO: 516862 - protein, 11 aa, Homo sapiens
  CDR3 for beta chain variable domain of TCR clone 258431 (TRBV19, TRBJ1-1)
CASSIGSEAFF

SEQ ID NO: 516863 - protein, 14 aa, Homo sapiens
  CDR3 for alpha chain variable domain of TCR clone 258432 (TRAV12-3, TRAJ9)
CAMSPNTGGFKTIF

SEQ ID NO: 516864 - protein, 19 aa, Homo sapiens
  CDR3 for beta chain variable domain of TCR clone 258432 (TRBV14, TRBJ2-1)
CASSQDQLWEAPEYNEQFF

SEQ ID NO: 516865 - protein, 11 aa, Homo sapiens
  CDR3 for alpha chain variable domain of TCR clone 258433 (TRAV3, TRAJ21)
CAVGNFNKFYF

SEQ ID NO: 516866 - protein, 13 aa, Homo sapiens
  CDR3 for beta chain variable domain of TCR clone 258433 (TRBV7-9, TRBJ1-2)
RASSLKQNYGYTF

SEQ ID NO: 516867 - protein, 14 aa, Homo sapiens
  CDR3 for alpha chain variable domain of TCR clone 258434 (TRAV12-3, TRAJ58)
CAMSTETSGSRLTF

SEQ ID NO: 516868 - protein, 18 aa, Homo sapiens
  CDR3 for beta chain variable domain of TCR clone 258434 (TRBV15, TRBJ2-3)
CATSRDGARSWDTDTQYF

SEQ ID NO: 516869 - protein, 12 aa, Homo sapiens
  CDR3 for alpha chain variable domain of TCR clone 258435 (TRAV3, TRAJ31)
CAVRPRVPRLMF

SEQ ID NO: 516870 - protein, 12 aa, Homo sapiens
  CDR3 for beta chain variable domain of TCR clone 258435 (TRBV7-9, TRBJ2-7)
CASSIKREEQYF

SEQ ID NO: 516871 - protein, 14 aa, Homo sapiens
  CDR3 for alpha chain variable domain of TCR clone 258436 (TRAV21, TRAJ15)
CAVSLNQAGTALIF

SEQ ID NO: 516872 - protein, 11 aa, Homo sapiens
  CDR3 for beta chain variable domain of TCR clone 258436 (TRBV20-1, TRBJ2-7)
CIARTSYEQYF

SEQ ID NO: 516873 - protein, 15 aa, Homo sapiens
  CDR3 for alpha chain variable domain of TCR clone 258437 (TRAV3, TRAJ13)
CAVRVYSGGYQKVTF

SEQ ID NO: 516874 - protein, 16 aa, Homo sapiens
  CDR3 for beta chain variable domain of TCR clone 258437 (TRBV7-3, TRBJ2-1)
CASSLEGYRSYNEQFF

SEQ ID NO: 516875 - protein, 14 aa, Homo sapiens
  CDR3 for alpha chain variable domain of TCR clone 258438 (TRAV1-2, TRAJ8)
CAVREYTGFQKLVF

SEQ ID NO: 516876 - protein, 12 aa, Homo sapiens
  CDR3 for beta chain variable domain of TCR clone 258438 (TRBV11-2, TRBJ2-2)
CASSLPAGELFF

SEQ ID NO: 516877 - protein, 14 aa, Homo sapiens
  CDR3 for alpha chain variable domain of TCR clone 258439 (TRAV35, TRAJ48)
CAGQRDFGNEKLAF

SEQ ID NO: 516878 - protein, 14 aa, Homo sapiens
  CDR3 for beta chain variable domain of TCR clone 258439 (TRBV7-8, TRBJ1-2)
CASSPDSLSYGYTF

SEQ ID NO: 516879 - protein, 11 aa, Homo sapiens
  CDR3 for alpha chain variable domain of TCR clone 258440 (TRAV35, TRAJ30)
CAPGGDDKIIF

SEQ ID NO: 516880 - protein, 21 aa, Homo sapiens
  CDR3 for beta chain variable domain of TCR clone 258440 (TRBV7-6, TRBJ2-1)
SWTRPCIAVPAAWGGADEQFF

SEQ ID NO: 516881 - protein, 14 aa, Homo sapiens
  CDR3 for alpha chain variable domain of TCR clone 258441 (TRAV13-1, TRAJ15)
CAASTNQAGTALIF

SEQ ID NO: 516882 - protein, 11 aa, Homo sapiens
  CDR3 for beta chain variable domain of TCR clone 258441 (TRBV7-2, TRBJ2-1)
RASSLRDNEFF

SEQ ID NO: 516883 - protein, 20 aa, Homo sapiens
  CDR3 for alpha chain variable domain of TCR clone 258442 (TRAV8-3, TRAJ44)
LSTSVLWVRLYTGTASKLTF

SEQ ID NO: 516884 - protein, 14 aa, Homo sapiens
  CDR3 for beta chain variable domain of TCR clone 258442 (TRBV19, TRBJ2-1)
CASPTFVLSGEQFF

SEQ ID NO: 516885 - protein, 19 aa, Homo sapiens
  CDR3 for alpha chain variable domain of TCR clone 258443 (TRAV36/DV7, TRAJ13)
CAVEAGPFLGVTRKLPLEL

SEQ ID NO: 516886 - protein, 14 aa, Homo sapiens
  CDR3 for beta chain variable domain of TCR clone 258443 (TRBV7-2, TRBJ2-7)
CASRSQGAAYEQYF

SEQ ID NO: 516887 - protein, 14 aa, Homo sapiens
  CDR3 for alpha chain variable domain of TCR clone 258444 (TRAV16, TRAJ17)
CALRGRAAGNKLTF

SEQ ID NO: 516888 - protein, 15 aa, Homo sapiens
  CDR3 for beta chain variable domain of TCR clone 258444 (TRBV3-1, TRBJ1-2)
CSSSPTRLPEGGYTF

SEQ ID NO: 516889 - protein, 16 aa, Homo sapiens
  CDR3 for alpha chain variable domain of TCR clone 258445 (TRAV30, TRAJ24)
CGTEIVDADSWGKFQF

SEQ ID NO: 516890 - protein, 13 aa, Homo sapiens
  CDR3 for beta chain variable domain of TCR clone 258445 (TRBV11-2, TRBJ2-5)
CASSSTGEETQFF

SEQ ID NO: 516891 - protein, 13 aa, Homo sapiens
  CDR3 for alpha chain variable domain of TCR clone 258446 (TRAV21, TRAJ27)
CAARPGNAGKSTF

SEQ ID NO: 516892 - protein, 14 aa, Homo sapiens
  CDR3 for beta chain variable domain of TCR clone 258446 (TRBV11-2, TRBJ2-7)
CASGLGAGAYKQYF

SEQ ID NO: 516893 - protein, 14 aa, Homo sapiens
  CDR3 for alpha chain variable domain of TCR clone 258447 (TRAV12-3, TRAJ29)
CAISPYSGNTPLVF

SEQ ID NO: 516894 - protein, 12 aa, Homo sapiens
  CDR3 for beta chain variable domain of TCR clone 258447 (TRBV9, TRBJ2-1)
CASSVGGTDIFF

SEQ ID NO: 516895 - protein, 12 aa, Homo sapiens
  CDR3 for alpha chain variable domain of TCR clone 258448 (TRAV12-3, TRAJ17)
CAMTLTGNKLTF

SEQ ID NO: 516896 - protein, 16 aa, Homo sapiens
  CDR3 for beta chain variable domain of TCR clone 258448 (TRBV28, TRBJ1-4)
CASSTPYRGRSEKLFF

SEQ ID NO: 516897 - protein, 14 aa, Homo sapiens
  CDR3 for alpha chain variable domain of TCR clone 258449 (TRAV12-3, TRAJ10)
SHLPLTGGGNKLTF

SEQ ID NO: 516898 - protein, 17 aa, Homo sapiens
  CDR3 for beta chain variable domain of TCR clone 258449 (TRBV13, TRBJ2-3)
CASSLCRVAGGRNTQYF

SEQ ID NO: 516899 - protein, 12 aa, Homo sapiens
  CDR3 for alpha chain variable domain of TCR clone 258450 (TRAV3, TRAJ39)
CAVIEWSNMLTF

SEQ ID NO: 516900 - protein, 14 aa, Homo sapiens
  CDR3 for beta chain variable domain of TCR clone 258450 (TRBV19, TRBJ2-3)
CASSIDLGGDTQYF

SEQ ID NO: 516901 - protein, 13 aa, Homo sapiens
  CDR3 for alpha chain variable domain of TCR clone 258451 (TRAV3, TRAJ21)
CAVREPDFNKFYF

SEQ ID NO: 516902 - protein, 13 aa, Homo sapiens
  CDR3 for beta chain variable domain of TCR clone 258451 (TRBV9, TRBJ2-1)
CAISPSGGNEQFF

SEQ ID NO: 516903 - protein, 15 aa, Homo sapiens
  CDR3 for alpha chain variable domain of TCR clone 258452 (TRAV23/DV6, TRAJ18)
CAARYRGSTLGRLYF

SEQ ID NO: 516904 - protein, 12 aa, Homo sapiens
  CDR3 for beta chain variable domain of TCR clone 258452 (TRBV11-2, TRBJ2-3)
CASSPPEDTQYF

SEQ ID NO: 516905 - protein, 14 aa, Homo sapiens
  CDR3 for alpha chain variable domain of TCR clone 258453 (TRAV2, TRAJ9)
CAVEDRSGGFKTIF

SEQ ID NO: 516906 - protein, 19 aa, Homo sapiens
  CDR3 for beta chain variable domain of TCR clone 258453 (TRBV25-1, TRBJ2-2)
CAILVYRVDRGRKTGELFF

SEQ ID NO: 516907 - protein, 11 aa, Homo sapiens
  CDR3 for alpha chain variable domain of TCR clone 258454 (TRAV3, TRAJ21)
CAVGNFNKFYF

SEQ ID NO: 516908 - protein, 16 aa, Homo sapiens
  CDR3 for beta chain variable domain of TCR clone 258454 (TRBV28, TRBJ1-4)
CASRPGQGTTREKLFF

SEQ ID NO: 516909 - protein, 12 aa, Homo sapiens
  CDR3 for alpha chain variable domain of TCR clone 258455 (TRAV20, TRAJ56)
CAVTGANSKLTF

SEQ ID NO: 516910 - protein, 14 aa, Homo sapiens
  CDR3 for beta chain variable domain of TCR clone 258455 (TRBV20-1, TRBJ2-5)
CSALGPGYQETQYF

SEQ ID NO: 516911 - protein, 14 aa, Homo sapiens
  CDR3 for alpha chain variable domain of TCR clone 258456 (TRAV8-4, TRAJ40)
CAVIPTSGAYKYIF

SEQ ID NO: 516912 - protein, 15 aa, Homo sapiens
  CDR3 for beta chain variable domain of TCR clone 258456 (TRBV7-2, TRBJ2-1)
CASTSASGDYNEQFF

SEQ ID NO: 516913 - protein, 12 aa, Homo sapiens
  CDR3 for alpha chain variable domain of TCR clone 258457 (TRAV13-1, TRAJ45)
CAATRGADGLTF

SEQ ID NO: 516914 - protein, 17 aa, Homo sapiens
  CDR3 for beta chain variable domain of TCR clone 258457 (TRBV7-8, TRBJ2-6)
CASSAGTGGAGANVLTF

SEQ ID NO: 516915 - protein, 14 aa, Homo sapiens
  CDR3 for alpha chain variable domain of TCR clone 258458 (TRAV39, TRAJ54)
CAVVLIQGAQKPVF

SEQ ID NO: 516916 - protein, 13 aa, Homo sapiens
  CDR3 for beta chain variable domain of TCR clone 258458 (TRBV29-1, TRBJ2-5)
CSVGGTSAETQYF

SEQ ID NO: 516917 - protein, 12 aa, Homo sapiens
  CDR3 for alpha chain variable domain of TCR clone 258459 (TRAV12-1, TRAJ40)
CVVPSGTYKYIF

SEQ ID NO: 516918 - protein, 13 aa, Homo sapiens
  CDR3 for beta chain variable domain of TCR clone 258459 (TRBV7-9, TRBJ2-3)
CASSPGSTDTQYF

SEQ ID NO: 516919 - protein, 13 aa, Homo sapiens
  CDR3 for alpha chain variable domain of TCR clone 258460 (TRAV13-1, TRAJ6)
CAASKGGSYIPTF

SEQ ID NO: 516920 - protein, 13 aa, Homo sapiens
  CDR3 for beta chain variable domain of TCR clone 258460 (TRBV11-2, TRBJ2-5)
CASSSTGEETQYF

SEQ ID NO: 516921 - protein, 14 aa, Homo sapiens
  CDR3 for alpha chain variable domain of TCR clone 258461 (TRAV1-2, TRAJ16)
CAVNRFSDGQKLRF

SEQ ID NO: 516922 - protein, 14 aa, Homo sapiens
  CDR3 for beta chain variable domain of TCR clone 258461 (TRBV4-1, TRBJ2-2)
CASSQAVNTGEPFF

SEQ ID NO: 516923 - protein, 15 aa, Homo sapiens
  CDR3 for alpha chain variable domain of TCR clone 258462 (TRAV12-3, TRAJ6)
CAMSPASGGSYIPTF

SEQ ID NO: 516924 - protein, 13 aa, Homo sapiens
  CDR3 for beta chain variable domain of TCR clone 258462 (TRBV20-1, TRBJ1-2)
CSASPEFNYGYTF

SEQ ID NO: 516925 - protein, 13 aa, Homo sapiens
  CDR3 for alpha chain variable domain of TCR clone 258463 (TRAV2, TRAJ40)
CAVVTSGTYKYIF

SEQ ID NO: 516926 - protein, 10 aa, Homo sapiens
  CDR3 for beta chain variable domain of TCR clone 258463 (TRBV7-9, TRBJ1-1)
CASSFTEAFF

SEQ ID NO: 516927 - protein, 14 aa, Homo sapiens
  CDR3 for alpha chain variable domain of TCR clone 258464 (TRAV2, TRAJ9)
CAVEDRSGGFKTIF

SEQ ID NO: 516928 - protein, 15 aa, Homo sapiens
  CDR3 for beta chain variable domain of TCR clone 258464 (TRBV28, TRBJ1-4)
CASSVSGSGLEKLFF

SEQ ID NO: 516929 - protein, 15 aa, Homo sapiens
  CDR3 for alpha chain variable domain of TCR clone 258465 (TRAV26-2, TRAJ39)
CSLRGNNNAGNMLTF

SEQ ID NO: 516930 - protein, 15 aa, Homo sapiens
  CDR3 for beta chain variable domain of TCR clone 258465 (TRBV5-4, TRBJ1-1)
CASSSLGWANTEAFI

SEQ ID NO: 516931 - protein, 15 aa, Homo sapiens
  CDR3 for alpha chain variable domain of TCR clone 258466 (TRAV13-1, TRAJ57)
PVPPLSQGGSEKLVF

SEQ ID NO: 516932 - protein, 17 aa, Homo sapiens
  CDR3 for beta chain variable domain of TCR clone 258466 (TRBV7-3, TRBJ2-3)
CASSLMKRMRGADTQYF

SEQ ID NO: 516933 - protein, 13 aa, Homo sapiens
  CDR3 for alpha chain variable domain of TCR clone 258467 (TRAV38-1, TRAJ42)
CARWGGSQGNLIF

SEQ ID NO: 516934 - protein, 14 aa, Homo sapiens
  CDR3 for beta chain variable domain of TCR clone 258467 (TRBV2, TRBJ2-5)
CASKRDGTTETQYF

SEQ ID NO: 516935 - protein, 12 aa, Homo sapiens
  CDR3 for alpha chain variable domain of TCR clone 258468 (TRAV12-3, TRAJ17)
CAMTLTGNKLTF

SEQ ID NO: 516936 - protein, 15 aa, Homo sapiens
  CDR3 for beta chain variable domain of TCR clone 258468 (TRBV20-1, TRBJ2-7)
CSARDRVAGMDAQYF

SEQ ID NO: 516937 - protein, 19 aa, Homo sapiens
  CDR3 for alpha chain variable domain of TCR clone 258469 (TRAV3, TRAJ6)
CAVRDGPRAGGSYIPTFRR

SEQ ID NO: 516938 - protein, 14 aa, Homo sapiens
  CDR3 for beta chain variable domain of TCR clone 258469 (TRBV7-2, TRBJ2-7)
CASSPKTSFYEQYF

SEQ ID NO: 516939 - protein, 13 aa, Homo sapiens
  CDR3 for alpha chain variable domain of TCR clone 258470 (TRAV12-1, TRAJ40)
CVVPTSGTYKYIF

SEQ ID NO: 516940 - protein, 11 aa, Homo sapiens
  CDR3 for beta chain variable domain of TCR clone 258470 (TRBV29-1, TRBJ2-5)
CSVASGETQYF

SEQ ID NO: 516941 - protein, 10 aa, Homo sapiens
  CDR3 for alpha chain variable domain of TCR clone 258471 (TRAV13-1, TRAJ7)
LIGGNNRLAF

SEQ ID NO: 516942 - protein, 14 aa, Homo sapiens
  CDR3 for beta chain variable domain of TCR clone 258471 (TRBV16, TRBJ1-1)
CARSQAGPNTEAFF

SEQ ID NO: 516943 - protein, 14 aa, Homo sapiens
  CDR3 for alpha chain variable domain of TCR clone 258472 (TRAV29/DV5, TRAJ36)
CAARRKTGANNLFF

SEQ ID NO: 516944 - protein, 13 aa, Homo sapiens
  CDR3 for beta chain variable domain of TCR clone 258472 (TRBV19, TRBJ1-1)
CASSFGRMPEAFF

SEQ ID NO: 516945 - protein, 13 aa, Homo sapiens
  CDR3 for alpha chain variable domain of TCR clone 258473 (TRAV22, TRAJ7)
CAVEFYGNNRLAF

SEQ ID NO: 516946 - protein, 15 aa, Homo sapiens
  CDR3 for beta chain variable domain of TCR clone 258473 (TRBV5-1, TRBJ2-3)
CASSVTSGSTDTQYF

SEQ ID NO: 516947 - protein, 15 aa, Homo sapiens
  CDR3 for alpha chain variable domain of TCR clone 258474 (TRAV23/DV6, TRAJ38)
WAARSNAGNNRKLLW

SEQ ID NO: 516948 - protein, 16 aa, Homo sapiens
  CDR3 for beta chain variable domain of TCR clone 258474 (TRBV10-2, TRBJ1-5)
CASSRDRDYSNQPQHF

SEQ ID NO: 516949 - protein, 15 aa, Homo sapiens
  CDR3 for alpha chain variable domain of TCR clone 258475 (TRAV25, TRAJ52)
CAGRPGGTSYGKLTL

SEQ ID NO: 516950 - protein, 17 aa, Homo sapiens
  CDR3 for beta chain variable domain of TCR clone 258475 (TRBV7-8, TRBJ2-6)
CASSAGTGGAGANVLSF

SEQ ID NO: 516951 - protein, 15 aa, Homo sapiens
  CDR3 for alpha chain variable domain of TCR clone 258476 (TRAV17, TRAJ40)
CATVSSTSGTYKYIF

SEQ ID NO: 516952 - protein, 14 aa, Homo sapiens
  CDR3 for beta chain variable domain of TCR clone 258476 (TRBV7-6, TRBJ1-6)
CASSQAGGGSPLHF

SEQ ID NO: 516953 - protein, 14 aa, Homo sapiens
  CDR3 for alpha chain variable domain of TCR clone 258477 (TRAV12-2, TRAJ11)
CAVEGGSGYSTLTF

SEQ ID NO: 516954 - protein, 17 aa, Homo sapiens
  CDR3 for beta chain variable domain of TCR clone 258477 (TRBV7-8, TRBJ2-6)
CASSAGTGGAGANVLTS

SEQ ID NO: 516955 - protein, 13 aa, Homo sapiens
  CDR3 for alpha chain variable domain of TCR clone 258478 (TRAV27, TRAJ41)
CAGEGNSGYALNF

SEQ ID NO: 516956 - protein, 14 aa, Homo sapiens
  CDR3 for beta chain variable domain of TCR clone 258478 (TRBV7-2, TRBJ1-1)
CASSFLTGTTEGVF

SEQ ID NO: 516957 - protein, 12 aa, Homo sapiens
  CDR3 for alpha chain variable domain of TCR clone 258479 (TRAV17, TRAJ20)
CATALNDYKLSF

SEQ ID NO: 516958 - protein, 12 aa, Homo sapiens
  CDR3 for beta chain variable domain of TCR clone 258479 (TRBV10-3, TRBJ2-7)
CAHGADSGEQYL

SEQ ID NO: 516959 - protein, 16 aa, Homo sapiens
  CDR3 for alpha chain variable domain of TCR clone 258480 (TRAV8-6, TRAJ27)
CAVRASLTPMQANQPL

SEQ ID NO: 516960 - protein, 16 aa, Homo sapiens
  CDR3 for beta chain variable domain of TCR clone 258480 (TRBV10-3, TRBJ2-5)
CAISDPSGGAWETQYF

SEQ ID NO: 516961 - protein, 17 aa, Homo sapiens
  CDR3 for alpha chain variable domain of TCR clone 258481 (TRAV26-2, TRAJ42)
CILRDVGYGGSQGNLIF

SEQ ID NO: 516962 - protein, 20 aa, Homo sapiens
  CDR3 for beta chain variable domain of TCR clone 258481 (TRBV7-8, TRBJ2-2)
CASSHLFPGPTIHITGELFF

SEQ ID NO: 516963 - protein, 14 aa, Homo sapiens
  CDR3 for alpha chain variable domain of TCR clone 258482 (TRAV1-2, TRAJ8)
CAVREDTGFQKLVF

SEQ ID NO: 516964 - protein, 11 aa, Homo sapiens
  CDR3 for beta chain variable domain of TCR clone 258482 (TRBV7-9, TRBJ2-3)
CASSTTDTQYF

SEQ ID NO: 516965 - protein, 14 aa, Homo sapiens
  CDR3 for alpha chain variable domain of TCR clone 258483 (TRAV1-2, TRAJ8)
CAVSEDTGFKKLVF

SEQ ID NO: 516966 - protein, 14 aa, Homo sapiens
  CDR3 for beta chain variable domain of TCR clone 258483 (TRBV7-2, TRBJ2-7)
CASSLYPGRYEQYF

SEQ ID NO: 516967 - protein, 13 aa, Homo sapiens
  CDR3 for alpha chain variable domain of TCR clone 258484 (TRAV3, TRAJ21)
CAVREPDFNKFYF

SEQ ID NO: 516968 - protein, 15 aa, Homo sapiens
  CDR3 for beta chain variable domain of TCR clone 258484 (TRBV2, TRBJ2-1)
CASSELTGGYNEQFF

SEQ ID NO: 516969 - protein, 17 aa, Homo sapiens
  CDR3 for alpha chain variable domain of TCR clone 258485 (TRAV16, TRAJ58)
CITVLSNGETSGPRLTF

SEQ ID NO: 516970 - protein, 17 aa, Homo sapiens
  CDR3 for beta chain variable domain of TCR clone 258485 (TRBV18, TRBJ2-1)
CASSKGLSGGADNEQFL

SEQ ID NO: 516971 - protein, 12 aa, Homo sapiens
  CDR3 for alpha chain variable domain of TCR clone 258486 (TRAV2, TRAJ26)
CAVDNYGQNFVF

SEQ ID NO: 516972 - protein, 14 aa, Homo sapiens
  CDR3 for beta chain variable domain of TCR clone 258486 (TRBV7-2, TRBJ2-7)
CASRSQGAAYEQYF

SEQ ID NO: 516973 - protein, 14 aa, Homo sapiens
  CDR3 for alpha chain variable domain of TCR clone 258487 (TRAV13-1, TRAJ40)
CAASMASGTYKHIF

SEQ ID NO: 516974 - protein, 13 aa, Homo sapiens
  CDR3 for beta chain variable domain of TCR clone 258487 (TRBV29-1, TRBJ2-7)
CSVGRTGGYEQYF

SEQ ID NO: 516975 - protein, 17 aa, Homo sapiens
  CDR3 for alpha chain variable domain of TCR clone 258488 (TRAV8-3, TRAJ52)
CAVGAEAGGTSYGKLTF

SEQ ID NO: 516976 - protein, 15 aa, Homo sapiens
  CDR3 for beta chain variable domain of TCR clone 258488 (TRBV5-1, TRBJ2-5)
GASSRQGLGQETQYF

SEQ ID NO: 516977 - protein, 15 aa, Homo sapiens
  CDR3 for alpha chain variable domain of TCR clone 258489 (TRAV27, TRAJ38)
CAGRFNAGNNRKLLG

SEQ ID NO: 516978 - protein, 13 aa, Homo sapiens
  CDR3 for beta chain variable domain of TCR clone 258489 (TRBV12-5, TRBJ2-3)
CASQNRGTDTQYF

SEQ ID NO: 516979 - protein, 16 aa, Homo sapiens
  CDR3 for alpha chain variable domain of TCR clone 258490 (TRAV8-4, TRAJ5)
CAVSPLTYTGRRALTF

SEQ ID NO: 516980 - protein, 14 aa, Homo sapiens
  CDR3 for beta chain variable domain of TCR clone 258490 (TRBV19, TRBJ1-6)
CASSTDGWNSPLHF

SEQ ID NO: 516981 - protein, 16 aa, Homo sapiens
  CDR3 for alpha chain variable domain of TCR clone 258491 (TRAV3, TRAJ37)
CAVRPHGSGNTGTLIF

SEQ ID NO: 516982 - protein, 17 aa, Homo sapiens
  CDR3 for beta chain variable domain of TCR clone 258491 (TRBV20-1, TRBJ2-1)
CSASSSGLAGSYNEQFF

SEQ ID NO: 516983 - protein, 12 aa, Homo sapiens
  CDR3 for alpha chain variable domain of TCR clone 258492 (TRAV12-3, TRAJ17)
CAMTLTGNKLTF

SEQ ID NO: 516984 - protein, 15 aa, Homo sapiens
  CDR3 for beta chain variable domain of TCR clone 258492 (TRBV6-4, TRBJ2-7)
CASSDQGPPNYKQYF

SEQ ID NO: 516985 - protein, 12 aa, Homo sapiens
  CDR3 for alpha chain variable domain of TCR clone 258493 (TRAV3, TRAJ20)
CAVRDGDYKLSF

SEQ ID NO: 516986 - protein, 15 aa, Homo sapiens
  CDR3 for beta chain variable domain of TCR clone 258493 (TRBV11-3, TRBJ2-3)
CASLKDGREGDTQYF

SEQ ID NO: 516987 - protein, 21 aa, Homo sapiens
  CDR3 for alpha chain variable domain of TCR clone 258494 (TRAV26-1, TRAJ17)
CCVLLHRQSPGSKAAGNKLTF

SEQ ID NO: 516988 - protein, 14 aa, Homo sapiens
  CDR3 for beta chain variable domain of TCR clone 258494 (TRBV28, TRBJ1-2)
CASRIQGANYGYTF

SEQ ID NO: 516989 - protein, 14 aa, Homo sapiens
  CDR3 for alpha chain variable domain of TCR clone 258495 (TRAV3, TRAJ21)
CAVRDAYNFNKFYF

SEQ ID NO: 516990 - protein, 18 aa, Homo sapiens
  CDR3 for beta chain variable domain of TCR clone 258495 (TRBV11-2, TRBJ2-3)
CASSLGGASRGAPNTQYF

SEQ ID NO: 516991 - protein, 13 aa, Homo sapiens
  CDR3 for alpha chain variable domain of TCR clone 258496 (TRAV13-2, TRAJ20)
FVQRISDDYKLSF

SEQ ID NO: 516992 - protein, 15 aa, Homo sapiens
  CDR3 for beta chain variable domain of TCR clone 258496 (TRBV18, TRBJ1-2)
CASSPGNGLGYGYTF

SEQ ID NO: 516993 - protein, 16 aa, Homo sapiens
  CDR3 for alpha chain variable domain of TCR clone 258497 (TRAV27, TRAJ13)
CAGAKIDSGDYQKVTF

SEQ ID NO: 516994 - protein, 15 aa, Homo sapiens
  CDR3 for beta chain variable domain of TCR clone 258497 (TRBV29-1, TRBJ2-1)
CSVGRHALFYNEQFF

SEQ ID NO: 516995 - protein, 21 aa, Homo sapiens
  CDR3 for alpha chain variable domain of TCR clone 258498 (TRAV1-2, TRAJ37)
CLLPLCCERFHGSGNIGKLIF

SEQ ID NO: 516996 - protein, 14 aa, Homo sapiens
  CDR3 for beta chain variable domain of TCR clone 258498 (TRBV2, TRBJ2-5)
CASSEVLAQETQYF

SEQ ID NO: 516997 - protein, 13 aa, Homo sapiens
  CDR3 for alpha chain variable domain of TCR clone 258499 (TRAV12-2, TRAJ12)
CAVNGDSSYKLIF

SEQ ID NO: 516998 - protein, 14 aa, Homo sapiens
  CDR3 for beta chain variable domain of TCR clone 258499 (TRBV18, TRBJ2-7)
CASSPRGGAYEQYF

SEQ ID NO: 516999 - protein, 10 aa, Homo sapiens
  CDR3 for alpha chain variable domain of TCR clone 258500 (TRAV1-2, TRAJ20)
CALNDYKLSF

SEQ ID NO: 517000 - protein, 15 aa, Homo sapiens
  CDR3 for beta chain variable domain of TCR clone 258500 (TRBV28, TRBJ1-2)
CASSSHSIANYGYTF

SEQ ID NO: 517001 - protein, 16 aa, Homo sapiens
  CDR3 for alpha chain variable domain of TCR clone 258501 (TRAV3, TRAJ10)
CAVRDMRAGGGNKLNF

SEQ ID NO: 517002 - protein, 16 aa, Homo sapiens
  CDR3 for beta chain variable domain of TCR clone 258501 (TRBV6-1, TRBJ2-5)
CASSETLDRGAETQYF

SEQ ID NO: 517003 - protein, 20 aa, Homo sapiens
  CDR3 for alpha chain variable domain of TCR clone 258502 (TRAV26-1, TRAJ42)
CCVLLHRQTYYGGGQGNLIF

SEQ ID NO: 517004 - protein, 16 aa, Homo sapiens
  CDR3 for beta chain variable domain of TCR clone 258502 (TRBV7-3, TRBJ2-2)
CASSLKRGTLSGELCF

SEQ ID NO: 517005 - protein, 11 aa, Homo sapiens
  CDR3 for alpha chain variable domain of TCR clone 258503 (TRAV12-2, TRAJ39)
CAVNNMLTFGG

SEQ ID NO: 517006 - protein, 15 aa, Homo sapiens
  CDR3 for beta chain variable domain of TCR clone 258503 (TRBV11-2, TRBJ1-2)
CASSLEGVQRNGYTF

SEQ ID NO: 517007 - protein, 13 aa, Homo sapiens
  CDR3 for alpha chain variable domain of TCR clone 258504 (TRAV21, TRAJ27)
CAARPGNAGKSTF

SEQ ID NO: 517008 - protein, 12 aa, Homo sapiens
  CDR3 for beta chain variable domain of TCR clone 258504 (TRBV11-3, TRBJ2-2)
CASSLGGGELFF

SEQ ID NO: 517009 - protein, 14 aa, Homo sapiens
  CDR3 for alpha chain variable domain of TCR clone 258505 (TRAV2, TRAJ9)
CAVEDRSGGFKNIF

SEQ ID NO: 517010 - protein, 15 aa, Homo sapiens
  CDR3 for beta chain variable domain of TCR clone 258505 (TRBV19, TRBJ2-1)
CASSHRDRGPNEQFF

SEQ ID NO: 517011 - protein, 13 aa, Homo sapiens
  CDR3 for alpha chain variable domain of TCR clone 258506 (TRAV1-2, TRAJ9)
CAALNTGGFNTIF

SEQ ID NO: 517012 - protein, 13 aa, Homo sapiens
  CDR3 for beta chain variable domain of TCR clone 258506 (TRBV7-9, TRBJ1-2)
CASSLKQNYGYAF

SEQ ID NO: 517013 - protein, 11 aa, Homo sapiens
  CDR3 for alpha chain variable domain of TCR clone 258507 (TRAV26-2, TRAJ43)
CILRQGRYTIT

SEQ ID NO: 517014 - protein, 14 aa, Homo sapiens
  CDR3 for beta chain variable domain of TCR clone 258507 (TRBV7-2, TRBJ2-7)
CASSLPPGQGPQYF

SEQ ID NO: 517015 - protein, 16 aa, Homo sapiens
  CDR3 for alpha chain variable domain of TCR clone 258508 (TRAV23/DV6, TRAJ52)
CAARPAGGTSYGKLNF

SEQ ID NO: 517016 - protein, 13 aa, Homo sapiens
  CDR3 for beta chain variable domain of TCR clone 258508 (TRBV7-9, TRBJ1-1)
CASSLSGETEAFF

SEQ ID NO: 517017 - protein, 13 aa, Homo sapiens
  CDR3 for alpha chain variable domain of TCR clone 258509 (TRAV30, TRAJ6)
CGFIEGGSYIPTF

SEQ ID NO: 517018 - protein, 13 aa, Homo sapiens
  CDR3 for beta chain variable domain of TCR clone 258509 (TRBV5-4, TRBJ2-5)
CASSPVSQETEYF

SEQ ID NO: 517019 - protein, 17 aa, Homo sapiens
  CDR3 for alpha chain variable domain of TCR clone 258510 (TRAV12-1, TRAJ32)
CVVNMQGYGGATNKLIF

SEQ ID NO: 517020 - protein, 16 aa, Homo sapiens
  CDR3 for beta chain variable domain of TCR clone 258510 (TRBV19, TRBJ2-1)
CASSKAGPSSYNEQFF

SEQ ID NO: 517021 - protein, 13 aa, Homo sapiens
  CDR3 for alpha chain variable domain of TCR clone 258511 (TRAV8-6, TRAJ21)
CAVSPSSLNKFYF

SEQ ID NO: 517022 - protein, 13 aa, Homo sapiens
  CDR3 for beta chain variable domain of TCR clone 258511 (TRBV4-2, TRBJ1-2)
CASSPSASGGYTF

SEQ ID NO: 517023 - protein, 13 aa, Homo sapiens
  CDR3 for alpha chain variable domain of TCR clone 258512 (TRAV25, TRAJ26)
CAGMDNYGQNFVF

SEQ ID NO: 517024 - protein, 13 aa, Homo sapiens
  CDR3 for beta chain variable domain of TCR clone 258512 (TRBV19, TRBJ1-1)
CASSGQVNTEAFF

SEQ ID NO: 517025 - protein, 14 aa, Homo sapiens
  CDR3 for alpha chain variable domain of TCR clone 258513 (TRAV26-1, TRAJ21)
CIVRPPYNFSKFYF

SEQ ID NO: 517026 - protein, 14 aa, Homo sapiens
  CDR3 for beta chain variable domain of TCR clone 258513 (TRBV11-3, TRBJ2-1)
CASSATTSGSIQFF

SEQ ID NO: 517027 - protein, 14 aa, Homo sapiens
  CDR3 for alpha chain variable domain of TCR clone 258514 (TRAV2, TRAJ9)
CAVEDRRGGFKTIF

SEQ ID NO: 517028 - protein, 14 aa, Homo sapiens
  CDR3 for beta chain variable domain of TCR clone 258514 (TRBV7-2, TRBJ2-7)
CASSPKTSFYEQYF

SEQ ID NO: 517029 - protein, 13 aa, Homo sapiens
  CDR3 for alpha chain variable domain of TCR clone 258515 (TRAV12-1, TRAJ33)
CGDAPDSDYQLIW

SEQ ID NO: 517030 - protein, 12 aa, Homo sapiens
  CDR3 for beta chain variable domain of TCR clone 258515 (TRBV11-2, TRBJ2-2)
CASSLGGGELFF

SEQ ID NO: 517031 - protein, 14 aa, Homo sapiens
  CDR3 for alpha chain variable domain of TCR clone 258516 (TRAV26-1, TRAJ38)
CIADNAGNNRQLIW

SEQ ID NO: 517032 - protein, 13 aa, Homo sapiens
  CDR3 for beta chain variable domain of TCR clone 258516 (TRBV7-9, TRBJ1-2)
CASSLKQNYGYTF

SEQ ID NO: 517033 - protein, 11 aa, Homo sapiens
  CDR3 for alpha chain variable domain of TCR clone 258517 (TRAV12-2, TRAJ43)
CASPIGNDMRF

SEQ ID NO: 517034 - protein, 13 aa, Homo sapiens
  CDR3 for beta chain variable domain of TCR clone 258517 (TRBV7-3, TRBJ1-2)
CASSLKRGCGYTF

SEQ ID NO: 517035 - protein, 14 aa, Homo sapiens
  CDR3 for alpha chain variable domain of TCR clone 258518 (TRAV34, TRAJ44)
CGADGTGTASKPTF

SEQ ID NO: 517036 - protein, 15 aa, Homo sapiens
  CDR3 for beta chain variable domain of TCR clone 258518 (TRBV5-1, TRBJ2-1)
CASSPPRAPYNEQFF

SEQ ID NO: 517037 - protein, 14 aa, Homo sapiens
  CDR3 for alpha chain variable domain of TCR clone 258519 (TRAV12-2, TRAJ40)
CAVKIPSGTNKYIF

SEQ ID NO: 517038 - protein, 16 aa, Homo sapiens
  CDR3 for beta chain variable domain of TCR clone 258519 (TRBV28, TRBJ2-5)
CASSFSPAGGWETQYF

SEQ ID NO: 517039 - protein, 14 aa, Homo sapiens
  CDR3 for alpha chain variable domain of TCR clone 258520 (TRAV38-1, TRAJ45)
CAYYSGGGAAGLTF

SEQ ID NO: 517040 - protein, 20 aa, Homo sapiens
  CDR3 for beta chain variable domain of TCR clone 258520 (TRBV28, TRBJ2-1)
CASTRIGRSPGLAGGNEQFF

SEQ ID NO: 517041 - protein, 15 aa, Homo sapiens
  CDR3 for alpha chain variable domain of TCR clone 258521 (TRAV26-1, TRAJ44)
CIARVPFGTASKLTS

SEQ ID NO: 517042 - protein, 17 aa, Homo sapiens
  CDR3 for beta chain variable domain of TCR clone 258521 (TRBV24-1, TRBJ2-4)
CATSDAEARGVRNIQYF

SEQ ID NO: 517043 - protein, 15 aa, Homo sapiens
  CDR3 for alpha chain variable domain of TCR clone 258522 (TRAV25, TRAJ53)
CAGPRSGGSNYKLTF

SEQ ID NO: 517044 - protein, 16 aa, Homo sapiens
  CDR3 for beta chain variable domain of TCR clone 258522 (TRBV7-7, TRBJ2-1)
CASSLASGTSYNEQFF

SEQ ID NO: 517045 - protein, 15 aa, Homo sapiens
  CDR3 for alpha chain variable domain of TCR clone 258523 (TRAV21, TRAJ52)
CAVRGGGTSYVKLTF

SEQ ID NO: 517046 - protein, 13 aa, Homo sapiens
  CDR3 for beta chain variable domain of TCR clone 258523 (TRBV6-5, TRBJ2-5)
CATAPSPQETQYF

SEQ ID NO: 517047 - protein, 17 aa, Homo sapiens
  CDR3 for alpha chain variable domain of TCR clone 258524 (TRAV3, TRAJ38)
CAVRDCLNAGNNRKLIW

SEQ ID NO: 517048 - protein, 14 aa, Homo sapiens
  CDR3 for beta chain variable domain of TCR clone 258524 (TRBV5-5, TRBJ1-5)
CASRGQGVDQPQHF

SEQ ID NO: 517049 - protein, 13 aa, Homo sapiens
  CDR3 for alpha chain variable domain of TCR clone 258525 (TRAV13-1, TRAJ9)
CAARITGGFKTIF

SEQ ID NO: 517050 - protein, 14 aa, Homo sapiens
  CDR3 for beta chain variable domain of TCR clone 258525 (TRBV25-1, TRBJ1-1)
CASTHLGGNTEAFF

SEQ ID NO: 517051 - protein, 15 aa, Homo sapiens
  CDR3 for alpha chain variable domain of TCR clone 258526 (TRAV12-2, TRAJ56)
CAVNPFTGANSKLTF

SEQ ID NO: 517052 - protein, 13 aa, Homo sapiens
  CDR3 for beta chain variable domain of TCR clone 258526 (TRBV20-1, TRBJ1-2)
CSARDRVYGAYTF

SEQ ID NO: 517053 - protein, 12 aa, Homo sapiens
  CDR3 for alpha chain variable domain of TCR clone 258527 (TRAV29/DV5, TRAJ15)
CASNQAGTALKF

SEQ ID NO: 517054 - protein, 15 aa, Homo sapiens
  CDR3 for beta chain variable domain of TCR clone 258527 (TRBV11-2, TRBJ2-2)
CASSSDRVNAGEMFF

SEQ ID NO: 517055 - protein, 16 aa, Homo sapiens
  CDR3 for alpha chain variable domain of TCR clone 258528 (TRAV3, TRAJ18)
CAVRDGRGSTLGRLYS

SEQ ID NO: 517056 - protein, 14 aa, Homo sapiens
  CDR3 for beta chain variable domain of TCR clone 258528 (TRBV7-3, TRBJ1-1)
CASSLKGGNTEAFF

SEQ ID NO: 517057 - protein, 12 aa, Homo sapiens
  CDR3 for alpha chain variable domain of TCR clone 258529 (TRAV12-3, TRAJ17)
CAMTLTGSKLTF

SEQ ID NO: 517058 - protein, 19 aa, Homo sapiens
  CDR3 for beta chain variable domain of TCR clone 258529 (TRBV7-2, TRBJ2-3)
CASSFLSRNWGGGTDTQYF

SEQ ID NO: 517059 - protein, 13 aa, Homo sapiens
  CDR3 for alpha chain variable domain of TCR clone 258530 (TRAV8-6, TRAJ9)
CAVWDTGGFKTIF

SEQ ID NO: 517060 - protein, 13 aa, Homo sapiens
  CDR3 for beta chain variable domain of TCR clone 258530 (TRBV10-3, TRBJ1-2)
CAISERDSYGYTF

SEQ ID NO: 517061 - protein, 12 aa, Homo sapiens
  CDR3 for alpha chain variable domain of TCR clone 258531 (TRAV27, TRAJ35)
CAGADFGNMLHC

SEQ ID NO: 517062 - protein, 16 aa, Homo sapiens
  CDR3 for beta chain variable domain of TCR clone 258531 (TRBV6-1, TRBJ2-1)
CASISRQGSSYNEQFF

SEQ ID NO: 517063 - protein, 17 aa, Homo sapiens
  CDR3 for alpha chain variable domain of TCR clone 258532 (TRAV3, TRAJ6)
CAVRDGSRAGGSYIPTF

SEQ ID NO: 517064 - protein, 12 aa, Homo sapiens
  CDR3 for beta chain variable domain of TCR clone 258532 (TRBV11-2, TRBJ2-1)
CASSPGNNEQFF

SEQ ID NO: 517065 - protein, 19 aa, Homo sapiens
  CDR3 for alpha chain variable domain of TCR clone 258533 (TRAV8-3, TRAJ8)
LSTSVLWDPMNTGVQKLVF

SEQ ID NO: 517066 - protein, 13 aa, Homo sapiens
  CDR3 for beta chain variable domain of TCR clone 258533 (TRBV7-9, TRBJ2-1)
CASSWESYNEQFF

SEQ ID NO: 517067 - protein, 14 aa, Homo sapiens
  CDR3 for alpha chain variable domain of TCR clone 258534 (TRAV8-2, TRAJ4)
CVVSPSGGYNQLIF

SEQ ID NO: 517068 - protein, 15 aa, Homo sapiens
  CDR3 for beta chain variable domain of TCR clone 258534 (TRBV6-6, TRBJ2-7)
CASSYSYGVSYEQYF

SEQ ID NO: 517069 - protein, 14 aa, Homo sapiens
  CDR3 for alpha chain variable domain of TCR clone 258535 (TRAV2, TRAJ37)
CAVEGSTNTGKLIF

SEQ ID NO: 517070 - protein, 15 aa, Homo sapiens
  CDR3 for beta chain variable domain of TCR clone 258535 (TRBV24-1, TRBJ2-4)
CATSDPRDRANIQYF

SEQ ID NO: 517071 - protein, 15 aa, Homo sapiens
  CDR3 for alpha chain variable domain of TCR clone 258536 (TRAV21, TRAJ13)
CAVRPTSGGYQNVTF

SEQ ID NO: 517072 - protein, 15 aa, Homo sapiens
  CDR3 for beta chain variable domain of TCR clone 258536 (TRBV28, TRBJ2-7)
CASSPGGRGFYEQYF

SEQ ID NO: 517073 - protein, 18 aa, Homo sapiens
  CDR3 for alpha chain variable domain of TCR clone 258537 (TRAV12-3, TRAJ52)
CAISVGGAGGTSYGKLPF

SEQ ID NO: 517074 - protein, 15 aa, Homo sapiens
  CDR3 for beta chain variable domain of TCR clone 258537 (TRBV27, TRBJ1-6)
CASSFDRGLGSPLHF

SEQ ID NO: 517075 - protein, 13 aa, Homo sapiens
  CDR3 for alpha chain variable domain of TCR clone 258538 (TRAV2, TRAJ40)
CAVVTSGTYKYIF

SEQ ID NO: 517076 - protein, 13 aa, Homo sapiens
  CDR3 for beta chain variable domain of TCR clone 258538 (TRBV6-5, TRBJ2-1)
CASRGRVGNEQFF

SEQ ID NO: 517077 - protein, 17 aa, Homo sapiens
  CDR3 for alpha chain variable domain of TCR clone 258539 (TRAV14/DV4, TRAJ53)
CNERGPSSGGSNYKLTF

SEQ ID NO: 517078 - protein, 14 aa, Homo sapiens
  CDR3 for beta chain variable domain of TCR clone 258539 (TRBV7-6, TRBJ2-3)
CASSVAGGTDTQYF

SEQ ID NO: 517079 - protein, 14 aa, Homo sapiens
  CDR3 for alpha chain variable domain of TCR clone 258540 (TRAV1-2, TRAJ16)
CAVNRFSDGQKLLF

SEQ ID NO: 517080 - protein, 17 aa, Homo sapiens
  CDR3 for beta chain variable domain of TCR clone 258540 (TRBV5-5, TRBJ1-2)
CASSLGSLDGQSEGYTF

SEQ ID NO: 517081 - protein, 12 aa, Homo sapiens
  CDR3 for alpha chain variable domain of TCR clone 258541 (TRAV8-3, TRAJ26)
CAGDNYGQNFVF

SEQ ID NO: 517082 - protein, 14 aa, Homo sapiens
  CDR3 for beta chain variable domain of TCR clone 258541 (TRBV11-3, TRBJ1-6)
CASSFSGGDSPLHF

SEQ ID NO: 517083 - protein, 12 aa, Homo sapiens
  CDR3 for alpha chain variable domain of TCR clone 258542 (TRAV12-3, TRAJ20)
CAMVRGDYKLSF

SEQ ID NO: 517084 - protein, 16 aa, Homo sapiens
  CDR3 for beta chain variable domain of TCR clone 258542 (TRBV7-6, TRBJ2-1)
CASSAPGPSSYNEQFF

SEQ ID NO: 517085 - protein, 15 aa, Homo sapiens
  CDR3 for alpha chain variable domain of TCR clone 258543 (TRAV8-3, TRAJ11)
CAVGLLNSGYSTLTF

SEQ ID NO: 517086 - protein, 16 aa, Homo sapiens
  CDR3 for beta chain variable domain of TCR clone 258543 (TRBV7-9, TRBJ1-2)
CACSLGFSSGEDGYAF

SEQ ID NO: 517087 - protein, 15 aa, Homo sapiens
  CDR3 for alpha chain variable domain of TCR clone 258544 (TRAV17, TRAJ52)
CATEAGGTSYGKLTF

SEQ ID NO: 517088 - protein, 15 aa, Homo sapiens
  CDR3 for beta chain variable domain of TCR clone 258544 (TRBV4-3, TRBJ2-1)
CASSQMRGAHNEQFF

SEQ ID NO: 517089 - protein, 12 aa, Homo sapiens
  CDR3 for alpha chain variable domain of TCR clone 258545 (TRAV13-1, TRAJ53)
AASGGSNYKLTF

SEQ ID NO: 517090 - protein, 13 aa, Homo sapiens
  CDR3 for beta chain variable domain of TCR clone 258545 (TRBV11-2, TRBJ2-2)
CASGRDREEELFF

SEQ ID NO: 517091 - protein, 13 aa, Homo sapiens
  CDR3 for alpha chain variable domain of TCR clone 258546 (TRAV12-2, TRAJ54)
CAVNRRGAQKLVF

SEQ ID NO: 517092 - protein, 18 aa, Homo sapiens
  CDR3 for beta chain variable domain of TCR clone 258546 (TRBV7-3, TRBJ2-5)
CASSLGGAAQGRWEAQYF

SEQ ID NO: 517093 - protein, 17 aa, Homo sapiens
  CDR3 for alpha chain variable domain of TCR clone 258547 (TRAV12-2, TRAJ4)
CAVDVRPVSGGYNKLIF

SEQ ID NO: 517094 - protein, 17 aa, Homo sapiens
  CDR3 for beta chain variable domain of TCR clone 258547 (TRBV6-3, TRBJ2-1)
CASSYSSGTRGLDEQFF

SEQ ID NO: 517095 - protein, 17 aa, Homo sapiens
  CDR3 for alpha chain variable domain of TCR clone 258548 (TRAV3, TRAJ6)
CAVRDGPRAGGSYIPTF

SEQ ID NO: 517096 - protein, 15 aa, Homo sapiens
  CDR3 for beta chain variable domain of TCR clone 258548 (TRBV7-2, TRBJ2-7)
CASSLGGAKSGEQYF

SEQ ID NO: 517097 - protein, 16 aa, Homo sapiens
  CDR3 for alpha chain variable domain of TCR clone 258549 (TRAV13-2, TRAJ28)
CAEKSYSGAGSDQLTF

SEQ ID NO: 517098 - protein, 16 aa, Homo sapiens
  CDR3 for beta chain variable domain of TCR clone 258549 (TRBV19, TRBJ2-1)
CASSKARPSSYNEQFF

SEQ ID NO: 517099 - protein, 13 aa, Homo sapiens
  CDR3 for alpha chain variable domain of TCR clone 258550 (TRAV1-2, TRAJ9)
CAALNTGGFKTIF

SEQ ID NO: 517100 - protein, 14 aa, Homo sapiens
  CDR3 for beta chain variable domain of TCR clone 258550 (TRBV13, TRBJ2-5)
CDSSLERVGETQYF

SEQ ID NO: 517101 - protein, 12 aa, Homo sapiens
  CDR3 for alpha chain variable domain of TCR clone 258551 (TRAV21, TRAJ39)
CAADNAGNMLTF

SEQ ID NO: 517102 - protein, 14 aa, Homo sapiens
  CDR3 for beta chain variable domain of TCR clone 258551 (TRBV5-1, TRBJ2-3)
CASSLFGPTDTQYF

SEQ ID NO: 517103 - protein, 17 aa, Homo sapiens
  CDR3 for alpha chain variable domain of TCR clone 258552 (TRAV3, TRAJ6)
CAVRDGPRAGGSYIPTF

SEQ ID NO: 517104 - protein, 14 aa, Homo sapiens
  CDR3 for beta chain variable domain of TCR clone 258552 (TRBV12-5, TRBJ2-5)
CASGSRTHQETKYF

SEQ ID NO: 517105 - protein, 14 aa, Homo sapiens
  CDR3 for alpha chain variable domain of TCR clone 258553 (TRAV12-2, TRAJ53)
CSVKGGGSNYKLTF

SEQ ID NO: 517106 - protein, 14 aa, Homo sapiens
  CDR3 for beta chain variable domain of TCR clone 258553 (TRBV7-7, TRBJ2-2)
CATRQDSDTGELFF

SEQ ID NO: 517107 - protein, 17 aa, Homo sapiens
  CDR3 for alpha chain variable domain of TCR clone 258554 (TRAV26-2, TRAJ42)
CILRDVGYGGSQGNLIF

SEQ ID NO: 517108 - protein, 15 aa, Homo sapiens
  CDR3 for beta chain variable domain of TCR clone 258554 (TRBV12-4, TRBJ2-7)
CASLIGGTGTYEQYF

SEQ ID NO: 517109 - protein, 18 aa, Homo sapiens
  CDR3 for alpha chain variable domain of TCR clone 258555 (TRAV26-1, TRAJ30)
CCVLLHRQSTNRDDNIIF

SEQ ID NO: 517110 - protein, 18 aa, Homo sapiens
  CDR3 for beta chain variable domain of TCR clone 258555 (TRBV4-1, TRBJ1-5)
CASSQDPRGQGLNQPQHF

SEQ ID NO: 517111 - protein, 15 aa, Homo sapiens
  CDR3 for alpha chain variable domain of TCR clone 258556 (TRAV3, TRAJ17)
CAVRDTGAAGTKLTF

SEQ ID NO: 517112 - protein, 14 aa, Homo sapiens
  CDR3 for beta chain variable domain of TCR clone 258556 (TRBV12-5, TRBJ2-5)
CASGSRTHQETQYF

SEQ ID NO: 517113 - protein, 14 aa, Homo sapiens
  CDR3 for alpha chain variable domain of TCR clone 258557 (TRAV26-1, TRAJ34)
CIVRVAYNTDKLIF

SEQ ID NO: 517114 - protein, 15 aa, Homo sapiens
  CDR3 for beta chain variable domain of TCR clone 258557 (TRBV11-2, TRBJ2-1)
CASSLGTSGLNEQFF

SEQ ID NO: 517115 - protein, 15 aa, Homo sapiens
  CDR3 for alpha chain variable domain of TCR clone 258558 (TRAV17, TRAJ54)
CATEKLGQGAQKLGF

SEQ ID NO: 517116 - protein, 14 aa, Homo sapiens
  CDR3 for beta chain variable domain of TCR clone 258558 (TRBV7-3, TRBJ1-1)
CQQLRGQMNTEAFF

SEQ ID NO: 517117 - protein, 15 aa, Homo sapiens
  CDR3 for alpha chain variable domain of TCR clone 258559 (TRAV17, TRAJ16)
CAPALRFSDCQKLLF

SEQ ID NO: 517118 - protein, 15 aa, Homo sapiens
  CDR3 for beta chain variable domain of TCR clone 258559 (TRBV20-1, TRBJ1-1)
CSASRGVTGNTEAFF

SEQ ID NO: 517119 - protein, 11 aa, Homo sapiens
  CDR3 for alpha chain variable domain of TCR clone 258560 (TRAV21, TRAJ39)
LLVNAGNMLTF

SEQ ID NO: 517120 - protein, 15 aa, Homo sapiens
  CDR3 for beta chain variable domain of TCR clone 258560 (TRBV7-2, TRBJ2-1)
CASSSGLAGGNEQFF

SEQ ID NO: 517121 - protein, 14 aa, Homo sapiens
  CDR3 for alpha chain variable domain of TCR clone 258561 (TRAV35, TRAJ50)
CAGHRKTSYDKGIF

SEQ ID NO: 517122 - protein, 13 aa, Homo sapiens
  CDR3 for beta chain variable domain of TCR clone 258561 (TRBV7-7, TRBJ2-3)
CASSLRRADTQYF

SEQ ID NO: 517123 - protein, 12 aa, Homo sapiens
  CDR3 for alpha chain variable domain of TCR clone 258562 (TRAV12-3, TRAJ17)
CAMTLTGNKLTF

SEQ ID NO: 517124 - protein, 15 aa, Homo sapiens
  CDR3 for beta chain variable domain of TCR clone 258562 (TRBV20-1, TRBJ2-7)
CRASDRVSGMDEQYF

SEQ ID NO: 517125 - protein, 15 aa, Homo sapiens
  CDR3 for alpha chain variable domain of TCR clone 258563 (TRAV2, TRAJ22)
CAVPSRGGSARQLTV

SEQ ID NO: 517126 - protein, 11 aa, Homo sapiens
  CDR3 for beta chain variable domain of TCR clone 258563 (TRBV19, TRBJ1-1)
CASSIGSEAFF

SEQ ID NO: 517127 - protein, 21 aa, Homo sapiens
  CDR3 for alpha chain variable domain of TCR clone 258564 (TRAV1-1, TRAJ6)
CLLLLRCERLERTGGSYIPTF

SEQ ID NO: 517128 - protein, 13 aa, Homo sapiens
  CDR3 for beta chain variable domain of TCR clone 258564 (TRBV12-5, TRBJ2-3)
CASGDRQSDTQYF

SEQ ID NO: 517129 - protein, 14 aa, Homo sapiens
  CDR3 for alpha chain variable domain of TCR clone 258565 (TRAV35, TRAJ22)
CAGLRPGSAWQLTF

SEQ ID NO: 517130 - protein, 13 aa, Homo sapiens
  CDR3 for beta chain variable domain of TCR clone 258565 (TRBV20-1, TRBJ2-7)
CSATHTSGYEQYF

SEQ ID NO: 517131 - protein, 14 aa, Homo sapiens
  CDR3 for alpha chain variable domain of TCR clone 258566 (TRAV17, TRAJ12)
CAILPMDSSYKLIF

SEQ ID NO: 517132 - protein, 14 aa, Homo sapiens
  CDR3 for beta chain variable domain of TCR clone 258566 (TRBV7-2, TRBJ2-7)
CASRSQGAAYEQYF

SEQ ID NO: 517133 - protein, 14 aa, Homo sapiens
  CDR3 for alpha chain variable domain of TCR clone 258567 (TRAV1-2, TRAJ8)
CAVREDTGFQQLVF

SEQ ID NO: 517134 - protein, 14 aa, Homo sapiens
  CDR3 for beta chain variable domain of TCR clone 258567 (TRBV7-9, TRBJ1-1)
CASTPLQSYTEAFF

SEQ ID NO: 517135 - protein, 12 aa, Homo sapiens
  CDR3 for alpha chain variable domain of TCR clone 258568 (TRAV2, TRAJ37)
CAVAGNTGKPIF

SEQ ID NO: 517136 - protein, 17 aa, Homo sapiens
  CDR3 for beta chain variable domain of TCR clone 258568 (TRBV28, TRBJ2-5)
CASSTPEGDALQETQYF

SEQ ID NO: 517137 - protein, 14 aa, Homo sapiens
  CDR3 for alpha chain variable domain of TCR clone 258569 (TRAV26-1, TRAJ36)
CIVRLLTGANNLFF

SEQ ID NO: 517138 - protein, 17 aa, Homo sapiens
  CDR3 for beta chain variable domain of TCR clone 258569 (TRBV24-1, TRBJ1-2)
CATSDPRQGVLSGGYTF

SEQ ID NO: 517139 - protein, 15 aa, Homo sapiens
  CDR3 for alpha chain variable domain of TCR clone 258570 (TRAV8-3, TRAJ45)
CASSYSGGGADGLTF

SEQ ID NO: 517140 - protein, 18 aa, Homo sapiens
  CDR3 for beta chain variable domain of TCR clone 258570 (TRBV18, TRBJ1-3)
WASSPRGGAGPSGNTLYF

SEQ ID NO: 517141 - protein, 10 aa, Homo sapiens
  CDR3 for alpha chain variable domain of TCR clone 258571 (TRAV30, TRAJ48)
CGIGNEKLTF

SEQ ID NO: 517142 - protein, 15 aa, Homo sapiens
  CDR3 for beta chain variable domain of TCR clone 258571 (TRBV7-3, TRBJ2-1)
CASSPKGGGEVEQFF

SEQ ID NO: 517143 - protein, 15 aa, Homo sapiens
  CDR3 for alpha chain variable domain of TCR clone 258572 (TRAV12-2, TRAJ53)
CAVNGGGGSNYKLTF

SEQ ID NO: 517144 - protein, 15 aa, Homo sapiens
  CDR3 for beta chain variable domain of TCR clone 258572 (TRBV28, TRBJ2-1)
CASSIIAGGRSEQFF

SEQ ID NO: 517145 - protein, 18 aa, Homo sapiens
  CDR3 for alpha chain variable domain of TCR clone 258573 (TRAV13-1, TRAJ52)
CAAKKPNAGGTSYGKLTF

SEQ ID NO: 517146 - protein, 16 aa, Homo sapiens
  CDR3 for beta chain variable domain of TCR clone 258573 (TRBV29-1, TRBJ2-7)
CSVEVVGTSGSYEQYF

SEQ ID NO: 517147 - protein, 14 aa, Homo sapiens
  CDR3 for alpha chain variable domain of TCR clone 258574 (TRAV4, TRAJ17)
CLVGPQAAGNKLTF

SEQ ID NO: 517148 - protein, 11 aa, Homo sapiens
  CDR3 for beta chain variable domain of TCR clone 258574 (TRBV11-2, TRBJ2-2)
CASSLPGELFF

SEQ ID NO: 517149 - protein, 11 aa, Homo sapiens
  CDR3 for alpha chain variable domain of TCR clone 258575 (TRAV1-1, TRAJ5)
CTVRVRRALTF

SEQ ID NO: 517150 - protein, 18 aa, Homo sapiens
  CDR3 for beta chain variable domain of TCR clone 258575 (TRBV12-4, TRBJ1-2)
CASSPNPGQAGPYYGYTF

SEQ ID NO: 517151 - protein, 12 aa, Homo sapiens
  CDR3 for alpha chain variable domain of TCR clone 258576 (TRAV13-2, TRAJ23)
CAERHRGGKPIF

SEQ ID NO: 517152 - protein, 13 aa, Homo sapiens
  CDR3 for beta chain variable domain of TCR clone 258576 (TRBV7-2, TRBJ2-7)
CASSSPSGSEQYF

SEQ ID NO: 517153 - protein, 17 aa, Homo sapiens
  CDR3 for alpha chain variable domain of TCR clone 258577 (TRAV3, TRAJ38)
CAVRDCLNAGNNRKLIW

SEQ ID NO: 517154 - protein, 14 aa, Homo sapiens
  CDR3 for beta chain variable domain of TCR clone 258577 (TRBV20-1, TRBJ2-2)
CSARRRLATGELFF

SEQ ID NO: 517155 - protein, 13 aa, Homo sapiens
  CDR3 for alpha chain variable domain of TCR clone 258578 (TRAV8-6, TRAJ8)
FAVSNTGFQKLVF

SEQ ID NO: 517156 - protein, 15 aa, Homo sapiens
  CDR3 for beta chain variable domain of TCR clone 258578 (TRBV28, TRBJ2-5)
CASSSGRTIQETQYF

SEQ ID NO: 517157 - protein, 23 aa, Homo sapiens
  CDR3 for alpha chain variable domain of TCR clone 258579 (TRAV26-1, TRAJ38)
CIADNAGNNQIQNPDPAVYQLRD

SEQ ID NO: 517158 - protein, 13 aa, Homo sapiens
  CDR3 for beta chain variable domain of TCR clone 258579 (TRBV20-1, TRBJ1-1)
CSARGGGNTEAFF

SEQ ID NO: 517159 - protein, 16 aa, Homo sapiens
  CDR3 for alpha chain variable domain of TCR clone 258580 (TRAV3, TRAJ37)
CAVRPHGSGNTGKITF

SEQ ID NO: 517160 - protein, 16 aa, Homo sapiens
  CDR3 for beta chain variable domain of TCR clone 258580 (TRBV9, TRBJ1-2)
CASSVEEKVSPYGYTF

SEQ ID NO: 517161 - protein, 13 aa, Homo sapiens
  CDR3 for alpha chain variable domain of TCR clone 258581 (TRAV20, TRAJ42)
CAVQGGSQGNLIF

SEQ ID NO: 517162 - protein, 15 aa, Homo sapiens
  CDR3 for beta chain variable domain of TCR clone 258581 (TRBV10-1, TRBJ2-1)
CAISEWRGTYNEQFF

SEQ ID NO: 517163 - protein, 16 aa, Homo sapiens
  CDR3 for alpha chain variable domain of TCR clone 258582 (TRAV12-3, TRAJ18)
CAMRGSRGSTLGRLYF

SEQ ID NO: 517164 - protein, 19 aa, Homo sapiens
  CDR3 for beta chain variable domain of TCR clone 258582 (TRBV6-3, TRBJ2-7)
WASSYRTGLAGGVSGEQYF

SEQ ID NO: 517165 - protein, 11 aa, Homo sapiens
  CDR3 for alpha chain variable domain of TCR clone 258583 (TRAV23/DV6, TRAJ49)
WAVAPVTRSIL

SEQ ID NO: 517166 - protein, 13 aa, Homo sapiens
  CDR3 for beta chain variable domain of TCR clone 258583 (TRBV6-1, TRBJ1-1)
CASSRQGNTEAFF

SEQ ID NO: 517167 - protein, 17 aa, Homo sapiens
  CDR3 for alpha chain variable domain of TCR clone 258584 (TRAV3, TRAJ38)
CAVRDCLNAGNNRKLIW

SEQ ID NO: 517168 - protein, 11 aa, Homo sapiens
  CDR3 for beta chain variable domain of TCR clone 258584 (TRBV7-8, TRBJ2-7)
CASSLSLEQYF

SEQ ID NO: 517169 - protein, 11 aa, Homo sapiens
  CDR3 for alpha chain variable domain of TCR clone 258585 (TRAV21, TRAJ34)
CAHYNTDKLIF

SEQ ID NO: 517170 - protein, 14 aa, Homo sapiens
  CDR3 for beta chain variable domain of TCR clone 258585 (TRBV11-2, TRBJ2-5)
CASRPLAGRETQYF

SEQ ID NO: 517171 - protein, 11 aa, Homo sapiens
  CDR3 for alpha chain variable domain of TCR clone 258586 (TRAV3, TRAJ21)
CAVGNFIKFYF

SEQ ID NO: 517172 - protein, 17 aa, Homo sapiens
  CDR3 for beta chain variable domain of TCR clone 258586 (TRBV24-1, TRBJ2-1)
CATSDVSTSGTYNEQFF

SEQ ID NO: 517173 - protein, 14 aa, Homo sapiens
  CDR3 for alpha chain variable domain of TCR clone 258587 (TRAV1-2, TRAJ16)
CAVNRFSDGQQLLF

SEQ ID NO: 517174 - protein, 16 aa, Homo sapiens
  CDR3 for beta chain variable domain of TCR clone 258587 (TRBV7-3, TRBJ2-2)
CASSLKRGTLSGELFF

SEQ ID NO: 517175 - protein, 15 aa, Homo sapiens
  CDR3 for alpha chain variable domain of TCR clone 258588 (TRAV17, TRAJ57)
CATGPSQGGSEKLVF

SEQ ID NO: 517176 - protein, 14 aa, Homo sapiens
  CDR3 for beta chain variable domain of TCR clone 258588 (TRBV18, TRBJ2-5)
CASSPGVSQETQYF

SEQ ID NO: 517177 - protein, 12 aa, Homo sapiens
  CDR3 for alpha chain variable domain of TCR clone 258589 (TRAV17, TRAJ4)
CATDGGYNKLIS

SEQ ID NO: 517178 - protein, 13 aa, Homo sapiens
  CDR3 for beta chain variable domain of TCR clone 258589 (TRBV29-1, TRBJ2-2)
CSTTGINTGELFF

SEQ ID NO: 517179 - protein, 14 aa, Homo sapiens
  CDR3 for alpha chain variable domain of TCR clone 258590 (TRAV4, TRAJ43)
CLVGPMYNNNDMRF

SEQ ID NO: 517180 - protein, 21 aa, Homo sapiens
  CDR3 for beta chain variable domain of TCR clone 258590 (TRBV11-1, TRBJ2-1)
CASSARERLRPEGPYYNEQFF

SEQ ID NO: 517181 - protein, 15 aa, Homo sapiens
  CDR3 for alpha chain variable domain of TCR clone 258591 (TRAV3, TRAJ5)
CAVRDLYTGRRALTF

SEQ ID NO: 517182 - protein, 13 aa, Homo sapiens
  CDR3 for beta chain variable domain of TCR clone 258591 (TRBV12-4, TRBJ2-7)
CASSPTETHEQYF

SEQ ID NO: 517183 - protein, 12 aa, Homo sapiens
  CDR3 for alpha chain variable domain of TCR clone 258592 (TRAV6, TRAJ10)
CALERGGNKLTF

SEQ ID NO: 517184 - protein, 15 aa, Homo sapiens
  CDR3 for beta chain variable domain of TCR clone 258592 (TRBV12-4, TRBJ1-5)
CASSLPGRSNQHQHF

SEQ ID NO: 517185 - protein, 13 aa, Homo sapiens
  CDR3 for alpha chain variable domain of TCR clone 258593 (TRAV2, TRAJ40)
CAVVTSGTYKYVF

SEQ ID NO: 517186 - protein, 14 aa, Homo sapiens
  CDR3 for beta chain variable domain of TCR clone 258593 (TRBV28, TRBJ2-1)
CASSYYTAYSEQFF

SEQ ID NO: 517187 - protein, 14 aa, Homo sapiens
  CDR3 for alpha chain variable domain of TCR clone 258594 (TRAV12-2, TRAJ45)
CALPESGGADGLTF

SEQ ID NO: 517188 - protein, 14 aa, Homo sapiens
  CDR3 for beta chain variable domain of TCR clone 258594 (TRBV18, TRBJ1-5)
CASSPGSSNQPQHF

SEQ ID NO: 517189 - protein, 11 aa, Homo sapiens
  CDR3 for alpha chain variable domain of TCR clone 258595 (TRAV13-1, TRAJ39)
CASHAGNMLTF

SEQ ID NO: 517190 - protein, 14 aa, Homo sapiens
  CDR3 for beta chain variable domain of TCR clone 258595 (TRBV11-2, TRBJ1-5)
CASSLERGRQPQHF

SEQ ID NO: 517191 - protein, 12 aa, Homo sapiens
  CDR3 for alpha chain variable domain of TCR clone 258596 (TRAV8-3, TRAJ20)
CAVGANDYKLSF

SEQ ID NO: 517192 - protein, 14 aa, Homo sapiens
  CDR3 for beta chain variable domain of TCR clone 258596 (TRBV19, TRBJ2-5)
CASSSSGIQETQYF

SEQ ID NO: 517193 - protein, 13 aa, Homo sapiens
  CDR3 for alpha chain variable domain of TCR clone 258597 (TRAV29/DV5, TRAJ31)
CAASRNNNARLMF

SEQ ID NO: 517194 - protein, 12 aa, Homo sapiens
  CDR3 for beta chain variable domain of TCR clone 258597 (TRBV11-2, TRBJ2-1)
CASSPANNEQFF

SEQ ID NO: 517195 - protein, 18 aa, Homo sapiens
  CDR3 for alpha chain variable domain of TCR clone 258598 (TRAV12-3, TRAJ52)
CAMSVGGAGGTSYGKLTF

SEQ ID NO: 517196 - protein, 14 aa, Homo sapiens
  CDR3 for beta chain variable domain of TCR clone 258598 (TRBV7-2, TRBJ2-7)
CASSGLAGRGEQYF

SEQ ID NO: 517197 - protein, 12 aa, Homo sapiens
  CDR3 for alpha chain variable domain of TCR clone 258599 (TRAV13-1, TRAJ21)
CAAKEGVNKFYF

SEQ ID NO: 517198 - protein, 14 aa, Homo sapiens
  CDR3 for beta chain variable domain of TCR clone 258599 (TRBV25-1, TRBJ1-1)
CASTHLGGNTEAFF

SEQ ID NO: 517199 - protein, 14 aa, Homo sapiens
  CDR3 for alpha chain variable domain of TCR clone 258600 (TRAV1-2, TRAJ33)
CAVRAPYSNYQLIW

SEQ ID NO: 517200 - protein, 17 aa, Homo sapiens
  CDR3 for beta chain variable domain of TCR clone 258600 (TRBV27, TRBJ2-7)
CTSVPAPKGPEYYEQYF

SEQ ID NO: 517201 - protein, 14 aa, Homo sapiens
  CDR3 for alpha chain variable domain of TCR clone 258601 (TRAV26-1, TRAJ48)
CIVRSWGGNEKLTF

SEQ ID NO: 517202 - protein, 15 aa, Homo sapiens
  CDR3 for beta chain variable domain of TCR clone 258601 (TRBV7-2, TRBJ2-1)
CASSSGLAGGNEQFF

SEQ ID NO: 517203 - protein, 17 aa, Homo sapiens
  CDR3 for alpha chain variable domain of TCR clone 258602 (TRAV23/DV6, TRAJ57)
CAASSTLSQGGSQKLVF

SEQ ID NO: 517204 - protein, 14 aa, Homo sapiens
  CDR3 for beta chain variable domain of TCR clone 258602 (TRBV25-1, TRBJ1-1)
CASTHLGGNTEAFF

SEQ ID NO: 517205 - protein, 16 aa, Homo sapiens
  CDR3 for alpha chain variable domain of TCR clone 258603 (TRAV12-1, TRAJ15)
CVVSPAGQPGRNCSDL

SEQ ID NO: 517206 - protein, 13 aa, Homo sapiens
  CDR3 for beta chain variable domain of TCR clone 258603 (TRBV7-9, TRBJ1-2)
CASSLKQNYGYTF

SEQ ID NO: 517207 - protein, 15 aa, Homo sapiens
  CDR3 for alpha chain variable domain of TCR clone 258604 (TRAV3, TRAJ22)
CAVSDRGGSARQLTF

SEQ ID NO: 517208 - protein, 13 aa, Homo sapiens
  CDR3 for beta chain variable domain of TCR clone 258604 (TRBV7-3, TRBJ2-1)
CASSPVAYNEQFF

SEQ ID NO: 517209 - protein, 14 aa, Homo sapiens
  CDR3 for alpha chain variable domain of TCR clone 258605 (TRAV12-2, TRAJ24)
CAVTPADSWGKLQF

SEQ ID NO: 517210 - protein, 16 aa, Homo sapiens
  CDR3 for beta chain variable domain of TCR clone 258605 (TRBV2, TRBJ1-5)
CASSEGGFYSNQPQHF

SEQ ID NO: 517211 - protein, 16 aa, Homo sapiens
  CDR3 for alpha chain variable domain of TCR clone 258606 (TRAV12-3, TRAJ53)
CAMSPGSGSSNYKLTF

SEQ ID NO: 517212 - protein, 11 aa, Homo sapiens
  CDR3 for beta chain variable domain of TCR clone 258606 (TRBV29-1, TRBJ2-5)
CSEDRAGTQYF

SEQ ID NO: 517213 - protein, 19 aa, Homo sapiens
  CDR3 for alpha chain variable domain of TCR clone 258607 (TRAV27, TRAJ53)
ASTSVQSRNSGGSNIKLTF

SEQ ID NO: 517214 - protein, 14 aa, Homo sapiens
  CDR3 for beta chain variable domain of TCR clone 258607 (TRBV11-1, TRBJ2-7)
CASTFAVPSYEQYF

SEQ ID NO: 517215 - protein, 15 aa, Homo sapiens
  CDR3 for alpha chain variable domain of TCR clone 258608 (TRAV14/DV4, TRAJ12)
CAMREERDSRYKLIF

SEQ ID NO: 517216 - protein, 16 aa, Homo sapiens
  CDR3 for beta chain variable domain of TCR clone 258608 (TRBV11-2, TRBJ1-2)
CASSLDRGGNNYGYTF

SEQ ID NO: 517217 - protein, 14 aa, Homo sapiens
  CDR3 for alpha chain variable domain of TCR clone 258609 (TRAV38-2/DV8, TRAJ40)
CAYRRISGTYKYIF

SEQ ID NO: 517218 - protein, 14 aa, Homo sapiens
  CDR3 for beta chain variable domain of TCR clone 258609 (TRBV12-4, TRBJ1-1)
CASSLGTGGTEAFF

SEQ ID NO: 517219 - protein, 11 aa, Homo sapiens
  CDR3 for alpha chain variable domain of TCR clone 258610 (TRAV13-2, TRAJ23)
CAESPRGKLIF

SEQ ID NO: 517220 - protein, 16 aa, Homo sapiens
  CDR3 for beta chain variable domain of TCR clone 258610 (TRBV7-7, TRBJ2-1)
CASSLASGTSYNEQFF

SEQ ID NO: 517221 - protein, 15 aa, Homo sapiens
  CDR3 for alpha chain variable domain of TCR clone 258611 (TRAV13-1, TRAJ10)
CAAEVVTGGGNKHTF

SEQ ID NO: 517222 - protein, 13 aa, Homo sapiens
  CDR3 for beta chain variable domain of TCR clone 258611 (TRBV28, TRBJ2-5)
CAGVSRGEETQYF

SEQ ID NO: 517223 - protein, 14 aa, Homo sapiens
  CDR3 for alpha chain variable domain of TCR clone 258612 (TRAV16, TRAJ15)
CVLSFNQAGTALIF

SEQ ID NO: 517224 - protein, 16 aa, Homo sapiens
  CDR3 for beta chain variable domain of TCR clone 258612 (TRBV9, TRBJ2-7)
CASSAGPDRSPYEQYF

SEQ ID NO: 517225 - protein, 11 aa, Homo sapiens
  CDR3 for alpha chain variable domain of TCR clone 258613 (TRAV2, TRAJ21)
CAVFNFNKFYF

SEQ ID NO: 517226 - protein, 14 aa, Homo sapiens
  CDR3 for beta chain variable domain of TCR clone 258613 (TRBV15, TRBJ2-3)
FATRSGTSTDTQYF

SEQ ID NO: 517227 - protein, 12 aa, Homo sapiens
  CDR3 for alpha chain variable domain of TCR clone 258614 (TRAV12-3, TRAJ17)
CAMTLTGNKLTF

SEQ ID NO: 517228 - protein, 13 aa, Homo sapiens
  CDR3 for beta chain variable domain of TCR clone 258614 (TRBV5-1, TRBJ1-1)
SASSADWDTEAFF

SEQ ID NO: 517229 - protein, 14 aa, Homo sapiens
  CDR3 for alpha chain variable domain of TCR clone 258615 (TRAV1-2, TRAJ16)
CAVNRFSDGQKLLF

SEQ ID NO: 517230 - protein, 15 aa, Homo sapiens
  CDR3 for beta chain variable domain of TCR clone 258615 (TRBV3-1, TRBJ2-5)
CASSANLGGPENQYF

SEQ ID NO: 517231 - protein, 10 aa, Homo sapiens
  CDR3 for alpha chain variable domain of TCR clone 258616 (TRAV36/DV7, TRAJ48)
CAVGNEKLTL

SEQ ID NO: 517232 - protein, 13 aa, Homo sapiens
  CDR3 for beta chain variable domain of TCR clone 258616 (TRBV19, TRBJ1-2)
CASSVPGQDGYTF

SEQ ID NO: 517233 - protein, 13 aa, Homo sapiens
  CDR3 for alpha chain variable domain of TCR clone 258617 (TRAV12-3, TRAJ33)
CAMSLNSNYQLIW

SEQ ID NO: 517234 - protein, 14 aa, Homo sapiens
  CDR3 for beta chain variable domain of TCR clone 258617 (TRBV19, TRBJ2-1)
CASPTFVLNGEQFF

SEQ ID NO: 517235 - protein, 13 aa, Homo sapiens
  CDR3 for alpha chain variable domain of TCR clone 258618 (TRAV34, TRAJ33)
CGADMNSNYQLIW

SEQ ID NO: 517236 - protein, 16 aa, Homo sapiens
  CDR3 for beta chain variable domain of TCR clone 258618 (TRBV6-1, TRBJ2-5)
CASSKTLDRGAETQYF

SEQ ID NO: 517237 - protein, 14 aa, Homo sapiens
  CDR3 for alpha chain variable domain of TCR clone 258619 (TRAV38-2/DV8, TRAJ30)
CAYRSADRDDKIIF

SEQ ID NO: 517238 - protein, 13 aa, Homo sapiens
  CDR3 for beta chain variable domain of TCR clone 258619 (TRBV15, TRBJ1-6)
CATSGGLNSPLHF

SEQ ID NO: 517239 - protein, 18 aa, Homo sapiens
  CDR3 for alpha chain variable domain of TCR clone 258620 (TRAV26-1, TRAJ23)
CIVRVGLEVWNQGGKLIF

SEQ ID NO: 517240 - protein, 13 aa, Homo sapiens
  CDR3 for beta chain variable domain of TCR clone 258620 (TRBV12-4, TRBJ2-2)
CASSITGSGELFF

SEQ ID NO: 517241 - protein, 14 aa, Homo sapiens
  CDR3 for alpha chain variable domain of TCR clone 258621 (TRAV17, TRAJ57)
CATDPQGGSEKLVF

SEQ ID NO: 517242 - protein, 15 aa, Homo sapiens
  CDR3 for beta chain variable domain of TCR clone 258621 (TRBV28, TRBJ2-1)
CASSIIAGGRSEQFF

SEQ ID NO: 517243 - protein, 15 aa, Homo sapiens
  CDR3 for alpha chain variable domain of TCR clone 258622 (TRAV26-1, TRAJ29)
CIVRVEGSGHTPLVF

SEQ ID NO: 517244 - protein, 14 aa, Homo sapiens
  CDR3 for beta chain variable domain of TCR clone 258622 (TRBV18, TRBJ2-5)
CASSPGVAQETQYF

SEQ ID NO: 517245 - protein, 15 aa, Homo sapiens
  CDR3 for alpha chain variable domain of TCR clone 258623 (TRAV26-1, TRAJ42)
CIVRVKGGSQGNLIF

SEQ ID NO: 517246 - protein, 14 aa, Homo sapiens
  CDR3 for beta chain variable domain of TCR clone 258623 (TRBV19, TRBJ2-2)
CATAGHANTGELFF

SEQ ID NO: 517247 - protein, 17 aa, Homo sapiens
  CDR3 for alpha chain variable domain of TCR clone 258624 (TRAV12-3, TRAJ52)
CAVNPYAGGTSYGKLTF

SEQ ID NO: 517248 - protein, 16 aa, Homo sapiens
  CDR3 for beta chain variable domain of TCR clone 258624 (TRBV5-5, TRBJ2-2)
CASSGRREGATGELFF

SEQ ID NO: 517249 - protein, 18 aa, Homo sapiens
  CDR3 for alpha chain variable domain of TCR clone 258625 (TRAV21, TRAJ52)
CAVRPSPAGGTSYGKLTF

SEQ ID NO: 517250 - protein, 13 aa, Homo sapiens
  CDR3 for beta chain variable domain of TCR clone 258625 (TRBV4-2, TRBJ2-7)
CASSRDPHDEQYF

SEQ ID NO: 517251 - protein, 11 aa, Homo sapiens
  CDR3 for alpha chain variable domain of TCR clone 258626 (TRAV13-1, TRAJ52)
PGGTNYGKLTF

SEQ ID NO: 517252 - protein, 16 aa, Homo sapiens
  CDR3 for beta chain variable domain of TCR clone 258626 (TRBV28, TRBJ2-7)
CASGPWVATGDLSQYF

SEQ ID NO: 517253 - protein, 14 aa, Homo sapiens
  CDR3 for alpha chain variable domain of TCR clone 258627 (TRAV1-2, TRAJ16)
CAVNRFSDGQKLLF

SEQ ID NO: 517254 - protein, 15 aa, Homo sapiens
  CDR3 for beta chain variable domain of TCR clone 258627 (TRBV12-4, TRBJ2-5)
CASSPPTCLQETQYF

SEQ ID NO: 517255 - protein, 17 aa, Homo sapiens
  CDR3 for alpha chain variable domain of TCR clone 258628 (TRAV23/DV6, TRAJ57)
CAASSTLSQGGSEKLVF

SEQ ID NO: 517256 - protein, 15 aa, Homo sapiens
  CDR3 for beta chain variable domain of TCR clone 258628 (TRBV7-2, TRBJ2-3)
CASSSTGLETDTQYF

SEQ ID NO: 517257 - protein, 14 aa, Homo sapiens
  CDR3 for alpha chain variable domain of TCR clone 258629 (TRAV12-3, TRAJ10)
SHLPPTGGGNKLTF

SEQ ID NO: 517258 - protein, 12 aa, Homo sapiens
  CDR3 for beta chain variable domain of TCR clone 258629 (TRBV11-2, TRBJ2-2)
CASSLGGGELFF

SEQ ID NO: 517259 - protein, 15 aa, Homo sapiens
  CDR3 for alpha chain variable domain of TCR clone 258630 (TRAV8-6, TRAJ10)
CAVSDQAGGGNKLTF

SEQ ID NO: 517260 - protein, 18 aa, Homo sapiens
  CDR3 for beta chain variable domain of TCR clone 258630 (TRBV12-4, TRBJ2-2)
CASRPFGAGALNTGELFF

SEQ ID NO: 517261 - protein, 15 aa, Homo sapiens
  CDR3 for alpha chain variable domain of TCR clone 258631 (TRAV26-1, TRAJ48)
CIVRVGDFGNEKLTF

SEQ ID NO: 517262 - protein, 13 aa, Homo sapiens
  CDR3 for beta chain variable domain of TCR clone 258631 (TRBV19, TRBJ1-5)
CASSIGGEQPQHF

SEQ ID NO: 517263 - protein, 19 aa, Homo sapiens
  CDR3 for alpha chain variable domain of TCR clone 258632 (TRAV2, TRAJ20)
ILQVREADAAVYRDCKLSF

SEQ ID NO: 517264 - protein, 17 aa, Homo sapiens
  CDR3 for beta chain variable domain of TCR clone 258632 (TRBV15, TRBJ1-5)
CATSRAPPGTRNQPQHF

SEQ ID NO: 517265 - protein, 13 aa, Homo sapiens
  CDR3 for alpha chain variable domain of TCR clone 258633 (TRAV20, TRAJ20)
CAVQAGSGYKLSF

SEQ ID NO: 517266 - protein, 17 aa, Homo sapiens
  CDR3 for beta chain variable domain of TCR clone 258633 (TRBV7-2, TRBJ2-1)
CASSRGTSGAVGWEQFF

SEQ ID NO: 517267 - protein, 14 aa, Homo sapiens
  CDR3 for alpha chain variable domain of TCR clone 258634 (TRAV13-2, TRAJ32)
CAENHGGATNKLIF

SEQ ID NO: 517268 - protein, 12 aa, Homo sapiens
  CDR3 for beta chain variable domain of TCR clone 258634 (TRBV7-8, TRBJ2-7)
CASEGGPHGQYF

SEQ ID NO: 517269 - protein, 15 aa, Homo sapiens
  CDR3 for alpha chain variable domain of TCR clone 258635 (TRAV26-1, TRAJ3)
CIVRSGYGSASKIIF

SEQ ID NO: 517270 - protein, 15 aa, Homo sapiens
  CDR3 for beta chain variable domain of TCR clone 258635 (TRBV9, TRBJ1-6)
CASSVAGTGDSPLHF

SEQ ID NO: 517271 - protein, 15 aa, Homo sapiens
  CDR3 for alpha chain variable domain of TCR clone 258636 (TRAV3, TRAJ20)
CAMRDIKLSDYKLNF

SEQ ID NO: 517272 - protein, 15 aa, Homo sapiens
  CDR3 for beta chain variable domain of TCR clone 258636 (TRBV7-9, TRBJ1-6)
CASSSPGRGNSPLHF

SEQ ID NO: 517273 - protein, 11 aa, Homo sapiens
  CDR3 for alpha chain variable domain of TCR clone 258637 (TRAV12-3, TRAJ26)
CAMSHGQNFVF

SEQ ID NO: 517274 - protein, 15 aa, Homo sapiens
  CDR3 for beta chain variable domain of TCR clone 258637 (TRBV4-1, TRBJ1-4)
CASSDTGGTNEKLFF

SEQ ID NO: 517275 - protein, 15 aa, Homo sapiens
  CDR3 for alpha chain variable domain of TCR clone 258638 (TRAV8-3, TRAJ45)
WASSYSGGGADGLTF

SEQ ID NO: 517276 - protein, 12 aa, Homo sapiens
  CDR3 for beta chain variable domain of TCR clone 258638 (TRBV11-2, TRBJ2-3)
CASRPGTDTQYF

SEQ ID NO: 517277 - protein, 12 aa, Homo sapiens
  CDR3 for alpha chain variable domain of TCR clone 258639 (TRAV20, TRAJ37)
CALPSNTGKLIF

SEQ ID NO: 517278 - protein, 16 aa, Homo sapiens
  CDR3 for beta chain variable domain of TCR clone 258639 (TRBV28, TRBJ1-2)
CASSHVQGVYKDGYTF

SEQ ID NO: 517279 - protein, 15 aa, Homo sapiens
  CDR3 for alpha chain variable domain of TCR clone 258640 (TRAV17, TRAJ57)
CATGPSQGGSAKLVF

SEQ ID NO: 517280 - protein, 16 aa, Homo sapiens
  CDR3 for beta chain variable domain of TCR clone 258640 (TRBV12-4, TRBJ1-5)
CVSSRPVGGSNQTQHF

SEQ ID NO: 517281 - protein, 15 aa, Homo sapiens
  CDR3 for alpha chain variable domain of TCR clone 258641 (TRAV26-1, TRAJ29)
CIVRVEGSGNTPLVS

SEQ ID NO: 517282 - protein, 15 aa, Homo sapiens
  CDR3 for beta chain variable domain of TCR clone 258641 (TRBV7-9, TRBJ1-5)
CASSQGHQPNQTQHF

SEQ ID NO: 517283 - protein, 15 aa, Homo sapiens
  CDR3 for alpha chain variable domain of TCR clone 258642 (TRAV27, TRAJ38)
CAARRNAGNNRKRIW

SEQ ID NO: 517284 - protein, 13 aa, Homo sapiens
  CDR3 for beta chain variable domain of TCR clone 258642 (TRBV12-5, TRBJ2-3)
CASSDRQSDTQYF

SEQ ID NO: 517285 - protein, 13 aa, Homo sapiens
  CDR3 for alpha chain variable domain of TCR clone 258643 (TRAV8-1, TRAJ32)
CAADGGATNKLIF

SEQ ID NO: 517286 - protein, 16 aa, Homo sapiens
  CDR3 for beta chain variable domain of TCR clone 258643 (TRBV20-1, TRBJ1-4)
CSAPGQGLLTNEKLFF

SEQ ID NO: 517287 - protein, 14 aa, Homo sapiens
  CDR3 for alpha chain variable domain of TCR clone 258644 (TRAV12-2, TRAJ9)
CAVNALEGGFKTVF

SEQ ID NO: 517288 - protein, 13 aa, Homo sapiens
  CDR3 for beta chain variable domain of TCR clone 258644 (TRBV10-3, TRBJ2-7)
CASKLAVNYEKYF

SEQ ID NO: 517289 - protein, 20 aa, Homo sapiens
  CDR3 for alpha chain variable domain of TCR clone 258645 (TRAV8-3, TRAJ10)
CAVGNAGRRKQTHLWDRHSA

SEQ ID NO: 517290 - protein, 16 aa, Homo sapiens
  CDR3 for beta chain variable domain of TCR clone 258645 (TRBV11-2, TRBJ1-2)
CASSLDTGGADYGYTF

SEQ ID NO: 517291 - protein, 12 aa, Homo sapiens
  CDR3 for alpha chain variable domain of TCR clone 258646 (TRAV12-2, TRAJ8)
CAVATGFQKLVF

SEQ ID NO: 517292 - protein, 16 aa, Homo sapiens
  CDR3 for beta chain variable domain of TCR clone 258646 (TRBV19, TRBJ2-1)
CASSKAGPSSYNEQFF

SEQ ID NO: 517293 - protein, 10 aa, Homo sapiens
  CDR3 for alpha chain variable domain of TCR clone 258647 (TRAV12-1, TRAJ24)
CVVNRGKFQF

SEQ ID NO: 517294 - protein, 12 aa, Homo sapiens
  CDR3 for beta chain variable domain of TCR clone 258647 (TRBV11-2, TRBJ2-2)
CASSLGGGELFF

SEQ ID NO: 517295 - protein, 13 aa, Homo sapiens
  CDR3 for alpha chain variable domain of TCR clone 258648 (TRAV12-1, TRAJ11)
CVVNRAGYSTLTF

SEQ ID NO: 517296 - protein, 17 aa, Homo sapiens
  CDR3 for beta chain variable domain of TCR clone 258648 (TRBV20-1, TRBJ2-2)
CSASGSGQGGLTGELFF

SEQ ID NO: 517297 - protein, 13 aa, Homo sapiens
  CDR3 for alpha chain variable domain of TCR clone 258649 (TRAV8-3, TRAJ31)
CAVVARNNARLMF

SEQ ID NO: 517298 - protein, 14 aa, Homo sapiens
  CDR3 for beta chain variable domain of TCR clone 258649 (TRBV12-5, TRBJ2-5)
CASGSRTHQETQYF

SEQ ID NO: 517299 - protein, 12 aa, Homo sapiens
  CDR3 for alpha chain variable domain of TCR clone 258650 (TRAV12-3, TRAJ17)
CAMTLTGNKLTF

SEQ ID NO: 517300 - protein, 15 aa, Homo sapiens
  CDR3 for beta chain variable domain of TCR clone 258650 (TRBV10-3, TRBJ2-1)
CAIRNETSGHNEQFF

SEQ ID NO: 517301 - protein, 13 aa, Homo sapiens
  CDR3 for alpha chain variable domain of TCR clone 258651 (TRAV16, TRAJ26)
CITVLCQGQNFVF

SEQ ID NO: 517302 - protein, 12 aa, Homo sapiens
  CDR3 for beta chain variable domain of TCR clone 258651 (TRBV11-2, TRBJ2-1)
CASSPGNNEQFF

SEQ ID NO: 517303 - protein, 12 aa, Homo sapiens
  CDR3 for alpha chain variable domain of TCR clone 258652 (TRAV29/DV5, TRAJ34)
CAARHNTDKLIF

SEQ ID NO: 517304 - protein, 13 aa, Homo sapiens
  CDR3 for beta chain variable domain of TCR clone 258652 (TRBV6-5, TRBJ2-5)
CATAPSPQETQYF

SEQ ID NO: 517305 - protein, 14 aa, Homo sapiens
  CDR3 for alpha chain variable domain of TCR clone 258653 (TRAV12-2, TRAJ44)
CTVNPAGTASKLTF

SEQ ID NO: 517306 - protein, 14 aa, Homo sapiens
  CDR3 for beta chain variable domain of TCR clone 258653 (TRBV7-2, TRBJ1-3)
CASSRLRSGNTIYF

SEQ ID NO: 517307 - protein, 13 aa, Homo sapiens
  CDR3 for alpha chain variable domain of TCR clone 258654 (TRAV13-1, TRAJ6)
CAASKGGSYIPTF

SEQ ID NO: 517308 - protein, 12 aa, Homo sapiens
  CDR3 for beta chain variable domain of TCR clone 258654 (TRBV7-9, TRBJ2-7)
CASSIKREEQYF

SEQ ID NO: 517309 - protein, 12 aa, Homo sapiens
  CDR3 for alpha chain variable domain of TCR clone 258655 (TRAV17, TRAJ20)
CATQSNDYKLSF

SEQ ID NO: 517310 - protein, 13 aa, Homo sapiens
  CDR3 for beta chain variable domain of TCR clone 258655 (TRBV10-3, TRBJ1-1)
CAIIPEGGNEAFF

SEQ ID NO: 517311 - protein, 16 aa, Homo sapiens
  CDR3 for alpha chain variable domain of TCR clone 258656 (TRAV16, TRAJ4)
CITVLPFSGGYNKLIF

SEQ ID NO: 517312 - protein, 14 aa, Homo sapiens
  CDR3 for beta chain variable domain of TCR clone 258656 (TRBV19, TRBJ2-7)
CASSMGQGAIEQYV

SEQ ID NO: 517313 - protein, 15 aa, Homo sapiens
  CDR3 for alpha chain variable domain of TCR clone 258657 (TRAV17, TRAJ57)
CATGPSQGGSDKLVF

SEQ ID NO: 517314 - protein, 14 aa, Homo sapiens
  CDR3 for beta chain variable domain of TCR clone 258657 (TRBV2, TRBJ2-1)
CASRTGSSYNEQFF

SEQ ID NO: 517315 - protein, 14 aa, Homo sapiens
  CDR3 for alpha chain variable domain of TCR clone 258658 (TRAV13-1, TRAJ35)
CAARKGGFGNVLHC

SEQ ID NO: 517316 - protein, 15 aa, Homo sapiens
  CDR3 for beta chain variable domain of TCR clone 258658 (TRBV7-3, TRBJ2-1)
CASSLGQGPFGEQFF

SEQ ID NO: 517317 - protein, 12 aa, Homo sapiens
  CDR3 for alpha chain variable domain of TCR clone 258659 (TRAV2, TRAJ33)
CAVPDSNYQLIW

SEQ ID NO: 517318 - protein, 17 aa, Homo sapiens
  CDR3 for beta chain variable domain of TCR clone 258659 (TRBV6-5, TRBJ2-3)
CAISYGTSLYKSDTQYF

SEQ ID NO: 517319 - protein, 14 aa, Homo sapiens
  CDR3 for alpha chain variable domain of TCR clone 258660 (TRAV4, TRAJ26)
CRVGPHNYGQKFVF

SEQ ID NO: 517320 - protein, 17 aa, Homo sapiens
  CDR3 for beta chain variable domain of TCR clone 258660 (TRBV24-1, TRBJ2-1)
CATSDVSTSGTYNEQFF

SEQ ID NO: 517321 - protein, 15 aa, Homo sapiens
  CDR3 for alpha chain variable domain of TCR clone 258661 (TRAV38-1, TRAJ37)
CAFIHGSGNTGNLIF

SEQ ID NO: 517322 - protein, 14 aa, Homo sapiens
  CDR3 for beta chain variable domain of TCR clone 258661 (TRBV29-1, TRBJ2-5)
CSVETSGSGETQYF

SEQ ID NO: 517323 - protein, 11 aa, Homo sapiens
  CDR3 for alpha chain variable domain of TCR clone 258662 (TRAV2, TRAJ33)
CAVESNYQLIW

SEQ ID NO: 517324 - protein, 15 aa, Homo sapiens
  CDR3 for beta chain variable domain of TCR clone 258662 (TRBV15, TRBJ1-1)
CATSLQGGRNTEAFF

SEQ ID NO: 517325 - protein, 12 aa, Homo sapiens
  CDR3 for alpha chain variable domain of TCR clone 258663 (TRAV12-3, TRAJ42)
CAPGGSQGNLIF

SEQ ID NO: 517326 - protein, 13 aa, Homo sapiens
  CDR3 for beta chain variable domain of TCR clone 258663 (TRBV5-7, TRBJ2-6)
CASTYSGANVLTF

SEQ ID NO: 517327 - protein, 15 aa, Homo sapiens
  CDR3 for alpha chain variable domain of TCR clone 258664 (TRAV8-3, TRAJ27)
CAVGDSKTNAGKSTF

SEQ ID NO: 517328 - protein, 15 aa, Homo sapiens
  CDR3 for beta chain variable domain of TCR clone 258664 (TRBV7-2, TRBJ2-1)
CASSSGLAGGNEQFF

SEQ ID NO: 517329 - protein, 14 aa, Homo sapiens
  CDR3 for alpha chain variable domain of TCR clone 258665 (TRAV12-3, TRAJ10)
SHLPLTGGGNKLTF

SEQ ID NO: 517330 - protein, 14 aa, Homo sapiens
  CDR3 for beta chain variable domain of TCR clone 258665 (TRBV4-2, TRBJ1-5)
CASSQDSINQPQHF

SEQ ID NO: 517331 - protein, 17 aa, Homo sapiens
  CDR3 for alpha chain variable domain of TCR clone 258666 (TRAV3, TRAJ12)
CAVRDGWRMDSSYKLIF

SEQ ID NO: 517332 - protein, 12 aa, Homo sapiens
  CDR3 for beta chain variable domain of TCR clone 258666 (TRBV11-2, TRBJ2-2)
CASSLGGGELFF

SEQ ID NO: 517333 - protein, 15 aa, Homo sapiens
  CDR3 for alpha chain variable domain of TCR clone 258667 (TRAV3, TRAJ5)
CAVRDLETGRRALTF

SEQ ID NO: 517334 - protein, 14 aa, Homo sapiens
  CDR3 for beta chain variable domain of TCR clone 258667 (TRBV25-1, TRBJ1-1)
CASTHLGGNTEAFF

SEQ ID NO: 517335 - protein, 17 aa, Homo sapiens
  CDR3 for alpha chain variable domain of TCR clone 258668 (TRAV3, TRAJ28)
CAVRDGYSGAGSYQLTF

SEQ ID NO: 517336 - protein, 14 aa, Homo sapiens
  CDR3 for beta chain variable domain of TCR clone 258668 (TRBV12-4, TRBJ1-1)
CASRQGQEYTGAFF

SEQ ID NO: 517337 - protein, 12 aa, Homo sapiens
  CDR3 for alpha chain variable domain of TCR clone 258669 (TRAV21, TRAJ3)
CCFYSSASKIIF

SEQ ID NO: 517338 - protein, 12 aa, Homo sapiens
  CDR3 for beta chain variable domain of TCR clone 258669 (TRBV11-2, TRBJ2-2)
CASSLGGGELFF

SEQ ID NO: 517339 - protein, 15 aa, Homo sapiens
  CDR3 for alpha chain variable domain of TCR clone 258670 (TRAV3, TRAJ5)
CAVRDRKTGRRALTF

SEQ ID NO: 517340 - protein, 18 aa, Homo sapiens
  CDR3 for beta chain variable domain of TCR clone 258670 (TRBV12-4, TRBJ2-2)
CASSLVAGTRGRTGELFF

SEQ ID NO: 517341 - protein, 15 aa, Homo sapiens
  CDR3 for alpha chain variable domain of TCR clone 258671 (TRAV21, TRAJ48)
CAVPISNFGNEKLTF

SEQ ID NO: 517342 - protein, 14 aa, Homo sapiens
  CDR3 for beta chain variable domain of TCR clone 258671 (TRBV19, TRBJ2-1)
CASPTFVLSGEQFF

SEQ ID NO: 517343 - protein, 14 aa, Homo sapiens
  CDR3 for alpha chain variable domain of TCR clone 258672 (TRAV16, TRAJ26)
CALSSANYGQNFVF

SEQ ID NO: 517344 - protein, 14 aa, Homo sapiens
  CDR3 for beta chain variable domain of TCR clone 258672 (TRBV7-2, TRBJ2-7)
CASRSQGAAYEQYF

SEQ ID NO: 517345 - protein, 12 aa, Homo sapiens
  CDR3 for alpha chain variable domain of TCR clone 258673 (TRAV13-1, TRAJ21)
CAAKEGINKFYF

SEQ ID NO: 517346 - protein, 14 aa, Homo sapiens
  CDR3 for beta chain variable domain of TCR clone 258673 (TRBV23-1, TRBJ2-5)
CASSFLRSQETQYF

SEQ ID NO: 517347 - protein, 13 aa, Homo sapiens
  CDR3 for alpha chain variable domain of TCR clone 258674 (TRAV12-1, TRAJ16)
CVVNGPDGQKLLF

SEQ ID NO: 517348 - protein, 13 aa, Homo sapiens
  CDR3 for beta chain variable domain of TCR clone 258674 (TRBV2, TRBJ1-1)
CARNPTRGFHAFF

SEQ ID NO: 517349 - protein, 14 aa, Homo sapiens
  CDR3 for alpha chain variable domain of TCR clone 258675 (TRAV12-2, TRAJ13)
CAVKKTGGYQKVTF

SEQ ID NO: 517350 - protein, 13 aa, Homo sapiens
  CDR3 for beta chain variable domain of TCR clone 258675 (TRBV12-4, TRBJ1-1)
CASSFGEDTEAFF

SEQ ID NO: 517351 - protein, 15 aa, Homo sapiens
  CDR3 for alpha chain variable domain of TCR clone 258676 (TRAV8-3, TRAJ11)
CAVGLLNSGYSTLTF

SEQ ID NO: 517352 - protein, 15 aa, Homo sapiens
  CDR3 for beta chain variable domain of TCR clone 258676 (TRBV6-6, TRBJ2-1)
CQQLLILWSYNEQFF

SEQ ID NO: 517353 - protein, 18 aa, Homo sapiens
  CDR3 for alpha chain variable domain of TCR clone 258677 (TRAV13-1, TRAJ52)
CASKNPNAGGTSYGKLTF

SEQ ID NO: 517354 - protein, 18 aa, Homo sapiens
  CDR3 for beta chain variable domain of TCR clone 258677 (TRBV12-4, TRBJ2-4)
CASSRTGAVDVAKNIQYF

SEQ ID NO: 517355 - protein, 14 aa, Homo sapiens
  CDR3 for alpha chain variable domain of TCR clone 258678 (TRAV8-1, TRAJ34)
CAVITTYNTDKLIF

SEQ ID NO: 517356 - protein, 14 aa, Homo sapiens
  CDR3 for beta chain variable domain of TCR clone 258678 (TRBV11-3, TRBJ1-3)
CASSHNGLGNTIYF

SEQ ID NO: 517357 - protein, 14 aa, Homo sapiens
  CDR3 for alpha chain variable domain of TCR clone 258679 (TRAV13-1, TRAJ6)
CAASITGGSYIPTF

SEQ ID NO: 517358 - protein, 20 aa, Homo sapiens
  CDR3 for beta chain variable domain of TCR clone 258679 (TRBV7-8, TRBJ2-2)
CASSHLFPGPTIHITGELFF

SEQ ID NO: 517359 - protein, 14 aa, Homo sapiens
  CDR3 for alpha chain variable domain of TCR clone 258680 (TRAV12-1, TRAJ17)
CVVNPKAAGNKLTF

SEQ ID NO: 517360 - protein, 16 aa, Homo sapiens
  CDR3 for beta chain variable domain of TCR clone 258680 (TRBV20-1, TRBJ2-1)
CSASASGYSPYNEQFI

SEQ ID NO: 517361 - protein, 14 aa, Homo sapiens
  CDR3 for alpha chain variable domain of TCR clone 258681 (TRAV2, TRAJ9)
CAVEDRSGGFKTIF

SEQ ID NO: 517362 - protein, 17 aa, Homo sapiens
  CDR3 for beta chain variable domain of TCR clone 258681 (TRBV5-5, TRBJ1-1)
CASSLRFRGLMNTEAFF

SEQ ID NO: 517363 - protein, 12 aa, Homo sapiens
  CDR3 for alpha chain variable domain of TCR clone 258682 (TRAV13-1, TRAJ49)
CAASIWGNQFYL

SEQ ID NO: 517364 - protein, 14 aa, Homo sapiens
  CDR3 for beta chain variable domain of TCR clone 258682 (TRBV12-4, TRBJ1-1)
CASSLDGLNTEAFF

SEQ ID NO: 517365 - protein, 13 aa, Homo sapiens
  CDR3 for alpha chain variable domain of TCR clone 258683 (TRAV12-1, TRAJ29)
CVVNGPGNTPLVL

SEQ ID NO: 517366 - protein, 13 aa, Homo sapiens
  CDR3 for beta chain variable domain of TCR clone 258683 (TRBV7-2, TRBJ2-5)
CASSRGGLETQYF

SEQ ID NO: 517367 - protein, 13 aa, Homo sapiens
  CDR3 for alpha chain variable domain of TCR clone 258684 (TRAV23/DV6, TRAJ27)
CAASKPMQANQPL

SEQ ID NO: 517368 - protein, 14 aa, Homo sapiens
  CDR3 for beta chain variable domain of TCR clone 258684 (TRBV19, TRBJ2-1)
CASKDPSSYNEQFF

SEQ ID NO: 517369 - protein, 12 aa, Homo sapiens
  CDR3 for alpha chain variable domain of TCR clone 258685 (TRAV21, TRAJ33)
CAKMDSNYQLIW

SEQ ID NO: 517370 - protein, 11 aa, Homo sapiens
  CDR3 for beta chain variable domain of TCR clone 258685 (TRBV6-1, TRBJ2-1)
CASISSNEQFF

SEQ ID NO: 517371 - protein, 16 aa, Homo sapiens
  CDR3 for alpha chain variable domain of TCR clone 258686 (TRAV26-1, TRAJ38)
CIVRPLNAGNNRKLIW

SEQ ID NO: 517372 - protein, 13 aa, Homo sapiens
  CDR3 for beta chain variable domain of TCR clone 258686 (TRBV18, TRBJ1-1)
CASSPNGDTDAFF

SEQ ID NO: 517373 - protein, 12 aa, Homo sapiens
  CDR3 for alpha chain variable domain of TCR clone 258687 (TRAV16, TRAJ27)
CALNTNAGKSTF

SEQ ID NO: 517374 - protein, 16 aa, Homo sapiens
  CDR3 for beta chain variable domain of TCR clone 258687 (TRBV7-3, TRBJ2-1)
CASSLSGGVHYNEQFF

SEQ ID NO: 517375 - protein, 16 aa, Homo sapiens
  CDR3 for alpha chain variable domain of TCR clone 258688 (TRAV3, TRAJ37)
CAVRPHGSGTTAKLIF

SEQ ID NO: 517376 - protein, 16 aa, Homo sapiens
  CDR3 for beta chain variable domain of TCR clone 258688 (TRBV9, TRBJ1-2)
CASSVEEKVSPYGYTF

SEQ ID NO: 517377 - protein, 18 aa, Homo sapiens
  CDR3 for alpha chain variable domain of TCR clone 258689 (TRAV12-3, TRAJ52)
CAMSVGGAGGASYVKLTF

SEQ ID NO: 517378 - protein, 15 aa, Homo sapiens
  CDR3 for beta chain variable domain of TCR clone 258689 (TRBV27, TRBJ1-6)
CASSFDRGLGSPLHF

SEQ ID NO: 517379 - protein, 13 aa, Homo sapiens
  CDR3 for alpha chain variable domain of TCR clone 258690 (TRAV23/DV6, TRAJ47)
CAASIRNGIWKQT

SEQ ID NO: 517380 - protein, 13 aa, Homo sapiens
  CDR3 for beta chain variable domain of TCR clone 258690 (TRBV19, TRBJ1-2)
CASRQGQVYGYTF

SEQ ID NO: 517381 - protein, 19 aa, Homo sapiens
  CDR3 for alpha chain variable domain of TCR clone 258691 (TRAV26-1, TRAJ28)
CIVRVAHAYSGAGSYHLTF

SEQ ID NO: 517382 - protein, 15 aa, Homo sapiens
  CDR3 for beta chain variable domain of TCR clone 258691 (TRBV5-1, TRBJ1-3)
CASSSKTGAGNTIYF

SEQ ID NO: 517383 - protein, 12 aa, Homo sapiens
  CDR3 for alpha chain variable domain of TCR clone 258692 (TRAV27, TRAJ9)
CAGESGGFKTIF

SEQ ID NO: 517384 - protein, 14 aa, Homo sapiens
  CDR3 for beta chain variable domain of TCR clone 258692 (TRBV6-1, TRBJ2-1)
CASAKDVFYNEQFF

SEQ ID NO: 517385 - protein, 16 aa, Homo sapiens
  CDR3 for alpha chain variable domain of TCR clone 258693 (TRAV27, TRAJ52)
CAGAPAGGTSYGKLTF

SEQ ID NO: 517386 - protein, 17 aa, Homo sapiens
  CDR3 for beta chain variable domain of TCR clone 258693 (TRBV11-2, TRBJ2-1)
CASSLYPPGVEYNEQFF

SEQ ID NO: 517387 - protein, 13 aa, Homo sapiens
  CDR3 for alpha chain variable domain of TCR clone 258694 (TRAV17, TRAJ9)
CATDYTGGFKTIF

SEQ ID NO: 517388 - protein, 11 aa, Homo sapiens
  CDR3 for beta chain variable domain of TCR clone 258694 (TRBV12-4, TRBJ2-3)
CASSSVRGRYF

SEQ ID NO: 517389 - protein, 14 aa, Homo sapiens
  CDR3 for alpha chain variable domain of TCR clone 258695 (TRAV23/DV6, TRAJ11)
CAASLESGYSTLTF

SEQ ID NO: 517390 - protein, 13 aa, Homo sapiens
  CDR3 for beta chain variable domain of TCR clone 258695 (TRBV4-1, TRBJ2-5)
CASSRTRGETQYF

SEQ ID NO: 517391 - protein, 14 aa, Homo sapiens
  CDR3 for alpha chain variable domain of TCR clone 258696 (TRAV14/DV4, TRAJ7)
CAMREAYGNNRLAF

SEQ ID NO: 517392 - protein, 15 aa, Homo sapiens
  CDR3 for beta chain variable domain of TCR clone 258696 (TRBV19, TRBJ2-1)
CASSINREPSHEQVF

SEQ ID NO: 517393 - protein, 18 aa, Homo sapiens
  CDR3 for alpha chain variable domain of TCR clone 258697 (TRAV26-2, )
CILTDIQNPDPAVYQLRD

SEQ ID NO: 517394 - protein, 11 aa, Homo sapiens
  CDR3 for beta chain variable domain of TCR clone 258697 (TRBV7-8, TRBJ2-7)
CASSLSLEQYF

SEQ ID NO: 517395 - protein, 12 aa, Homo sapiens
  CDR3 for alpha chain variable domain of TCR clone 258698 (TRAV12-2, TRAJ36)
CAAPRGANNLFF

SEQ ID NO: 517396 - protein, 15 aa, Homo sapiens
  CDR3 for beta chain variable domain of TCR clone 258698 (TRBV19, TRBJ1-2)
CASSVGQVLNYGYTF

SEQ ID NO: 517397 - protein, 12 aa, Homo sapiens
  CDR3 for alpha chain variable domain of TCR clone 258699 (TRAV3, TRAJ20)
CAVRDPDYKLSF

SEQ ID NO: 517398 - protein, 14 aa, Homo sapiens
  CDR3 for beta chain variable domain of TCR clone 258699 (TRBV7-2, TRBJ2-7)
CASSPKTSFYEQYV

SEQ ID NO: 517399 - protein, 13 aa, Homo sapiens
  CDR3 for alpha chain variable domain of TCR clone 258700 (TRAV12-2, TRAJ20)
CAVYPSNDYKLSF

SEQ ID NO: 517400 - protein, 14 aa, Homo sapiens
  CDR3 for beta chain variable domain of TCR clone 258700 (TRBV19, TRBJ2-1)
CASSKDRGQDEQFF

SEQ ID NO: 517401 - protein, 10 aa, Homo sapiens
  CDR3 for alpha chain variable domain of TCR clone 258701 (TRAV2, TRAJ15)
RGQAGTALIF

SEQ ID NO: 517402 - protein, 13 aa, Homo sapiens
  CDR3 for beta chain variable domain of TCR clone 258701 (TRBV27, TRBJ2-1)
CASRNLGVGEQFF

SEQ ID NO: 517403 - protein, 16 aa, Homo sapiens
  CDR3 for alpha chain variable domain of TCR clone 258702 (TRAV17, TRAJ22)
CATGPISSGSARQLTF

SEQ ID NO: 517404 - protein, 13 aa, Homo sapiens
  CDR3 for beta chain variable domain of TCR clone 258702 (TRBV11-2, TRBJ2-1)
CTSSLGLAGGRFF

SEQ ID NO: 517405 - protein, 16 aa, Homo sapiens
  CDR3 for alpha chain variable domain of TCR clone 258703 (TRAV13-1, TRAJ48)
CSKYRESNFGNEKLTF

SEQ ID NO: 517406 - protein, 17 aa, Homo sapiens
  CDR3 for beta chain variable domain of TCR clone 258703 (TRBV28, TRBJ2-1)
CASSSARQALTYDEQFF

SEQ ID NO: 517407 - protein, 12 aa, Homo sapiens
  CDR3 for alpha chain variable domain of TCR clone 258704 (TRAV17, TRAJ12)
CATLRSSYKLIF

SEQ ID NO: 517408 - protein, 15 aa, Homo sapiens
  CDR3 for beta chain variable domain of TCR clone 258704 (TRBV7-9, TRBJ1-4)
CASSRTGGFNEELFF

SEQ ID NO: 517409 - protein, 12 aa, Homo sapiens
  CDR3 for alpha chain variable domain of TCR clone 258705 (TRAV13-1, TRAJ11)
CAADSGYSTLTF

SEQ ID NO: 517410 - protein, 16 aa, Homo sapiens
  CDR3 for beta chain variable domain of TCR clone 258705 (TRBV7-3, TRBJ2-2)
CASSLKRGTLSGELFF

SEQ ID NO: 517411 - protein, 16 aa, Homo sapiens
  CDR3 for alpha chain variable domain of TCR clone 258706 (TRAV12-2, TRAJ18)
CAVTTDRGSTLGRLYF

SEQ ID NO: 517412 - protein, 13 aa, Homo sapiens
  CDR3 for beta chain variable domain of TCR clone 258706 (TRBV19, TRBJ2-3)
CATWDKITDTQYV

SEQ ID NO: 517413 - protein, 13 aa, Homo sapiens
  CDR3 for alpha chain variable domain of TCR clone 258707 (TRAV21, TRAJ27)
CAALNTNAGKSTF

SEQ ID NO: 517414 - protein, 13 aa, Homo sapiens
  CDR3 for beta chain variable domain of TCR clone 258707 (TRBV4-1, TRBJ2-2)
CASSQENTGELFF

SEQ ID NO: 517415 - protein, 13 aa, Homo sapiens
  CDR3 for alpha chain variable domain of TCR clone 258708 (TRAV29/DV5, TRAJ44)
CAASTGTASKLTF

SEQ ID NO: 517416 - protein, 17 aa, Homo sapiens
  CDR3 for beta chain variable domain of TCR clone 258708 (TRBV7-3, TRBJ2-3)
CASSLMKRMRGADTQYF

SEQ ID NO: 517417 - protein, 15 aa, Homo sapiens
  CDR3 for alpha chain variable domain of TCR clone 258709 (TRAV21, TRAJ53)
CATLNSGGSNYKLTF

SEQ ID NO: 517418 - protein, 14 aa, Homo sapiens
  CDR3 for beta chain variable domain of TCR clone 258709 (TRBV19, TRBJ2-1)
CASPTFVLSGEQFV

SEQ ID NO: 517419 - protein, 16 aa, Homo sapiens
  CDR3 for alpha chain variable domain of TCR clone 258710 (TRAV26-1, TRAJ31)
CIVRPPVLNNNSRLMF

SEQ ID NO: 517420 - protein, 11 aa, Homo sapiens
  CDR3 for beta chain variable domain of TCR clone 258710 (TRBV7-8, TRBJ2-7)
CASSLSLEQYF

SEQ ID NO: 517421 - protein, 13 aa, Homo sapiens
  CDR3 for alpha chain variable domain of TCR clone 258711 (TRAV8-3, TRAJ44)
CAVVPGTASKLTF

SEQ ID NO: 517422 - protein, 14 aa, Homo sapiens
  CDR3 for beta chain variable domain of TCR clone 258711 (TRBV11-3, TRBJ2-1)
CASSATTSGSIQFF

SEQ ID NO: 517423 - protein, 14 aa, Homo sapiens
  CDR3 for alpha chain variable domain of TCR clone 258712 (TRAV12-1, TRAJ9)
CVVTLNTGGFKTIF

SEQ ID NO: 517424 - protein, 15 aa, Homo sapiens
  CDR3 for beta chain variable domain of TCR clone 258712 (TRBV28, TRBJ2-1)
CASSFQEGVHNEQFF

SEQ ID NO: 517425 - protein, 22 aa, Homo sapiens
  CDR3 for alpha chain variable domain of TCR clone 258713 (TRAV3, )
CAVRDHTGNNHIQNHDPAVYQL

SEQ ID NO: 517426 - protein, 14 aa, Homo sapiens
  CDR3 for beta chain variable domain of TCR clone 258713 (TRBV7-2, TRBJ2-7)
CASSSTVGGYEQYF

SEQ ID NO: 517427 - protein, 13 aa, Homo sapiens
  CDR3 for alpha chain variable domain of TCR clone 258714 (TRAV12-2, TRAJ10)
CAVPTGGGNKLTF

SEQ ID NO: 517428 - protein, 11 aa, Homo sapiens
  CDR3 for beta chain variable domain of TCR clone 258714 (TRBV6-1, TRBJ2-1)
CACISSNEQFF

SEQ ID NO: 517429 - protein, 17 aa, Homo sapiens
  CDR3 for alpha chain variable domain of TCR clone 258715 (TRAV3, TRAJ42)
CAVRDRDYGGSQGNIIF

SEQ ID NO: 517430 - protein, 15 aa, Homo sapiens
  CDR3 for beta chain variable domain of TCR clone 258715 (TRBV6-1, TRBJ2-1)
CASSEAAYSYNEQFF

SEQ ID NO: 517431 - protein, 18 aa, Homo sapiens
  CDR3 for alpha chain variable domain of TCR clone 258716 (TRAV13-1, TRAJ52)
CAAKNPNAGGTSYGKLTF

SEQ ID NO: 517432 - protein, 15 aa, Homo sapiens
  CDR3 for beta chain variable domain of TCR clone 258716 (TRBV28, TRBJ2-4)
CAAGSGTLLMGIPYF

SEQ ID NO: 517433 - protein, 11 aa, Homo sapiens
  CDR3 for alpha chain variable domain of TCR clone 258717 (TRAV27, TRAJ20)
CAGLNDYKLSF

SEQ ID NO: 517434 - protein, 14 aa, Homo sapiens
  CDR3 for beta chain variable domain of TCR clone 258717 (TRBV6-1, TRBJ1-1)
CASTPLQMNTEAYF

SEQ ID NO: 517435 - protein, 14 aa, Homo sapiens
  CDR3 for alpha chain variable domain of TCR clone 258718 (TRAV1-2, TRAJ8)
CAVREDTGFQKLVF

SEQ ID NO: 517436 - protein, 15 aa, Homo sapiens
  CDR3 for beta chain variable domain of TCR clone 258718 (TRBV28, TRBJ2-1)
CASSIIEGGRSEQFF

SEQ ID NO: 517437 - protein, 13 aa, Homo sapiens
  CDR3 for alpha chain variable domain of TCR clone 258719 (TRAV12-2, TRAJ20)
CAVNRFDDYKLIF

SEQ ID NO: 517438 - protein, 12 aa, Homo sapiens
  CDR3 for beta chain variable domain of TCR clone 258719 (TRBV19, TRBJ2-1)
CASSQISNEQFF

SEQ ID NO: 517439 - protein, 15 aa, Homo sapiens
  CDR3 for alpha chain variable domain of TCR clone 258720 (TRAV13-1, TRAJ45)
CAASGSGRGADGLTF

SEQ ID NO: 517440 - protein, 14 aa, Homo sapiens
  CDR3 for beta chain variable domain of TCR clone 258720 (TRBV12-4, TRBJ1-2)
CASSFVGTAYGYTF

SEQ ID NO: 517441 - protein, 14 aa, Homo sapiens
  CDR3 for alpha chain variable domain of TCR clone 258721 (TRAV12-2, TRAJ17)
CAVLFEAAGNKLTF

SEQ ID NO: 517442 - protein, 14 aa, Homo sapiens
  CDR3 for beta chain variable domain of TCR clone 258721 (TRBV15, TRBJ1-2)
CATSRDFDRVGYTF

SEQ ID NO: 517443 - protein, 18 aa, Homo sapiens
  CDR3 for alpha chain variable domain of TCR clone 258722 (TRAV21, TRAJ52)
CAVRPSPAGGTSYGKLTC

SEQ ID NO: 517444 - protein, 13 aa, Homo sapiens
  CDR3 for beta chain variable domain of TCR clone 258722 (TRBV29-1, TRBJ2-1)
CSVEGGRVNEQFF

SEQ ID NO: 517445 - protein, 13 aa, Homo sapiens
  CDR3 for alpha chain variable domain of TCR clone 258723 (TRAV12-2, TRAJ52)
CAVGGTSYGKLTF

SEQ ID NO: 517446 - protein, 13 aa, Homo sapiens
  CDR3 for beta chain variable domain of TCR clone 258723 (TRBV7-2, TRBJ2-2)
CASSLAVTGELFF

SEQ ID NO: 517447 - protein, 14 aa, Homo sapiens
  CDR3 for alpha chain variable domain of TCR clone 258724 (TRAV26-1, TRAJ8)
CIVRVDTGFQKLVF

SEQ ID NO: 517448 - protein, 15 aa, Homo sapiens
  CDR3 for beta chain variable domain of TCR clone 258724 (TRBV25-1, TRBJ1-4)
CASSPGDSTNEKLFF

SEQ ID NO: 517449 - protein, 16 aa, Homo sapiens
  CDR3 for alpha chain variable domain of TCR clone 258725 (TRAV3, TRAJ37)
CAVRPHGPGNTGKLIF

SEQ ID NO: 517450 - protein, 11 aa, Homo sapiens
  CDR3 for beta chain variable domain of TCR clone 258725 (TRBV10-3, TRBJ2-7)
CAISEGHEQYF

SEQ ID NO: 517451 - protein, 15 aa, Homo sapiens
  CDR3 for alpha chain variable domain of TCR clone 258726 (TRAV26-1, TRAJ48)
CIARWSWFGNEKLTF

SEQ ID NO: 517452 - protein, 12 aa, Homo sapiens
  CDR3 for beta chain variable domain of TCR clone 258726 (TRBV19, TRBJ2-5)
CASSISEVTQYF

SEQ ID NO: 517453 - protein, 16 aa, Homo sapiens
  CDR3 for alpha chain variable domain of TCR clone 258727 (TRAV12-1, TRAJ43)
CVVNPHRFGAGTRLTV

SEQ ID NO: 517454 - protein, 13 aa, Homo sapiens
  CDR3 for beta chain variable domain of TCR clone 258727 (TRBV12-4, TRBJ1-2)
CASSPEPNYGYTF

SEQ ID NO: 517455 - protein, 15 aa, Homo sapiens
  CDR3 for alpha chain variable domain of TCR clone 258728 (TRAV38-1, TRAJ37)
CAFIHGSGNTGKLIF

SEQ ID NO: 517456 - protein, 12 aa, Homo sapiens
  CDR3 for beta chain variable domain of TCR clone 258728 (TRBV7-9, TRBJ2-7)
CASSVGRYEQYF

SEQ ID NO: 517457 - protein, 14 aa, Homo sapiens
  CDR3 for alpha chain variable domain of TCR clone 258729 (TRAV1-2, TRAJ16)
CAVNRFSDGQKLLF

SEQ ID NO: 517458 - protein, 16 aa, Homo sapiens
  CDR3 for beta chain variable domain of TCR clone 258729 (TRBV18, TRBJ1-4)
CASSLQTVATNDKLFF

SEQ ID NO: 517459 - protein, 16 aa, Homo sapiens
  CDR3 for alpha chain variable domain of TCR clone 258730 (TRAV4, TRAJ22)
CLVGDLYSGSARQLTF

SEQ ID NO: 517460 - protein, 16 aa, Homo sapiens
  CDR3 for beta chain variable domain of TCR clone 258730 (TRBV7-9, TRBJ2-1)
CASSDVAGGSSKEQFF

SEQ ID NO: 517461 - protein, 13 aa, Homo sapiens
  CDR3 for alpha chain variable domain of TCR clone 258731 (TRAV27, TRAJ45)
CRSSGGGADGLTF

SEQ ID NO: 517462 - protein, 13 aa, Homo sapiens
  CDR3 for beta chain variable domain of TCR clone 258731 (TRBV7-9, TRBJ2-3)
CASSAAGSDTQYF

SEQ ID NO: 517463 - protein, 11 aa, Homo sapiens
  CDR3 for alpha chain variable domain of TCR clone 258732 (TRAV3, TRAJ21)
CAVGNFNNFYF

SEQ ID NO: 517464 - protein, 14 aa, Homo sapiens
  CDR3 for beta chain variable domain of TCR clone 258732 (TRBV25-1, TRBJ1-1)
CASTHLGGNTEAFF

SEQ ID NO: 517465 - protein, 15 aa, Homo sapiens
  CDR3 for alpha chain variable domain of TCR clone 258733 (TRAV12-3, TRAJ6)
CAMSATTGGSYIPTF

SEQ ID NO: 517466 - protein, 13 aa, Homo sapiens
  CDR3 for beta chain variable domain of TCR clone 258733 (TRBV7-9, TRBJ1-2)
CASSLKQNYGYTC

SEQ ID NO: 517467 - protein, 11 aa, Homo sapiens
  CDR3 for alpha chain variable domain of TCR clone 258734 (TRAV12-1, TRAJ21)
CVVNNFNKFYF

SEQ ID NO: 517468 - protein, 11 aa, Homo sapiens
  CDR3 for beta chain variable domain of TCR clone 258734 (TRBV10-3, TRBJ2-7)
CAISEGLKQYF

SEQ ID NO: 517469 - protein, 10 aa, Homo sapiens
  CDR3 for alpha chain variable domain of TCR clone 258735 (TRAV36/DV7, TRAJ49)
CALTGNQFYF

SEQ ID NO: 517470 - protein, 14 aa, Homo sapiens
  CDR3 for beta chain variable domain of TCR clone 258735 (TRBV19, TRBJ2-1)
CASPTFVLSGEQFF

SEQ ID NO: 517471 - protein, 14 aa, Homo sapiens
  CDR3 for alpha chain variable domain of TCR clone 258736 (TRAV38-1, TRAJ40)
CALRPTSGTYKYIF

SEQ ID NO: 517472 - protein, 16 aa, Homo sapiens
  CDR3 for beta chain variable domain of TCR clone 258736 (TRBV7-9, TRBJ1-3)
CASSLGAGSSGNTIYF

SEQ ID NO: 517473 - protein, 11 aa, Homo sapiens
  CDR3 for alpha chain variable domain of TCR clone 258737 (TRAV3, TRAJ21)
CAVGNFNKFYF

SEQ ID NO: 517474 - protein, 15 aa, Homo sapiens
  CDR3 for beta chain variable domain of TCR clone 258737 (TRBV11-2, TRBJ2-7)
CASSLAGGVATEQYF

SEQ ID NO: 517475 - protein, 16 aa, Homo sapiens
  CDR3 for alpha chain variable domain of TCR clone 258738 (TRAV16, TRAJ52)
CALSGVGGTSYGKLTF

SEQ ID NO: 517476 - protein, 13 aa, Homo sapiens
  CDR3 for beta chain variable domain of TCR clone 258738 (TRBV7-3, TRBJ1-1)
CASSQDWGAEAFF

SEQ ID NO: 517477 - protein, 13 aa, Homo sapiens
  CDR3 for alpha chain variable domain of TCR clone 258739 (TRAV1-2, TRAJ9)
CAALNTGGFKTIF

SEQ ID NO: 517478 - protein, 14 aa, Homo sapiens
  CDR3 for beta chain variable domain of TCR clone 258739 (TRBV7-3, TRBJ2-1)
CASSLTGGANEQFF

SEQ ID NO: 517479 - protein, 16 aa, Homo sapiens
  CDR3 for alpha chain variable domain of TCR clone 258740 (TRAV3, TRAJ37)
CAVRGKGSGNTGKLIF

SEQ ID NO: 517480 - protein, 21 aa, Homo sapiens
  CDR3 for beta chain variable domain of TCR clone 258740 (TRBV15, TRBJ2-1)
AWGTQPCTCVPPGEVDTARFF

SEQ ID NO: 517481 - protein, 15 aa, Homo sapiens
  CDR3 for alpha chain variable domain of TCR clone 258741 (TRAV25, TRAJ52)
CAGRPGGTSYGKLTF

SEQ ID NO: 517482 - protein, 15 aa, Homo sapiens
  CDR3 for beta chain variable domain of TCR clone 258741 (TRBV20-1, TRBJ2-7)
CSARDRFSGMDEQYF

SEQ ID NO: 517483 - protein, 11 aa, Homo sapiens
  CDR3 for alpha chain variable domain of TCR clone 258742 (TRAV1-2, TRAJ20)
CAVSNDYTLSF

SEQ ID NO: 517484 - protein, 16 aa, Homo sapiens
  CDR3 for beta chain variable domain of TCR clone 258742 (TRBV29-1, TRBJ2-6)
CSVEDITYSGANVLTF

SEQ ID NO: 517485 - protein, 13 aa, Homo sapiens
  CDR3 for alpha chain variable domain of TCR clone 258743 (TRAV29/DV5, TRAJ31)
CAASRTNNARLMF

SEQ ID NO: 517486 - protein, 12 aa, Homo sapiens
  CDR3 for beta chain variable domain of TCR clone 258743 (TRBV14, TRBJ2-5)
CVSSQLKETQYF

SEQ ID NO: 517487 - protein, 16 aa, Homo sapiens
  CDR3 for alpha chain variable domain of TCR clone 258744 (TRAV20, TRAJ53)
CSVQGNSGGSNYKLTF

SEQ ID NO: 517488 - protein, 14 aa, Homo sapiens
  CDR3 for beta chain variable domain of TCR clone 258744 (TRBV6-5, TRBJ2-7)
CASSPHRGLREQYF

SEQ ID NO: 517489 - protein, 18 aa, Homo sapiens
  CDR3 for alpha chain variable domain of TCR clone 258745 (TRAV13-1, TRAJ52)
CAAKNPNAGGTSYGKLAF

SEQ ID NO: 517490 - protein, 15 aa, Homo sapiens
  CDR3 for beta chain variable domain of TCR clone 258745 (TRBV27, TRBJ2-1)
CASSNGGGSSNEQFF

SEQ ID NO: 517491 - protein, 13 aa, Homo sapiens
  CDR3 for alpha chain variable domain of TCR clone 258746 (TRAV1-2, TRAJ9)
CAVLNTGGSNTIF

SEQ ID NO: 517492 - protein, 15 aa, Homo sapiens
  CDR3 for beta chain variable domain of TCR clone 258746 (TRBV7-3, TRBJ2-1)
CASSPTGGGEVEQFF

SEQ ID NO: 517493 - protein, 14 aa, Homo sapiens
  CDR3 for alpha chain variable domain of TCR clone 258747 (TRAV8-3, TRAJ4)
CAVGAAGGYNKLIF

SEQ ID NO: 517494 - protein, 14 aa, Homo sapiens
  CDR3 for beta chain variable domain of TCR clone 258747 (TRBV7-8, TRBJ2-3)
CASSFKSSTDTQYF

SEQ ID NO: 517495 - protein, 14 aa, Homo sapiens
  CDR3 for alpha chain variable domain of TCR clone 258748 (TRAV29/DV5, TRAJ20)
CAASAPIEDYKLSF

SEQ ID NO: 517496 - protein, 15 aa, Homo sapiens
  CDR3 for beta chain variable domain of TCR clone 258748 (TRBV28, TRBJ2-1)
CASSIIAGGRSEQFF

SEQ ID NO: 517497 - protein, 13 aa, Homo sapiens
  CDR3 for alpha chain variable domain of TCR clone 258749 (TRAV1-2, TRAJ9)
CATLNTGGFKTIF

SEQ ID NO: 517498 - protein, 12 aa, Homo sapiens
  CDR3 for beta chain variable domain of TCR clone 258749 (TRBV11-3, TRBJ1-1)
CASSHRQGEAFF

SEQ ID NO: 517499 - protein, 15 aa, Homo sapiens
  CDR3 for alpha chain variable domain of TCR clone 258750 (TRAV21, TRAJ13)
CAVRPTSGGYPKVTF

SEQ ID NO: 517500 - protein, 18 aa, Homo sapiens
  CDR3 for beta chain variable domain of TCR clone 258750 (TRBV11-3, TRBJ2-1)
CASSSYPGGRDSYNEQFF

SEQ ID NO: 517501 - protein, 17 aa, Homo sapiens
  CDR3 for alpha chain variable domain of TCR clone 258751 (TRAV3, TRAJ6)
CAVRDGPRAGGSSIPTF

SEQ ID NO: 517502 - protein, 13 aa, Homo sapiens
  CDR3 for beta chain variable domain of TCR clone 258751 (TRBV29-1, TRBJ1-1)
CSVGDSRNTEAFF

SEQ ID NO: 517503 - protein, 14 aa, Homo sapiens
  CDR3 for alpha chain variable domain of TCR clone 258752 (TRAV1-2, TRAJ16)
CAINRFSDGQKLLF

SEQ ID NO: 517504 - protein, 15 aa, Homo sapiens
  CDR3 for beta chain variable domain of TCR clone 258752 (TRBV9, TRBJ1-6)
CASSVAGTGGSHLHF

SEQ ID NO: 517505 - protein, 15 aa, Homo sapiens
  CDR3 for alpha chain variable domain of TCR clone 258753 (TRAV3, TRAJ22)
CAVRDRGGSAMQLTF

SEQ ID NO: 517506 - protein, 13 aa, Homo sapiens
  CDR3 for beta chain variable domain of TCR clone 258753 (TRBV2, TRBJ1-5)
CATAGPGNQPQHF

SEQ ID NO: 517507 - protein, 14 aa, Homo sapiens
  CDR3 for alpha chain variable domain of TCR clone 258754 (TRAV12-2, TRAJ13)
CAVKKTGGYQKVTF

SEQ ID NO: 517508 - protein, 13 aa, Homo sapiens
  CDR3 for beta chain variable domain of TCR clone 258754 (TRBV20-1, TRBJ1-1)
CSARLRQGTEAFF

SEQ ID NO: 517509 - protein, 14 aa, Homo sapiens
  CDR3 for alpha chain variable domain of TCR clone 258755 (TRAV1-2, TRAJ8)
FAVREDTGFQKLVF

SEQ ID NO: 517510 - protein, 16 aa, Homo sapiens
  CDR3 for beta chain variable domain of TCR clone 258755 (TRBV7-6, TRBJ2-6)
CASSLPGLSGANVLTF

SEQ ID NO: 517511 - protein, 13 aa, Homo sapiens
  CDR3 for alpha chain variable domain of TCR clone 258756 (TRAV21, TRAJ20)
CAVGVFADYKLSF

SEQ ID NO: 517512 - protein, 13 aa, Homo sapiens
  CDR3 for beta chain variable domain of TCR clone 258756 (TRBV20-1, TRBJ1-5)
CSASQQVVQPQHF

SEQ ID NO: 517513 - protein, 12 aa, Homo sapiens
  CDR3 for alpha chain variable domain of TCR clone 258757 (TRAV13-2, TRAJ8)
CAPLLGFQKLVF

SEQ ID NO: 517514 - protein, 15 aa, Homo sapiens
  CDR3 for beta chain variable domain of TCR clone 258757 (TRBV29-1, TRBJ2-1)
CSGRDRKSSYNEQFF

SEQ ID NO: 517515 - protein, 14 aa, Homo sapiens
  CDR3 for alpha chain variable domain of TCR clone 258758 (TRAV17, TRAJ22)
CATVLSGSARQLTF

SEQ ID NO: 517516 - protein, 14 aa, Homo sapiens
  CDR3 for beta chain variable domain of TCR clone 258758 (TRBV12-4, TRBJ2-5)
CARSFGDRGETQYF

SEQ ID NO: 517517 - protein, 14 aa, Homo sapiens
  CDR3 for alpha chain variable domain of TCR clone 258759 (TRAV12-2, TRAJ13)
CAVAGSGGYQKVNF

SEQ ID NO: 517518 - protein, 14 aa, Homo sapiens
  CDR3 for beta chain variable domain of TCR clone 258759 (TRBV6-5, TRBJ2-7)
CASSYGVGEAEQYF

SEQ ID NO: 517519 - protein, 14 aa, Homo sapiens
  CDR3 for alpha chain variable domain of TCR clone 258760 (TRAV26-1, TRAJ38)
CIADNAGNNRKLIW

SEQ ID NO: 517520 - protein, 17 aa, Homo sapiens
  CDR3 for beta chain variable domain of TCR clone 258760 (TRBV7-9, TRBJ2-3)
SASSPTVAGDLTDTQYF

SEQ ID NO: 517521 - protein, 17 aa, Homo sapiens
  CDR3 for alpha chain variable domain of TCR clone 258761 (TRAV35, TRAJ38)
CAGQLQRNAGNNRKLIG

SEQ ID NO: 517522 - protein, 15 aa, Homo sapiens
  CDR3 for beta chain variable domain of TCR clone 258761 (TRBV7-9, TRBJ2-1)
CASSLGLAGGTEQFF

SEQ ID NO: 517523 - protein, 15 aa, Homo sapiens
  CDR3 for alpha chain variable domain of TCR clone 258762 (TRAV8-3, TRAJ23)
CAVGDRYNQGGKLIF

SEQ ID NO: 517524 - protein, 22 aa, Homo sapiens
  CDR3 for beta chain variable domain of TCR clone 258762 (TRBV29-1, TRBJ2-5)
TVSNMSPEDSSICLCSAGTQYF

SEQ ID NO: 517525 - protein, 11 aa, Homo sapiens
  CDR3 for alpha chain variable domain of TCR clone 258763 (TRAV26-1, TRAJ37)
CIVRVGRKLIF

SEQ ID NO: 517526 - protein, 15 aa, Homo sapiens
  CDR3 for beta chain variable domain of TCR clone 258763 (TRBV4-1, TRBJ2-7)
CASSQQGQGFDEQYF

SEQ ID NO: 517527 - protein, 16 aa, Homo sapiens
  CDR3 for alpha chain variable domain of TCR clone 258764 (TRAV1-1, TRAJ37)
CAVRDKALATQANWSL

SEQ ID NO: 517528 - protein, 14 aa, Homo sapiens
  CDR3 for beta chain variable domain of TCR clone 258764 (TRBV7-2, TRBJ2-7)
CASSPKTSFYEQYF

SEQ ID NO: 517529 - protein, 13 aa, Homo sapiens
  CDR3 for alpha chain variable domain of TCR clone 258765 (TRAV2, TRAJ40)
CAVVTSGTYKYIF

SEQ ID NO: 517530 - protein, 15 aa, Homo sapiens
  CDR3 for beta chain variable domain of TCR clone 258765 (TRBV28, TRBJ2-1)
CASSGLAEVDNEQVF

SEQ ID NO: 517531 - protein, 12 aa, Homo sapiens
  CDR3 for alpha chain variable domain of TCR clone 258766 (TRAV12-3, TRAJ3)
CTIDSSASKIIF

SEQ ID NO: 517532 - protein, 16 aa, Homo sapiens
  CDR3 for beta chain variable domain of TCR clone 258766 (TRBV7-3, TRBJ2-2)
CASSLKRGTLSGELFF

SEQ ID NO: 517533 - protein, 14 aa, Homo sapiens
  CDR3 for alpha chain variable domain of TCR clone 258767 (TRAV23/DV6, TRAJ49)
CAASKSFVGNQFYF

SEQ ID NO: 517534 - protein, 13 aa, Homo sapiens
  CDR3 for beta chain variable domain of TCR clone 258767 (TRBV10-3, TRBJ2-7)
CASKLAVNYEQYF

SEQ ID NO: 517535 - protein, 11 aa, Homo sapiens
  CDR3 for alpha chain variable domain of TCR clone 258768 (TRAV8-3, TRAJ52)
PGVYSYGKLTF

SEQ ID NO: 517536 - protein, 18 aa, Homo sapiens
  CDR3 for beta chain variable domain of TCR clone 258768 (TRBV11-2, TRBJ2-6)
CASSLNPFLGTGANVLTF

SEQ ID NO: 517537 - protein, 12 aa, Homo sapiens
  CDR3 for alpha chain variable domain of TCR clone 258769 (TRAV13-1, TRAJ27)
CAAHTNAGKSTF

SEQ ID NO: 517538 - protein, 13 aa, Homo sapiens
  CDR3 for beta chain variable domain of TCR clone 258769 (TRBV10-3, TRBJ2-7)
CASKLAVNYEQYF

SEQ ID NO: 517539 - protein, 14 aa, Homo sapiens
  CDR3 for alpha chain variable domain of TCR clone 258770 (TRAV3, TRAJ26)
CAVGDYNYGQNVVF

SEQ ID NO: 517540 - protein, 15 aa, Homo sapiens
  CDR3 for beta chain variable domain of TCR clone 258770 (TRBV20-1, TRBJ2-5)
CSANPPGRGGETPYF

SEQ ID NO: 517541 - protein, 15 aa, Homo sapiens
  CDR3 for alpha chain variable domain of TCR clone 258771 (TRAV8-3, TRAJ11)
CAVGLLNLGYSTLTF

SEQ ID NO: 517542 - protein, 16 aa, Homo sapiens
  CDR3 for beta chain variable domain of TCR clone 258771 (TRBV7-9, TRBJ1-2)
CASSLGFSSGEDGYSF

SEQ ID NO: 517543 - protein, 12 aa, Homo sapiens
  CDR3 for alpha chain variable domain of TCR clone 258772 (TRAV6, TRAJ34)
CALHRGTDKLIF

SEQ ID NO: 517544 - protein, 16 aa, Homo sapiens
  CDR3 for beta chain variable domain of TCR clone 258772 (TRBV12-5, TRBJ2-5)
CASGPRTSGNQETQYF

SEQ ID NO: 517545 - protein, 13 aa, Homo sapiens
  CDR3 for alpha chain variable domain of TCR clone 258773 (TRAV12-3, TRAJ9)
CAMSADGGFKTIF

SEQ ID NO: 517546 - protein, 13 aa, Homo sapiens
  CDR3 for beta chain variable domain of TCR clone 258773 (TRBV7-2, TRBJ2-7)
CASSSPSGSEQYF

SEQ ID NO: 517547 - protein, 14 aa, Homo sapiens
  CDR3 for alpha chain variable domain of TCR clone 258774 (TRAV36/DV7, TRAJ40)
CAVEKTSGTYKYIF

SEQ ID NO: 517548 - protein, 13 aa, Homo sapiens
  CDR3 for beta chain variable domain of TCR clone 258774 (TRBV10-3, TRBJ2-5)
CAMTSGAGETQYF

SEQ ID NO: 517549 - protein, 11 aa, Homo sapiens
  CDR3 for alpha chain variable domain of TCR clone 258775 (TRAV1-2, TRAJ20)
CAVSNDYRLSF

SEQ ID NO: 517550 - protein, 13 aa, Homo sapiens
  CDR3 for beta chain variable domain of TCR clone 258775 (TRBV7-9, TRBJ1-2)
CASSLKQNYGYTF

SEQ ID NO: 517551 - protein, 17 aa, Homo sapiens
  CDR3 for alpha chain variable domain of TCR clone 258776 (TRAV3, TRAJ12)
CAVTDGGRMDSSYKLIF

SEQ ID NO: 517552 - protein, 13 aa, Homo sapiens
  CDR3 for beta chain variable domain of TCR clone 258776 (TRBV12-4, TRBJ1-2)
CASSLRQGKGYTF

SEQ ID NO: 517553 - protein, 17 aa, Homo sapiens
  CDR3 for alpha chain variable domain of TCR clone 258777 (TRAV13-1, TRAJ52)
CAASSGAGGTSCGKLTF

SEQ ID NO: 517554 - protein, 15 aa, Homo sapiens
  CDR3 for beta chain variable domain of TCR clone 258777 (TRBV2, TRBJ2-1)
CASSELAGSYNEQFF

SEQ ID NO: 517555 - protein, 12 aa, Homo sapiens
  CDR3 for alpha chain variable domain of TCR clone 258778 (TRAV13-2, TRAJ42)
CAEGGSQGNLIF

SEQ ID NO: 517556 - protein, 14 aa, Homo sapiens
  CDR3 for beta chain variable domain of TCR clone 258778 (TRBV6-1, TRBJ1-3)
CASVQGGGGNTIYF

SEQ ID NO: 517557 - protein, 11 aa, Homo sapiens
  CDR3 for alpha chain variable domain of TCR clone 258779 (TRAV2, TRAJ13)
CASVGYQKVTF

SEQ ID NO: 517558 - protein, 13 aa, Homo sapiens
  CDR3 for beta chain variable domain of TCR clone 258779 (TRBV20-1, TRBJ1-1)
CSAPLGGGTEAFF

SEQ ID NO: 517559 - protein, 13 aa, Homo sapiens
  CDR3 for alpha chain variable domain of TCR clone 258780 (TRAV23/DV6, TRAJ21)
CAASIGNFNKFYF

SEQ ID NO: 517560 - protein, 16 aa, Homo sapiens
  CDR3 for beta chain variable domain of TCR clone 258780 (TRBV12-5, TRBJ2-5)
CASGPRTSGNQETQYF

SEQ ID NO: 517561 - protein, 14 aa, Homo sapiens
  CDR3 for alpha chain variable domain of TCR clone 258781 (TRAV1-2, TRAJ8)
CAVREDTGFQKFVF

SEQ ID NO: 517562 - protein, 15 aa, Homo sapiens
  CDR3 for beta chain variable domain of TCR clone 258781 (TRBV25-1, TRBJ1-4)
CASSKRIATNEKLFF

SEQ ID NO: 517563 - protein, 13 aa, Homo sapiens
  CDR3 for alpha chain variable domain of TCR clone 258782 (TRAV25, TRAJ40)
CAGSASGTYKYSF

SEQ ID NO: 517564 - protein, 14 aa, Homo sapiens
  CDR3 for beta chain variable domain of TCR clone 258782 (TRBV7-2, TRBJ2-7)
CASRSQGAAYEQYF

SEQ ID NO: 517565 - protein, 19 aa, Homo sapiens
  CDR3 for alpha chain variable domain of TCR clone 258783 (TRAV25, TRAJ20)
TATQTTDVGILRHDYKLSF

SEQ ID NO: 517566 - protein, 17 aa, Homo sapiens
  CDR3 for beta chain variable domain of TCR clone 258783 (TRBV4-3, TRBJ2-1)
CASSQFSSGRASGEQFF

SEQ ID NO: 517567 - protein, 14 aa, Homo sapiens
  CDR3 for alpha chain variable domain of TCR clone 258784 (TRAV13-1, TRAJ35)
CAASKGGFGNVLHC

SEQ ID NO: 517568 - protein, 15 aa, Homo sapiens
  CDR3 for beta chain variable domain of TCR clone 258784 (TRBV28, TRBJ2-1)
CASSGLAEVDNEQSF

SEQ ID NO: 517569 - protein, 19 aa, Homo sapiens
  CDR3 for alpha chain variable domain of TCR clone 258785 (TRAV3, TRAJ37)
CAVRDIVGGYPSNTGKLIF

SEQ ID NO: 517570 - protein, 14 aa, Homo sapiens
  CDR3 for beta chain variable domain of TCR clone 258785 (TRBV7-8, TRBJ2-3)
CARSLEAGTDTQYF

SEQ ID NO: 517571 - protein, 16 aa, Homo sapiens
  CDR3 for alpha chain variable domain of TCR clone 258786 (TRAV30, TRAJ24)
CGTEIVDADSWGKFQF

SEQ ID NO: 517572 - protein, 16 aa, Homo sapiens
  CDR3 for beta chain variable domain of TCR clone 258786 (TRBV5-6, TRBJ2-7)
PAANEGGGRGSYEQYF

SEQ ID NO: 517573 - protein, 16 aa, Homo sapiens
  CDR3 for alpha chain variable domain of TCR clone 258787 (TRAV2, TRAJ13)
CCGDFMNSGGYQKVTF

SEQ ID NO: 517574 - protein, 17 aa, Homo sapiens
  CDR3 for beta chain variable domain of TCR clone 258787 (TRBV24-1, TRBJ2-1)
CATSDVSTNGTYNEQFF

SEQ ID NO: 517575 - protein, 11 aa, Homo sapiens
  CDR3 for alpha chain variable domain of TCR clone 258788 (TRAV16, TRAJ33)
CALHSNYQLIW

SEQ ID NO: 517576 - protein, 15 aa, Homo sapiens
  CDR3 for beta chain variable domain of TCR clone 258788 (TRBV4-1, TRBJ2-7)
WASSQQGQGFDEQYF

SEQ ID NO: 517577 - protein, 14 aa, Homo sapiens
  CDR3 for alpha chain variable domain of TCR clone 258789 (TRAV21, TRAJ35)
CAVMPIGFGNVLHC

SEQ ID NO: 517578 - protein, 16 aa, Homo sapiens
  CDR3 for beta chain variable domain of TCR clone 258789 (TRBV5-1, TRBJ2-2)
CASSSYREGDTGELFF

SEQ ID NO: 517579 - protein, 17 aa, Homo sapiens
  CDR3 for alpha chain variable domain of TCR clone 258790 (TRAV29/DV5, TRAJ52)
CAASARAGGTSYGKMTF

SEQ ID NO: 517580 - protein, 15 aa, Homo sapiens
  CDR3 for beta chain variable domain of TCR clone 258790 (TRBV4-2, TRBJ1-1)
CASSQRSSGRTEAFF

SEQ ID NO: 517581 - protein, 12 aa, Homo sapiens
  CDR3 for alpha chain variable domain of TCR clone 258791 (TRAV12-2, TRAJ43)
CAVNVNNNDKRF

SEQ ID NO: 517582 - protein, 13 aa, Homo sapiens
  CDR3 for beta chain variable domain of TCR clone 258791 (TRBV25-1, TRBJ2-2)
CASSELGLPGELF

SEQ ID NO: 517583 - protein, 13 aa, Homo sapiens
  CDR3 for alpha chain variable domain of TCR clone 258792 (TRAV17, TRAJ9)
CATDYTGGFKTNF

SEQ ID NO: 517584 - protein, 16 aa, Homo sapiens
  CDR3 for beta chain variable domain of TCR clone 258792 (TRBV7-7, TRBJ2-1)
CASSLASGTFYNEQFF

SEQ ID NO: 517585 - protein, 13 aa, Homo sapiens
  CDR3 for alpha chain variable domain of TCR clone 258793 (TRAV38-1, TRAJ42)
CARWGGSQGNLIF

SEQ ID NO: 517586 - protein, 15 aa, Homo sapiens
  CDR3 for beta chain variable domain of TCR clone 258793 (TRBV27, TRBJ2-1)
CASSNGGGSSNEQFF

SEQ ID NO: 517587 - protein, 14 aa, Homo sapiens
  CDR3 for alpha chain variable domain of TCR clone 258794 (TRAV38-1, TRAJ40)
CALRPTSGTYKYIF

SEQ ID NO: 517588 - protein, 14 aa, Homo sapiens
  CDR3 for beta chain variable domain of TCR clone 258794 (TRBV25-1, TRBJ1-1)
SASTHLGGNTEAFF

SEQ ID NO: 517589 - protein, 17 aa, Homo sapiens
  CDR3 for alpha chain variable domain of TCR clone 258795 (TRAV26-1, TRAJ53)
CIVRVDDSGGSNYKLTF

SEQ ID NO: 517590 - protein, 13 aa, Homo sapiens
  CDR3 for beta chain variable domain of TCR clone 258795 (TRBV7-7, TRBJ2-3)
CASSLSRADTQYF

SEQ ID NO: 517591 - protein, 19 aa, Homo sapiens
  CDR3 for alpha chain variable domain of TCR clone 258796 (TRAV26-1, TRAJ38)
CIADNAGNNHIQNPDPTVY

SEQ ID NO: 517592 - protein, 13 aa, Homo sapiens
  CDR3 for beta chain variable domain of TCR clone 258796 (TRBV20-1, TRBJ1-1)
CSARGGGNTEAFF

SEQ ID NO: 517593 - protein, 17 aa, Homo sapiens
  CDR3 for alpha chain variable domain of TCR clone 258797 (TRAV3, TRAJ6)
CAVRDGPRAGGSYIPTF

SEQ ID NO: 517594 - protein, 16 aa, Homo sapiens
  CDR3 for beta chain variable domain of TCR clone 258797 (TRBV4-1, TRBJ1-5)
CASSQGGHTTNQPQHF

SEQ ID NO: 517595 - protein, 18 aa, Homo sapiens
  CDR3 for alpha chain variable domain of TCR clone 258798 (TRAV2, TRAJ32)
CCLLLCFHYGGATNTLIF

SEQ ID NO: 517596 - protein, 16 aa, Homo sapiens
  CDR3 for beta chain variable domain of TCR clone 258798 (TRBV7-9, TRBJ2-7)
CASSYPDREGGYEQYF

SEQ ID NO: 517597 - protein, 13 aa, Homo sapiens
  CDR3 for alpha chain variable domain of TCR clone 258799 (TRAV21, TRAJ44)
CAAHTGTASKLTF

SEQ ID NO: 517598 - protein, 16 aa, Homo sapiens
  CDR3 for beta chain variable domain of TCR clone 258799 (TRBV4-1, TRBJ2-3)
CASSQSTSGAEDTQYF

SEQ ID NO: 517599 - protein, 14 aa, Homo sapiens
  CDR3 for alpha chain variable domain of TCR clone 258800 (TRAV12-2, TRAJ44)
CAVNPVGTASKLTF

SEQ ID NO: 517600 - protein, 13 aa, Homo sapiens
  CDR3 for beta chain variable domain of TCR clone 258800 (TRBV29-1, TRBJ2-5)
CSDTEQGAETQYF

SEQ ID NO: 517601 - protein, 13 aa, Homo sapiens
  CDR3 for alpha chain variable domain of TCR clone 258801 (TRAV13-2, TRAJ13)
CAERPGGYQKVNF

SEQ ID NO: 517602 - protein, 18 aa, Homo sapiens
  CDR3 for beta chain variable domain of TCR clone 258801 (TRBV7-6, TRBJ2-1)
CASSPRTSGMSSYNEQFF

SEQ ID NO: 517603 - protein, 16 aa, Homo sapiens
  CDR3 for alpha chain variable domain of TCR clone 258802 (TRAV3, TRAJ42)
CAVRDIEGGSQGNLIF

SEQ ID NO: 517604 - protein, 15 aa, Homo sapiens
  CDR3 for beta chain variable domain of TCR clone 258802 (TRBV19, TRBJ1-1)
CASTSGQIQNTEAFF

SEQ ID NO: 517605 - protein, 14 aa, Homo sapiens
  CDR3 for alpha chain variable domain of TCR clone 258803 (TRAV23/DV6, TRAJ17)
CAARGRAAGNKLTF

SEQ ID NO: 517606 - protein, 13 aa, Homo sapiens
  CDR3 for beta chain variable domain of TCR clone 258803 (TRBV14, TRBJ2-7)
CASSQDRRYEQYF

SEQ ID NO: 517607 - protein, 14 aa, Homo sapiens
  CDR3 for alpha chain variable domain of TCR clone 258804 (TRAV17, TRAJ22)
CATSPSGSARQLTF

SEQ ID NO: 517608 - protein, 13 aa, Homo sapiens
  CDR3 for beta chain variable domain of TCR clone 258804 (TRBV5-5, TRBJ1-2)
CASSFWRGEDYTF

SEQ ID NO: 517609 - protein, 16 aa, Homo sapiens
  CDR3 for alpha chain variable domain of TCR clone 258805 (TRAV3, TRAJ10)
CAVRDIRAGGGNKLTF

SEQ ID NO: 517610 - protein, 15 aa, Homo sapiens
  CDR3 for beta chain variable domain of TCR clone 258805 (TRBV11-3, TRBJ2-7)
CASSPGPASSYEQYF

SEQ ID NO: 517611 - protein, 14 aa, Homo sapiens
  CDR3 for alpha chain variable domain of TCR clone 258806 (TRAV12-2, TRAJ13)
CAVKKTGGYQKVTF

SEQ ID NO: 517612 - protein, 13 aa, Homo sapiens
  CDR3 for beta chain variable domain of TCR clone 258806 (TRBV10-3, TRBJ1-4)
CAIRGGTDEKLFF

SEQ ID NO: 517613 - protein, 23 aa, Homo sapiens
  CDR3 for alpha chain variable domain of TCR clone 258807 (TRAV26-1, )
CIADHAGNNHIQNPDPAVYQLRD

SEQ ID NO: 517614 - protein, 13 aa, Homo sapiens
  CDR3 for beta chain variable domain of TCR clone 258807 (TRBV20-1, TRBJ1-1)
CSARGGGNTEAFF

SEQ ID NO: 517615 - protein, 14 aa, Homo sapiens
  CDR3 for alpha chain variable domain of TCR clone 258808 (TRAV29/DV5, TRAJ36)
CAARRKTGANNLFF

SEQ ID NO: 517616 - protein, 18 aa, Homo sapiens
  CDR3 for beta chain variable domain of TCR clone 258808 (TRBV7-3, TRBJ2-5)
CASSFRGGGDPVRRARNA

SEQ ID NO: 517617 - protein, 14 aa, Homo sapiens
  CDR3 for alpha chain variable domain of TCR clone 258809 (TRAV26-1, TRAJ38)
CIADNAGNNRKMIW

SEQ ID NO: 517618 - protein, 17 aa, Homo sapiens
  CDR3 for beta chain variable domain of TCR clone 258809 (TRBV7-9, TRBJ2-3)
CASSPTVAGDLTDTQYF

SEQ ID NO: 517619 - protein, 14 aa, Homo sapiens
  CDR3 for alpha chain variable domain of TCR clone 258810 (TRAV12-3, TRAJ10)
SHLPLTGGGNKLTF

SEQ ID NO: 517620 - protein, 13 aa, Homo sapiens
  CDR3 for beta chain variable domain of TCR clone 258810 (TRBV5-5, TRBJ2-7)
CASSSKTRQRQYF

SEQ ID NO: 517621 - protein, 14 aa, Homo sapiens
  CDR3 for alpha chain variable domain of TCR clone 258811 (TRAV1-2, TRAJ16)
CAVNRFSDGQKLLF

SEQ ID NO: 517622 - protein, 11 aa, Homo sapiens
  CDR3 for beta chain variable domain of TCR clone 258811 (TRBV5-5, TRBJ2-7)
CASSLAYEQYF

SEQ ID NO: 517623 - protein, 14 aa, Homo sapiens
  CDR3 for alpha chain variable domain of TCR clone 258812 (TRAV13-1, TRAJ40)
CAASMPSGTYKYIF

SEQ ID NO: 517624 - protein, 15 aa, Homo sapiens
  CDR3 for beta chain variable domain of TCR clone 258812 (TRBV7-3, TRBJ2-1)
CASSPTGGGEVEQFF

SEQ ID NO: 517625 - protein, 11 aa, Homo sapiens
  CDR3 for alpha chain variable domain of TCR clone 258813 (TRAV17, TRAJ43)
CATDVTGDMRF

SEQ ID NO: 517626 - protein, 15 aa, Homo sapiens
  CDR3 for beta chain variable domain of TCR clone 258813 (TRBV7-3, TRBJ2-1)
CASSLAGAGADEQFF

SEQ ID NO: 517627 - protein, 13 aa, Homo sapiens
  CDR3 for alpha chain variable domain of TCR clone 258814 (TRAV6, TRAJ20)
CALAVSNDYKLSF

SEQ ID NO: 517628 - protein, 14 aa, Homo sapiens
  CDR3 for beta chain variable domain of TCR clone 258814 (TRBV5-1, TRBJ1-1)
CASSSGTLKLSLDK

SEQ ID NO: 517629 - protein, 13 aa, Homo sapiens
  CDR3 for alpha chain variable domain of TCR clone 258815 (TRAV21, TRAJ20)
CAVGLRVDYKLSF

SEQ ID NO: 517630 - protein, 13 aa, Homo sapiens
  CDR3 for beta chain variable domain of TCR clone 258815 (TRBV28, TRBJ2-5)
CASSSRNQETQYF

SEQ ID NO: 517631 - protein, 14 aa, Homo sapiens
  CDR3 for alpha chain variable domain of TCR clone 258816 (TRAV36/DV7, TRAJ40)
CAVEGASGTYKYIF

SEQ ID NO: 517632 - protein, 15 aa, Homo sapiens
  CDR3 for beta chain variable domain of TCR clone 258816 (TRBV6-3, TRBJ2-7)
CASSSPGTVFYEQYF

SEQ ID NO: 517633 - protein, 15 aa, Homo sapiens
  CDR3 for alpha chain variable domain of TCR clone 258817 (TRAV35, TRAJ42)
CAGQLRGGSQGNLIF

SEQ ID NO: 517634 - protein, 12 aa, Homo sapiens
  CDR3 for beta chain variable domain of TCR clone 258817 (TRBV2, TRBJ2-1)
CAKREGYNEQFF

SEQ ID NO: 517635 - protein, 12 aa, Homo sapiens
  CDR3 for alpha chain variable domain of TCR clone 258818 (TRAV12-1, TRAJ40)
CGVYSGTYKYIF

SEQ ID NO: 517636 - protein, 15 aa, Homo sapiens
  CDR3 for beta chain variable domain of TCR clone 258818 (TRBV7-9, TRBJ1-6)
CASSSPGRGNSPLHF

SEQ ID NO: 517637 - protein, 14 aa, Homo sapiens
  CDR3 for alpha chain variable domain of TCR clone 258819 (TRAV4, TRAJ13)
CLVGYSGGYQKVTF

SEQ ID NO: 517638 - protein, 13 aa, Homo sapiens
  CDR3 for beta chain variable domain of TCR clone 258819 (TRBV19, TRBJ1-2)
CASSVPGQDGYTF

SEQ ID NO: 517639 - protein, 12 aa, Homo sapiens
  CDR3 for alpha chain variable domain of TCR clone 258820 (TRAV13-1, TRAJ15)
CAASQAGTALIF

SEQ ID NO: 517640 - protein, 16 aa, Homo sapiens
  CDR3 for beta chain variable domain of TCR clone 258820 (TRBV5-8, TRBJ2-2)
CASSLINPGGAGELFF

SEQ ID NO: 517641 - protein, 20 aa, Homo sapiens
  CDR3 for alpha chain variable domain of TCR clone 258821 (TRAV4, TRAJ29)
CCVLLPRGCVPFSGNTPLVF

SEQ ID NO: 517642 - protein, 16 aa, Homo sapiens
  CDR3 for beta chain variable domain of TCR clone 258821 (TRBV25-1, TRBJ2-7)
GSSDARVVFSSYEQYF

SEQ ID NO: 517643 - protein, 12 aa, Homo sapiens
  CDR3 for alpha chain variable domain of TCR clone 258822 (TRAV26-1, TRAJ35)
CIGLSFGNVLHC

SEQ ID NO: 517644 - protein, 13 aa, Homo sapiens
  CDR3 for beta chain variable domain of TCR clone 258822 (TRBV7-7, TRBJ2-3)
CASSLSRADTQYF

SEQ ID NO: 517645 - protein, 14 aa, Homo sapiens
  CDR3 for alpha chain variable domain of TCR clone 258823 (TRAV12-2, TRAJ44)
CAVNPAGTASKLTF

SEQ ID NO: 517646 - protein, 15 aa, Homo sapiens
  CDR3 for beta chain variable domain of TCR clone 258823 (TRBV20-1, TRBJ1-6)
CSDPWGLDHPSTLGM

SEQ ID NO: 517647 - protein, 13 aa, Homo sapiens
  CDR3 for alpha chain variable domain of TCR clone 258824 (TRAV12-3, TRAJ7)
CAMSASGNNRLAF

SEQ ID NO: 517648 - protein, 16 aa, Homo sapiens
  CDR3 for beta chain variable domain of TCR clone 258824 (TRBV20-1, TRBJ1-4)
CSAPGQGLLTSEKLFF

SEQ ID NO: 517649 - protein, 13 aa, Homo sapiens
  CDR3 for alpha chain variable domain of TCR clone 258825 (TRAV8-1, TRAJ30)
CAVIMNRDDKIIF

SEQ ID NO: 517650 - protein, 13 aa, Homo sapiens
  CDR3 for beta chain variable domain of TCR clone 258825 (TRBV7-3, TRBJ1-1)
CASSQDWGAEAFF

SEQ ID NO: 517651 - protein, 13 aa, Homo sapiens
  CDR3 for alpha chain variable domain of TCR clone 258826 (TRAV16, TRAJ26)
CSSSANYGQNFVF

SEQ ID NO: 517652 - protein, 12 aa, Homo sapiens
  CDR3 for beta chain variable domain of TCR clone 258826 (TRBV6-5, TRBJ2-2)
CASRTGTGELFF

SEQ ID NO: 517653 - protein, 12 aa, Homo sapiens
  CDR3 for alpha chain variable domain of TCR clone 258827 (TRAV12-3, TRAJ17)
CAMTLTRNKLTF

SEQ ID NO: 517654 - protein, 12 aa, Homo sapiens
  CDR3 for beta chain variable domain of TCR clone 258827 (TRBV2, TRBJ2-1)
CAYGPPGNEQFF

SEQ ID NO: 517655 - protein, 12 aa, Homo sapiens
  CDR3 for alpha chain variable domain of TCR clone 258828 (TRAV21, TRAJ49)
CAVSWTGNQFYF

SEQ ID NO: 517656 - protein, 18 aa, Homo sapiens
  CDR3 for beta chain variable domain of TCR clone 258828 (TRBV7-8, TRBJ2-1)
CASSPAEGLAGGLNEQCF

SEQ ID NO: 517657 - protein, 15 aa, Homo sapiens
  CDR3 for alpha chain variable domain of TCR clone 258829 (TRAV21, TRAJ24)
CAARSSTGSWGKLQF

SEQ ID NO: 517658 - protein, 14 aa, Homo sapiens
  CDR3 for beta chain variable domain of TCR clone 258829 (TRBV7-2, TRBJ2-7)
CASRSQGAAYEQYF

SEQ ID NO: 517659 - protein, 12 aa, Homo sapiens
  CDR3 for alpha chain variable domain of TCR clone 258830 (TRAV27, TRAJ35)
CAGADFGNVLHC

SEQ ID NO: 517660 - protein, 15 aa, Homo sapiens
  CDR3 for beta chain variable domain of TCR clone 258830 (TRBV7-2, TRBJ1-2)
CASSLVAGGDYGYTF

SEQ ID NO: 517661 - protein, 14 aa, Homo sapiens
  CDR3 for alpha chain variable domain of TCR clone 258831 (TRAV12-3, TRAJ57)
CAMSAWGGSEKLVF

SEQ ID NO: 517662 - protein, 16 aa, Homo sapiens
  CDR3 for beta chain variable domain of TCR clone 258831 (TRBV6-1, TRBJ1-2)
CASSGAWQGRSHGYTF

SEQ ID NO: 517663 - protein, 14 aa, Homo sapiens
  CDR3 for alpha chain variable domain of TCR clone 258832 (TRAV35, TRAJ53)
CAGPGYGSNYKLTF

SEQ ID NO: 517664 - protein, 14 aa, Homo sapiens
  CDR3 for beta chain variable domain of TCR clone 258832 (TRBV7-3, TRBJ2-7)
CASSLHRGAYEQYF

SEQ ID NO: 517665 - protein, 13 aa, Homo sapiens
  CDR3 for alpha chain variable domain of TCR clone 258833 (TRAV39, TRAJ48)
CAAVNFGNEKLTF

SEQ ID NO: 517666 - protein, 12 aa, Homo sapiens
  CDR3 for beta chain variable domain of TCR clone 258833 (TRBV5-5, TRBJ2-5)
CASRYFGETQYF

SEQ ID NO: 517667 - protein, 11 aa, Homo sapiens
  CDR3 for alpha chain variable domain of TCR clone 258834 (TRAV13-1, TRAJ20)
CSPHGLYKLSF

SEQ ID NO: 517668 - protein, 13 aa, Homo sapiens
  CDR3 for beta chain variable domain of TCR clone 258834 (TRBV7-3, TRBJ2-1)
CASSLIDRGKQFF

SEQ ID NO: 517669 - protein, 14 aa, Homo sapiens
  CDR3 for alpha chain variable domain of TCR clone 258835 (TRAV35, TRAJ42)
CCVPYGGSQGNLIF

SEQ ID NO: 517670 - protein, 18 aa, Homo sapiens
  CDR3 for beta chain variable domain of TCR clone 258835 (TRBV13, TRBJ2-6)
CASSPRTSGRSGANVLTF

SEQ ID NO: 517671 - protein, 17 aa, Homo sapiens
  CDR3 for alpha chain variable domain of TCR clone 258836 (TRAV3, TRAJ6)
CAVRDGPRAGGSYIPTS

SEQ ID NO: 517672 - protein, 14 aa, Homo sapiens
  CDR3 for beta chain variable domain of TCR clone 258836 (TRBV7-3, TRBJ2-1)
CASSLTGGANEQFF

SEQ ID NO: 517673 - protein, 16 aa, Homo sapiens
  CDR3 for alpha chain variable domain of TCR clone 258837 (TRAV26-2, TRAJ45)
CTTASPIGGGADGLTF

SEQ ID NO: 517674 - protein, 20 aa, Homo sapiens
  CDR3 for beta chain variable domain of TCR clone 258837 (TRBV28, TRBJ2-1)
CASTPIGRSPGLAGGNAQFF

SEQ ID NO: 517675 - protein, 12 aa, Homo sapiens
  CDR3 for alpha chain variable domain of TCR clone 258838 (TRAV21, TRAJ29)
CAVTSGNTPLVF

SEQ ID NO: 517676 - protein, 15 aa, Homo sapiens
  CDR3 for beta chain variable domain of TCR clone 258838 (TRBV18, TRBJ2-1)
CASSPPGASYNEQFF

SEQ ID NO: 517677 - protein, 13 aa, Homo sapiens
  CDR3 for alpha chain variable domain of TCR clone 258839 (TRAV26-2, TRAJ57)
CILSRGGSEKLVF

SEQ ID NO: 517678 - protein, 15 aa, Homo sapiens
  CDR3 for beta chain variable domain of TCR clone 258839 (TRBV2, TRBJ2-1)
CASSEEREGDNEQFF

SEQ ID NO: 517679 - protein, 14 aa, Homo sapiens
  CDR3 for alpha chain variable domain of TCR clone 258840 (TRAV13-1, TRAJ40)
CAASMTSGTYKYIF

SEQ ID NO: 517680 - protein, 13 aa, Homo sapiens
  CDR3 for beta chain variable domain of TCR clone 258840 (TRBV7-2, TRBJ1-6)
CASSLVGSSPLHF

SEQ ID NO: 517681 - protein, 15 aa, Homo sapiens
  CDR3 for alpha chain variable domain of TCR clone 258841 (TRAV21, TRAJ53)
CATLHSGGSNYKLTF

SEQ ID NO: 517682 - protein, 15 aa, Homo sapiens
  CDR3 for beta chain variable domain of TCR clone 258841 (TRBV20-1, TRBJ2-7)
CSARDRVSGMDEQYF

SEQ ID NO: 517683 - protein, 13 aa, Homo sapiens
  CDR3 for alpha chain variable domain of TCR clone 258842 (TRAV8-1, TRAJ30)
CAVIMNRDDKIIF

SEQ ID NO: 517684 - protein, 12 aa, Homo sapiens
  CDR3 for beta chain variable domain of TCR clone 258842 (TRBV7-9, TRBJ1-1)
CASSLVRGEAFF

SEQ ID NO: 517685 - protein, 14 aa, Homo sapiens
  CDR3 for alpha chain variable domain of TCR clone 258843 (TRAV3, TRAJ42)
CCETLGGSQGNLIF

SEQ ID NO: 517686 - protein, 15 aa, Homo sapiens
  CDR3 for beta chain variable domain of TCR clone 258843 (TRBV10-2, TRBJ2-6)
CASSEQGTGANVLTF

SEQ ID NO: 517687 - protein, 15 aa, Homo sapiens
  CDR3 for alpha chain variable domain of TCR clone 258844 (TRAV17, TRAJ4)
CATGTWSGGYNKLIF

SEQ ID NO: 517688 - protein, 19 aa, Homo sapiens
  CDR3 for beta chain variable domain of TCR clone 258844 (TRBV5-1, TRBJ2-3)
CASSLWLAGGITTTDTQYF

SEQ ID NO: 517689 - protein, 16 aa, Homo sapiens
  CDR3 for alpha chain variable domain of TCR clone 258845 (TRAV4, TRAJ8)
CLVGDSGNTGFQKLVF

SEQ ID NO: 517690 - protein, 13 aa, Homo sapiens
  CDR3 for beta chain variable domain of TCR clone 258845 (TRBV7-9, TRBJ1-2)
CASSLKQNYGYTF

SEQ ID NO: 517691 - protein, 14 aa, Homo sapiens
  CDR3 for alpha chain variable domain of TCR clone 258846 (TRAV1-2, TRAJ16)
CAVNRFSDGQKLLF

SEQ ID NO: 517692 - protein, 15 aa, Homo sapiens
  CDR3 for beta chain variable domain of TCR clone 258846 (TRBV7-3, TRBJ2-2)
ELSLKRVTLSGGLFF

SEQ ID NO: 517693 - protein, 14 aa, Homo sapiens
  CDR3 for alpha chain variable domain of TCR clone 258847 (TRAV17, TRAJ48)
CATEGNFGNEKLTF

SEQ ID NO: 517694 - protein, 15 aa, Homo sapiens
  CDR3 for beta chain variable domain of TCR clone 258847 (TRBV7-9, TRBJ1-5)
CASSQGHQPNQPQHF

SEQ ID NO: 517695 - protein, 12 aa, Homo sapiens
  CDR3 for alpha chain variable domain of TCR clone 258848 (TRAV3, TRAJ26)
CAVRDYGQNFVF

SEQ ID NO: 517696 - protein, 23 aa, Homo sapiens
  CDR3 for beta chain variable domain of TCR clone 258848 (TRBV11-2, TRBJ1-2)
LRTRPCISVPAAPGREANYGYTF

SEQ ID NO: 517697 - protein, 14 aa, Homo sapiens
  CDR3 for alpha chain variable domain of TCR clone 258849 (TRAV12-2, TRAJ13)
CAVKKTGGYQNVTF

SEQ ID NO: 517698 - protein, 11 aa, Homo sapiens
  CDR3 for beta chain variable domain of TCR clone 258849 (TRBV11-2, TRBJ2-2)
CASSLPGELFF

SEQ ID NO: 517699 - protein, 11 aa, Homo sapiens
  CDR3 for alpha chain variable domain of TCR clone 258850 (TRAV2, TRAJ31)
CAAGPPARLMF

SEQ ID NO: 517700 - protein, 12 aa, Homo sapiens
  CDR3 for beta chain variable domain of TCR clone 258850 (TRBV7-8, TRBJ2-7)
CASSVGDREQYF

SEQ ID NO: 517701 - protein, 10 aa, Homo sapiens
  CDR3 for alpha chain variable domain of TCR clone 258851 (TRAV12-3, TRAJ49)
CAMNDDQFYF

SEQ ID NO: 517702 - protein, 16 aa, Homo sapiens
  CDR3 for beta chain variable domain of TCR clone 258851 (TRBV27, TRBJ2-2)
CASSFRGLVRTGDLFF

SEQ ID NO: 517703 - protein, 14 aa, Homo sapiens
  CDR3 for alpha chain variable domain of TCR clone 258852 (TRAV12-2, TRAJ13)
CAVKKTGGYQKVTF

SEQ ID NO: 517704 - protein, 11 aa, Homo sapiens
  CDR3 for beta chain variable domain of TCR clone 258852 (TRBV7-9, TRBJ1-6)
CASSSNSPLHF

SEQ ID NO: 517705 - protein, 13 aa, Homo sapiens
  CDR3 for alpha chain variable domain of TCR clone 258853 (TRAV1-2, TRAJ9)
CAALNTGGFKTIF

SEQ ID NO: 517706 - protein, 16 aa, Homo sapiens
  CDR3 for beta chain variable domain of TCR clone 258853 (TRBV4-1, TRBJ2-7)
CSSSQEWTSGPLEQYF

SEQ ID NO: 517707 - protein, 12 aa, Homo sapiens
  CDR3 for alpha chain variable domain of TCR clone 258854 (TRAV13-1, TRAJ15)
CAASQAGTALIF

SEQ ID NO: 517708 - protein, 18 aa, Homo sapiens
  CDR3 for beta chain variable domain of TCR clone 258854 (TRBV7-9, TRBJ2-3)
CASSLPINGQISTDTRYF

SEQ ID NO: 517709 - protein, 13 aa, Homo sapiens
  CDR3 for alpha chain variable domain of TCR clone 258855 (TRAV3, TRAJ43)
CAVKARYNNDMRF

SEQ ID NO: 517710 - protein, 16 aa, Homo sapiens
  CDR3 for beta chain variable domain of TCR clone 258855 (TRBV7-9, TRBJ2-3)
CASSFSVAGGTDTQYF

SEQ ID NO: 517711 - protein, 10 aa, Homo sapiens
  CDR3 for alpha chain variable domain of TCR clone 258856 (TRAV23/DV6, TRAJ57)
CAASSTLSQG

SEQ ID NO: 517712 - protein, 16 aa, Homo sapiens
  CDR3 for beta chain variable domain of TCR clone 258856 (TRBV7-7, TRBJ2-1)
CASSLASGTSYNEQFF

SEQ ID NO: 517713 - protein, 14 aa, Homo sapiens
  CDR3 for alpha chain variable domain of TCR clone 258857 (TRAV8-4, TRAJ54)
CAVSEVLGAQKLVF

SEQ ID NO: 517714 - protein, 13 aa, Homo sapiens
  CDR3 for beta chain variable domain of TCR clone 258857 (TRBV27, TRBJ2-7)
CASSFVCSYEQYF

SEQ ID NO: 517715 - protein, 15 aa, Homo sapiens
  CDR3 for alpha chain variable domain of TCR clone 258858 (TRAV8-3, TRAJ11)
CAVGLLNSGYSTLTF

SEQ ID NO: 517716 - protein, 19 aa, Homo sapiens
  CDR3 for beta chain variable domain of TCR clone 258858 (TRBV7-2, TRBJ2-3)
CASSPGLAGGGLTTDTQYF

SEQ ID NO: 517717 - protein, 17 aa, Homo sapiens
  CDR3 for alpha chain variable domain of TCR clone 258859 (TRAV3, TRAJ6)
CAVRDGPRAGGSYIPTF

SEQ ID NO: 517718 - protein, 14 aa, Homo sapiens
  CDR3 for beta chain variable domain of TCR clone 258859 (TRBV7-9, TRBJ2-1)
CASSLVVGADEQFF

SEQ ID NO: 517719 - protein, 16 aa, Homo sapiens
  CDR3 for alpha chain variable domain of TCR clone 258860 (TRAV30, TRAJ24)
CGTEIVDADSWGKFKF

SEQ ID NO: 517720 - protein, 13 aa, Homo sapiens
  CDR3 for beta chain variable domain of TCR clone 258860 (TRBV7-3, TRBJ1-1)
CASIQDWGAEAFF

SEQ ID NO: 517721 - protein, 10 aa, Homo sapiens
  CDR3 for alpha chain variable domain of TCR clone 258861 (TRAV8-4, TRAJ43)
CAVSLGDMRF

SEQ ID NO: 517722 - protein, 15 aa, Homo sapiens
  CDR3 for beta chain variable domain of TCR clone 258861 (TRBV19, TRBJ1-2)
CASSVGQVLNYGYSF

SEQ ID NO: 517723 - protein, 16 aa, Homo sapiens
  CDR3 for alpha chain variable domain of TCR clone 258862 (TRAV8-3, TRAJ13)
CAVGAYPSGGYQKVTF

SEQ ID NO: 517724 - protein, 15 aa, Homo sapiens
  CDR3 for beta chain variable domain of TCR clone 258862 (TRBV19, TRBJ1-5)
CASSIIWADNQPQHF

SEQ ID NO: 517725 - protein, 13 aa, Homo sapiens
  CDR3 for alpha chain variable domain of TCR clone 258863 (TRAV12-2, TRAJ22)
CAVQSGSARQLTF

SEQ ID NO: 517726 - protein, 15 aa, Homo sapiens
  CDR3 for beta chain variable domain of TCR clone 258863 (TRBV12-4, TRBJ2-5)
CASSPPTGLQETQYF

SEQ ID NO: 517727 - protein, 14 aa, Homo sapiens
  CDR3 for alpha chain variable domain of TCR clone 258864 (TRAV4, TRAJ26)
CLVGDQGYGQNFVF

SEQ ID NO: 517728 - protein, 16 aa, Homo sapiens
  CDR3 for beta chain variable domain of TCR clone 258864 (TRBV2, TRBJ2-1)
CASSVGGSLAYNEQFF

SEQ ID NO: 517729 - protein, 11 aa, Homo sapiens
  CDR3 for alpha chain variable domain of TCR clone 258865 (TRAV12-3, TRAJ41)
CAMNARAALNF

SEQ ID NO: 517730 - protein, 16 aa, Homo sapiens
  CDR3 for beta chain variable domain of TCR clone 258865 (TRBV7-8, TRBJ2-3)
CASSTEGQRETDTQYF

SEQ ID NO: 517731 - protein, 14 aa, Homo sapiens
  CDR3 for alpha chain variable domain of TCR clone 258866 (TRAV20, TRAJ42)
CAVQAGGSQGNVIF

SEQ ID NO: 517732 - protein, 14 aa, Homo sapiens
  CDR3 for beta chain variable domain of TCR clone 258866 (TRBV28, TRBJ1-2)
CASRIQGANYGYTF

SEQ ID NO: 517733 - protein, 16 aa, Homo sapiens
  CDR3 for alpha chain variable domain of TCR clone 258867 (TRAV16, TRAJ37)
CSKRPDGSSNTGKLIF

SEQ ID NO: 517734 - protein, 13 aa, Homo sapiens
  CDR3 for beta chain variable domain of TCR clone 258867 (TRBV7-2, TRBJ2-2)
CASSLAVTGELFF

SEQ ID NO: 517735 - protein, 14 aa, Homo sapiens
  CDR3 for alpha chain variable domain of TCR clone 258868 (TRAV3, TRAJ9)
CAVRLNTGGFKTIF

SEQ ID NO: 517736 - protein, 15 aa, Homo sapiens
  CDR3 for beta chain variable domain of TCR clone 258868 (TRBV19, TRBJ1-2)
CASSVGQVLNYGYTF

SEQ ID NO: 517737 - protein, 15 aa, Homo sapiens
  CDR3 for alpha chain variable domain of TCR clone 258869 (TRAV29/DV5, TRAJ29)
CAASERSSGNTPLGF

SEQ ID NO: 517738 - protein, 17 aa, Homo sapiens
  CDR3 for beta chain variable domain of TCR clone 258869 (TRBV4-1, TRBJ1-4)
CASSQEGPRGVEEKLFF

SEQ ID NO: 517739 - protein, 14 aa, Homo sapiens
  CDR3 for alpha chain variable domain of TCR clone 258870 (TRAV12-2, TRAJ11)
CAVEGGSGYSTLTF

SEQ ID NO: 517740 - protein, 16 aa, Homo sapiens
  CDR3 for beta chain variable domain of TCR clone 258870 (TRBV6-1, TRBJ1-2)
CASSGAWYGRSHGYTF

SEQ ID NO: 517741 - protein, 14 aa, Homo sapiens
  CDR3 for alpha chain variable domain of TCR clone 258871 (TRAV35, TRAJ22)
CAGLRPGSARQLTF

SEQ ID NO: 517742 - protein, 14 aa, Homo sapiens
  CDR3 for beta chain variable domain of TCR clone 258871 (TRBV7-2, TRBJ1-6)
CASSLQGANSPLHF

SEQ ID NO: 517743 - protein, 13 aa, Homo sapiens
  CDR3 for alpha chain variable domain of TCR clone 258872 (TRAV8-4, TRAJ48)
CAVSLFGNEKLTF

SEQ ID NO: 517744 - protein, 17 aa, Homo sapiens
  CDR3 for beta chain variable domain of TCR clone 258872 (TRBV20-1, TRBJ2-2)
CSASGSGQGGLTGELFF

SEQ ID NO: 517745 - protein, 12 aa, Homo sapiens
  CDR3 for alpha chain variable domain of TCR clone 258873 (TRAV13-1, TRAJ45)
CAATRGADGLTF

SEQ ID NO: 517746 - protein, 16 aa, Homo sapiens
  CDR3 for beta chain variable domain of TCR clone 258873 (TRBV19, TRBJ2-2)
CASRSPGTGATGELFF

SEQ ID NO: 517747 - protein, 14 aa, Homo sapiens
  CDR3 for alpha chain variable domain of TCR clone 258874 (TRAV12-2, TRAJ40)
CAVKIPSGTYKYIF

SEQ ID NO: 517748 - protein, 15 aa, Homo sapiens
  CDR3 for beta chain variable domain of TCR clone 258874 (TRBV20-1, TRBJ2-7)
CSAESGASGAYEQYF

SEQ ID NO: 517749 - protein, 11 aa, Homo sapiens
  CDR3 for alpha chain variable domain of TCR clone 258875 (TRAV27, TRAJ40)
SLTSGTYKYIF

SEQ ID NO: 517750 - protein, 12 aa, Homo sapiens
  CDR3 for beta chain variable domain of TCR clone 258875 (TRBV18, TRBJ2-3)
CQLYQNTDTQYF

SEQ ID NO: 517751 - protein, 12 aa, Homo sapiens
  CDR3 for alpha chain variable domain of TCR clone 258876 (TRAV13-1, TRAJ21)
CAAKEGFNKFYF

SEQ ID NO: 517752 - protein, 11 aa, Homo sapiens
  CDR3 for beta chain variable domain of TCR clone 258876 (TRBV19, TRBJ1-2)
CASSISSGYTF

SEQ ID NO: 517753 - protein, 14 aa, Homo sapiens
  CDR3 for alpha chain variable domain of TCR clone 258877 (TRAV3, TRAJ36)
CAVRDGTGAKNLFF

SEQ ID NO: 517754 - protein, 16 aa, Homo sapiens
  CDR3 for beta chain variable domain of TCR clone 258877 (TRBV20-1, TRBJ2-6)
CSAREGPGVGANVLTF

SEQ ID NO: 517755 - protein, 12 aa, Homo sapiens
  CDR3 for alpha chain variable domain of TCR clone 258878 (TRAV35, TRAJ12)
CAGMDSSYKLIF

SEQ ID NO: 517756 - protein, 14 aa, Homo sapiens
  CDR3 for beta chain variable domain of TCR clone 258878 (TRBV28, TRBJ2-5)
CASSLYRGRETQYF

SEQ ID NO: 517757 - protein, 11 aa, Homo sapiens
  CDR3 for alpha chain variable domain of TCR clone 258879 (TRAV17, TRAJ49)
CATNTGNQFYF

SEQ ID NO: 517758 - protein, 12 aa, Homo sapiens
  CDR3 for beta chain variable domain of TCR clone 258879 (TRBV2, TRBJ2-7)
CASSGGSGIPYL

SEQ ID NO: 517759 - protein, 14 aa, Homo sapiens
  CDR3 for alpha chain variable domain of TCR clone 258880 (TRAV8-3, TRAJ10)
CAVGNAGGGNKLTF

SEQ ID NO: 517760 - protein, 15 aa, Homo sapiens
  CDR3 for beta chain variable domain of TCR clone 258880 (TRBV13, TRBJ1-5)
CASSRTGRGHQPQHF

SEQ ID NO: 517761 - protein, 14 aa, Homo sapiens
  CDR3 for alpha chain variable domain of TCR clone 258881 (TRAV13-2, TRAJ17)
CAENCKAAGNKLTF

SEQ ID NO: 517762 - protein, 17 aa, Homo sapiens
  CDR3 for beta chain variable domain of TCR clone 258881 (TRBV28, TRBJ2-5)
CASSTPEGDALQETQYF

SEQ ID NO: 517763 - protein, 14 aa, Homo sapiens
  CDR3 for alpha chain variable domain of TCR clone 258882 (TRAV2, TRAJ41)
CAVGTSNSGYALNF

SEQ ID NO: 517764 - protein, 17 aa, Homo sapiens
  CDR3 for beta chain variable domain of TCR clone 258882 (TRBV13, TRBJ2-3)
CASSLSRVAGGRNTQYF

SEQ ID NO: 517765 - protein, 16 aa, Homo sapiens
  CDR3 for alpha chain variable domain of TCR clone 258883 (TRAV26-1, TRAJ23)
CIVRVHPYNQGGKLIF

SEQ ID NO: 517766 - protein, 14 aa, Homo sapiens
  CDR3 for beta chain variable domain of TCR clone 258883 (TRBV7-2, TRBJ1-1)
CANSFLTGTTEAFF

SEQ ID NO: 517767 - protein, 14 aa, Homo sapiens
  CDR3 for alpha chain variable domain of TCR clone 258884 (TRAV12-3, TRAJ10)
SHLPLTGGGSKLTF

SEQ ID NO: 517768 - protein, 13 aa, Homo sapiens
  CDR3 for beta chain variable domain of TCR clone 258884 (TRBV20-1, TRBJ2-2)
CSASAAGTGELFF

SEQ ID NO: 517769 - protein, 13 aa, Homo sapiens
  CDR3 for alpha chain variable domain of TCR clone 258885 (TRAV1-1, TRAJ9)
CAAKNTGGFKTIF

SEQ ID NO: 517770 - protein, 15 aa, Homo sapiens
  CDR3 for beta chain variable domain of TCR clone 258885 (TRBV20-1, TRBJ2-7)
CSARDRVSGMDKQYF

SEQ ID NO: 517771 - protein, 14 aa, Homo sapiens
  CDR3 for alpha chain variable domain of TCR clone 258886 (TRAV20, TRAJ10)
CAVRVEGGGNKLTF

SEQ ID NO: 517772 - protein, 15 aa, Homo sapiens
  CDR3 for beta chain variable domain of TCR clone 258886 (TRBV10-2, TRBJ2-6)
CASSEQGTGANVLTF

SEQ ID NO: 517773 - protein, 14 aa, Homo sapiens
  CDR3 for alpha chain variable domain of TCR clone 258887 (TRAV1-2, TRAJ8)
CAVREDTGFQKLSF

SEQ ID NO: 517774 - protein, 15 aa, Homo sapiens
  CDR3 for beta chain variable domain of TCR clone 258887 (TRBV6-3, TRBJ2-7)
CASSSPGTVFYEQYF

SEQ ID NO: 517775 - protein, 16 aa, Homo sapiens
  CDR3 for alpha chain variable domain of TCR clone 258888 (TRAV12-2, TRAJ10)
CAVNRVLTGGGNKLTF

SEQ ID NO: 517776 - protein, 13 aa, Homo sapiens
  CDR3 for beta chain variable domain of TCR clone 258888 (TRBV12-4, TRBJ1-1)
CASSPGTGFEAFF

SEQ ID NO: 517777 - protein, 16 aa, Homo sapiens
  CDR3 for alpha chain variable domain of TCR clone 258889 (TRAV26-1, TRAJ23)
CIVRPHGNNQGGKLIF

SEQ ID NO: 517778 - protein, 14 aa, Homo sapiens
  CDR3 for beta chain variable domain of TCR clone 258889 (TRBV7-7, TRBJ2-2)
CASSTRASGGELFF

SEQ ID NO: 517779 - protein, 12 aa, Homo sapiens
  CDR3 for alpha chain variable domain of TCR clone 258890 (TRAV12-3, TRAJ17)
CAMTLTGNKLTF

SEQ ID NO: 517780 - protein, 14 aa, Homo sapiens
  CDR3 for beta chain variable domain of TCR clone 258890 (TRBV4-1, TRBJ1-1)
CASSPRVDNTEAFF

SEQ ID NO: 517781 - protein, 15 aa, Homo sapiens
  CDR3 for alpha chain variable domain of TCR clone 258891 (TRAV3, TRAJ4)
CAVRDGTGGYNKLIF

SEQ ID NO: 517782 - protein, 16 aa, Homo sapiens
  CDR3 for beta chain variable domain of TCR clone 258891 (TRBV5-1, TRBJ2-3)
CASSLGLAVYTDTQYF

SEQ ID NO: 517783 - protein, 17 aa, Homo sapiens
  CDR3 for alpha chain variable domain of TCR clone 258892 (TRAV13-1, TRAJ10)
CAASIWRGTGGGNKLPF

SEQ ID NO: 517784 - protein, 13 aa, Homo sapiens
  CDR3 for beta chain variable domain of TCR clone 258892 (TRBV20-1, TRBJ1-1)
CSARGGGNTEAFF

SEQ ID NO: 517785 - protein, 15 aa, Homo sapiens
  CDR3 for alpha chain variable domain of TCR clone 258893 (TRAV14/DV4, TRAJ39)
CAMRAVNNAGHMLTF

SEQ ID NO: 517786 - protein, 15 aa, Homo sapiens
  CDR3 for beta chain variable domain of TCR clone 258893 (TRBV9, TRBJ2-3)
CASSLEGGLTDTQYF

SEQ ID NO: 517787 - protein, 14 aa, Homo sapiens
  CDR3 for alpha chain variable domain of TCR clone 258894 (TRAV1-2, TRAJ8)
CAVREDTGFQQLVF

SEQ ID NO: 517788 - protein, 16 aa, Homo sapiens
  CDR3 for beta chain variable domain of TCR clone 258894 (TRBV29-1, TRBJ2-6)
CSVEDITYSGANVLTF

SEQ ID NO: 517789 - protein, 21 aa, Homo sapiens
  CDR3 for alpha chain variable domain of TCR clone 258895 (TRAV12-1, TRAJ32)
SSVIQPPTSMNYGGATNKLIF

SEQ ID NO: 517790 - protein, 18 aa, Homo sapiens
  CDR3 for beta chain variable domain of TCR clone 258895 (TRBV20-1, TRBJ2-3)
CSASGLAGGQGTTDTQYF

SEQ ID NO: 517791 - protein, 16 aa, Homo sapiens
  CDR3 for alpha chain variable domain of TCR clone 258896 (TRAV8-3, TRAJ13)
CAVGAYPSGGYQKVTF

SEQ ID NO: 517792 - protein, 14 aa, Homo sapiens
  CDR3 for beta chain variable domain of TCR clone 258896 (TRBV7-9, TRBJ2-2)
CASSLVQDTGELFF

SEQ ID NO: 517793 - protein, 13 aa, Homo sapiens
  CDR3 for alpha chain variable domain of TCR clone 258897 (TRAV30, TRAJ34)
CGTVGYNTDKPIF

SEQ ID NO: 517794 - protein, 16 aa, Homo sapiens
  CDR3 for beta chain variable domain of TCR clone 258897 (TRBV7-9, TRBJ1-2)
CASSLGFSAGEDGYTF

SEQ ID NO: 517795 - protein, 13 aa, Homo sapiens
  CDR3 for alpha chain variable domain of TCR clone 258898 (TRAV21, TRAJ27)
CAARPGNAGKSTF

SEQ ID NO: 517796 - protein, 16 aa, Homo sapiens
  CDR3 for beta chain variable domain of TCR clone 258898 (TRBV11-2, TRBJ2-7)
CASSLAPTGVNYEQYF

SEQ ID NO: 517797 - protein, 13 aa, Homo sapiens
  CDR3 for alpha chain variable domain of TCR clone 258899 (TRAV2, TRAJ40)
CAVVTSGTYKYIF

SEQ ID NO: 517798 - protein, 14 aa, Homo sapiens
  CDR3 for beta chain variable domain of TCR clone 258899 (TRBV7-3, TRBJ1-5)
RASSFSGCNQPQHF

SEQ ID NO: 517799 - protein, 11 aa, Homo sapiens
  CDR3 for alpha chain variable domain of TCR clone 258900 (TRAV1-2, TRAJ31)
CAVNNNARLMF

SEQ ID NO: 517800 - protein, 12 aa, Homo sapiens
  CDR3 for beta chain variable domain of TCR clone 258900 (TRBV7-8, TRBJ2-7)
CASSLGDREQYF

SEQ ID NO: 517801 - protein, 16 aa, Homo sapiens
  CDR3 for alpha chain variable domain of TCR clone 258901 (TRAV16, TRAJ4)
CALSRMFSGGCNKLIF

SEQ ID NO: 517802 - protein, 16 aa, Homo sapiens
  CDR3 for beta chain variable domain of TCR clone 258901 (TRBV24-1, TRBJ2-3)
CATSDPGTGATETQYF

SEQ ID NO: 517803 - protein, 14 aa, Homo sapiens
  CDR3 for alpha chain variable domain of TCR clone 258902 (TRAV2, TRAJ9)
CAVEDRSGGFKTVF

SEQ ID NO: 517804 - protein, 14 aa, Homo sapiens
  CDR3 for beta chain variable domain of TCR clone 258902 (TRBV18, TRBJ1-5)
CASSRQQRNQPQHF

SEQ ID NO: 517805 - protein, 14 aa, Homo sapiens
  CDR3 for alpha chain variable domain of TCR clone 258903 (TRAV8-3, TRAJ39)
CAVGANNAGNMLTF

SEQ ID NO: 517806 - protein, 15 aa, Homo sapiens
  CDR3 for beta chain variable domain of TCR clone 258903 (TRBV4-3, TRBJ1-1)
CASRQELGRETEAFF

SEQ ID NO: 517807 - protein, 13 aa, Homo sapiens
  CDR3 for alpha chain variable domain of TCR clone 258904 (TRAV8-3, TRAJ20)
CAVGRPNDSKLSF

SEQ ID NO: 517808 - protein, 14 aa, Homo sapiens
  CDR3 for beta chain variable domain of TCR clone 258904 (TRBV12-5, TRBJ2-5)
CASGSRTHQETQYF

SEQ ID NO: 517809 - protein, 12 aa, Homo sapiens
  CDR3 for alpha chain variable domain of TCR clone 258905 (TRAV8-3, TRAJ20)
CAVGATDYKLSC

SEQ ID NO: 517810 - protein, 16 aa, Homo sapiens
  CDR3 for beta chain variable domain of TCR clone 258905 (TRBV19, TRBJ2-2)
CASRSPGTGATGELFF

SEQ ID NO: 517811 - protein, 19 aa, Homo sapiens
  CDR3 for alpha chain variable domain of TCR clone 258906 (TRAV2, TRAJ20)
ILQVREADAAVYRDCKLSF

SEQ ID NO: 517812 - protein, 13 aa, Homo sapiens
  CDR3 for beta chain variable domain of TCR clone 258906 (TRBV15, TRBJ1-6)
CATAGGLNSPLHF

SEQ ID NO: 517813 - protein, 14 aa, Homo sapiens
  CDR3 for alpha chain variable domain of TCR clone 258907 (TRAV21, TRAJ21)
CAVGVEYNFNKFYF

SEQ ID NO: 517814 - protein, 17 aa, Homo sapiens
  CDR3 for beta chain variable domain of TCR clone 258907 (TRBV20-1, TRBJ2-2)
CSASGSGQGGLTGELFF

SEQ ID NO: 517815 - protein, 13 aa, Homo sapiens
  CDR3 for alpha chain variable domain of TCR clone 258908 (TRAV26-1, TRAJ30)
CIVGVESNDKIIF

SEQ ID NO: 517816 - protein, 16 aa, Homo sapiens
  CDR3 for beta chain variable domain of TCR clone 258908 (TRBV12-4, TRBJ1-5)
CASRQPVEGSNQPQHF

SEQ ID NO: 517817 - protein, 14 aa, Homo sapiens
  CDR3 for alpha chain variable domain of TCR clone 258909 (TRAV1-2, TRAJ16)
CAVNRFSDGQKLLF

SEQ ID NO: 517818 - protein, 17 aa, Homo sapiens
  CDR3 for beta chain variable domain of TCR clone 258909 (TRBV28, TRBJ2-5)
CASSFGGECGGQETQYF

SEQ ID NO: 517819 - protein, 15 aa, Homo sapiens
  CDR3 for alpha chain variable domain of TCR clone 258910 (TRAV4, TRAJ39)
CLVGPNNNAGNMLTF

SEQ ID NO: 517820 - protein, 13 aa, Homo sapiens
  CDR3 for beta chain variable domain of TCR clone 258910 (TRBV12-5, TRBJ2-3)
CASQNRGTDTQYF

SEQ ID NO: 517821 - protein, 11 aa, Homo sapiens
  CDR3 for alpha chain variable domain of TCR clone 258911 (TRAV13-1, TRAJ39)
CASHAGNMFTF

SEQ ID NO: 517822 - protein, 14 aa, Homo sapiens
  CDR3 for beta chain variable domain of TCR clone 258911 (TRBV11-2, TRBJ1-5)
CASSLDRGRQPQHF

SEQ ID NO: 517823 - protein, 16 aa, Homo sapiens
  CDR3 for alpha chain variable domain of TCR clone 258912 (TRAV3, TRAJ5)
CAVRNLMDTDRRALTF

SEQ ID NO: 517824 - protein, 14 aa, Homo sapiens
  CDR3 for beta chain variable domain of TCR clone 258912 (TRBV7-3, TRBJ2-1)
CASSLAGGTNEQFF

SEQ ID NO: 517825 - protein, 15 aa, Homo sapiens
  CDR3 for alpha chain variable domain of TCR clone 258913 (TRAV12-1, TRAJ48)
CVVNKVNFGNEKLTF

SEQ ID NO: 517826 - protein, 13 aa, Homo sapiens
  CDR3 for beta chain variable domain of TCR clone 258913 (TRBV7-9, TRBJ1-2)
CASSLKQNYGYTF

SEQ ID NO: 517827 - protein, 14 aa, Homo sapiens
  CDR3 for alpha chain variable domain of TCR clone 258914 (TRAV3, TRAJ30)
CAVRDIGRDDKIIF

SEQ ID NO: 517828 - protein, 15 aa, Homo sapiens
  CDR3 for beta chain variable domain of TCR clone 258914 (TRBV10-3, TRBJ1-1)
CASSEAWTGGTEAFF

SEQ ID NO: 517829 - protein, 13 aa, Homo sapiens
  CDR3 for alpha chain variable domain of TCR clone 258915 (TRAV3, TRAJ21)
CAVREPDFNKFYF

SEQ ID NO: 517830 - protein, 13 aa, Homo sapiens
  CDR3 for beta chain variable domain of TCR clone 258915 (TRBV28, TRBJ2-7)
CASKAGGVYEQYF

SEQ ID NO: 517831 - protein, 14 aa, Homo sapiens
  CDR3 for alpha chain variable domain of TCR clone 258916 (TRAV16, TRAJ54)
CALSLIQGAQKLVF

SEQ ID NO: 517832 - protein, 14 aa, Homo sapiens
  CDR3 for beta chain variable domain of TCR clone 258916 (TRBV11-2, TRBJ2-3)
CASSRLARTDTQYF

SEQ ID NO: 517833 - protein, 22 aa, Homo sapiens
  CDR3 for alpha chain variable domain of TCR clone 258917 (TRAV1-1, TRAJ30)
CAVRDQTEMTRSSLEKGHDFIF

SEQ ID NO: 517834 - protein, 16 aa, Homo sapiens
  CDR3 for beta chain variable domain of TCR clone 258917 (TRBV7-3, TRBJ2-2)
CASSLKRGTLSGELFF

SEQ ID NO: 517835 - protein, 17 aa, Homo sapiens
  CDR3 for alpha chain variable domain of TCR clone 258918 (TRAV23/DV6, TRAJ3)
CINHFCFGWSSASKIIF

SEQ ID NO: 517836 - protein, 15 aa, Homo sapiens
  CDR3 for beta chain variable domain of TCR clone 258918 (TRBV19, TRBJ1-6)
CASSTQGAVGSPLHF

SEQ ID NO: 517837 - protein, 17 aa, Homo sapiens
  CDR3 for alpha chain variable domain of TCR clone 258919 (TRAV23/DV6, TRAJ57)
CAASSTLSQGGSEKLVF

SEQ ID NO: 517838 - protein, 12 aa, Homo sapiens
  CDR3 for beta chain variable domain of TCR clone 258919 (TRBV11-2, TRBJ2-1)
CASSPGNNEQFF

SEQ ID NO: 517839 - protein, 14 aa, Homo sapiens
  CDR3 for alpha chain variable domain of TCR clone 258920 (TRAV1-2, TRAJ16)
CAVNRFSDGQKLLF

SEQ ID NO: 517840 - protein, 13 aa, Homo sapiens
  CDR3 for beta chain variable domain of TCR clone 258920 (TRBV29-1, TRBJ1-1)
CSVGDSRNPEAFF

SEQ ID NO: 517841 - protein, 17 aa, Homo sapiens
  CDR3 for alpha chain variable domain of TCR clone 258921 (TRAV3, TRAJ6)
CAVRDGPRAGGSYIPTF

SEQ ID NO: 517842 - protein, 14 aa, Homo sapiens
  CDR3 for beta chain variable domain of TCR clone 258921 (TRBV6-1, TRBJ1-3)
CASGQGRGGNTIYF

SEQ ID NO: 517843 - protein, 12 aa, Homo sapiens
  CDR3 for alpha chain variable domain of TCR clone 258922 (TRAV2, TRAJ31)
CAVEDNNARLMF

SEQ ID NO: 517844 - protein, 16 aa, Homo sapiens
  CDR3 for beta chain variable domain of TCR clone 258922 (TRBV10-3, TRBJ2-1)
CTISGVGDGGGGEQFF

SEQ ID NO: 517845 - protein, 18 aa, Homo sapiens
  CDR3 for alpha chain variable domain of TCR clone 258923 (TRAV29/DV5, TRAJ52)
CAAGFRGAGGTTYGRLTF

SEQ ID NO: 517846 - protein, 16 aa, Homo sapiens
  CDR3 for beta chain variable domain of TCR clone 258923 (TRBV7-3, TRBJ2-2)
CASSLKRGTLSGELFF

SEQ ID NO: 517847 - protein, 14 aa, Homo sapiens
  CDR3 for alpha chain variable domain of TCR clone 258924 (TRAV1-2, TRAJ8)
CAVREDTRFQKLVF

SEQ ID NO: 517848 - protein, 11 aa, Homo sapiens
  CDR3 for beta chain variable domain of TCR clone 258924 (TRBV29-1, TRBJ2-5)
CSEDRTGTQYF

SEQ ID NO: 517849 - protein, 15 aa, Homo sapiens
  CDR3 for alpha chain variable domain of TCR clone 258925 (TRAV12-3, TRAJ13)
CSMSARSGGYQKVTF

SEQ ID NO: 517850 - protein, 18 aa, Homo sapiens
  CDR3 for beta chain variable domain of TCR clone 258925 (TRBV3-1, TRBJ2-7)
CASSQEGGGRSWHYEQYF

SEQ ID NO: 517851 - protein, 17 aa, Homo sapiens
  CDR3 for alpha chain variable domain of TCR clone 258926 (TRAV8-6, TRAJ58)
CAVSSWVGETSGSRLTF

SEQ ID NO: 517852 - protein, 13 aa, Homo sapiens
  CDR3 for beta chain variable domain of TCR clone 258926 (TRBV9, TRBJ2-5)
CASSPAGLGTQYF

SEQ ID NO: 517853 - protein, 10 aa, Homo sapiens
  CDR3 for alpha chain variable domain of TCR clone 258927 (TRAV13-2, TRAJ49)
CADTGNQFYF

SEQ ID NO: 517854 - protein, 14 aa, Homo sapiens
  CDR3 for beta chain variable domain of TCR clone 258927 (TRBV12-5, TRBJ2-5)
CASGSRTHQETQYF

SEQ ID NO: 517855 - protein, 18 aa, Homo sapiens
  CDR3 for alpha chain variable domain of TCR clone 258928 (TRAV35, TRAJ52)
CAGLLRYPGGTSYGKLTF

SEQ ID NO: 517856 - protein, 15 aa, Homo sapiens
  CDR3 for beta chain variable domain of TCR clone 258928 (TRBV7-9, TRBJ1-6)
CASSSPGRGNSPLHF

SEQ ID NO: 517857 - protein, 15 aa, Homo sapiens
  CDR3 for alpha chain variable domain of TCR clone 258929 (TRAV21, TRAJ53)
CATLNSGGSNYKLTF

SEQ ID NO: 517858 - protein, 14 aa, Homo sapiens
  CDR3 for beta chain variable domain of TCR clone 258929 (TRBV27, TRBJ2-2)
CAGRPGVSTGELFF

SEQ ID NO: 517859 - protein, 14 aa, Homo sapiens
  CDR3 for alpha chain variable domain of TCR clone 258930 (TRAV1-2, TRAJ16)
CAVNRFSDGQKLLF

SEQ ID NO: 517860 - protein, 13 aa, Homo sapiens
  CDR3 for beta chain variable domain of TCR clone 258930 (TRBV7-9, TRBJ2-1)
CASSSEGFEEQFF

SEQ ID NO: 517861 - protein, 14 aa, Homo sapiens
  CDR3 for alpha chain variable domain of TCR clone 258931 (TRAV1-2, TRAJ8)
CAVREDTGFQKLVF

SEQ ID NO: 517862 - protein, 20 aa, Homo sapiens
  CDR3 for beta chain variable domain of TCR clone 258931 (TRBV7-8, TRBJ2-2)
CASSHLFPGPTIHITGEMFF

SEQ ID NO: 517863 - protein, 13 aa, Homo sapiens
  CDR3 for alpha chain variable domain of TCR clone 258932 (TRAV12-1, TRAJ7)
CVVNMRGNNRLAF

SEQ ID NO: 517864 - protein, 14 aa, Homo sapiens
  CDR3 for beta chain variable domain of TCR clone 258932 (TRBV4-2, TRBJ2-5)
CASSQDRGRETQYF

SEQ ID NO: 517865 - protein, 16 aa, Homo sapiens
  CDR3 for alpha chain variable domain of TCR clone 258933 (TRAV12-3, TRAJ53)
CAMIPGSGGSNYKLTF

SEQ ID NO: 517866 - protein, 13 aa, Homo sapiens
  CDR3 for beta chain variable domain of TCR clone 258933 (TRBV28, TRBJ2-4)
CASSQSSKNIQYF

SEQ ID NO: 517867 - protein, 15 aa, Homo sapiens
  CDR3 for alpha chain variable domain of TCR clone 258934 (TRAV8-4, TRAJ29)
CAVSEDFRGITPLVF

SEQ ID NO: 517868 - protein, 12 aa, Homo sapiens
  CDR3 for beta chain variable domain of TCR clone 258934 (TRBV14, TRBJ2-7)
CASSSLKGEQYF

SEQ ID NO: 517869 - protein, 15 aa, Homo sapiens
  CDR3 for alpha chain variable domain of TCR clone 258935 (TRAV3, TRAJ22)
CAVRDRGGSARHMTF

SEQ ID NO: 517870 - protein, 14 aa, Homo sapiens
  CDR3 for beta chain variable domain of TCR clone 258935 (TRBV7-2, TRBJ2-5)
CASSFTQGQETQYF

SEQ ID NO: 517871 - protein, 15 aa, Homo sapiens
  CDR3 for alpha chain variable domain of TCR clone 258936 (TRAV4, TRAJ26)
CLVGDMNNYGQNFVF

SEQ ID NO: 517872 - protein, 16 aa, Homo sapiens
  CDR3 for beta chain variable domain of TCR clone 258936 (TRBV28, TRBJ1-4)
CASSSRTGAANEELFF

SEQ ID NO: 517873 - protein, 10 aa, Homo sapiens
  CDR3 for alpha chain variable domain of TCR clone 258937 (TRAV36/DV7, TRAJ56)
CAGPAVELTC

SEQ ID NO: 517874 - protein, 13 aa, Homo sapiens
  CDR3 for beta chain variable domain of TCR clone 258937 (TRBV7-9, TRBJ2-7)
CASSFWSSYEQYF

SEQ ID NO: 517875 - protein, 12 aa, Homo sapiens
  CDR3 for alpha chain variable domain of TCR clone 258938 (TRAV1-2, TRAJ29)
CAVPSGNTPLVF

SEQ ID NO: 517876 - protein, 15 aa, Homo sapiens
  CDR3 for beta chain variable domain of TCR clone 258938 (TRBV28, TRBJ2-5)
CASSQTSGSLETQYF

SEQ ID NO: 517877 - protein, 13 aa, Homo sapiens
  CDR3 for alpha chain variable domain of TCR clone 258939 (TRAV17, TRAJ9)
CATNYTGGFKPIF

SEQ ID NO: 517878 - protein, 14 aa, Homo sapiens
  CDR3 for beta chain variable domain of TCR clone 258939 (TRBV19, TRBJ2-5)
CASSMTGQQETQYF

SEQ ID NO: 517879 - protein, 11 aa, Homo sapiens
  CDR3 for alpha chain variable domain of TCR clone 258940 (TRAV21, TRAJ34)
CAVNNTDKLIF

SEQ ID NO: 517880 - protein, 12 aa, Homo sapiens
  CDR3 for beta chain variable domain of TCR clone 258940 (TRBV7-9, TRBJ1-1)
CASSLVRGEAFF

SEQ ID NO: 517881 - protein, 15 aa, Homo sapiens
  CDR3 for alpha chain variable domain of TCR clone 258941 (TRAV8-1, TRAJ8)
CAVNAMNTGFQKRVF

SEQ ID NO: 517882 - protein, 16 aa, Homo sapiens
  CDR3 for beta chain variable domain of TCR clone 258941 (TRBV7-3, TRBJ2-2)
CASSLKRGTLSGELFF

SEQ ID NO: 517883 - protein, 10 aa, Homo sapiens
  CDR3 for alpha chain variable domain of TCR clone 258942 (TRAV1-2, TRAJ31)
CAFFDARLMF

SEQ ID NO: 517884 - protein, 14 aa, Homo sapiens
  CDR3 for beta chain variable domain of TCR clone 258942 (TRBV12-4, TRBJ1-4)
CASSLGTGGEKLFF

SEQ ID NO: 517885 - protein, 16 aa, Homo sapiens
  CDR3 for alpha chain variable domain of TCR clone 258943 (TRAV3, TRAJ27)
CAVRDPEGTNAGKSTF

SEQ ID NO: 517886 - protein, 17 aa, Homo sapiens
  CDR3 for beta chain variable domain of TCR clone 258943 (TRBV4-1, TRBJ2-7)
CASSQGRGLQTSYEQYV

SEQ ID NO: 517887 - protein, 14 aa, Homo sapiens
  CDR3 for alpha chain variable domain of TCR clone 258944 (TRAV27, TRAJ40)
CADPTTAGTYKYIF

SEQ ID NO: 517888 - protein, 14 aa, Homo sapiens
  CDR3 for beta chain variable domain of TCR clone 258944 (TRBV19, TRBJ2-7)
CASSIFAGTYEQYF

SEQ ID NO: 517889 - protein, 11 aa, Homo sapiens
  CDR3 for alpha chain variable domain of TCR clone 258945 (TRAV21, TRAJ34)
CAVTNTDKLIF

SEQ ID NO: 517890 - protein, 15 aa, Homo sapiens
  CDR3 for beta chain variable domain of TCR clone 258945 (TRBV5-1, TRBJ2-7)
CASSLNGGPAREQYF

SEQ ID NO: 517891 - protein, 11 aa, Homo sapiens
  CDR3 for alpha chain variable domain of TCR clone 258946 (TRAV1-1, TRAJ22)
CLVGFCKATDL

SEQ ID NO: 517892 - protein, 14 aa, Homo sapiens
  CDR3 for beta chain variable domain of TCR clone 258946 (TRBV27, TRBJ2-7)
CASSLAGLSYEQYF

SEQ ID NO: 517893 - protein, 14 aa, Homo sapiens
  CDR3 for alpha chain variable domain of TCR clone 258947 (TRAV8-4, TRAJ9)
WAVRVNNGGFKTIF

SEQ ID NO: 517894 - protein, 15 aa, Homo sapiens
  CDR3 for beta chain variable domain of TCR clone 258947 (TRBV10-2, TRBJ2-6)
CASSEQGTGANVLTF

SEQ ID NO: 517895 - protein, 14 aa, Homo sapiens
  CDR3 for alpha chain variable domain of TCR clone 258948 (TRAV3, TRAJ21)
CAVRDAYNFNKFYF

SEQ ID NO: 517896 - protein, 16 aa, Homo sapiens
  CDR3 for beta chain variable domain of TCR clone 258948 (TRBV5-1, TRBJ1-1)
CASSSGGNSLNTEAFF

SEQ ID NO: 517897 - protein, 14 aa, Homo sapiens
  CDR3 for alpha chain variable domain of TCR clone 258949 (TRAV21, TRAJ28)
CGVGSGAGSYQVTF

SEQ ID NO: 517898 - protein, 14 aa, Homo sapiens
  CDR3 for beta chain variable domain of TCR clone 258949 (TRBV18, TRBJ1-4)
CASSPGPNGEKLFF

SEQ ID NO: 517899 - protein, 11 aa, Homo sapiens
  CDR3 for alpha chain variable domain of TCR clone 258950 (TRAV8-4, TRAJ12)
DRVDSSYKLIF

SEQ ID NO: 517900 - protein, 15 aa, Homo sapiens
  CDR3 for beta chain variable domain of TCR clone 258950 (TRBV11-3, TRBJ2-1)
CASSLAGQTYNEQFF

SEQ ID NO: 517901 - protein, 14 aa, Homo sapiens
  CDR3 for alpha chain variable domain of TCR clone 258951 (TRAV8-3, TRAJ4)
CAVGASGGSNKLIF

SEQ ID NO: 517902 - protein, 12 aa, Homo sapiens
  CDR3 for beta chain variable domain of TCR clone 258951 (TRBV18, TRBJ2-5)
CQLATGAETQYF

SEQ ID NO: 517903 - protein, 14 aa, Homo sapiens
  CDR3 for alpha chain variable domain of TCR clone 258952 (TRAV2, TRAJ37)
CAVDFTSNTGKLIF

SEQ ID NO: 517904 - protein, 15 aa, Homo sapiens
  CDR3 for beta chain variable domain of TCR clone 258952 (TRBV20-1, TRBJ1-1)
CSAPLGGALKLSLDK

SEQ ID NO: 517905 - protein, 15 aa, Homo sapiens
  CDR3 for alpha chain variable domain of TCR clone 258953 (TRAV8-3, TRAJ11)
CAVGLLNSGYSTLTF

SEQ ID NO: 517906 - protein, 16 aa, Homo sapiens
  CDR3 for beta chain variable domain of TCR clone 258953 (TRBV15, TRBJ1-2)
CATSRGPRTGDGGYTF

SEQ ID NO: 517907 - protein, 15 aa, Homo sapiens
  CDR3 for alpha chain variable domain of TCR clone 258954 (TRAV3, TRAJ32)
CAVSSYGGVTNKLIF

SEQ ID NO: 517908 - protein, 16 aa, Homo sapiens
  CDR3 for beta chain variable domain of TCR clone 258954 (TRBV5-1, TRBJ2-5)
CASSLSLAGAQETQYF

SEQ ID NO: 517909 - protein, 11 aa, Homo sapiens
  CDR3 for alpha chain variable domain of TCR clone 258955 (TRAV13-1, TRAJ26)
CAASQGQNFVF

SEQ ID NO: 517910 - protein, 15 aa, Homo sapiens
  CDR3 for beta chain variable domain of TCR clone 258955 (TRBV6-3, TRBJ2-7)
CASSSPGTVFYEQYF

SEQ ID NO: 517911 - protein, 14 aa, Homo sapiens
  CDR3 for alpha chain variable domain of TCR clone 258956 (TRAV12-2, TRAJ9)
CAVNALEGGFKTIF

SEQ ID NO: 517912 - protein, 16 aa, Homo sapiens
  CDR3 for beta chain variable domain of TCR clone 258956 (TRBV19, TRBJ1-6)
CASSVAPVAGSSPLHF

SEQ ID NO: 517913 - protein, 11 aa, Homo sapiens
  CDR3 for alpha chain variable domain of TCR clone 258957 (TRAV2, TRAJ13)
CASGGYQKVTF

SEQ ID NO: 517914 - protein, 15 aa, Homo sapiens
  CDR3 for beta chain variable domain of TCR clone 258957 (TRBV29-1, TRBJ2-1)
CSGRDRKSAYNEQFS

SEQ ID NO: 517915 - protein, 10 aa, Homo sapiens
  CDR3 for alpha chain variable domain of TCR clone 258958 (TRAV2, TRAJ29)
CAPGNTPLVF

SEQ ID NO: 517916 - protein, 16 aa, Homo sapiens
  CDR3 for beta chain variable domain of TCR clone 258958 (TRBV7-3, TRBJ2-2)
CASSLKRGTLSGELFF

SEQ ID NO: 517917 - protein, 16 aa, Homo sapiens
  CDR3 for alpha chain variable domain of TCR clone 258959 (TRAV30, TRAJ24)
CGTEIVDADSWGKFQL

SEQ ID NO: 517918 - protein, 15 aa, Homo sapiens
  CDR3 for beta chain variable domain of TCR clone 258959 (TRBV15, TRBJ1-5)
CATSRDPVSNQPQHF

SEQ ID NO: 517919 - protein, 16 aa, Homo sapiens
  CDR3 for alpha chain variable domain of TCR clone 258960 (TRAV1-2, TRAJ33)
CAVRATSMDSNYQLIW

SEQ ID NO: 517920 - protein, 16 aa, Homo sapiens
  CDR3 for beta chain variable domain of TCR clone 258960 (TRBV7-2, TRBJ1-4)
CASGLAPGRRDEKLFF

SEQ ID NO: 517921 - protein, 15 aa, Homo sapiens
  CDR3 for alpha chain variable domain of TCR clone 258961 (TRAV13-1, TRAJ52)
SHYNAGGTSYGKLTF

SEQ ID NO: 517922 - protein, 11 aa, Homo sapiens
  CDR3 for beta chain variable domain of TCR clone 258961 (TRBV12-4, TRBJ2-2)
CASSSAGELFF

SEQ ID NO: 517923 - protein, 14 aa, Homo sapiens
  CDR3 for alpha chain variable domain of TCR clone 258962 (TRAV12-3, TRAJ9)
CAMSVETGGFQTIF

SEQ ID NO: 517924 - protein, 13 aa, Homo sapiens
  CDR3 for beta chain variable domain of TCR clone 258962 (TRBV2, TRBJ1-5)
CASSVGWDQPQHF

SEQ ID NO: 517925 - protein, 14 aa, Homo sapiens
  CDR3 for alpha chain variable domain of TCR clone 258963 (TRAV23/DV6, TRAJ8)
CAASKNTGFHKLVF

SEQ ID NO: 517926 - protein, 16 aa, Homo sapiens
  CDR3 for beta chain variable domain of TCR clone 258963 (TRBV19, TRBJ2-2)
CASSFPGQGLAGELFF

SEQ ID NO: 517927 - protein, 13 aa, Homo sapiens
  CDR3 for alpha chain variable domain of TCR clone 258964 (TRAV26-2, TRAJ43)
CILRAVNNNDMRF

SEQ ID NO: 517928 - protein, 12 aa, Homo sapiens
  CDR3 for beta chain variable domain of TCR clone 258964 (TRBV28, TRBJ1-6)
CASSLLRGGIAF

SEQ ID NO: 517929 - protein, 14 aa, Homo sapiens
  CDR3 for alpha chain variable domain of TCR clone 258965 (TRAV23/DV6, TRAJ8)
CAASKNTGFQKLVF

SEQ ID NO: 517930 - protein, 16 aa, Homo sapiens
  CDR3 for beta chain variable domain of TCR clone 258965 (TRBV4-1, TRBJ2-6)
CASSQVGDPGANVLTF

SEQ ID NO: 517931 - protein, 15 aa, Homo sapiens
  CDR3 for alpha chain variable domain of TCR clone 258966 (TRAV12-2, TRAJ53)
CAVNGGGGSNYKLPF

SEQ ID NO: 517932 - protein, 13 aa, Homo sapiens
  CDR3 for beta chain variable domain of TCR clone 258966 (TRBV3-1, TRBJ1-1)
CASSLGVITEAFF

SEQ ID NO: 517933 - protein, 12 aa, Homo sapiens
  CDR3 for alpha chain variable domain of TCR clone 258967 (TRAV8-3, TRAJ5)
CAVGGGLRALTF

SEQ ID NO: 517934 - protein, 13 aa, Homo sapiens
  CDR3 for beta chain variable domain of TCR clone 258967 (TRBV7-2, TRBJ2-2)
CASSLAVTGELFF

SEQ ID NO: 517935 - protein, 13 aa, Homo sapiens
  CDR3 for alpha chain variable domain of TCR clone 258968 (TRAV8-3, TRAJ10)
CAVGATGQTTSSL

SEQ ID NO: 517936 - protein, 12 aa, Homo sapiens
  CDR3 for beta chain variable domain of TCR clone 258968 (TRBV7-8, TRBJ2-7)
CASSLGDREQYF

SEQ ID NO: 517937 - protein, 14 aa, Homo sapiens
  CDR3 for alpha chain variable domain of TCR clone 258969 (TRAV27, TRAJ22)
CAGVSVLGKRQLTF

SEQ ID NO: 517938 - protein, 17 aa, Homo sapiens
  CDR3 for beta chain variable domain of TCR clone 258969 (TRBV14, TRBJ2-1)
CASSQDRRVTSYNEQFV

SEQ ID NO: 517939 - protein, 15 aa, Homo sapiens
  CDR3 for alpha chain variable domain of TCR clone 258970 (TRAV13-1, TRAJ17)
CAASIERAAGNKLTF

SEQ ID NO: 517940 - protein, 14 aa, Homo sapiens
  CDR3 for beta chain variable domain of TCR clone 258970 (TRBV19, TRBJ2-1)
CASSKGFAENEQFF

SEQ ID NO: 517941 - protein, 14 aa, Homo sapiens
  CDR3 for alpha chain variable domain of TCR clone 258971 (TRAV2, TRAJ39)
CAVEGDNAGNMLTF

SEQ ID NO: 517942 - protein, 14 aa, Homo sapiens
  CDR3 for beta chain variable domain of TCR clone 258971 (TRBV28, TRBJ2-7)
CASSLRARGNERYF

SEQ ID NO: 517943 - protein, 15 aa, Homo sapiens
  CDR3 for alpha chain variable domain of TCR clone 258972 (TRAV4, TRAJ39)
CLVGPNNNAGNMLTF

SEQ ID NO: 517944 - protein, 16 aa, Homo sapiens
  CDR3 for beta chain variable domain of TCR clone 258972 (TRBV7-9, TRBJ2-1)
CASSDVAGGSYNEQFF

SEQ ID NO: 517945 - protein, 16 aa, Homo sapiens
  CDR3 for alpha chain variable domain of TCR clone 258973 (TRAV26-1, TRAJ48)
IASSDLSNFGNEKLTF

SEQ ID NO: 517946 - protein, 14 aa, Homo sapiens
  CDR3 for beta chain variable domain of TCR clone 258973 (TRBV13, TRBJ2-7)
CASSLKGASYKQYF

SEQ ID NO: 517947 - protein, 18 aa, Homo sapiens
  CDR3 for alpha chain variable domain of TCR clone 258974 (TRAV1-2, TRAJ18)
CAVRDMGDRGSTLGRLYF

SEQ ID NO: 517948 - protein, 14 aa, Homo sapiens
  CDR3 for beta chain variable domain of TCR clone 258974 (TRBV25-1, TRBJ1-1)
CASTHLGGNTEAFF

SEQ ID NO: 517949 - protein, 14 aa, Homo sapiens
  CDR3 for alpha chain variable domain of TCR clone 258975 (TRAV21, TRAJ23)
CAIMIYNQGGKLIF

SEQ ID NO: 517950 - protein, 18 aa, Homo sapiens
  CDR3 for beta chain variable domain of TCR clone 258975 (TRBV20-1, TRBJ2-6)
CSAETTPTRGSGANVLTF

SEQ ID NO: 517951 - protein, 13 aa, Homo sapiens
  CDR3 for alpha chain variable domain of TCR clone 258976 (TRAV12-1, TRAJ3)
FVVNPRGASKIIF

SEQ ID NO: 517952 - protein, 13 aa, Homo sapiens
  CDR3 for beta chain variable domain of TCR clone 258976 (TRBV28, TRBJ1-5)
CASSDRGNQPQHF

SEQ ID NO: 517953 - protein, 15 aa, Homo sapiens
  CDR3 for alpha chain variable domain of TCR clone 258977 (TRAV27, TRAJ38)
CAGRFNAGNNRKLIW

SEQ ID NO: 517954 - protein, 13 aa, Homo sapiens
  CDR3 for beta chain variable domain of TCR clone 258977 (TRBV4-2, TRBJ1-1)
CGSSQAGNTEAFF

SEQ ID NO: 517955 - protein, 13 aa, Homo sapiens
  CDR3 for alpha chain variable domain of TCR clone 258978 (TRAV36/DV7, TRAJ37)
CAVFSSNTGKLIF

SEQ ID NO: 517956 - protein, 15 aa, Homo sapiens
  CDR3 for beta chain variable domain of TCR clone 258978 (TRBV20-1, TRBJ1-1)
CSPRDPRGEYTEAFF

SEQ ID NO: 517957 - protein, 14 aa, Homo sapiens
  CDR3 for alpha chain variable domain of TCR clone 258979 (TRAV8-1, TRAJ4)
CAVKFSGGYNKLFF

SEQ ID NO: 517958 - protein, 22 aa, Homo sapiens
  CDR3 for beta chain variable domain of TCR clone 258979 (TRBV7-3, TRBJ2-5)
CASARDRVILRPRDPVLRARHA

SEQ ID NO: 517959 - protein, 16 aa, Homo sapiens
  CDR3 for alpha chain variable domain of TCR clone 258980 (TRAV30, TRAJ24)
CGTEIVDADRWGKFQF

SEQ ID NO: 517960 - protein, 15 aa, Homo sapiens
  CDR3 for beta chain variable domain of TCR clone 258980 (TRBV18, TRBJ2-1)
CASLPDRGRDNEQFF

SEQ ID NO: 517961 - protein, 16 aa, Homo sapiens
  CDR3 for alpha chain variable domain of TCR clone 258981 (TRAV23/DV6, TRAJ9)
CAASIGGNTGGFKTIF

SEQ ID NO: 517962 - protein, 15 aa, Homo sapiens
  CDR3 for beta chain variable domain of TCR clone 258981 (TRBV4-1, TRBJ2-7)
CASSQQGQGFDEQYF

SEQ ID NO: 517963 - protein, 15 aa, Homo sapiens
  CDR3 for alpha chain variable domain of TCR clone 258982 (TRAV41, TRAJ45)
CAASYSGAGADGLTF

SEQ ID NO: 517964 - protein, 14 aa, Homo sapiens
  CDR3 for beta chain variable domain of TCR clone 258982 (TRBV12-5, TRBJ2-5)
CASGSRTHQETQYF

SEQ ID NO: 517965 - protein, 14 aa, Homo sapiens
  CDR3 for alpha chain variable domain of TCR clone 258983 (TRAV12-2, TRAJ17)
CAVLFKAAGNKLPF

SEQ ID NO: 517966 - protein, 13 aa, Homo sapiens
  CDR3 for beta chain variable domain of TCR clone 258983 (TRBV19, TRBJ1-2)
CASSQGQVYGDTF

SEQ ID NO: 517967 - protein, 13 aa, Homo sapiens
  CDR3 for alpha chain variable domain of TCR clone 258984 (TRAV8-6, TRAJ9)
CAVWDTGGFKTIY

SEQ ID NO: 517968 - protein, 14 aa, Homo sapiens
  CDR3 for beta chain variable domain of TCR clone 258984 (TRBV2, TRBJ2-1)
CASSEALIYNEQFF

SEQ ID NO: 517969 - protein, 12 aa, Homo sapiens
  CDR3 for alpha chain variable domain of TCR clone 258985 (TRAV12-1, TRAJ40)
CSVYSGTYKYIF

SEQ ID NO: 517970 - protein, 18 aa, Homo sapiens
  CDR3 for beta chain variable domain of TCR clone 258985 (TRBV11-2, TRBJ2-3)
CASSLGGASRGAPNTQYF

SEQ ID NO: 517971 - protein, 14 aa, Homo sapiens
  CDR3 for alpha chain variable domain of TCR clone 258986 (TRAV21, TRAJ8)
CAPRAGTGFQKLVF

SEQ ID NO: 517972 - protein, 18 aa, Homo sapiens
  CDR3 for beta chain variable domain of TCR clone 258986 (TRBV7-3, TRBJ2-3)
CASSSTGTYPGSTDTQYF

SEQ ID NO: 517973 - protein, 17 aa, Homo sapiens
  CDR3 for alpha chain variable domain of TCR clone 258987 (TRAV4, TRAJ42)
CLVGVLNYGGSQGNLIF

SEQ ID NO: 517974 - protein, 12 aa, Homo sapiens
  CDR3 for beta chain variable domain of TCR clone 258987 (TRBV20-1, TRBJ2-1)
CSAQYTCNEQFF

SEQ ID NO: 517975 - protein, 11 aa, Homo sapiens
  CDR3 for alpha chain variable domain of TCR clone 258988 (TRAV13-1, TRAJ23)
CAASSRGKLIF

SEQ ID NO: 517976 - protein, 14 aa, Homo sapiens
  CDR3 for beta chain variable domain of TCR clone 258988 (TRBV19, TRBJ2-1)
CASPTFVLSGEQFF

SEQ ID NO: 517977 - protein, 18 aa, Homo sapiens
  CDR3 for alpha chain variable domain of TCR clone 258989 (TRAV12-3, TRAJ52)
CAMSVGGAGGTSYGKLTF

SEQ ID NO: 517978 - protein, 13 aa, Homo sapiens
  CDR3 for beta chain variable domain of TCR clone 258989 (TRBV9, TRBJ2-1)
CASSVGQGGEQFF

SEQ ID NO: 517979 - protein, 15 aa, Homo sapiens
  CDR3 for alpha chain variable domain of TCR clone 258990 (TRAV3, TRAJ5)
CAVRDRDTGRRALTV

SEQ ID NO: 517980 - protein, 13 aa, Homo sapiens
  CDR3 for beta chain variable domain of TCR clone 258990 (TRBV12-4, TRBJ2-7)
CASSPTETYEQYF

SEQ ID NO: 517981 - protein, 12 aa, Homo sapiens
  CDR3 for alpha chain variable domain of TCR clone 258991 (TRAV36/DV7, TRAJ26)
CAADNYGQNFVF

SEQ ID NO: 517982 - protein, 18 aa, Homo sapiens
  CDR3 for beta chain variable domain of TCR clone 258991 (TRBV7-3, TRBJ2-3)
CASSSTGTYPGSTDTQYF

SEQ ID NO: 517983 - protein, 11 aa, Homo sapiens
  CDR3 for alpha chain variable domain of TCR clone 258992 (TRAV8-3, TRAJ15)
CAVGPGTALNF

SEQ ID NO: 517984 - protein, 15 aa, Homo sapiens
  CDR3 for beta chain variable domain of TCR clone 258992 (TRBV7-9, TRBJ2-7)
CASSLALAEAYEQYF

SEQ ID NO: 517985 - protein, 15 aa, Homo sapiens
  CDR3 for alpha chain variable domain of TCR clone 258993 (TRAV17, TRAJ4)
CATGTWSGGYNKLIF

SEQ ID NO: 517986 - protein, 13 aa, Homo sapiens
  CDR3 for beta chain variable domain of TCR clone 258993 (TRBV6-6, TRBJ2-7)
CASSSKHLAEQYF

SEQ ID NO: 517987 - protein, 11 aa, Homo sapiens
  CDR3 for alpha chain variable domain of TCR clone 258994 (TRAV3, TRAJ21)
CAVGNFNKFYF

SEQ ID NO: 517988 - protein, 16 aa, Homo sapiens
  CDR3 for beta chain variable domain of TCR clone 258994 (TRBV19, TRBJ2-1)
CASSREGPSSYNEQFF

SEQ ID NO: 517989 - protein, 10 aa, Homo sapiens
  CDR3 for alpha chain variable domain of TCR clone 258995 (TRAV23/DV6, TRAJ57)
CAASSTLSQG

SEQ ID NO: 517990 - protein, 15 aa, Homo sapiens
  CDR3 for beta chain variable domain of TCR clone 258995 (TRBV5-7, TRBJ2-1)
CASSYISGRGNEQFF

SEQ ID NO: 517991 - protein, 16 aa, Homo sapiens
  CDR3 for alpha chain variable domain of TCR clone 258996 (TRAV4, TRAJ8)
CLVGDSGNTGFQKLVF

SEQ ID NO: 517992 - protein, 14 aa, Homo sapiens
  CDR3 for beta chain variable domain of TCR clone 258996 (TRBV19, TRBJ2-1)
CASGKSTQYNEQFF

SEQ ID NO: 517993 - protein, 13 aa, Homo sapiens
  CDR3 for alpha chain variable domain of TCR clone 258997 (TRAV27, TRAJ42)
CAGARGSQGNLIF

SEQ ID NO: 517994 - protein, 16 aa, Homo sapiens
  CDR3 for beta chain variable domain of TCR clone 258997 (TRBV5-1, TRBJ2-2)
CASSSRTGGRTGELFF

SEQ ID NO: 517995 - protein, 14 aa, Homo sapiens
  CDR3 for alpha chain variable domain of TCR clone 258998 (TRAV23/DV6, TRAJ8)
CAASKATGFQKLEF

SEQ ID NO: 517996 - protein, 13 aa, Homo sapiens
  CDR3 for beta chain variable domain of TCR clone 258998 (TRBV4-2, TRBJ1-1)
CASSQAGNTEAFF

SEQ ID NO: 517997 - protein, 15 aa, Homo sapiens
  CDR3 for alpha chain variable domain of TCR clone 258999 (TRAV3, TRAJ22)
FAVRDRGGSARQLTF

SEQ ID NO: 517998 - protein, 15 aa, Homo sapiens
  CDR3 for beta chain variable domain of TCR clone 258999 (TRBV7-3, TRBJ2-2)
CASSETGQGTGELFF

SEQ ID NO: 517999 - protein, 14 aa, Homo sapiens
  CDR3 for alpha chain variable domain of TCR clone 259000 (TRAV1-2, TRAJ8)
CAVREDTGFQRLVF

SEQ ID NO: 518000 - protein, 12 aa, Homo sapiens
  CDR3 for beta chain variable domain of TCR clone 259000 (TRBV2, TRBJ2-1)
CAYGPPGNEQFF

SEQ ID NO: 518001 - protein, 10 aa, Homo sapiens
  CDR3 for alpha chain variable domain of TCR clone 259001 (TRAV3, TRAJ30)
CAVREIEIIF

SEQ ID NO: 518002 - protein, 16 aa, Homo sapiens
  CDR3 for beta chain variable domain of TCR clone 259001 (TRBV7-9, TRBJ2-3)
CASSFSVAGGTDTQYF

SEQ ID NO: 518003 - protein, 18 aa, Homo sapiens
  CDR3 for alpha chain variable domain of TCR clone 259002 (TRAV21, TRAJ52)
CAVRPSPAGGTSYGKLTF

SEQ ID NO: 518004 - protein, 15 aa, Homo sapiens
  CDR3 for beta chain variable domain of TCR clone 259002 (TRBV19, TRBJ2-7)
CASSPAGSGEALRYF

SEQ ID NO: 518005 - protein, 16 aa, Homo sapiens
  CDR3 for alpha chain variable domain of TCR clone 259003 (TRAV17, TRAJ43)
CATPRSNDMRLSRDQT

SEQ ID NO: 518006 - protein, 15 aa, Homo sapiens
  CDR3 for beta chain variable domain of TCR clone 259003 (TRBV11-2, TRBJ2-1)
CASSLGTSGLNEQFF

SEQ ID NO: 518007 - protein, 15 aa, Homo sapiens
  CDR3 for alpha chain variable domain of TCR clone 259004 (TRAV17, TRAJ52)
CATEAGGTSYGKLTF

SEQ ID NO: 518008 - protein, 16 aa, Homo sapiens
  CDR3 for beta chain variable domain of TCR clone 259004 (TRBV13, TRBJ2-2)
CASSPRTGEHTGELFF

SEQ ID NO: 518009 - protein, 12 aa, Homo sapiens
  CDR3 for alpha chain variable domain of TCR clone 259005 (TRAV17, TRAJ36)
CATLTGANNLFF

SEQ ID NO: 518010 - protein, 13 aa, Homo sapiens
  CDR3 for beta chain variable domain of TCR clone 259005 (TRBV5-1, TRBJ2-2)
CASIVARTGELFF

SEQ ID NO: 518011 - protein, 15 aa, Homo sapiens
  CDR3 for alpha chain variable domain of TCR clone 259006 (TRAV35, TRAJ20)
CAGQLVGSNDYKLSF

SEQ ID NO: 518012 - protein, 15 aa, Homo sapiens
  CDR3 for beta chain variable domain of TCR clone 259006 (TRBV19, TRBJ2-7)
CASSKQGPTSSTSGR

SEQ ID NO: 518013 - protein, 15 aa, Homo sapiens
  CDR3 for alpha chain variable domain of TCR clone 259007 (TRAV1-2, TRAJ15)
CAVDVMGSAGTALIF

SEQ ID NO: 518014 - protein, 13 aa, Homo sapiens
  CDR3 for beta chain variable domain of TCR clone 259007 (TRBV20-1, TRBJ1-1)
CSAFDRENTEALF

SEQ ID NO: 518015 - protein, 15 aa, Homo sapiens
  CDR3 for alpha chain variable domain of TCR clone 259008 (TRAV35, TRAJ58)
CAGRRQETSGSRLTF

SEQ ID NO: 518016 - protein, 11 aa, Homo sapiens
  CDR3 for beta chain variable domain of TCR clone 259008 (TRBV11-2, TRBJ1-1)
CASSINTAAFF

SEQ ID NO: 518017 - protein, 13 aa, Homo sapiens
  CDR3 for alpha chain variable domain of TCR clone 259009 (TRAV21, TRAJ3)
CCEPYSSASKIIF

SEQ ID NO: 518018 - protein, 15 aa, Homo sapiens
  CDR3 for beta chain variable domain of TCR clone 259009 (TRBV7-3, TRBJ2-1)
CASSPAGGGEVEQFF

SEQ ID NO: 518019 - protein, 11 aa, Homo sapiens
  CDR3 for alpha chain variable domain of TCR clone 259010 (TRAV12-2, TRAJ40)
CAVKIPSNLQI

SEQ ID NO: 518020 - protein, 14 aa, Homo sapiens
  CDR3 for beta chain variable domain of TCR clone 259010 (TRBV20-1, TRBJ1-1)
CSAQTRIGGTEAFF

SEQ ID NO: 518021 - protein, 17 aa, Homo sapiens
  CDR3 for alpha chain variable domain of TCR clone 259011 (TRAV35, TRAJ28)
CAGLQVYSGVGSYQLTF

SEQ ID NO: 518022 - protein, 15 aa, Homo sapiens
  CDR3 for beta chain variable domain of TCR clone 259011 (TRBV2, TRBJ1-2)
CASSEIGGANYGYTF

SEQ ID NO: 518023 - protein, 11 aa, Homo sapiens
  CDR3 for alpha chain variable domain of TCR clone 259012 (TRAV17, TRAJ43)
CATPRSNDMRF

SEQ ID NO: 518024 - protein, 17 aa, Homo sapiens
  CDR3 for beta chain variable domain of TCR clone 259012 (TRBV19, TRBJ2-6)
CASSSGTVFSGANVLTF

SEQ ID NO: 518025 - protein, 17 aa, Homo sapiens
  CDR3 for alpha chain variable domain of TCR clone 259013 (TRAV26-1, TRAJ53)
YIVRVEDSGGSNYKLTF

SEQ ID NO: 518026 - protein, 15 aa, Homo sapiens
  CDR3 for beta chain variable domain of TCR clone 259013 (TRBV20-1, TRBJ2-7)
CSARVPAAYFYEQYF

SEQ ID NO: 518027 - protein, 14 aa, Homo sapiens
  CDR3 for alpha chain variable domain of TCR clone 259014 (TRAV1-2, TRAJ8)
CAVREDTGFQKLVF

SEQ ID NO: 518028 - protein, 15 aa, Homo sapiens
  CDR3 for beta chain variable domain of TCR clone 259014 (TRBV2, TRBJ2-1)
CASSELAGSYNDQFF

SEQ ID NO: 518029 - protein, 14 aa, Homo sapiens
  CDR3 for alpha chain variable domain of TCR clone 259015 (TRAV38-1, TRAJ29)
CAFITPSGNTPLVF

SEQ ID NO: 518030 - protein, 15 aa, Homo sapiens
  CDR3 for beta chain variable domain of TCR clone 259015 (TRBV5-1, TRBJ1-1)
CASSLSDLGGTEAFF

SEQ ID NO: 518031 - protein, 13 aa, Homo sapiens
  CDR3 for alpha chain variable domain of TCR clone 259016 (TRAV13-1, TRAJ37)
CAARSGNTGKLIF

SEQ ID NO: 518032 - protein, 13 aa, Homo sapiens
  CDR3 for beta chain variable domain of TCR clone 259016 (TRBV15, TRBJ1-6)
CATSGGLNSPLHF

SEQ ID NO: 518033 - protein, 15 aa, Homo sapiens
  CDR3 for alpha chain variable domain of TCR clone 259017 (TRAV26-1, TRAJ44)
CIVRIGTGSASKLTF

SEQ ID NO: 518034 - protein, 15 aa, Homo sapiens
  CDR3 for beta chain variable domain of TCR clone 259017 (TRBV7-6, TRBJ2-1)
CASSSLAGEGNEQFF

SEQ ID NO: 518035 - protein, 18 aa, Homo sapiens
  CDR3 for alpha chain variable domain of TCR clone 259018 (TRAV26-1, TRAJ52)
CIVRVAGAGGTSYGKLTF

SEQ ID NO: 518036 - protein, 13 aa, Homo sapiens
  CDR3 for beta chain variable domain of TCR clone 259018 (TRBV7-8, TRBJ1-2)
CASRAQSYYGYTF

SEQ ID NO: 518037 - protein, 15 aa, Homo sapiens
  CDR3 for alpha chain variable domain of TCR clone 259019 (TRAV3, TRAJ7)
CAVRDKDNGNNRLAF

SEQ ID NO: 518038 - protein, 14 aa, Homo sapiens
  CDR3 for beta chain variable domain of TCR clone 259019 (TRBV7-8, TRBJ2-3)
CASSLEAGTDTQYF

SEQ ID NO: 518039 - protein, 12 aa, Homo sapiens
  CDR3 for alpha chain variable domain of TCR clone 259020 (TRAV8-3, TRAJ41)
CAVALSGDALNF

SEQ ID NO: 518040 - protein, 18 aa, Homo sapiens
  CDR3 for beta chain variable domain of TCR clone 259020 (TRBV20-1, TRBJ2-6)
CSAETTPTHGSGANVLTF

SEQ ID NO: 518041 - protein, 14 aa, Homo sapiens
  CDR3 for alpha chain variable domain of TCR clone 259021 (TRAV12-2, TRAJ13)
CAVKKTGGYQKVTF

SEQ ID NO: 518042 - protein, 16 aa, Homo sapiens
  CDR3 for beta chain variable domain of TCR clone 259021 (TRBV4-3, TRBJ2-4)
CDSSQELRRAKNIQYF

SEQ ID NO: 518043 - protein, 19 aa, Homo sapiens
  CDR3 for alpha chain variable domain of TCR clone 259022 (TRAV26-1, TRAJ52)
FIVRAHRNAGGTSYGKLTF

SEQ ID NO: 518044 - protein, 13 aa, Homo sapiens
  CDR3 for beta chain variable domain of TCR clone 259022 (TRBV29-1, TRBJ2-1)
CSVEGGRVNEQFF

SEQ ID NO: 518045 - protein, 11 aa, Homo sapiens
  CDR3 for alpha chain variable domain of TCR clone 259023 (TRAV1-2, TRAJ31)
CAVNNNARLMF

SEQ ID NO: 518046 - protein, 12 aa, Homo sapiens
  CDR3 for beta chain variable domain of TCR clone 259023 (TRBV6-3, TRBJ2-1)
CASSGSYNEQFF

SEQ ID NO: 518047 - protein, 13 aa, Homo sapiens
  CDR3 for alpha chain variable domain of TCR clone 259024 (TRAV27, TRAJ8)
CAGGPTGFQKLVF

SEQ ID NO: 518048 - protein, 19 aa, Homo sapiens
  CDR3 for beta chain variable domain of TCR clone 259024 (TRBV7-2, TRBJ2-3)
CASSFLSRNWGGGTDTQYF

SEQ ID NO: 518049 - protein, 18 aa, Homo sapiens
  CDR3 for alpha chain variable domain of TCR clone 259025 (TRAV26-2, TRAJ54)
CILRDVEVGIQGAQKPVF

SEQ ID NO: 518050 - protein, 17 aa, Homo sapiens
  CDR3 for beta chain variable domain of TCR clone 259025 (TRBV20-1, TRBJ1-5)
CSASLSPGQGGNQPQHF

SEQ ID NO: 518051 - protein, 15 aa, Homo sapiens
  CDR3 for alpha chain variable domain of TCR clone 259026 (TRAV30, TRAJ13)
CGTQGVTGGYQRVTF

SEQ ID NO: 518052 - protein, 17 aa, Homo sapiens
  CDR3 for beta chain variable domain of TCR clone 259026 (TRBV20-1, TRBJ2-2)
CSAGVKRTHVRSGELFF

SEQ ID NO: 518053 - protein, 14 aa, Homo sapiens
  CDR3 for alpha chain variable domain of TCR clone 259027 (TRAV27, TRAJ22)
CAGLPSGSARQLTF

SEQ ID NO: 518054 - protein, 14 aa, Homo sapiens
  CDR3 for beta chain variable domain of TCR clone 259027 (TRBV7-2, TRBJ2-2)
CASRGQGAAGELFF

SEQ ID NO: 518055 - protein, 11 aa, Homo sapiens
  CDR3 for alpha chain variable domain of TCR clone 259028 (TRAV25, TRAJ5)
CRGGGRRALTF

SEQ ID NO: 518056 - protein, 16 aa, Homo sapiens
  CDR3 for beta chain variable domain of TCR clone 259028 (TRBV2, TRBJ2-1)
CASSVGGSLSYNEQFF

SEQ ID NO: 518057 - protein, 11 aa, Homo sapiens
  CDR3 for alpha chain variable domain of TCR clone 259029 (TRAV1-1, TRAJ23)
CAVRQGGKLIF

SEQ ID NO: 518058 - protein, 20 aa, Homo sapiens
  CDR3 for beta chain variable domain of TCR clone 259029 (TRBV11-2, TRBJ1-6)
CASSLVFATGGSAHPSTLGT

SEQ ID NO: 518059 - protein, 13 aa, Homo sapiens
  CDR3 for alpha chain variable domain of TCR clone 259030 (TRAV21, TRAJ37)
CAVSSGNTGKLIF

SEQ ID NO: 518060 - protein, 17 aa, Homo sapiens
  CDR3 for beta chain variable domain of TCR clone 259030 (TRBV5-1, TRBJ2-5)
CAGSLLGLAANQETQYF

SEQ ID NO: 518061 - protein, 15 aa, Homo sapiens
  CDR3 for alpha chain variable domain of TCR clone 259031 (TRAV17, TRAJ37)
CATDGGSSNTGKLIF

SEQ ID NO: 518062 - protein, 15 aa, Homo sapiens
  CDR3 for beta chain variable domain of TCR clone 259031 (TRBV28, TRBJ2-5)
CASSSGRTIQDTQYF

SEQ ID NO: 518063 - protein, 15 aa, Homo sapiens
  CDR3 for alpha chain variable domain of TCR clone 259032 (TRAV12-3, TRAJ6)
CAMSATTGGSYIPTF

SEQ ID NO: 518064 - protein, 16 aa, Homo sapiens
  CDR3 for beta chain variable domain of TCR clone 259032 (TRBV11-2, TRBJ2-7)
CASSLAPTGVNYEQYF

SEQ ID NO: 518065 - protein, 12 aa, Homo sapiens
  CDR3 for alpha chain variable domain of TCR clone 259033 (TRAV8-3, TRAJ7)
CAVEGGNNRLAF

SEQ ID NO: 518066 - protein, 15 aa, Homo sapiens
  CDR3 for beta chain variable domain of TCR clone 259033 (TRBV10-3, TRBJ2-1)
CAISDVQDRAYGQFF

SEQ ID NO: 518067 - protein, 15 aa, Homo sapiens
  CDR3 for alpha chain variable domain of TCR clone 259034 (TRAV12-1, TRAJ44)
CVADLTTGPASKLTF

SEQ ID NO: 518068 - protein, 13 aa, Homo sapiens
  CDR3 for beta chain variable domain of TCR clone 259034 (TRBV6-5, TRBJ2-5)
CASSPQGGETQYF

SEQ ID NO: 518069 - protein, 11 aa, Homo sapiens
  CDR3 for alpha chain variable domain of TCR clone 259035 (TRAV1-2, TRAJ11)
CAVRGYSTLTF

SEQ ID NO: 518070 - protein, 16 aa, Homo sapiens
  CDR3 for beta chain variable domain of TCR clone 259035 (TRBV4-2, TRBJ2-1)
CASSQELRGGLNEQFF

SEQ ID NO: 518071 - protein, 16 aa, Homo sapiens
  CDR3 for alpha chain variable domain of TCR clone 259036 (TRAV23/DV6, TRAJ9)
CAASIGGNTGGFKTIF

SEQ ID NO: 518072 - protein, 15 aa, Homo sapiens
  CDR3 for beta chain variable domain of TCR clone 259036 (TRBV28, TRBJ1-3)
CASSMGWASGNTTYF

SEQ ID NO: 518073 - protein, 16 aa, Homo sapiens
  CDR3 for alpha chain variable domain of TCR clone 259037 (TRAV3, TRAJ42)
RAVRDIEGGSQGNLIF

SEQ ID NO: 518074 - protein, 15 aa, Homo sapiens
  CDR3 for beta chain variable domain of TCR clone 259037 (TRBV9, TRBJ2-2)
CASSDFAGASGELFF

SEQ ID NO: 518075 - protein, 13 aa, Homo sapiens
  CDR3 for alpha chain variable domain of TCR clone 259038 (TRAV3, TRAJ27)
CAVRPLGAGNSTF

SEQ ID NO: 518076 - protein, 13 aa, Homo sapiens
  CDR3 for beta chain variable domain of TCR clone 259038 (TRBV7-9, TRBJ2-3)
CASSPGSTETQYF

SEQ ID NO: 518077 - protein, 11 aa, Homo sapiens
  CDR3 for alpha chain variable domain of TCR clone 259039 (TRAV38-2/DV8, TRAJ29)
CAYRGNTPLVF

SEQ ID NO: 518078 - protein, 15 aa, Homo sapiens
  CDR3 for beta chain variable domain of TCR clone 259039 (TRBV19, TRBJ1-1)
CASTSGQIQNTEAFF

SEQ ID NO: 518079 - protein, 15 aa, Homo sapiens
  CDR3 for alpha chain variable domain of TCR clone 259040 (TRAV4, TRAJ26)
CLVGDMNNYGQNFVF

SEQ ID NO: 518080 - protein, 16 aa, Homo sapiens
  CDR3 for beta chain variable domain of TCR clone 259040 (TRBV28, TRBJ1-4)
CASSSRTGAANDKLFF

SEQ ID NO: 518081 - protein, 14 aa, Homo sapiens
  CDR3 for alpha chain variable domain of TCR clone 259041 (TRAV2, TRAJ21)
CAVEDLHNFNKFYF

SEQ ID NO: 518082 - protein, 11 aa, Homo sapiens
  CDR3 for beta chain variable domain of TCR clone 259041 (TRBV10-3, TRBJ2-1)
CAISDRGLQFF

SEQ ID NO: 518083 - protein, 15 aa, Homo sapiens
  CDR3 for alpha chain variable domain of TCR clone 259042 (TRAV27, TRAJ38)
CAARRNSGNNRKLIW

SEQ ID NO: 518084 - protein, 13 aa, Homo sapiens
  CDR3 for beta chain variable domain of TCR clone 259042 (TRBV12-5, TRBJ2-3)
CASGDRQSDTQYF

SEQ ID NO: 518085 - protein, 16 aa, Homo sapiens
  CDR3 for alpha chain variable domain of TCR clone 259043 (TRAV3, TRAJ21)
CAVRDIERGNFNKFYF

SEQ ID NO: 518086 - protein, 15 aa, Homo sapiens
  CDR3 for beta chain variable domain of TCR clone 259043 (TRBV5-1, TRBJ1-2)
CASSPGDRGSYGYIF

SEQ ID NO: 518087 - protein, 16 aa, Homo sapiens
  CDR3 for alpha chain variable domain of TCR clone 259044 (TRAV1-2, TRAJ10)
CAVRGVLTGGGNKLTF

SEQ ID NO: 518088 - protein, 16 aa, Homo sapiens
  CDR3 for beta chain variable domain of TCR clone 259044 (TRBV7-2, TRBJ2-7)
CASSLVMGVGSYEQYF

SEQ ID NO: 518089 - protein, 13 aa, Homo sapiens
  CDR3 for alpha chain variable domain of TCR clone 259045 (TRAV12-1, TRAJ11)
CVVTRGGYSTLTF

SEQ ID NO: 518090 - protein, 13 aa, Homo sapiens
  CDR3 for beta chain variable domain of TCR clone 259045 (TRBV20-1, TRBJ1-2)
CSARDQVAYGYTF

SEQ ID NO: 518091 - protein, 18 aa, Homo sapiens
  CDR3 for alpha chain variable domain of TCR clone 259046 (TRAV9-2, TRAJ52)
CALNRHNAGGTSYGKLTF

SEQ ID NO: 518092 - protein, 17 aa, Homo sapiens
  CDR3 for beta chain variable domain of TCR clone 259046 (TRBV6-5, TRBJ2-1)
CASRKSPRTGGHNEQFF

SEQ ID NO: 518093 - protein, 13 aa, Homo sapiens
  CDR3 for alpha chain variable domain of TCR clone 259047 (TRAV23/DV6, TRAJ22)
CAPWGGSARQMTF

SEQ ID NO: 518094 - protein, 14 aa, Homo sapiens
  CDR3 for beta chain variable domain of TCR clone 259047 (TRBV18, TRBJ2-7)
CASSPTSGGYEQYF

SEQ ID NO: 518095 - protein, 15 aa, Homo sapiens
  CDR3 for alpha chain variable domain of TCR clone 259048 (TRAV13-1, TRAJ45)
CAASGSGAGADGLTF

SEQ ID NO: 518096 - protein, 14 aa, Homo sapiens
  CDR3 for beta chain variable domain of TCR clone 259048 (TRBV12-4, TRBJ1-2)
CASSFVGTAYGYTF

SEQ ID NO: 518097 - protein, 12 aa, Homo sapiens
  CDR3 for alpha chain variable domain of TCR clone 259049 (TRAV1-2, TRAJ29)
CAVPSGNTPLVF

SEQ ID NO: 518098 - protein, 16 aa, Homo sapiens
  CDR3 for beta chain variable domain of TCR clone 259049 (TRBV6-1, TRBJ2-5)
CASSETLDRGAETQYF

SEQ ID NO: 518099 - protein, 23 aa, Homo sapiens
  CDR3 for alpha chain variable domain of TCR clone 259050 (TRAV30, TRAJ43)
CTLRPPSSVTQEPTSAALSDMRF

SEQ ID NO: 518100 - protein, 11 aa, Homo sapiens
  CDR3 for beta chain variable domain of TCR clone 259050 (TRBV11-2, TRBJ2-2)
CASSLPGELFL

SEQ ID NO: 518101 - protein, 15 aa, Homo sapiens
  CDR3 for alpha chain variable domain of TCR clone 259051 (TRAV13-1, TRAJ52)
CAANAGGTSYGKLTF

SEQ ID NO: 518102 - protein, 15 aa, Homo sapiens
  CDR3 for beta chain variable domain of TCR clone 259051 (TRBV11-2, TRBJ2-2)
CASSSDRVNAGELFF

SEQ ID NO: 518103 - protein, 13 aa, Homo sapiens
  CDR3 for alpha chain variable domain of TCR clone 259052 (TRAV8-3, TRAJ28)
CAVGAVGSYQLTF

SEQ ID NO: 518104 - protein, 13 aa, Homo sapiens
  CDR3 for beta chain variable domain of TCR clone 259052 (TRBV29-1, TRBJ2-1)
CSVEGGGVNEQFF

SEQ ID NO: 518105 - protein, 15 aa, Homo sapiens
  CDR3 for alpha chain variable domain of TCR clone 259053 (TRAV2, TRAJ37)
CAVGDGSSNPGKLIF

SEQ ID NO: 518106 - protein, 13 aa, Homo sapiens
  CDR3 for beta chain variable domain of TCR clone 259053 (TRBV20-1, TRBJ2-7)
CSAQTGLSYEQYF

SEQ ID NO: 518107 - protein, 14 aa, Homo sapiens
  CDR3 for alpha chain variable domain of TCR clone 259054 (TRAV13-1, TRAJ3)
CAASKSSSASKIIF

SEQ ID NO: 518108 - protein, 13 aa, Homo sapiens
  CDR3 for beta chain variable domain of TCR clone 259054 (TRBV25-1, TRBJ2-5)
CGSSESGRETQYF

SEQ ID NO: 518109 - protein, 14 aa, Homo sapiens
  CDR3 for alpha chain variable domain of TCR clone 259055 (TRAV12-2, TRAJ13)
CAVKKTGGYQKVTF

SEQ ID NO: 518110 - protein, 15 aa, Homo sapiens
  CDR3 for beta chain variable domain of TCR clone 259055 (TRBV7-2, TRBJ2-1)
CASSSGVAGGNEQFF

SEQ ID NO: 518111 - protein, 18 aa, Homo sapiens
  CDR3 for alpha chain variable domain of TCR clone 259056 (TRAV13-1, TRAJ52)
CAARKRSTGGTSYGKLTF

SEQ ID NO: 518112 - protein, 13 aa, Homo sapiens
  CDR3 for beta chain variable domain of TCR clone 259056 (TRBV12-4, TRBJ1-2)
CASSLRQGKGYTF

SEQ ID NO: 518113 - protein, 15 aa, Homo sapiens
  CDR3 for alpha chain variable domain of TCR clone 259057 (TRAV12-3, TRAJ6)
CAMSATSGGSYIPTF

SEQ ID NO: 518114 - protein, 11 aa, Homo sapiens
  CDR3 for beta chain variable domain of TCR clone 259057 (TRBV20-1, TRBJ1-5)
CSAQGDQPQYF

SEQ ID NO: 518115 - protein, 20 aa, Homo sapiens
  CDR3 for alpha chain variable domain of TCR clone 259058 (TRAV1-1, TRAJ13)
CAVRGNLGVTRKLPLELEQS

SEQ ID NO: 518116 - protein, 14 aa, Homo sapiens
  CDR3 for beta chain variable domain of TCR clone 259058 (TRBV7-2, TRBJ2-7)
CASRSQGAAYEQYF

SEQ ID NO: 518117 - protein, 15 aa, Homo sapiens
  CDR3 for alpha chain variable domain of TCR clone 259059 (TRAV27, TRAJ38)
CAARRNAGNNRKLIW

SEQ ID NO: 518118 - protein, 13 aa, Homo sapiens
  CDR3 for beta chain variable domain of TCR clone 259059 (TRBV12-5, TRBJ2-3)
CASSDRQSDTQYF

SEQ ID NO: 518119 - protein, 13 aa, Homo sapiens
  CDR3 for alpha chain variable domain of TCR clone 259060 (TRAV17, TRAJ40)
CATRPSGTYKYIF

SEQ ID NO: 518120 - protein, 14 aa, Homo sapiens
  CDR3 for beta chain variable domain of TCR clone 259060 (TRBV6-3, TRBJ1-1)
CASSYQRRDTEAFF

SEQ ID NO: 518121 - protein, 15 aa, Homo sapiens
  CDR3 for alpha chain variable domain of TCR clone 259061 (TRAV13-1, TRAJ44)
CAASRGGGTASKLTF

SEQ ID NO: 518122 - protein, 14 aa, Homo sapiens
  CDR3 for beta chain variable domain of TCR clone 259061 (TRBV7-2, TRBJ2-7)
CASRSQGAAYEQYF

SEQ ID NO: 518123 - protein, 15 aa, Homo sapiens
  CDR3 for alpha chain variable domain of TCR clone 259062 (TRAV12-1, TRAJ10)
CVVNKLTGGGNKFTF

SEQ ID NO: 518124 - protein, 17 aa, Homo sapiens
  CDR3 for beta chain variable domain of TCR clone 259062 (TRBV5-1, TRBJ1-6)
CASSPSLQGSDNSPLHF

SEQ ID NO: 518125 - protein, 14 aa, Homo sapiens
  CDR3 for alpha chain variable domain of TCR clone 259063 (TRAV29/DV5, TRAJ32)
CAAAYGGAPNKLIF

SEQ ID NO: 518126 - protein, 11 aa, Homo sapiens
  CDR3 for beta chain variable domain of TCR clone 259063 (TRBV11-2, TRBJ2-2)
CASSLPGELFF

SEQ ID NO: 518127 - protein, 12 aa, Homo sapiens
  CDR3 for alpha chain variable domain of TCR clone 259064 (TRAV13-1, TRAJ21)
CAAKEGFNKFYF

SEQ ID NO: 518128 - protein, 17 aa, Homo sapiens
  CDR3 for beta chain variable domain of TCR clone 259064 (TRBV20-1, TRBJ2-1)
CGASSSGLAVPYNEQFF

SEQ ID NO: 518129 - protein, 13 aa, Homo sapiens
  CDR3 for alpha chain variable domain of TCR clone 259065 (TRAV39, TRAJ48)
CAAVNFGNEKLTF

SEQ ID NO: 518130 - protein, 12 aa, Homo sapiens
  CDR3 for beta chain variable domain of TCR clone 259065 (TRBV5-5, TRBJ2-5)
CASSYFVETQYF

SEQ ID NO: 518131 - protein, 14 aa, Homo sapiens
  CDR3 for alpha chain variable domain of TCR clone 259066 (TRAV8-3, TRAJ23)
CAVIIYNQGGKLIF

SEQ ID NO: 518132 - protein, 14 aa, Homo sapiens
  CDR3 for beta chain variable domain of TCR clone 259066 (TRBV18, TRBJ2-1)
CASSPPSAYNEQFF

SEQ ID NO: 518133 - protein, 11 aa, Homo sapiens
  CDR3 for alpha chain variable domain of TCR clone 259067 (TRAV12-1, TRAJ30)
CVVNGQDKSIF

SEQ ID NO: 518134 - protein, 14 aa, Homo sapiens
  CDR3 for beta chain variable domain of TCR clone 259067 (TRBV7-2, TRBJ2-7)
CASRSQGAAYEQYF

SEQ ID NO: 518135 - protein, 14 aa, Homo sapiens
  CDR3 for alpha chain variable domain of TCR clone 259068 (TRAV13-1, TRAJ35)
CAASKGGFGNALHC

SEQ ID NO: 518136 - protein, 16 aa, Homo sapiens
  CDR3 for beta chain variable domain of TCR clone 259068 (TRBV2, TRBJ1-4)
CASNLLQGATNEKLFF

SEQ ID NO: 518137 - protein, 11 aa, Homo sapiens
  CDR3 for alpha chain variable domain of TCR clone 259069 (TRAV12-1, TRAJ15)
CVVNAGTALIF

SEQ ID NO: 518138 - protein, 14 aa, Homo sapiens
  CDR3 for beta chain variable domain of TCR clone 259069 (TRBV28, TRBJ1-2)
CASRIQGANYGYTF

SEQ ID NO: 518139 - protein, 12 aa, Homo sapiens
  CDR3 for alpha chain variable domain of TCR clone 259070 (TRAV21, TRAJ8)
CAVNIGFQKLVF

SEQ ID NO: 518140 - protein, 13 aa, Homo sapiens
  CDR3 for beta chain variable domain of TCR clone 259070 (TRBV6-3, TRBJ2-1)
CASSYDNYNEQFF

SEQ ID NO: 518141 - protein, 15 aa, Homo sapiens
  CDR3 for alpha chain variable domain of TCR clone 259071 (TRAV8-3, TRAJ45)
CAVEGSGGGADGLTF

SEQ ID NO: 518142 - protein, 16 aa, Homo sapiens
  CDR3 for beta chain variable domain of TCR clone 259071 (TRBV6-5, TRBJ2-6)
CASSYPLSSGAKVMTF

SEQ ID NO: 518143 - protein, 13 aa, Homo sapiens
  CDR3 for alpha chain variable domain of TCR clone 259072 (TRAV26-2, TRAJ43)
CILIAVNNNEMRF

SEQ ID NO: 518144 - protein, 15 aa, Homo sapiens
  CDR3 for beta chain variable domain of TCR clone 259072 (TRBV7-2, TRBJ2-1)
CASTHGTGIYNEQFF

SEQ ID NO: 518145 - protein, 13 aa, Homo sapiens
  CDR3 for alpha chain variable domain of TCR clone 259073 (TRAV8-1, TRAJ30)
CAVIMNRDDKIIF

SEQ ID NO: 518146 - protein, 17 aa, Homo sapiens
  CDR3 for beta chain variable domain of TCR clone 259073 (TRBV20-1, TRBJ2-1)
CSAPPRLAGTRYNEQFF

SEQ ID NO: 518147 - protein, 15 aa, Homo sapiens
  CDR3 for alpha chain variable domain of TCR clone 259074 (TRAV2, TRAJ15)
CAVEDRGQAGTALIF

SEQ ID NO: 518148 - protein, 14 aa, Homo sapiens
  CDR3 for beta chain variable domain of TCR clone 259074 (TRBV5-1, TRBJ2-5)
CASSTDRGGETQYF

SEQ ID NO: 518149 - protein, 14 aa, Homo sapiens
  CDR3 for alpha chain variable domain of TCR clone 259075 (TRAV23/DV6, TRAJ24)
CAASLSDSWGRLQF

SEQ ID NO: 518150 - protein, 16 aa, Homo sapiens
  CDR3 for beta chain variable domain of TCR clone 259075 (TRBV7-9, TRBJ2-6)
CASSLKGPLRANVLTS

SEQ ID NO: 518151 - protein, 14 aa, Homo sapiens
  CDR3 for alpha chain variable domain of TCR clone 259076 (TRAV4, TRAJ43)
CLVGPMYNNNDMRF

SEQ ID NO: 518152 - protein, 16 aa, Homo sapiens
  CDR3 for beta chain variable domain of TCR clone 259076 (TRBV20-1, TRBJ1-4)
CSAPGQGLLTNEKLFF

SEQ ID NO: 518153 - protein, 13 aa, Homo sapiens
  CDR3 for alpha chain variable domain of TCR clone 259077 (TRAV12-3, TRAJ40)
CAMSARGTYKYIF

SEQ ID NO: 518154 - protein, 15 aa, Homo sapiens
  CDR3 for beta chain variable domain of TCR clone 259077 (TRBV9, TRBJ1-6)
CASSVAGTGDSPLHC

SEQ ID NO: 518155 - protein, 15 aa, Homo sapiens
  CDR3 for alpha chain variable domain of TCR clone 259078 (TRAV3, TRAJ23)
CAVRVIYNQGGKLIF

SEQ ID NO: 518156 - protein, 15 aa, Homo sapiens
  CDR3 for beta chain variable domain of TCR clone 259078 (TRBV20-1, TRBJ2-7)
CSARDRVSGMDEQYF

SEQ ID NO: 518157 - protein, 11 aa, Homo sapiens
  CDR3 for alpha chain variable domain of TCR clone 259079 (TRAV12-3, TRAJ43)
CAMSVSNDMRF

SEQ ID NO: 518158 - protein, 12 aa, Homo sapiens
  CDR3 for beta chain variable domain of TCR clone 259079 (TRBV9, TRBJ2-2)
CASSARTGELFF

SEQ ID NO: 518159 - protein, 14 aa, Homo sapiens
  CDR3 for alpha chain variable domain of TCR clone 259080 (TRAV20, TRAJ22)
CAVALGGSARQLTF

SEQ ID NO: 518160 - protein, 16 aa, Homo sapiens
  CDR3 for beta chain variable domain of TCR clone 259080 (TRBV7-6, TRBJ2-3)
CASSPLAGGSTDTQYF

SEQ ID NO: 518161 - protein, 14 aa, Homo sapiens
  CDR3 for alpha chain variable domain of TCR clone 259081 (TRAV26-1, TRAJ38)
CIADNAGNNRKLIW

SEQ ID NO: 518162 - protein, 15 aa, Homo sapiens
  CDR3 for beta chain variable domain of TCR clone 259081 (TRBV18, TRBJ2-1)
CASAPPSASYNEQFF

SEQ ID NO: 518163 - protein, 13 aa, Homo sapiens
  CDR3 for alpha chain variable domain of TCR clone 259082 (TRAV27, TRAJ27)
CAGGITNAVKSTF

SEQ ID NO: 518164 - protein, 13 aa, Homo sapiens
  CDR3 for beta chain variable domain of TCR clone 259082 (TRBV20-1, TRBJ1-2)
CSASLGVGYGYTF

SEQ ID NO: 518165 - protein, 16 aa, Homo sapiens
  CDR3 for alpha chain variable domain of TCR clone 259083 (TRAV1-2, TRAJ10)
CAVRGVLTGGGNKLTF

SEQ ID NO: 518166 - protein, 14 aa, Homo sapiens
  CDR3 for beta chain variable domain of TCR clone 259083 (TRBV11-2, TRBJ1-2)
CASSSGTANYGYTF

SEQ ID NO: 518167 - protein, 15 aa, Homo sapiens
  CDR3 for alpha chain variable domain of TCR clone 259084 (TRAV13-2, TRAJ45)
CAESDSGGGADGLTF

SEQ ID NO: 518168 - protein, 17 aa, Homo sapiens
  CDR3 for beta chain variable domain of TCR clone 259084 (TRBV11-2, TRBJ2-1)
CASSLYPPGVEYNEQFF

SEQ ID NO: 518169 - protein, 14 aa, Homo sapiens
  CDR3 for alpha chain variable domain of TCR clone 259085 (TRAV35, TRAJ10)
CAGILTGGGHKLTF

SEQ ID NO: 518170 - protein, 16 aa, Homo sapiens
  CDR3 for beta chain variable domain of TCR clone 259085 (TRBV12-5, TRBJ2-5)
CASGPRTSGNQETQYF

SEQ ID NO: 518171 - protein, 12 aa, Homo sapiens
  CDR3 for alpha chain variable domain of TCR clone 259086 (TRAV8-4, TRAJ43)
GAVSVNNNDMRF

SEQ ID NO: 518172 - protein, 13 aa, Homo sapiens
  CDR3 for beta chain variable domain of TCR clone 259086 (TRBV7-9, TRBJ1-2)
CASSLKQNYCYTF

SEQ ID NO: 518173 - protein, 16 aa, Homo sapiens
  CDR3 for alpha chain variable domain of TCR clone 259087 (TRAV1-1, TRAJ45)
CAVRAYSGGGADGLTL

SEQ ID NO: 518174 - protein, 13 aa, Homo sapiens
  CDR3 for beta chain variable domain of TCR clone 259087 (TRBV20-1, TRBJ1-2)
CSARGTADYGYTF

SEQ ID NO: 518175 - protein, 15 aa, Homo sapiens
  CDR3 for alpha chain variable domain of TCR clone 259088 (TRAV3, TRAJ4)
CAVRDGTGGYNKLIF

SEQ ID NO: 518176 - protein, 15 aa, Homo sapiens
  CDR3 for beta chain variable domain of TCR clone 259088 (TRBV20-1, TRBJ1-1)
CSASRGVTGNTEAFF

SEQ ID NO: 518177 - protein, 11 aa, Homo sapiens
  CDR3 for alpha chain variable domain of TCR clone 259089 (TRAV1-2, TRAJ20)
CAVSNDYKLSF

SEQ ID NO: 518178 - protein, 14 aa, Homo sapiens
  CDR3 for beta chain variable domain of TCR clone 259089 (TRBV28, TRBJ1-2)
CASRIQGANYGYTF

SEQ ID NO: 518179 - protein, 15 aa, Homo sapiens
  CDR3 for alpha chain variable domain of TCR clone 259090 (TRAV27, TRAJ24)
CAGGTSADSWGKLQF

SEQ ID NO: 518180 - protein, 18 aa, Homo sapiens
  CDR3 for beta chain variable domain of TCR clone 259090 (TRBV20-1, TRBJ2-6)
CSAETTPTHGSGANVLTF

SEQ ID NO: 518181 - protein, 12 aa, Homo sapiens
  CDR3 for alpha chain variable domain of TCR clone 259091 (TRAV3, TRAJ20)
CAGRDPDYKLSF

SEQ ID NO: 518182 - protein, 13 aa, Homo sapiens
  CDR3 for beta chain variable domain of TCR clone 259091 (TRBV18, TRBJ1-1)
CASSPETKPEAFF

SEQ ID NO: 518183 - protein, 10 aa, Homo sapiens
  CDR3 for alpha chain variable domain of TCR clone 259092 (TRAV21, TRAJ20)
CAVNVGRLQA

SEQ ID NO: 518184 - protein, 15 aa, Homo sapiens
  CDR3 for beta chain variable domain of TCR clone 259092 (TRBV6-1, TRBJ2-5)
CASSEVPLMGETQYF

SEQ ID NO: 518185 - protein, 14 aa, Homo sapiens
  CDR3 for alpha chain variable domain of TCR clone 259093 (TRAV35, TRAJ50)
CAGHRKTSYDKVIF

SEQ ID NO: 518186 - protein, 13 aa, Homo sapiens
  CDR3 for beta chain variable domain of TCR clone 259093 (TRBV7-2, TRBJ2-4)
CASSREHANIQYF

SEQ ID NO: 518187 - protein, 11 aa, Homo sapiens
  CDR3 for alpha chain variable domain of TCR clone 259094 (TRAV13-2, TRAJ20)
CADSNDYKLSF

SEQ ID NO: 518188 - protein, 16 aa, Homo sapiens
  CDR3 for beta chain variable domain of TCR clone 259094 (TRBV7-9, TRBJ2-3)
CASSPWREVGTDTQYC

SEQ ID NO: 518189 - protein, 15 aa, Homo sapiens
  CDR3 for alpha chain variable domain of TCR clone 259095 (TRAV26-1, TRAJ56)
CIVRVDNGAISKLTF

SEQ ID NO: 518190 - protein, 15 aa, Homo sapiens
  CDR3 for beta chain variable domain of TCR clone 259095 (TRBV20-1, TRBJ2-7)
CSARDPTEVGHEQYF

SEQ ID NO: 518191 - protein, 14 aa, Homo sapiens
  CDR3 for alpha chain variable domain of TCR clone 259096 (TRAV17, TRAJ16)
CATADFSDGQKLLF

SEQ ID NO: 518192 - protein, 13 aa, Homo sapiens
  CDR3 for beta chain variable domain of TCR clone 259096 (TRBV11-2, TRBJ2-5)
CASSSTGEETQYF

SEQ ID NO: 518193 - protein, 14 aa, Homo sapiens
  CDR3 for alpha chain variable domain of TCR clone 259097 (TRAV2, TRAJ37)
CAVDFTSNTGKLIF

SEQ ID NO: 518194 - protein, 16 aa, Homo sapiens
  CDR3 for beta chain variable domain of TCR clone 259097 (TRBV12-4, TRBJ2-5)
CASSWRPSGDLETQYF

SEQ ID NO: 518195 - protein, 15 aa, Homo sapiens
  CDR3 for alpha chain variable domain of TCR clone 259098 (TRAV1-2, TRAJ24)
CAVRGVTDSWGKFQF

SEQ ID NO: 518196 - protein, 16 aa, Homo sapiens
  CDR3 for beta chain variable domain of TCR clone 259098 (TRBV20-1, TRBJ2-1)
CSAATQGPVSYNEQFF

SEQ ID NO: 518197 - protein, 12 aa, Homo sapiens
  CDR3 for alpha chain variable domain of TCR clone 259099 (TRAV2, TRAJ31)
CAVEDNNARLMF

SEQ ID NO: 518198 - protein, 17 aa, Homo sapiens
  CDR3 for beta chain variable domain of TCR clone 259099 (TRBV4-2, TRBJ2-5)
CASSQDAAGGPVETQYF

SEQ ID NO: 518199 - protein, 14 aa, Homo sapiens
  CDR3 for alpha chain variable domain of TCR clone 259100 (TRAV1-2, TRAJ8)
CAVREDTGFQKLVF

SEQ ID NO: 518200 - protein, 18 aa, Homo sapiens
  CDR3 for beta chain variable domain of TCR clone 259100 (TRBV20-1, TRBJ2-6)
CSAETTPTPGSGANVLTF

SEQ ID NO: 518201 - protein, 16 aa, Homo sapiens
  CDR3 for alpha chain variable domain of TCR clone 259101 (TRAV26-1, )
CIDIQNPDPAVYQLRD

SEQ ID NO: 518202 - protein, 14 aa, Homo sapiens
  CDR3 for beta chain variable domain of TCR clone 259101 (TRBV6-1, TRBJ1-3)
CASVQGGGGNTIYF

SEQ ID NO: 518203 - protein, 14 aa, Homo sapiens
  CDR3 for alpha chain variable domain of TCR clone 259102 (TRAV12-2, TRAJ40)
CAVKIPSGTYKYIF

SEQ ID NO: 518204 - protein, 13 aa, Homo sapiens
  CDR3 for beta chain variable domain of TCR clone 259102 (TRBV10-3, TRBJ1-1)
CAIIPEGGTEAFF

SEQ ID NO: 518205 - protein, 12 aa, Homo sapiens
  CDR3 for alpha chain variable domain of TCR clone 259103 (TRAV12-3, TRAJ17)
CAMTLTGDKLTF

SEQ ID NO: 518206 - protein, 15 aa, Homo sapiens
  CDR3 for beta chain variable domain of TCR clone 259103 (TRBV20-1, TRBJ2-7)
CSARVRVSGMDEQYF

SEQ ID NO: 518207 - protein, 16 aa, Homo sapiens
  CDR3 for alpha chain variable domain of TCR clone 259104 (TRAV12-3, TRAJ53)
CAMSPGSGGSNYKLTF

SEQ ID NO: 518208 - protein, 16 aa, Homo sapiens
  CDR3 for beta chain variable domain of TCR clone 259104 (TRBV7-2, TRBJ2-5)
CASSSKWLSGQETQYF

SEQ ID NO: 518209 - protein, 10 aa, Homo sapiens
  CDR3 for alpha chain variable domain of TCR clone 259105 (TRAV1-2, TRAJ34)
CAVNTDKLIF

SEQ ID NO: 518210 - protein, 13 aa, Homo sapiens
  CDR3 for beta chain variable domain of TCR clone 259105 (TRBV7-3, TRBJ2-1)
CASSPVVYNEQFF

SEQ ID NO: 518211 - protein, 13 aa, Homo sapiens
  CDR3 for alpha chain variable domain of TCR clone 259106 (TRAV21, TRAJ27)
CAAHPGNAGKSTF

SEQ ID NO: 518212 - protein, 13 aa, Homo sapiens
  CDR3 for beta chain variable domain of TCR clone 259106 (TRBV7-6, TRBJ2-1)
CQQLGGGADEQFF

SEQ ID NO: 518213 - protein, 15 aa, Homo sapiens
  CDR3 for alpha chain variable domain of TCR clone 259107 (TRAV26-1, TRAJ29)
CIVRVEGSGNTPLVF

SEQ ID NO: 518214 - protein, 15 aa, Homo sapiens
  CDR3 for beta chain variable domain of TCR clone 259107 (TRBV5-1, TRBJ2-6)
CASSLDPSGANVLTF

SEQ ID NO: 518215 - protein, 13 aa, Homo sapiens
  CDR3 for alpha chain variable domain of TCR clone 259108 (TRAV2, TRAJ40)
CAVVPSGTYKYIF

SEQ ID NO: 518216 - protein, 15 aa, Homo sapiens
  CDR3 for beta chain variable domain of TCR clone 259108 (TRBV6-3, TRBJ2-7)
CASSSPGTVFYEQYF

SEQ ID NO: 518217 - protein, 16 aa, Homo sapiens
  CDR3 for alpha chain variable domain of TCR clone 259109 (TRAV3, TRAJ37)
CAVRPHGSGNTGKLIF

SEQ ID NO: 518218 - protein, 17 aa, Homo sapiens
  CDR3 for beta chain variable domain of TCR clone 259109 (TRBV20-1, TRBJ2-1)
SSASSSGLAGSYNEQFF

SEQ ID NO: 518219 - protein, 19 aa, Homo sapiens
  CDR3 for alpha chain variable domain of TCR clone 259110 (TRAV1-2, TRAJ26)
CLLPLCCERPDNYGQNFVF

SEQ ID NO: 518220 - protein, 13 aa, Homo sapiens
  CDR3 for beta chain variable domain of TCR clone 259110 (TRBV19, TRBJ1-2)
CASSQGQVYGYAF

SEQ ID NO: 518221 - protein, 16 aa, Homo sapiens
  CDR3 for alpha chain variable domain of TCR clone 259111 (TRAV1-2, TRAJ10)
CAVGGVLTGGGTKLTF

SEQ ID NO: 518222 - protein, 12 aa, Homo sapiens
  CDR3 for beta chain variable domain of TCR clone 259111 (TRBV7-8, TRBJ2-7)
CASSLGDREQYF

SEQ ID NO: 518223 - protein, 14 aa, Homo sapiens
  CDR3 for alpha chain variable domain of TCR clone 259112 (TRAV17, TRAJ35)
CATDRPGFGNVLHC

SEQ ID NO: 518224 - protein, 19 aa, Homo sapiens
  CDR3 for beta chain variable domain of TCR clone 259112 (TRBV11-3, TRBJ2-2)
CASSTRSGAKTTNTGELFF

SEQ ID NO: 518225 - protein, 15 aa, Homo sapiens
  CDR3 for alpha chain variable domain of TCR clone 259113 (TRAV20, TRAJ52)
CAVQAGGTSYGKLTF

SEQ ID NO: 518226 - protein, 16 aa, Homo sapiens
  CDR3 for beta chain variable domain of TCR clone 259113 (TRBV13, TRBJ2-2)
CASSPRTGEHTGELFF

SEQ ID NO: 518227 - protein, 13 aa, Homo sapiens
  CDR3 for alpha chain variable domain of TCR clone 259114 (TRAV17, TRAJ54)
CATSWGGAQKLVF

SEQ ID NO: 518228 - protein, 14 aa, Homo sapiens
  CDR3 for beta chain variable domain of TCR clone 259114 (TRBV7-2, TRBJ2-7)
CASSLYPGRYEQYF

SEQ ID NO: 518229 - protein, 13 aa, Homo sapiens
  CDR3 for alpha chain variable domain of TCR clone 259115 (TRAV17, TRAJ7)
CATVESGNNRLAF

SEQ ID NO: 518230 - protein, 13 aa, Homo sapiens
  CDR3 for beta chain variable domain of TCR clone 259115 (TRBV5-4, TRBJ1-1)
CASSVDLGAEAFF

SEQ ID NO: 518231 - protein, 13 aa, Homo sapiens
  CDR3 for alpha chain variable domain of TCR clone 259116 (TRAV13-2, TRAJ40)
GAENGSGTYKYIF

SEQ ID NO: 518232 - protein, 15 aa, Homo sapiens
  CDR3 for beta chain variable domain of TCR clone 259116 (TRBV10-3, TRBJ1-1)
CAISDRGGMNTEAFF

SEQ ID NO: 518233 - protein, 14 aa, Homo sapiens
  CDR3 for alpha chain variable domain of TCR clone 259117 (TRAV6, TRAJ16)
CALGRFSDGQKLLF

SEQ ID NO: 518234 - protein, 16 aa, Homo sapiens
  CDR3 for beta chain variable domain of TCR clone 259117 (TRBV20-1, TRBJ1-2)
CSASMGQGVANYGYTF

SEQ ID NO: 518235 - protein, 13 aa, Homo sapiens
  CDR3 for alpha chain variable domain of TCR clone 259118 (TRAV3, TRAJ30)
CALRDRGDDKIIF

SEQ ID NO: 518236 - protein, 14 aa, Homo sapiens
  CDR3 for beta chain variable domain of TCR clone 259118 (TRBV5-1, TRBJ1-1)
CASSRTTGDTEAFF

SEQ ID NO: 518237 - protein, 13 aa, Homo sapiens
  CDR3 for alpha chain variable domain of TCR clone 259119 (TRAV20, TRAJ37)
CAGCSSNTGKLIF

SEQ ID NO: 518238 - protein, 18 aa, Homo sapiens
  CDR3 for beta chain variable domain of TCR clone 259119 (TRBV7-9, TRBJ2-7)
CASSLTTSGSRTWYEQYF

SEQ ID NO: 518239 - protein, 16 aa, Homo sapiens
  CDR3 for alpha chain variable domain of TCR clone 259120 (TRAV12-1, TRAJ42)
CVLTPYYGGSQGNLIF

SEQ ID NO: 518240 - protein, 15 aa, Homo sapiens
  CDR3 for beta chain variable domain of TCR clone 259120 (TRBV4-3, TRBJ2-7)
CASSQGGRGIYEQYF

SEQ ID NO: 518241 - protein, 11 aa, Homo sapiens
  CDR3 for alpha chain variable domain of TCR clone 259121 (TRAV27, TRAJ45)
CAGAQEEVLTD

SEQ ID NO: 518242 - protein, 17 aa, Homo sapiens
  CDR3 for beta chain variable domain of TCR clone 259121 (TRBV11-2, TRBJ2-1)
FASSLYPPGVEYNEQFF

SEQ ID NO: 518243 - protein, 13 aa, Homo sapiens
  CDR3 for alpha chain variable domain of TCR clone 259122 (TRAV21, TRAJ20)
CAVGLRVDYKLSS

SEQ ID NO: 518244 - protein, 13 aa, Homo sapiens
  CDR3 for beta chain variable domain of TCR clone 259122 (TRBV6-1, TRBJ1-1)
CASSRQGNTGAFF

SEQ ID NO: 518245 - protein, 21 aa, Homo sapiens
  CDR3 for alpha chain variable domain of TCR clone 259123 (TRAV12-1, TRAJ32)
SSVIQPPISMNYGGATNKLIF

SEQ ID NO: 518246 - protein, 15 aa, Homo sapiens
  CDR3 for beta chain variable domain of TCR clone 259123 (TRBV7-9, TRBJ2-2)
CASGPLDTFPGELFF

SEQ ID NO: 518247 - protein, 15 aa, Homo sapiens
  CDR3 for alpha chain variable domain of TCR clone 259124 (TRAV3, TRAJ5)
GAVRDLDTGRRALTF

SEQ ID NO: 518248 - protein, 15 aa, Homo sapiens
  CDR3 for beta chain variable domain of TCR clone 259124 (TRBV20-1, TRBJ2-1)
CSARSPGGPGNEQFF

SEQ ID NO: 518249 - protein, 15 aa, Homo sapiens
  CDR3 for alpha chain variable domain of TCR clone 259125 (TRAV1-2, TRAJ28)
CAVQYSGAGSYQLTF

SEQ ID NO: 518250 - protein, 13 aa, Homo sapiens
  CDR3 for beta chain variable domain of TCR clone 259125 (TRBV20-1, TRBJ2-7)
CSATHTNGYEQYF

SEQ ID NO: 518251 - protein, 14 aa, Homo sapiens
  CDR3 for alpha chain variable domain of TCR clone 259126 (TRAV17, TRAJ12)
CATDEKDSSYKLIF

SEQ ID NO: 518252 - protein, 16 aa, Homo sapiens
  CDR3 for beta chain variable domain of TCR clone 259126 (TRBV3-1, TRBJ2-5)
CASSSQRGYAPETQYF

SEQ ID NO: 518253 - protein, 12 aa, Homo sapiens
  CDR3 for alpha chain variable domain of TCR clone 259127 (TRAV12-1, TRAJ40)
CVLPSGTYKYIF

SEQ ID NO: 518254 - protein, 15 aa, Homo sapiens
  CDR3 for beta chain variable domain of TCR clone 259127 (TRBV12-4, TRBJ2-1)
CASSPLSGRNNEQFF

SEQ ID NO: 518255 - protein, 14 aa, Homo sapiens
  CDR3 for alpha chain variable domain of TCR clone 259128 (TRAV12-2, TRAJ45)
CALPERGGADGLTF

SEQ ID NO: 518256 - protein, 18 aa, Homo sapiens
  CDR3 for beta chain variable domain of TCR clone 259128 (TRBV12-4, TRBJ2-4)
CASSRTGAVDVAKNIQYF

SEQ ID NO: 518257 - protein, 13 aa, Homo sapiens
  CDR3 for alpha chain variable domain of TCR clone 259129 (TRAV22, TRAJ29)
CAVGGSVNTPLVF

SEQ ID NO: 518258 - protein, 13 aa, Homo sapiens
  CDR3 for beta chain variable domain of TCR clone 259129 (TRBV4-2, TRBJ1-1)
CASSQAGNTEAFF

SEQ ID NO: 518259 - protein, 13 aa, Homo sapiens
  CDR3 for alpha chain variable domain of TCR clone 259130 (TRAV21, TRAJ17)
CAPVKAAGNELTF

SEQ ID NO: 518260 - protein, 11 aa, Homo sapiens
  CDR3 for beta chain variable domain of TCR clone 259130 (TRBV20-1, TRBJ1-2)
CSIWASYGYTF

SEQ ID NO: 518261 - protein, 13 aa, Homo sapiens
  CDR3 for alpha chain variable domain of TCR clone 259131 (TRAV22, TRAJ12)
CAGRMDSSYKLIF

SEQ ID NO: 518262 - protein, 15 aa, Homo sapiens
  CDR3 for beta chain variable domain of TCR clone 259131 (TRBV4-1, TRBJ1-4)
CASSDTGGTNEKLFF

SEQ ID NO: 518263 - protein, 17 aa, Homo sapiens
  CDR3 for alpha chain variable domain of TCR clone 259132 (TRAV26-1, TRAJ58)
CIVRVGAEETSGSRLTF

SEQ ID NO: 518264 - protein, 13 aa, Homo sapiens
  CDR3 for beta chain variable domain of TCR clone 259132 (TRBV7-9, TRBJ1-2)
CASSLEQNYGYTF

SEQ ID NO: 518265 - protein, 15 aa, Homo sapiens
  CDR3 for alpha chain variable domain of TCR clone 259133 (TRAV34, TRAJ38)
CGADFTPGNNRKLIW

SEQ ID NO: 518266 - protein, 15 aa, Homo sapiens
  CDR3 for beta chain variable domain of TCR clone 259133 (TRBV7-9, TRBJ2-3)
CASSVTSGSTDTQYF

SEQ ID NO: 518267 - protein, 14 aa, Homo sapiens
  CDR3 for alpha chain variable domain of TCR clone 259134 (TRAV2, TRAJ37)
CAVDFTSNTGKLIF

SEQ ID NO: 518268 - protein, 14 aa, Homo sapiens
  CDR3 for beta chain variable domain of TCR clone 259134 (TRBV9, TRBJ2-1)
CASSVVAAYNEQFF

SEQ ID NO: 518269 - protein, 14 aa, Homo sapiens
  CDR3 for alpha chain variable domain of TCR clone 259135 (TRAV2, TRAJ9)
CAVEDRSGGLKTIF

SEQ ID NO: 518270 - protein, 17 aa, Homo sapiens
  CDR3 for beta chain variable domain of TCR clone 259135 (TRBV28, TRBJ2-5)
CASSTPEGDALQETQYF

SEQ ID NO: 518271 - protein, 15 aa, Homo sapiens
  CDR3 for alpha chain variable domain of TCR clone 259136 (TRAV8-4, TRAJ47)
CAVSGPEEYGNKLVF

SEQ ID NO: 518272 - protein, 15 aa, Homo sapiens
  CDR3 for beta chain variable domain of TCR clone 259136 (TRBV11-2, TRBJ2-1)
CASSLGPDSYNEQFF

SEQ ID NO: 518273 - protein, 17 aa, Homo sapiens
  CDR3 for alpha chain variable domain of TCR clone 259137 (TRAV12-3, TRAJ6)
CAGSARGGAGGSYIPTF

SEQ ID NO: 518274 - protein, 12 aa, Homo sapiens
  CDR3 for beta chain variable domain of TCR clone 259137 (TRBV12-4, TRBJ2-3)
CASSTLPDTQYF

SEQ ID NO: 518275 - protein, 22 aa, Homo sapiens
  CDR3 for alpha chain variable domain of TCR clone 259138 (TRAV3, TRAJ38)
CAVRDGLNAGNNHIQNPDPAVY

SEQ ID NO: 518276 - protein, 19 aa, Homo sapiens
  CDR3 for beta chain variable domain of TCR clone 259138 (TRBV7-2, TRBJ2-3)
CASSFLSRNWGGGTDTQYF

SEQ ID NO: 518277 - protein, 12 aa, Homo sapiens
  CDR3 for alpha chain variable domain of TCR clone 259139 (TRAV12-3, TRAJ17)
CAMTLTGNKLTF

SEQ ID NO: 518278 - protein, 16 aa, Homo sapiens
  CDR3 for beta chain variable domain of TCR clone 259139 (TRBV15, TRBJ2-1)
CATSRERLAGAYEQFF

SEQ ID NO: 518279 - protein, 16 aa, Homo sapiens
  CDR3 for alpha chain variable domain of TCR clone 259140 (TRAV13-1, TRAJ10)
CAAGYILTGGGNKLTF

SEQ ID NO: 518280 - protein, 15 aa, Homo sapiens
  CDR3 for beta chain variable domain of TCR clone 259140 (TRBV12-4, TRBJ2-7)
CASNQTGAISYEQYF

SEQ ID NO: 518281 - protein, 13 aa, Homo sapiens
  CDR3 for alpha chain variable domain of TCR clone 259141 (TRAV13-2, TRAJ48)
CAEMDFGNEKLTF

SEQ ID NO: 518282 - protein, 14 aa, Homo sapiens
  CDR3 for beta chain variable domain of TCR clone 259141 (TRBV28, TRBJ2-1)
CVSSLVAPYNEQFF

SEQ ID NO: 518283 - protein, 14 aa, Homo sapiens
  CDR3 for alpha chain variable domain of TCR clone 259142 (TRAV17, TRAJ57)
CATDPQGGTEKLVF

SEQ ID NO: 518284 - protein, 18 aa, Homo sapiens
  CDR3 for beta chain variable domain of TCR clone 259142 (TRBV25-1, TRBJ2-1)
CASSESRAGGPGYNEQFF

SEQ ID NO: 518285 - protein, 15 aa, Homo sapiens
  CDR3 for alpha chain variable domain of TCR clone 259143 (TRAV8-4, TRAJ48)
CAVSAASFGNEKLTF

SEQ ID NO: 518286 - protein, 12 aa, Homo sapiens
  CDR3 for beta chain variable domain of TCR clone 259143 (TRBV3-1, TRBJ2-5)
CASSQRGETQYF

SEQ ID NO: 518287 - protein, 14 aa, Homo sapiens
  CDR3 for alpha chain variable domain of TCR clone 259144 (TRAV17, TRAJ12)
CAILPMDSSYKLIF

SEQ ID NO: 518288 - protein, 15 aa, Homo sapiens
  CDR3 for beta chain variable domain of TCR clone 259144 (TRBV7-9, TRBJ2-2)
CASGPLDTFPGELFF

SEQ ID NO: 518289 - protein, 13 aa, Homo sapiens
  CDR3 for alpha chain variable domain of TCR clone 259145 (TRAV12-3, TRAJ7)
CAMSASGSNRLAF

SEQ ID NO: 518290 - protein, 14 aa, Homo sapiens
  CDR3 for beta chain variable domain of TCR clone 259145 (TRBV13, TRBJ2-5)
CASSVGPRGETEYF

SEQ ID NO: 518291 - protein, 13 aa, Homo sapiens
  CDR3 for alpha chain variable domain of TCR clone 259146 (TRAV27, TRAJ29)
CAGAHSGNTPLVF

SEQ ID NO: 518292 - protein, 14 aa, Homo sapiens
  CDR3 for beta chain variable domain of TCR clone 259146 (TRBV7-9, TRBJ2-7)
CASSIGQGAGEQCF

SEQ ID NO: 518293 - protein, 12 aa, Homo sapiens
  CDR3 for alpha chain variable domain of TCR clone 259147 (TRAV17, TRAJ43)
CATDAFPADMRF

SEQ ID NO: 518294 - protein, 14 aa, Homo sapiens
  CDR3 for beta chain variable domain of TCR clone 259147 (TRBV20-1, TRBJ2-3)
EDSSLGGPQRPQYF

SEQ ID NO: 518295 - protein, 15 aa, Homo sapiens
  CDR3 for alpha chain variable domain of TCR clone 259148 (TRAV25, TRAJ53)
CPTSNSGGSNYKLTF

SEQ ID NO: 518296 - protein, 15 aa, Homo sapiens
  CDR3 for beta chain variable domain of TCR clone 259148 (TRBV4-2, TRBJ2-6)
CASSLQGTGANVLTF

SEQ ID NO: 518297 - protein, 12 aa, Homo sapiens
  CDR3 for alpha chain variable domain of TCR clone 259149 (TRAV13-2, TRAJ23)
CADRHRGGKLIF

SEQ ID NO: 518298 - protein, 16 aa, Homo sapiens
  CDR3 for beta chain variable domain of TCR clone 259149 (TRBV19, TRBJ2-1)
CASSRAGPSSYNEQFF

SEQ ID NO: 518299 - protein, 14 aa, Homo sapiens
  CDR3 for alpha chain variable domain of TCR clone 259150 (TRAV12-2, TRAJ40)
CAVKIPSGTYTYIF

SEQ ID NO: 518300 - protein, 14 aa, Homo sapiens
  CDR3 for beta chain variable domain of TCR clone 259150 (TRBV20-1, TRBJ1-1)
CSAQTRIGGTEAFS

SEQ ID NO: 518301 - protein, 11 aa, Homo sapiens
  CDR3 for alpha chain variable domain of TCR clone 259151 (TRAV29/DV5, TRAJ31)
CAASYRDRLMF

SEQ ID NO: 518302 - protein, 12 aa, Homo sapiens
  CDR3 for beta chain variable domain of TCR clone 259151 (TRBV11-2, TRBJ2-2)
CASSLGGGELFF

SEQ ID NO: 518303 - protein, 12 aa, Homo sapiens
  CDR3 for alpha chain variable domain of TCR clone 259152 (TRAV27, TRAJ13)
CAGAGGYQKVTF

SEQ ID NO: 518304 - protein, 16 aa, Homo sapiens
  CDR3 for beta chain variable domain of TCR clone 259152 (TRBV12-4, TRBJ2-2)
CASSSQVGGPGGELFF

SEQ ID NO: 518305 - protein, 13 aa, Homo sapiens
  CDR3 for alpha chain variable domain of TCR clone 259153 (TRAV1-2, TRAJ9)
CAALNTGGFKTIF

SEQ ID NO: 518306 - protein, 15 aa, Homo sapiens
  CDR3 for beta chain variable domain of TCR clone 259153 (TRBV6-3, TRBJ2-7)
CASSSPGTVFYKQYF

SEQ ID NO: 518307 - protein, 11 aa, Homo sapiens
  CDR3 for alpha chain variable domain of TCR clone 259154 (TRAV2, TRAJ13)
CASGGYQKVTF

SEQ ID NO: 518308 - protein, 18 aa, Homo sapiens
  CDR3 for beta chain variable domain of TCR clone 259154 (TRBV13, TRBJ2-6)
CASSPMTSGGSGANVLTF

SEQ ID NO: 518309 - protein, 15 aa, Homo sapiens
  CDR3 for alpha chain variable domain of TCR clone 259155 (TRAV26-1, TRAJ29)
CIVRVEGSGNTPLVF

SEQ ID NO: 518310 - protein, 13 aa, Homo sapiens
  CDR3 for beta chain variable domain of TCR clone 259155 (TRBV29-1, TRBJ1-1)
CSVGDSRNTEAFF

SEQ ID NO: 518311 - protein, 14 aa, Homo sapiens
  CDR3 for alpha chain variable domain of TCR clone 259156 (TRAV8-4, TRAJ17)
GAVSDQAAGNKLTF

SEQ ID NO: 518312 - protein, 15 aa, Homo sapiens
  CDR3 for beta chain variable domain of TCR clone 259156 (TRBV7-2, TRBJ1-2)
CASSLAPDRGLGYTF

SEQ ID NO: 518313 - protein, 12 aa, Homo sapiens
  CDR3 for alpha chain variable domain of TCR clone 259157 (TRAV1-1, TRAJ8)
CAGGTGFQKLVF

SEQ ID NO: 518314 - protein, 15 aa, Homo sapiens
  CDR3 for beta chain variable domain of TCR clone 259157 (TRBV4-2, TRBJ1-1)
CASSQDPDSNTEAFF

SEQ ID NO: 518315 - protein, 17 aa, Homo sapiens
  CDR3 for alpha chain variable domain of TCR clone 259158 (TRAV26-1, TRAJ58)
CIVRVGAGETSGSRLTF

SEQ ID NO: 518316 - protein, 12 aa, Homo sapiens
  CDR3 for beta chain variable domain of TCR clone 259158 (TRBV11-2, TRBJ2-5)
CASSLDTQTQYF

SEQ ID NO: 518317 - protein, 15 aa, Homo sapiens
  CDR3 for alpha chain variable domain of TCR clone 259159 (TRAV26-1, TRAJ29)
CIVRVTNSGNTPLVF

SEQ ID NO: 518318 - protein, 15 aa, Homo sapiens
  CDR3 for beta chain variable domain of TCR clone 259159 (TRBV6-3, TRBJ2-7)
CASSSPGTVFYEQYF

SEQ ID NO: 518319 - protein, 11 aa, Homo sapiens
  CDR3 for alpha chain variable domain of TCR clone 259160 (TRAV1-2, TRAJ20)
CALANDYKLSF

SEQ ID NO: 518320 - protein, 12 aa, Homo sapiens
  CDR3 for beta chain variable domain of TCR clone 259160 (TRBV3-1, TRBJ2-7)
CASSQVRYEQYF

SEQ ID NO: 518321 - protein, 15 aa, Homo sapiens
  CDR3 for alpha chain variable domain of TCR clone 259161 (TRAV25, TRAJ52)
CAGTSGGTSYGKLTF

SEQ ID NO: 518322 - protein, 12 aa, Homo sapiens
  CDR3 for beta chain variable domain of TCR clone 259161 (TRBV5-5, TRBJ2-5)
CASSYFGETQYF

SEQ ID NO: 518323 - protein, 14 aa, Homo sapiens
  CDR3 for alpha chain variable domain of TCR clone 259162 (TRAV20, TRAJ56)
YAVQFGGANSKLTF

SEQ ID NO: 518324 - protein, 14 aa, Homo sapiens
  CDR3 for beta chain variable domain of TCR clone 259162 (TRBV20-1, TRBJ2-7)
CSAKRGRSSYEQYF

SEQ ID NO: 518325 - protein, 12 aa, Homo sapiens
  CDR3 for alpha chain variable domain of TCR clone 259163 (TRAV21, TRAJ11)
CAATSGYSTLTF

SEQ ID NO: 518326 - protein, 15 aa, Homo sapiens
  CDR3 for beta chain variable domain of TCR clone 259163 (TRBV7-8, TRBJ2-7)
CASSLERAGSYEQYF

SEQ ID NO: 518327 - protein, 11 aa, Homo sapiens
  CDR3 for alpha chain variable domain of TCR clone 259164 (TRAV13-1, TRAJ43)
CAASMRNEMRF

SEQ ID NO: 518328 - protein, 15 aa, Homo sapiens
  CDR3 for beta chain variable domain of TCR clone 259164 (TRBV7-2, TRBJ2-2)
CASSPTGANTRELFF

SEQ ID NO: 518329 - protein, 16 aa, Homo sapiens
  CDR3 for alpha chain variable domain of TCR clone 259165 (TRAV3, TRAJ37)
CAVRVRGSGNTGKLIF

SEQ ID NO: 518330 - protein, 17 aa, Homo sapiens
  CDR3 for beta chain variable domain of TCR clone 259165 (TRBV7-8, TRBJ2-6)
CASSAGTGGAGANVLTF

SEQ ID NO: 518331 - protein, 11 aa, Homo sapiens
  CDR3 for alpha chain variable domain of TCR clone 259166 (TRAV1-1, TRAJ23)
CAVRQGGKLIF

SEQ ID NO: 518332 - protein, 16 aa, Homo sapiens
  CDR3 for beta chain variable domain of TCR clone 259166 (TRBV12-4, TRBJ2-1)
CASSAVGQGNGDEQFF

SEQ ID NO: 518333 - protein, 14 aa, Homo sapiens
  CDR3 for alpha chain variable domain of TCR clone 259167 (TRAV26-1, TRAJ21)
CIVRPPYNFNKFYF

SEQ ID NO: 518334 - protein, 14 aa, Homo sapiens
  CDR3 for beta chain variable domain of TCR clone 259167 (TRBV11-2, TRBJ2-5)
CASRPLAGRETQYF

SEQ ID NO: 518335 - protein, 19 aa, Homo sapiens
  CDR3 for alpha chain variable domain of TCR clone 259168 (TRAV1-2, TRAJ26)
CLLPLCCERPDNYGQNFVF

SEQ ID NO: 518336 - protein, 17 aa, Homo sapiens
  CDR3 for beta chain variable domain of TCR clone 259168 (TRBV20-1, TRBJ1-5)
CSASLSPGQGGNQPQHF

SEQ ID NO: 518337 - protein, 13 aa, Homo sapiens
  CDR3 for alpha chain variable domain of TCR clone 259169 (TRAV20, TRAJ37)
CAGCSSNTGKLIF

SEQ ID NO: 518338 - protein, 16 aa, Homo sapiens
  CDR3 for beta chain variable domain of TCR clone 259169 (TRBV4-2, TRBJ2-3)
CASSQSTSGAEDTQYF

SEQ ID NO: 518339 - protein, 17 aa, Homo sapiens
  CDR3 for alpha chain variable domain of TCR clone 259170 (TRAV36/DV7, TRAJ52)
CAVAQRAGSTSYGKLTF

SEQ ID NO: 518340 - protein, 16 aa, Homo sapiens
  CDR3 for beta chain variable domain of TCR clone 259170 (TRBV20-1, TRBJ2-1)
CSARDLKQGMNNEQFF

SEQ ID NO: 518341 - protein, 12 aa, Homo sapiens
  CDR3 for alpha chain variable domain of TCR clone 259171 (TRAV26-2, TRAJ21)
CILKGNFNKFCF

SEQ ID NO: 518342 - protein, 14 aa, Homo sapiens
  CDR3 for beta chain variable domain of TCR clone 259171 (TRBV7-9, TRBJ1-1)
CASTPLQSYTEAFF

SEQ ID NO: 518343 - protein, 16 aa, Homo sapiens
  CDR3 for alpha chain variable domain of TCR clone 259172 (TRAV12-3, TRAJ53)
CAMSPRSGGSNYKLTF

SEQ ID NO: 518344 - protein, 15 aa, Homo sapiens
  CDR3 for beta chain variable domain of TCR clone 259172 (TRBV6-3, TRBJ2-7)
CASSSPGTVFYEQYF

SEQ ID NO: 518345 - protein, 13 aa, Homo sapiens
  CDR3 for alpha chain variable domain of TCR clone 259173 (TRAV13-1, TRAJ5)
CAARVTGRRALTF

SEQ ID NO: 518346 - protein, 15 aa, Homo sapiens
  CDR3 for beta chain variable domain of TCR clone 259173 (TRBV7-9, TRBJ2-7)
CASSSGGGLTYEQYF

SEQ ID NO: 518347 - protein, 16 aa, Homo sapiens
  CDR3 for alpha chain variable domain of TCR clone 259174 (TRAV17, TRAJ52)
CATDGAGGTSYGKLTF

SEQ ID NO: 518348 - protein, 11 aa, Homo sapiens
  CDR3 for beta chain variable domain of TCR clone 259174 (TRBV29-1, TRBJ2-5)
CSEDRTGTQYF

SEQ ID NO: 518349 - protein, 15 aa, Homo sapiens
  CDR3 for alpha chain variable domain of TCR clone 259175 (TRAV3, TRAJ40)
CAVRDVTSGTYKYIF

SEQ ID NO: 518350 - protein, 13 aa, Homo sapiens
  CDR3 for beta chain variable domain of TCR clone 259175 (TRBV7-9, TRBJ1-2)
CASSLKQNYGDAF

SEQ ID NO: 518351 - protein, 15 aa, Homo sapiens
  CDR3 for alpha chain variable domain of TCR clone 259176 (TRAV25, TRAJ52)
CAGTSGGTSYGKLTF

SEQ ID NO: 518352 - protein, 14 aa, Homo sapiens
  CDR3 for beta chain variable domain of TCR clone 259176 (TRBV7-2, TRBJ2-7)
CASRSQGAAYEQYF

SEQ ID NO: 518353 - protein, 15 aa, Homo sapiens
  CDR3 for alpha chain variable domain of TCR clone 259177 (TRAV3, TRAJ45)
CAVRTPWGGADGLTF

SEQ ID NO: 518354 - protein, 17 aa, Homo sapiens
  CDR3 for beta chain variable domain of TCR clone 259177 (TRBV19, TRBJ1-5)
CASSRDRILSRFQPQHF

SEQ ID NO: 518355 - protein, 13 aa, Homo sapiens
  CDR3 for alpha chain variable domain of TCR clone 259178 (TRAV17, TRAJ26)
CATVDNYGQNFVF

SEQ ID NO: 518356 - protein, 14 aa, Homo sapiens
  CDR3 for beta chain variable domain of TCR clone 259178 (TRBV6-1, TRBJ1-3)
CASVPGGGGNTIYF

SEQ ID NO: 518357 - protein, 13 aa, Homo sapiens
  CDR3 for alpha chain variable domain of TCR clone 259179 (TRAV12-1, TRAJ31)
CVVIPNNNARLMF

SEQ ID NO: 518358 - protein, 14 aa, Homo sapiens
  CDR3 for beta chain variable domain of TCR clone 259179 (TRBV4-1, TRBJ2-2)
CASSQAVNTGELFF

SEQ ID NO: 518359 - protein, 13 aa, Homo sapiens
  CDR3 for alpha chain variable domain of TCR clone 259180 (TRAV21, TRAJ27)
CAARPGNAGKSTF

SEQ ID NO: 518360 - protein, 16 aa, Homo sapiens
  CDR3 for beta chain variable domain of TCR clone 259180 (TRBV7-6, TRBJ2-1)
CASSAPGPSSYNEQFF

SEQ ID NO: 518361 - protein, 13 aa, Homo sapiens
  CDR3 for alpha chain variable domain of TCR clone 259181 (TRAV35, TRAJ42)
CAGFPGSQGNLIF

SEQ ID NO: 518362 - protein, 13 aa, Homo sapiens
  CDR3 for beta chain variable domain of TCR clone 259181 (TRBV29-1, TRBJ2-1)
CSVESGRVNEQFF

SEQ ID NO: 518363 - protein, 13 aa, Homo sapiens
  CDR3 for alpha chain variable domain of TCR clone 259182 (TRAV12-3, TRAJ33)
CAMSVNSNYQLIW

SEQ ID NO: 518364 - protein, 13 aa, Homo sapiens
  CDR3 for beta chain variable domain of TCR clone 259182 (TRBV7-2, TRBJ2-2)
CANSVAVTGELFF

SEQ ID NO: 518365 - protein, 15 aa, Homo sapiens
  CDR3 for alpha chain variable domain of TCR clone 259183 (TRAV8-3, TRAJ11)
CAVGLLNSGYSTLTF

SEQ ID NO: 518366 - protein, 23 aa, Homo sapiens
  CDR3 for beta chain variable domain of TCR clone 259183 (TRBV7-9, TRBJ1-2)
EAQLEKSRLLSDRYSSGEDGYTF

SEQ ID NO: 518367 - protein, 12 aa, Homo sapiens
  CDR3 for alpha chain variable domain of TCR clone 259184 (TRAV12-3, TRAJ40)
CAMSSGTYKYIF

SEQ ID NO: 518368 - protein, 20 aa, Homo sapiens
  CDR3 for beta chain variable domain of TCR clone 259184 (TRBV11-2, TRBJ1-6)
CASSLVFATGGSVHPSTLGT

SEQ ID NO: 518369 - protein, 14 aa, Homo sapiens
  CDR3 for alpha chain variable domain of TCR clone 259185 (TRAV12-2, TRAJ10)
CAVTPTGGGNKLTF

SEQ ID NO: 518370 - protein, 17 aa, Homo sapiens
  CDR3 for beta chain variable domain of TCR clone 259185 (TRBV20-1, TRBJ2-1)
CSASSSGLAGSYNEQFF

SEQ ID NO: 518371 - protein, 13 aa, Homo sapiens
  CDR3 for alpha chain variable domain of TCR clone 259186 (TRAV27, TRAJ41)
CAGEGNSGYALNF

SEQ ID NO: 518372 - protein, 15 aa, Homo sapiens
  CDR3 for beta chain variable domain of TCR clone 259186 (TRBV7-3, TRBJ2-7)
CASSVRLAGSYEQYF

SEQ ID NO: 518373 - protein, 15 aa, Homo sapiens
  CDR3 for alpha chain variable domain of TCR clone 259187 (TRAV8-1, TRAJ6)
CAVNGGAGGSYIPTF

SEQ ID NO: 518374 - protein, 14 aa, Homo sapiens
  CDR3 for beta chain variable domain of TCR clone 259187 (TRBV25-1, TRBJ1-6)
CASSLSADISPLHF

SEQ ID NO: 518375 - protein, 12 aa, Homo sapiens
  CDR3 for alpha chain variable domain of TCR clone 259188 (TRAV21, TRAJ23)
RAVPNQGGKLIF

SEQ ID NO: 518376 - protein, 15 aa, Homo sapiens
  CDR3 for beta chain variable domain of TCR clone 259188 (TRBV27, TRBJ2-1)
CASSFGAGTGPEQFF

SEQ ID NO: 518377 - protein, 16 aa, Homo sapiens
  CDR3 for alpha chain variable domain of TCR clone 259189 (TRAV3, TRAJ6)
CAVSRTPSGGSYIPTF

SEQ ID NO: 518378 - protein, 14 aa, Homo sapiens
  CDR3 for beta chain variable domain of TCR clone 259189 (TRBV3-1, TRBJ1-5)
CANSTGDSNQPQHF

SEQ ID NO: 518379 - protein, 15 aa, Homo sapiens
  CDR3 for alpha chain variable domain of TCR clone 259190 (TRAV40, TRAJ45)
CLLGDLGGGADGLTF

SEQ ID NO: 518380 - protein, 13 aa, Homo sapiens
  CDR3 for beta chain variable domain of TCR clone 259190 (TRBV7-9, TRBJ1-2)
CSSSLKQNYGYTF

SEQ ID NO: 518381 - protein, 14 aa, Homo sapiens
  CDR3 for alpha chain variable domain of TCR clone 259191 (TRAV1-2, TRAJ16)
CAVNRFSEGQKLLF

SEQ ID NO: 518382 - protein, 12 aa, Homo sapiens
  CDR3 for beta chain variable domain of TCR clone 259191 (TRBV12-4, TRBJ2-7)
CASSLGGYEQYF

SEQ ID NO: 518383 - protein, 13 aa, Homo sapiens
  CDR3 for alpha chain variable domain of TCR clone 259192 (TRAV12-2, TRAJ20)
CAVNRFDDYKLSF

SEQ ID NO: 518384 - protein, 16 aa, Homo sapiens
  CDR3 for beta chain variable domain of TCR clone 259192 (TRBV7-3, TRBJ2-1)
CASSLEGYRSYNEQFF

SEQ ID NO: 518385 - protein, 15 aa, Homo sapiens
  CDR3 for alpha chain variable domain of TCR clone 259193 (TRAV8-3, TRAJ45)
CASLYSGGGADGLAF

SEQ ID NO: 518386 - protein, 13 aa, Homo sapiens
  CDR3 for beta chain variable domain of TCR clone 259193 (TRBV10-3, TRBJ2-7)
CASKLAVNYEQYF

SEQ ID NO: 518387 - protein, 11 aa, Homo sapiens
  CDR3 for alpha chain variable domain of TCR clone 259194 (TRAV3, TRAJ21)
CAVGNFNKFYF

SEQ ID NO: 518388 - protein, 16 aa, Homo sapiens
  CDR3 for beta chain variable domain of TCR clone 259194 (TRBV19, TRBJ2-1)
CAISKAGPGSYNEQFF

SEQ ID NO: 518389 - protein, 23 aa, Homo sapiens
  CDR3 for alpha chain variable domain of TCR clone 259195 (TRAV26-1, TRAJ38)
CIVRPLNAGNNHIQNPDRAVYQL

SEQ ID NO: 518390 - protein, 13 aa, Homo sapiens
  CDR3 for beta chain variable domain of TCR clone 259195 (TRBV18, TRBJ1-1)
CASSPNGDTEAFF

SEQ ID NO: 518391 - protein, 12 aa, Homo sapiens
  CDR3 for alpha chain variable domain of TCR clone 259196 (TRAV13-1, TRAJ21)
CAAKEGFNKFYF

SEQ ID NO: 518392 - protein, 17 aa, Homo sapiens
  CDR3 for beta chain variable domain of TCR clone 259196 (TRBV7-3, TRBJ2-2)
CASSLSGTSGGTGELFF

SEQ ID NO: 518393 - protein, 17 aa, Homo sapiens
  CDR3 for alpha chain variable domain of TCR clone 259197 (TRAV3, TRAJ42)
CAVRDRDYGGSQGNLIF

SEQ ID NO: 518394 - protein, 17 aa, Homo sapiens
  CDR3 for beta chain variable domain of TCR clone 259197 (TRBV20-1, TRBJ2-1)
CSARDPLAGVWDNEQLF

SEQ ID NO: 518395 - protein, 14 aa, Homo sapiens
  CDR3 for alpha chain variable domain of TCR clone 259198 (TRAV1-1, TRAJ27)
CAVIYNTNAGKSTF

SEQ ID NO: 518396 - protein, 14 aa, Homo sapiens
  CDR3 for beta chain variable domain of TCR clone 259198 (TRBV7-2, TRBJ1-2)
CASSSGQAGDGYTF

SEQ ID NO: 518397 - protein, 14 aa, Homo sapiens
  CDR3 for alpha chain variable domain of TCR clone 259199 (TRAV12-3, TRAJ22)
CAMSLFGSARQLTF

SEQ ID NO: 518398 - protein, 14 aa, Homo sapiens
  CDR3 for beta chain variable domain of TCR clone 259199 (TRBV4-3, TRBJ1-4)
CASSPLQRNEKLFF

SEQ ID NO: 518399 - protein, 11 aa, Homo sapiens
  CDR3 for alpha chain variable domain of TCR clone 259200 (TRAV2, TRAJ13)
CASGGYQKVTF

SEQ ID NO: 518400 - protein, 14 aa, Homo sapiens
  CDR3 for beta chain variable domain of TCR clone 259200 (TRBV7-3, TRBJ2-7)
CASSYDQDYYEHYF

SEQ ID NO: 518401 - protein, 16 aa, Homo sapiens
  CDR3 for alpha chain variable domain of TCR clone 259201 (TRAV12-1, TRAJ48)
CVVNMVSNFGNEKLTF

SEQ ID NO: 518402 - protein, 12 aa, Homo sapiens
  CDR3 for beta chain variable domain of TCR clone 259201 (TRBV24-1, TRBJ2-2)
CATSDPRLTGLQ

SEQ ID NO: 518403 - protein, 18 aa, Homo sapiens
  CDR3 for alpha chain variable domain of TCR clone 259202 (TRAV13-1, TRAJ52)
CAAKNPNAGGTSYGKLTF

SEQ ID NO: 518404 - protein, 12 aa, Homo sapiens
  CDR3 for beta chain variable domain of TCR clone 259202 (TRBV28, TRBJ2-6)
CAIQAGANVLTF

SEQ ID NO: 518405 - protein, 12 aa, Homo sapiens
  CDR3 for alpha chain variable domain of TCR clone 259203 (TRAV12-1, TRAJ23)
CVGNIPGGKLIF

SEQ ID NO: 518406 - protein, 15 aa, Homo sapiens
  CDR3 for beta chain variable domain of TCR clone 259203 (TRBV6-3, TRBJ2-7)
CASSSPGTVFYEQYF

SEQ ID NO: 518407 - protein, 13 aa, Homo sapiens
  CDR3 for alpha chain variable domain of TCR clone 259204 (TRAV35, TRAJ40)
CAGQLSGTYNYIF

SEQ ID NO: 518408 - protein, 14 aa, Homo sapiens
  CDR3 for beta chain variable domain of TCR clone 259204 (TRBV3-1, TRBJ2-5)
CASSLQLAGETQYF

SEQ ID NO: 518409 - protein, 12 aa, Homo sapiens
  CDR3 for alpha chain variable domain of TCR clone 259205 (TRAV12-3, TRAJ17)
CAMTLTGNKLTF

SEQ ID NO: 518410 - protein, 16 aa, Homo sapiens
  CDR3 for beta chain variable domain of TCR clone 259205 (TRBV12-5, TRBJ2-5)
CAGGPRTSGNQETQYF

SEQ ID NO: 518411 - protein, 15 aa, Homo sapiens
  CDR3 for alpha chain variable domain of TCR clone 259206 (TRAV23/DV6, TRAJ30)
CAASSQESRDDTIIF

SEQ ID NO: 518412 - protein, 17 aa, Homo sapiens
  CDR3 for beta chain variable domain of TCR clone 259206 (TRBV4-3, TRBJ2-1)
CASSQFSSGRAWVSSSS

SEQ ID NO: 518413 - protein, 18 aa, Homo sapiens
  CDR3 for alpha chain variable domain of TCR clone 259207 (TRAV26-1, TRAJ23)
CIVRVGLEVCNQGGKLIF

SEQ ID NO: 518414 - protein, 16 aa, Homo sapiens
  CDR3 for beta chain variable domain of TCR clone 259207 (TRBV12-4, TRBJ2-5)
CASSCFVRGRQDTQYF

SEQ ID NO: 518415 - protein, 13 aa, Homo sapiens
  CDR3 for alpha chain variable domain of TCR clone 259208 (TRAV12-3, TRAJ13)
CAMTSGGYQKVTF

SEQ ID NO: 518416 - protein, 13 aa, Homo sapiens
  CDR3 for beta chain variable domain of TCR clone 259208 (TRBV7-9, TRBJ1-2)
CASSLKQIYGYTF

SEQ ID NO: 518417 - protein, 13 aa, Homo sapiens
  CDR3 for alpha chain variable domain of TCR clone 259209 (TRAV16, TRAJ27)
CALRRTNEGKSTF

SEQ ID NO: 518418 - protein, 15 aa, Homo sapiens
  CDR3 for beta chain variable domain of TCR clone 259209 (TRBV18, TRBJ2-1)
CASSPPSASYNEQFF

SEQ ID NO: 518419 - protein, 16 aa, Homo sapiens
  CDR3 for alpha chain variable domain of TCR clone 259210 (TRAV17, TRAJ28)
CATAPASGAGSYQLTF

SEQ ID NO: 518420 - protein, 11 aa, Homo sapiens
  CDR3 for beta chain variable domain of TCR clone 259210 (TRBV7-9, TRBJ2-5)
CASSLGETQYF

SEQ ID NO: 518421 - protein, 12 aa, Homo sapiens
  CDR3 for alpha chain variable domain of TCR clone 259211 (TRAV8-3, TRAJ20)
CAVGANDYKLSF

SEQ ID NO: 518422 - protein, 14 aa, Homo sapiens
  CDR3 for beta chain variable domain of TCR clone 259211 (TRBV4-1, TRBJ2-7)
CASSQDREHVEQYF

SEQ ID NO: 518423 - protein, 16 aa, Homo sapiens
  CDR3 for alpha chain variable domain of TCR clone 259212 (TRAV1-2, TRAJ10)
CAVRGVLTGGGNKLTF

SEQ ID NO: 518424 - protein, 13 aa, Homo sapiens
  CDR3 for beta chain variable domain of TCR clone 259212 (TRBV7-9, TRBJ2-5)
CASLPSGRETQYF

SEQ ID NO: 518425 - protein, 14 aa, Homo sapiens
  CDR3 for alpha chain variable domain of TCR clone 259213 (TRAV8-6, TRAJ12)
CAVKAAGSSYRLIF

SEQ ID NO: 518426 - protein, 15 aa, Homo sapiens
  CDR3 for beta chain variable domain of TCR clone 259213 (TRBV5-1, TRBJ2-5)
CASSLGLAEQETQYF

SEQ ID NO: 518427 - protein, 13 aa, Homo sapiens
  CDR3 for alpha chain variable domain of TCR clone 259214 (TRAV21, TRAJ15)
CAVRNQAGTALIF

SEQ ID NO: 518428 - protein, 16 aa, Homo sapiens
  CDR3 for beta chain variable domain of TCR clone 259214 (TRBV20-1, TRBJ2-5)
CSPGGTSGGYMETQYF

SEQ ID NO: 518429 - protein, 16 aa, Homo sapiens
  CDR3 for alpha chain variable domain of TCR clone 259215 (TRAV3, TRAJ10)
CAVRDMNAGGGNKLTF

SEQ ID NO: 518430 - protein, 16 aa, Homo sapiens
  CDR3 for beta chain variable domain of TCR clone 259215 (TRBV6-3, TRBJ1-2)
CASSYSRRASNYGYAL

SEQ ID NO: 518431 - protein, 14 aa, Homo sapiens
  CDR3 for alpha chain variable domain of TCR clone 259216 (TRAV12-3, TRAJ9)
CAMSPKTGGFKTIF

SEQ ID NO: 518432 - protein, 15 aa, Homo sapiens
  CDR3 for beta chain variable domain of TCR clone 259216 (TRBV7-6, TRBJ2-1)
CASSPGQGPYNEQFF

SEQ ID NO: 518433 - protein, 12 aa, Homo sapiens
  CDR3 for alpha chain variable domain of TCR clone 259217 (TRAV13-2, TRAJ23)
CAERHRGGKLIF

SEQ ID NO: 518434 - protein, 15 aa, Homo sapiens
  CDR3 for beta chain variable domain of TCR clone 259217 (TRBV15, TRBJ2-1)
CATSRPGHGLHEQFF

SEQ ID NO: 518435 - protein, 13 aa, Homo sapiens
  CDR3 for alpha chain variable domain of TCR clone 259218 (TRAV14/DV4, TRAJ20)
CAIRESNDYKLSF

SEQ ID NO: 518436 - protein, 15 aa, Homo sapiens
  CDR3 for beta chain variable domain of TCR clone 259218 (TRBV7-9, TRBJ1-1)
CASSRPGTANTEAFF

SEQ ID NO: 518437 - protein, 15 aa, Homo sapiens
  CDR3 for alpha chain variable domain of TCR clone 259219 (TRAV12-1, TRAJ9)
CVVSFGDTGGFKTIF

SEQ ID NO: 518438 - protein, 13 aa, Homo sapiens
  CDR3 for beta chain variable domain of TCR clone 259219 (TRBV7-9, TRBJ1-2)
CASSSKQNYGYTF

SEQ ID NO: 518439 - protein, 13 aa, Homo sapiens
  CDR3 for alpha chain variable domain of TCR clone 259220 (TRAV2, TRAJ40)
CAVVTSGTYKYIF

SEQ ID NO: 518440 - protein, 16 aa, Homo sapiens
  CDR3 for beta chain variable domain of TCR clone 259220 (TRBV7-9, TRBJ1-3)
CASSLGAGSSGNTIQF

SEQ ID NO: 518441 - protein, 15 aa, Homo sapiens
  CDR3 for alpha chain variable domain of TCR clone 259221 (TRAV27, TRAJ38)
CAGRFDAGNNRKLIL

SEQ ID NO: 518442 - protein, 13 aa, Homo sapiens
  CDR3 for beta chain variable domain of TCR clone 259221 (TRBV20-1, TRBJ2-1)
TSGALPPGNEQFF

SEQ ID NO: 518443 - protein, 15 aa, Homo sapiens
  CDR3 for alpha chain variable domain of TCR clone 259222 (TRAV23/DV6, TRAJ18)
FAARYRGSTLGRLYF

SEQ ID NO: 518444 - protein, 16 aa, Homo sapiens
  CDR3 for beta chain variable domain of TCR clone 259222 (TRBV20-1, TRBJ1-2)
CSASMGQGVANYGYTF

SEQ ID NO: 518445 - protein, 14 aa, Homo sapiens
  CDR3 for alpha chain variable domain of TCR clone 259223 (TRAV8-3, TRAJ23)
CAVIIYNQGGMLIF

SEQ ID NO: 518446 - protein, 15 aa, Homo sapiens
  CDR3 for beta chain variable domain of TCR clone 259223 (TRBV18, TRBJ2-1)
CASSPPSASYNEQFF

SEQ ID NO: 518447 - protein, 12 aa, Homo sapiens
  CDR3 for alpha chain variable domain of TCR clone 259224 (TRAV36/DV7, TRAJ31)
CAVANNNARLMF

SEQ ID NO: 518448 - protein, 14 aa, Homo sapiens
  CDR3 for beta chain variable domain of TCR clone 259224 (TRBV7-2, TRBJ2-7)
CASSPKTSFYEQYF

SEQ ID NO: 518449 - protein, 14 aa, Homo sapiens
  CDR3 for alpha chain variable domain of TCR clone 259225 (TRAV17, TRAJ39)
CATDPVRAGNMLTF

SEQ ID NO: 518450 - protein, 15 aa, Homo sapiens
  CDR3 for beta chain variable domain of TCR clone 259225 (TRBV13, TRBJ1-5)
CASSFGQGGVQHQHL

SEQ ID NO: 518451 - protein, 15 aa, Homo sapiens
  CDR3 for alpha chain variable domain of TCR clone 259226 (TRAV3, TRAJ17)
CAVRDTGAAGNKLTF

SEQ ID NO: 518452 - protein, 12 aa, Homo sapiens
  CDR3 for beta chain variable domain of TCR clone 259226 (TRBV11-2, TRBJ2-5)
CASSLGQETQYF

SEQ ID NO: 518453 - protein, 18 aa, Homo sapiens
  CDR3 for alpha chain variable domain of TCR clone 259227 (TRAV1-2, TRAJ10)
CAVRALTPVTGGGNKLTF

SEQ ID NO: 518454 - protein, 14 aa, Homo sapiens
  CDR3 for beta chain variable domain of TCR clone 259227 (TRBV4-1, TRBJ1-1)
CASSQQGNGNDAVF

SEQ ID NO: 518455 - protein, 16 aa, Homo sapiens
  CDR3 for alpha chain variable domain of TCR clone 259228 (TRAV3, TRAJ21)
CAVRDAYNFNKFTLDL

SEQ ID NO: 518456 - protein, 12 aa, Homo sapiens
  CDR3 for beta chain variable domain of TCR clone 259228 (TRBV5-5, TRBJ2-5)
CASSYFGETQYF

SEQ ID NO: 518457 - protein, 14 aa, Homo sapiens
  CDR3 for alpha chain variable domain of TCR clone 259229 (TRAV12-2, TRAJ40)
CAVKIPSGTYKYIF

SEQ ID NO: 518458 - protein, 17 aa, Homo sapiens
  CDR3 for beta chain variable domain of TCR clone 259229 (TRBV20-1, TRBJ2-1)
CSAFSGTSGSLYYEQFF

SEQ ID NO: 518459 - protein, 15 aa, Homo sapiens
  CDR3 for alpha chain variable domain of TCR clone 259230 (TRAV26-2, TRAJ57)
CILRDIRGGTEKLVF

SEQ ID NO: 518460 - protein, 15 aa, Homo sapiens
  CDR3 for beta chain variable domain of TCR clone 259230 (TRBV2, TRBJ2-1)
CASDIGLAGEGEQFF

SEQ ID NO: 518461 - protein, 14 aa, Homo sapiens
  CDR3 for alpha chain variable domain of TCR clone 259231 (TRAV1-2, TRAJ16)
CAVNRFSDGQKLLF

SEQ ID NO: 518462 - protein, 13 aa, Homo sapiens
  CDR3 for beta chain variable domain of TCR clone 259231 (TRBV9, TRBJ2-7)
CASSASDSYEQYF

SEQ ID NO: 518463 - protein, 13 aa, Homo sapiens
  CDR3 for alpha chain variable domain of TCR clone 259232 (TRAV13-1, TRAJ20)
CAARVSNDSKLSF

SEQ ID NO: 518464 - protein, 16 aa, Homo sapiens
  CDR3 for beta chain variable domain of TCR clone 259232 (TRBV11-1, TRBJ1-1)
CATNPRDRAFNTEAFF

SEQ ID NO: 518465 - protein, 15 aa, Homo sapiens
  CDR3 for alpha chain variable domain of TCR clone 259233 (TRAV12-3, TRAJ6)
CAMSATTGGSYIPTL

SEQ ID NO: 518466 - protein, 13 aa, Homo sapiens
  CDR3 for beta chain variable domain of TCR clone 259233 (TRBV13, TRBJ2-5)
CASSPEVGETQYF

SEQ ID NO: 518467 - protein, 17 aa, Homo sapiens
  CDR3 for alpha chain variable domain of TCR clone 259234 (TRAV14/DV4, TRAJ4)
CAMREASGRGGYNKRIF

SEQ ID NO: 518468 - protein, 14 aa, Homo sapiens
  CDR3 for beta chain variable domain of TCR clone 259234 (TRBV19, TRBJ2-7)
CASSMGQGAIEQYF

SEQ ID NO: 518469 - protein, 13 aa, Homo sapiens
  CDR3 for alpha chain variable domain of TCR clone 259235 (TRAV13-2, TRAJ13)
CAERPGGYQKVTV

SEQ ID NO: 518470 - protein, 15 aa, Homo sapiens
  CDR3 for beta chain variable domain of TCR clone 259235 (TRBV11-3, TRBJ2-7)
CASSPGPASSYEQYF

SEQ ID NO: 518471 - protein, 20 aa, Homo sapiens
  CDR3 for alpha chain variable domain of TCR clone 259236 (TRAV12-1, TRAJ42)
SSVIQPPTSVKGGSQGNLIF

SEQ ID NO: 518472 - protein, 13 aa, Homo sapiens
  CDR3 for beta chain variable domain of TCR clone 259236 (TRBV12-5, TRBJ2-3)
CASGDRQSDTQYF

SEQ ID NO: 518473 - protein, 11 aa, Homo sapiens
  CDR3 for alpha chain variable domain of TCR clone 259237 (TRAV12-3, TRAJ43)
CAMSVSNDMRF

SEQ ID NO: 518474 - protein, 13 aa, Homo sapiens
  CDR3 for beta chain variable domain of TCR clone 259237 (TRBV20-1, TRBJ1-1)
CSAPLGGGTQPFF

SEQ ID NO: 518475 - protein, 14 aa, Homo sapiens
  CDR3 for alpha chain variable domain of TCR clone 259238 (TRAV12-1, TRAJ17)
CVVNYKTAGNKLTF

SEQ ID NO: 518476 - protein, 14 aa, Homo sapiens
  CDR3 for beta chain variable domain of TCR clone 259238 (TRBV7-8, TRBJ2-3)
CASSLEAGTDTQYF

SEQ ID NO: 518477 - protein, 14 aa, Homo sapiens
  CDR3 for alpha chain variable domain of TCR clone 259239 (TRAV12-1, TRAJ9)
CVVTGDTGGFKTIF

SEQ ID NO: 518478 - protein, 13 aa, Homo sapiens
  CDR3 for beta chain variable domain of TCR clone 259239 (TRBV4-1, TRBJ2-1)
CASSQAGGDEQFF

SEQ ID NO: 518479 - protein, 13 aa, Homo sapiens
  CDR3 for alpha chain variable domain of TCR clone 259240 (TRAV21, TRAJ49)
CAVRQSTGNQFYV

SEQ ID NO: 518480 - protein, 13 aa, Homo sapiens
  CDR3 for beta chain variable domain of TCR clone 259240 (TRBV6-6, TRBJ1-5)
CASRAYQDQPQHF

SEQ ID NO: 518481 - protein, 15 aa, Homo sapiens
  CDR3 for alpha chain variable domain of TCR clone 259241 (TRAV12-1, TRAJ23)
CGERSRCNQGGKLIF

SEQ ID NO: 518482 - protein, 14 aa, Homo sapiens
  CDR3 for beta chain variable domain of TCR clone 259241 (TRBV12-5, TRBJ2-5)
CASGSRTHQETQYF

SEQ ID NO: 518483 - protein, 18 aa, Homo sapiens
  CDR3 for alpha chain variable domain of TCR clone 259242 (TRAV13-1, TRAJ52)
CAAKNPNAGGTSYGKMTF

SEQ ID NO: 518484 - protein, 18 aa, Homo sapiens
  CDR3 for beta chain variable domain of TCR clone 259242 (TRBV4-1, TRBJ1-4)
CASSPRTGGAWTNEKLFF

SEQ ID NO: 518485 - protein, 14 aa, Homo sapiens
  CDR3 for alpha chain variable domain of TCR clone 259243 (TRAV1-2, TRAJ8)
CAVRDPPGFQKLLF

SEQ ID NO: 518486 - protein, 14 aa, Homo sapiens
  CDR3 for beta chain variable domain of TCR clone 259243 (TRBV5-1, TRBJ2-7)
CASSRGESLYEQYF

SEQ ID NO: 518487 - protein, 14 aa, Homo sapiens
  CDR3 for alpha chain variable domain of TCR clone 259244 (TRAV12-2, TRAJ24)
CAVTPADSWGKLQF

SEQ ID NO: 518488 - protein, 13 aa, Homo sapiens
  CDR3 for beta chain variable domain of TCR clone 259244 (TRBV7-8, TRBJ1-1)
CASSSDANTEAFF

SEQ ID NO: 518489 - protein, 17 aa, Homo sapiens
  CDR3 for alpha chain variable domain of TCR clone 259245 (TRAV13-1, TRAJ52)
CAASSGAGGNSYGKLTF

SEQ ID NO: 518490 - protein, 17 aa, Homo sapiens
  CDR3 for beta chain variable domain of TCR clone 259245 (TRBV11-2, TRBJ2-1)
CASSLYPPGVEYNEQFF

SEQ ID NO: 518491 - protein, 14 aa, Homo sapiens
  CDR3 for alpha chain variable domain of TCR clone 259246 (TRAV8-3, TRAJ31)
CAVGRGLNNARLMF

SEQ ID NO: 518492 - protein, 15 aa, Homo sapiens
  CDR3 for beta chain variable domain of TCR clone 259246 (TRBV7-2, TRBJ2-2)
CASSLAGGITGELFF

SEQ ID NO: 518493 - protein, 13 aa, Homo sapiens
  CDR3 for alpha chain variable domain of TCR clone 259247 (TRAV36/DV7, TRAJ54)
CAVDIQGAQKLAF

SEQ ID NO: 518494 - protein, 14 aa, Homo sapiens
  CDR3 for beta chain variable domain of TCR clone 259247 (TRBV19, TRBJ2-7)
CASNFRDTFTGMYF

SEQ ID NO: 518495 - protein, 13 aa, Homo sapiens
  CDR3 for alpha chain variable domain of TCR clone 259248 (TRAV1-2, TRAJ9)
CAALNTGGFKTIF

SEQ ID NO: 518496 - protein, 14 aa, Homo sapiens
  CDR3 for beta chain variable domain of TCR clone 259248 (TRBV7-9, TRBJ1-1)
CASTPLQSYTEAFF

SEQ ID NO: 518497 - protein, 14 aa, Homo sapiens
  CDR3 for alpha chain variable domain of TCR clone 259249 (TRAV27, TRAJ22)
CAGLPSGSARQLTF

SEQ ID NO: 518498 - protein, 15 aa, Homo sapiens
  CDR3 for beta chain variable domain of TCR clone 259249 (TRBV18, TRBJ2-1)
CASSPPSASYNEQFF

SEQ ID NO: 518499 - protein, 14 aa, Homo sapiens
  CDR3 for alpha chain variable domain of TCR clone 259250 (TRAV1-2, TRAJ16)
CAVNRFSDGQKLLF

SEQ ID NO: 518500 - protein, 14 aa, Homo sapiens
  CDR3 for beta chain variable domain of TCR clone 259250 (TRBV4-1, TRBJ2-2)
CASSQAVNTGELFV

SEQ ID NO: 518501 - protein, 14 aa, Homo sapiens
  CDR3 for alpha chain variable domain of TCR clone 259251 (TRAV17, TRAJ54)
CATDANQGAQKLVF

SEQ ID NO: 518502 - protein, 13 aa, Homo sapiens
  CDR3 for beta chain variable domain of TCR clone 259251 (TRBV5-4, TRBJ1-1)
CASSVDLGTEAFF

SEQ ID NO: 518503 - protein, 12 aa, Homo sapiens
  CDR3 for alpha chain variable domain of TCR clone 259252 (TRAV8-3, TRAJ15)
CAGNQAGTALIF

SEQ ID NO: 518504 - protein, 12 aa, Homo sapiens
  CDR3 for beta chain variable domain of TCR clone 259252 (TRBV11-2, TRBJ2-5)
CASSLVGETQYF

SEQ ID NO: 518505 - protein, 15 aa, Homo sapiens
  CDR3 for alpha chain variable domain of TCR clone 259253 (TRAV26-1, TRAJ56)
CIVRVATGANSKLTF

SEQ ID NO: 518506 - protein, 15 aa, Homo sapiens
  CDR3 for beta chain variable domain of TCR clone 259253 (TRBV27, TRBJ2-7)
CASSLQREGQREQYF

SEQ ID NO: 518507 - protein, 13 aa, Homo sapiens
  CDR3 for alpha chain variable domain of TCR clone 259254 (TRAV17, TRAJ31)
CATDENNNARLMF

SEQ ID NO: 518508 - protein, 14 aa, Homo sapiens
  CDR3 for beta chain variable domain of TCR clone 259254 (TRBV11-2, TRBJ2-7)
CASSPKTSFYEQYF

SEQ ID NO: 518509 - protein, 13 aa, Homo sapiens
  CDR3 for alpha chain variable domain of TCR clone 259255 (TRAV1-1, TRAJ31)
CSSYLNNNARLMF

SEQ ID NO: 518510 - protein, 13 aa, Homo sapiens
  CDR3 for beta chain variable domain of TCR clone 259255 (TRBV15, TRBJ1-6)
CATSGGLNSPLHF

SEQ ID NO: 518511 - protein, 13 aa, Homo sapiens
  CDR3 for alpha chain variable domain of TCR clone 259256 (TRAV1-1, TRAJ10)
CAVNSGCYQKVTF

SEQ ID NO: 518512 - protein, 12 aa, Homo sapiens
  CDR3 for beta chain variable domain of TCR clone 259256 (TRBV28, TRBJ2-1)
CASSVQINEQFF

SEQ ID NO: 518513 - protein, 12 aa, Homo sapiens
  CDR3 for alpha chain variable domain of TCR clone 259257 (TRAV17, TRAJ53)
CAFGGSNYKLTF

SEQ ID NO: 518514 - protein, 18 aa, Homo sapiens
  CDR3 for beta chain variable domain of TCR clone 259257 (TRBV11-2, TRBJ2-4)
CASRQEGRGAWTFSTSAP

SEQ ID NO: 518515 - protein, 16 aa, Homo sapiens
  CDR3 for alpha chain variable domain of TCR clone 259258 (TRAV4, TRAJ22)
CLVGDLYSGSARQLTF

SEQ ID NO: 518516 - protein, 12 aa, Homo sapiens
  CDR3 for beta chain variable domain of TCR clone 259258 (TRBV7-9, TRBJ2-3)
CASSFITDTQYF

SEQ ID NO: 518517 - protein, 11 aa, Homo sapiens
  CDR3 for alpha chain variable domain of TCR clone 259259 (TRAV3, TRAJ32)
CAVREGVMVVL

SEQ ID NO: 518518 - protein, 13 aa, Homo sapiens
  CDR3 for beta chain variable domain of TCR clone 259259 (TRBV2, TRBJ1-1)
CASSEGRNTEAFF

SEQ ID NO: 518519 - protein, 13 aa, Homo sapiens
  CDR3 for alpha chain variable domain of TCR clone 259260 (TRAV12-2, TRAJ50)
CAVIVTSYDKVIF

SEQ ID NO: 518520 - protein, 14 aa, Homo sapiens
  CDR3 for beta chain variable domain of TCR clone 259260 (TRBV9, TRBJ2-7)
CASSVDPRGKEQYF

SEQ ID NO: 518521 - protein, 13 aa, Homo sapiens
  CDR3 for alpha chain variable domain of TCR clone 259261 (TRAV5, TRAJ40)
CAEKETGTYKYIF

SEQ ID NO: 518522 - protein, 13 aa, Homo sapiens
  CDR3 for beta chain variable domain of TCR clone 259261 (TRBV7-3, TRBJ1-1)
CASSQDWGAEAFF

SEQ ID NO: 518523 - protein, 20 aa, Homo sapiens
  CDR3 for alpha chain variable domain of TCR clone 259262 (TRAV12-3, TRAJ41)
SLFIRDSQPSDSATPEAVNF

SEQ ID NO: 518524 - protein, 15 aa, Homo sapiens
  CDR3 for beta chain variable domain of TCR clone 259262 (TRBV5-1, TRBJ2-7)
CASSLDLTSSYEQYF

SEQ ID NO: 518525 - protein, 13 aa, Homo sapiens
  CDR3 for alpha chain variable domain of TCR clone 259263 (TRAV4, TRAJ21)
CLVGPYNFNKFYF

SEQ ID NO: 518526 - protein, 15 aa, Homo sapiens
  CDR3 for beta chain variable domain of TCR clone 259263 (TRBV2, TRBJ2-4)
CASSLNRDSKNIQYF

SEQ ID NO: 518527 - protein, 15 aa, Homo sapiens
  CDR3 for alpha chain variable domain of TCR clone 259264 (TRAV23/DV6, TRAJ13)
CAAWPGGGVYQKVTF

SEQ ID NO: 518528 - protein, 17 aa, Homo sapiens
  CDR3 for beta chain variable domain of TCR clone 259264 (TRBV19, TRBJ2-7)
CASSISFYDSYPYEQYF

SEQ ID NO: 518529 - protein, 11 aa, Homo sapiens
  CDR3 for alpha chain variable domain of TCR clone 259265 (TRAV35, TRAJ30)
CAGPGDDKIIF

SEQ ID NO: 518530 - protein, 18 aa, Homo sapiens
  CDR3 for beta chain variable domain of TCR clone 259265 (TRBV25-1, TRBJ1-2)
CASSGLQNGQGLIFGYTF

SEQ ID NO: 518531 - protein, 15 aa, Homo sapiens
  CDR3 for alpha chain variable domain of TCR clone 259266 (TRAV13-1, TRAJ9)
CAASTLNTGGFKTTF

SEQ ID NO: 518532 - protein, 15 aa, Homo sapiens
  CDR3 for beta chain variable domain of TCR clone 259266 (TRBV9, TRBJ1-6)
CASSVAGTGDSPLHF

SEQ ID NO: 518533 - protein, 10 aa, Homo sapiens
  CDR3 for alpha chain variable domain of TCR clone 259267 (TRAV8-4, TRAJ43)
CAVSADDMRF

SEQ ID NO: 518534 - protein, 15 aa, Homo sapiens
  CDR3 for beta chain variable domain of TCR clone 259267 (TRBV5-1, TRBJ2-3)
CASSVTSGSTDKQYF

SEQ ID NO: 518535 - protein, 16 aa, Homo sapiens
  CDR3 for alpha chain variable domain of TCR clone 259268 (TRAV12-3, TRAJ53)
CAMSPGSGGSYYKLTF

SEQ ID NO: 518536 - protein, 14 aa, Homo sapiens
  CDR3 for beta chain variable domain of TCR clone 259268 (TRBV4-2, TRBJ2-1)
CASGLDRAYNEQFF

SEQ ID NO: 518537 - protein, 13 aa, Homo sapiens
  CDR3 for alpha chain variable domain of TCR clone 259269 (TRAV20, TRAJ9)
CAVPDTGGFKTIF

SEQ ID NO: 518538 - protein, 14 aa, Homo sapiens
  CDR3 for beta chain variable domain of TCR clone 259269 (TRBV7-2, TRBJ2-5)
CASGPRGSSETQYF

SEQ ID NO: 518539 - protein, 13 aa, Homo sapiens
  CDR3 for alpha chain variable domain of TCR clone 259270 (TRAV21, TRAJ27)
CAARPGHAGKATF

SEQ ID NO: 518540 - protein, 14 aa, Homo sapiens
  CDR3 for beta chain variable domain of TCR clone 259270 (TRBV7-6, TRBJ2-3)
CASSLGTVTDTQYF

SEQ ID NO: 518541 - protein, 15 aa, Homo sapiens
  CDR3 for alpha chain variable domain of TCR clone 259271 (TRAV3, TRAJ20)
CAVRDIKLSDYKLSF

SEQ ID NO: 518542 - protein, 16 aa, Homo sapiens
  CDR3 for beta chain variable domain of TCR clone 259271 (TRBV12-5, TRBJ2-5)
CASGPRTSGNQETQYF

SEQ ID NO: 518543 - protein, 12 aa, Homo sapiens
  CDR3 for alpha chain variable domain of TCR clone 259272 (TRAV8-6, TRAJ36)
CAVSDWLGQTTS

SEQ ID NO: 518544 - protein, 14 aa, Homo sapiens
  CDR3 for beta chain variable domain of TCR clone 259272 (TRBV6-1, TRBJ1-3)
CASVQGGGGNTIYF

SEQ ID NO: 518545 - protein, 14 aa, Homo sapiens
  CDR3 for alpha chain variable domain of TCR clone 259273 (TRAV16, TRAJ39)
CALSKNNAGNMLTF

SEQ ID NO: 518546 - protein, 16 aa, Homo sapiens
  CDR3 for beta chain variable domain of TCR clone 259273 (TRBV6-6, TRBJ2-1)
CASSYSFSGSYNEQCF

SEQ ID NO: 518547 - protein, 11 aa, Homo sapiens
  CDR3 for alpha chain variable domain of TCR clone 259274 (TRAV12-2, TRAJ3)
CAVKRASKVIF

SEQ ID NO: 518548 - protein, 14 aa, Homo sapiens
  CDR3 for beta chain variable domain of TCR clone 259274 (TRBV6-5, TRBJ1-1)
CASNRQRSDTEAFF

SEQ ID NO: 518549 - protein, 14 aa, Homo sapiens
  CDR3 for alpha chain variable domain of TCR clone 259275 (TRAV17, TRAJ32)
CATDPGGATNKLIF

SEQ ID NO: 518550 - protein, 14 aa, Homo sapiens
  CDR3 for beta chain variable domain of TCR clone 259275 (TRBV2, TRBJ1-5)
CASSESRSGQPQHF

SEQ ID NO: 518551 - protein, 13 aa, Homo sapiens
  CDR3 for alpha chain variable domain of TCR clone 259276 (TRAV21, TRAJ20)
CAVGLRVDYKLSF

SEQ ID NO: 518552 - protein, 15 aa, Homo sapiens
  CDR3 for beta chain variable domain of TCR clone 259276 (TRBV5-1, TRBJ2-1)
CASSLDAGPSYAQFF

SEQ ID NO: 518553 - protein, 12 aa, Homo sapiens
  CDR3 for alpha chain variable domain of TCR clone 259277 (TRAV13-2, TRAJ8)
CAPWLGFQKLVF

SEQ ID NO: 518554 - protein, 12 aa, Homo sapiens
  CDR3 for beta chain variable domain of TCR clone 259277 (TRBV14, TRBJ2-7)
CASSSLKGEQYF

SEQ ID NO: 518555 - protein, 13 aa, Homo sapiens
  CDR3 for alpha chain variable domain of TCR clone 259278 (TRAV21, TRAJ57)
CAVTQGGSETLVL

SEQ ID NO: 518556 - protein, 16 aa, Homo sapiens
  CDR3 for beta chain variable domain of TCR clone 259278 (TRBV29-1, TRBJ2-7)
CSVEDAEDGTAYEQYF

SEQ ID NO: 518557 - protein, 14 aa, Homo sapiens
  CDR3 for alpha chain variable domain of TCR clone 259279 (TRAV25, TRAJ23)
CAGQGDNQGGNLIF

SEQ ID NO: 518558 - protein, 12 aa, Homo sapiens
  CDR3 for beta chain variable domain of TCR clone 259279 (TRBV7-9, TRBJ1-1)
CASSLVRGEAFF

SEQ ID NO: 518559 - protein, 14 aa, Homo sapiens
  CDR3 for alpha chain variable domain of TCR clone 259280 (TRAV17, TRAJ8)
CATDLNTGFQKLVF

SEQ ID NO: 518560 - protein, 13 aa, Homo sapiens
  CDR3 for beta chain variable domain of TCR clone 259280 (TRBV4-2, TRBJ1-1)
CASSQAGNTEAFF

SEQ ID NO: 518561 - protein, 13 aa, Homo sapiens
  CDR3 for alpha chain variable domain of TCR clone 259281 (TRAV20, TRAJ36)
CAVQGTGANNLFF

SEQ ID NO: 518562 - protein, 15 aa, Homo sapiens
  CDR3 for beta chain variable domain of TCR clone 259281 (TRBV7-9, TRBJ1-5)
CASSQGHQPNQPQHF

SEQ ID NO: 518563 - protein, 12 aa, Homo sapiens
  CDR3 for alpha chain variable domain of TCR clone 259282 (TRAV1-1, TRAJ39)
CAVPVVGNMLTF

SEQ ID NO: 518564 - protein, 17 aa, Homo sapiens
  CDR3 for beta chain variable domain of TCR clone 259282 (TRBV20-1, TRBJ2-2)
CSASGSGQGGLTGELFF

SEQ ID NO: 518565 - protein, 12 aa, Homo sapiens
  CDR3 for alpha chain variable domain of TCR clone 259283 (TRAV13-1, TRAJ21)
CAAKEGFNKFYF

SEQ ID NO: 518566 - protein, 19 aa, Homo sapiens
  CDR3 for beta chain variable domain of TCR clone 259283 (TRBV2, TRBJ2-7)
CASSDDETSGRANDYDQYF

SEQ ID NO: 518567 - protein, 13 aa, Homo sapiens
  CDR3 for alpha chain variable domain of TCR clone 259284 (TRAV12-3, TRAJ9)
CAMRNTGGFKTIF

SEQ ID NO: 518568 - protein, 16 aa, Homo sapiens
  CDR3 for beta chain variable domain of TCR clone 259284 (TRBV11-3, TRBJ2-7)
CASSPHGAGGPYEQYF

SEQ ID NO: 518569 - protein, 23 aa, Homo sapiens
  CDR3 for alpha chain variable domain of TCR clone 259285 (TRAV26-1, TRAJ38)
CIADNAGNNHIQNPDPAVYQLID

SEQ ID NO: 518570 - protein, 16 aa, Homo sapiens
  CDR3 for beta chain variable domain of TCR clone 259285 (TRBV7-9, TRBJ1-2)
CASSLGFSSGEDGYTF

SEQ ID NO: 518571 - protein, 16 aa, Homo sapiens
  CDR3 for alpha chain variable domain of TCR clone 259286 (TRAV12-2, TRAJ56)
CALRRVDTGANSKLTF

SEQ ID NO: 518572 - protein, 11 aa, Homo sapiens
  CDR3 for beta chain variable domain of TCR clone 259286 (TRBV3-1, TRBJ2-7)
CASSQVREQYF

SEQ ID NO: 518573 - protein, 12 aa, Homo sapiens
  CDR3 for alpha chain variable domain of TCR clone 259287 (TRAV12-1, TRAJ29)
CLADSGNTPLVF

SEQ ID NO: 518574 - protein, 12 aa, Homo sapiens
  CDR3 for beta chain variable domain of TCR clone 259287 (TRBV2, TRBJ2-7)
CASKRGSYEQYF

SEQ ID NO: 518575 - protein, 12 aa, Homo sapiens
  CDR3 for alpha chain variable domain of TCR clone 259288 (TRAV12-1, TRAJ40)
CVFYSGTYKYIF

SEQ ID NO: 518576 - protein, 13 aa, Homo sapiens
  CDR3 for beta chain variable domain of TCR clone 259288 (TRBV20-1, TRBJ2-5)
CSAREAFQETQYF

SEQ ID NO: 518577 - protein, 13 aa, Homo sapiens
  CDR3 for alpha chain variable domain of TCR clone 259289 (TRAV1-2, TRAJ9)
CAALNTVGFKTIF

SEQ ID NO: 518578 - protein, 12 aa, Homo sapiens
  CDR3 for beta chain variable domain of TCR clone 259289 (TRBV7-9, TRBJ2-7)
CASSLEGYEQYF

SEQ ID NO: 518579 - protein, 15 aa, Homo sapiens
  CDR3 for alpha chain variable domain of TCR clone 259290 (TRAV21, TRAJ27)
CAARPGNAGNQPLGV

SEQ ID NO: 518580 - protein, 14 aa, Homo sapiens
  CDR3 for beta chain variable domain of TCR clone 259290 (TRBV7-6, TRBJ2-3)
RASSLGTVTDTQYF

SEQ ID NO: 518581 - protein, 16 aa, Homo sapiens
  CDR3 for alpha chain variable domain of TCR clone 259291 (TRAV30, TRAJ24)
CGTEIVDADSWGKFQF

SEQ ID NO: 518582 - protein, 17 aa, Homo sapiens
  CDR3 for beta chain variable domain of TCR clone 259291 (TRBV12-4, TRBJ1-1)
CASSLSGFRTMNTEAFF

SEQ ID NO: 518583 - protein, 10 aa, Homo sapiens
  CDR3 for alpha chain variable domain of TCR clone 259292 (TRAV17, TRAJ52)
SATGYGKLTF

SEQ ID NO: 518584 - protein, 13 aa, Homo sapiens
  CDR3 for beta chain variable domain of TCR clone 259292 (TRBV29-1, TRBJ2-5)
CSVGGTSAETQYF

SEQ ID NO: 518585 - protein, 13 aa, Homo sapiens
  CDR3 for alpha chain variable domain of TCR clone 259293 (TRAV12-2, TRAJ24)
CAVSTDSWGKLQF

SEQ ID NO: 518586 - protein, 14 aa, Homo sapiens
  CDR3 for beta chain variable domain of TCR clone 259293 (TRBV4-1, TRBJ2-2)
CASSQAVNTGELFF

SEQ ID NO: 518587 - protein, 15 aa, Homo sapiens
  CDR3 for alpha chain variable domain of TCR clone 259294 (TRAV26-1, TRAJ29)
CIVRVEGSGNTPLVF

SEQ ID NO: 518588 - protein, 15 aa, Homo sapiens
  CDR3 for beta chain variable domain of TCR clone 259294 (TRBV5-1, TRBJ2-7)
CASSLMTSGSNEQYF

SEQ ID NO: 518589 - protein, 16 aa, Homo sapiens
  CDR3 for alpha chain variable domain of TCR clone 259295 (TRAV26-1, TRAJ22)
CIVRVPSSGSARQLTF

SEQ ID NO: 518590 - protein, 16 aa, Homo sapiens
  CDR3 for beta chain variable domain of TCR clone 259295 (TRBV12-5, TRBJ2-5)
CAGGPRTSGNQETQYF

SEQ ID NO: 518591 - protein, 16 aa, Homo sapiens
  CDR3 for alpha chain variable domain of TCR clone 259296 (TRAV3, TRAJ21)
CAVRDIERGNFNKFYF

SEQ ID NO: 518592 - protein, 13 aa, Homo sapiens
  CDR3 for beta chain variable domain of TCR clone 259296 (TRBV4-2, TRBJ1-1)
RASSQAGNTEAFF

SEQ ID NO: 518593 - protein, 12 aa, Homo sapiens
  CDR3 for alpha chain variable domain of TCR clone 259297 (TRAV2, TRAJ33)
CAVPDSNYQLIW

SEQ ID NO: 518594 - protein, 17 aa, Homo sapiens
  CDR3 for beta chain variable domain of TCR clone 259297 (TRBV6-5, TRBJ2-3)
RASSYGTSLYRSDTQYF

SEQ ID NO: 518595 - protein, 13 aa, Homo sapiens
  CDR3 for alpha chain variable domain of TCR clone 259298 (TRAV20, TRAJ35)
CAVQEGFGNVLHR

SEQ ID NO: 518596 - protein, 14 aa, Homo sapiens
  CDR3 for beta chain variable domain of TCR clone 259298 (TRBV5-1, TRBJ1-1)
CASSSATGGTEAFF

SEQ ID NO: 518597 - protein, 14 aa, Homo sapiens
  CDR3 for alpha chain variable domain of TCR clone 259299 (TRAV1-2, TRAJ16)
CAVNRFSDGQKMLC

SEQ ID NO: 518598 - protein, 13 aa, Homo sapiens
  CDR3 for beta chain variable domain of TCR clone 259299 (TRBV7-2, TRBJ2-2)
CASSSVRAGELFF

SEQ ID NO: 518599 - protein, 15 aa, Homo sapiens
  CDR3 for alpha chain variable domain of TCR clone 259300 (TRAV26-1, TRAJ44)
CIVRANTGTASKLTF

SEQ ID NO: 518600 - protein, 13 aa, Homo sapiens
  CDR3 for beta chain variable domain of TCR clone 259300 (TRBV4-2, TRBJ1-1)
CASSQAGNTEAFF

SEQ ID NO: 518601 - protein, 14 aa, Homo sapiens
  CDR3 for alpha chain variable domain of TCR clone 259301 (TRAV27, TRAJ3)
QASLRGRSASKIIF

SEQ ID NO: 518602 - protein, 15 aa, Homo sapiens
  CDR3 for beta chain variable domain of TCR clone 259301 (TRBV28, TRBJ1-3)
CASSMGWASGNTIYF

SEQ ID NO: 518603 - protein, 13 aa, Homo sapiens
  CDR3 for alpha chain variable domain of TCR clone 259302 (TRAV12-1, TRAJ29)
CVVNGPGNTPLVF

SEQ ID NO: 518604 - protein, 14 aa, Homo sapiens
  CDR3 for beta chain variable domain of TCR clone 259302 (TRBV19, TRBJ2-7)
CASTVQGRPYEQYF

SEQ ID NO: 518605 - protein, 13 aa, Homo sapiens
  CDR3 for alpha chain variable domain of TCR clone 259303 (TRAV13-1, TRAJ6)
CAASKGGSYIPTF

SEQ ID NO: 518606 - protein, 15 aa, Homo sapiens
  CDR3 for beta chain variable domain of TCR clone 259303 (TRBV9, TRBJ1-6)
CASSVAGTGDSPLNF

SEQ ID NO: 518607 - protein, 13 aa, Homo sapiens
  CDR3 for alpha chain variable domain of TCR clone 259304 (TRAV12-2, TRAJ34)
CAVRGYNTDKLIF

SEQ ID NO: 518608 - protein, 15 aa, Homo sapiens
  CDR3 for beta chain variable domain of TCR clone 259304 (TRBV28, TRBJ2-1)
CASLTGAGVIARQFF

SEQ ID NO: 518609 - protein, 14 aa, Homo sapiens
  CDR3 for alpha chain variable domain of TCR clone 259305 (TRAV26-1, TRAJ48)
CIARVGFGNEKLTF

SEQ ID NO: 518610 - protein, 13 aa, Homo sapiens
  CDR3 for beta chain variable domain of TCR clone 259305 (TRBV11-3, TRBJ2-3)
CARSHATKDTQYF

SEQ ID NO: 518611 - protein, 14 aa, Homo sapiens
  CDR3 for alpha chain variable domain of TCR clone 259306 (TRAV12-2, TRAJ4)
CAEDLSGVYNKLIL

SEQ ID NO: 518612 - protein, 13 aa, Homo sapiens
  CDR3 for beta chain variable domain of TCR clone 259306 (TRBV7-9, TRBJ1-2)
CASSLKQNYGYTF

SEQ ID NO: 518613 - protein, 15 aa, Homo sapiens
  CDR3 for alpha chain variable domain of TCR clone 259307 (TRAV12-1, TRAJ9)
CVVSFGDTGGFKTIF

SEQ ID NO: 518614 - protein, 17 aa, Homo sapiens
  CDR3 for beta chain variable domain of TCR clone 259307 (TRBV13, TRBJ2-3)
CASSLSRVAGGRNTQYF

SEQ ID NO: 518615 - protein, 12 aa, Homo sapiens
  CDR3 for alpha chain variable domain of TCR clone 259308 (TRAV13-2, TRAJ39)
CAENSECNMLTF

SEQ ID NO: 518616 - protein, 13 aa, Homo sapiens
  CDR3 for beta chain variable domain of TCR clone 259308 (TRBV6-1, TRBJ1-2)
CASSGGISFGYTF

SEQ ID NO: 518617 - protein, 16 aa, Homo sapiens
  CDR3 for alpha chain variable domain of TCR clone 259309 (TRAV8-4, TRAJ27)
CAVKEGGFTNAGKSTF

SEQ ID NO: 518618 - protein, 15 aa, Homo sapiens
  CDR3 for beta chain variable domain of TCR clone 259309 (TRBV20-1, TRBJ2-7)
CSARDRVSGMDEQYF

SEQ ID NO: 518619 - protein, 15 aa, Homo sapiens
  CDR3 for alpha chain variable domain of TCR clone 259310 (TRAV17, TRAJ4)
CATGTWSGGYNKLIF

SEQ ID NO: 518620 - protein, 23 aa, Homo sapiens
  CDR3 for beta chain variable domain of TCR clone 259310 (TRBV7-3, TRBJ2-1)
CASSPRGRTGDYLTSSPTMSSSS

SEQ ID NO: 518621 - protein, 15 aa, Homo sapiens
  CDR3 for alpha chain variable domain of TCR clone 259311 (TRAV4, TRAJ10)
CLVGDGSGGGNKLTF

SEQ ID NO: 518622 - protein, 15 aa, Homo sapiens
  CDR3 for beta chain variable domain of TCR clone 259311 (TRBV27, TRBJ2-3)
CASSSLAGVIDTQFF

SEQ ID NO: 518623 - protein, 11 aa, Homo sapiens
  CDR3 for alpha chain variable domain of TCR clone 259312 (TRAV13-1, TRAJ15)
CAATPGTALIF

SEQ ID NO: 518624 - protein, 13 aa, Homo sapiens
  CDR3 for beta chain variable domain of TCR clone 259312 (TRBV12-4, TRBJ1-2)
CASSLRQGKGYTF

SEQ ID NO: 518625 - protein, 13 aa, Homo sapiens
  CDR3 for alpha chain variable domain of TCR clone 259313 (TRAV12-2, TRAJ42)
CAVQRGSLGNLIF

SEQ ID NO: 518626 - protein, 16 aa, Homo sapiens
  CDR3 for beta chain variable domain of TCR clone 259313 (TRBV9, TRBJ2-2)
CASSAMGKGNTGELFF

SEQ ID NO: 518627 - protein, 16 aa, Homo sapiens
  CDR3 for alpha chain variable domain of TCR clone 259314 (TRAV16, TRAJ57)
CAPYLITQGGSEKLVF

SEQ ID NO: 518628 - protein, 16 aa, Homo sapiens
  CDR3 for beta chain variable domain of TCR clone 259314 (TRBV28, TRBJ2-1)
CASSSPEYPRDNEQFF

SEQ ID NO: 518629 - protein, 14 aa, Homo sapiens
  CDR3 for alpha chain variable domain of TCR clone 259315 (TRAV1-2, TRAJ16)
CAVKRFSDGQKPLF

SEQ ID NO: 518630 - protein, 16 aa, Homo sapiens
  CDR3 for beta chain variable domain of TCR clone 259315 (TRBV12-5, TRBJ2-5)
CASGPRTSGNQETQYF

SEQ ID NO: 518631 - protein, 11 aa, Homo sapiens
  CDR3 for alpha chain variable domain of TCR clone 259316 (TRAV8-4, TRAJ20)
CAVTNVLTTTS

SEQ ID NO: 518632 - protein, 13 aa, Homo sapiens
  CDR3 for beta chain variable domain of TCR clone 259316 (TRBV7-3, TRBJ1-1)
CASSQDWGAEAFF

SEQ ID NO: 518633 - protein, 15 aa, Homo sapiens
  CDR3 for alpha chain variable domain of TCR clone 259317 (TRAV2, TRAJ9)
CAVADLGTGGFKTIF

SEQ ID NO: 518634 - protein, 16 aa, Homo sapiens
  CDR3 for beta chain variable domain of TCR clone 259317 (TRBV24-1, TRBJ2-3)
CATSDPGTGATDTQYF

SEQ ID NO: 518635 - protein, 16 aa, Homo sapiens
  CDR3 for alpha chain variable domain of TCR clone 259318 (TRAV4, TRAJ18)
CCVLLIGGSTLGRLYF

SEQ ID NO: 518636 - protein, 16 aa, Homo sapiens
  CDR3 for beta chain variable domain of TCR clone 259318 (TRBV19, TRBJ2-1)
CASSKAGPSSYNEQFF

SEQ ID NO: 518637 - protein, 16 aa, Homo sapiens
  CDR3 for alpha chain variable domain of TCR clone 259319 (TRAV1-2, TRAJ10)
CAVRGVLTGGGNKLTF

SEQ ID NO: 518638 - protein, 15 aa, Homo sapiens
  CDR3 for beta chain variable domain of TCR clone 259319 (TRBV7-3, TRBJ2-1)
CASSYFRGTYNEQFF

SEQ ID NO: 518639 - protein, 16 aa, Homo sapiens
  CDR3 for alpha chain variable domain of TCR clone 259320 (TRAV26-1, TRAJ37)
CIVRGDGSGNTGKLIF

SEQ ID NO: 518640 - protein, 17 aa, Homo sapiens
  CDR3 for beta chain variable domain of TCR clone 259320 (TRBV13, TRBJ2-3)
CASSLSRVAGGRNTQYF

SEQ ID NO: 518641 - protein, 13 aa, Homo sapiens
  CDR3 for alpha chain variable domain of TCR clone 259321 (TRAV36/DV7, TRAJ54)
CAVDIQGAQKLVF

SEQ ID NO: 518642 - protein, 14 aa, Homo sapiens
  CDR3 for beta chain variable domain of TCR clone 259321 (TRBV19, TRBJ2-7)
CSSHFRDTFTGMYF

SEQ ID NO: 518643 - protein, 14 aa, Homo sapiens
  CDR3 for alpha chain variable domain of TCR clone 259322 (TRAV1-2, TRAJ16)
CAVNRFSDGQKLLF

SEQ ID NO: 518644 - protein, 17 aa, Homo sapiens
  CDR3 for beta chain variable domain of TCR clone 259322 (TRBV20-1, TRBJ2-1)
CSASGGENTGAYNEQFF

SEQ ID NO: 518645 - protein, 14 aa, Homo sapiens
  CDR3 for alpha chain variable domain of TCR clone 259323 (TRAV17, TRAJ5)
CATVALTGGRALTF

SEQ ID NO: 518646 - protein, 14 aa, Homo sapiens
  CDR3 for beta chain variable domain of TCR clone 259323 (TRBV28, TRBJ2-7)
CASSPYGMAYEQYF

SEQ ID NO: 518647 - protein, 16 aa, Homo sapiens
  CDR3 for alpha chain variable domain of TCR clone 259324 (TRAV12-3, TRAJ53)
CAMSPGSGGSNYKLTF

SEQ ID NO: 518648 - protein, 14 aa, Homo sapiens
  CDR3 for beta chain variable domain of TCR clone 259324 (TRBV5-1, TRBJ2-5)
CASSFGGSQETQYF

SEQ ID NO: 518649 - protein, 14 aa, Homo sapiens
  CDR3 for alpha chain variable domain of TCR clone 259325 (TRAV25, TRAJ6)
CAGRESGGSYIPTF

SEQ ID NO: 518650 - protein, 14 aa, Homo sapiens
  CDR3 for beta chain variable domain of TCR clone 259325 (TRBV7-2, TRBJ2-7)
CASSPKTSFYEQYF

SEQ ID NO: 518651 - protein, 14 aa, Homo sapiens
  CDR3 for alpha chain variable domain of TCR clone 259326 (TRAV29/DV5, TRAJ40)
CAAAVASGTYKNIF

SEQ ID NO: 518652 - protein, 13 aa, Homo sapiens
  CDR3 for beta chain variable domain of TCR clone 259326 (TRBV7-9, TRBJ2-7)
CASSFAGAYEQYF

SEQ ID NO: 518653 - protein, 16 aa, Homo sapiens
  CDR3 for alpha chain variable domain of TCR clone 259327 (TRAV4, TRAJ22)
CLVGDLHSGSARQLTF

SEQ ID NO: 518654 - protein, 14 aa, Homo sapiens
  CDR3 for beta chain variable domain of TCR clone 259327 (TRBV28, TRBJ2-3)
CASSWRGRADTQYF

SEQ ID NO: 518655 - protein, 14 aa, Homo sapiens
  CDR3 for alpha chain variable domain of TCR clone 259328 (TRAV30, TRAJ26)
CGTEIVSYGQNFVF

SEQ ID NO: 518656 - protein, 13 aa, Homo sapiens
  CDR3 for beta chain variable domain of TCR clone 259328 (TRBV24-1, TRBJ2-2)
CATSDGSTGELFF

SEQ ID NO: 518657 - protein, 13 aa, Homo sapiens
  CDR3 for alpha chain variable domain of TCR clone 259329 (TRAV12-3, TRAJ13)
CAMGTGGYQKVTF

SEQ ID NO: 518658 - protein, 18 aa, Homo sapiens
  CDR3 for beta chain variable domain of TCR clone 259329 (TRBV7-2, TRBJ2-3)
CASSLKREGSGITDTQYF

SEQ ID NO: 518659 - protein, 12 aa, Homo sapiens
  CDR3 for alpha chain variable domain of TCR clone 259330 (TRAV13-2, TRAJ23)
CAERHRGGKLIF

SEQ ID NO: 518660 - protein, 15 aa, Homo sapiens
  CDR3 for beta chain variable domain of TCR clone 259330 (TRBV7-3, TRBJ2-1)
CASSPTGGSRNEQFF

SEQ ID NO: 518661 - protein, 14 aa, Homo sapiens
  CDR3 for alpha chain variable domain of TCR clone 259331 (TRAV8-4, TRAJ38)
CARLNAGNNRMLIW

SEQ ID NO: 518662 - protein, 12 aa, Homo sapiens
  CDR3 for beta chain variable domain of TCR clone 259331 (TRBV6-1, TRBJ2-7)
CASSEPLYEQYF

SEQ ID NO: 518663 - protein, 13 aa, Homo sapiens
  CDR3 for alpha chain variable domain of TCR clone 259332 (TRAV8-4, TRAJ9)
CAVSETGGFKTIF

SEQ ID NO: 518664 - protein, 16 aa, Homo sapiens
  CDR3 for beta chain variable domain of TCR clone 259332 (TRBV19, TRBJ2-3)
CASSSIAGTRADTQYF

SEQ ID NO: 518665 - protein, 15 aa, Homo sapiens
  CDR3 for alpha chain variable domain of TCR clone 259333 (TRAV3, TRAJ22)
CAVRDRGGSARQLTF

SEQ ID NO: 518666 - protein, 17 aa, Homo sapiens
  CDR3 for beta chain variable domain of TCR clone 259333 (TRBV13, TRBJ2-3)
CDSSLSRVAGGRNTQYF

SEQ ID NO: 518667 - protein, 12 aa, Homo sapiens
  CDR3 for alpha chain variable domain of TCR clone 259334 (TRAV35, TRAJ49)
CAGWNTGNQFYC

SEQ ID NO: 518668 - protein, 15 aa, Homo sapiens
  CDR3 for beta chain variable domain of TCR clone 259334 (TRBV27, TRBJ1-5)
CASSLGTGFDQPQHF

SEQ ID NO: 518669 - protein, 14 aa, Homo sapiens
  CDR3 for alpha chain variable domain of TCR clone 259335 (TRAV2, TRAJ34)
CAVGGGYNTDKLIF

SEQ ID NO: 518670 - protein, 15 aa, Homo sapiens
  CDR3 for beta chain variable domain of TCR clone 259335 (TRBV28, TRBJ1-1)
CASSLLGRGNTEAFF

SEQ ID NO: 518671 - protein, 13 aa, Homo sapiens
  CDR3 for alpha chain variable domain of TCR clone 259336 (TRAV13-1, TRAJ39)
CSKYSNAGNMLTF

SEQ ID NO: 518672 - protein, 11 aa, Homo sapiens
  CDR3 for beta chain variable domain of TCR clone 259336 (TRBV25-1, TRBJ2-4)
CQSRDQNIQYF

SEQ ID NO: 518673 - protein, 16 aa, Homo sapiens
  CDR3 for alpha chain variable domain of TCR clone 259337 (TRAV23/DV6, TRAJ13)
CAASLSFSGGYQKVTF

SEQ ID NO: 518674 - protein, 14 aa, Homo sapiens
  CDR3 for beta chain variable domain of TCR clone 259337 (TRBV7-9, TRBJ1-2)
CASSRQGANYGYTF

SEQ ID NO: 518675 - protein, 11 aa, Homo sapiens
  CDR3 for alpha chain variable domain of TCR clone 259338 (TRAV29/DV5, TRAJ49)
CAAVPGIQFYF

SEQ ID NO: 518676 - protein, 17 aa, Homo sapiens
  CDR3 for beta chain variable domain of TCR clone 259338 (TRBV7-8, TRBJ2-6)
CASSAGTGGAGANVLTF

SEQ ID NO: 518677 - protein, 15 aa, Homo sapiens
  CDR3 for alpha chain variable domain of TCR clone 259339 (TRAV13-1, TRAJ5)
CAASKADTGRRALTF

SEQ ID NO: 518678 - protein, 15 aa, Homo sapiens
  CDR3 for beta chain variable domain of TCR clone 259339 (TRBV19, TRBJ2-1)
CASSMGWNSNNEKFF

SEQ ID NO: 518679 - protein, 13 aa, Homo sapiens
  CDR3 for alpha chain variable domain of TCR clone 259340 (TRAV21, TRAJ57)
CAVTQGGSEKLVF

SEQ ID NO: 518680 - protein, 16 aa, Homo sapiens
  CDR3 for beta chain variable domain of TCR clone 259340 (TRBV29-1, TRBJ2-7)
GSVEDAEDGTAYEQYF

SEQ ID NO: 518681 - protein, 13 aa, Homo sapiens
  CDR3 for alpha chain variable domain of TCR clone 259341 (TRAV8-6, TRAJ21)
CAVSPSSLNKFYF

SEQ ID NO: 518682 - protein, 15 aa, Homo sapiens
  CDR3 for beta chain variable domain of TCR clone 259341 (TRBV20-1, TRBJ2-7)
CSARDRVSGMDEQYF

SEQ ID NO: 518683 - protein, 16 aa, Homo sapiens
  CDR3 for alpha chain variable domain of TCR clone 259342 (TRAV30, TRAJ24)
CGTEIVDADSWGKFQF

SEQ ID NO: 518684 - protein, 16 aa, Homo sapiens
  CDR3 for beta chain variable domain of TCR clone 259342 (TRBV4-1, TRBJ1-4)
CASSQDLRRGGEKLFF

SEQ ID NO: 518685 - protein, 12 aa, Homo sapiens
  CDR3 for alpha chain variable domain of TCR clone 259343 (TRAV13-2, TRAJ23)
CAERHRGGKLIF

SEQ ID NO: 518686 - protein, 15 aa, Homo sapiens
  CDR3 for beta chain variable domain of TCR clone 259343 (TRBV19, TRBJ1-2)
CASSVGQVLNYGFTF

SEQ ID NO: 518687 - protein, 16 aa, Homo sapiens
  CDR3 for alpha chain variable domain of TCR clone 259344 (TRAV12-2, TRAJ18)
CAVTTDRGSTLGRLYF

SEQ ID NO: 518688 - protein, 14 aa, Homo sapiens
  CDR3 for beta chain variable domain of TCR clone 259344 (TRBV20-1, TRBJ1-3)
CSASPTGAGNTIYF

SEQ ID NO: 518689 - protein, 15 aa, Homo sapiens
  CDR3 for alpha chain variable domain of TCR clone 259345 (TRAV2, TRAJ15)
CAVGGPNQAGTALIF

SEQ ID NO: 518690 - protein, 20 aa, Homo sapiens
  CDR3 for beta chain variable domain of TCR clone 259345 (TRBV7-8, TRBJ2-2)
CASRHLFPGPTIHITGELFF

SEQ ID NO: 518691 - protein, 14 aa, Homo sapiens
  CDR3 for alpha chain variable domain of TCR clone 259346 (TRAV13-2, TRAJ10)
CAETFTGGGNKLTL

SEQ ID NO: 518692 - protein, 16 aa, Homo sapiens
  CDR3 for beta chain variable domain of TCR clone 259346 (TRBV18, TRBJ2-7)
CASSPRSQGISYEQYF

SEQ ID NO: 518693 - protein, 13 aa, Homo sapiens
  CDR3 for alpha chain variable domain of TCR clone 259347 (TRAV26-1, TRAJ30)
CIVRVESNDKIIF

SEQ ID NO: 518694 - protein, 15 aa, Homo sapiens
  CDR3 for beta chain variable domain of TCR clone 259347 (TRBV6-1, TRBJ2-3)
CASSERGWITDTQYF

SEQ ID NO: 518695 - protein, 13 aa, Homo sapiens
  CDR3 for alpha chain variable domain of TCR clone 259348 (TRAV38-1, TRAJ42)
CARWGGSQGNLIF

SEQ ID NO: 518696 - protein, 13 aa, Homo sapiens
  CDR3 for beta chain variable domain of TCR clone 259348 (TRBV7-3, TRBJ1-2)
CASSLKRGYGYTF

SEQ ID NO: 518697 - protein, 16 aa, Homo sapiens
  CDR3 for alpha chain variable domain of TCR clone 259349 (TRAV3, TRAJ10)
CAVRDMRAGGGNKLTF

SEQ ID NO: 518698 - protein, 14 aa, Homo sapiens
  CDR3 for beta chain variable domain of TCR clone 259349 (TRBV15, TRBJ2-3)
CATRSGTSTDTQYF

SEQ ID NO: 518699 - protein, 15 aa, Homo sapiens
  CDR3 for alpha chain variable domain of TCR clone 259350 (TRAV38-1, TRAJ57)
CAFMDSPGGSEKLVF

SEQ ID NO: 518700 - protein, 16 aa, Homo sapiens
  CDR3 for beta chain variable domain of TCR clone 259350 (TRBV10-3, TRBJ2-1)
CAIRGGGRGDYNEQFF

SEQ ID NO: 518701 - protein, 11 aa, Homo sapiens
  CDR3 for alpha chain variable domain of TCR clone 259351 (TRAV12-1, TRAJ21)
CVANNFDKFYF

SEQ ID NO: 518702 - protein, 11 aa, Homo sapiens
  CDR3 for beta chain variable domain of TCR clone 259351 (TRBV10-3, TRBJ2-7)
CAISEGLEQYF

SEQ ID NO: 518703 - protein, 13 aa, Homo sapiens
  CDR3 for alpha chain variable domain of TCR clone 259352 (TRAV2, TRAJ40)
CAVVTSGTCKYIF

SEQ ID NO: 518704 - protein, 16 aa, Homo sapiens
  CDR3 for beta chain variable domain of TCR clone 259352 (TRBV19, TRBJ2-1)
CASSKAGPSSYNEQFF

SEQ ID NO: 518705 - protein, 19 aa, Homo sapiens
  CDR3 for alpha chain variable domain of TCR clone 259353 (TRAV26-1, TRAJ28)
CIVRAAHAYSGAGSYQLTF

SEQ ID NO: 518706 - protein, 12 aa, Homo sapiens
  CDR3 for beta chain variable domain of TCR clone 259353 (TRBV27, TRBJ2-2)
CAIKLFTGELFF

SEQ ID NO: 518707 - protein, 15 aa, Homo sapiens
  CDR3 for alpha chain variable domain of TCR clone 259354 (TRAV12-1, TRAJ9)
CVVSFGDAGGFKTIF

SEQ ID NO: 518708 - protein, 13 aa, Homo sapiens
  CDR3 for beta chain variable domain of TCR clone 259354 (TRBV2, TRBJ1-4)
CASSERAGEKLFF

SEQ ID NO: 518709 - protein, 14 aa, Homo sapiens
  CDR3 for alpha chain variable domain of TCR clone 259355 (TRAV30, TRAJ26)
CGTEIVSYGQNFVF

SEQ ID NO: 518710 - protein, 13 aa, Homo sapiens
  CDR3 for beta chain variable domain of TCR clone 259355 (TRBV24-1, TRBJ2-2)
CATSDWSTGELLF

SEQ ID NO: 518711 - protein, 13 aa, Homo sapiens
  CDR3 for alpha chain variable domain of TCR clone 259356 (TRAV21, TRAJ27)
CAARPGNAGKSTF

SEQ ID NO: 518712 - protein, 14 aa, Homo sapiens
  CDR3 for beta chain variable domain of TCR clone 259356 (TRBV11-2, TRBJ1-5)
CASSLDRGRQPQHF

SEQ ID NO: 518713 - protein, 13 aa, Homo sapiens
  CDR3 for alpha chain variable domain of TCR clone 259357 (TRAV2, TRAJ40)
CAVVTSGTYKYIF

SEQ ID NO: 518714 - protein, 16 aa, Homo sapiens
  CDR3 for beta chain variable domain of TCR clone 259357 (TRBV4-1, TRBJ1-1)
CASSYRQGTGDTEAFF

SEQ ID NO: 518715 - protein, 18 aa, Homo sapiens
  CDR3 for alpha chain variable domain of TCR clone 259358 (TRAV1-2, TRAJ18)
CAVRDMGDRGSTLGRLYF

SEQ ID NO: 518716 - protein, 16 aa, Homo sapiens
  CDR3 for beta chain variable domain of TCR clone 259358 (TRBV12-5, TRBJ2-5)
CASGPRTSGNQETQYF

SEQ ID NO: 518717 - protein, 10 aa, Homo sapiens
  CDR3 for alpha chain variable domain of TCR clone 259359 (TRAV8-4, TRAJ42)
CAVSDDRGSQ

SEQ ID NO: 518718 - protein, 17 aa, Homo sapiens
  CDR3 for beta chain variable domain of TCR clone 259359 (TRBV11-2, TRBJ2-1)
CASSLYPPGVEYNEQFF

SEQ ID NO: 518719 - protein, 13 aa, Homo sapiens
  CDR3 for alpha chain variable domain of TCR clone 259360 (TRAV21, TRAJ47)
CAVGEEYGNKLVF

SEQ ID NO: 518720 - protein, 12 aa, Homo sapiens
  CDR3 for beta chain variable domain of TCR clone 259360 (TRBV2, TRBJ2-1)
CAYGPPGNEQFF

SEQ ID NO: 518721 - protein, 11 aa, Homo sapiens
  CDR3 for alpha chain variable domain of TCR clone 259361 (TRAV1-2, TRAJ20)
CAVANDYKPSF

SEQ ID NO: 518722 - protein, 11 aa, Homo sapiens
  CDR3 for beta chain variable domain of TCR clone 259361 (TRBV29-1, TRBJ2-5)
CSEDRTGTQYF

SEQ ID NO: 518723 - protein, 11 aa, Homo sapiens
  CDR3 for alpha chain variable domain of TCR clone 259362 (TRAV17, TRAJ31)
CATSNNARLMF

SEQ ID NO: 518724 - protein, 15 aa, Homo sapiens
  CDR3 for beta chain variable domain of TCR clone 259362 (TRBV5-1, TRBJ2-7)
CASSLNGGPAREQYF

SEQ ID NO: 518725 - protein, 14 aa, Homo sapiens
  CDR3 for alpha chain variable domain of TCR clone 259363 (TRAV12-2, TRAJ9)
CAVNMEGGGFKTNF

SEQ ID NO: 518726 - protein, 14 aa, Homo sapiens
  CDR3 for beta chain variable domain of TCR clone 259363 (TRBV2, TRBJ2-5)
CASSEVLAQETQYF

SEQ ID NO: 518727 - protein, 17 aa, Homo sapiens
  CDR3 for alpha chain variable domain of TCR clone 259364 (TRAV3, TRAJ42)
CAVRDRDYGGSQGNLMF

SEQ ID NO: 518728 - protein, 14 aa, Homo sapiens
  CDR3 for beta chain variable domain of TCR clone 259364 (TRBV25-1, TRBJ1-1)
CASTHLGGNTEAFF

SEQ ID NO: 518729 - protein, 16 aa, Homo sapiens
  CDR3 for alpha chain variable domain of TCR clone 259365 (TRAV3, TRAJ13)
CAVRDFESGGYQKVTF

SEQ ID NO: 518730 - protein, 16 aa, Homo sapiens
  CDR3 for beta chain variable domain of TCR clone 259365 (TRBV27, TRBJ2-5)
CARSYGPGGQKETQYF

SEQ ID NO: 518731 - protein, 15 aa, Homo sapiens
  CDR3 for alpha chain variable domain of TCR clone 259366 (TRAV12-3, TRAJ6)
CAMSATTGGSYIPTF

SEQ ID NO: 518732 - protein, 14 aa, Homo sapiens
  CDR3 for beta chain variable domain of TCR clone 259366 (TRBV19, TRBJ2-2)
CATTGHANTGELFF

SEQ ID NO: 518733 - protein, 15 aa, Homo sapiens
  CDR3 for alpha chain variable domain of TCR clone 259367 (TRAV4, TRAJ39)
CLVGPNNNAGNMLTF

SEQ ID NO: 518734 - protein, 15 aa, Homo sapiens
  CDR3 for beta chain variable domain of TCR clone 259367 (TRBV5-1, TRBJ2-1)
CASGPPRAPYNEQFF

SEQ ID NO: 518735 - protein, 11 aa, Homo sapiens
  CDR3 for alpha chain variable domain of TCR clone 259368 (TRAV35, TRAJ30)
CAPGGDAKIIF

SEQ ID NO: 518736 - protein, 13 aa, Homo sapiens
  CDR3 for beta chain variable domain of TCR clone 259368 (TRBV7-6, TRBJ2-1)
CQQLGGGADEQFF

SEQ ID NO: 518737 - protein, 14 aa, Homo sapiens
  CDR3 for alpha chain variable domain of TCR clone 259369 (TRAV16, TRAJ33)
CALSAMDSNYQLIW

SEQ ID NO: 518738 - protein, 17 aa, Homo sapiens
  CDR3 for beta chain variable domain of TCR clone 259369 (TRBV4-1, TRBJ2-7)
CASSHPTSGSRGYEQYF

SEQ ID NO: 518739 - protein, 12 aa, Homo sapiens
  CDR3 for alpha chain variable domain of TCR clone 259370 (TRAV3, TRAJ27)
CAVRDKAGKSTF

SEQ ID NO: 518740 - protein, 14 aa, Homo sapiens
  CDR3 for beta chain variable domain of TCR clone 259370 (TRBV5-1, TRBJ1-2)
CASSVDSTNYDDTF

SEQ ID NO: 518741 - protein, 14 aa, Homo sapiens
  CDR3 for alpha chain variable domain of TCR clone 259371 (TRAV23/DV6, TRAJ11)
CAALIGGGYRTLTL

SEQ ID NO: 518742 - protein, 13 aa, Homo sapiens
  CDR3 for beta chain variable domain of TCR clone 259371 (TRBV11-3, TRBJ1-1)
CASSLGGNTEAFF

SEQ ID NO: 518743 - protein, 21 aa, Homo sapiens
  CDR3 for alpha chain variable domain of TCR clone 259372 (TRAV25, TRAJ47)
TATQTTDVGTYFWEYGNKLVF

SEQ ID NO: 518744 - protein, 16 aa, Homo sapiens
  CDR3 for beta chain variable domain of TCR clone 259372 (TRBV6-6, TRBJ2-1)
CASSWGGQGPYNDQFF

SEQ ID NO: 518745 - protein, 13 aa, Homo sapiens
  CDR3 for alpha chain variable domain of TCR clone 259373 (TRAV12-1, TRAJ34)
CGEPLRNTDKLIF

SEQ ID NO: 518746 - protein, 14 aa, Homo sapiens
  CDR3 for beta chain variable domain of TCR clone 259373 (TRBV12-5, TRBJ2-5)
CASGSRTHQETQYF

SEQ ID NO: 518747 - protein, 12 aa, Homo sapiens
  CDR3 for alpha chain variable domain of TCR clone 259374 (TRAV12-2, TRAJ31)
CAVNTPDARLMF

SEQ ID NO: 518748 - protein, 15 aa, Homo sapiens
  CDR3 for beta chain variable domain of TCR clone 259374 (TRBV20-1, TRBJ2-7)
CSADSGTSGAYEQYF

SEQ ID NO: 518749 - protein, 13 aa, Homo sapiens
  CDR3 for alpha chain variable domain of TCR clone 259375 (TRAV12-2, TRAJ42)
CAVKRGSQGNLIF

SEQ ID NO: 518750 - protein, 16 aa, Homo sapiens
  CDR3 for beta chain variable domain of TCR clone 259375 (TRBV9, TRBJ2-2)
CASSAMGKGNTGELIF

SEQ ID NO: 518751 - protein, 11 aa, Homo sapiens
  CDR3 for alpha chain variable domain of TCR clone 259376 (TRAV2, TRAJ21)
CAVFNFNKFYF

SEQ ID NO: 518752 - protein, 16 aa, Homo sapiens
  CDR3 for beta chain variable domain of TCR clone 259376 (TRBV28, TRBJ2-2)
CASSLEGGSNTGELFF

SEQ ID NO: 518753 - protein, 15 aa, Homo sapiens
  CDR3 for alpha chain variable domain of TCR clone 259377 (TRAV29/DV5, TRAJ24)
CTASGATDSWGKFQF

SEQ ID NO: 518754 - protein, 14 aa, Homo sapiens
  CDR3 for beta chain variable domain of TCR clone 259377 (TRBV12-5, TRBJ2-5)
CASGSRTHQETQYF

SEQ ID NO: 518755 - protein, 14 aa, Homo sapiens
  CDR3 for alpha chain variable domain of TCR clone 259378 (TRAV8-4, TRAJ5)
CAVSTDTGRRALTF

SEQ ID NO: 518756 - protein, 12 aa, Homo sapiens
  CDR3 for beta chain variable domain of TCR clone 259378 (TRBV29-1, TRBJ2-3)
CSVTGGADTQYF

SEQ ID NO: 518757 - protein, 12 aa, Homo sapiens
  CDR3 for alpha chain variable domain of TCR clone 259379 (TRAV17, TRAJ30)
CATDARDDKIIL

SEQ ID NO: 518758 - protein, 16 aa, Homo sapiens
  CDR3 for beta chain variable domain of TCR clone 259379 (TRBV7-2, TRBJ2-7)
CASTSQAASGGYEQYF

SEQ ID NO: 518759 - protein, 15 aa, Homo sapiens
  CDR3 for alpha chain variable domain of TCR clone 259380 (TRAV12-3, TRAJ6)
CAMSATTGGSYIPKF

SEQ ID NO: 518760 - protein, 14 aa, Homo sapiens
  CDR3 for beta chain variable domain of TCR clone 259380 (TRBV13, TRBJ2-5)
CASSLERVGETQYF

SEQ ID NO: 518761 - protein, 14 aa, Homo sapiens
  CDR3 for alpha chain variable domain of TCR clone 259381 (TRAV12-1, TRAJ6)
CVVPTSGGSYIPTF

SEQ ID NO: 518762 - protein, 14 aa, Homo sapiens
  CDR3 for beta chain variable domain of TCR clone 259381 (TRBV18, TRBJ2-5)
CASSPGVSQETQYF

SEQ ID NO: 518763 - protein, 17 aa, Homo sapiens
  CDR3 for alpha chain variable domain of TCR clone 259382 (TRAV3, TRAJ13)
CAVRDMRRTGGYQKVTF

SEQ ID NO: 518764 - protein, 13 aa, Homo sapiens
  CDR3 for beta chain variable domain of TCR clone 259382 (TRBV7-7, TRBJ2-3)
CASSLSRADTQYF

SEQ ID NO: 518765 - protein, 16 aa, Homo sapiens
  CDR3 for alpha chain variable domain of TCR clone 259383 (TRAV3, TRAJ21)
CAVRDIERGNFNKFYF

SEQ ID NO: 518766 - protein, 15 aa, Homo sapiens
  CDR3 for beta chain variable domain of TCR clone 259383 (TRBV7-2, TRBJ2-1)
CASTHGTGIYNEQFF

SEQ ID NO: 518767 - protein, 16 aa, Homo sapiens
  CDR3 for alpha chain variable domain of TCR clone 259384 (TRAV27, TRAJ48)
TAAQPGDTGLYLPLTF

SEQ ID NO: 518768 - protein, 16 aa, Homo sapiens
  CDR3 for beta chain variable domain of TCR clone 259384 (TRBV19, TRBJ2-1)
CASSKAGPSSYNEQFF

SEQ ID NO: 518769 - protein, 13 aa, Homo sapiens
  CDR3 for alpha chain variable domain of TCR clone 259385 (TRAV16, TRAJ22)
CVFRKGSARQLTF

SEQ ID NO: 518770 - protein, 13 aa, Homo sapiens
  CDR3 for beta chain variable domain of TCR clone 259385 (TRBV27, TRBJ2-1)
CASRTLGVGEQFF

SEQ ID NO: 518771 - protein, 14 aa, Homo sapiens
  CDR3 for alpha chain variable domain of TCR clone 259386 (TRAV21, TRAJ35)
CAVMPIGFGNVLHC

SEQ ID NO: 518772 - protein, 18 aa, Homo sapiens
  CDR3 for beta chain variable domain of TCR clone 259386 (TRBV12-4, TRBJ2-4)
CASSRTGAVDVAKNIQYF

SEQ ID NO: 518773 - protein, 23 aa, Homo sapiens
  CDR3 for alpha chain variable domain of TCR clone 259387 (TRAV13-1, )
CAASTRRAQIPDIQNPDPAVYQL

SEQ ID NO: 518774 - protein, 19 aa, Homo sapiens
  CDR3 for beta chain variable domain of TCR clone 259387 (TRBV25-1, TRBJ2-2)
CAILVYRVDRGRKTGELFF

SEQ ID NO: 518775 - protein, 13 aa, Homo sapiens
  CDR3 for alpha chain variable domain of TCR clone 259388 (TRAV30, TRAJ31)
CGTEITNNARLMF

SEQ ID NO: 518776 - protein, 13 aa, Homo sapiens
  CDR3 for beta chain variable domain of TCR clone 259388 (TRBV12-5, TRBJ2-3)
CASGYRQSDTQYF

SEQ ID NO: 518777 - protein, 12 aa, Homo sapiens
  CDR3 for alpha chain variable domain of TCR clone 259389 (TRAV2, TRAJ30)
TTVLSKDDKIIF

SEQ ID NO: 518778 - protein, 15 aa, Homo sapiens
  CDR3 for beta chain variable domain of TCR clone 259389 (TRBV9, TRBJ1-6)
CASSVAGTGDSPLHF

SEQ ID NO: 518779 - protein, 12 aa, Homo sapiens
  CDR3 for alpha chain variable domain of TCR clone 259390 (TRAV1-2, TRAJ26)
CAVRYYGQNFVF

SEQ ID NO: 518780 - protein, 13 aa, Homo sapiens
  CDR3 for beta chain variable domain of TCR clone 259390 (TRBV7-9, TRBJ1-2)
CAGSLKQNYGYTF

SEQ ID NO: 518781 - protein, 16 aa, Homo sapiens
  CDR3 for alpha chain variable domain of TCR clone 259391 (TRAV30, TRAJ24)
CGTEIVDADSWGKFQF

SEQ ID NO: 518782 - protein, 16 aa, Homo sapiens
  CDR3 for beta chain variable domain of TCR clone 259391 (TRBV18, TRBJ2-7)
CASSPGRAGGAYEQYF

SEQ ID NO: 518783 - protein, 12 aa, Homo sapiens
  CDR3 for alpha chain variable domain of TCR clone 259392 (TRAV12-3, TRAJ17)
CAMTLTGNKLTF

SEQ ID NO: 518784 - protein, 13 aa, Homo sapiens
  CDR3 for beta chain variable domain of TCR clone 259392 (TRBV4-1, TRBJ2-7)
CASSWTGGYEQYF

SEQ ID NO: 518785 - protein, 14 aa, Homo sapiens
  CDR3 for alpha chain variable domain of TCR clone 259393 (TRAV12-1, TRAJ3)
CVVILYSSASKIIF

SEQ ID NO: 518786 - protein, 16 aa, Homo sapiens
  CDR3 for beta chain variable domain of TCR clone 259393 (TRBV12-4, TRBJ2-2)
CASSSQVGGPGGELFF

SEQ ID NO: 518787 - protein, 12 aa, Homo sapiens
  CDR3 for alpha chain variable domain of TCR clone 259394 (TRAV12-3, TRAJ40)
CAMSSGTYKYIF

SEQ ID NO: 518788 - protein, 15 aa, Homo sapiens
  CDR3 for beta chain variable domain of TCR clone 259394 (TRBV7-2, TRBJ2-1)
CASSSGLAGGNEQFF

SEQ ID NO: 518789 - protein, 12 aa, Homo sapiens
  CDR3 for alpha chain variable domain of TCR clone 259395 (TRAV12-2, TRAJ20)
CAVRPSDYKLSF

SEQ ID NO: 518790 - protein, 15 aa, Homo sapiens
  CDR3 for beta chain variable domain of TCR clone 259395 (TRBV2, TRBJ2-2)
CASSRETVGTGELFF

SEQ ID NO: 518791 - protein, 13 aa, Homo sapiens
  CDR3 for alpha chain variable domain of TCR clone 259396 (TRAV1-2, TRAJ9)
CAALNTGGFKTIF

SEQ ID NO: 518792 - protein, 18 aa, Homo sapiens
  CDR3 for beta chain variable domain of TCR clone 259396 (TRBV12-4, TRBJ2-4)
CASSRTGAVDVAKNIQYF

SEQ ID NO: 518793 - protein, 11 aa, Homo sapiens
  CDR3 for alpha chain variable domain of TCR clone 259397 (TRAV2, TRAJ13)
CASGGYQKVTF

SEQ ID NO: 518794 - protein, 14 aa, Homo sapiens
  CDR3 for beta chain variable domain of TCR clone 259397 (TRBV7-3, TRBJ2-7)
CASSYDQDYYGQYF

SEQ ID NO: 518795 - protein, 14 aa, Homo sapiens
  CDR3 for alpha chain variable domain of TCR clone 259398 (TRAV17, TRAJ57)
CATYPQVGSEKLVF

SEQ ID NO: 518796 - protein, 16 aa, Homo sapiens
  CDR3 for beta chain variable domain of TCR clone 259398 (TRBV20-1, TRBJ1-4)
CSAPGQGLLTNEKLFF

SEQ ID NO: 518797 - protein, 10 aa, Homo sapiens
  CDR3 for alpha chain variable domain of TCR clone 259399 (TRAV12-3, TRAJ27)
CNGQCRQITF

SEQ ID NO: 518798 - protein, 13 aa, Homo sapiens
  CDR3 for beta chain variable domain of TCR clone 259399 (TRBV9, TRBJ2-7)
CASSVAEYYEQYF

SEQ ID NO: 518799 - protein, 18 aa, Homo sapiens
  CDR3 for alpha chain variable domain of TCR clone 259400 (TRAV21, TRAJ52)
CAVRPSPAGGTSYGKLTF

SEQ ID NO: 518800 - protein, 14 aa, Homo sapiens
  CDR3 for beta chain variable domain of TCR clone 259400 (TRBV25-1, TRBJ1-2)
CASSEAGTAYGYAF

SEQ ID NO: 518801 - protein, 11 aa, Homo sapiens
  CDR3 for alpha chain variable domain of TCR clone 259401 (TRAV12-1, TRAJ8)
CVVKGFQKLVF

SEQ ID NO: 518802 - protein, 14 aa, Homo sapiens
  CDR3 for beta chain variable domain of TCR clone 259401 (TRBV12-4, TRBJ2-3)
CASSGQGSTDTQYF

SEQ ID NO: 518803 - protein, 14 aa, Homo sapiens
  CDR3 for alpha chain variable domain of TCR clone 259402 (TRAV17, TRAJ5)
CATVALRAGEHLLL

SEQ ID NO: 518804 - protein, 14 aa, Homo sapiens
  CDR3 for beta chain variable domain of TCR clone 259402 (TRBV28, TRBJ2-7)
CASSPYGMAYEQYF

SEQ ID NO: 518805 - protein, 13 aa, Homo sapiens
  CDR3 for alpha chain variable domain of TCR clone 259403 (TRAV27, TRAJ42)
CAGARGSQGNLIF

SEQ ID NO: 518806 - protein, 15 aa, Homo sapiens
  CDR3 for beta chain variable domain of TCR clone 259403 (TRBV10-3, TRBJ2-2)
CDIRTDREDTGELFF

SEQ ID NO: 518807 - protein, 16 aa, Homo sapiens
  CDR3 for alpha chain variable domain of TCR clone 259404 (TRAV12-2, TRAJ10)
CAVNRVLTGGGNKLTF

SEQ ID NO: 518808 - protein, 11 aa, Homo sapiens
  CDR3 for beta chain variable domain of TCR clone 259404 (TRBV28, TRBJ2-7)
CQSFSSYEQYF

SEQ ID NO: 518809 - protein, 13 aa, Homo sapiens
  CDR3 for alpha chain variable domain of TCR clone 259405 (TRAV4, TRAJ7)
CLVGVYGNNRLAF

SEQ ID NO: 518810 - protein, 15 aa, Homo sapiens
  CDR3 for beta chain variable domain of TCR clone 259405 (TRBV29-1, TRBJ2-1)
CSGRDRKSSYNEQFF

SEQ ID NO: 518811 - protein, 12 aa, Homo sapiens
  CDR3 for alpha chain variable domain of TCR clone 259406 (TRAV13-1, TRAJ21)
CAAKEGFNKFYF

SEQ ID NO: 518812 - protein, 13 aa, Homo sapiens
  CDR3 for beta chain variable domain of TCR clone 259406 (TRBV7-3, TRBJ1-1)
CASSQDWGAEAFF

SEQ ID NO: 518813 - protein, 12 aa, Homo sapiens
  CDR3 for alpha chain variable domain of TCR clone 259407 (TRAV3, TRAJ39)
CAVIEWSNMLTF

SEQ ID NO: 518814 - protein, 13 aa, Homo sapiens
  CDR3 for beta chain variable domain of TCR clone 259407 (TRBV14, TRBJ1-1)
CASSREFGTEAFF

SEQ ID NO: 518815 - protein, 18 aa, Homo sapiens
  CDR3 for alpha chain variable domain of TCR clone 259408 (TRAV3, TRAJ6)
CCERQESQPIGGSYIPTF

SEQ ID NO: 518816 - protein, 15 aa, Homo sapiens
  CDR3 for beta chain variable domain of TCR clone 259408 (TRBV18, TRBJ2-7)
CASSPTFMDSYEQYF

SEQ ID NO: 518817 - protein, 13 aa, Homo sapiens
  CDR3 for alpha chain variable domain of TCR clone 259409 (TRAV23/DV6, TRAJ16)
CAASGSDGQKLLF

SEQ ID NO: 518818 - protein, 17 aa, Homo sapiens
  CDR3 for beta chain variable domain of TCR clone 259409 (TRBV5-1, TRBJ1-1)
CDSSLQGAGTLKLSLDK

SEQ ID NO: 518819 - protein, 12 aa, Homo sapiens
  CDR3 for alpha chain variable domain of TCR clone 259410 (TRAV13-1, TRAJ53)
CSAGGSNYKLTF

SEQ ID NO: 518820 - protein, 11 aa, Homo sapiens
  CDR3 for beta chain variable domain of TCR clone 259410 (TRBV2, TRBJ1-1)
CASREGTEAFF

SEQ ID NO: 518821 - protein, 16 aa, Homo sapiens
  CDR3 for alpha chain variable domain of TCR clone 259411 (TRAV21, TRAJ37)
CAVCTAGSSNTGKLTF

SEQ ID NO: 518822 - protein, 13 aa, Homo sapiens
  CDR3 for beta chain variable domain of TCR clone 259411 (TRBV7-9, TRBJ2-5)
CASLPSGRETQYF

SEQ ID NO: 518823 - protein, 17 aa, Homo sapiens
  CDR3 for alpha chain variable domain of TCR clone 259412 (TRAV29/DV5, TRAJ52)
CAATSTADGTSYGKLTF

SEQ ID NO: 518824 - protein, 14 aa, Homo sapiens
  CDR3 for beta chain variable domain of TCR clone 259412 (TRBV7-2, TRBJ2-7)
CASSPKTSFYEQYF

SEQ ID NO: 518825 - protein, 16 aa, Homo sapiens
  CDR3 for alpha chain variable domain of TCR clone 259413 (TRAV30, TRAJ24)
CGTEIVDADSWGKFQF

SEQ ID NO: 518826 - protein, 16 aa, Homo sapiens
  CDR3 for beta chain variable domain of TCR clone 259413 (TRBV4-1, TRBJ2-7)
CASSPVAGGTSSTPGR

SEQ ID NO: 518827 - protein, 22 aa, Homo sapiens
  CDR3 for alpha chain variable domain of TCR clone 259414 (TRAV3, )
CAVRDCLNAGTNHIQNPDPAVY

SEQ ID NO: 518828 - protein, 19 aa, Homo sapiens
  CDR3 for beta chain variable domain of TCR clone 259414 (TRBV7-2, TRBJ2-3)
CASSFLSRNWGGGTDTQYF

SEQ ID NO: 518829 - protein, 14 aa, Homo sapiens
  CDR3 for alpha chain variable domain of TCR clone 259415 (TRAV9-2, TRAJ39)
CALYIYNTGNMLTF

SEQ ID NO: 518830 - protein, 15 aa, Homo sapiens
  CDR3 for beta chain variable domain of TCR clone 259415 (TRBV28, TRBJ1-3)
CASSMGWASGNTIYF

SEQ ID NO: 518831 - protein, 15 aa, Homo sapiens
  CDR3 for alpha chain variable domain of TCR clone 259416 (TRAV35, TRAJ40)
CAGVPGASGTYKYIF

SEQ ID NO: 518832 - protein, 12 aa, Homo sapiens
  CDR3 for beta chain variable domain of TCR clone 259416 (TRBV12-4, TRBJ2-7)
CASSLGGYEQYF

SEQ ID NO: 518833 - protein, 12 aa, Homo sapiens
  CDR3 for alpha chain variable domain of TCR clone 259417 (TRAV12-2, TRAJ36)
CAASRGANNLFF

SEQ ID NO: 518834 - protein, 15 aa, Homo sapiens
  CDR3 for beta chain variable domain of TCR clone 259417 (TRBV11-2, TRBJ1-3)
CASSLDGTVGNTIYF

SEQ ID NO: 518835 - protein, 16 aa, Homo sapiens
  CDR3 for alpha chain variable domain of TCR clone 259418 (TRAV3, TRAJ34)
CAVRARGTPTSSSLGL

SEQ ID NO: 518836 - protein, 15 aa, Homo sapiens
  CDR3 for beta chain variable domain of TCR clone 259418 (TRBV6-3, TRBJ2-7)
CASSSSGTVFYEQYF

SEQ ID NO: 518837 - protein, 17 aa, Homo sapiens
  CDR3 for alpha chain variable domain of TCR clone 259419 (TRAV12-2, TRAJ52)
CAVNPYAGGTSYGKLTF

SEQ ID NO: 518838 - protein, 15 aa, Homo sapiens
  CDR3 for beta chain variable domain of TCR clone 259419 (TRBV28, TRBJ2-5)
CASSPGQGSIETQYF

SEQ ID NO: 518839 - protein, 14 aa, Homo sapiens
  CDR3 for alpha chain variable domain of TCR clone 259420 (TRAV13-1, TRAJ40)
CAASMTSGTYKYIF

SEQ ID NO: 518840 - protein, 13 aa, Homo sapiens
  CDR3 for beta chain variable domain of TCR clone 259420 (TRBV12-5, TRBJ2-3)
CASGDRQSDTQYF

SEQ ID NO: 518841 - protein, 15 aa, Homo sapiens
  CDR3 for alpha chain variable domain of TCR clone 259421 (TRAV20, TRAJ53)
CAVQASGGSNYKLTF

SEQ ID NO: 518842 - protein, 15 aa, Homo sapiens
  CDR3 for beta chain variable domain of TCR clone 259421 (TRBV9, TRBJ2-1)
CASSLAGGSYNEQFF

SEQ ID NO: 518843 - protein, 14 aa, Homo sapiens
  CDR3 for alpha chain variable domain of TCR clone 259422 (TRAV12-3, TRAJ10)
SHLPLTGGGNKLTF

SEQ ID NO: 518844 - protein, 10 aa, Homo sapiens
  CDR3 for beta chain variable domain of TCR clone 259422 (TRBV7-3, TRBJ2-2)
CASSETGQGT

SEQ ID NO: 518845 - protein, 16 aa, Homo sapiens
  CDR3 for alpha chain variable domain of TCR clone 259423 (TRAV3, TRAJ10)
CAVRAMRAGGGNKLTF

SEQ ID NO: 518846 - protein, 17 aa, Homo sapiens
  CDR3 for beta chain variable domain of TCR clone 259423 (TRBV6-5, TRBJ2-4)
CASRPTPGQGSKNIQYF

SEQ ID NO: 518847 - protein, 13 aa, Homo sapiens
  CDR3 for alpha chain variable domain of TCR clone 259424 (TRAV39, TRAJ58)
CAGEETSGSRLTF

SEQ ID NO: 518848 - protein, 13 aa, Homo sapiens
  CDR3 for beta chain variable domain of TCR clone 259424 (TRBV15, TRBJ2-7)
CATSPTGHYEQYF

SEQ ID NO: 518849 - protein, 16 aa, Homo sapiens
  CDR3 for alpha chain variable domain of TCR clone 259425 (TRAV12-3, TRAJ10)
CALKKGITGGGNKLTF

SEQ ID NO: 518850 - protein, 12 aa, Homo sapiens
  CDR3 for beta chain variable domain of TCR clone 259425 (TRBV20-1, TRBJ2-7)
CSAITPTKEQYF

SEQ ID NO: 518851 - protein, 14 aa, Homo sapiens
  CDR3 for alpha chain variable domain of TCR clone 259426 (TRAV1-2, TRAJ16)
CAVNRFSAGQKLLF

SEQ ID NO: 518852 - protein, 16 aa, Homo sapiens
  CDR3 for beta chain variable domain of TCR clone 259426 (TRBV13, TRBJ2-2)
CASSPRTGEHTGELFF

SEQ ID NO: 518853 - protein, 13 aa, Homo sapiens
  CDR3 for alpha chain variable domain of TCR clone 259427 (TRAV17, TRAJ40)
CATDEGGTYKYIF

SEQ ID NO: 518854 - protein, 14 aa, Homo sapiens
  CDR3 for beta chain variable domain of TCR clone 259427 (TRBV19, TRBJ2-1)
CASKDPGLANEQFF

SEQ ID NO: 518855 - protein, 15 aa, Homo sapiens
  CDR3 for alpha chain variable domain of TCR clone 259428 (TRAV17, TRAJ4)
CATKSAGYNKLILEQ

SEQ ID NO: 518856 - protein, 14 aa, Homo sapiens
  CDR3 for beta chain variable domain of TCR clone 259428 (TRBV20-1, TRBJ1-5)
CSARDDRGNQPQHF

SEQ ID NO: 518857 - protein, 13 aa, Homo sapiens
  CDR3 for alpha chain variable domain of TCR clone 259429 (TRAV27, TRAJ39)
CAGVNNAGNMLTF

SEQ ID NO: 518858 - protein, 15 aa, Homo sapiens
  CDR3 for beta chain variable domain of TCR clone 259429 (TRBV4-1, TRBJ1-4)
CASSDTGGTNEKLFF

SEQ ID NO: 518859 - protein, 16 aa, Homo sapiens
  CDR3 for alpha chain variable domain of TCR clone 259430 (TRAV41, TRAJ34)
CAFQGIGPYNTDKLIF

SEQ ID NO: 518860 - protein, 15 aa, Homo sapiens
  CDR3 for beta chain variable domain of TCR clone 259430 (TRBV20-1, TRBJ1-1)
CSASRGVTGNTEAFF

SEQ ID NO: 518861 - protein, 13 aa, Homo sapiens
  CDR3 for alpha chain variable domain of TCR clone 259431 (TRAV21, TRAJ47)
CAVSGLYGNKLVF

SEQ ID NO: 518862 - protein, 17 aa, Homo sapiens
  CDR3 for beta chain variable domain of TCR clone 259431 (TRBV15, TRBJ2-3)
CAISGTTSEEGTDTQYF

SEQ ID NO: 518863 - protein, 14 aa, Homo sapiens
  CDR3 for alpha chain variable domain of TCR clone 259432 (TRAV8-3, TRAJ4)
CAVGASGGYNKLIF

SEQ ID NO: 518864 - protein, 16 aa, Homo sapiens
  CDR3 for beta chain variable domain of TCR clone 259432 (TRBV4-3, TRBJ2-2)
CASSYLQGSGTGELFF

SEQ ID NO: 518865 - protein, 12 aa, Homo sapiens
  CDR3 for alpha chain variable domain of TCR clone 259433 (TRAV23/DV6, TRAJ30)
CAASKGDDKIIF

SEQ ID NO: 518866 - protein, 15 aa, Homo sapiens
  CDR3 for beta chain variable domain of TCR clone 259433 (TRBV20-1, TRBJ2-7)
CSARDRVSGMDERYF

SEQ ID NO: 518867 - protein, 11 aa, Homo sapiens
  CDR3 for alpha chain variable domain of TCR clone 259434 (TRAV2, TRAJ20)
CAVEYDYKLSL

SEQ ID NO: 518868 - protein, 14 aa, Homo sapiens
  CDR3 for beta chain variable domain of TCR clone 259434 (TRBV27, TRBJ2-2)
CASRPGVNTGELFF

SEQ ID NO: 518869 - protein, 14 aa, Homo sapiens
  CDR3 for alpha chain variable domain of TCR clone 259435 (TRAV1-2, TRAJ8)
CAVREDTGFQKLVF

SEQ ID NO: 518870 - protein, 15 aa, Homo sapiens
  CDR3 for beta chain variable domain of TCR clone 259435 (TRBV28, TRBJ1-1)
CASRIKGGLNTEAFF

SEQ ID NO: 518871 - protein, 20 aa, Homo sapiens
  CDR3 for alpha chain variable domain of TCR clone 259436 (TRAV8-3, TRAJ44)
LSTSVLWVRVYTGTASKLTF

SEQ ID NO: 518872 - protein, 15 aa, Homo sapiens
  CDR3 for beta chain variable domain of TCR clone 259436 (TRBV6-5, TRBJ1-2)
CASSYSQAFNYGYTF

SEQ ID NO: 518873 - protein, 13 aa, Homo sapiens
  CDR3 for alpha chain variable domain of TCR clone 259437 (TRAV3, TRAJ36)
CAVRDTGANNLFF

SEQ ID NO: 518874 - protein, 15 aa, Homo sapiens
  CDR3 for beta chain variable domain of TCR clone 259437 (TRBV24-1, TRBJ2-1)
CATSGSGVFYKEQFF

SEQ ID NO: 518875 - protein, 13 aa, Homo sapiens
  CDR3 for alpha chain variable domain of TCR clone 259438 (TRAV3, TRAJ20)
CCEAFCNDYKLSF

SEQ ID NO: 518876 - protein, 16 aa, Homo sapiens
  CDR3 for beta chain variable domain of TCR clone 259438 (TRBV7-3, TRBJ2-2)
CASSLKRGTLSGELFF

SEQ ID NO: 518877 - protein, 12 aa, Homo sapiens
  CDR3 for alpha chain variable domain of TCR clone 259439 (TRAV13-2, TRAJ23)
CAECHRGGKLIF

SEQ ID NO: 518878 - protein, 15 aa, Homo sapiens
  CDR3 for beta chain variable domain of TCR clone 259439 (TRBV9, TRBJ1-6)
CASSVAGTGDSPLHF

SEQ ID NO: 518879 - protein, 16 aa, Homo sapiens
  CDR3 for alpha chain variable domain of TCR clone 259440 (TRAV26-1, TRAJ32)
CIVRTNYGVATNKLIF

SEQ ID NO: 518880 - protein, 14 aa, Homo sapiens
  CDR3 for beta chain variable domain of TCR clone 259440 (TRBV27, TRBJ1-1)
CASSLLSGLSEAFF

SEQ ID NO: 518881 - protein, 14 aa, Homo sapiens
  CDR3 for alpha chain variable domain of TCR clone 259441 (TRAV2, TRAJ9)
CTVEDRSGGFKTIF

SEQ ID NO: 518882 - protein, 13 aa, Homo sapiens
  CDR3 for beta chain variable domain of TCR clone 259441 (TRBV7-9, TRBJ1-2)
CASSLKQNYGYTF

SEQ ID NO: 518883 - protein, 13 aa, Homo sapiens
  CDR3 for alpha chain variable domain of TCR clone 259442 (TRAV12-2, TRAJ37)
CAGGSGNTGKLIF

SEQ ID NO: 518884 - protein, 10 aa, Homo sapiens
  CDR3 for beta chain variable domain of TCR clone 259442 (TRBV11-2, TRBJ2-1)
PGVEYNEQFF

SEQ ID NO: 518885 - protein, 14 aa, Homo sapiens
  CDR3 for alpha chain variable domain of TCR clone 259443 (TRAV29/DV5, TRAJ42)
CAAKGGGSQGNLIF

SEQ ID NO: 518886 - protein, 14 aa, Homo sapiens
  CDR3 for beta chain variable domain of TCR clone 259443 (TRBV2, TRBJ1-5)
CASSEAAGGQPQHF

SEQ ID NO: 518887 - protein, 15 aa, Homo sapiens
  CDR3 for alpha chain variable domain of TCR clone 259444 (TRAV17, TRAJ35)
CATAFVIGFGNVLHC

SEQ ID NO: 518888 - protein, 16 aa, Homo sapiens
  CDR3 for beta chain variable domain of TCR clone 259444 (TRBV20-1, TRBJ1-4)
CSAPGQGLLTNEKLFF

SEQ ID NO: 518889 - protein, 13 aa, Homo sapiens
  CDR3 for alpha chain variable domain of TCR clone 259445 (TRAV13-1, TRAJ43)
CAASLSNNNDMRF

SEQ ID NO: 518890 - protein, 14 aa, Homo sapiens
  CDR3 for beta chain variable domain of TCR clone 259445 (TRBV5-1, TRBJ2-5)
GASSLAGKQETQYF

SEQ ID NO: 518891 - protein, 12 aa, Homo sapiens
  CDR3 for alpha chain variable domain of TCR clone 259446 (TRAV12-3, TRAJ17)
CAITLTGNKLTF

SEQ ID NO: 518892 - protein, 15 aa, Homo sapiens
  CDR3 for beta chain variable domain of TCR clone 259446 (TRBV20-1, TRBJ2-7)
CSARVRVSGMDEQYF

SEQ ID NO: 518893 - protein, 16 aa, Homo sapiens
  CDR3 for alpha chain variable domain of TCR clone 259447 (TRAV30, TRAJ24)
CGTEIVDADSWGKFPF

SEQ ID NO: 518894 - protein, 14 aa, Homo sapiens
  CDR3 for beta chain variable domain of TCR clone 259447 (TRBV7-9, TRBJ2-4)
CASSLAMGGNIQYF

SEQ ID NO: 518895 - protein, 15 aa, Homo sapiens
  CDR3 for alpha chain variable domain of TCR clone 259448 (TRAV3, TRAJ47)
CAVRDIGECGNKLVF

SEQ ID NO: 518896 - protein, 14 aa, Homo sapiens
  CDR3 for beta chain variable domain of TCR clone 259448 (TRBV13, TRBJ2-5)
CASSLERVGETQFF

SEQ ID NO: 518897 - protein, 12 aa, Homo sapiens
  CDR3 for alpha chain variable domain of TCR clone 259449 (TRAV13-1, TRAJ43)
CAASIGDNDMRC

SEQ ID NO: 518898 - protein, 17 aa, Homo sapiens
  CDR3 for beta chain variable domain of TCR clone 259449 (TRBV11-3, TRBJ2-3)
CASSPGSSGGRTETQYF

SEQ ID NO: 518899 - protein, 14 aa, Homo sapiens
  CDR3 for alpha chain variable domain of TCR clone 259450 (TRAV17, TRAJ57)
CATDPQGGSEKLVF

SEQ ID NO: 518900 - protein, 13 aa, Homo sapiens
  CDR3 for beta chain variable domain of TCR clone 259450 (TRBV29-1, TRBJ2-1)
CSVEGGRVNEQYF

SEQ ID NO: 518901 - protein, 12 aa, Homo sapiens
  CDR3 for alpha chain variable domain of TCR clone 259451 (TRAV21, TRAJ13)
PGPSGGYQKVIF

SEQ ID NO: 518902 - protein, 15 aa, Homo sapiens
  CDR3 for beta chain variable domain of TCR clone 259451 (TRBV7-9, TRBJ1-6)
CASSAPGRGNSPLHF

SEQ ID NO: 518903 - protein, 13 aa, Homo sapiens
  CDR3 for alpha chain variable domain of TCR clone 259452 (TRAV3, TRAJ15)
CAVRDQAGTALIF

SEQ ID NO: 518904 - protein, 12 aa, Homo sapiens
  CDR3 for beta chain variable domain of TCR clone 259452 (TRBV12-5, TRBJ2-5)
CASGQGVETQYF

SEQ ID NO: 518905 - protein, 15 aa, Homo sapiens
  CDR3 for alpha chain variable domain of TCR clone 259453 (TRAV3, TRAJ20)
CAVRDIKLSDYKLSF

SEQ ID NO: 518906 - protein, 14 aa, Homo sapiens
  CDR3 for beta chain variable domain of TCR clone 259453 (TRBV6-1, TRBJ1-3)
CASVQGGGGNTIYF

SEQ ID NO: 518907 - protein, 12 aa, Homo sapiens
  CDR3 for alpha chain variable domain of TCR clone 259454 (TRAV12-2, TRAJ4)
GWPEGGYNQLIF

SEQ ID NO: 518908 - protein, 16 aa, Homo sapiens
  CDR3 for beta chain variable domain of TCR clone 259454 (TRBV6-1, TRBJ2-5)
CASSETLDRGAETQYF

SEQ ID NO: 518909 - protein, 12 aa, Homo sapiens
  CDR3 for alpha chain variable domain of TCR clone 259455 (TRAV12-2, TRAJ10)
WGVTGGGNKLTF

SEQ ID NO: 518910 - protein, 16 aa, Homo sapiens
  CDR3 for beta chain variable domain of TCR clone 259455 (TRBV6-4, TRBJ1-2)
CASSEAVGDPNYGETF

SEQ ID NO: 518911 - protein, 14 aa, Homo sapiens
  CDR3 for alpha chain variable domain of TCR clone 259456 (TRAV13-1, TRAJ8)
CAASMSTGFQELVF

SEQ ID NO: 518912 - protein, 13 aa, Homo sapiens
  CDR3 for beta chain variable domain of TCR clone 259456 (TRBV13, TRBJ2-1)
CASTPGSYNELFF

SEQ ID NO: 518913 - protein, 14 aa, Homo sapiens
  CDR3 for alpha chain variable domain of TCR clone 259457 (TRAV2, TRAJ37)
CAVDFTSNTGKLIF

SEQ ID NO: 518914 - protein, 16 aa, Homo sapiens
  CDR3 for beta chain variable domain of TCR clone 259457 (TRBV7-9, TRBJ2-5)
CASSPSGQGVKGTQYF

SEQ ID NO: 518915 - protein, 10 aa, Homo sapiens
  CDR3 for alpha chain variable domain of TCR clone 259458 (TRAV23/DV6, TRAJ57)
CAASSTLSQG

SEQ ID NO: 518916 - protein, 13 aa, Homo sapiens
  CDR3 for beta chain variable domain of TCR clone 259458 (TRBV5-1, TRBJ1-2)
CASSLQGNYGYTF

SEQ ID NO: 518917 - protein, 14 aa, Homo sapiens
  CDR3 for alpha chain variable domain of TCR clone 259459 (TRAV8-4, TRAJ9)
CAVRINTGGFKTIF

SEQ ID NO: 518918 - protein, 15 aa, Homo sapiens
  CDR3 for beta chain variable domain of TCR clone 259459 (TRBV20-1, TRBJ2-7)
CSARDRVSMMDEEYF

SEQ ID NO: 518919 - protein, 12 aa, Homo sapiens
  CDR3 for alpha chain variable domain of TCR clone 259460 (TRAV35, TRAJ12)
CAGMDSSYKLIF

SEQ ID NO: 518920 - protein, 15 aa, Homo sapiens
  CDR3 for beta chain variable domain of TCR clone 259460 (TRBV19, TRBJ2-1)
CASSSPGVPLDEQFF

SEQ ID NO: 518921 - protein, 15 aa, Homo sapiens
  CDR3 for alpha chain variable domain of TCR clone 259461 (TRAV1-1, TRAJ23)
CAVRVCYNQGGKLIF

SEQ ID NO: 518922 - protein, 13 aa, Homo sapiens
  CDR3 for beta chain variable domain of TCR clone 259461 (TRBV7-2, TRBJ1-1)
CASSLTENTESFF

SEQ ID NO: 518923 - protein, 13 aa, Homo sapiens
  CDR3 for alpha chain variable domain of TCR clone 259462 (TRAV13-1, TRAJ21)
CAASIYNLNKFYF

SEQ ID NO: 518924 - protein, 12 aa, Homo sapiens
  CDR3 for beta chain variable domain of TCR clone 259462 (TRBV11-2, TRBJ2-1)
CASSPGNNEQFF

SEQ ID NO: 518925 - protein, 16 aa, Homo sapiens
  CDR3 for alpha chain variable domain of TCR clone 259463 (TRAV3, TRAJ23)
CAVKIGIYNLGGKLIF

SEQ ID NO: 518926 - protein, 17 aa, Homo sapiens
  CDR3 for beta chain variable domain of TCR clone 259463 (TRBV10-3, TRBJ2-6)
CAISESTAPSGANVLTF

SEQ ID NO: 518927 - protein, 14 aa, Homo sapiens
  CDR3 for alpha chain variable domain of TCR clone 259464 (TRAV26-1, TRAJ38)
CIADNAGNNRKLSW

SEQ ID NO: 518928 - protein, 13 aa, Homo sapiens
  CDR3 for beta chain variable domain of TCR clone 259464 (TRBV20-1, TRBJ1-1)
CSARGGGNTEDFF

SEQ ID NO: 518929 - protein, 15 aa, Homo sapiens
  CDR3 for alpha chain variable domain of TCR clone 259465 (TRAV35, TRAJ40)
CAGQLGTSGTYKYTF

SEQ ID NO: 518930 - protein, 14 aa, Homo sapiens
  CDR3 for beta chain variable domain of TCR clone 259465 (TRBV7-3, TRBJ2-1)
CASSVAGGTNEQFF

SEQ ID NO: 518931 - protein, 13 aa, Homo sapiens
  CDR3 for alpha chain variable domain of TCR clone 259466 (TRAV17, TRAJ5)
CSPMDTGRRALTF

SEQ ID NO: 518932 - protein, 16 aa, Homo sapiens
  CDR3 for beta chain variable domain of TCR clone 259466 (TRBV27, TRBJ2-7)
CASSSERRDSAYEQYF

SEQ ID NO: 518933 - protein, 16 aa, Homo sapiens
  CDR3 for alpha chain variable domain of TCR clone 259467 (TRAV3, TRAJ10)
CAVRDMRAGGGKRLTF

SEQ ID NO: 518934 - protein, 14 aa, Homo sapiens
  CDR3 for beta chain variable domain of TCR clone 259467 (TRBV25-1, TRBJ1-1)
CASTHLGGNTEAFF

SEQ ID NO: 518935 - protein, 17 aa, Homo sapiens
  CDR3 for alpha chain variable domain of TCR clone 259468 (TRAV3, TRAJ6)
CAVRDGPRAGGSYIPTF

SEQ ID NO: 518936 - protein, 18 aa, Homo sapiens
  CDR3 for beta chain variable domain of TCR clone 259468 (TRBV7-3, TRBJ2-3)
CASSSTGTYPGSTDRQYF

SEQ ID NO: 518937 - protein, 11 aa, Homo sapiens
  CDR3 for alpha chain variable domain of TCR clone 259469 (TRAV12-3, TRAJ27)
CAMANAGKSTF

SEQ ID NO: 518938 - protein, 16 aa, Homo sapiens
  CDR3 for beta chain variable domain of TCR clone 259469 (TRBV11-3, TRBJ2-5)
CASSSVVAGSTETQYF

SEQ ID NO: 518939 - protein, 13 aa, Homo sapiens
  CDR3 for alpha chain variable domain of TCR clone 259470 (TRAV20, TRAJ48)
CAVQGVGNEKLTF

SEQ ID NO: 518940 - protein, 12 aa, Homo sapiens
  CDR3 for beta chain variable domain of TCR clone 259470 (TRBV2, TRBJ2-2)
CSSSQPGLAGGG

SEQ ID NO: 518941 - protein, 17 aa, Homo sapiens
  CDR3 for alpha chain variable domain of TCR clone 259471 (TRAV26-1, TRAJ28)
RIVRALYSGAGSYQLTF

SEQ ID NO: 518942 - protein, 12 aa, Homo sapiens
  CDR3 for beta chain variable domain of TCR clone 259471 (TRBV12-4, TRBJ2-1)
CASRQTENEQFF

SEQ ID NO: 518943 - protein, 11 aa, Homo sapiens
  CDR3 for alpha chain variable domain of TCR clone 259472 (TRAV35, TRAJ30)
CAPGGDDKIIF

SEQ ID NO: 518944 - protein, 13 aa, Homo sapiens
  CDR3 for beta chain variable domain of TCR clone 259472 (TRBV7-6, TRBJ2-1)
CQQLGGGADEQFL

SEQ ID NO: 518945 - protein, 11 aa, Homo sapiens
  CDR3 for alpha chain variable domain of TCR clone 259473 (TRAV2, TRAJ33)
CAVESNYQLIW

SEQ ID NO: 518946 - protein, 15 aa, Homo sapiens
  CDR3 for beta chain variable domain of TCR clone 259473 (TRBV6-1, TRBJ2-2)
CASSAGQGYTGELFF

SEQ ID NO: 518947 - protein, 15 aa, Homo sapiens
  CDR3 for alpha chain variable domain of TCR clone 259474 (TRAV26-1, TRAJ40)
CIVRVTTSGTYKYIF

SEQ ID NO: 518948 - protein, 14 aa, Homo sapiens
  CDR3 for beta chain variable domain of TCR clone 259474 (TRBV7-3, TRBJ2-1)
CASSLSGSYNEQFF

SEQ ID NO: 518949 - protein, 15 aa, Homo sapiens
  CDR3 for alpha chain variable domain of TCR clone 259475 (TRAV25, TRAJ52)
CAGTSGGTCYGKLTF

SEQ ID NO: 518950 - protein, 16 aa, Homo sapiens
  CDR3 for beta chain variable domain of TCR clone 259475 (TRBV15, TRBJ1-2)
CATSRGPRTGGGGYTF

SEQ ID NO: 518951 - protein, 11 aa, Homo sapiens
  CDR3 for alpha chain variable domain of TCR clone 259476 (TRAV12-3, TRAJ43)
CAMSVSNDMRF

SEQ ID NO: 518952 - protein, 13 aa, Homo sapiens
  CDR3 for beta chain variable domain of TCR clone 259476 (TRBV20-1, TRBJ1-1)
CSALLGGGTEAFF

SEQ ID NO: 518953 - protein, 13 aa, Homo sapiens
  CDR3 for alpha chain variable domain of TCR clone 259477 (TRAV20, TRAJ35)
CAVQASFGNVLHC

SEQ ID NO: 518954 - protein, 13 aa, Homo sapiens
  CDR3 for beta chain variable domain of TCR clone 259477 (TRBV5-5, TRBJ1-2)
CASSFWRGEDYTF

SEQ ID NO: 518955 - protein, 13 aa, Homo sapiens
  CDR3 for alpha chain variable domain of TCR clone 259478 (TRAV1-2, TRAJ9)
CAALNTGGFKTIF

SEQ ID NO: 518956 - protein, 15 aa, Homo sapiens
  CDR3 for beta chain variable domain of TCR clone 259478 (TRBV7-2, TRBJ2-1)
CASSLVGSSYNGQFF

SEQ ID NO: 518957 - protein, 14 aa, Homo sapiens
  CDR3 for alpha chain variable domain of TCR clone 259479 (TRAV13-1, TRAJ3)
CAASKSSSASKIIF

SEQ ID NO: 518958 - protein, 13 aa, Homo sapiens
  CDR3 for beta chain variable domain of TCR clone 259479 (TRBV25-1, TRBJ2-5)
CARSESGRETQYF

SEQ ID NO: 518959 - protein, 13 aa, Homo sapiens
  CDR3 for alpha chain variable domain of TCR clone 259480 (TRAV25, TRAJ10)
CAGRTGGGNKLTF

SEQ ID NO: 518960 - protein, 15 aa, Homo sapiens
  CDR3 for beta chain variable domain of TCR clone 259480 (TRBV19, TRBJ2-1)
CASSSPECPLMSSSS

SEQ ID NO: 518961 - protein, 14 aa, Homo sapiens
  CDR3 for alpha chain variable domain of TCR clone 259481 (TRAV17, TRAJ22)
CATSPSGSARQLTF

SEQ ID NO: 518962 - protein, 14 aa, Homo sapiens
  CDR3 for beta chain variable domain of TCR clone 259481 (TRBV2, TRBJ2-5)
CASKRDGTTETQYF

SEQ ID NO: 518963 - protein, 14 aa, Homo sapiens
  CDR3 for alpha chain variable domain of TCR clone 259482 (TRAV1-2, TRAJ8)
CAVREDTGFQKLVF

SEQ ID NO: 518964 - protein, 22 aa, Homo sapiens
  CDR3 for beta chain variable domain of TCR clone 259482 (TRBV7-3, TRBJ2-2)
GGTQPCISVPAAQEDTPGSFFF

SEQ ID NO: 518965 - protein, 13 aa, Homo sapiens
  CDR3 for alpha chain variable domain of TCR clone 259483 (TRAV8-6, TRAJ8)
CAFMNTGFQKLVF

SEQ ID NO: 518966 - protein, 15 aa, Homo sapiens
  CDR3 for beta chain variable domain of TCR clone 259483 (TRBV28, TRBJ2-5)
CASSSCRVIQETQYF

SEQ ID NO: 518967 - protein, 15 aa, Homo sapiens
  CDR3 for alpha chain variable domain of TCR clone 259484 (TRAV36/DV7, TRAJ53)
CAVAGSGGSNYKLTF

SEQ ID NO: 518968 - protein, 12 aa, Homo sapiens
  CDR3 for beta chain variable domain of TCR clone 259484 (TRBV29-1, TRBJ2-3)
CSVTGGADTQYF

SEQ ID NO: 518969 - protein, 17 aa, Homo sapiens
  CDR3 for alpha chain variable domain of TCR clone 259485 (TRAV3, TRAJ42)
CAVRDRDYGGSQGNLIF

SEQ ID NO: 518970 - protein, 14 aa, Homo sapiens
  CDR3 for beta chain variable domain of TCR clone 259485 (TRBV4-1, TRBJ2-2)
CASSQAVNTGELLF

SEQ ID NO: 518971 - protein, 16 aa, Homo sapiens
  CDR3 for alpha chain variable domain of TCR clone 259486 (TRAV1-2, TRAJ10)
CAVRDQGWGGGNKLTF

SEQ ID NO: 518972 - protein, 15 aa, Homo sapiens
  CDR3 for beta chain variable domain of TCR clone 259486 (TRBV4-3, TRBJ2-7)
CASSQDLGSSYEQYF

SEQ ID NO: 518973 - protein, 14 aa, Homo sapiens
  CDR3 for alpha chain variable domain of TCR clone 259487 (TRAV1-2, TRAJ8)
CAVREDTGFQQLVF

SEQ ID NO: 518974 - protein, 15 aa, Homo sapiens
  CDR3 for beta chain variable domain of TCR clone 259487 (TRBV11-3, TRBJ2-3)
CASLKDGREGDTQYF

SEQ ID NO: 518975 - protein, 13 aa, Homo sapiens
  CDR3 for alpha chain variable domain of TCR clone 259488 (TRAV2, TRAJ40)
CAVVTSGTYKYIF

SEQ ID NO: 518976 - protein, 16 aa, Homo sapiens
  CDR3 for beta chain variable domain of TCR clone 259488 (TRBV3-1, TRBJ2-7)
CASSQLGLAGGREQYF

SEQ ID NO: 518977 - protein, 13 aa, Homo sapiens
  CDR3 for alpha chain variable domain of TCR clone 259489 (TRAV8-6, TRAJ49)
GAVITNTGNQFYF

SEQ ID NO: 518978 - protein, 14 aa, Homo sapiens
  CDR3 for beta chain variable domain of TCR clone 259489 (TRBV5-1, TRBJ2-7)
CAGSRGESLYEQYF

SEQ ID NO: 518979 - protein, 11 aa, Homo sapiens
  CDR3 for alpha chain variable domain of TCR clone 259490 (TRAV35, TRAJ30)
CAPGGDDKIIF

SEQ ID NO: 518980 - protein, 12 aa, Homo sapiens
  CDR3 for beta chain variable domain of TCR clone 259490 (TRBV11-2, TRBJ2-1)
CASSPGNNEQFF

SEQ ID NO: 518981 - protein, 12 aa, Homo sapiens
  CDR3 for alpha chain variable domain of TCR clone 259491 (TRAV12-3, TRAJ40)
CAMSSGTYKYIF

SEQ ID NO: 518982 - protein, 13 aa, Homo sapiens
  CDR3 for beta chain variable domain of TCR clone 259491 (TRBV9, TRBJ2-1)
CASSPSGGSEQFF

SEQ ID NO: 518983 - protein, 15 aa, Homo sapiens
  CDR3 for alpha chain variable domain of TCR clone 259492 (TRAV8-4, TRAJ7)
CAVSGGNYGDNRLAF

SEQ ID NO: 518984 - protein, 11 aa, Homo sapiens
  CDR3 for beta chain variable domain of TCR clone 259492 (TRBV20-1, TRBJ2-1)
CSLSSGSEQFF

SEQ ID NO: 518985 - protein, 16 aa, Homo sapiens
  CDR3 for alpha chain variable domain of TCR clone 259493 (TRAV20, TRAJ38)
CAVQASNAGNNRKMIW

SEQ ID NO: 518986 - protein, 16 aa, Homo sapiens
  CDR3 for beta chain variable domain of TCR clone 259493 (TRBV7-8, TRBJ2-6)
CASRVGDSSGANVLTF

SEQ ID NO: 518987 - protein, 13 aa, Homo sapiens
  CDR3 for alpha chain variable domain of TCR clone 259494 (TRAV12-1, TRAJ39)
CVVPQRAGNMPTF

SEQ ID NO: 518988 - protein, 17 aa, Homo sapiens
  CDR3 for beta chain variable domain of TCR clone 259494 (TRBV4-1, TRBJ2-5)
CASSQDLTGGPIETQYF

SEQ ID NO: 518989 - protein, 14 aa, Homo sapiens
  CDR3 for alpha chain variable domain of TCR clone 259495 (TRAV12-2, TRAJ4)
FAEDLSGGYNKLIF

SEQ ID NO: 518990 - protein, 13 aa, Homo sapiens
  CDR3 for beta chain variable domain of TCR clone 259495 (TRBV7-9, TRBJ1-2)
CASSLKQNYGYTF

SEQ ID NO: 518991 - protein, 10 aa, Homo sapiens
  CDR3 for alpha chain variable domain of TCR clone 259496 (TRAV21, TRAJ31)
CAVDNARLMF

SEQ ID NO: 518992 - protein, 13 aa, Homo sapiens
  CDR3 for beta chain variable domain of TCR clone 259496 (TRBV4-1, TRBJ1-1)
CASRRKMNTEAFF

SEQ ID NO: 518993 - protein, 13 aa, Homo sapiens
  CDR3 for alpha chain variable domain of TCR clone 259497 (TRAV26-2, TRAJ57)
CILSRGGSEKLVF

SEQ ID NO: 518994 - protein, 13 aa, Homo sapiens
  CDR3 for beta chain variable domain of TCR clone 259497 (TRBV7-3, TRBJ1-1)
CASSQDWGAEAFF

SEQ ID NO: 518995 - protein, 13 aa, Homo sapiens
  CDR3 for alpha chain variable domain of TCR clone 259498 (TRAV35, TRAJ44)
CAGLSGTASKLTF

SEQ ID NO: 518996 - protein, 12 aa, Homo sapiens
  CDR3 for beta chain variable domain of TCR clone 259498 (TRBV7-9, TRBJ2-7)
CASSIKREEQYF

SEQ ID NO: 518997 - protein, 13 aa, Homo sapiens
  CDR3 for alpha chain variable domain of TCR clone 259499 (TRAV1-2, TRAJ17)
CAVGKAAGNKLTF

SEQ ID NO: 518998 - protein, 15 aa, Homo sapiens
  CDR3 for beta chain variable domain of TCR clone 259499 (TRBV27, TRBJ2-1)
CASSNGGGSSNEQFF

SEQ ID NO: 518999 - protein, 10 aa, Homo sapiens
  CDR3 for alpha chain variable domain of TCR clone 259500 (TRAV27, TRAJ43)
CAGANNDMRF

SEQ ID NO: 519000 - protein, 15 aa, Homo sapiens
  CDR3 for beta chain variable domain of TCR clone 259500 (TRBV15, TRBJ2-1)
CATSRADRGHNEQFF

SEQ ID NO: 519001 - protein, 14 aa, Homo sapiens
  CDR3 for alpha chain variable domain of TCR clone 259501 (TRAV16, TRAJ39)
CALSKNNAGNMLTV

SEQ ID NO: 519002 - protein, 16 aa, Homo sapiens
  CDR3 for beta chain variable domain of TCR clone 259501 (TRBV6-6, TRBJ2-1)
CASSYSFSGSYNEQFF

SEQ ID NO: 519003 - protein, 11 aa, Homo sapiens
  CDR3 for alpha chain variable domain of TCR clone 259502 (TRAV12-1, TRAJ21)
CVVSNFNKFYF

SEQ ID NO: 519004 - protein, 11 aa, Homo sapiens
  CDR3 for beta chain variable domain of TCR clone 259502 (TRBV10-3, TRBJ2-7)
CAISEGLEQYF

SEQ ID NO: 519005 - protein, 14 aa, Homo sapiens
  CDR3 for alpha chain variable domain of TCR clone 259503 (TRAV4, TRAJ9)
CLVGSGTGGFKTIF

SEQ ID NO: 519006 - protein, 15 aa, Homo sapiens
  CDR3 for beta chain variable domain of TCR clone 259503 (TRBV7-2, TRBJ2-7)
CASSLASGRVNEQYF

SEQ ID NO: 519007 - protein, 17 aa, Homo sapiens
  CDR3 for alpha chain variable domain of TCR clone 259504 (TRAV12-2, TRAJ52)
CAVNPYAGGTSYGKLTF

SEQ ID NO: 519008 - protein, 16 aa, Homo sapiens
  CDR3 for beta chain variable domain of TCR clone 259504 (TRBV13, TRBJ2-3)
CQQPLQGSGGRNTQYF

SEQ ID NO: 519009 - protein, 14 aa, Homo sapiens
  CDR3 for alpha chain variable domain of TCR clone 259505 (TRAV6, TRAJ17)
CALDLKAAGNKLTF

SEQ ID NO: 519010 - protein, 17 aa, Homo sapiens
  CDR3 for beta chain variable domain of TCR clone 259505 (TRBV7-8, TRBJ2-7)
CASSVTSGRPPSYEQYF

SEQ ID NO: 519011 - protein, 14 aa, Homo sapiens
  CDR3 for alpha chain variable domain of TCR clone 259506 (TRAV12-2, TRAJ40)
CAVKIPSGTYKYIF

SEQ ID NO: 519012 - protein, 17 aa, Homo sapiens
  CDR3 for beta chain variable domain of TCR clone 259506 (TRBV13, TRBJ2-3)
CASSLYRVAGGRNTQYF

SEQ ID NO: 519013 - protein, 18 aa, Homo sapiens
  CDR3 for alpha chain variable domain of TCR clone 259507 (TRAV13-1, TRAJ52)
CAASKRSAGGTSYGKLTF

SEQ ID NO: 519014 - protein, 16 aa, Homo sapiens
  CDR3 for beta chain variable domain of TCR clone 259507 (TRBV24-1, TRBJ2-3)
CATSDPGTGATDTQYF

SEQ ID NO: 519015 - protein, 14 aa, Homo sapiens
  CDR3 for alpha chain variable domain of TCR clone 259508 (TRAV13-1, TRAJ22)
CAASYSGSAGQLTF

SEQ ID NO: 519016 - protein, 13 aa, Homo sapiens
  CDR3 for beta chain variable domain of TCR clone 259508 (TRBV6-3, TRBJ1-2)
CASSLTGDYGYTF

SEQ ID NO: 519017 - protein, 13 aa, Homo sapiens
  CDR3 for alpha chain variable domain of TCR clone 259509 (TRAV2, TRAJ24)
CAVGSTDRGQLQF

SEQ ID NO: 519018 - protein, 15 aa, Homo sapiens
  CDR3 for beta chain variable domain of TCR clone 259509 (TRBV5-7, TRBJ2-3)
CASSPWDRATDTQYF

SEQ ID NO: 519019 - protein, 12 aa, Homo sapiens
  CDR3 for alpha chain variable domain of TCR clone 259510 (TRAV36/DV7, TRAJ54)
CAVVRGAQKLVF

SEQ ID NO: 519020 - protein, 14 aa, Homo sapiens
  CDR3 for beta chain variable domain of TCR clone 259510 (TRBV7-3, TRBJ1-1)
GASSLKGGNTEAFF

SEQ ID NO: 519021 - protein, 14 aa, Homo sapiens
  CDR3 for alpha chain variable domain of TCR clone 259511 (TRAV20, TRAJ42)
CAVQAGGSQGNLVL

SEQ ID NO: 519022 - protein, 14 aa, Homo sapiens
  CDR3 for beta chain variable domain of TCR clone 259511 (TRBV28, TRBJ1-2)
CASRIQGANYGYTF

SEQ ID NO: 519023 - protein, 13 aa, Homo sapiens
  CDR3 for alpha chain variable domain of TCR clone 259512 (TRAV12-2, TRAJ20)
CAVNRFDDYKLSF

SEQ ID NO: 519024 - protein, 13 aa, Homo sapiens
  CDR3 for beta chain variable domain of TCR clone 259512 (TRBV2, TRBJ2-3)
CASILAGGQGQYF

SEQ ID NO: 519025 - protein, 14 aa, Homo sapiens
  CDR3 for alpha chain variable domain of TCR clone 259513 (TRAV29/DV5, TRAJ36)
CAARRKTGANNLFF

SEQ ID NO: 519026 - protein, 17 aa, Homo sapiens
  CDR3 for beta chain variable domain of TCR clone 259513 (TRBV13, TRBJ2-7)
CASSVKPGASGTYEQYF

SEQ ID NO: 519027 - protein, 14 aa, Homo sapiens
  CDR3 for alpha chain variable domain of TCR clone 259514 (TRAV12-2, TRAJ17)
CAVLFKAAGNKLTF

SEQ ID NO: 519028 - protein, 18 aa, Homo sapiens
  CDR3 for beta chain variable domain of TCR clone 259514 (TRBV4-3, TRBJ2-6)
YASSQDIQGGPGDNVLTF

SEQ ID NO: 519029 - protein, 14 aa, Homo sapiens
  CDR3 for alpha chain variable domain of TCR clone 259515 (TRAV17, TRAJ54)
CTTDANQVAQKLVF

SEQ ID NO: 519030 - protein, 12 aa, Homo sapiens
  CDR3 for beta chain variable domain of TCR clone 259515 (TRBV7-9, TRBJ2-7)
CASSIKREEQYF

SEQ ID NO: 519031 - protein, 16 aa, Homo sapiens
  CDR3 for alpha chain variable domain of TCR clone 259516 (TRAV30, TRAJ24)
CGTEIVDADSWGKFQF

SEQ ID NO: 519032 - protein, 15 aa, Homo sapiens
  CDR3 for beta chain variable domain of TCR clone 259516 (TRBV18, TRBJ2-1)
CASLPDTGRDNEQFF

SEQ ID NO: 519033 - protein, 14 aa, Homo sapiens
  CDR3 for alpha chain variable domain of TCR clone 259517 (TRAV3, TRAJ21)
CAVRDAYNFNKFYF

SEQ ID NO: 519034 - protein, 14 aa, Homo sapiens
  CDR3 for beta chain variable domain of TCR clone 259517 (TRBV20-1, TRBJ2-7)
CSAKRGRSSYEQYF

SEQ ID NO: 519035 - protein, 13 aa, Homo sapiens
  CDR3 for alpha chain variable domain of TCR clone 259518 (TRAV3, TRAJ21)
CAVREPDFNKFYF

SEQ ID NO: 519036 - protein, 15 aa, Homo sapiens
  CDR3 for beta chain variable domain of TCR clone 259518 (TRBV9, TRBJ1-6)
CASSVAGTGDSPLLF

SEQ ID NO: 519037 - protein, 11 aa, Homo sapiens
  CDR3 for alpha chain variable domain of TCR clone 259519 (TRAV12-1, TRAJ30)
CVVNGQDKIIF

SEQ ID NO: 519038 - protein, 14 aa, Homo sapiens
  CDR3 for beta chain variable domain of TCR clone 259519 (TRBV5-4, TRBJ2-2)
CASRLDGGTGELFF

SEQ ID NO: 519039 - protein, 16 aa, Homo sapiens
  CDR3 for alpha chain variable domain of TCR clone 259520 (TRAV9-2, TRAJ10)
CALSEGGTGGGNKLTF

SEQ ID NO: 519040 - protein, 16 aa, Homo sapiens
  CDR3 for beta chain variable domain of TCR clone 259520 (TRBV7-2, TRBJ1-4)
CASSPVGRFDREKLFY

SEQ ID NO: 519041 - protein, 13 aa, Homo sapiens
  CDR3 for alpha chain variable domain of TCR clone 259521 (TRAV12-3, TRAJ6)
CANPSGGSYIPTF

SEQ ID NO: 519042 - protein, 16 aa, Homo sapiens
  CDR3 for beta chain variable domain of TCR clone 259521 (TRBV7-3, TRBJ2-1)
CASSLEGYRSYNEQFF

SEQ ID NO: 519043 - protein, 13 aa, Homo sapiens
  CDR3 for alpha chain variable domain of TCR clone 259522 (TRAV17, TRAJ33)
CATDADSNYQLSW

SEQ ID NO: 519044 - protein, 17 aa, Homo sapiens
  CDR3 for beta chain variable domain of TCR clone 259522 (TRBV20-1, TRBJ2-3)
CSAVSPGLAGGQDTQYF

SEQ ID NO: 519045 - protein, 14 aa, Homo sapiens
  CDR3 for alpha chain variable domain of TCR clone 259523 (TRAV8-3, TRAJ42)
CAVGHGGSQGNLIS

SEQ ID NO: 519046 - protein, 17 aa, Homo sapiens
  CDR3 for beta chain variable domain of TCR clone 259523 (TRBV4-1, TRBJ1-5)
CASSQDLRAGRGQPQHF

SEQ ID NO: 519047 - protein, 13 aa, Homo sapiens
  CDR3 for alpha chain variable domain of TCR clone 259524 (TRAV13-1, TRAJ39)
CSKYSNAGNMLTF

SEQ ID NO: 519048 - protein, 16 aa, Homo sapiens
  CDR3 for beta chain variable domain of TCR clone 259524 (TRBV28, TRBJ1-5)
CASSLTGQGWNQPQHF

SEQ ID NO: 519049 - protein, 14 aa, Homo sapiens
  CDR3 for alpha chain variable domain of TCR clone 259525 (TRAV1-2, TRAJ8)
CAVREDPGFQKLVF

SEQ ID NO: 519050 - protein, 12 aa, Homo sapiens
  CDR3 for beta chain variable domain of TCR clone 259525 (TRBV11-2, TRBJ2-1)
CASSPGNNEQFF

SEQ ID NO: 519051 - protein, 14 aa, Homo sapiens
  CDR3 for alpha chain variable domain of TCR clone 259526 (TRAV12-3, TRAJ10)
CAIILTGGGNKLTF

SEQ ID NO: 519052 - protein, 15 aa, Homo sapiens
  CDR3 for beta chain variable domain of TCR clone 259526 (TRBV5-1, TRBJ2-7)
CASSLNGGPAREQYF

SEQ ID NO: 519053 - protein, 12 aa, Homo sapiens
  CDR3 for alpha chain variable domain of TCR clone 259527 (TRAV3, TRAJ26)
CAVRDYGKNFFF

SEQ ID NO: 519054 - protein, 16 aa, Homo sapiens
  CDR3 for beta chain variable domain of TCR clone 259527 (TRBV11-2, TRBJ1-2)
CASSPSGREANYGYTF

SEQ ID NO: 519055 - protein, 13 aa, Homo sapiens
  CDR3 for alpha chain variable domain of TCR clone 259528 (TRAV8-4, TRAJ49)
CAVRTLTGTQFYF

SEQ ID NO: 519056 - protein, 16 aa, Homo sapiens
  CDR3 for beta chain variable domain of TCR clone 259528 (TRBV5-7, TRBJ2-5)
CASTLAPAGGRETQYF

SEQ ID NO: 519057 - protein, 13 aa, Homo sapiens
  CDR3 for alpha chain variable domain of TCR clone 259529 (TRAV23/DV6, TRAJ12)
CAPRVDSSYKLIF

SEQ ID NO: 519058 - protein, 12 aa, Homo sapiens
  CDR3 for beta chain variable domain of TCR clone 259529 (TRBV7-6, TRBJ2-5)
CASSLSQETQYL

SEQ ID NO: 519059 - protein, 15 aa, Homo sapiens
  CDR3 for alpha chain variable domain of TCR clone 259530 (TRAV12-1, TRAJ45)
FVVLSGGGGADGLTF

SEQ ID NO: 519060 - protein, 15 aa, Homo sapiens
  CDR3 for beta chain variable domain of TCR clone 259530 (TRBV20-1, TRBJ2-7)
CSARDRVSGMDEQYF

SEQ ID NO: 519061 - protein, 15 aa, Homo sapiens
  CDR3 for alpha chain variable domain of TCR clone 259531 (TRAV3, TRAJ22)
CALRDRGGSARQLTF

SEQ ID NO: 519062 - protein, 15 aa, Homo sapiens
  CDR3 for beta chain variable domain of TCR clone 259531 (TRBV19, TRBJ2-5)
CASSIVRASQETQYF

SEQ ID NO: 519063 - protein, 14 aa, Homo sapiens
  CDR3 for alpha chain variable domain of TCR clone 259532 (TRAV12-3, TRAJ7)
CAMSKIGGNNRLAF

SEQ ID NO: 519064 - protein, 13 aa, Homo sapiens
  CDR3 for beta chain variable domain of TCR clone 259532 (TRBV9, TRBJ1-1)
CASSVARNPEAFF

SEQ ID NO: 519065 - protein, 14 aa, Homo sapiens
  CDR3 for alpha chain variable domain of TCR clone 259533 (TRAV12-3, TRAJ10)
SHLPLTGGGNKLTF

SEQ ID NO: 519066 - protein, 13 aa, Homo sapiens
  CDR3 for beta chain variable domain of TCR clone 259533 (TRBV12-4, TRBJ1-1)
CASSPGTGFEAFC

SEQ ID NO: 519067 - protein, 15 aa, Homo sapiens
  CDR3 for alpha chain variable domain of TCR clone 259534 (TRAV4, TRAJ39)
CLVGPNNNAGNMLTF

SEQ ID NO: 519068 - protein, 16 aa, Homo sapiens
  CDR3 for beta chain variable domain of TCR clone 259534 (TRBV7-9, TRBJ2-2)
CASSGFGGANTGELFF

SEQ ID NO: 519069 - protein, 11 aa, Homo sapiens
  CDR3 for alpha chain variable domain of TCR clone 259535 (TRAV23/DV6, TRAJ49)
CADAPVTSSIL

SEQ ID NO: 519070 - protein, 13 aa, Homo sapiens
  CDR3 for beta chain variable domain of TCR clone 259535 (TRBV6-1, TRBJ1-1)
CASSRQGNTEAFF

SEQ ID NO: 519071 - protein, 13 aa, Homo sapiens
  CDR3 for alpha chain variable domain of TCR clone 259536 (TRAV36/DV7, TRAJ53)
CALSGGSNYKLTF

SEQ ID NO: 519072 - protein, 13 aa, Homo sapiens
  CDR3 for beta chain variable domain of TCR clone 259536 (TRBV28, TRBJ2-7)
CASSLPSRYEKYF

SEQ ID NO: 519073 - protein, 14 aa, Homo sapiens
  CDR3 for alpha chain variable domain of TCR clone 259537 (TRAV26-1, TRAJ45)
CIEVTGGGADGLTF

SEQ ID NO: 519074 - protein, 12 aa, Homo sapiens
  CDR3 for beta chain variable domain of TCR clone 259537 (TRBV11-2, TRBJ2-1)
CASSPGNNEQFF

SEQ ID NO: 519075 - protein, 14 aa, Homo sapiens
  CDR3 for alpha chain variable domain of TCR clone 259538 (TRAV29/DV5, TRAJ48)
CAAMALFGNEKLTF

SEQ ID NO: 519076 - protein, 12 aa, Homo sapiens
  CDR3 for beta chain variable domain of TCR clone 259538 (TRBV28, TRBJ2-3)
CASSLYRDTQYF

SEQ ID NO: 519077 - protein, 15 aa, Homo sapiens
  CDR3 for alpha chain variable domain of TCR clone 259539 (TRAV12-1, TRAJ45)
CVVLSGGGGADGLTF

SEQ ID NO: 519078 - protein, 14 aa, Homo sapiens
  CDR3 for beta chain variable domain of TCR clone 259539 (TRBV11-2, TRBJ2-5)
CASSRTGGIEAQYF

SEQ ID NO: 519079 - protein, 14 aa, Homo sapiens
  CDR3 for alpha chain variable domain of TCR clone 259540 (TRAV9-2, TRAJ39)
CALYIYNAGNMLTF

SEQ ID NO: 519080 - protein, 15 aa, Homo sapiens
  CDR3 for beta chain variable domain of TCR clone 259540 (TRBV4-1, TRBJ2-5)
CASSQWDLYQETQYF

SEQ ID NO: 519081 - protein, 12 aa, Homo sapiens
  CDR3 for alpha chain variable domain of TCR clone 259541 (TRAV21, TRAJ31)
CAVWGNNARLMF

SEQ ID NO: 519082 - protein, 15 aa, Homo sapiens
  CDR3 for beta chain variable domain of TCR clone 259541 (TRBV27, TRBJ2-5)
CQQLRPGGQKETQYF

SEQ ID NO: 519083 - protein, 11 aa, Homo sapiens
  CDR3 for alpha chain variable domain of TCR clone 259542 (TRAV21, TRAJ27)
CAVRMQANQPL

SEQ ID NO: 519084 - protein, 14 aa, Homo sapiens
  CDR3 for beta chain variable domain of TCR clone 259542 (TRBV7-8, TRBJ2-3)
CASSLEAGTDTQYF

SEQ ID NO: 519085 - protein, 12 aa, Homo sapiens
  CDR3 for alpha chain variable domain of TCR clone 259543 (TRAV3, TRAJ43)
CAVRDPNNDMRF

SEQ ID NO: 519086 - protein, 15 aa, Homo sapiens
  CDR3 for beta chain variable domain of TCR clone 259543 (TRBV27, TRBJ1-5)
CASSLGTGFDQPQYF

SEQ ID NO: 519087 - protein, 11 aa, Homo sapiens
  CDR3 for alpha chain variable domain of TCR clone 259544 (TRAV3, TRAJ21)
CAVGNFNKFYF

SEQ ID NO: 519088 - protein, 13 aa, Homo sapiens
  CDR3 for beta chain variable domain of TCR clone 259544 (TRBV5-1, TRBJ2-7)
CASIGTDSYEQYF

SEQ ID NO: 519089 - protein, 17 aa, Homo sapiens
  CDR3 for alpha chain variable domain of TCR clone 259545 (TRAV23/DV6, TRAJ12)
CAAIDLGAMDSRHKLIF

SEQ ID NO: 519090 - protein, 12 aa, Homo sapiens
  CDR3 for beta chain variable domain of TCR clone 259545 (TRBV10-3, TRBJ2-2)
CAIRENTGELFF

SEQ ID NO: 519091 - protein, 15 aa, Homo sapiens
  CDR3 for alpha chain variable domain of TCR clone 259546 (TRAV21, TRAJ53)
CATLNSGGSHYKLTF

SEQ ID NO: 519092 - protein, 13 aa, Homo sapiens
  CDR3 for beta chain variable domain of TCR clone 259546 (TRBV4-1, TRBJ2-2)
CASSQENTGELFF

SEQ ID NO: 519093 - protein, 17 aa, Homo sapiens
  CDR3 for alpha chain variable domain of TCR clone 259547 (TRAV13-1, TRAJ52)
CAASLGAGGTSYGELTF

SEQ ID NO: 519094 - protein, 15 aa, Homo sapiens
  CDR3 for beta chain variable domain of TCR clone 259547 (TRBV2, TRBJ2-1)
CASSELAGSYNEQFF

SEQ ID NO: 519095 - protein, 14 aa, Homo sapiens
  CDR3 for alpha chain variable domain of TCR clone 259548 (TRAV38-1, TRAJ45)
CAYYSGGGADVLTF

SEQ ID NO: 519096 - protein, 20 aa, Homo sapiens
  CDR3 for beta chain variable domain of TCR clone 259548 (TRBV28, TRBJ2-1)
CASTPSGRSPGLAGGNEQFF

SEQ ID NO: 519097 - protein, 13 aa, Homo sapiens
  CDR3 for alpha chain variable domain of TCR clone 259549 (TRAV1-1, TRAJ9)
CTAKNTGGFKTIF

SEQ ID NO: 519098 - protein, 16 aa, Homo sapiens
  CDR3 for beta chain variable domain of TCR clone 259549 (TRBV12-5, TRBJ2-5)
CASGPRTSGNQETQYF

SEQ ID NO: 519099 - protein, 11 aa, Homo sapiens
  CDR3 for alpha chain variable domain of TCR clone 259550 (TRAV17, TRAJ9)
CATTGRFKTIF

SEQ ID NO: 519100 - protein, 14 aa, Homo sapiens
  CDR3 for beta chain variable domain of TCR clone 259550 (TRBV7-9, TRBJ2-2)
CASSGLADTGELFF

SEQ ID NO: 519101 - protein, 12 aa, Homo sapiens
  CDR3 for alpha chain variable domain of TCR clone 259551 (TRAV1-2, TRAJ33)
CAALDSNYQLIW

SEQ ID NO: 519102 - protein, 16 aa, Homo sapiens
  CDR3 for beta chain variable domain of TCR clone 259551 (TRBV6-1, TRBJ2-5)
CASSETLDRGAETRYF

SEQ ID NO: 519103 - protein, 13 aa, Homo sapiens
  CDR3 for alpha chain variable domain of TCR clone 259552 (TRAV9-2, TRAJ6)
CALSPGGSYIPTF

SEQ ID NO: 519104 - protein, 14 aa, Homo sapiens
  CDR3 for beta chain variable domain of TCR clone 259552 (TRBV7-8, TRBJ2-3)
CASSSRDSTDTQYF

SEQ ID NO: 519105 - protein, 20 aa, Homo sapiens
  CDR3 for alpha chain variable domain of TCR clone 259553 (TRAV12-1, TRAJ42)
SSVIQPPTSVKGGSQGNLIF

SEQ ID NO: 519106 - protein, 15 aa, Homo sapiens
  CDR3 for beta chain variable domain of TCR clone 259553 (TRBV4-1, TRBJ2-7)
CASSQNTERLYEQYF

SEQ ID NO: 519107 - protein, 14 aa, Homo sapiens
  CDR3 for alpha chain variable domain of TCR clone 259554 (TRAV1-2, TRAJ16)
CAVNRFSDGQKLLF

SEQ ID NO: 519108 - protein, 14 aa, Homo sapiens
  CDR3 for beta chain variable domain of TCR clone 259554 (TRBV9, TRBJ1-6)
CASVAGTGDSPLHF

SEQ ID NO: 519109 - protein, 13 aa, Homo sapiens
  CDR3 for alpha chain variable domain of TCR clone 259555 (TRAV17, TRAJ45)
CATDGRRCGRTHL

SEQ ID NO: 519110 - protein, 15 aa, Homo sapiens
  CDR3 for beta chain variable domain of TCR clone 259555 (TRBV5-7, TRBJ1-5)
CASSYGKLWDQPQHF

SEQ ID NO: 519111 - protein, 16 aa, Homo sapiens
  CDR3 for alpha chain variable domain of TCR clone 259556 (TRAV3, TRAJ21)
CAVRDIERGNFNKFYF

SEQ ID NO: 519112 - protein, 14 aa, Homo sapiens
  CDR3 for beta chain variable domain of TCR clone 259556 (TRBV12-4, TRBJ2-5)
CASSVSSGRETQYF

SEQ ID NO: 519113 - protein, 13 aa, Homo sapiens
  CDR3 for alpha chain variable domain of TCR clone 259557 (TRAV8-4, TRAJ37)
CAAPSGNTGKLIF

SEQ ID NO: 519114 - protein, 16 aa, Homo sapiens
  CDR3 for beta chain variable domain of TCR clone 259557 (TRBV11-3, TRBJ2-5)
CASSSVVAGSTETQYF

SEQ ID NO: 519115 - protein, 11 aa, Homo sapiens
  CDR3 for alpha chain variable domain of TCR clone 259558 (TRAV29/DV5, TRAJ37)
CATSNTGKLIF

SEQ ID NO: 519116 - protein, 17 aa, Homo sapiens
  CDR3 for beta chain variable domain of TCR clone 259558 (TRBV28, TRBJ2-7)
CASSPLPAGGKSYEQYF

SEQ ID NO: 519117 - protein, 11 aa, Homo sapiens
  CDR3 for alpha chain variable domain of TCR clone 259559 (TRAV3, TRAJ21)
CAVGNFNKFYF

SEQ ID NO: 519118 - protein, 15 aa, Homo sapiens
  CDR3 for beta chain variable domain of TCR clone 259559 (TRBV7-2, TRBJ2-1)
CASSLVAGGHNEQFF

SEQ ID NO: 519119 - protein, 15 aa, Homo sapiens
  CDR3 for alpha chain variable domain of TCR clone 259560 (TRAV17, TRAJ10)
CATVLLTGGGNKHTF

SEQ ID NO: 519120 - protein, 16 aa, Homo sapiens
  CDR3 for beta chain variable domain of TCR clone 259560 (TRBV7-9, TRBJ2-3)
CASSPWREVGTDTQYF

SEQ ID NO: 519121 - protein, 11 aa, Homo sapiens
  CDR3 for alpha chain variable domain of TCR clone 259561 (TRAV35, TRAJ30)
CAGPGDDKIIF

SEQ ID NO: 519122 - protein, 14 aa, Homo sapiens
  CDR3 for beta chain variable domain of TCR clone 259561 (TRBV7-6, TRBJ2-1)
CASSLGGGADEQFF

SEQ ID NO: 519123 - protein, 14 aa, Homo sapiens
  CDR3 for alpha chain variable domain of TCR clone 259562 (TRAV8-6, TRAJ49)
CAVSEMDTGNQFYF

SEQ ID NO: 519124 - protein, 19 aa, Homo sapiens
  CDR3 for beta chain variable domain of TCR clone 259562 (TRBV28, TRBJ2-7)
CASSYSGTSRLGWVYEQYF

SEQ ID NO: 519125 - protein, 15 aa, Homo sapiens
  CDR3 for alpha chain variable domain of TCR clone 259563 (TRAV21, TRAJ53)
CATLNSGGSNYKLTF

SEQ ID NO: 519126 - protein, 14 aa, Homo sapiens
  CDR3 for beta chain variable domain of TCR clone 259563 (TRBV7-8, TRBJ1-2)
CASSPDSLSYGYTF

SEQ ID NO: 519127 - protein, 17 aa, Homo sapiens
  CDR3 for alpha chain variable domain of TCR clone 259564 (TRAV38-1, TRAJ28)
CAFMKPTSGAGSYQLTF

SEQ ID NO: 519128 - protein, 15 aa, Homo sapiens
  CDR3 for beta chain variable domain of TCR clone 259564 (TRBV5-1, TRBJ2-4)
CASSLGGGGRYIQYF

SEQ ID NO: 519129 - protein, 14 aa, Homo sapiens
  CDR3 for alpha chain variable domain of TCR clone 259565 (TRAV23/DV6, TRAJ37)
CSASTPSNTGKLIF

SEQ ID NO: 519130 - protein, 15 aa, Homo sapiens
  CDR3 for beta chain variable domain of TCR clone 259565 (TRBV7-9, TRBJ2-7)
CASSPGGGLTYEQYF

SEQ ID NO: 519131 - protein, 21 aa, Homo sapiens
  CDR3 for alpha chain variable domain of TCR clone 259566 (TRAV1-1, TRAJ6)
CAVRREEATYLHLEEEPALLF

SEQ ID NO: 519132 - protein, 16 aa, Homo sapiens
  CDR3 for beta chain variable domain of TCR clone 259566 (TRBV19, TRBJ2-4)
CATGGLAGGTKNIQYF

SEQ ID NO: 519133 - protein, 16 aa, Homo sapiens
  CDR3 for alpha chain variable domain of TCR clone 259567 (TRAV3, TRAJ37)
CALRPHGSGNTGKLIF

SEQ ID NO: 519134 - protein, 16 aa, Homo sapiens
  CDR3 for beta chain variable domain of TCR clone 259567 (TRBV9, TRBJ1-2)
CASSVEEKVSPYGDTF

SEQ ID NO: 519135 - protein, 14 aa, Homo sapiens
  CDR3 for alpha chain variable domain of TCR clone 259568 (TRAV1-2, TRAJ8)
CAVREDTGFQKLVF

SEQ ID NO: 519136 - protein, 17 aa, Homo sapiens
  CDR3 for beta chain variable domain of TCR clone 259568 (TRBV11-2, TRBJ2-1)
CASSLYPPGVEYNEQCF

SEQ ID NO: 519137 - protein, 15 aa, Homo sapiens
  CDR3 for alpha chain variable domain of TCR clone 259569 (TRAV3, TRAJ9)
CAVRDSNTGGFKTIF

SEQ ID NO: 519138 - protein, 16 aa, Homo sapiens
  CDR3 for beta chain variable domain of TCR clone 259569 (TRBV15, TRBJ2-5)
CATSPTTGQGMETQFF

SEQ ID NO: 519139 - protein, 12 aa, Homo sapiens
  CDR3 for alpha chain variable domain of TCR clone 259570 (TRAV12-3, TRAJ17)
RAITLTGNKLTF

SEQ ID NO: 519140 - protein, 15 aa, Homo sapiens
  CDR3 for beta chain variable domain of TCR clone 259570 (TRBV20-1, TRBJ2-7)
CSARDRVSGMDEQYF

SEQ ID NO: 519141 - protein, 18 aa, Homo sapiens
  CDR3 for alpha chain variable domain of TCR clone 259571 (TRAV21, TRAJ52)
CAVRPPPAGGTSYGKLTF

SEQ ID NO: 519142 - protein, 17 aa, Homo sapiens
  CDR3 for beta chain variable domain of TCR clone 259571 (TRBV4-2, TRBJ2-1)
CASSQVSGLAMNNEQFF

SEQ ID NO: 519143 - protein, 13 aa, Homo sapiens
  CDR3 for alpha chain variable domain of TCR clone 259572 (TRAV2, TRAJ20)
CAVEDPSEFKLSF

SEQ ID NO: 519144 - protein, 16 aa, Homo sapiens
  CDR3 for beta chain variable domain of TCR clone 259572 (TRBV25-1, TRBJ2-7)
CASSELTGGGIYEQYF

SEQ ID NO: 519145 - protein, 11 aa, Homo sapiens
  CDR3 for alpha chain variable domain of TCR clone 259573 (TRAV3, TRAJ21)
CAVGNFNKFYF

SEQ ID NO: 519146 - protein, 16 aa, Homo sapiens
  CDR3 for beta chain variable domain of TCR clone 259573 (TRBV19, TRBJ2-1)
CAWSVAGPSAYNEQFF

SEQ ID NO: 519147 - protein, 13 aa, Homo sapiens
  CDR3 for alpha chain variable domain of TCR clone 259574 (TRAV21, TRAJ57)
CAVTQGGSEKLVF

SEQ ID NO: 519148 - protein, 14 aa, Homo sapiens
  CDR3 for beta chain variable domain of TCR clone 259574 (TRBV18, TRBJ2-7)
CASSPRGGAYEQYF

SEQ ID NO: 519149 - protein, 12 aa, Homo sapiens
  CDR3 for alpha chain variable domain of TCR clone 259575 (TRAV16, TRAJ36)
CALGTGANNLFF

SEQ ID NO: 519150 - protein, 13 aa, Homo sapiens
  CDR3 for beta chain variable domain of TCR clone 259575 (TRBV7-9, TRBJ1-1)
CASSAGAGTEAFF

SEQ ID NO: 519151 - protein, 15 aa, Homo sapiens
  CDR3 for alpha chain variable domain of TCR clone 259576 (TRAV20, TRAJ58)
CAVQDLETSGSRLTF

SEQ ID NO: 519152 - protein, 13 aa, Homo sapiens
  CDR3 for beta chain variable domain of TCR clone 259576 (TRBV20-1, TRBJ1-1)
CSARGGGNTKAFF

SEQ ID NO: 519153 - protein, 14 aa, Homo sapiens
  CDR3 for alpha chain variable domain of TCR clone 259577 (TRAV12-3, TRAJ56)
CAMSVTGANSKLTF

SEQ ID NO: 519154 - protein, 17 aa, Homo sapiens
  CDR3 for beta chain variable domain of TCR clone 259577 (TRBV7-9, TRBJ2-3)
CASSPTVAGDLTDTQYF

SEQ ID NO: 519155 - protein, 13 aa, Homo sapiens
  CDR3 for alpha chain variable domain of TCR clone 259578 (TRAV38-1, TRAJ42)
CARWGGSQGNLIF

SEQ ID NO: 519156 - protein, 13 aa, Homo sapiens
  CDR3 for beta chain variable domain of TCR clone 259578 (TRBV19, TRBJ1-2)
CASSQGQVYGYTF

SEQ ID NO: 519157 - protein, 12 aa, Homo sapiens
  CDR3 for alpha chain variable domain of TCR clone 259579 (TRAV12-3, TRAJ17)
CAMTLTSNKLTF

SEQ ID NO: 519158 - protein, 14 aa, Homo sapiens
  CDR3 for beta chain variable domain of TCR clone 259579 (TRBV7-3, TRBJ2-1)
CASSLAGGTNEQFF

SEQ ID NO: 519159 - protein, 15 aa, Homo sapiens
  CDR3 for alpha chain variable domain of TCR clone 259580 (TRAV2, TRAJ24)
CAVEVLTDSWWKFQF

SEQ ID NO: 519160 - protein, 14 aa, Homo sapiens
  CDR3 for beta chain variable domain of TCR clone 259580 (TRBV19, TRBJ2-1)
CASSMGSGRRSSSS

SEQ ID NO: 519161 - protein, 18 aa, Homo sapiens
  CDR3 for alpha chain variable domain of TCR clone 259581 (TRAV12-3, TRAJ52)
CAMSVGGAGGTSYGKRTF

SEQ ID NO: 519162 - protein, 15 aa, Homo sapiens
  CDR3 for beta chain variable domain of TCR clone 259581 (TRBV27, TRBJ1-6)
CAGSFDRGLGSPLHF

SEQ ID NO: 519163 - protein, 17 aa, Homo sapiens
  CDR3 for alpha chain variable domain of TCR clone 259582 (TRAV3, TRAJ6)
CAVRDGPRAGGSYIPTF

SEQ ID NO: 519164 - protein, 14 aa, Homo sapiens
  CDR3 for beta chain variable domain of TCR clone 259582 (TRBV4-2, TRBJ2-5)
CASSQDRGRETQYF

SEQ ID NO: 519165 - protein, 16 aa, Homo sapiens
  CDR3 for alpha chain variable domain of TCR clone 259583 (TRAV3, TRAJ10)
CAVRDMRAGGGNKLTF

SEQ ID NO: 519166 - protein, 19 aa, Homo sapiens
  CDR3 for beta chain variable domain of TCR clone 259583 (TRBV6-3, TRBJ1-2)
CASSYSKGRTGSPNYGYTF

SEQ ID NO: 519167 - protein, 14 aa, Homo sapiens
  CDR3 for alpha chain variable domain of TCR clone 259584 (TRAV1-2, TRAJ16)
CAVNRFSDGQKLLF

SEQ ID NO: 519168 - protein, 13 aa, Homo sapiens
  CDR3 for beta chain variable domain of TCR clone 259584 (TRBV7-9, TRBJ1-2)
CASSLTQSYGYTF

SEQ ID NO: 519169 - protein, 10 aa, Homo sapiens
  CDR3 for alpha chain variable domain of TCR clone 259585 (TRAV8-3, TRAJ33)
CAVGAIATIS

SEQ ID NO: 519170 - protein, 13 aa, Homo sapiens
  CDR3 for beta chain variable domain of TCR clone 259585 (TRBV27, TRBJ2-5)
CASSLSSLETQYF

SEQ ID NO: 519171 - protein, 13 aa, Homo sapiens
  CDR3 for alpha chain variable domain of TCR clone 259586 (TRAV12-3, TRAJ33)
CAMSVNSNYQLIW

SEQ ID NO: 519172 - protein, 15 aa, Homo sapiens
  CDR3 for beta chain variable domain of TCR clone 259586 (TRBV7-2, TRBJ1-1)
CASSFAGDRDTEAFF

SEQ ID NO: 519173 - protein, 14 aa, Homo sapiens
  CDR3 for alpha chain variable domain of TCR clone 259587 (TRAV14/DV4, TRAJ42)
CPRGSLRSQGNLIF

SEQ ID NO: 519174 - protein, 18 aa, Homo sapiens
  CDR3 for beta chain variable domain of TCR clone 259587 (TRBV20-1, TRBJ2-3)
SSASGLAGGPGTTDTQYF

SEQ ID NO: 519175 - protein, 13 aa, Homo sapiens
  CDR3 for alpha chain variable domain of TCR clone 259588 (TRAV29/DV5, TRAJ31)
CAASRNNNARLLF

SEQ ID NO: 519176 - protein, 12 aa, Homo sapiens
  CDR3 for beta chain variable domain of TCR clone 259588 (TRBV11-2, TRBJ2-2)
RASSLGGGELFF

SEQ ID NO: 519177 - protein, 15 aa, Homo sapiens
  CDR3 for alpha chain variable domain of TCR clone 259589 (TRAV21, TRAJ40)
CAVRPQTSGTYKYIC

SEQ ID NO: 519178 - protein, 13 aa, Homo sapiens
  CDR3 for beta chain variable domain of TCR clone 259589 (TRBV7-2, TRBJ2-2)
CASSSVRAGELFF

SEQ ID NO: 519179 - protein, 12 aa, Homo sapiens
  CDR3 for alpha chain variable domain of TCR clone 259590 (TRAV12-2, TRAJ21)
CAVNRNFTKFYF

SEQ ID NO: 519180 - protein, 14 aa, Homo sapiens
  CDR3 for beta chain variable domain of TCR clone 259590 (TRBV12-4, TRBJ2-3)
CASSLSGATDTQYF

SEQ ID NO: 519181 - protein, 14 aa, Homo sapiens
  CDR3 for alpha chain variable domain of TCR clone 259591 (TRAV21, TRAJ35)
CAVMPIGFGIVLNC

SEQ ID NO: 519182 - protein, 12 aa, Homo sapiens
  CDR3 for beta chain variable domain of TCR clone 259591 (TRBV7-9, TRBJ2-7)
CASSIKREEQYF

SEQ ID NO: 519183 - protein, 11 aa, Homo sapiens
  CDR3 for alpha chain variable domain of TCR clone 259592 (TRAV21, TRAJ34)
CAVTNTDKHIF

SEQ ID NO: 519184 - protein, 16 aa, Homo sapiens
  CDR3 for beta chain variable domain of TCR clone 259592 (TRBV20-1, TRBJ1-4)
CSAPGQGLLTNEKLFF

SEQ ID NO: 519185 - protein, 14 aa, Homo sapiens
  CDR3 for alpha chain variable domain of TCR clone 259593 (TRAV17, TRAJ23)
CAASRLGRGGKLIF

SEQ ID NO: 519186 - protein, 15 aa, Homo sapiens
  CDR3 for beta chain variable domain of TCR clone 259593 (TRBV7-2, TRBJ2-1)
CASSLVAGRYNEQFF

SEQ ID NO: 519187 - protein, 13 aa, Homo sapiens
  CDR3 for alpha chain variable domain of TCR clone 259594 (TRAV21, TRAJ15)
CAVANQAGTALIF

SEQ ID NO: 519188 - protein, 12 aa, Homo sapiens
  CDR3 for beta chain variable domain of TCR clone 259594 (TRBV11-2, TRBJ2-2)
CASSLPTGELFF

SEQ ID NO: 519189 - protein, 13 aa, Homo sapiens
  CDR3 for alpha chain variable domain of TCR clone 259595 (TRAV35, TRAJ36)
CAGPRIGANNLFF

SEQ ID NO: 519190 - protein, 14 aa, Homo sapiens
  CDR3 for beta chain variable domain of TCR clone 259595 (TRBV28, TRBJ2-5)
CGSPPWSYQETQYF

SEQ ID NO: 519191 - protein, 17 aa, Homo sapiens
  CDR3 for alpha chain variable domain of TCR clone 259596 (TRAV14/DV4, TRAJ28)
CAMREVSSGAGSYQLTF

SEQ ID NO: 519192 - protein, 15 aa, Homo sapiens
  CDR3 for beta chain variable domain of TCR clone 259596 (TRBV11-2, TRBJ1-6)
CASTRRETGNSPLLF

SEQ ID NO: 519193 - protein, 16 aa, Homo sapiens
  CDR3 for alpha chain variable domain of TCR clone 259597 (TRAV38-1, TRAJ45)
CAFMKGSGGGADGLTF

SEQ ID NO: 519194 - protein, 15 aa, Homo sapiens
  CDR3 for beta chain variable domain of TCR clone 259597 (TRBV20-1, TRBJ2-7)
SSAREGRDSLYEQYF

SEQ ID NO: 519195 - protein, 13 aa, Homo sapiens
  CDR3 for alpha chain variable domain of TCR clone 259598 (TRAV3, TRAJ21)
CAVREPDFNKFSF

SEQ ID NO: 519196 - protein, 15 aa, Homo sapiens
  CDR3 for beta chain variable domain of TCR clone 259598 (TRBV5-1, TRBJ2-1)
CASSPPRAPYNEQFF

SEQ ID NO: 519197 - protein, 12 aa, Homo sapiens
  CDR3 for alpha chain variable domain of TCR clone 259599 (TRAV2, TRAJ33)
CAFMDSNYQLNW

SEQ ID NO: 519198 - protein, 16 aa, Homo sapiens
  CDR3 for beta chain variable domain of TCR clone 259599 (TRBV2, TRBJ2-7)
CASSEPWTGPSYEQYF

SEQ ID NO: 519199 - protein, 12 aa, Homo sapiens
  CDR3 for alpha chain variable domain of TCR clone 259600 (TRAV21, TRAJ33)
CAKVDSNYQLIW

SEQ ID NO: 519200 - protein, 15 aa, Homo sapiens
  CDR3 for beta chain variable domain of TCR clone 259600 (TRBV11-3, TRBJ2-3)
CASLKDGREGDTQYF

SEQ ID NO: 519201 - protein, 16 aa, Homo sapiens
  CDR3 for alpha chain variable domain of TCR clone 259601 (TRAV30, TRAJ24)
CGTEIVDADSWGKFQF

SEQ ID NO: 519202 - protein, 17 aa, Homo sapiens
  CDR3 for beta chain variable domain of TCR clone 259601 (TRBV20-1, TRBJ2-2)
CSASGSGQGGLSGELFF

SEQ ID NO: 519203 - protein, 15 aa, Homo sapiens
  CDR3 for alpha chain variable domain of TCR clone 259602 (TRAV3, TRAJ32)
CAVRDPGGATSKLIF

SEQ ID NO: 519204 - protein, 14 aa, Homo sapiens
  CDR3 for beta chain variable domain of TCR clone 259602 (TRBV9, TRBJ1-2)
CASSVKGDNYGYTF

SEQ ID NO: 519205 - protein, 11 aa, Homo sapiens
  CDR3 for alpha chain variable domain of TCR clone 259603 (TRAV4, TRAJ31)
CLVGDNARLMC

SEQ ID NO: 519206 - protein, 16 aa, Homo sapiens
  CDR3 for beta chain variable domain of TCR clone 259603 (TRBV7-2, TRBJ2-5)
CASSSKWLSGQETQYF

SEQ ID NO: 519207 - protein, 13 aa, Homo sapiens
  CDR3 for alpha chain variable domain of TCR clone 259604 (TRAV8-4, TRAJ9)
CAVSETGGFKTIF

SEQ ID NO: 519208 - protein, 15 aa, Homo sapiens
  CDR3 for beta chain variable domain of TCR clone 259604 (TRBV6-1, TRBJ2-4)
CASSEAVWTINIQYF

SEQ ID NO: 519209 - protein, 14 aa, Homo sapiens
  CDR3 for alpha chain variable domain of TCR clone 259605 (TRAV1-1, TRAJ28)
CAAPSGAGSYHLTF

SEQ ID NO: 519210 - protein, 15 aa, Homo sapiens
  CDR3 for beta chain variable domain of TCR clone 259605 (TRBV7-2, TRBJ1-2)
CASSLVLGGDYGYTF

SEQ ID NO: 519211 - protein, 16 aa, Homo sapiens
  CDR3 for alpha chain variable domain of TCR clone 259606 (TRAV13-1, TRAJ18)
CAASRMRGSTLGRLYF

SEQ ID NO: 519212 - protein, 15 aa, Homo sapiens
  CDR3 for beta chain variable domain of TCR clone 259606 (TRBV6-1, TRBJ1-5)
CASSELREGNQPQHF

SEQ ID NO: 519213 - protein, 16 aa, Homo sapiens
  CDR3 for alpha chain variable domain of TCR clone 259607 (TRAV3, TRAJ10)
CAVRDMWAGGGNKLTF

SEQ ID NO: 519214 - protein, 15 aa, Homo sapiens
  CDR3 for beta chain variable domain of TCR clone 259607 (TRBV2, TRBJ2-7)
CASSEGLARSYEQYF

SEQ ID NO: 519215 - protein, 11 aa, Homo sapiens
  CDR3 for alpha chain variable domain of TCR clone 259608 (TRAV21, TRAJ41)
CAVRSGNALNF

SEQ ID NO: 519216 - protein, 13 aa, Homo sapiens
  CDR3 for beta chain variable domain of TCR clone 259608 (TRBV7-9, TRBJ1-2)
CASSLKQNYGYTF

SEQ ID NO: 519217 - protein, 14 aa, Homo sapiens
  CDR3 for alpha chain variable domain of TCR clone 259609 (TRAV1-2, TRAJ16)
CAVNRFSDGQKLLF

SEQ ID NO: 519218 - protein, 12 aa, Homo sapiens
  CDR3 for beta chain variable domain of TCR clone 259609 (TRBV7-8, TRBJ2-7)
CASSLGDREHYF

SEQ ID NO: 519219 - protein, 15 aa, Homo sapiens
  CDR3 for alpha chain variable domain of TCR clone 259610 (TRAV29/DV5, TRAJ42)
CAAKTDGGSQGNPIF

SEQ ID NO: 519220 - protein, 15 aa, Homo sapiens
  CDR3 for beta chain variable domain of TCR clone 259610 (TRBV5-1, TRBJ2-2)
CASSSQGGDTGELFF

SEQ ID NO: 519221 - protein, 16 aa, Homo sapiens
  CDR3 for alpha chain variable domain of TCR clone 259611 (TRAV30, TRAJ24)
CGTETVDADSWGKFRF

SEQ ID NO: 519222 - protein, 13 aa, Homo sapiens
  CDR3 for beta chain variable domain of TCR clone 259611 (TRBV20-1, TRBJ1-1)
CSALPGGHTEAFF

SEQ ID NO: 519223 - protein, 13 aa, Homo sapiens
  CDR3 for alpha chain variable domain of TCR clone 259612 (TRAV3, TRAJ29)
CAVRDIIDTPLVF

SEQ ID NO: 519224 - protein, 12 aa, Homo sapiens
  CDR3 for beta chain variable domain of TCR clone 259612 (TRBV27, TRBJ2-7)
CASSLGDREQYF

SEQ ID NO: 519225 - protein, 14 aa, Homo sapiens
  CDR3 for alpha chain variable domain of TCR clone 259613 (TRAV38-2/DV8, TRAJ30)
CAYMDGLGGDKIIF

SEQ ID NO: 519226 - protein, 16 aa, Homo sapiens
  CDR3 for beta chain variable domain of TCR clone 259613 (TRBV12-5, TRBJ2-5)
CASGPRTSGNQETQYF

SEQ ID NO: 519227 - protein, 18 aa, Homo sapiens
  CDR3 for alpha chain variable domain of TCR clone 259614 (TRAV13-1, TRAJ52)
CAAKNPNAGGTSYGKLTF

SEQ ID NO: 519228 - protein, 14 aa, Homo sapiens
  CDR3 for beta chain variable domain of TCR clone 259614 (TRBV7-3, TRBJ2-1)
CASSLAGGTNEQFV

SEQ ID NO: 519229 - protein, 14 aa, Homo sapiens
  CDR3 for alpha chain variable domain of TCR clone 259615 (TRAV16, TRAJ32)
CALKSGGATNKLIF

SEQ ID NO: 519230 - protein, 13 aa, Homo sapiens
  CDR3 for beta chain variable domain of TCR clone 259615 (TRBV15, TRBJ1-6)
CATSGGLTSPLHF

SEQ ID NO: 519231 - protein, 17 aa, Homo sapiens
  CDR3 for alpha chain variable domain of TCR clone 259616 (TRAV4, TRAJ13)
CLVGVQGSSGGYQEVTF

SEQ ID NO: 519232 - protein, 18 aa, Homo sapiens
  CDR3 for beta chain variable domain of TCR clone 259616 (TRBV15, TRBJ2-3)
CATSRDGSRSWDTDTQYF

SEQ ID NO: 519233 - protein, 12 aa, Homo sapiens
  CDR3 for alpha chain variable domain of TCR clone 259617 (TRAV17, TRAJ39)
CATGAAGNMLTF

SEQ ID NO: 519234 - protein, 15 aa, Homo sapiens
  CDR3 for beta chain variable domain of TCR clone 259617 (TRBV18, TRBJ2-1)
CASSPPSASYNEQFF

SEQ ID NO: 519235 - protein, 15 aa, Homo sapiens
  CDR3 for alpha chain variable domain of TCR clone 259618 (TRAV23/DV6, TRAJ18)
CAASFRGSTLGRLYF

SEQ ID NO: 519236 - protein, 13 aa, Homo sapiens
  CDR3 for beta chain variable domain of TCR clone 259618 (TRBV28, TRBJ2-7)
CAILDRAGGERYF

SEQ ID NO: 519237 - protein, 12 aa, Homo sapiens
  CDR3 for alpha chain variable domain of TCR clone 259619 (TRAV21, TRAJ34)
CAVRSNTDKLIF

SEQ ID NO: 519238 - protein, 11 aa, Homo sapiens
  CDR3 for beta chain variable domain of TCR clone 259619 (TRBV29-1, TRBJ2-5)
CSEDRTGTQYF

SEQ ID NO: 519239 - protein, 16 aa, Homo sapiens
  CDR3 for alpha chain variable domain of TCR clone 259620 (TRAV30, TRAJ24)
CGTETVDADSWGKFQF

SEQ ID NO: 519240 - protein, 14 aa, Homo sapiens
  CDR3 for beta chain variable domain of TCR clone 259620 (TRBV3-1, TRBJ2-5)
CASSQAGPPETQYF

SEQ ID NO: 519241 - protein, 10 aa, Homo sapiens
  CDR3 for alpha chain variable domain of TCR clone 259621 (TRAV12-1, TRAJ43)
CVVHNNDMRF

SEQ ID NO: 519242 - protein, 13 aa, Homo sapiens
  CDR3 for beta chain variable domain of TCR clone 259621 (TRBV2, TRBJ2-7)
CASSGAAAYEQYF

SEQ ID NO: 519243 - protein, 14 aa, Homo sapiens
  CDR3 for alpha chain variable domain of TCR clone 259622 (TRAV8-3, TRAJ13)
CAVGARGGYPKVTF

SEQ ID NO: 519244 - protein, 16 aa, Homo sapiens
  CDR3 for beta chain variable domain of TCR clone 259622 (TRBV27, TRBJ2-7)
CASSLGSGTGPYEQYF

SEQ ID NO: 519245 - protein, 14 aa, Homo sapiens
  CDR3 for alpha chain variable domain of TCR clone 259623 (TRAV3, TRAJ22)
CAVRDYGSAMQLTF

SEQ ID NO: 519246 - protein, 13 aa, Homo sapiens
  CDR3 for beta chain variable domain of TCR clone 259623 (TRBV11-2, TRBJ2-5)
CASGHGAKETQYF

SEQ ID NO: 519247 - protein, 17 aa, Homo sapiens
  CDR3 for alpha chain variable domain of TCR clone 259624 (TRAV13-2, TRAJ31)
CAENARLMFGDGTQLVL

SEQ ID NO: 519248 - protein, 14 aa, Homo sapiens
  CDR3 for beta chain variable domain of TCR clone 259624 (TRBV7-9, TRBJ2-1)
CASSLGVADNEQFF

SEQ ID NO: 519249 - protein, 16 aa, Homo sapiens
  CDR3 for alpha chain variable domain of TCR clone 259625 (TRAV30, TRAJ24)
CGTEIVDADSWGKFRF

SEQ ID NO: 519250 - protein, 19 aa, Homo sapiens
  CDR3 for beta chain variable domain of TCR clone 259625 (TRBV25-1, TRBJ2-2)
CAILVYRVDRGRKTGELFF

SEQ ID NO: 519251 - protein, 12 aa, Homo sapiens
  CDR3 for alpha chain variable domain of TCR clone 259626 (TRAV12-3, TRAJ17)
CAMTLTGNKLTF

SEQ ID NO: 519252 - protein, 15 aa, Homo sapiens
  CDR3 for beta chain variable domain of TCR clone 259626 (TRBV20-1, TRBJ2-7)
CSARDQASGMDEQYF

SEQ ID NO: 519253 - protein, 15 aa, Homo sapiens
  CDR3 for alpha chain variable domain of TCR clone 259627 (TRAV21, TRAJ53)
CATLNSGGSNYKLTF

SEQ ID NO: 519254 - protein, 16 aa, Homo sapiens
  CDR3 for beta chain variable domain of TCR clone 259627 (TRBV9, TRBJ2-1)
CASSVGGGGYYNEQFF

SEQ ID NO: 519255 - protein, 15 aa, Homo sapiens
  CDR3 for alpha chain variable domain of TCR clone 259628 (TRAV26-1, TRAJ47)
CIVIVGWGYGNKLVF

SEQ ID NO: 519256 - protein, 13 aa, Homo sapiens
  CDR3 for beta chain variable domain of TCR clone 259628 (TRBV20-1, TRBJ2-7)
CSARGDTQDEQYF

SEQ ID NO: 519257 - protein, 14 aa, Homo sapiens
  CDR3 for alpha chain variable domain of TCR clone 259629 (TRAV12-3, TRAJ9)
CAMSPNTGGFKTIF

SEQ ID NO: 519258 - protein, 13 aa, Homo sapiens
  CDR3 for beta chain variable domain of TCR clone 259629 (TRBV19, TRBJ2-1)
CQSDFRLSGEQFF

SEQ ID NO: 519259 - protein, 16 aa, Homo sapiens
  CDR3 for alpha chain variable domain of TCR clone 259630 (TRAV23/DV6, TRAJ9)
CAASIGGNTGGFKTIF

SEQ ID NO: 519260 - protein, 14 aa, Homo sapiens
  CDR3 for beta chain variable domain of TCR clone 259630 (TRBV19, TRBJ2-1)
CASPTFVLSCEQFF

SEQ ID NO: 519261 - protein, 12 aa, Homo sapiens
  CDR3 for alpha chain variable domain of TCR clone 259631 (TRAV12-3, TRAJ17)
CAMTLTGNKLTF

SEQ ID NO: 519262 - protein, 15 aa, Homo sapiens
  CDR3 for beta chain variable domain of TCR clone 259631 (TRBV27, TRBJ2-1)
CVSSNGGGSSNEQFF

SEQ ID NO: 519263 - protein, 12 aa, Homo sapiens
  CDR3 for alpha chain variable domain of TCR clone 259632 (TRAV17, TRAJ20)
CATDSNDYKFSF

SEQ ID NO: 519264 - protein, 16 aa, Homo sapiens
  CDR3 for beta chain variable domain of TCR clone 259632 (TRBV7-2, TRBJ1-2)
CASSSNQDRRGHGYTF

SEQ ID NO: 519265 - protein, 15 aa, Homo sapiens
  CDR3 for alpha chain variable domain of TCR clone 259633 (TRAV8-6, TRAJ28)
CAVRPLRAGSYQLTF

SEQ ID NO: 519266 - protein, 16 aa, Homo sapiens
  CDR3 for beta chain variable domain of TCR clone 259633 (TRBV4-3, TRBJ2-7)
CASSPRTSGRSYEQYF

SEQ ID NO: 519267 - protein, 10 aa, Homo sapiens
  CDR3 for alpha chain variable domain of TCR clone 259634 (TRAV1-2, TRAJ20)
CACNDYKLSF

SEQ ID NO: 519268 - protein, 15 aa, Homo sapiens
  CDR3 for beta chain variable domain of TCR clone 259634 (TRBV11-1, TRBJ2-7)
CASSLNYGASYEQYF

SEQ ID NO: 519269 - protein, 14 aa, Homo sapiens
  CDR3 for alpha chain variable domain of TCR clone 259635 (TRAV1-2, TRAJ16)
CAVNRFSDGQKLLF

SEQ ID NO: 519270 - protein, 16 aa, Homo sapiens
  CDR3 for beta chain variable domain of TCR clone 259635 (TRBV11-2, TRBJ1-2)
CASSLDTEGADYGYTF

SEQ ID NO: 519271 - protein, 16 aa, Homo sapiens
  CDR3 for alpha chain variable domain of TCR clone 259636 (TRAV3, TRAJ21)
CDVRDIERGNFNKFYF

SEQ ID NO: 519272 - protein, 16 aa, Homo sapiens
  CDR3 for beta chain variable domain of TCR clone 259636 (TRBV12-4, TRBJ1-5)
CASSRPVGGSNQPQHF

SEQ ID NO: 519273 - protein, 13 aa, Homo sapiens
  CDR3 for alpha chain variable domain of TCR clone 259637 (TRAV35, TRAJ44)
CAGLSGTASKLTF

SEQ ID NO: 519274 - protein, 17 aa, Homo sapiens
  CDR3 for beta chain variable domain of TCR clone 259637 (TRBV7-8, TRBJ1-2)
CASSLRPLQGHVYGYTF

SEQ ID NO: 519275 - protein, 17 aa, Homo sapiens
  CDR3 for alpha chain variable domain of TCR clone 259638 (TRAV4, TRAJ18)
CLVGERSVGSTLGRLYF

SEQ ID NO: 519276 - protein, 15 aa, Homo sapiens
  CDR3 for beta chain variable domain of TCR clone 259638 (TRBV5-1, TRBJ2-7)
CASSLDLTSSYEQYF

SEQ ID NO: 519277 - protein, 11 aa, Homo sapiens
  CDR3 for alpha chain variable domain of TCR clone 259639 (TRAV29/DV5, TRAJ30)
CAVRKVDKIIF

SEQ ID NO: 519278 - protein, 13 aa, Homo sapiens
  CDR3 for beta chain variable domain of TCR clone 259639 (TRBV12-4, TRBJ1-2)
CASSLRQGKGYTF

SEQ ID NO: 519279 - protein, 13 aa, Homo sapiens
  CDR3 for alpha chain variable domain of TCR clone 259640 (TRAV23/DV6, TRAJ16)
CAASISDGQKLLF

SEQ ID NO: 519280 - protein, 15 aa, Homo sapiens
  CDR3 for beta chain variable domain of TCR clone 259640 (TRBV27, TRBJ2-1)
CASSNGGGSSNEQFF

SEQ ID NO: 519281 - protein, 12 aa, Homo sapiens
  CDR3 for alpha chain variable domain of TCR clone 259641 (TRAV16, TRAJ56)
CAPTGANSKLTF

SEQ ID NO: 519282 - protein, 13 aa, Homo sapiens
  CDR3 for beta chain variable domain of TCR clone 259641 (TRBV19, TRBJ2-7)
CASSPRQSYEQYF

SEQ ID NO: 519283 - protein, 16 aa, Homo sapiens
  CDR3 for alpha chain variable domain of TCR clone 259642 (TRAV8-3, TRAJ44)
CAVGPLNTGTASKLTF

SEQ ID NO: 519284 - protein, 18 aa, Homo sapiens
  CDR3 for beta chain variable domain of TCR clone 259642 (TRBV3-1, TRBJ2-1)
CASSQDLPGRPLLDEQFF

SEQ ID NO: 519285 - protein, 11 aa, Homo sapiens
  CDR3 for alpha chain variable domain of TCR clone 259643 (TRAV3, TRAJ21)
CSVGNFNKFYF

SEQ ID NO: 519286 - protein, 16 aa, Homo sapiens
  CDR3 for beta chain variable domain of TCR clone 259643 (TRBV19, TRBJ2-1)
CASSKAGPSSYNEHFF

SEQ ID NO: 519287 - protein, 14 aa, Homo sapiens
  CDR3 for alpha chain variable domain of TCR clone 259644 (TRAV12-2, TRAJ17)
CAVNIKAAGNKLTF

SEQ ID NO: 519288 - protein, 15 aa, Homo sapiens
  CDR3 for beta chain variable domain of TCR clone 259644 (TRBV28, TRBJ2-1)
CASSGLAEVDNEQFF

SEQ ID NO: 519289 - protein, 11 aa, Homo sapiens
  CDR3 for alpha chain variable domain of TCR clone 259645 (TRAV21, TRAJ34)
CAVTNTDELIF

SEQ ID NO: 519290 - protein, 14 aa, Homo sapiens
  CDR3 for beta chain variable domain of TCR clone 259645 (TRBV7-3, TRBJ2-1)
CASSLAGGTNEQFF

SEQ ID NO: 519291 - protein, 17 aa, Homo sapiens
  CDR3 for alpha chain variable domain of TCR clone 259646 (TRAV17, TRAJ7)
CATLGRLAFGKGNQVVV

SEQ ID NO: 519292 - protein, 12 aa, Homo sapiens
  CDR3 for beta chain variable domain of TCR clone 259646 (TRBV12-4, TRBJ2-7)
CQQLERVREQYF

SEQ ID NO: 519293 - protein, 12 aa, Homo sapiens
  CDR3 for alpha chain variable domain of TCR clone 259647 (TRAV12-3, TRAJ17)
CAMTLTGNKLTF

SEQ ID NO: 519294 - protein, 18 aa, Homo sapiens
  CDR3 for beta chain variable domain of TCR clone 259647 (TRBV13, TRBJ2-6)
CASSPMTSGGSGANVLTF

SEQ ID NO: 519295 - protein, 12 aa, Homo sapiens
  CDR3 for alpha chain variable domain of TCR clone 259648 (TRAV8-6, TRAJ43)
CAVSNNNNDMSF

SEQ ID NO: 519296 - protein, 15 aa, Homo sapiens
  CDR3 for beta chain variable domain of TCR clone 259648 (TRBV7-3, TRBJ2-6)
CASSLGGSGANVLTF

SEQ ID NO: 519297 - protein, 16 aa, Homo sapiens
  CDR3 for alpha chain variable domain of TCR clone 259649 (TRAV30, TRAJ24)
CGTEIVDADSWGNFQF

SEQ ID NO: 519298 - protein, 14 aa, Homo sapiens
  CDR3 for beta chain variable domain of TCR clone 259649 (TRBV11-2, TRBJ2-3)
CASSRLARTDTQYF

SEQ ID NO: 519299 - protein, 13 aa, Homo sapiens
  CDR3 for alpha chain variable domain of TCR clone 259650 (TRAV1-2, TRAJ9)
CAALNTGGFKTIF

SEQ ID NO: 519300 - protein, 17 aa, Homo sapiens
  CDR3 for beta chain variable domain of TCR clone 259650 (TRBV5-1, TRBJ1-1)
CASRPIRTGGVNTEAFF

SEQ ID NO: 519301 - protein, 11 aa, Homo sapiens
  CDR3 for alpha chain variable domain of TCR clone 259651 (TRAV35, TRAJ22)
CAGPGVGQLTF

SEQ ID NO: 519302 - protein, 15 aa, Homo sapiens
  CDR3 for beta chain variable domain of TCR clone 259651 (TRBV7-3, TRBJ2-1)
CASSLGQGPFGEQFF

SEQ ID NO: 519303 - protein, 13 aa, Homo sapiens
  CDR3 for alpha chain variable domain of TCR clone 259652 (TRAV8-1, TRAJ47)
CAVTSEYGNKLVF

SEQ ID NO: 519304 - protein, 13 aa, Homo sapiens
  CDR3 for beta chain variable domain of TCR clone 259652 (TRBV6-5, TRBJ2-5)
CASSPQGGETQYF

SEQ ID NO: 519305 - protein, 13 aa, Homo sapiens
  CDR3 for alpha chain variable domain of TCR clone 259653 (TRAV2, TRAJ40)
CAVATSETYKYIF

SEQ ID NO: 519306 - protein, 14 aa, Homo sapiens
  CDR3 for beta chain variable domain of TCR clone 259653 (TRBV19, TRBJ2-1)
CAGPTFVLSGEQFF

SEQ ID NO: 519307 - protein, 18 aa, Homo sapiens
  CDR3 for alpha chain variable domain of TCR clone 259654 (TRAV21, TRAJ52)
CAVRPSPAGGTSYGKLTF

SEQ ID NO: 519308 - protein, 16 aa, Homo sapiens
  CDR3 for beta chain variable domain of TCR clone 259654 (TRBV5-1, TRBJ2-5)
CASSLSLAGAQETQYF

SEQ ID NO: 519309 - protein, 13 aa, Homo sapiens
  CDR3 for alpha chain variable domain of TCR clone 259655 (TRAV25, TRAJ10)
CAGRTGGGNKPTF

SEQ ID NO: 519310 - protein, 15 aa, Homo sapiens
  CDR3 for beta chain variable domain of TCR clone 259655 (TRBV19, TRBJ2-1)
CASSSPGVPLDEQFF

SEQ ID NO: 519311 - protein, 13 aa, Homo sapiens
  CDR3 for alpha chain variable domain of TCR clone 259656 (TRAV21, TRAJ27)
CAARLGNAGKSTF

SEQ ID NO: 519312 - protein, 11 aa, Homo sapiens
  CDR3 for beta chain variable domain of TCR clone 259656 (TRBV29-1, TRBJ2-5)
CSEDRTGTQYF

SEQ ID NO: 519313 - protein, 15 aa, Homo sapiens
  CDR3 for alpha chain variable domain of TCR clone 259657 (TRAV17, TRAJ23)
CATDAEDNQGGKLIF

SEQ ID NO: 519314 - protein, 12 aa, Homo sapiens
  CDR3 for beta chain variable domain of TCR clone 259657 (TRBV2, TRBJ2-1)
CDKQEGYNEQFF

SEQ ID NO: 519315 - protein, 13 aa, Homo sapiens
  CDR3 for alpha chain variable domain of TCR clone 259658 (TRAV21, TRAJ27)
CAARPGNAGKSTL

SEQ ID NO: 519316 - protein, 15 aa, Homo sapiens
  CDR3 for beta chain variable domain of TCR clone 259658 (TRBV11-3, TRBJ2-7)
CASSPGPARSYEQYF

SEQ ID NO: 519317 - protein, 11 aa, Homo sapiens
  CDR3 for alpha chain variable domain of TCR clone 259659 (TRAV20, TRAJ23)
CAYNQGGKLIF

SEQ ID NO: 519318 - protein, 14 aa, Homo sapiens
  CDR3 for beta chain variable domain of TCR clone 259659 (TRBV7-2, TRBJ1-1)
CASSFLTGTTEAFF

SEQ ID NO: 519319 - protein, 13 aa, Homo sapiens
  CDR3 for alpha chain variable domain of TCR clone 259660 (TRAV27, TRAJ11)
CAGARSGYSTLTF

SEQ ID NO: 519320 - protein, 16 aa, Homo sapiens
  CDR3 for beta chain variable domain of TCR clone 259660 (TRBV10-2, TRBJ2-2)
CPSSESRDRGSGELFF

SEQ ID NO: 519321 - protein, 11 aa, Homo sapiens
  CDR3 for alpha chain variable domain of TCR clone 259661 (TRAV35, TRAJ52)
CAGTPKGKLTF

SEQ ID NO: 519322 - protein, 14 aa, Homo sapiens
  CDR3 for beta chain variable domain of TCR clone 259661 (TRBV12-4, TRBJ2-1)
CASSLGQGASEQFF

SEQ ID NO: 519323 - protein, 14 aa, Homo sapiens
  CDR3 for alpha chain variable domain of TCR clone 259662 (TRAV12-2, TRAJ24)
CAVTPADSWGKLRF

SEQ ID NO: 519324 - protein, 15 aa, Homo sapiens
  CDR3 for beta chain variable domain of TCR clone 259662 (TRBV7-9, TRBJ1-4)
CASSARTGGNEKLFF

SEQ ID NO: 519325 - protein, 15 aa, Homo sapiens
  CDR3 for alpha chain variable domain of TCR clone 259663 (TRAV1-2, TRAJ13)
CAVRGSSGGYQKVTF

SEQ ID NO: 519326 - protein, 15 aa, Homo sapiens
  CDR3 for beta chain variable domain of TCR clone 259663 (TRBV11-3, TRBJ1-3)
CASRLSGTSGNTIYF

SEQ ID NO: 519327 - protein, 15 aa, Homo sapiens
  CDR3 for alpha chain variable domain of TCR clone 259664 (TRAV14/DV4, TRAJ10)
CAMRELTGGGNTLTF

SEQ ID NO: 519328 - protein, 18 aa, Homo sapiens
  CDR3 for beta chain variable domain of TCR clone 259664 (TRBV7-9, TRBJ2-7)
CASSLTTSGSRTWYEQYF

SEQ ID NO: 519329 - protein, 11 aa, Homo sapiens
  CDR3 for alpha chain variable domain of TCR clone 259665 (TRAV1-2, TRAJ20)
CAVANDYKLSF

SEQ ID NO: 519330 - protein, 13 aa, Homo sapiens
  CDR3 for beta chain variable domain of TCR clone 259665 (TRBV7-2, TRBJ1-6)
CASSLVGSSPLHF

SEQ ID NO: 519331 - protein, 15 aa, Homo sapiens
  CDR3 for alpha chain variable domain of TCR clone 259666 (TRAV3, TRAJ17)
CAVRDTGAAGNKLTF

SEQ ID NO: 519332 - protein, 16 aa, Homo sapiens
  CDR3 for beta chain variable domain of TCR clone 259666 (TRBV7-3, TRBJ1-6)
CASSLSSRIGDSPLHF

SEQ ID NO: 519333 - protein, 14 aa, Homo sapiens
  CDR3 for alpha chain variable domain of TCR clone 259667 (TRAV12-2, TRAJ23)
CAVGGYNQGGKIIF

SEQ ID NO: 519334 - protein, 15 aa, Homo sapiens
  CDR3 for beta chain variable domain of TCR clone 259667 (TRBV20-1, TRBJ2-3)
CSASSGGPRTDTQYF

SEQ ID NO: 519335 - protein, 18 aa, Homo sapiens
  CDR3 for alpha chain variable domain of TCR clone 259668 (TRAV3, TRAJ17)
CAVRARRGGRSCMQQANF

SEQ ID NO: 519336 - protein, 14 aa, Homo sapiens
  CDR3 for beta chain variable domain of TCR clone 259668 (TRBV4-1, TRBJ2-2)
CASSQAVNTGELFF

SEQ ID NO: 519337 - protein, 15 aa, Homo sapiens
  CDR3 for alpha chain variable domain of TCR clone 259669 (TRAV3, TRAJ9)
CAVRARNTGGFKTIF

SEQ ID NO: 519338 - protein, 12 aa, Homo sapiens
  CDR3 for beta chain variable domain of TCR clone 259669 (TRBV19, TRBJ2-1)
CASSMQDTEQFF

SEQ ID NO: 519339 - protein, 16 aa, Homo sapiens
  CDR3 for alpha chain variable domain of TCR clone 259670 (TRAV26-1, TRAJ50)
CIVRVEAGTSYDKVMF

SEQ ID NO: 519340 - protein, 13 aa, Homo sapiens
  CDR3 for beta chain variable domain of TCR clone 259670 (TRBV25-1, TRBJ1-2)
CASSENMGRGYTF

SEQ ID NO: 519341 - protein, 12 aa, Homo sapiens
  CDR3 for alpha chain variable domain of TCR clone 259671 (TRAV22, TRAJ22)
CAPGGSARQLTF

SEQ ID NO: 519342 - protein, 16 aa, Homo sapiens
  CDR3 for beta chain variable domain of TCR clone 259671 (TRBV19, TRBJ2-7)
CASSTPGQASSYEQYF

SEQ ID NO: 519343 - protein, 12 aa, Homo sapiens
  CDR3 for alpha chain variable domain of TCR clone 259672 (TRAV27, TRAJ13)
CAGVRGYQKVTF

SEQ ID NO: 519344 - protein, 16 aa, Homo sapiens
  CDR3 for beta chain variable domain of TCR clone 259672 (TRBV28, TRBJ2-1)
CASSLSYSGSLNEQFF

SEQ ID NO: 519345 - protein, 12 aa, Homo sapiens
  CDR3 for alpha chain variable domain of TCR clone 259673 (TRAV8-1, TRAJ31)
YAVINNNARLMF

SEQ ID NO: 519346 - protein, 15 aa, Homo sapiens
  CDR3 for beta chain variable domain of TCR clone 259673 (TRBV20-1, TRBJ2-2)
CSARGGQGNTGELFF

SEQ ID NO: 519347 - protein, 13 aa, Homo sapiens
  CDR3 for alpha chain variable domain of TCR clone 259674 (TRAV12-1, TRAJ7)
CVVNMRGNNRLAF

SEQ ID NO: 519348 - protein, 16 aa, Homo sapiens
  CDR3 for beta chain variable domain of TCR clone 259674 (TRBV19, TRBJ2-1)
CASSKAGPSSYNEQFF

SEQ ID NO: 519349 - protein, 14 aa, Homo sapiens
  CDR3 for alpha chain variable domain of TCR clone 259675 (TRAV12-2, TRAJ17)
CAVLFKAAGNKLTF

SEQ ID NO: 519350 - protein, 15 aa, Homo sapiens
  CDR3 for beta chain variable domain of TCR clone 259675 (TRBV5-1, TRBJ2-1)
CASSPPRAAYNEQFF

SEQ ID NO: 519351 - protein, 12 aa, Homo sapiens
  CDR3 for alpha chain variable domain of TCR clone 259676 (TRAV29/DV5, TRAJ54)
CATSRGAQKLAF

SEQ ID NO: 519352 - protein, 15 aa, Homo sapiens
  CDR3 for beta chain variable domain of TCR clone 259676 (TRBV3-1, TRBJ1-2)
CASSRRNPGFYGYTF

SEQ ID NO: 519353 - protein, 14 aa, Homo sapiens
  CDR3 for alpha chain variable domain of TCR clone 259677 (TRAV13-1, TRAJ23)
CAASRLGRGGKLIF

SEQ ID NO: 519354 - protein, 17 aa, Homo sapiens
  CDR3 for beta chain variable domain of TCR clone 259677 (TRBV24-1, TRBJ1-2)
CATSDPRQGVLSGGYTF

SEQ ID NO: 519355 - protein, 12 aa, Homo sapiens
  CDR3 for alpha chain variable domain of TCR clone 259678 (TRAV13-2, TRAJ23)
CAERHRGGKLIF

SEQ ID NO: 519356 - protein, 15 aa, Homo sapiens
  CDR3 for beta chain variable domain of TCR clone 259678 (TRBV7-9, TRBJ1-6)
CGSSSPGRGNSPLHF

SEQ ID NO: 519357 - protein, 21 aa, Homo sapiens
  CDR3 for alpha chain variable domain of TCR clone 259679 (TRAV1-1, TRAJ6)
CLLLLRCERLERTGGSYIPTF

SEQ ID NO: 519358 - protein, 16 aa, Homo sapiens
  CDR3 for beta chain variable domain of TCR clone 259679 (TRBV12-4, TRBJ1-5)
CASSRPVGGSNQPQHF

SEQ ID NO: 519359 - protein, 12 aa, Homo sapiens
  CDR3 for alpha chain variable domain of TCR clone 259680 (TRAV8-4, TRAJ57)
CAVKGGSEKLVF

SEQ ID NO: 519360 - protein, 15 aa, Homo sapiens
  CDR3 for beta chain variable domain of TCR clone 259680 (TRBV28, TRBJ2-4)
CAAGSGTLLMGIQYF

SEQ ID NO: 519361 - protein, 16 aa, Homo sapiens
  CDR3 for alpha chain variable domain of TCR clone 259681 (TRAV3, TRAJ37)
CTVRVRGSGNTGKLIF

SEQ ID NO: 519362 - protein, 16 aa, Homo sapiens
  CDR3 for beta chain variable domain of TCR clone 259681 (TRBV12-5, TRBJ2-5)
CASGPRTSGNQETQYF

SEQ ID NO: 519363 - protein, 14 aa, Homo sapiens
  CDR3 for alpha chain variable domain of TCR clone 259682 (TRAV21, TRAJ23)
CAIMIYNQGGKLIF

SEQ ID NO: 519364 - protein, 15 aa, Homo sapiens
  CDR3 for beta chain variable domain of TCR clone 259682 (TRBV7-3, TRBJ2-2)
CASSETGQGTGELFF

SEQ ID NO: 519365 - protein, 14 aa, Homo sapiens
  CDR3 for alpha chain variable domain of TCR clone 259683 (TRAV8-3, TRAJ10)
CAVGNAGGGNKLTF

SEQ ID NO: 519366 - protein, 16 aa, Homo sapiens
  CDR3 for beta chain variable domain of TCR clone 259683 (TRBV11-2, TRBJ1-2)
CASSVDTGGADYGYTF

SEQ ID NO: 519367 - protein, 15 aa, Homo sapiens
  CDR3 for alpha chain variable domain of TCR clone 259684 (TRAV12-3, TRAJ6)
CAMSATTGGSYIPTF

SEQ ID NO: 519368 - protein, 19 aa, Homo sapiens
  CDR3 for beta chain variable domain of TCR clone 259684 (TRBV25-1, TRBJ2-2)
CAILVYRVDRGRKTGELFL

SEQ ID NO: 519369 - protein, 11 aa, Homo sapiens
  CDR3 for alpha chain variable domain of TCR clone 259685 (TRAV1-1, TRAJ23)
CAVRQGGKLIF

SEQ ID NO: 519370 - protein, 15 aa, Homo sapiens
  CDR3 for beta chain variable domain of TCR clone 259685 (TRBV19, TRBJ2-7)
CASSTGLAGTYEQYF

SEQ ID NO: 519371 - protein, 18 aa, Homo sapiens
  CDR3 for alpha chain variable domain of TCR clone 259686 (TRAV9-2, TRAJ52)
CALSRHNAGCTSYGKLTF

SEQ ID NO: 519372 - protein, 13 aa, Homo sapiens
  CDR3 for beta chain variable domain of TCR clone 259686 (TRBV7-9, TRBJ1-2)
CDSSLKQNYGYTF

SEQ ID NO: 519373 - protein, 10 aa, Homo sapiens
  CDR3 for alpha chain variable domain of TCR clone 259687 (TRAV8-4, TRAJ43)
CAVSADDMRF

SEQ ID NO: 519374 - protein, 18 aa, Homo sapiens
  CDR3 for beta chain variable domain of TCR clone 259687 (TRBV7-8, TRBJ2-1)
CASSLARLAVNRGNEQLF

SEQ ID NO: 519375 - protein, 15 aa, Homo sapiens
  CDR3 for alpha chain variable domain of TCR clone 259688 (TRAV13-1, TRAJ44)
CAASRNTGTASKLTF

SEQ ID NO: 519376 - protein, 12 aa, Homo sapiens
  CDR3 for beta chain variable domain of TCR clone 259688 (TRBV7-8, TRBJ2-7)
CASSLGDREQYF

SEQ ID NO: 519377 - protein, 11 aa, Homo sapiens
  CDR3 for alpha chain variable domain of TCR clone 259689 (TRAV3, TRAJ21)
CAVGNFNKFYF

SEQ ID NO: 519378 - protein, 16 aa, Homo sapiens
  CDR3 for beta chain variable domain of TCR clone 259689 (TRBV19, TRBJ2-1)
CASSIWGQGARNEQFF

SEQ ID NO: 519379 - protein, 10 aa, Homo sapiens
  CDR3 for alpha chain variable domain of TCR clone 259690 (TRAV23/DV6, TRAJ57)
CASSSTLSQR

SEQ ID NO: 519380 - protein, 14 aa, Homo sapiens
  CDR3 for beta chain variable domain of TCR clone 259690 (TRBV25-1, TRBJ1-1)
CASTHLGGNTEAFF

SEQ ID NO: 519381 - protein, 14 aa, Homo sapiens
  CDR3 for alpha chain variable domain of TCR clone 259691 (TRAV12-2, TRAJ44)
CAVNPAGTASKLTF

SEQ ID NO: 519382 - protein, 13 aa, Homo sapiens
  CDR3 for beta chain variable domain of TCR clone 259691 (TRBV20-1, TRBJ1-6)
CSSPLGVGSPLHF

SEQ ID NO: 519383 - protein, 17 aa, Homo sapiens
  CDR3 for alpha chain variable domain of TCR clone 259692 (TRAV29/DV5, TRAJ21)
CAASNKFYFGSGTKLNV

SEQ ID NO: 519384 - protein, 15 aa, Homo sapiens
  CDR3 for beta chain variable domain of TCR clone 259692 (TRBV27, TRBJ2-1)
CASSNGGGSSNEQFF

SEQ ID NO: 519385 - protein, 13 aa, Homo sapiens
  CDR3 for alpha chain variable domain of TCR clone 259693 (TRAV14/DV4, TRAJ20)
CAMRESNDYKLSF

SEQ ID NO: 519386 - protein, 15 aa, Homo sapiens
  CDR3 for beta chain variable domain of TCR clone 259693 (TRBV7-9, TRBJ1-1)
CASSRPVTANTEAFF

SEQ ID NO: 519387 - protein, 15 aa, Homo sapiens
  CDR3 for alpha chain variable domain of TCR clone 259694 (TRAV4, TRAJ12)
CLVGDLMDSSYKLIF

SEQ ID NO: 519388 - protein, 14 aa, Homo sapiens
  CDR3 for beta chain variable domain of TCR clone 259694 (TRBV7-2, TRBJ1-1)
CASSHRQGRTEALF

SEQ ID NO: 519389 - protein, 15 aa, Homo sapiens
  CDR3 for alpha chain variable domain of TCR clone 259695 (TRAV12-2, TRAJ53)
CAENGGEGSNYKLTF

SEQ ID NO: 519390 - protein, 13 aa, Homo sapiens
  CDR3 for beta chain variable domain of TCR clone 259695 (TRBV3-1, TRBJ1-1)
CASSPGVITEALF

SEQ ID NO: 519391 - protein, 13 aa, Homo sapiens
  CDR3 for alpha chain variable domain of TCR clone 259696 (TRAV13-2, TRAJ15)
CAESNQAGTALIF

SEQ ID NO: 519392 - protein, 13 aa, Homo sapiens
  CDR3 for beta chain variable domain of TCR clone 259696 (TRBV9, TRBJ2-1)
FASSPSGGSEQFF

SEQ ID NO: 519393 - protein, 19 aa, Homo sapiens
  CDR3 for alpha chain variable domain of TCR clone 259697 (TRAV13-1, TRAJ52)
CAARPYQSAGGTSYGKLTF

SEQ ID NO: 519394 - protein, 13 aa, Homo sapiens
  CDR3 for beta chain variable domain of TCR clone 259697 (TRBV15, TRBJ2-7)
CATSTTGHYEQYF

SEQ ID NO: 519395 - protein, 12 aa, Homo sapiens
  CDR3 for alpha chain variable domain of TCR clone 259698 (TRAV12-1, TRAJ40)
CVVPSGTYKYLF

SEQ ID NO: 519396 - protein, 15 aa, Homo sapiens
  CDR3 for beta chain variable domain of TCR clone 259698 (TRBV12-4, TRBJ2-1)
CASSPLSGRNNEQFF

SEQ ID NO: 519397 - protein, 13 aa, Homo sapiens
  CDR3 for alpha chain variable domain of TCR clone 259699 (TRAV20, TRAJ48)
YAVQGVGNEKLTF

SEQ ID NO: 519398 - protein, 14 aa, Homo sapiens
  CDR3 for beta chain variable domain of TCR clone 259699 (TRBV27, TRBJ2-7)
CASSFRDGPYEQYF

SEQ ID NO: 519399 - protein, 12 aa, Homo sapiens
  CDR3 for alpha chain variable domain of TCR clone 259700 (TRAV12-3, TRAJ17)
CAMTLTGNKLTF

SEQ ID NO: 519400 - protein, 17 aa, Homo sapiens
  CDR3 for beta chain variable domain of TCR clone 259700 (TRBV20-1, TRBJ2-1)
CNASSSGLAGSYNEQFF

SEQ ID NO: 519401 - protein, 14 aa, Homo sapiens
  CDR3 for alpha chain variable domain of TCR clone 259701 (TRAV29/DV5, TRAJ36)
CAARRKTGANNLFF

SEQ ID NO: 519402 - protein, 16 aa, Homo sapiens
  CDR3 for beta chain variable domain of TCR clone 259701 (TRBV20-1, TRBJ1-4)
CSARPYGGELNEKLFF

SEQ ID NO: 519403 - protein, 14 aa, Homo sapiens
  CDR3 for alpha chain variable domain of TCR clone 259702 (TRAV1-2, TRAJ8)
CAVREDTGFQKLVF

SEQ ID NO: 519404 - protein, 15 aa, Homo sapiens
  CDR3 for beta chain variable domain of TCR clone 259702 (TRBV7-3, TRBJ2-2)
CQQLKAGDLVRGAVF

SEQ ID NO: 519405 - protein, 11 aa, Homo sapiens
  CDR3 for alpha chain variable domain of TCR clone 259703 (TRAV8-4, TRAJ20)
CAVTNVLTTTS

SEQ ID NO: 519406 - protein, 13 aa, Homo sapiens
  CDR3 for beta chain variable domain of TCR clone 259703 (TRBV4-1, TRBJ2-7)
CASSQGQAYEQYF

SEQ ID NO: 519407 - protein, 14 aa, Homo sapiens
  CDR3 for alpha chain variable domain of TCR clone 259704 (TRAV8-3, TRAJ4)
CSVGASGGYNKLIF

SEQ ID NO: 519408 - protein, 12 aa, Homo sapiens
  CDR3 for beta chain variable domain of TCR clone 259704 (TRBV19, TRBJ2-7)
CASTSVGSEQYF

SEQ ID NO: 519409 - protein, 14 aa, Homo sapiens
  CDR3 for alpha chain variable domain of TCR clone 259705 (TRAV23/DV6, TRAJ40)
CAASLTSGTYKYIF

SEQ ID NO: 519410 - protein, 14 aa, Homo sapiens
  CDR3 for beta chain variable domain of TCR clone 259705 (TRBV20-1, TRBJ1-1)
CSAQTRIGGTEAFF

SEQ ID NO: 519411 - protein, 21 aa, Homo sapiens
  CDR3 for alpha chain variable domain of TCR clone 259706 (TRAV29/DV5, TRAJ52)
CSVLLCSKREAGGTNYGKLTF

SEQ ID NO: 519412 - protein, 13 aa, Homo sapiens
  CDR3 for beta chain variable domain of TCR clone 259706 (TRBV27, TRBJ1-4)
CASSLMGDEKLFF

SEQ ID NO: 519413 - protein, 20 aa, Homo sapiens
  CDR3 for alpha chain variable domain of TCR clone 259707 (TRAV12-3, TRAJ41)
SLFIRDSQPSDSATPEALNF

SEQ ID NO: 519414 - protein, 14 aa, Homo sapiens
  CDR3 for beta chain variable domain of TCR clone 259707 (TRBV28, TRBJ2-5)
CASSSGTAQETQYF

SEQ ID NO: 519415 - protein, 15 aa, Homo sapiens
  CDR3 for alpha chain variable domain of TCR clone 259708 (TRAV12-3, TRAJ6)
CAMSATTGGSYIPKF

SEQ ID NO: 519416 - protein, 15 aa, Homo sapiens
  CDR3 for beta chain variable domain of TCR clone 259708 (TRBV20-1, TRBJ2-7)
CSARDRVSGMDEQYF

SEQ ID NO: 519417 - protein, 13 aa, Homo sapiens
  CDR3 for alpha chain variable domain of TCR clone 259709 (TRAV3, TRAJ21)
CAVREPDFNKFYF

SEQ ID NO: 519418 - protein, 13 aa, Homo sapiens
  CDR3 for beta chain variable domain of TCR clone 259709 (TRBV25-1, TRBJ2-5)
CASSESGRETQYF

SEQ ID NO: 519419 - protein, 17 aa, Homo sapiens
  CDR3 for alpha chain variable domain of TCR clone 259710 (TRAV3, TRAJ38)
CAVRDCLNAGNNRKLIC

SEQ ID NO: 519420 - protein, 12 aa, Homo sapiens
  CDR3 for beta chain variable domain of TCR clone 259710 (TRBV11-2, TRBJ2-2)
CASSLGGGELFF

SEQ ID NO: 519421 - protein, 16 aa, Homo sapiens
  CDR3 for alpha chain variable domain of TCR clone 259711 (TRAV1-1, TRAJ29)
CAVRSTRNSGNTPLVF

SEQ ID NO: 519422 - protein, 19 aa, Homo sapiens
  CDR3 for beta chain variable domain of TCR clone 259711 (TRBV7-2, TRBJ2-3)
CASSFLSRNWGGGTDTQYF

SEQ ID NO: 519423 - protein, 14 aa, Homo sapiens
  CDR3 for alpha chain variable domain of TCR clone 259712 (TRAV12-2, TRAJ13)
CAVKKTGGYQKVTF

SEQ ID NO: 519424 - protein, 15 aa, Homo sapiens
  CDR3 for beta chain variable domain of TCR clone 259712 (TRBV27, TRBJ2-7)
CASSPPGQGTYEQYF

SEQ ID NO: 519425 - protein, 14 aa, Homo sapiens
  CDR3 for alpha chain variable domain of TCR clone 259713 (TRAV25, TRAJ44)
CAVFPTGTASKLTF

SEQ ID NO: 519426 - protein, 12 aa, Homo sapiens
  CDR3 for beta chain variable domain of TCR clone 259713 (TRBV11-2, TRBJ2-2)
CASSLGGGELFF

SEQ ID NO: 519427 - protein, 12 aa, Homo sapiens
  CDR3 for alpha chain variable domain of TCR clone 259714 (TRAV17, TRAJ57)
CATDGGSEKLVF

SEQ ID NO: 519428 - protein, 13 aa, Homo sapiens
  CDR3 for beta chain variable domain of TCR clone 259714 (TRBV7-9, TRBJ2-7)
CASSCAGAYQQYF

SEQ ID NO: 519429 - protein, 13 aa, Homo sapiens
  CDR3 for alpha chain variable domain of TCR clone 259715 (TRAV21, TRAJ49)
CAVRQSTGNHFYF

SEQ ID NO: 519430 - protein, 13 aa, Homo sapiens
  CDR3 for beta chain variable domain of TCR clone 259715 (TRBV6-6, TRBJ1-5)
CSSRAYQDQPQHF

SEQ ID NO: 519431 - protein, 13 aa, Homo sapiens
  CDR3 for alpha chain variable domain of TCR clone 259716 (TRAV3, TRAJ21)
CAVREPDFNKFYS

SEQ ID NO: 519432 - protein, 15 aa, Homo sapiens
  CDR3 for beta chain variable domain of TCR clone 259716 (TRBV3-1, TRBJ2-7)
CASSQAPSGSYEQYF

SEQ ID NO: 519433 - protein, 20 aa, Homo sapiens
  CDR3 for alpha chain variable domain of TCR clone 259717 (TRAV1-2, TRAJ34)
LLKELQMKDSASPNTDKLIF

SEQ ID NO: 519434 - protein, 18 aa, Homo sapiens
  CDR3 for beta chain variable domain of TCR clone 259717 (TRBV3-1, TRBJ2-5)
CASSQAGTSGRGRETQYF

SEQ ID NO: 519435 - protein, 14 aa, Homo sapiens
  CDR3 for alpha chain variable domain of TCR clone 259718 (TRAV3, TRAJ36)
CAVRDGTGTNNLFF

SEQ ID NO: 519436 - protein, 16 aa, Homo sapiens
  CDR3 for beta chain variable domain of TCR clone 259718 (TRBV20-1, TRBJ2-6)
CSAREGPGVGANVLTF

SEQ ID NO: 519437 - protein, 13 aa, Homo sapiens
  CDR3 for alpha chain variable domain of TCR clone 259719 (TRAV26-1, TRAJ30)
CIVRVESNDKIIF

SEQ ID NO: 519438 - protein, 17 aa, Homo sapiens
  CDR3 for beta chain variable domain of TCR clone 259719 (TRBV13, TRBJ2-3)
CASRLSRVAGGRNTQYF

SEQ ID NO: 519439 - protein, 15 aa, Homo sapiens
  CDR3 for alpha chain variable domain of TCR clone 259720 (TRAV23/DV6, TRAJ18)
CAARYRGSTLGRLYF

SEQ ID NO: 519440 - protein, 15 aa, Homo sapiens
  CDR3 for beta chain variable domain of TCR clone 259720 (TRBV20-1, TRBJ2-7)
CSARYRVSGVDEQYF

SEQ ID NO: 519441 - protein, 13 aa, Homo sapiens
  CDR3 for alpha chain variable domain of TCR clone 259721 (TRAV1-2, TRAJ9)
CAALNTGGFTTIF

SEQ ID NO: 519442 - protein, 16 aa, Homo sapiens
  CDR3 for beta chain variable domain of TCR clone 259721 (TRBV11-2, TRBJ2-1)
CASSPRLAGVYNEQFF

SEQ ID NO: 519443 - protein, 14 aa, Homo sapiens
  CDR3 for alpha chain variable domain of TCR clone 259722 (TRAV26-1, TRAJ26)
CIVRATFLVQNFVF

SEQ ID NO: 519444 - protein, 16 aa, Homo sapiens
  CDR3 for beta chain variable domain of TCR clone 259722 (TRBV12-4, TRBJ2-7)
CASRSTGTGPSYEQYF

SEQ ID NO: 519445 - protein, 12 aa, Homo sapiens
  CDR3 for alpha chain variable domain of TCR clone 259723 (TRAV27, TRAJ37)
CADSGSTGKLIF

SEQ ID NO: 519446 - protein, 18 aa, Homo sapiens
  CDR3 for beta chain variable domain of TCR clone 259723 (TRBV7-9, TRBJ1-1)
CASGKPWDTMGMNTEAFF

SEQ ID NO: 519447 - protein, 13 aa, Homo sapiens
  CDR3 for alpha chain variable domain of TCR clone 259724 (TRAV17, TRAJ4)
CATKSAGYNKLIF

SEQ ID NO: 519448 - protein, 14 aa, Homo sapiens
  CDR3 for beta chain variable domain of TCR clone 259724 (TRBV20-1, TRBJ1-5)
CSARDDRGNQPQHF

SEQ ID NO: 519449 - protein, 13 aa, Homo sapiens
  CDR3 for alpha chain variable domain of TCR clone 259725 (TRAV3, TRAJ20)
CAVRSLNDYKLSF

SEQ ID NO: 519450 - protein, 13 aa, Homo sapiens
  CDR3 for beta chain variable domain of TCR clone 259725 (TRBV7-3, TRBJ1-1)
CASSQDWGAEACF

SEQ ID NO: 519451 - protein, 15 aa, Homo sapiens
  CDR3 for alpha chain variable domain of TCR clone 259726 (TRAV12-3, TRAJ5)
CAMSGLGTGRRALTC

SEQ ID NO: 519452 - protein, 16 aa, Homo sapiens
  CDR3 for beta chain variable domain of TCR clone 259726 (TRBV20-1, TRBJ2-3)
CSARLHSAGAIDTQYF

SEQ ID NO: 519453 - protein, 12 aa, Homo sapiens
  CDR3 for alpha chain variable domain of TCR clone 259727 (TRAV35, TRAJ39)
LAPNNAGNMLTF

SEQ ID NO: 519454 - protein, 13 aa, Homo sapiens
  CDR3 for beta chain variable domain of TCR clone 259727 (TRBV7-2, TRBJ2-7)
CASSFGQEKDQYF

SEQ ID NO: 519455 - protein, 15 aa, Homo sapiens
  CDR3 for alpha chain variable domain of TCR clone 259728 (TRAV8-3, TRAJ32)
CAVCPYGGATNNLIF

SEQ ID NO: 519456 - protein, 14 aa, Homo sapiens
  CDR3 for beta chain variable domain of TCR clone 259728 (TRBV29-1, TRBJ2-2)
CSVLAETNTGELFF

SEQ ID NO: 519457 - protein, 15 aa, Homo sapiens
  CDR3 for alpha chain variable domain of TCR clone 259729 (TRAV12-3, TRAJ6)
CAMSASTGGSYIPTF

SEQ ID NO: 519458 - protein, 13 aa, Homo sapiens
  CDR3 for beta chain variable domain of TCR clone 259729 (TRBV7-9, TRBJ1-2)
CASSLKQNYGYTF

SEQ ID NO: 519459 - protein, 18 aa, Homo sapiens
  CDR3 for alpha chain variable domain of TCR clone 259730 (TRAV21, TRAJ52)
RAVRPSPACGTSYGKLTF

SEQ ID NO: 519460 - protein, 15 aa, Homo sapiens
  CDR3 for beta chain variable domain of TCR clone 259730 (TRBV19, TRBJ1-1)
CASTSGQIQNTEAFF

SEQ ID NO: 519461 - protein, 13 aa, Homo sapiens
  CDR3 for alpha chain variable domain of TCR clone 259731 (TRAV8-1, TRAJ30)
CAVIMNRDDKIIF

SEQ ID NO: 519462 - protein, 15 aa, Homo sapiens
  CDR3 for beta chain variable domain of TCR clone 259731 (TRBV7-9, TRBJ1-5)
CASSQGHQPNQPQHF

SEQ ID NO: 519463 - protein, 10 aa, Homo sapiens
  CDR3 for alpha chain variable domain of TCR clone 259732 (TRAV13-1, TRAJ17)
PPAAGNKLTF

SEQ ID NO: 519464 - protein, 15 aa, Homo sapiens
  CDR3 for beta chain variable domain of TCR clone 259732 (TRBV28, TRBJ2-3)
CAPTFRDWSTDTQYF

SEQ ID NO: 519465 - protein, 14 aa, Homo sapiens
  CDR3 for alpha chain variable domain of TCR clone 259733 (TRAV12-1, TRAJ17)
CVVNYKAAGNKLTF

SEQ ID NO: 519466 - protein, 17 aa, Homo sapiens
  CDR3 for beta chain variable domain of TCR clone 259733 (TRBV20-1, TRBJ2-1)
CSASSSGLAGFYNEQFF

SEQ ID NO: 519467 - protein, 17 aa, Homo sapiens
  CDR3 for alpha chain variable domain of TCR clone 259734 (TRAV27, TRAJ42)
CAARVIYYGGSQGNLIF

SEQ ID NO: 519468 - protein, 14 aa, Homo sapiens
  CDR3 for beta chain variable domain of TCR clone 259734 (TRBV20-1, TRBJ2-1)
CSAQIGGSANEQFF

SEQ ID NO: 519469 - protein, 16 aa, Homo sapiens
  CDR3 for alpha chain variable domain of TCR clone 259735 (TRAV17, TRAJ36)
TSVLRSPETGANNLFF

SEQ ID NO: 519470 - protein, 13 aa, Homo sapiens
  CDR3 for beta chain variable domain of TCR clone 259735 (TRBV4-1, TRBJ1-1)
CASSQLGTGEAFF

SEQ ID NO: 519471 - protein, 15 aa, Homo sapiens
  CDR3 for alpha chain variable domain of TCR clone 259736 (TRAV12-3, TRAJ42)
CAMSGHGGSQGNLIF

SEQ ID NO: 519472 - protein, 15 aa, Homo sapiens
  CDR3 for beta chain variable domain of TCR clone 259736 (TRBV5-1, TRBJ2-5)
CASSLGLAEQETQYF

SEQ ID NO: 519473 - protein, 15 aa, Homo sapiens
  CDR3 for alpha chain variable domain of TCR clone 259737 (TRAV8-3, TRAJ45)
CASSYSGRGADGLTF

SEQ ID NO: 519474 - protein, 15 aa, Homo sapiens
  CDR3 for beta chain variable domain of TCR clone 259737 (TRBV20-1, TRBJ2-7)
CSARDRVPGMDEQYF

SEQ ID NO: 519475 - protein, 10 aa, Homo sapiens
  CDR3 for alpha chain variable domain of TCR clone 259738 (TRAV26-1, TRAJ40)
CIAGTYKYTF

SEQ ID NO: 519476 - protein, 15 aa, Homo sapiens
  CDR3 for beta chain variable domain of TCR clone 259738 (TRBV19, TRBJ2-1)
CASSSPGLPLDEQFF

SEQ ID NO: 519477 - protein, 19 aa, Homo sapiens
  CDR3 for alpha chain variable domain of TCR clone 259739 (TRAV26-1, TRAJ28)
CIVRVAPAYSGAGSYQLTF

SEQ ID NO: 519478 - protein, 12 aa, Homo sapiens
  CDR3 for beta chain variable domain of TCR clone 259739 (TRBV27, TRBJ2-2)
CASKLFTGELFF

SEQ ID NO: 519479 - protein, 10 aa, Homo sapiens
  CDR3 for alpha chain variable domain of TCR clone 259740 (TRAV23/DV6, TRAJ22)
FAASSRGSRF

SEQ ID NO: 519480 - protein, 15 aa, Homo sapiens
  CDR3 for beta chain variable domain of TCR clone 259740 (TRBV10-3, TRBJ2-3)
CAIDTSGRRTDTQYF

SEQ ID NO: 519481 - protein, 15 aa, Homo sapiens
  CDR3 for alpha chain variable domain of TCR clone 259741 (TRAV26-1, TRAJ29)
CIVRVEGSGTTPLVF

SEQ ID NO: 519482 - protein, 15 aa, Homo sapiens
  CDR3 for beta chain variable domain of TCR clone 259741 (TRBV7-9, TRBJ1-5)
CASCQGHQPNQPQHF

SEQ ID NO: 519483 - protein, 13 aa, Homo sapiens
  CDR3 for alpha chain variable domain of TCR clone 259742 (TRAV12-3, TRAJ43)
CATRPYNNNDMRF

SEQ ID NO: 519484 - protein, 16 aa, Homo sapiens
  CDR3 for beta chain variable domain of TCR clone 259742 (TRBV11-2, TRBJ2-1)
CASSLLLLSSYNEQFF

SEQ ID NO: 519485 - protein, 14 aa, Homo sapiens
  CDR3 for alpha chain variable domain of TCR clone 259743 (TRAV23/DV6, TRAJ10)
CASSIGTHGRRKQT

SEQ ID NO: 519486 - protein, 13 aa, Homo sapiens
  CDR3 for beta chain variable domain of TCR clone 259743 (TRBV11-1, TRBJ1-2)
CASVGSWGYGYTF

SEQ ID NO: 519487 - protein, 14 aa, Homo sapiens
  CDR3 for alpha chain variable domain of TCR clone 259744 (TRAV26-1, TRAJ38)
CIADNAVNNRKLIW

SEQ ID NO: 519488 - protein, 15 aa, Homo sapiens
  CDR3 for beta chain variable domain of TCR clone 259744 (TRBV7-6, TRBJ1-4)
CASSLGAGAGEKLFF

SEQ ID NO: 519489 - protein, 15 aa, Homo sapiens
  CDR3 for alpha chain variable domain of TCR clone 259745 (TRAV21, TRAJ53)
CATLNSGGSNYKLTF

SEQ ID NO: 519490 - protein, 15 aa, Homo sapiens
  CDR3 for beta chain variable domain of TCR clone 259745 (TRBV4-2, TRBJ2-3)
CASSPDIGAGDTQYF

SEQ ID NO: 519491 - protein, 11 aa, Homo sapiens
  CDR3 for alpha chain variable domain of TCR clone 259746 (TRAV12-1, TRAJ34)
CVVNKGRELIL

SEQ ID NO: 519492 - protein, 12 aa, Homo sapiens
  CDR3 for beta chain variable domain of TCR clone 259746 (TRBV2, TRBJ2-1)
CAYGPPGNEQFF

SEQ ID NO: 519493 - protein, 16 aa, Homo sapiens
  CDR3 for alpha chain variable domain of TCR clone 259747 (TRAV8-6, TRAJ58)
CAVSDHTETSGSRLTF

SEQ ID NO: 519494 - protein, 14 aa, Homo sapiens
  CDR3 for beta chain variable domain of TCR clone 259747 (TRBV7-2, TRBJ1-5)
CASSPRGGPQSQHF

SEQ ID NO: 519495 - protein, 13 aa, Homo sapiens
  CDR3 for alpha chain variable domain of TCR clone 259748 (TRAV12-3, TRAJ7)
CAMSASGNNRLAF

SEQ ID NO: 519496 - protein, 17 aa, Homo sapiens
  CDR3 for beta chain variable domain of TCR clone 259748 (TRBV7-3, TRBJ2-3)
CASSPRGQGYGTDTQYF

SEQ ID NO: 519497 - protein, 14 aa, Homo sapiens
  CDR3 for alpha chain variable domain of TCR clone 259749 (TRAV1-2, TRAJ16)
CAVNRLSDGQKLLF

SEQ ID NO: 519498 - protein, 14 aa, Homo sapiens
  CDR3 for beta chain variable domain of TCR clone 259749 (TRBV12-4, TRBJ1-1)
CASSLRSSGTEAFF

SEQ ID NO: 519499 - protein, 14 aa, Homo sapiens
  CDR3 for alpha chain variable domain of TCR clone 259750 (TRAV1-2, TRAJ16)
CAVNRFSDGQKLLF

SEQ ID NO: 519500 - protein, 14 aa, Homo sapiens
  CDR3 for beta chain variable domain of TCR clone 259750 (TRBV25-1, TRBJ1-1)
CASTHLGGKTEAFF

SEQ ID NO: 519501 - protein, 20 aa, Homo sapiens
  CDR3 for alpha chain variable domain of TCR clone 259751 (TRAV8-1, TRAJ5)
CAVKTEQPGRRAGEHLLLVV

SEQ ID NO: 519502 - protein, 16 aa, Homo sapiens
  CDR3 for beta chain variable domain of TCR clone 259751 (TRBV12-5, TRBJ2-5)
CASGPRTSGNQETQYF

SEQ ID NO: 519503 - protein, 14 aa, Homo sapiens
  CDR3 for alpha chain variable domain of TCR clone 259752 (TRAV10, TRAJ36)
CVVNYEGGANNLFF

SEQ ID NO: 519504 - protein, 16 aa, Homo sapiens
  CDR3 for beta chain variable domain of TCR clone 259752 (TRBV7-3, TRBJ2-2)
CASSLKRGNLSGELFF

SEQ ID NO: 519505 - protein, 13 aa, Homo sapiens
  CDR3 for alpha chain variable domain of TCR clone 259753 (TRAV8-3, TRAJ43)
CAVGPDNNNDMRF

SEQ ID NO: 519506 - protein, 14 aa, Homo sapiens
  CDR3 for beta chain variable domain of TCR clone 259753 (TRBV19, TRBJ2-1)
CASATFVLSGEQFF

SEQ ID NO: 519507 - protein, 12 aa, Homo sapiens
  CDR3 for alpha chain variable domain of TCR clone 259754 (TRAV38-2/DV8, TRAJ48)
CALLSGNEKLTF

SEQ ID NO: 519508 - protein, 12 aa, Homo sapiens
  CDR3 for beta chain variable domain of TCR clone 259754 (TRBV7-8, TRBJ2-7)
CTSSLGDREQYF

SEQ ID NO: 519509 - protein, 15 aa, Homo sapiens
  CDR3 for alpha chain variable domain of TCR clone 259755 (TRAV27, TRAJ28)
CAGAYSGAGSYQLTF

SEQ ID NO: 519510 - protein, 14 aa, Homo sapiens
  CDR3 for beta chain variable domain of TCR clone 259755 (TRBV7-2, TRBJ2-3)
CASSQTGSSYTQYF

SEQ ID NO: 519511 - protein, 12 aa, Homo sapiens
  CDR3 for alpha chain variable domain of TCR clone 259756 (TRAV35, TRAJ39)
LAPNNAGNMLTF

SEQ ID NO: 519512 - protein, 16 aa, Homo sapiens
  CDR3 for beta chain variable domain of TCR clone 259756 (TRBV2, TRBJ2-1)
CASSVGGSLSYNEQFF

SEQ ID NO: 519513 - protein, 16 aa, Homo sapiens
  CDR3 for alpha chain variable domain of TCR clone 259757 (TRAV3, TRAJ3)
CAVRDRATRSASKIIF

SEQ ID NO: 519514 - protein, 13 aa, Homo sapiens
  CDR3 for beta chain variable domain of TCR clone 259757 (TRBV10-3, TRBJ2-7)
CASKLAVNYEQYF

SEQ ID NO: 519515 - protein, 12 aa, Homo sapiens
  CDR3 for alpha chain variable domain of TCR clone 259758 (TRAV17, TRAJ53)
CATEGSNYKLTF

SEQ ID NO: 519516 - protein, 16 aa, Homo sapiens
  CDR3 for beta chain variable domain of TCR clone 259758 (TRBV2, TRBJ2-1)
CASSVVGSLSYNEQFF

SEQ ID NO: 519517 - protein, 14 aa, Homo sapiens
  CDR3 for alpha chain variable domain of TCR clone 259759 (TRAV38-1, TRAJ29)
CAFITPSGNTPLVF

SEQ ID NO: 519518 - protein, 14 aa, Homo sapiens
  CDR3 for beta chain variable domain of TCR clone 259759 (TRBV11-2, TRBJ2-5)
CASSRTGGIETQYF

SEQ ID NO: 519519 - protein, 14 aa, Homo sapiens
  CDR3 for alpha chain variable domain of TCR clone 259760 (TRAV2, TRAJ37)
CAVDFTSNTGKLIF

SEQ ID NO: 519520 - protein, 15 aa, Homo sapiens
  CDR3 for beta chain variable domain of TCR clone 259760 (TRBV20-1, TRBJ2-3)
CSATGTSGFTDTQYF

SEQ ID NO: 519521 - protein, 16 aa, Homo sapiens
  CDR3 for alpha chain variable domain of TCR clone 259761 (TRAV8-3, TRAJ8)
CAVPRDGNTGFQKLVF

SEQ ID NO: 519522 - protein, 14 aa, Homo sapiens
  CDR3 for beta chain variable domain of TCR clone 259761 (TRBV14, TRBJ2-3)
CASSRKLAADTQYF

SEQ ID NO: 519523 - protein, 12 aa, Homo sapiens
  CDR3 for alpha chain variable domain of TCR clone 259762 (TRAV12-3, TRAJ17)
RAMTLTGNKLTF

SEQ ID NO: 519524 - protein, 15 aa, Homo sapiens
  CDR3 for beta chain variable domain of TCR clone 259762 (TRBV20-1, TRBJ2-2)
CSAIPGHSNTGELFF

SEQ ID NO: 519525 - protein, 14 aa, Homo sapiens
  CDR3 for alpha chain variable domain of TCR clone 259763 (TRAV26-1, TRAJ34)
CIVRVAYNTDKLIF

SEQ ID NO: 519526 - protein, 16 aa, Homo sapiens
  CDR3 for beta chain variable domain of TCR clone 259763 (TRBV2, TRBJ2-1)
CASSVGGSLSYNEQFF

SEQ ID NO: 519527 - protein, 14 aa, Homo sapiens
  CDR3 for alpha chain variable domain of TCR clone 259764 (TRAV17, TRAJ57)
CATDPQGGSEMLVF

SEQ ID NO: 519528 - protein, 18 aa, Homo sapiens
  CDR3 for beta chain variable domain of TCR clone 259764 (TRBV20-1, TRBJ2-3)
CSASGLAGGPGTTDTQYF

SEQ ID NO: 519529 - protein, 15 aa, Homo sapiens
  CDR3 for alpha chain variable domain of TCR clone 259765 (TRAV17, TRAJ22)
CATAPISGSARQLTF

SEQ ID NO: 519530 - protein, 13 aa, Homo sapiens
  CDR3 for beta chain variable domain of TCR clone 259765 (TRBV6-5, TRBJ1-2)
CASSLDTYDGYTF

SEQ ID NO: 519531 - protein, 14 aa, Homo sapiens
  CDR3 for alpha chain variable domain of TCR clone 259766 (TRAV12-2, TRAJ44)
CAVNPAGTASKLTF

SEQ ID NO: 519532 - protein, 12 aa, Homo sapiens
  CDR3 for beta chain variable domain of TCR clone 259766 (TRBV7-8, TRBJ2-7)
CSSEGGPHGQYF

SEQ ID NO: 519533 - protein, 13 aa, Homo sapiens
  CDR3 for alpha chain variable domain of TCR clone 259767 (TRAV26-2, TRAJ43)
CILRAVNNNDMRF

SEQ ID NO: 519534 - protein, 15 aa, Homo sapiens
  CDR3 for beta chain variable domain of TCR clone 259767 (TRBV7-2, TRBJ2-1)
SASTHGTGIYNEQFF

SEQ ID NO: 519535 - protein, 12 aa, Homo sapiens
  CDR3 for alpha chain variable domain of TCR clone 259768 (TRAV13-1, TRAJ15)
CAASQPGTALIF

SEQ ID NO: 519536 - protein, 14 aa, Homo sapiens
  CDR3 for beta chain variable domain of TCR clone 259768 (TRBV19, TRBJ2-1)
CASPTFVLSGEQFF

SEQ ID NO: 519537 - protein, 13 aa, Homo sapiens
  CDR3 for alpha chain variable domain of TCR clone 259769 (TRAV35, TRAJ57)
CAGSQGGSEKLVF

SEQ ID NO: 519538 - protein, 16 aa, Homo sapiens
  CDR3 for beta chain variable domain of TCR clone 259769 (TRBV12-5, TRBJ2-5)
CASGPRTSGNQETQYF

SEQ ID NO: 519539 - protein, 14 aa, Homo sapiens
  CDR3 for alpha chain variable domain of TCR clone 259770 (TRAV35, TRAJ13)
CAGSPSGGYQKVTF

SEQ ID NO: 519540 - protein, 15 aa, Homo sapiens
  CDR3 for beta chain variable domain of TCR clone 259770 (TRBV20-1, TRBJ2-5)
CSAPPRTGFGETQYF

SEQ ID NO: 519541 - protein, 14 aa, Homo sapiens
  CDR3 for alpha chain variable domain of TCR clone 259771 (TRAV12-3, TRAJ5)
CAMTWDTGRRALTF

SEQ ID NO: 519542 - protein, 14 aa, Homo sapiens
  CDR3 for beta chain variable domain of TCR clone 259771 (TRBV10-2, TRBJ1-5)
CASSSTGRKQPQHF

SEQ ID NO: 519543 - protein, 15 aa, Homo sapiens
  CDR3 for alpha chain variable domain of TCR clone 259772 (TRAV38-2/DV8, TRAJ28)
CAYRSRGGGSYQLAF

SEQ ID NO: 519544 - protein, 14 aa, Homo sapiens
  CDR3 for beta chain variable domain of TCR clone 259772 (TRBV7-9, TRBJ2-7)
CASSLSQGSYEQYF

SEQ ID NO: 519545 - protein, 11 aa, Homo sapiens
  CDR3 for alpha chain variable domain of TCR clone 259773 (TRAV35, TRAJ49)
CLGTPVTSSIL

SEQ ID NO: 519546 - protein, 13 aa, Homo sapiens
  CDR3 for beta chain variable domain of TCR clone 259773 (TRBV19, TRBJ2-2)
CASSSKNTGELFF

SEQ ID NO: 519547 - protein, 20 aa, Homo sapiens
  CDR3 for alpha chain variable domain of TCR clone 259774 (TRAV26-1, TRAJ42)
CCVLLHRQTYYGGSQGNLIF

SEQ ID NO: 519548 - protein, 16 aa, Homo sapiens
  CDR3 for beta chain variable domain of TCR clone 259774 (TRBV7-3, TRBJ2-2)
CASSLKRGTLSGELFY

SEQ ID NO: 519549 - protein, 16 aa, Homo sapiens
  CDR3 for alpha chain variable domain of TCR clone 259775 (TRAV8-3, TRAJ44)
CAVGASNTGTASKLTF

SEQ ID NO: 519550 - protein, 15 aa, Homo sapiens
  CDR3 for beta chain variable domain of TCR clone 259775 (TRBV27, TRBJ1-5)
CASTFNRGSNRPQHF

SEQ ID NO: 519551 - protein, 15 aa, Homo sapiens
  CDR3 for alpha chain variable domain of TCR clone 259776 (TRAV3, TRAJ3)
FAVRDRDSSASKIIF

SEQ ID NO: 519552 - protein, 15 aa, Homo sapiens
  CDR3 for beta chain variable domain of TCR clone 259776 (TRBV29-1, TRBJ2-7)
CSVEFFDRGSYEQYF

SEQ ID NO: 519553 - protein, 15 aa, Homo sapiens
  CDR3 for alpha chain variable domain of TCR clone 259777 (TRAV8-2, TRAJ15)
CVVTLGNQAGTALIF

SEQ ID NO: 519554 - protein, 15 aa, Homo sapiens
  CDR3 for beta chain variable domain of TCR clone 259777 (TRBV19, TRBJ1-2)
CASSVGQVLNYGYTF

SEQ ID NO: 519555 - protein, 13 aa, Homo sapiens
  CDR3 for alpha chain variable domain of TCR clone 259778 (TRAV27, TRAJ6)
CAGGTRGSDIPTF

SEQ ID NO: 519556 - protein, 14 aa, Homo sapiens
  CDR3 for beta chain variable domain of TCR clone 259778 (TRBV20-1, TRBJ2-4)
CSASGRVGENIQYF

SEQ ID NO: 519557 - protein, 15 aa, Homo sapiens
  CDR3 for alpha chain variable domain of TCR clone 259779 (TRAV2, TRAJ22)
CAVPSRGGSARQLTF

SEQ ID NO: 519558 - protein, 14 aa, Homo sapiens
  CDR3 for beta chain variable domain of TCR clone 259779 (TRBV5-1, TRBJ2-3)
CASSRGQGGGTQYC

SEQ ID NO: 519559 - protein, 13 aa, Homo sapiens
  CDR3 for alpha chain variable domain of TCR clone 259780 (TRAV21, TRAJ36)
CAVREAGANNLFF

SEQ ID NO: 519560 - protein, 13 aa, Homo sapiens
  CDR3 for beta chain variable domain of TCR clone 259780 (TRBV29-1, TRBJ1-1)
CSVGDSRNTEAFF

SEQ ID NO: 519561 - protein, 13 aa, Homo sapiens
  CDR3 for alpha chain variable domain of TCR clone 259781 (TRAV2, TRAJ27)
CAVEAPMQANQPL

SEQ ID NO: 519562 - protein, 13 aa, Homo sapiens
  CDR3 for beta chain variable domain of TCR clone 259781 (TRBV10-2, TRBJ2-3)
CASSESGDQTQYF

SEQ ID NO: 519563 - protein, 13 aa, Homo sapiens
  CDR3 for alpha chain variable domain of TCR clone 259782 (TRAV3, TRAJ27)
CAVRPLGAGKSTF

SEQ ID NO: 519564 - protein, 15 aa, Homo sapiens
  CDR3 for beta chain variable domain of TCR clone 259782 (TRBV20-1, TRBJ2-1)
CSAVIGTGTYNEQFF

SEQ ID NO: 519565 - protein, 13 aa, Homo sapiens
  CDR3 for alpha chain variable domain of TCR clone 259783 (TRAV12-1, TRAJ29)
CVVDTLGNTPLVF

SEQ ID NO: 519566 - protein, 14 aa, Homo sapiens
  CDR3 for beta chain variable domain of TCR clone 259783 (TRBV12-4, TRBJ2-3)
CASSLVPSTDTQYF

SEQ ID NO: 519567 - protein, 12 aa, Homo sapiens
  CDR3 for alpha chain variable domain of TCR clone 259784 (TRAV12-3, TRAJ17)
CAMTLTGNKLPF

SEQ ID NO: 519568 - protein, 15 aa, Homo sapiens
  CDR3 for beta chain variable domain of TCR clone 259784 (TRBV20-1, TRBJ2-7)
CSARDRVYGMDEQYF

SEQ ID NO: 519569 - protein, 14 aa, Homo sapiens
  CDR3 for alpha chain variable domain of TCR clone 259785 (TRAV20, TRAJ56)
CAVQFGGANSKLTF

SEQ ID NO: 519570 - protein, 15 aa, Homo sapiens
  CDR3 for beta chain variable domain of TCR clone 259785 (TRBV7-3, TRBJ2-1)
CASSPTGGSRNEQFF

SEQ ID NO: 519571 - protein, 10 aa, Homo sapiens
  CDR3 for alpha chain variable domain of TCR clone 259786 (TRAV23/DV6, TRAJ57)
CAASSTLSQG

SEQ ID NO: 519572 - protein, 13 aa, Homo sapiens
  CDR3 for beta chain variable domain of TCR clone 259786 (TRBV5-5, TRBJ1-2)
CASSFWRGEDYAF

SEQ ID NO: 519573 - protein, 11 aa, Homo sapiens
  CDR3 for alpha chain variable domain of TCR clone 259787 (TRAV12-3, TRAJ43)
CAMSVSNDMRF

SEQ ID NO: 519574 - protein, 14 aa, Homo sapiens
  CDR3 for beta chain variable domain of TCR clone 259787 (TRBV20-1, TRBJ2-1)
CSAQIGGSANEQFF

SEQ ID NO: 519575 - protein, 14 aa, Homo sapiens
  CDR3 for alpha chain variable domain of TCR clone 259788 (TRAV36/DV7, TRAJ44)
CCGANTGTASKLTF

SEQ ID NO: 519576 - protein, 16 aa, Homo sapiens
  CDR3 for beta chain variable domain of TCR clone 259788 (TRBV20-1, TRBJ1-4)
CSAPGQGLLTNEKLFF

SEQ ID NO: 519577 - protein, 15 aa, Homo sapiens
  CDR3 for alpha chain variable domain of TCR clone 259789 (TRAV3, TRAJ22)
CSVRDRGGSARQLTF

SEQ ID NO: 519578 - protein, 15 aa, Homo sapiens
  CDR3 for beta chain variable domain of TCR clone 259789 (TRBV20-1, TRBJ1-1)
CSASRGVTGNTEAFF

SEQ ID NO: 519579 - protein, 13 aa, Homo sapiens
  CDR3 for alpha chain variable domain of TCR clone 259790 (TRAV8-6, TRAJ21)
CAVSPSSLNKFYF

SEQ ID NO: 519580 - protein, 14 aa, Homo sapiens
  CDR3 for beta chain variable domain of TCR clone 259790 (TRBV7-9, TRBJ2-5)
CASTLDTAQETQYF

SEQ ID NO: 519581 - protein, 23 aa, Homo sapiens
  CDR3 for alpha chain variable domain of TCR clone 259791 (TRAV26-1, TRAJ38)
CIADNAGNNHIQNPDPAVSPLRD

SEQ ID NO: 519582 - protein, 13 aa, Homo sapiens
  CDR3 for beta chain variable domain of TCR clone 259791 (TRBV20-1, TRBJ1-1)
CSARGGGNTEAFF

SEQ ID NO: 519583 - protein, 11 aa, Homo sapiens
  CDR3 for alpha chain variable domain of TCR clone 259792 (TRAV39, TRAJ49)
CAVDISTQFYF

SEQ ID NO: 519584 - protein, 11 aa, Homo sapiens
  CDR3 for beta chain variable domain of TCR clone 259792 (TRBV7-8, TRBJ2-7)
CASSLSRERYF

SEQ ID NO: 519585 - protein, 14 aa, Homo sapiens
  CDR3 for alpha chain variable domain of TCR clone 259793 (TRAV12-3, TRAJ33)
CAMSVPGSNYQLIW

SEQ ID NO: 519586 - protein, 12 aa, Homo sapiens
  CDR3 for beta chain variable domain of TCR clone 259793 (TRBV7-8, TRBJ2-7)
CASSLGDREQYS

SEQ ID NO: 519587 - protein, 14 aa, Homo sapiens
  CDR3 for alpha chain variable domain of TCR clone 259794 (TRAV12-3, TRAJ22)
CAMSLFGSARQLTF

SEQ ID NO: 519588 - protein, 20 aa, Homo sapiens
  CDR3 for beta chain variable domain of TCR clone 259794 (TRBV11-2, TRBJ1-6)
CASSLVFATGGSVHPSTLGT

SEQ ID NO: 519589 - protein, 14 aa, Homo sapiens
  CDR3 for alpha chain variable domain of TCR clone 259795 (TRAV8-3, TRAJ39)
CAVGANNAGNMLTF

SEQ ID NO: 519590 - protein, 12 aa, Homo sapiens
  CDR3 for beta chain variable domain of TCR clone 259795 (TRBV28, TRBJ1-3)
RASVSSGNTIYF

SEQ ID NO: 519591 - protein, 11 aa, Homo sapiens
  CDR3 for alpha chain variable domain of TCR clone 259796 (TRAV2, TRAJ13)
CASGGYQKVTF

SEQ ID NO: 519592 - protein, 20 aa, Homo sapiens
  CDR3 for beta chain variable domain of TCR clone 259796 (TRBV28, TRBJ2-1)
WASTPIGRSPGLAGGNEQFF

SEQ ID NO: 519593 - protein, 13 aa, Homo sapiens
  CDR3 for alpha chain variable domain of TCR clone 259797 (TRAV8-3, TRAJ36)
CAVGATGPNNLFF

SEQ ID NO: 519594 - protein, 15 aa, Homo sapiens
  CDR3 for beta chain variable domain of TCR clone 259797 (TRBV7-2, TRBJ1-2)
CASSPRAGWNYGYTF

SEQ ID NO: 519595 - protein, 15 aa, Homo sapiens
  CDR3 for alpha chain variable domain of TCR clone 259798 (TRAV3, TRAJ5)
CAVRDLDTGRRALTF

SEQ ID NO: 519596 - protein, 14 aa, Homo sapiens
  CDR3 for beta chain variable domain of TCR clone 259798 (TRBV25-1, TRBJ1-1)
CASTHPGGNTEAFF

SEQ ID NO: 519597 - protein, 15 aa, Homo sapiens
  CDR3 for alpha chain variable domain of TCR clone 259799 (TRAV12-3, TRAJ48)
CAMNAKNFGNEKLTF

SEQ ID NO: 519598 - protein, 14 aa, Homo sapiens
  CDR3 for beta chain variable domain of TCR clone 259799 (TRBV19, TRBJ2-7)
CASSMGQGAIEQYF

SEQ ID NO: 519599 - protein, 14 aa, Homo sapiens
  CDR3 for alpha chain variable domain of TCR clone 259800 (TRAV1-2, TRAJ16)
CAVNRFSDGHKLLF

SEQ ID NO: 519600 - protein, 14 aa, Homo sapiens
  CDR3 for beta chain variable domain of TCR clone 259800 (TRBV7-2, TRBJ2-7)
CASSPKTSFYEQYF

SEQ ID NO: 519601 - protein, 17 aa, Homo sapiens
  CDR3 for alpha chain variable domain of TCR clone 259801 (TRAV14/DV4, TRAJ4)
CAMREASGRGGYNKLIF

SEQ ID NO: 519602 - protein, 12 aa, Homo sapiens
  CDR3 for beta chain variable domain of TCR clone 259801 (TRBV12-4, TRBJ2-7)
CASSLGGHEQYF

SEQ ID NO: 519603 - protein, 14 aa, Homo sapiens
  CDR3 for alpha chain variable domain of TCR clone 259802 (TRAV1-2, TRAJ16)
CAVNRFSDGQNLLF

SEQ ID NO: 519604 - protein, 16 aa, Homo sapiens
  CDR3 for beta chain variable domain of TCR clone 259802 (TRBV11-2, TRBJ1-2)
CASSLDTGGADYGYTF

SEQ ID NO: 519605 - protein, 12 aa, Homo sapiens
  CDR3 for alpha chain variable domain of TCR clone 259803 (TRAV8-4, TRAJ20)
CAVRDDDYKLRF

SEQ ID NO: 519606 - protein, 17 aa, Homo sapiens
  CDR3 for beta chain variable domain of TCR clone 259803 (TRBV12-4, TRBJ1-5)
CASSRHQAGGVNQPQHF

SEQ ID NO: 519607 - protein, 15 aa, Homo sapiens
  CDR3 for alpha chain variable domain of TCR clone 259804 (TRAV3, TRAJ22)
CAVRDRGGSARQLTF

SEQ ID NO: 519608 - protein, 14 aa, Homo sapiens
  CDR3 for beta chain variable domain of TCR clone 259804 (TRBV19, TRBJ2-1)
CASSSLASINEQFF

SEQ ID NO: 519609 - protein, 14 aa, Homo sapiens
  CDR3 for alpha chain variable domain of TCR clone 259805 (TRAV26-1, TRAJ34)
CIVRVAYNTDKLIF

SEQ ID NO: 519610 - protein, 15 aa, Homo sapiens
  CDR3 for beta chain variable domain of TCR clone 259805 (TRBV20-1, TRBJ2-7)
FSARVPAAYFYEQYF

SEQ ID NO: 519611 - protein, 15 aa, Homo sapiens
  CDR3 for alpha chain variable domain of TCR clone 259806 (TRAV27, TRAJ38)
CAARRNPGNNRKLLW

SEQ ID NO: 519612 - protein, 14 aa, Homo sapiens
  CDR3 for beta chain variable domain of TCR clone 259806 (TRBV7-8, TRBJ2-3)
CASSLEAGTDTQYF

SEQ ID NO: 519613 - protein, 15 aa, Homo sapiens
  CDR3 for alpha chain variable domain of TCR clone 259807 (TRAV2, TRAJ28)
CAVPYSGAGSYQLTF

SEQ ID NO: 519614 - protein, 15 aa, Homo sapiens
  CDR3 for beta chain variable domain of TCR clone 259807 (TRBV20-1, TRBJ2-7)
CSARDRVSGMDEQYF

SEQ ID NO: 519615 - protein, 15 aa, Homo sapiens
  CDR3 for alpha chain variable domain of TCR clone 259808 (TRAV27, TRAJ38)
CAARRNAGNNRQLIS

SEQ ID NO: 519616 - protein, 13 aa, Homo sapiens
  CDR3 for beta chain variable domain of TCR clone 259808 (TRBV12-5, TRBJ2-3)
CASGDRQSDTQYF

SEQ ID NO: 519617 - protein, 13 aa, Homo sapiens
  CDR3 for alpha chain variable domain of TCR clone 259809 (TRAV38-1, TRAJ42)
CARWGGSQGNLIF

SEQ ID NO: 519618 - protein, 12 aa, Homo sapiens
  CDR3 for beta chain variable domain of TCR clone 259809 (TRBV12-4, TRBJ2-3)
CASSLAADTQYF

SEQ ID NO: 519619 - protein, 16 aa, Homo sapiens
  CDR3 for alpha chain variable domain of TCR clone 259810 (TRAV3, TRAJ10)
CAVRDMRAGGGNKLTF

SEQ ID NO: 519620 - protein, 14 aa, Homo sapiens
  CDR3 for beta chain variable domain of TCR clone 259810 (TRBV25-1, TRBJ1-1)
CASTHLGGNTESFF

SEQ ID NO: 519621 - protein, 14 aa, Homo sapiens
  CDR3 for alpha chain variable domain of TCR clone 259811 (TRAV16, TRAJ48)
CALTPGFGNEKLTF

SEQ ID NO: 519622 - protein, 15 aa, Homo sapiens
  CDR3 for beta chain variable domain of TCR clone 259811 (TRBV7-2, TRBJ2-1)
CASSLNRGAYNEQFF

SEQ ID NO: 519623 - protein, 14 aa, Homo sapiens
  CDR3 for alpha chain variable domain of TCR clone 259812 (TRAV1-2, TRAJ16)
CAVNRFSDGQKLLF

SEQ ID NO: 519624 - protein, 14 aa, Homo sapiens
  CDR3 for beta chain variable domain of TCR clone 259812 (TRBV28, TRBJ2-1)
CASSRPGLRDEQFF

SEQ ID NO: 519625 - protein, 14 aa, Homo sapiens
  CDR3 for alpha chain variable domain of TCR clone 259813 (TRAV1-2, TRAJ16)
CAVNRFSDGQKLLF

SEQ ID NO: 519626 - protein, 15 aa, Homo sapiens
  CDR3 for beta chain variable domain of TCR clone 259813 (TRBV7-9, TRBJ1-6)
GASSSPGSGNSPLHF

SEQ ID NO: 519627 - protein, 13 aa, Homo sapiens
  CDR3 for alpha chain variable domain of TCR clone 259814 (TRAV30, TRAJ24)
CSTVTDSWGKLQF

SEQ ID NO: 519628 - protein, 15 aa, Homo sapiens
  CDR3 for beta chain variable domain of TCR clone 259814 (TRBV9, TRBJ1-6)
CASSVAGTGDSPLHF

SEQ ID NO: 519629 - protein, 19 aa, Homo sapiens
  CDR3 for alpha chain variable domain of TCR clone 259815 (TRAV3, TRAJ6)
CAVRDRNPSRSGGSYIPTC

SEQ ID NO: 519630 - protein, 12 aa, Homo sapiens
  CDR3 for beta chain variable domain of TCR clone 259815 (TRBV11-3, TRBJ1-1)
CASSLRDSEAFF

SEQ ID NO: 519631 - protein, 13 aa, Homo sapiens
  CDR3 for alpha chain variable domain of TCR clone 259816 (TRAV1-2, TRAJ9)
CAVLNTGGFKTIF

SEQ ID NO: 519632 - protein, 14 aa, Homo sapiens
  CDR3 for beta chain variable domain of TCR clone 259816 (TRBV20-1, TRBJ2-3)
CSARGGTSTDMQYF

SEQ ID NO: 519633 - protein, 11 aa, Homo sapiens
  CDR3 for alpha chain variable domain of TCR clone 259817 (TRAV25, TRAJ49)
CAGGTGNQFYF

SEQ ID NO: 519634 - protein, 12 aa, Homo sapiens
  CDR3 for beta chain variable domain of TCR clone 259817 (TRBV5-1, TRBJ2-1)
CASIGGYNEQFF

SEQ ID NO: 519635 - protein, 16 aa, Homo sapiens
  CDR3 for alpha chain variable domain of TCR clone 259818 (TRAV12-2, TRAJ18)
CAVTTDRGSTLGRLYF

SEQ ID NO: 519636 - protein, 15 aa, Homo sapiens
  CDR3 for beta chain variable domain of TCR clone 259818 (TRBV28, TRBJ1-2)
CASSLWQPTNYGYTF

SEQ ID NO: 519637 - protein, 16 aa, Homo sapiens
  CDR3 for alpha chain variable domain of TCR clone 259819 (TRAV12-3, TRAJ53)
CAMSPGSGGSNYKLTF

SEQ ID NO: 519638 - protein, 16 aa, Homo sapiens
  CDR3 for beta chain variable domain of TCR clone 259819 (TRBV12-4, TRBJ2-5)
CASSFFVRGSQETQYF

SEQ ID NO: 519639 - protein, 15 aa, Homo sapiens
  CDR3 for alpha chain variable domain of TCR clone 259820 (TRAV3, TRAJ32)
CAVSSYGGAPNKLIF

SEQ ID NO: 519640 - protein, 14 aa, Homo sapiens
  CDR3 for beta chain variable domain of TCR clone 259820 (TRBV20-1, TRBJ1-4)
CSARDGSGWEKLFF

SEQ ID NO: 519641 - protein, 18 aa, Homo sapiens
  CDR3 for alpha chain variable domain of TCR clone 259821 (TRAV13-1, TRAJ52)
CAAKNPNAGGTSYGKLTF

SEQ ID NO: 519642 - protein, 15 aa, Homo sapiens
  CDR3 for beta chain variable domain of TCR clone 259821 (TRBV4-3, TRBJ2-1)
CASSQESAIYNEQFF

SEQ ID NO: 519643 - protein, 13 aa, Homo sapiens
  CDR3 for alpha chain variable domain of TCR clone 259822 (TRAV8-3, TRAJ36)
CAVGATGSNNLFF

SEQ ID NO: 519644 - protein, 14 aa, Homo sapiens
  CDR3 for beta chain variable domain of TCR clone 259822 (TRBV7-2, TRBJ2-7)
CASRSQGAAYEQYF

SEQ ID NO: 519645 - protein, 13 aa, Homo sapiens
  CDR3 for alpha chain variable domain of TCR clone 259823 (TRAV17, TRAJ30)
CATGGNRDDKIIF

SEQ ID NO: 519646 - protein, 13 aa, Homo sapiens
  CDR3 for beta chain variable domain of TCR clone 259823 (TRBV19, TRBJ1-2)
CASSVPGQDGYTF

SEQ ID NO: 519647 - protein, 13 aa, Homo sapiens
  CDR3 for alpha chain variable domain of TCR clone 259824 (TRAV29/DV5, TRAJ33)
CAASVESNYQLIW

SEQ ID NO: 519648 - protein, 14 aa, Homo sapiens
  CDR3 for beta chain variable domain of TCR clone 259824 (TRBV11-2, TRBJ2-5)
CAGSRTGGIETQYF

SEQ ID NO: 519649 - protein, 12 aa, Homo sapiens
  CDR3 for alpha chain variable domain of TCR clone 259825 (TRAV4, TRAJ26)
CLVGDYGQNFVF

SEQ ID NO: 519650 - protein, 16 aa, Homo sapiens
  CDR3 for beta chain variable domain of TCR clone 259825 (TRBV25-1, TRBJ1-1)
CASSGDRDRGRIEAFF

SEQ ID NO: 519651 - protein, 12 aa, Homo sapiens
  CDR3 for alpha chain variable domain of TCR clone 259826 (TRAV13-1, TRAJ49)
CAASIWGNQYYF

SEQ ID NO: 519652 - protein, 14 aa, Homo sapiens
  CDR3 for beta chain variable domain of TCR clone 259826 (TRBV12-4, TRBJ1-1)
CASSLDGLNTEAFF

SEQ ID NO: 519653 - protein, 14 aa, Homo sapiens
  CDR3 for alpha chain variable domain of TCR clone 259827 (TRAV17, TRAJ53)
CATDACGSNYKLTF

SEQ ID NO: 519654 - protein, 16 aa, Homo sapiens
  CDR3 for beta chain variable domain of TCR clone 259827 (TRBV4-1, TRBJ1-1)
CASSQDAGMGNTEAFF

SEQ ID NO: 519655 - protein, 16 aa, Homo sapiens
  CDR3 for alpha chain variable domain of TCR clone 259828 (TRAV12-2, TRAJ45)
CAVKRNPGGGADGPTF

SEQ ID NO: 519656 - protein, 12 aa, Homo sapiens
  CDR3 for beta chain variable domain of TCR clone 259828 (TRBV6-1, TRBJ2-5)
CASSGGRETQYF

SEQ ID NO: 519657 - protein, 18 aa, Homo sapiens
  CDR3 for alpha chain variable domain of TCR clone 259829 (TRAV12-3, TRAJ52)
CAMSVGGAGGTSYGKLTY

SEQ ID NO: 519658 - protein, 15 aa, Homo sapiens
  CDR3 for beta chain variable domain of TCR clone 259829 (TRBV27, TRBJ1-6)
CASSFDRGLGSPLHF

SEQ ID NO: 519659 - protein, 16 aa, Homo sapiens
  CDR3 for alpha chain variable domain of TCR clone 259830 (TRAV30, TRAJ24)
CVTEIVDADSWGKFQF

SEQ ID NO: 519660 - protein, 16 aa, Homo sapiens
  CDR3 for beta chain variable domain of TCR clone 259830 (TRBV7-9, TRBJ2-1)
CASSDVAGGSYNEQFF

SEQ ID NO: 519661 - protein, 18 aa, Homo sapiens
  CDR3 for alpha chain variable domain of TCR clone 259831 (TRAV26-1, TRAJ23)
CIVRVGLEVWNQGGKLIF

SEQ ID NO: 519662 - protein, 15 aa, Homo sapiens
  CDR3 for beta chain variable domain of TCR clone 259831 (TRBV7-2, TRBJ2-1)
CASSLASGRVNEQFF

SEQ ID NO: 519663 - protein, 13 aa, Homo sapiens
  CDR3 for alpha chain variable domain of TCR clone 259832 (TRAV8-1, TRAJ34)
CAVRPYNTDKLIF

SEQ ID NO: 519664 - protein, 15 aa, Homo sapiens
  CDR3 for beta chain variable domain of TCR clone 259832 (TRBV7-9, TRBJ1-3)
CASGLRSGSGNTIYF

SEQ ID NO: 519665 - protein, 13 aa, Homo sapiens
  CDR3 for alpha chain variable domain of TCR clone 259833 (TRAV12-2, TRAJ30)
CAVNLNRDDKIIF

SEQ ID NO: 519666 - protein, 14 aa, Homo sapiens
  CDR3 for beta chain variable domain of TCR clone 259833 (TRBV7-2, TRBJ1-2)
CASSSQGAHYGYTL

SEQ ID NO: 519667 - protein, 15 aa, Homo sapiens
  CDR3 for alpha chain variable domain of TCR clone 259834 (TRAV26-2, TRAJ13)
CILRDLSGGNQKVTF

SEQ ID NO: 519668 - protein, 11 aa, Homo sapiens
  CDR3 for beta chain variable domain of TCR clone 259834 (TRBV7-9, TRBJ2-3)
CASSYTDTQYF

SEQ ID NO: 519669 - protein, 13 aa, Homo sapiens
  CDR3 for alpha chain variable domain of TCR clone 259835 (TRAV12-3, TRAJ16)
CAVQLSDGQKLLF

SEQ ID NO: 519670 - protein, 15 aa, Homo sapiens
  CDR3 for beta chain variable domain of TCR clone 259835 (TRBV28, TRBJ2-1)
CASSIIAGGRSEQFF

SEQ ID NO: 519671 - protein, 14 aa, Homo sapiens
  CDR3 for alpha chain variable domain of TCR clone 259836 (TRAV8-2, TRAJ33)
CVVSDRNSNYQLIW

SEQ ID NO: 519672 - protein, 15 aa, Homo sapiens
  CDR3 for beta chain variable domain of TCR clone 259836 (TRBV5-1, TRBJ2-3)
CASSVTSGSTDTQYF

SEQ ID NO: 519673 - protein, 15 aa, Homo sapiens
  CDR3 for alpha chain variable domain of TCR clone 259837 (TRAV8-4, TRAJ29)
CAVSEDFRGNTPLVF

SEQ ID NO: 519674 - protein, 15 aa, Homo sapiens
  CDR3 for beta chain variable domain of TCR clone 259837 (TRBV7-9, TRBJ1-5)
CASSQGHQPNQPQHF

SEQ ID NO: 519675 - protein, 14 aa, Homo sapiens
  CDR3 for alpha chain variable domain of TCR clone 259838 (TRAV13-2, TRAJ17)
CSENSKAAGNKLTF

SEQ ID NO: 519676 - protein, 14 aa, Homo sapiens
  CDR3 for beta chain variable domain of TCR clone 259838 (TRBV19, TRBJ2-1)
CASPTFVLSGEQFF

SEQ ID NO: 519677 - protein, 14 aa, Homo sapiens
  CDR3 for alpha chain variable domain of TCR clone 259839 (TRAV12-2, TRAJ17)
CPVNIKAAGNKLTF

SEQ ID NO: 519678 - protein, 16 aa, Homo sapiens
  CDR3 for beta chain variable domain of TCR clone 259839 (TRBV20-1, TRBJ2-6)
CSASSQGYDGANVLTF

SEQ ID NO: 519679 - protein, 15 aa, Homo sapiens
  CDR3 for alpha chain variable domain of TCR clone 259840 (TRAV17, TRAJ52)
CATEAGGTSFGKLTF

SEQ ID NO: 519680 - protein, 16 aa, Homo sapiens
  CDR3 for beta chain variable domain of TCR clone 259840 (TRBV28, TRBJ2-1)
CASSSPGLAKGDEQFF

SEQ ID NO: 519681 - protein, 13 aa, Homo sapiens
  CDR3 for alpha chain variable domain of TCR clone 259841 (TRAV13-2, TRAJ48)
CAEMDFENEKLTF

SEQ ID NO: 519682 - protein, 11 aa, Homo sapiens
  CDR3 for beta chain variable domain of TCR clone 259841 (TRBV12-4, TRBJ2-3)
CASTATDTQYF

SEQ ID NO: 519683 - protein, 14 aa, Homo sapiens
  CDR3 for alpha chain variable domain of TCR clone 259842 (TRAV2, TRAJ9)
CAVEDRSGGFKTIF

SEQ ID NO: 519684 - protein, 12 aa, Homo sapiens
  CDR3 for beta chain variable domain of TCR clone 259842 (TRBV12-4, TRBJ2-4)
CASSSYGNIQCF

SEQ ID NO: 519685 - protein, 10 aa, Homo sapiens
  CDR3 for alpha chain variable domain of TCR clone 259843 (TRAV5, TRAJ34)
CAEDTDKLIF

SEQ ID NO: 519686 - protein, 14 aa, Homo sapiens
  CDR3 for beta chain variable domain of TCR clone 259843 (TRBV7-9, TRBJ2-2)
CASSLGHRTGELFF

SEQ ID NO: 519687 - protein, 15 aa, Homo sapiens
  CDR3 for alpha chain variable domain of TCR clone 259844 (TRAV3, TRAJ5)
CAVRDLDTGRRALTF

SEQ ID NO: 519688 - protein, 16 aa, Homo sapiens
  CDR3 for beta chain variable domain of TCR clone 259844 (TRBV4-2, TRBJ2-7)
CASSQEGLAISYEQYF

SEQ ID NO: 519689 - protein, 13 aa, Homo sapiens
  CDR3 for alpha chain variable domain of TCR clone 259845 (TRAV23/DV6, TRAJ34)
CAASIEGTDKLIF

SEQ ID NO: 519690 - protein, 15 aa, Homo sapiens
  CDR3 for beta chain variable domain of TCR clone 259845 (TRBV20-1, TRBJ2-7)
CSAESRTSGAYEQYF

SEQ ID NO: 519691 - protein, 11 aa, Homo sapiens
  CDR3 for alpha chain variable domain of TCR clone 259846 (TRAV25, TRAJ43)
CAGPRNNDMRF

SEQ ID NO: 519692 - protein, 15 aa, Homo sapiens
  CDR3 for beta chain variable domain of TCR clone 259846 (TRBV5-7, TRBJ2-7)
CASSLGPGRGHEQYF

SEQ ID NO: 519693 - protein, 12 aa, Homo sapiens
  CDR3 for alpha chain variable domain of TCR clone 259847 (TRAV12-2, TRAJ45)
CASGGGADGLTF

SEQ ID NO: 519694 - protein, 16 aa, Homo sapiens
  CDR3 for beta chain variable domain of TCR clone 259847 (TRBV19, TRBJ2-3)
CASSPGLLGSTDTQYF

SEQ ID NO: 519695 - protein, 18 aa, Homo sapiens
  CDR3 for alpha chain variable domain of TCR clone 259848 (TRAV8-3, TRAJ4)
WVRDPTSNDPGGYNKLIF

SEQ ID NO: 519696 - protein, 13 aa, Homo sapiens
  CDR3 for beta chain variable domain of TCR clone 259848 (TRBV20-1, TRBJ1-2)
WSATGIQGSGYTF

SEQ ID NO: 519697 - protein, 13 aa, Homo sapiens
  CDR3 for alpha chain variable domain of TCR clone 259849 (TRAV12-2, TRAJ20)
CDVYPSNDYKPSF

SEQ ID NO: 519698 - protein, 15 aa, Homo sapiens
  CDR3 for beta chain variable domain of TCR clone 259849 (TRBV27, TRBJ2-5)
CASSLYPRGGETQYF

SEQ ID NO: 519699 - protein, 14 aa, Homo sapiens
  CDR3 for alpha chain variable domain of TCR clone 259850 (TRAV1-2, TRAJ16)
FAVNRFSDGQKLLF

SEQ ID NO: 519700 - protein, 14 aa, Homo sapiens
  CDR3 for beta chain variable domain of TCR clone 259850 (TRBV7-9, TRBJ2-2)
CASSLGHRTGGLFF

SEQ ID NO: 519701 - protein, 14 aa, Homo sapiens
  CDR3 for alpha chain variable domain of TCR clone 259851 (TRAV20, TRAJ37)
CAVQSSSNTGKLIF

SEQ ID NO: 519702 - protein, 14 aa, Homo sapiens
  CDR3 for beta chain variable domain of TCR clone 259851 (TRBV7-3, TRBJ2-2)
CASSLYSNTGELFF

SEQ ID NO: 519703 - protein, 15 aa, Homo sapiens
  CDR3 for alpha chain variable domain of TCR clone 259852 (TRAV2, TRAJ15)
CAVDDRGQAGTALLF

SEQ ID NO: 519704 - protein, 13 aa, Homo sapiens
  CDR3 for beta chain variable domain of TCR clone 259852 (TRBV10-2, TRBJ2-7)
CASGASGGYEQYF

SEQ ID NO: 519705 - protein, 14 aa, Homo sapiens
  CDR3 for alpha chain variable domain of TCR clone 259853 (TRAV1-2, TRAJ16)
CGVNRFSDGQKLLF

SEQ ID NO: 519706 - protein, 15 aa, Homo sapiens
  CDR3 for beta chain variable domain of TCR clone 259853 (TRBV7-9, TRBJ1-6)
CASSSPGRGNSPLHF

SEQ ID NO: 519707 - protein, 12 aa, Homo sapiens
  CDR3 for alpha chain variable domain of TCR clone 259854 (TRAV13-2, TRAJ23)
CAERHRGGKLIF

SEQ ID NO: 519708 - protein, 16 aa, Homo sapiens
  CDR3 for beta chain variable domain of TCR clone 259854 (TRBV12-5, TRBJ2-5)
CASGPRTSGKQETQYF

SEQ ID NO: 519709 - protein, 14 aa, Homo sapiens
  CDR3 for alpha chain variable domain of TCR clone 259855 (TRAV1-2, TRAJ16)
CAVNRFSDGKQLLF

SEQ ID NO: 519710 - protein, 16 aa, Homo sapiens
  CDR3 for beta chain variable domain of TCR clone 259855 (TRBV3-1, TRBJ2-7)
CASSQGATGVAYEQYF

SEQ ID NO: 519711 - protein, 13 aa, Homo sapiens
  CDR3 for alpha chain variable domain of TCR clone 259856 (TRAV13-2, TRAJ40)
GAEFTSGTYKYIF

SEQ ID NO: 519712 - protein, 12 aa, Homo sapiens
  CDR3 for beta chain variable domain of TCR clone 259856 (TRBV11-2, TRBJ2-2)
CASSLGGGELFF

SEQ ID NO: 519713 - protein, 14 aa, Homo sapiens
  CDR3 for alpha chain variable domain of TCR clone 259857 (TRAV1-2, TRAJ16)
CAVNRFSDGQKLLF

SEQ ID NO: 519714 - protein, 14 aa, Homo sapiens
  CDR3 for beta chain variable domain of TCR clone 259857 (TRBV6-6, TRBJ1-5)
CASSYGPASQPQHF

SEQ ID NO: 519715 - protein, 12 aa, Homo sapiens
  CDR3 for alpha chain variable domain of TCR clone 259858 (TRAV29/DV5, TRAJ52)
CAAGFRGAGGTS

SEQ ID NO: 519716 - protein, 16 aa, Homo sapiens
  CDR3 for beta chain variable domain of TCR clone 259858 (TRBV7-3, TRBJ2-2)
CASSLKRGTLSGELFF

SEQ ID NO: 519717 - protein, 13 aa, Homo sapiens
  CDR3 for alpha chain variable domain of TCR clone 259859 (TRAV21, TRAJ57)
CAVTQGGSEQLVF

SEQ ID NO: 519718 - protein, 14 aa, Homo sapiens
  CDR3 for beta chain variable domain of TCR clone 259859 (TRBV5-1, TRBJ2-1)
CASSALWAGNEQFF

SEQ ID NO: 519719 - protein, 12 aa, Homo sapiens
  CDR3 for alpha chain variable domain of TCR clone 259860 (TRAV1-1, TRAJ24)
CAATDSWGKLQF

SEQ ID NO: 519720 - protein, 16 aa, Homo sapiens
  CDR3 for beta chain variable domain of TCR clone 259860 (TRBV19, TRBJ2-3)
CASSPGAASRTDTQYF

SEQ ID NO: 519721 - protein, 11 aa, Homo sapiens
  CDR3 for alpha chain variable domain of TCR clone 259861 (TRAV1-2, TRAJ20)
CAVSNDYKLSF

SEQ ID NO: 519722 - protein, 13 aa, Homo sapiens
  CDR3 for beta chain variable domain of TCR clone 259861 (TRBV20-1, TRBJ1-1)
CSARVGGNTEAFF

SEQ ID NO: 519723 - protein, 14 aa, Homo sapiens
  CDR3 for alpha chain variable domain of TCR clone 259862 (TRAV9-2, TRAJ39)
CALYIYNAGNMLTV

SEQ ID NO: 519724 - protein, 17 aa, Homo sapiens
  CDR3 for beta chain variable domain of TCR clone 259862 (TRBV20-1, TRBJ2-2)
CSASGSGQGGLTGELFF

SEQ ID NO: 519725 - protein, 14 aa, Homo sapiens
  CDR3 for alpha chain variable domain of TCR clone 259863 (TRAV12-2, TRAJ44)
FAVNKAGTASKLTF

SEQ ID NO: 519726 - protein, 12 aa, Homo sapiens
  CDR3 for beta chain variable domain of TCR clone 259863 (TRBV19, TRBJ1-4)
CASKDWPGGLFF

SEQ ID NO: 519727 - protein, 14 aa, Homo sapiens
  CDR3 for alpha chain variable domain of TCR clone 259864 (TRAV1-2, TRAJ8)
CSVREDTGFQKLVF

SEQ ID NO: 519728 - protein, 15 aa, Homo sapiens
  CDR3 for beta chain variable domain of TCR clone 259864 (TRBV2, TRBJ2-7)
SASSEGLARSYEQYF

SEQ ID NO: 519729 - protein, 15 aa, Homo sapiens
  CDR3 for alpha chain variable domain of TCR clone 259865 (TRAV8-2, TRAJ10)
CVVSHSTGGGNKLTF

SEQ ID NO: 519730 - protein, 12 aa, Homo sapiens
  CDR3 for beta chain variable domain of TCR clone 259865 (TRBV11-2, TRBJ2-2)
CASSLGGGELFF

SEQ ID NO: 519731 - protein, 13 aa, Homo sapiens
  CDR3 for alpha chain variable domain of TCR clone 259866 (TRAV21, TRAJ27)
CAARPGNAGKSTF

SEQ ID NO: 519732 - protein, 16 aa, Homo sapiens
  CDR3 for beta chain variable domain of TCR clone 259866 (TRBV3-1, TRBJ2-1)
CASSRLLTSGGNEQFF

SEQ ID NO: 519733 - protein, 13 aa, Homo sapiens
  CDR3 for alpha chain variable domain of TCR clone 259867 (TRAV27, TRAJ57)
CRSAQGGSEKLVF

SEQ ID NO: 519734 - protein, 11 aa, Homo sapiens
  CDR3 for beta chain variable domain of TCR clone 259867 (TRBV11-2, TRBJ1-1)
CAGSIDTEAFF

SEQ ID NO: 519735 - protein, 14 aa, Homo sapiens
  CDR3 for alpha chain variable domain of TCR clone 259868 (TRAV8-3, TRAJ4)
CDVGAAGGYNKLIF

SEQ ID NO: 519736 - protein, 13 aa, Homo sapiens
  CDR3 for beta chain variable domain of TCR clone 259868 (TRBV3-1, TRBJ1-1)
CASSPGVITEAFF

SEQ ID NO: 519737 - protein, 14 aa, Homo sapiens
  CDR3 for alpha chain variable domain of TCR clone 259869 (TRAV27, TRAJ22)
CAGLPSGSARQLTF

SEQ ID NO: 519738 - protein, 16 aa, Homo sapiens
  CDR3 for beta chain variable domain of TCR clone 259869 (TRBV7-3, TRBJ2-2)
CASSLKRGTLSWELFF

SEQ ID NO: 519739 - protein, 12 aa, Homo sapiens
  CDR3 for alpha chain variable domain of TCR clone 259870 (TRAV12-1, TRAJ30)
CVVKPRDDKIIF

SEQ ID NO: 519740 - protein, 18 aa, Homo sapiens
  CDR3 for beta chain variable domain of TCR clone 259870 (TRBV5-1, TRBJ2-7)
CASSLAGFGGMSSYEQYF

SEQ ID NO: 519741 - protein, 11 aa, Homo sapiens
  CDR3 for alpha chain variable domain of TCR clone 259871 (TRAV12-3, TRAJ43)
CAMSVSNDMRF

SEQ ID NO: 519742 - protein, 14 aa, Homo sapiens
  CDR3 for beta chain variable domain of TCR clone 259871 (TRBV7-8, TRBJ2-3)
CASSVEAGTDTQYF

SEQ ID NO: 519743 - protein, 11 aa, Homo sapiens
  CDR3 for alpha chain variable domain of TCR clone 259872 (TRAV21, TRAJ48)
CAVDGNAKLTF

SEQ ID NO: 519744 - protein, 16 aa, Homo sapiens
  CDR3 for beta chain variable domain of TCR clone 259872 (TRBV12-4, TRBJ1-5)
CASSSGPRGSNQPQHF

SEQ ID NO: 519745 - protein, 14 aa, Homo sapiens
  CDR3 for alpha chain variable domain of TCR clone 259873 (TRAV13-1, TRAJ4)
CAARLSGGYNKLIF

SEQ ID NO: 519746 - protein, 12 aa, Homo sapiens
  CDR3 for beta chain variable domain of TCR clone 259873 (TRBV20-1, TRBJ2-5)
CRVAGAGETQYF

SEQ ID NO: 519747 - protein, 18 aa, Homo sapiens
  CDR3 for alpha chain variable domain of TCR clone 259874 (TRAV26-2, TRAJ45)
CILRVDKYSGGGADGLTF

SEQ ID NO: 519748 - protein, 14 aa, Homo sapiens
  CDR3 for beta chain variable domain of TCR clone 259874 (TRBV25-1, TRBJ1-4)
CASSGGGQPEKLFF

SEQ ID NO: 519749 - protein, 13 aa, Homo sapiens
  CDR3 for alpha chain variable domain of TCR clone 259875 (TRAV8-3, TRAJ6)
CAARSGGSYIPTF

SEQ ID NO: 519750 - protein, 15 aa, Homo sapiens
  CDR3 for beta chain variable domain of TCR clone 259875 (TRBV4-1, TRBJ2-3)
CASSNLAGGRDTQYF

SEQ ID NO: 519751 - protein, 16 aa, Homo sapiens
  CDR3 for alpha chain variable domain of TCR clone 259876 (TRAV3, TRAJ10)
CAVRYRLTGGGNKLTF

SEQ ID NO: 519752 - protein, 17 aa, Homo sapiens
  CDR3 for beta chain variable domain of TCR clone 259876 (TRBV20-1, TRBJ2-1)
CSASSSGLAGSYNEQFF

SEQ ID NO: 519753 - protein, 11 aa, Homo sapiens
  CDR3 for alpha chain variable domain of TCR clone 259877 (TRAV36/DV7, TRAJ36)
CAVIARRQTTS

SEQ ID NO: 519754 - protein, 15 aa, Homo sapiens
  CDR3 for beta chain variable domain of TCR clone 259877 (TRBV20-1, TRBJ2-7)
CSARVPAAYFYEQYF

SEQ ID NO: 519755 - protein, 16 aa, Homo sapiens
  CDR3 for alpha chain variable domain of TCR clone 259878 (TRAV29/DV5, TRAJ36)
CAASAGVEPGANNLFF

SEQ ID NO: 519756 - protein, 16 aa, Homo sapiens
  CDR3 for beta chain variable domain of TCR clone 259878 (TRBV5-1, TRBJ2-3)
CASSLGLAVYTDTQYF

SEQ ID NO: 519757 - protein, 18 aa, Homo sapiens
  CDR3 for alpha chain variable domain of TCR clone 259879 (TRAV21, TRAJ52)
CAVRPSPAGGTSYGKLTF

SEQ ID NO: 519758 - protein, 18 aa, Homo sapiens
  CDR3 for beta chain variable domain of TCR clone 259879 (TRBV24-1, TRBJ2-2)
CATSDSGQGTANTGELFF

SEQ ID NO: 519759 - protein, 14 aa, Homo sapiens
  CDR3 for alpha chain variable domain of TCR clone 259880 (TRAV14/DV4, TRAJ13)
CAMIHSGGYQKVTF

SEQ ID NO: 519760 - protein, 16 aa, Homo sapiens
  CDR3 for beta chain variable domain of TCR clone 259880 (TRBV12-4, TRBJ1-5)
CASSRPVGGSNQPQHF

SEQ ID NO: 519761 - protein, 16 aa, Homo sapiens
  CDR3 for alpha chain variable domain of TCR clone 259881 (TRAV3, TRAJ37)
CAVRGKGYGNTGKLIF

SEQ ID NO: 519762 - protein, 12 aa, Homo sapiens
  CDR3 for beta chain variable domain of TCR clone 259881 (TRBV11-2, TRBJ2-2)
CASSLGGGELFF

SEQ ID NO: 519763 - protein, 18 aa, Homo sapiens
  CDR3 for alpha chain variable domain of TCR clone 259882 (TRAV17, TRAJ45)
CATSLDLYSGGGADGFTF

SEQ ID NO: 519764 - protein, 15 aa, Homo sapiens
  CDR3 for beta chain variable domain of TCR clone 259882 (TRBV11-2, TRBJ2-1)
CASSTNRGLIYEQFF

SEQ ID NO: 519765 - protein, 17 aa, Homo sapiens
  CDR3 for alpha chain variable domain of TCR clone 259883 (TRAV3, TRAJ6)
CAVRDGPRAGGSYIPTF

SEQ ID NO: 519766 - protein, 15 aa, Homo sapiens
  CDR3 for beta chain variable domain of TCR clone 259883 (TRBV7-9, TRBJ1-1)
CASSPTGSRAAEAFF

SEQ ID NO: 519767 - protein, 12 aa, Homo sapiens
  CDR3 for alpha chain variable domain of TCR clone 259884 (TRAV12-1, TRAJ20)
CVVNPDDYKLSF

SEQ ID NO: 519768 - protein, 14 aa, Homo sapiens
  CDR3 for beta chain variable domain of TCR clone 259884 (TRBV11-3, TRBJ2-7)
CASSPKTSFYEQYF

SEQ ID NO: 519769 - protein, 11 aa, Homo sapiens
  CDR3 for alpha chain variable domain of TCR clone 259885 (TRAV17, TRAJ9)
CGFTGGFKTIF

SEQ ID NO: 519770 - protein, 13 aa, Homo sapiens
  CDR3 for beta chain variable domain of TCR clone 259885 (TRBV20-1, TRBJ1-1)
CSAPPGGHTEAFF

SEQ ID NO: 519771 - protein, 15 aa, Homo sapiens
  CDR3 for alpha chain variable domain of TCR clone 259886 (TRAV12-3, TRAJ47)
CAMSALVEYGNKLVF

SEQ ID NO: 519772 - protein, 16 aa, Homo sapiens
  CDR3 for beta chain variable domain of TCR clone 259886 (TRBV12-4, TRBJ1-5)
CASSRPVGGSNQPQHF

SEQ ID NO: 519773 - protein, 11 aa, Homo sapiens
  CDR3 for alpha chain variable domain of TCR clone 259887 (TRAV12-3, TRAJ27)
CAMANAGKSTF

SEQ ID NO: 519774 - protein, 13 aa, Homo sapiens
  CDR3 for beta chain variable domain of TCR clone 259887 (TRBV20-1, TRBJ1-1)
CSAREGGNTEAFF

SEQ ID NO: 519775 - protein, 16 aa, Homo sapiens
  CDR3 for alpha chain variable domain of TCR clone 259888 (TRAV27, TRAJ13)
CAGAKSDSGGYQKVIF

SEQ ID NO: 519776 - protein, 15 aa, Homo sapiens
  CDR3 for beta chain variable domain of TCR clone 259888 (TRBV29-1, TRBJ2-1)
CSVGRHALFYNEQFF

SEQ ID NO: 519777 - protein, 13 aa, Homo sapiens
  CDR3 for alpha chain variable domain of TCR clone 259889 (TRAV12-3, TRAJ9)
CAMRNTGGFKTIF

SEQ ID NO: 519778 - protein, 20 aa, Homo sapiens
  CDR3 for beta chain variable domain of TCR clone 259889 (TRBV12-4, TRBJ2-7)
CASSLSWGAPPRDNQYEQYF

SEQ ID NO: 519779 - protein, 12 aa, Homo sapiens
  CDR3 for alpha chain variable domain of TCR clone 259890 (TRAV8-3, TRAJ20)
CAVGANDYKLSF

SEQ ID NO: 519780 - protein, 15 aa, Homo sapiens
  CDR3 for beta chain variable domain of TCR clone 259890 (TRBV27, TRBJ1-6)
CASSFDRGLGSPLHF

SEQ ID NO: 519781 - protein, 14 aa, Homo sapiens
  CDR3 for alpha chain variable domain of TCR clone 259891 (TRAV23/DV6, TRAJ6)
CAARWTGGSSIPTF

SEQ ID NO: 519782 - protein, 15 aa, Homo sapiens
  CDR3 for beta chain variable domain of TCR clone 259891 (TRBV6-3, TRBJ2-7)
CASSSPGTVFYEQYF

SEQ ID NO: 519783 - protein, 14 aa, Homo sapiens
  CDR3 for alpha chain variable domain of TCR clone 259892 (TRAV1-2, TRAJ9)
CAVLQNTGGFKTIF

SEQ ID NO: 519784 - protein, 17 aa, Homo sapiens
  CDR3 for beta chain variable domain of TCR clone 259892 (TRBV11-2, TRBJ2-1)
CASSLYPPGVEYNEQFF

SEQ ID NO: 519785 - protein, 17 aa, Homo sapiens
  CDR3 for alpha chain variable domain of TCR clone 259893 (TRAV17, TRAJ52)
CATERPSGGTSYGKLTF

SEQ ID NO: 519786 - protein, 13 aa, Homo sapiens
  CDR3 for beta chain variable domain of TCR clone 259893 (TRBV7-3, TRBJ1-1)
CASSQDWGAEAFF

SEQ ID NO: 519787 - protein, 12 aa, Homo sapiens
  CDR3 for alpha chain variable domain of TCR clone 259894 (TRAV2, TRAJ10)
CSSTGGGNKLTF

SEQ ID NO: 519788 - protein, 13 aa, Homo sapiens
  CDR3 for beta chain variable domain of TCR clone 259894 (TRBV7-2, TRBJ2-2)
CQQRTGGGWELFF

SEQ ID NO: 519789 - protein, 11 aa, Homo sapiens
  CDR3 for alpha chain variable domain of TCR clone 259895 (TRAV21, TRAJ11)
CAVNGYSNLTF

SEQ ID NO: 519790 - protein, 15 aa, Homo sapiens
  CDR3 for beta chain variable domain of TCR clone 259895 (TRBV6-3, TRBJ2-7)
CASSSPGTVFYEQYF

SEQ ID NO: 519791 - protein, 20 aa, Homo sapiens
  CDR3 for alpha chain variable domain of TCR clone 259896 (TRAV21, TRAJ30)
CAVRRRMTRSSLEKGHDFIF

SEQ ID NO: 519792 - protein, 15 aa, Homo sapiens
  CDR3 for beta chain variable domain of TCR clone 259896 (TRBV19, TRBJ1-2)
CASSVGQVLNYGYTF

SEQ ID NO: 519793 - protein, 14 aa, Homo sapiens
  CDR3 for alpha chain variable domain of TCR clone 259897 (TRAV12-3, TRAJ12)
CAMSEMDSSYKLIF

SEQ ID NO: 519794 - protein, 14 aa, Homo sapiens
  CDR3 for beta chain variable domain of TCR clone 259897 (TRBV20-1, TRBJ2-7)
CSAKRGRSSYEQYF

SEQ ID NO: 519795 - protein, 11 aa, Homo sapiens
  CDR3 for alpha chain variable domain of TCR clone 259898 (TRAV12-2, TRAJ33)
CAVGSNYQLIW

SEQ ID NO: 519796 - protein, 14 aa, Homo sapiens
  CDR3 for beta chain variable domain of TCR clone 259898 (TRBV6-1, TRBJ2-2)
CASVEHIESRELFF

SEQ ID NO: 519797 - protein, 14 aa, Homo sapiens
  CDR3 for alpha chain variable domain of TCR clone 259899 (TRAV8-4, TRAJ57)
CAVSFQGGSEKLVF

SEQ ID NO: 519798 - protein, 15 aa, Homo sapiens
  CDR3 for beta chain variable domain of TCR clone 259899 (TRBV7-8, TRBJ1-1)
CASSLGSGVDTEAFF

SEQ ID NO: 519799 - protein, 15 aa, Homo sapiens
  CDR3 for alpha chain variable domain of TCR clone 259900 (TRAV41, TRAJ45)
CAASYSGGGADGLPF

SEQ ID NO: 519800 - protein, 16 aa, Homo sapiens
  CDR3 for beta chain variable domain of TCR clone 259900 (TRBV19, TRBJ2-1)
CASSKAGPSSYNEQFF

SEQ ID NO: 519801 - protein, 10 aa, Homo sapiens
  CDR3 for alpha chain variable domain of TCR clone 259901 (TRAV12-3, TRAJ18)
CTMSAEAQPW

SEQ ID NO: 519802 - protein, 13 aa, Homo sapiens
  CDR3 for beta chain variable domain of TCR clone 259901 (TRBV15, TRBJ1-6)
CATSGGLNSPLHF

SEQ ID NO: 519803 - protein, 16 aa, Homo sapiens
  CDR3 for alpha chain variable domain of TCR clone 259902 (TRAV1-2, TRAJ16)
CAVNRFSDARSCSLQG

SEQ ID NO: 519804 - protein, 17 aa, Homo sapiens
  CDR3 for beta chain variable domain of TCR clone 259902 (TRBV20-1, TRBJ2-1)
CSASSSGLAGSYNEQFF

SEQ ID NO: 519805 - protein, 16 aa, Homo sapiens
  CDR3 for alpha chain variable domain of TCR clone 259903 (TRAV8-3, TRAJ38)
CAVQASNAGNNRKPLW

SEQ ID NO: 519806 - protein, 16 aa, Homo sapiens
  CDR3 for beta chain variable domain of TCR clone 259903 (TRBV7-8, TRBJ2-6)
CASRVGDSSGANVLTF

SEQ ID NO: 519807 - protein, 13 aa, Homo sapiens
  CDR3 for alpha chain variable domain of TCR clone 259904 (TRAV1-2, TRAJ9)
CAVLNTGGFKTNF

SEQ ID NO: 519808 - protein, 13 aa, Homo sapiens
  CDR3 for beta chain variable domain of TCR clone 259904 (TRBV19, TRBJ2-7)
CASRKAGGSEQYF

SEQ ID NO: 519809 - protein, 18 aa, Homo sapiens
  CDR3 for alpha chain variable domain of TCR clone 259905 (TRAV13-1, TRAJ52)
CAAKNPNAGGTTYGKLTF

SEQ ID NO: 519810 - protein, 15 aa, Homo sapiens
  CDR3 for beta chain variable domain of TCR clone 259905 (TRBV6-1, TRBJ2-3)
CASSERGGITDTQYF

SEQ ID NO: 519811 - protein, 12 aa, Homo sapiens
  CDR3 for alpha chain variable domain of TCR clone 259906 (TRAV38-2/DV8, TRAJ48)
CALLSRNEKLTF

SEQ ID NO: 519812 - protein, 14 aa, Homo sapiens
  CDR3 for beta chain variable domain of TCR clone 259906 (TRBV4-1, TRBJ2-2)
CASSQAVNTGELFF

SEQ ID NO: 519813 - protein, 12 aa, Homo sapiens
  CDR3 for alpha chain variable domain of TCR clone 259907 (TRAV25, TRAJ30)
RAGKNRDDKIIF

SEQ ID NO: 519814 - protein, 11 aa, Homo sapiens
  CDR3 for beta chain variable domain of TCR clone 259907 (TRBV12-4, TRBJ2-7)
CATPEKGEQYF

SEQ ID NO: 519815 - protein, 14 aa, Homo sapiens
  CDR3 for alpha chain variable domain of TCR clone 259908 (TRAV2, TRAJ9)
CAVEDRSGGVKTIF

SEQ ID NO: 519816 - protein, 14 aa, Homo sapiens
  CDR3 for beta chain variable domain of TCR clone 259908 (TRBV4-1, TRBJ2-2)
CASSQAVNTGELFF

SEQ ID NO: 519817 - protein, 14 aa, Homo sapiens
  CDR3 for alpha chain variable domain of TCR clone 259909 (TRAV23/DV6, TRAJ21)
CAAYKSGPRDKFYF

SEQ ID NO: 519818 - protein, 15 aa, Homo sapiens
  CDR3 for beta chain variable domain of TCR clone 259909 (TRBV5-4, TRBJ2-2)
CASSLTSRGTGELFF

SEQ ID NO: 519819 - protein, 15 aa, Homo sapiens
  CDR3 for alpha chain variable domain of TCR clone 259910 (TRAV27, TRAJ38)
CAARRNAGNNRKLIW

SEQ ID NO: 519820 - protein, 15 aa, Homo sapiens
  CDR3 for beta chain variable domain of TCR clone 259910 (TRBV28, TRBJ2-7)
CASRPWDRFSYEQYF

SEQ ID NO: 519821 - protein, 17 aa, Homo sapiens
  CDR3 for alpha chain variable domain of TCR clone 259911 (TRAV13-1, )
CAENIQNPDPAVYQLRD

SEQ ID NO: 519822 - protein, 14 aa, Homo sapiens
  CDR3 for beta chain variable domain of TCR clone 259911 (TRBV19, TRBJ2-7)
CASSIGPNSYEQYF

SEQ ID NO: 519823 - protein, 11 aa, Homo sapiens
  CDR3 for alpha chain variable domain of TCR clone 259912 (TRAV1-2, TRAJ20)
CSVSNDYKLSF

SEQ ID NO: 519824 - protein, 16 aa, Homo sapiens
  CDR3 for beta chain variable domain of TCR clone 259912 (TRBV19, TRBJ2-7)
CASSPAGSGSLNEQYF

SEQ ID NO: 519825 - protein, 16 aa, Homo sapiens
  CDR3 for alpha chain variable domain of TCR clone 259913 (TRAV12-2, TRAJ28)
CAVIRVSGAGSYQLTF

SEQ ID NO: 519826 - protein, 16 aa, Homo sapiens
  CDR3 for beta chain variable domain of TCR clone 259913 (TRBV7-2, TRBJ1-4)
CASSPVGRFDREKLFF

SEQ ID NO: 519827 - protein, 14 aa, Homo sapiens
  CDR3 for alpha chain variable domain of TCR clone 259914 (TRAV13-1, TRAJ20)
CAARPGSNGYKLSF

SEQ ID NO: 519828 - protein, 15 aa, Homo sapiens
  CDR3 for beta chain variable domain of TCR clone 259914 (TRBV4-1, TRBJ2-7)
CASSQRGQGFDEQYF

SEQ ID NO: 519829 - protein, 22 aa, Homo sapiens
  CDR3 for alpha chain variable domain of TCR clone 259915 (TRAV27, TRAJ41)
CAVRTQIPDIQNPDPAVYQLRD

SEQ ID NO: 519830 - protein, 12 aa, Homo sapiens
  CDR3 for beta chain variable domain of TCR clone 259915 (TRBV20-1, TRBJ2-1)
CSARLGTDEQFF

SEQ ID NO: 519831 - protein, 11 aa, Homo sapiens
  CDR3 for alpha chain variable domain of TCR clone 259916 (TRAV12-2, TRAJ33)
CAVTSNYQLIW

SEQ ID NO: 519832 - protein, 14 aa, Homo sapiens
  CDR3 for beta chain variable domain of TCR clone 259916 (TRBV12-4, TRBJ2-2)
CASNQGASTGELFF

SEQ ID NO: 519833 - protein, 13 aa, Homo sapiens
  CDR3 for alpha chain variable domain of TCR clone 259917 (TRAV21, TRAJ20)
CAVGLRVDYKLSF

SEQ ID NO: 519834 - protein, 14 aa, Homo sapiens
  CDR3 for beta chain variable domain of TCR clone 259917 (TRBV28, TRBJ2-3)
CASSWRGRADTQYF

SEQ ID NO: 519835 - protein, 15 aa, Homo sapiens
  CDR3 for alpha chain variable domain of TCR clone 259918 (TRAV34, TRAJ38)
CGADLTPGNNRKLLW

SEQ ID NO: 519836 - protein, 16 aa, Homo sapiens
  CDR3 for beta chain variable domain of TCR clone 259918 (TRBV12-5, TRBJ2-5)
CASGPRTSGNQETQYF

SEQ ID NO: 519837 - protein, 14 aa, Homo sapiens
  CDR3 for alpha chain variable domain of TCR clone 259919 (TRAV14/DV4, TRAJ54)
CAMREAPGAQNLVF

SEQ ID NO: 519838 - protein, 15 aa, Homo sapiens
  CDR3 for beta chain variable domain of TCR clone 259919 (TRBV5-1, TRBJ2-7)
CASSLNGEPAREQYF

SEQ ID NO: 519839 - protein, 14 aa, Homo sapiens
  CDR3 for alpha chain variable domain of TCR clone 259920 (TRAV13-1, TRAJ5)
CAASGGTGRRALTF

SEQ ID NO: 519840 - protein, 12 aa, Homo sapiens
  CDR3 for beta chain variable domain of TCR clone 259920 (TRBV7-9, TRBJ2-7)
CASSLEGYEQYF

SEQ ID NO: 519841 - protein, 13 aa, Homo sapiens
  CDR3 for alpha chain variable domain of TCR clone 259921 (TRAV30, TRAJ6)
CGTEAGGSYIPTF

SEQ ID NO: 519842 - protein, 13 aa, Homo sapiens
  CDR3 for beta chain variable domain of TCR clone 259921 (TRBV5-1, TRBJ2-2)
CASIVARTGELFF

SEQ ID NO: 519843 - protein, 14 aa, Homo sapiens
  CDR3 for alpha chain variable domain of TCR clone 259922 (TRAV16, TRAJ15)
CALSGPQAATALIF

SEQ ID NO: 519844 - protein, 12 aa, Homo sapiens
  CDR3 for beta chain variable domain of TCR clone 259922 (TRBV18, TRBJ2-5)
CASSPSKETQYF

SEQ ID NO: 519845 - protein, 16 aa, Homo sapiens
  CDR3 for alpha chain variable domain of TCR clone 259923 (TRAV17, TRAJ54)
CATDSGIIQGAQKLVF

SEQ ID NO: 519846 - protein, 17 aa, Homo sapiens
  CDR3 for beta chain variable domain of TCR clone 259923 (TRBV11-2, TRBJ2-1)
CASRLYPPGVEYNEQFF

SEQ ID NO: 519847 - protein, 12 aa, Homo sapiens
  CDR3 for alpha chain variable domain of TCR clone 259924 (TRAV12-3, TRAJ17)
CAMTLTGNKLTF

SEQ ID NO: 519848 - protein, 14 aa, Homo sapiens
  CDR3 for beta chain variable domain of TCR clone 259924 (TRBV2, TRBJ1-1)
CASRSGTMNTEAFF

SEQ ID NO: 519849 - protein, 15 aa, Homo sapiens
  CDR3 for alpha chain variable domain of TCR clone 259925 (TRAV3, TRAJ22)
CAVRDRGGSASQLTF

SEQ ID NO: 519850 - protein, 18 aa, Homo sapiens
  CDR3 for beta chain variable domain of TCR clone 259925 (TRBV12-4, TRBJ2-2)
CASSLVAGTRGRTGELFF

SEQ ID NO: 519851 - protein, 16 aa, Homo sapiens
  CDR3 for alpha chain variable domain of TCR clone 259926 (TRAV12-2, TRAJ10)
CAVNRVLTGGGNKLTF

SEQ ID NO: 519852 - protein, 17 aa, Homo sapiens
  CDR3 for beta chain variable domain of TCR clone 259926 (TRBV7-8, TRBJ2-6)
CANSAGTGGAGANVLTF

SEQ ID NO: 519853 - protein, 17 aa, Homo sapiens
  CDR3 for alpha chain variable domain of TCR clone 259927 (TRAV35, TRAJ38)
CAGQLQRNAGNNRTLIW

SEQ ID NO: 519854 - protein, 15 aa, Homo sapiens
  CDR3 for beta chain variable domain of TCR clone 259927 (TRBV7-9, TRBJ2-1)
CASSLGLAGGTEQFF

SEQ ID NO: 519855 - protein, 14 aa, Homo sapiens
  CDR3 for alpha chain variable domain of TCR clone 259928 (TRAV17, TRAJ40)
CATALTSGTYKYIF

SEQ ID NO: 519856 - protein, 14 aa, Homo sapiens
  CDR3 for beta chain variable domain of TCR clone 259928 (TRBV20-1, TRBJ1-1)
CSAMGGTANTEAFF

SEQ ID NO: 519857 - protein, 13 aa, Homo sapiens
  CDR3 for alpha chain variable domain of TCR clone 259929 (TRAV29/DV5, TRAJ31)
CAASRHNNARIMF

SEQ ID NO: 519858 - protein, 15 aa, Homo sapiens
  CDR3 for beta chain variable domain of TCR clone 259929 (TRBV27, TRBJ2-1)
CASSNGGGSSNEQFF

SEQ ID NO: 519859 - protein, 14 aa, Homo sapiens
  CDR3 for alpha chain variable domain of TCR clone 259930 (TRAV1-2, TRAJ8)
CAVREETGFQKLVF

SEQ ID NO: 519860 - protein, 16 aa, Homo sapiens
  CDR3 for beta chain variable domain of TCR clone 259930 (TRBV12-5, TRBJ2-5)
CASGPRTSGNQETQYF

SEQ ID NO: 519861 - protein, 15 aa, Homo sapiens
  CDR3 for alpha chain variable domain of TCR clone 259931 (TRAV8-6, TRAJ37)
CAVICSYGNTGKLIF

SEQ ID NO: 519862 - protein, 15 aa, Homo sapiens
  CDR3 for beta chain variable domain of TCR clone 259931 (TRBV25-1, TRBJ2-4)
CASSETGSAKNIQYF

SEQ ID NO: 519863 - protein, 13 aa, Homo sapiens
  CDR3 for alpha chain variable domain of TCR clone 259932 (TRAV3, TRAJ21)
CAVREPDFNKFYF

SEQ ID NO: 519864 - protein, 12 aa, Homo sapiens
  CDR3 for beta chain variable domain of TCR clone 259932 (TRBV2, TRBJ1-2)
CASSGQTYGYTF

SEQ ID NO: 519865 - protein, 15 aa, Homo sapiens
  CDR3 for alpha chain variable domain of TCR clone 259933 (TRAV21, TRAJ24)
CAARSSTDSWGKLQF

SEQ ID NO: 519866 - protein, 13 aa, Homo sapiens
  CDR3 for beta chain variable domain of TCR clone 259933 (TRBV19, TRBJ2-7)
CASSPRQSYEQYF

SEQ ID NO: 519867 - protein, 15 aa, Homo sapiens
  CDR3 for alpha chain variable domain of TCR clone 259934 (TRAV21, TRAJ53)
CATLNSGGSNYKLTF

SEQ ID NO: 519868 - protein, 12 aa, Homo sapiens
  CDR3 for beta chain variable domain of TCR clone 259934 (TRBV9, TRBJ2-1)
CASSVGGTDIFF

SEQ ID NO: 519869 - protein, 11 aa, Homo sapiens
  CDR3 for alpha chain variable domain of TCR clone 259935 (TRAV23/DV6, TRAJ56)
CAAPANSKLTF

SEQ ID NO: 519870 - protein, 17 aa, Homo sapiens
  CDR3 for beta chain variable domain of TCR clone 259935 (TRBV5-1, TRBJ1-5)
CASSLVGREEGNQPQHF

SEQ ID NO: 519871 - protein, 12 aa, Homo sapiens
  CDR3 for alpha chain variable domain of TCR clone 259936 (TRAV22, TRAJ29)
CAPPSGNTPLVF

SEQ ID NO: 519872 - protein, 17 aa, Homo sapiens
  CDR3 for beta chain variable domain of TCR clone 259936 (TRBV20-1, TRBJ2-1)
CSASSSGLAGSYNEQFF

SEQ ID NO: 519873 - protein, 17 aa, Homo sapiens
  CDR3 for alpha chain variable domain of TCR clone 259937 (TRAV8-6, TRAJ58)
CAVSSWVGEPSGSRLTF

SEQ ID NO: 519874 - protein, 14 aa, Homo sapiens
  CDR3 for beta chain variable domain of TCR clone 259937 (TRBV4-2, TRBJ2-1)
CASGLDRAYNEQFF

SEQ ID NO: 519875 - protein, 15 aa, Homo sapiens
  CDR3 for alpha chain variable domain of TCR clone 259938 (TRAV2, TRAJ20)
CAPLNSFGAGTTVTV

SEQ ID NO: 519876 - protein, 14 aa, Homo sapiens
  CDR3 for beta chain variable domain of TCR clone 259938 (TRBV28, TRBJ1-1)
CASSSEQGYTEAFF

SEQ ID NO: 519877 - protein, 14 aa, Homo sapiens
  CDR3 for alpha chain variable domain of TCR clone 259939 (TRAV1-2, TRAJ8)
CAVREDTGFQKLVI

SEQ ID NO: 519878 - protein, 12 aa, Homo sapiens
  CDR3 for beta chain variable domain of TCR clone 259939 (TRBV29-1, TRBJ2-3)
CSVTGGADTQYF

SEQ ID NO: 519879 - protein, 14 aa, Homo sapiens
  CDR3 for alpha chain variable domain of TCR clone 259940 (TRAV30, TRAJ26)
CGTEIVSYGQNFVF

SEQ ID NO: 519880 - protein, 13 aa, Homo sapiens
  CDR3 for beta chain variable domain of TCR clone 259940 (TRBV10-3, TRBJ2-7)
CASNLAVNYEQYF

SEQ ID NO: 519881 - protein, 13 aa, Homo sapiens
  CDR3 for alpha chain variable domain of TCR clone 259941 (TRAV12-1, TRAJ6)
CVVFPWGSYIPTF

SEQ ID NO: 519882 - protein, 14 aa, Homo sapiens
  CDR3 for beta chain variable domain of TCR clone 259941 (TRBV20-1, TRBJ1-3)
CSASPTGAGNTIYF

SEQ ID NO: 519883 - protein, 14 aa, Homo sapiens
  CDR3 for alpha chain variable domain of TCR clone 259942 (TRAV26-1, TRAJ36)
CIVRVATGANNLFF

SEQ ID NO: 519884 - protein, 16 aa, Homo sapiens
  CDR3 for beta chain variable domain of TCR clone 259942 (TRBV4-1, TRBJ2-3)
CASSQGLAEITDTQYF

SEQ ID NO: 519885 - protein, 15 aa, Homo sapiens
  CDR3 for alpha chain variable domain of TCR clone 259943 (TRAV8-4, TRAJ3)
CAVTGENLVQQCFQD

SEQ ID NO: 519886 - protein, 16 aa, Homo sapiens
  CDR3 for beta chain variable domain of TCR clone 259943 (TRBV4-3, TRBJ1-1)
CTSSQAGFGMNTEAFF

SEQ ID NO: 519887 - protein, 13 aa, Homo sapiens
  CDR3 for alpha chain variable domain of TCR clone 259944 (TRAV20, TRAJ49)
CAVQARTGNQFYF

SEQ ID NO: 519888 - protein, 11 aa, Homo sapiens
  CDR3 for beta chain variable domain of TCR clone 259944 (TRBV11-2, TRBJ1-1)
CASSINTEALF

SEQ ID NO: 519889 - protein, 15 aa, Homo sapiens
  CDR3 for alpha chain variable domain of TCR clone 259945 (TRAV3, TRAJ22)
CAVRDRGGSARQLTF

SEQ ID NO: 519890 - protein, 16 aa, Homo sapiens
  CDR3 for beta chain variable domain of TCR clone 259945 (TRBV9, TRBJ2-2)
CASSAMGKGNTGELFF

SEQ ID NO: 519891 - protein, 14 aa, Homo sapiens
  CDR3 for alpha chain variable domain of TCR clone 259946 (TRAV17, TRAJ57)
CATDPQGGSEQLVF

SEQ ID NO: 519892 - protein, 16 aa, Homo sapiens
  CDR3 for beta chain variable domain of TCR clone 259946 (TRBV20-1, TRBJ1-4)
CSAPGQGLLTNEKLFF

SEQ ID NO: 519893 - protein, 19 aa, Homo sapiens
  CDR3 for alpha chain variable domain of TCR clone 259947 (TRAV3, TRAJ6)
CAVRDRNPSRSGGSYIPTF

SEQ ID NO: 519894 - protein, 15 aa, Homo sapiens
  CDR3 for beta chain variable domain of TCR clone 259947 (TRBV18, TRBJ2-7)
CASSPTFMDSYEQYF

SEQ ID NO: 519895 - protein, 16 aa, Homo sapiens
  CDR3 for alpha chain variable domain of TCR clone 259948 (TRAV12-3, TRAJ52)
CAVSNAGGTSYGKLTF

SEQ ID NO: 519896 - protein, 13 aa, Homo sapiens
  CDR3 for beta chain variable domain of TCR clone 259948 (TRBV6-5, TRBJ2-5)
CASSPQGGETQYF

SEQ ID NO: 519897 - protein, 15 aa, Homo sapiens
  CDR3 for alpha chain variable domain of TCR clone 259949 (TRAV23/DV6, TRAJ18)
CAARYRGSTLGRLYF

SEQ ID NO: 519898 - protein, 17 aa, Homo sapiens
  CDR3 for beta chain variable domain of TCR clone 259949 (TRBV7-3, TRBJ2-3)
CASSLMKRTRGADTQYF

SEQ ID NO: 519899 - protein, 11 aa, Homo sapiens
  CDR3 for alpha chain variable domain of TCR clone 259950 (TRAV29/DV5, TRAJ49)
CAAVPGNQFYF

SEQ ID NO: 519900 - protein, 13 aa, Homo sapiens
  CDR3 for beta chain variable domain of TCR clone 259950 (TRBV27, TRBJ2-1)
CASRTLGVGEQFF

SEQ ID NO: 519901 - protein, 15 aa, Homo sapiens
  CDR3 for alpha chain variable domain of TCR clone 259951 (TRAV29/DV5, TRAJ57)
CAASLLRGGSERLVF

SEQ ID NO: 519902 - protein, 15 aa, Homo sapiens
  CDR3 for beta chain variable domain of TCR clone 259951 (TRBV5-1, TRBJ1-3)
CASSLEGGSGNTIYF

SEQ ID NO: 519903 - protein, 13 aa, Homo sapiens
  CDR3 for alpha chain variable domain of TCR clone 259952 (TRAV21, TRAJ27)
CAARPGSAGKSTF

SEQ ID NO: 519904 - protein, 20 aa, Homo sapiens
  CDR3 for beta chain variable domain of TCR clone 259952 (TRBV7-8, TRBJ2-2)
CASSHLFPGPTIHITGELFF

SEQ ID NO: 519905 - protein, 13 aa, Homo sapiens
  CDR3 for alpha chain variable domain of TCR clone 259953 (TRAV26-1, TRAJ29)
CIVRRSGTTHLVF

SEQ ID NO: 519906 - protein, 16 aa, Homo sapiens
  CDR3 for beta chain variable domain of TCR clone 259953 (TRBV11-2, TRBJ2-7)
CASSLAPTGVNYEQYF

SEQ ID NO: 519907 - protein, 13 aa, Homo sapiens
  CDR3 for alpha chain variable domain of TCR clone 259954 (TRAV8-6, TRAJ49)
CAVITNTGNQFYF

SEQ ID NO: 519908 - protein, 13 aa, Homo sapiens
  CDR3 for beta chain variable domain of TCR clone 259954 (TRBV7-3, TRBJ2-5)
CASSFRGGETQYF

SEQ ID NO: 519909 - protein, 14 aa, Homo sapiens
  CDR3 for alpha chain variable domain of TCR clone 259955 (TRAV17, TRAJ22)
CATSPSGSARQLTS

SEQ ID NO: 519910 - protein, 15 aa, Homo sapiens
  CDR3 for beta chain variable domain of TCR clone 259955 (TRBV4-1, TRBJ2-5)
CASSQWDLYQETQYV

SEQ ID NO: 519911 - protein, 13 aa, Homo sapiens
  CDR3 for alpha chain variable domain of TCR clone 259956 (TRAV3, TRAJ21)
CAVREPDFNKFYF

SEQ ID NO: 519912 - protein, 18 aa, Homo sapiens
  CDR3 for beta chain variable domain of TCR clone 259956 (TRBV11-2, TRBJ2-3)
CASSLGGDSRGAPNTQYF

SEQ ID NO: 519913 - protein, 15 aa, Homo sapiens
  CDR3 for alpha chain variable domain of TCR clone 259957 (TRAV3, TRAJ22)
CAVRDLGGSARQLTF

SEQ ID NO: 519914 - protein, 16 aa, Homo sapiens
  CDR3 for beta chain variable domain of TCR clone 259957 (TRBV4-2, TRBJ2-4)
CASSQELRRAKNIQYF

SEQ ID NO: 519915 - protein, 14 aa, Homo sapiens
  CDR3 for alpha chain variable domain of TCR clone 259958 (TRAV16, TRAJ31)
CALSGRNNNARLMF

SEQ ID NO: 519916 - protein, 15 aa, Homo sapiens
  CDR3 for beta chain variable domain of TCR clone 259958 (TRBV5-7, TRBJ1-5)
CASSYGKLWDQPQHF

SEQ ID NO: 519917 - protein, 13 aa, Homo sapiens
  CDR3 for alpha chain variable domain of TCR clone 259959 (TRAV2, TRAJ15)
CAVASQAGTAPIF

SEQ ID NO: 519918 - protein, 13 aa, Homo sapiens
  CDR3 for beta chain variable domain of TCR clone 259959 (TRBV25-1, TRBJ1-1)
CQHPPGGNTEAFF

SEQ ID NO: 519919 - protein, 15 aa, Homo sapiens
  CDR3 for alpha chain variable domain of TCR clone 259960 (TRAV8-3, TRAJ11)
CAVGLLNSGYSTLTF

SEQ ID NO: 519920 - protein, 13 aa, Homo sapiens
  CDR3 for beta chain variable domain of TCR clone 259960 (TRBV7-2, TRBJ2-2)
CASSSRPTGELFF

SEQ ID NO: 519921 - protein, 11 aa, Homo sapiens
  CDR3 for alpha chain variable domain of TCR clone 259961 (TRAV22, TRAJ20)
CAPLHDYKLSF

SEQ ID NO: 519922 - protein, 19 aa, Homo sapiens
  CDR3 for beta chain variable domain of TCR clone 259961 (TRBV7-8, TRBJ2-7)
CASSLVVGGSRGPHYEQYF

SEQ ID NO: 519923 - protein, 11 aa, Homo sapiens
  CDR3 for alpha chain variable domain of TCR clone 259962 (TRAV2, TRAJ13)
CASGGYQKVTF

SEQ ID NO: 519924 - protein, 16 aa, Homo sapiens
  CDR3 for beta chain variable domain of TCR clone 259962 (TRBV12-5, TRBJ2-5)
CASGPRASGNQETQYF

SEQ ID NO: 519925 - protein, 13 aa, Homo sapiens
  CDR3 for alpha chain variable domain of TCR clone 259963 (TRAV26-1, TRAJ40)
CIPLTSGTYKYIF

SEQ ID NO: 519926 - protein, 14 aa, Homo sapiens
  CDR3 for beta chain variable domain of TCR clone 259963 (TRBV6-5, TRBJ1-4)
CASSYINGGGKLFF

SEQ ID NO: 519927 - protein, 14 aa, Homo sapiens
  CDR3 for alpha chain variable domain of TCR clone 259964 (TRAV12-3, TRAJ10)
SHLPLTGGGNKLTF

SEQ ID NO: 519928 - protein, 13 aa, Homo sapiens
  CDR3 for beta chain variable domain of TCR clone 259964 (TRBV19, TRBJ1-1)
CASSPSNGGEAFF

SEQ ID NO: 519929 - protein, 16 aa, Homo sapiens
  CDR3 for alpha chain variable domain of TCR clone 259965 (TRAV4, TRAJ22)
CLVGDLYSGSARHLTF

SEQ ID NO: 519930 - protein, 16 aa, Homo sapiens
  CDR3 for beta chain variable domain of TCR clone 259965 (TRBV7-9, TRBJ2-3)
CASSPWREVGTDTQYF

SEQ ID NO: 519931 - protein, 12 aa, Homo sapiens
  CDR3 for alpha chain variable domain of TCR clone 259966 (TRAV3, TRAJ39)
CAVIEWSNRLTF

SEQ ID NO: 519932 - protein, 14 aa, Homo sapiens
  CDR3 for beta chain variable domain of TCR clone 259966 (TRBV7-8, TRBJ2-3)
CASSFPDGQDTQYF

SEQ ID NO: 519933 - protein, 15 aa, Homo sapiens
  CDR3 for alpha chain variable domain of TCR clone 259967 (TRAV21, TRAJ45)
CAVSYSGGGADGLTF

SEQ ID NO: 519934 - protein, 12 aa, Homo sapiens
  CDR3 for beta chain variable domain of TCR clone 259967 (TRBV11-2, TRBJ2-1)
CASSPGNNEQFV

SEQ ID NO: 519935 - protein, 15 aa, Homo sapiens
  CDR3 for alpha chain variable domain of TCR clone 259968 (TRAV3, TRAJ22)
CAVRDRGGFARQMTF

SEQ ID NO: 519936 - protein, 20 aa, Homo sapiens
  CDR3 for beta chain variable domain of TCR clone 259968 (TRBV11-2, TRBJ1-6)
CASSLVFATGGSVHPSTLGT

SEQ ID NO: 519937 - protein, 15 aa, Homo sapiens
  CDR3 for alpha chain variable domain of TCR clone 259969 (TRAV21, TRAJ52)
CAVRGGGTSYGKLTF

SEQ ID NO: 519938 - protein, 16 aa, Homo sapiens
  CDR3 for beta chain variable domain of TCR clone 259969 (TRBV20-1, TRBJ2-2)
CSARDLQGVDTGELFF

SEQ ID NO: 519939 - protein, 12 aa, Homo sapiens
  CDR3 for alpha chain variable domain of TCR clone 259970 (TRAV20, TRAJ13)
CCVKRGYQKVTF

SEQ ID NO: 519940 - protein, 13 aa, Homo sapiens
  CDR3 for beta chain variable domain of TCR clone 259970 (TRBV24-1, TRBJ2-2)
CATTATRTGELFF

SEQ ID NO: 519941 - protein, 15 aa, Homo sapiens
  CDR3 for alpha chain variable domain of TCR clone 259971 (TRAV8-4, TRAJ29)
CAVSEEFRGNTPLVF

SEQ ID NO: 519942 - protein, 12 aa, Homo sapiens
  CDR3 for beta chain variable domain of TCR clone 259971 (TRBV14, TRBJ2-7)
CASSSLKGEQYF

SEQ ID NO: 519943 - protein, 14 aa, Homo sapiens
  CDR3 for alpha chain variable domain of TCR clone 259972 (TRAV12-2, TRAJ17)
CAVLLKAAGNKLTF

SEQ ID NO: 519944 - protein, 14 aa, Homo sapiens
  CDR3 for beta chain variable domain of TCR clone 259972 (TRBV19, TRBJ2-1)
CASPTFVLSGELFF

SEQ ID NO: 519945 - protein, 11 aa, Homo sapiens
  CDR3 for alpha chain variable domain of TCR clone 259973 (TRAV21, TRAJ34)
CAVTNTDNLIF

SEQ ID NO: 519946 - protein, 13 aa, Homo sapiens
  CDR3 for beta chain variable domain of TCR clone 259973 (TRBV20-1, TRBJ2-1)
GALAGTSYNEQFF

SEQ ID NO: 519947 - protein, 14 aa, Homo sapiens
  CDR3 for alpha chain variable domain of TCR clone 259974 (TRAV2, TRAJ9)
CAVEDRSGGFKTIS

SEQ ID NO: 519948 - protein, 15 aa, Homo sapiens
  CDR3 for beta chain variable domain of TCR clone 259974 (TRBV13, TRBJ1-5)
CASSFGQGGVQPQHF

SEQ ID NO: 519949 - protein, 15 aa, Homo sapiens
  CDR3 for alpha chain variable domain of TCR clone 259975 (TRAV4, TRAJ8)
CLVGEQHTGFQKLVF

SEQ ID NO: 519950 - protein, 16 aa, Homo sapiens
  CDR3 for beta chain variable domain of TCR clone 259975 (TRBV19, TRBJ2-1)
CASSMGGGSSYNEQFF

SEQ ID NO: 519951 - protein, 12 aa, Homo sapiens
  CDR3 for alpha chain variable domain of TCR clone 259976 (TRAV12-3, TRAJ17)
CAMTLTGNKPTY

SEQ ID NO: 519952 - protein, 15 aa, Homo sapiens
  CDR3 for beta chain variable domain of TCR clone 259976 (TRBV11-3, TRBJ2-3)
CASLKDGREGDTQYF

SEQ ID NO: 519953 - protein, 14 aa, Homo sapiens
  CDR3 for alpha chain variable domain of TCR clone 259977 (TRAV12-1, TRAJ30)
CVVNIVGRDDKIIF

SEQ ID NO: 519954 - protein, 16 aa, Homo sapiens
  CDR3 for beta chain variable domain of TCR clone 259977 (TRBV20-1, TRBJ1-4)
CSAPGQGLLTNEKLFF

SEQ ID NO: 519955 - protein, 15 aa, Homo sapiens
  CDR3 for alpha chain variable domain of TCR clone 259978 (TRAV14/DV4, TRAJ33)
CAMREGRDSNYQLIW

SEQ ID NO: 519956 - protein, 15 aa, Homo sapiens
  CDR3 for beta chain variable domain of TCR clone 259978 (TRBV5-5, TRBJ1-5)
CASSSTPVSNQPQHF

SEQ ID NO: 519957 - protein, 16 aa, Homo sapiens
  CDR3 for alpha chain variable domain of TCR clone 259979 (TRAV8-3, TRAJ13)
CAVGAYPSGGYQKVTF

SEQ ID NO: 519958 - protein, 14 aa, Homo sapiens
  CDR3 for beta chain variable domain of TCR clone 259979 (TRBV2, TRBJ1-5)
CASSGTGFNQPQHF

SEQ ID NO: 519959 - protein, 14 aa, Homo sapiens
  CDR3 for alpha chain variable domain of TCR clone 259980 (TRAV4, TRAJ26)
CLVGPHNYGQNFVF

SEQ ID NO: 519960 - protein, 17 aa, Homo sapiens
  CDR3 for beta chain variable domain of TCR clone 259980 (TRBV24-1, TRBJ2-1)
CATSDVSTSGTYNKQFF

SEQ ID NO: 519961 - protein, 13 aa, Homo sapiens
  CDR3 for alpha chain variable domain of TCR clone 259981 (TRAV29/DV5, TRAJ33)
CAASVESNHQLIW

SEQ ID NO: 519962 - protein, 14 aa, Homo sapiens
  CDR3 for beta chain variable domain of TCR clone 259981 (TRBV11-2, TRBJ2-5)
CASSRTGGIETQYF

SEQ ID NO: 519963 - protein, 12 aa, Homo sapiens
  CDR3 for alpha chain variable domain of TCR clone 259982 (TRAV16, TRAJ10)
CSRTGGGNKLTF

SEQ ID NO: 519964 - protein, 14 aa, Homo sapiens
  CDR3 for beta chain variable domain of TCR clone 259982 (TRBV7-6, TRBJ2-5)
CASSLVGGAETQYF

SEQ ID NO: 519965 - protein, 10 aa, Homo sapiens
  CDR3 for alpha chain variable domain of TCR clone 259983 (TRAV8-4, TRAJ43)
CAVSADDMRF

SEQ ID NO: 519966 - protein, 14 aa, Homo sapiens
  CDR3 for beta chain variable domain of TCR clone 259983 (TRBV4-1, TRBJ2-7)
CASSRTGVAFEQYF

SEQ ID NO: 519967 - protein, 17 aa, Homo sapiens
  CDR3 for alpha chain variable domain of TCR clone 259984 (TRAV23/DV6, TRAJ57)
CAASSTLSQGGSERLVF

SEQ ID NO: 519968 - protein, 12 aa, Homo sapiens
  CDR3 for beta chain variable domain of TCR clone 259984 (TRBV12-4, TRBJ2-7)
CASSLGGYEQYF

SEQ ID NO: 519969 - protein, 13 aa, Homo sapiens
  CDR3 for alpha chain variable domain of TCR clone 259985 (TRAV1-1, TRAJ5)
CAVRQAGRRALTI

SEQ ID NO: 519970 - protein, 12 aa, Homo sapiens
  CDR3 for beta chain variable domain of TCR clone 259985 (TRBV18, TRBJ2-1)
CASSSDEDEQFF

SEQ ID NO: 519971 - protein, 14 aa, Homo sapiens
  CDR3 for alpha chain variable domain of TCR clone 259986 (TRAV12-3, TRAJ10)
SHLPLTGGGNKLTF

SEQ ID NO: 519972 - protein, 12 aa, Homo sapiens
  CDR3 for beta chain variable domain of TCR clone 259986 (TRBV7-9, TRBJ2-7)
CTSSIKREEQYF

SEQ ID NO: 519973 - protein, 13 aa, Homo sapiens
  CDR3 for alpha chain variable domain of TCR clone 259987 (TRAV26-2, TRAJ37)
CIRGSSNTGKQIF

SEQ ID NO: 519974 - protein, 16 aa, Homo sapiens
  CDR3 for beta chain variable domain of TCR clone 259987 (TRBV7-2, TRBJ2-5)
CASSPGGARRGETQYF

SEQ ID NO: 519975 - protein, 11 aa, Homo sapiens
  CDR3 for alpha chain variable domain of TCR clone 259988 (TRAV8-6, TRAJ23)
CAVISGGKLIF

SEQ ID NO: 519976 - protein, 14 aa, Homo sapiens
  CDR3 for beta chain variable domain of TCR clone 259988 (TRBV12-5, TRBJ2-5)
CASGSRTNQETQYF

SEQ ID NO: 519977 - protein, 13 aa, Homo sapiens
  CDR3 for alpha chain variable domain of TCR clone 259989 (TRAV29/DV5, TRAJ31)
CAASRNNNARLMF

SEQ ID NO: 519978 - protein, 12 aa, Homo sapiens
  CDR3 for beta chain variable domain of TCR clone 259989 (TRBV14, TRBJ2-7)
CASSLYKDERYF

SEQ ID NO: 519979 - protein, 13 aa, Homo sapiens
  CDR3 for alpha chain variable domain of TCR clone 259990 (TRAV20, TRAJ48)
CAVQGVGNEKLTF

SEQ ID NO: 519980 - protein, 10 aa, Homo sapiens
  CDR3 for beta chain variable domain of TCR clone 259990 (TRBV2, TRBJ2-2)
LASSQPGLAG

SEQ ID NO: 519981 - protein, 15 aa, Homo sapiens
  CDR3 for alpha chain variable domain of TCR clone 259991 (TRAV12-2, TRAJ8)
CAVREENTGFQKLVF

SEQ ID NO: 519982 - protein, 13 aa, Homo sapiens
  CDR3 for beta chain variable domain of TCR clone 259991 (TRBV13, TRBJ1-1)
CASSPRMNTEAFF

SEQ ID NO: 519983 - protein, 14 aa, Homo sapiens
  CDR3 for alpha chain variable domain of TCR clone 259992 (TRAV12-2, TRAJ12)
CAVINRDSSYKLIF

SEQ ID NO: 519984 - protein, 13 aa, Homo sapiens
  CDR3 for beta chain variable domain of TCR clone 259992 (TRBV7-9, TRBJ1-2)
CASSLKQNYGYTF

SEQ ID NO: 519985 - protein, 14 aa, Homo sapiens
  CDR3 for alpha chain variable domain of TCR clone 259993 (TRAV8-1, TRAJ34)
CAVITTYNTDKLIF

SEQ ID NO: 519986 - protein, 14 aa, Homo sapiens
  CDR3 for beta chain variable domain of TCR clone 259993 (TRBV11-3, TRBJ1-3)
CVSSHNGQGNTIYF

SEQ ID NO: 519987 - protein, 15 aa, Homo sapiens
  CDR3 for alpha chain variable domain of TCR clone 259994 (TRAV17, TRAJ22)
CATVAPSGSARQLTF

SEQ ID NO: 519988 - protein, 15 aa, Homo sapiens
  CDR3 for beta chain variable domain of TCR clone 259994 (TRBV27, TRBJ1-6)
CASSFDRGLGSPPHF

SEQ ID NO: 519989 - protein, 13 aa, Homo sapiens
  CDR3 for alpha chain variable domain of TCR clone 259995 (TRAV27, TRAJ56)
CAGKPGANSKLTF

SEQ ID NO: 519990 - protein, 15 aa, Homo sapiens
  CDR3 for beta chain variable domain of TCR clone 259995 (TRBV7-2, TRBJ2-1)
CASRKTGSSYNEQFF

SEQ ID NO: 519991 - protein, 14 aa, Homo sapiens
  CDR3 for alpha chain variable domain of TCR clone 259996 (TRAV1-2, TRAJ8)
CAVREDTGFQKLVF

SEQ ID NO: 519992 - protein, 13 aa, Homo sapiens
  CDR3 for beta chain variable domain of TCR clone 259996 (TRBV15, TRBJ2-7)
CATSTAGHYEQYF

SEQ ID NO: 519993 - protein, 12 aa, Homo sapiens
  CDR3 for alpha chain variable domain of TCR clone 259997 (TRAV21, TRAJ33)
CAKMDSNYQLIW

SEQ ID NO: 519994 - protein, 16 aa, Homo sapiens
  CDR3 for beta chain variable domain of TCR clone 259997 (TRBV28, TRBJ1-4)
CASSPPYRGRSEKLFF

SEQ ID NO: 519995 - protein, 16 aa, Homo sapiens
  CDR3 for alpha chain variable domain of TCR clone 259998 (TRAV20, TRAJ52)
CAVLTDGCTSYGKLTF

SEQ ID NO: 519996 - protein, 12 aa, Homo sapiens
  CDR3 for beta chain variable domain of TCR clone 259998 (TRBV19, TRBJ2-1)
CASSQISNEQFF

SEQ ID NO: 519997 - protein, 15 aa, Homo sapiens
  CDR3 for alpha chain variable domain of TCR clone 259999 (TRAV3, TRAJ5)
CAVIDLDTGRRALTF

SEQ ID NO: 519998 - protein, 13 aa, Homo sapiens
  CDR3 for beta chain variable domain of TCR clone 259999 (TRBV12-4, TRBJ2-7)
CASSPTETYEQYL

SEQ ID NO: 519999 - protein, 15 aa, Homo sapiens
  CDR3 for alpha chain variable domain of TCR clone 260000 (TRAV12-3, TRAJ42)
CAMSGHGGSQGNLIF

SEQ ID NO: 520000 - protein, 17 aa, Homo sapiens
  CDR3 for beta chain variable domain of TCR clone 260000 (TRBV10-3, TRBJ1-2)
CAISETRDRGLEYGYTF

SEQ ID NO: 520001 - protein, 15 aa, Homo sapiens
  CDR3 for alpha chain variable domain of TCR clone 260001 (TRAV29/DV5, TRAJ29)
CAASERSSGNTPLVF

SEQ ID NO: 520002 - protein, 12 aa, Homo sapiens
  CDR3 for beta chain variable domain of TCR clone 260001 (TRBV6-3, TRBJ2-7)
CASSLTPYEQYF

SEQ ID NO: 520003 - protein, 13 aa, Homo sapiens
  CDR3 for alpha chain variable domain of TCR clone 260002 (TRAV12-3, TRAJ7)
CAMSASGKNRLAV

SEQ ID NO: 520004 - protein, 14 aa, Homo sapiens
  CDR3 for beta chain variable domain of TCR clone 260002 (TRBV13, TRBJ2-5)
CASSLGPRGETQYF

SEQ ID NO: 520005 - protein, 13 aa, Homo sapiens
  CDR3 for alpha chain variable domain of TCR clone 260003 (TRAV30, TRAJ6)
CGFIEGGSYIPTF

SEQ ID NO: 520006 - protein, 13 aa, Homo sapiens
  CDR3 for beta chain variable domain of TCR clone 260003 (TRBV5-4, TRBJ2-5)
YASSPVSQETQYF

SEQ ID NO: 520007 - protein, 13 aa, Homo sapiens
  CDR3 for alpha chain variable domain of TCR clone 260004 (TRAV2, TRAJ29)
CAAGNSGNTPLVV

SEQ ID NO: 520008 - protein, 16 aa, Homo sapiens
  CDR3 for beta chain variable domain of TCR clone 260004 (TRBV7-9, TRBJ1-2)
CASSPGGGAINYGYTF

SEQ ID NO: 520009 - protein, 15 aa, Homo sapiens
  CDR3 for alpha chain variable domain of TCR clone 260005 (TRAV12-2, TRAJ53)
CAVNGGGGSNYKLTF

SEQ ID NO: 520010 - protein, 16 aa, Homo sapiens
  CDR3 for beta chain variable domain of TCR clone 260005 (TRBV7-3, TRBJ2-3)
CQQLMKRMRGADTQYF

SEQ ID NO: 520011 - protein, 14 aa, Homo sapiens
  CDR3 for alpha chain variable domain of TCR clone 260006 (TRAV16, TRAJ33)
CALSVMDSNYQLIW

SEQ ID NO: 520012 - protein, 15 aa, Homo sapiens
  CDR3 for beta chain variable domain of TCR clone 260006 (TRBV28, TRBJ1-5)
CASSRTGGYVQPQHF

SEQ ID NO: 520013 - protein, 12 aa, Homo sapiens
  CDR3 for alpha chain variable domain of TCR clone 260007 (TRAV12-3, TRAJ17)
CAMTLTGNKLTF

SEQ ID NO: 520014 - protein, 15 aa, Homo sapiens
  CDR3 for beta chain variable domain of TCR clone 260007 (TRBV20-1, TRBJ2-7)
CSARDRVPGMDEQYF

SEQ ID NO: 520015 - protein, 12 aa, Homo sapiens
  CDR3 for alpha chain variable domain of TCR clone 260008 (TRAV17, TRAJ4)
CATDGGYYKLIF

SEQ ID NO: 520016 - protein, 13 aa, Homo sapiens
  CDR3 for beta chain variable domain of TCR clone 260008 (TRBV29-1, TRBJ2-2)
CSTTGVNTGELFF

SEQ ID NO: 520017 - protein, 13 aa, Homo sapiens
  CDR3 for alpha chain variable domain of TCR clone 260009 (TRAV8-4, TRAJ48)
CAVSLFGNEKLTF

SEQ ID NO: 520018 - protein, 18 aa, Homo sapiens
  CDR3 for beta chain variable domain of TCR clone 260009 (TRBV20-1, TRBJ2-6)
CSAETTPTHGSGANVLTF

SEQ ID NO: 520019 - protein, 13 aa, Homo sapiens
  CDR3 for alpha chain variable domain of TCR clone 260010 (TRAV26-1, TRAJ48)
CIVRVVGDEKLTF

SEQ ID NO: 520020 - protein, 16 aa, Homo sapiens
  CDR3 for beta chain variable domain of TCR clone 260010 (TRBV12-5, TRBJ2-5)
CASGPRTSGKQETQYF

SEQ ID NO: 520021 - protein, 16 aa, Homo sapiens
  CDR3 for alpha chain variable domain of TCR clone 260011 (TRAV26-1, TRAJ45)
CIVEKYSGGGADGLTF

SEQ ID NO: 520022 - protein, 15 aa, Homo sapiens
  CDR3 for beta chain variable domain of TCR clone 260011 (TRBV15, TRBJ2-7)
CHPRRPIQQAYEQYF

SEQ ID NO: 520023 - protein, 11 aa, Homo sapiens
  CDR3 for alpha chain variable domain of TCR clone 260012 (TRAV13-1, TRAJ30)
CAASRDDKIIF

SEQ ID NO: 520024 - protein, 15 aa, Homo sapiens
  CDR3 for beta chain variable domain of TCR clone 260012 (TRBV18, TRBJ1-1)
CPSSPSSWVNTEAFF

SEQ ID NO: 520025 - protein, 12 aa, Homo sapiens
  CDR3 for alpha chain variable domain of TCR clone 260013 (TRAV12-3, TRAJ17)
CAMTLTGNELPF

SEQ ID NO: 520026 - protein, 15 aa, Homo sapiens
  CDR3 for beta chain variable domain of TCR clone 260013 (TRBV20-1, TRBJ2-7)
CSARDRVSGMDEQYF

SEQ ID NO: 520027 - protein, 14 aa, Homo sapiens
  CDR3 for alpha chain variable domain of TCR clone 260014 (TRAV3, TRAJ9)
CAVRLNTGGFKTIF

SEQ ID NO: 520028 - protein, 13 aa, Homo sapiens
  CDR3 for beta chain variable domain of TCR clone 260014 (TRBV11-2, TRBJ2-5)
CASSRGPSETQYF

SEQ ID NO: 520029 - protein, 13 aa, Homo sapiens
  CDR3 for alpha chain variable domain of TCR clone 260015 (TRAV30, TRAJ6)
CGTEAGGSYIPPF

SEQ ID NO: 520030 - protein, 16 aa, Homo sapiens
  CDR3 for beta chain variable domain of TCR clone 260015 (TRBV4-3, TRBJ2-3)
CASSLGLAGEGDTQYF

SEQ ID NO: 520031 - protein, 14 aa, Homo sapiens
  CDR3 for alpha chain variable domain of TCR clone 260016 (TRAV1-1, TRAJ28)
CAAPSGAGSYQLTF

SEQ ID NO: 520032 - protein, 15 aa, Homo sapiens
  CDR3 for beta chain variable domain of TCR clone 260016 (TRBV7-2, TRBJ1-2)
CASSLVSGGDDGYTF

SEQ ID NO: 520033 - protein, 22 aa, Homo sapiens
  CDR3 for alpha chain variable domain of TCR clone 260017 (TRAV34, )
CGADFTPGNNHIQNPDPAVYQL

SEQ ID NO: 520034 - protein, 14 aa, Homo sapiens
  CDR3 for beta chain variable domain of TCR clone 260017 (TRBV25-1, TRBJ1-1)
CASTHLGGNTEAVF

SEQ ID NO: 520035 - protein, 14 aa, Homo sapiens
  CDR3 for alpha chain variable domain of TCR clone 260018 (TRAV13-1, TRAJ35)
CAASKGGFGNVLHF

SEQ ID NO: 520036 - protein, 13 aa, Homo sapiens
  CDR3 for beta chain variable domain of TCR clone 260018 (TRBV12-4, TRBJ1-2)
CASSLRQGKGYTF

SEQ ID NO: 520037 - protein, 15 aa, Homo sapiens
  CDR3 for alpha chain variable domain of TCR clone 260019 (TRAV14/DV4, TRAJ12)
CAMREGWDSSYKLIF

SEQ ID NO: 520038 - protein, 13 aa, Homo sapiens
  CDR3 for beta chain variable domain of TCR clone 260019 (TRBV2, TRBJ1-1)
CASRWTVNTEAFF

SEQ ID NO: 520039 - protein, 11 aa, Homo sapiens
  CDR3 for alpha chain variable domain of TCR clone 260020 (TRAV12-2, TRAJ43)
CAADNNNDMRF

SEQ ID NO: 520040 - protein, 14 aa, Homo sapiens
  CDR3 for beta chain variable domain of TCR clone 260020 (TRBV7-8, TRBJ1-2)
CASSAGTAIYGYTF

SEQ ID NO: 520041 - protein, 13 aa, Homo sapiens
  CDR3 for alpha chain variable domain of TCR clone 260021 (TRAV12-3, TRAJ9)
CAMSADGGVKTIL

SEQ ID NO: 520042 - protein, 14 aa, Homo sapiens
  CDR3 for beta chain variable domain of TCR clone 260021 (TRBV6-1, TRBJ2-7)
CASSERVNPYEQYF

SEQ ID NO: 520043 - protein, 12 aa, Homo sapiens
  CDR3 for alpha chain variable domain of TCR clone 260022 (TRAV12-1, TRAJ34)
CVVAGATDKLIF

SEQ ID NO: 520044 - protein, 15 aa, Homo sapiens
  CDR3 for beta chain variable domain of TCR clone 260022 (TRBV19, TRBJ2-2)
CASSPRTGWTGELFF

SEQ ID NO: 520045 - protein, 16 aa, Homo sapiens
  CDR3 for alpha chain variable domain of TCR clone 260023 (TRAV3, TRAJ40)
CAVRDRFASGTYKYIF

SEQ ID NO: 520046 - protein, 16 aa, Homo sapiens
  CDR3 for beta chain variable domain of TCR clone 260023 (TRBV5-1, TRBJ1-4)
CASSFLTGQANEKLFF

SEQ ID NO: 520047 - protein, 15 aa, Homo sapiens
  CDR3 for alpha chain variable domain of TCR clone 260024 (TRAV3, TRAJ22)
CAVRDRGGFARQLTF

SEQ ID NO: 520048 - protein, 14 aa, Homo sapiens
  CDR3 for beta chain variable domain of TCR clone 260024 (TRBV25-1, TRBJ1-1)
CASTHLGGNTEAFF

SEQ ID NO: 520049 - protein, 15 aa, Homo sapiens
  CDR3 for alpha chain variable domain of TCR clone 260025 (TRAV4, )
CLVDIQNPDPAVYQL

SEQ ID NO: 520050 - protein, 15 aa, Homo sapiens
  CDR3 for beta chain variable domain of TCR clone 260025 (TRBV12-4, TRBJ2-7)
CASSLGSGGPYEQYF

SEQ ID NO: 520051 - protein, 13 aa, Homo sapiens
  CDR3 for alpha chain variable domain of TCR clone 260026 (TRAV30, TRAJ6)
CGFIEGGSYIPTF

SEQ ID NO: 520052 - protein, 16 aa, Homo sapiens
  CDR3 for beta chain variable domain of TCR clone 260026 (TRBV7-8, TRBJ2-4)
CASSAERTLAKNIQYF

SEQ ID NO: 520053 - protein, 18 aa, Homo sapiens
  CDR3 for alpha chain variable domain of TCR clone 260027 (TRAV17, TRAJ45)
CSTSLDLYSGGGADGLTF

SEQ ID NO: 520054 - protein, 15 aa, Homo sapiens
  CDR3 for beta chain variable domain of TCR clone 260027 (TRBV11-2, TRBJ2-1)
CASSKNRGLIYEQFF

SEQ ID NO: 520055 - protein, 15 aa, Homo sapiens
  CDR3 for alpha chain variable domain of TCR clone 260028 (TRAV35, TRAJ52)
CAGPRGGTSYGKLTF

SEQ ID NO: 520056 - protein, 14 aa, Homo sapiens
  CDR3 for beta chain variable domain of TCR clone 260028 (TRBV20-1, TRBJ2-7)
CRAWTALSSYEQYF

SEQ ID NO: 520057 - protein, 14 aa, Homo sapiens
  CDR3 for alpha chain variable domain of TCR clone 260029 (TRAV26-1, TRAJ38)
CIVVGAGNNRTLSW

SEQ ID NO: 520058 - protein, 12 aa, Homo sapiens
  CDR3 for beta chain variable domain of TCR clone 260029 (TRBV5-1, TRBJ2-5)
CASSWDQETQYF

SEQ ID NO: 520059 - protein, 14 aa, Homo sapiens
  CDR3 for alpha chain variable domain of TCR clone 260030 (TRAV23/DV6, TRAJ4)
CAANLSGGYNKLIF

SEQ ID NO: 520060 - protein, 12 aa, Homo sapiens
  CDR3 for beta chain variable domain of TCR clone 260030 (TRBV11-2, TRBJ2-2)
CASSLGGGELFF

SEQ ID NO: 520061 - protein, 10 aa, Homo sapiens
  CDR3 for alpha chain variable domain of TCR clone 260031 (TRAV2, TRAJ15)
RGQAGTALIL

SEQ ID NO: 520062 - protein, 13 aa, Homo sapiens
  CDR3 for beta chain variable domain of TCR clone 260031 (TRBV27, TRBJ2-1)
CASRTLGVGEQFF

SEQ ID NO: 520063 - protein, 13 aa, Homo sapiens
  CDR3 for alpha chain variable domain of TCR clone 260032 (TRAV20, TRAJ37)
CAGCSSNKGKPIF

SEQ ID NO: 520064 - protein, 21 aa, Homo sapiens
  CDR3 for beta chain variable domain of TCR clone 260032 (TRBV4-2, TRBJ2-3)
PCSQKTRPCISVPAAPDTQYF

SEQ ID NO: 520065 - protein, 13 aa, Homo sapiens
  CDR3 for alpha chain variable domain of TCR clone 260033 (TRAV21, TRAJ57)
CAVTQGGSEQLVL

SEQ ID NO: 520066 - protein, 16 aa, Homo sapiens
  CDR3 for beta chain variable domain of TCR clone 260033 (TRBV29-1, TRBJ2-7)
CSVEDAEDGTAYEQYF

SEQ ID NO: 520067 - protein, 13 aa, Homo sapiens
  CDR3 for alpha chain variable domain of TCR clone 260034 (TRAV12-1, TRAJ21)
CVVNEYNFNKFYF

SEQ ID NO: 520068 - protein, 17 aa, Homo sapiens
  CDR3 for beta chain variable domain of TCR clone 260034 (TRBV13, TRBJ2-3)
CASSLSRVAGGRNTQYF

SEQ ID NO: 520069 - protein, 18 aa, Homo sapiens
  CDR3 for alpha chain variable domain of TCR clone 260035 (TRAV3, TRAJ17)
CAVRARRGGRSCRQQANF

SEQ ID NO: 520070 - protein, 14 aa, Homo sapiens
  CDR3 for beta chain variable domain of TCR clone 260035 (TRBV4-1, TRBJ2-2)
CASSQAVNTGEQFF

SEQ ID NO: 520071 - protein, 14 aa, Homo sapiens
  CDR3 for alpha chain variable domain of TCR clone 260036 (TRAV4, TRAJ32)
YLVNYGGATNKLIF

SEQ ID NO: 520072 - protein, 14 aa, Homo sapiens
  CDR3 for beta chain variable domain of TCR clone 260036 (TRBV15, TRBJ2-5)
CATSGGTRTETQYF

SEQ ID NO: 520073 - protein, 14 aa, Homo sapiens
  CDR3 for alpha chain variable domain of TCR clone 260037 (TRAV13-2, TRAJ52)
CAEAGGTSYGKLTF

SEQ ID NO: 520074 - protein, 13 aa, Homo sapiens
  CDR3 for beta chain variable domain of TCR clone 260037 (TRBV7-9, TRBJ1-2)
CASSLKQNYGHTF

SEQ ID NO: 520075 - protein, 11 aa, Homo sapiens
  CDR3 for alpha chain variable domain of TCR clone 260038 (TRAV2, TRAJ13)
CASGGYQKVTF

SEQ ID NO: 520076 - protein, 12 aa, Homo sapiens
  CDR3 for beta chain variable domain of TCR clone 260038 (TRBV11-2, TRBJ2-1)
CASSPGNNEEFF

SEQ ID NO: 520077 - protein, 14 aa, Homo sapiens
  CDR3 for alpha chain variable domain of TCR clone 260039 (TRAV17, TRAJ12)
CAILPMDSSYKLIF

SEQ ID NO: 520078 - protein, 11 aa, Homo sapiens
  CDR3 for beta chain variable domain of TCR clone 260039 (TRBV12-4, TRBJ2-3)
CASTATDTQYF

SEQ ID NO: 520079 - protein, 13 aa, Homo sapiens
  CDR3 for alpha chain variable domain of TCR clone 260040 (TRAV12-2, TRAJ39)
CAVNNNAGNMVTF

SEQ ID NO: 520080 - protein, 14 aa, Homo sapiens
  CDR3 for beta chain variable domain of TCR clone 260040 (TRBV7-3, TRBJ2-1)
CASSPEGGGNEQFF

SEQ ID NO: 520081 - protein, 13 aa, Homo sapiens
  CDR3 for alpha chain variable domain of TCR clone 260041 (TRAV17, TRAJ9)
CATDGTGGFKTIF

SEQ ID NO: 520082 - protein, 17 aa, Homo sapiens
  CDR3 for beta chain variable domain of TCR clone 260041 (TRBV6-5, TRBJ2-7)
CASSYSFWGQGSYEQYC

SEQ ID NO: 520083 - protein, 17 aa, Homo sapiens
  CDR3 for alpha chain variable domain of TCR clone 260042 (TRAV3, TRAJ42)
CAVRDRDYGGSQGNLIF

SEQ ID NO: 520084 - protein, 17 aa, Homo sapiens
  CDR3 for beta chain variable domain of TCR clone 260042 (TRBV7-9, TRBJ2-3)
CASSPTVAGDLTDTQYL

SEQ ID NO: 520085 - protein, 14 aa, Homo sapiens
  CDR3 for alpha chain variable domain of TCR clone 260043 (TRAV12-3, TRAJ10)
SHLPLMGGGNKLTF

SEQ ID NO: 520086 - protein, 11 aa, Homo sapiens
  CDR3 for beta chain variable domain of TCR clone 260043 (TRBV19, TRBJ1-1)
CASSIGSEAFF

SEQ ID NO: 520087 - protein, 12 aa, Homo sapiens
  CDR3 for alpha chain variable domain of TCR clone 260044 (TRAV12-1, TRAJ34)
CVTGYNTDKLIF

SEQ ID NO: 520088 - protein, 13 aa, Homo sapiens
  CDR3 for beta chain variable domain of TCR clone 260044 (TRBV28, TRBJ2-7)
CASKAGGVYEQYF

SEQ ID NO: 520089 - protein, 12 aa, Homo sapiens
  CDR3 for alpha chain variable domain of TCR clone 260045 (TRAV1-1, TRAJ43)
CAPRVSSNDMRF

SEQ ID NO: 520090 - protein, 11 aa, Homo sapiens
  CDR3 for beta chain variable domain of TCR clone 260045 (TRBV29-1, TRBJ2-5)
CSEDRTGTQYF

SEQ ID NO: 520091 - protein, 17 aa, Homo sapiens
  CDR3 for alpha chain variable domain of TCR clone 260046 (TRAV26-1, TRAJ11)
CIVRVGQSNSGYSTLTF

SEQ ID NO: 520092 - protein, 14 aa, Homo sapiens
  CDR3 for beta chain variable domain of TCR clone 260046 (TRBV7-2, TRBJ2-7)
CASSPKTSFYEQYF

SEQ ID NO: 520093 - protein, 13 aa, Homo sapiens
  CDR3 for alpha chain variable domain of TCR clone 260047 (TRAV23/DV6, TRAJ27)
CAASKPMQANQPL

SEQ ID NO: 520094 - protein, 14 aa, Homo sapiens
  CDR3 for beta chain variable domain of TCR clone 260047 (TRBV5-4, TRBJ1-1)
CASSLDSRRDEDFF

SEQ ID NO: 520095 - protein, 15 aa, Homo sapiens
  CDR3 for alpha chain variable domain of TCR clone 260048 (TRAV2, TRAJ15)
CAVEDRGQTGTALIF

SEQ ID NO: 520096 - protein, 13 aa, Homo sapiens
  CDR3 for beta chain variable domain of TCR clone 260048 (TRBV10-2, TRBJ2-7)
CASGASGGYEQYF

SEQ ID NO: 520097 - protein, 14 aa, Homo sapiens
  CDR3 for alpha chain variable domain of TCR clone 260049 (TRAV26-1, TRAJ39)
CIVRGSRAGNMLTF

SEQ ID NO: 520098 - protein, 16 aa, Homo sapiens
  CDR3 for beta chain variable domain of TCR clone 260049 (TRBV12-4, TRBJ2-5)
CASSFFVRGRQETQYF

SEQ ID NO: 520099 - protein, 12 aa, Homo sapiens
  CDR3 for alpha chain variable domain of TCR clone 260050 (TRAV13-1, TRAJ21)
CAAKEGFNKFYF

SEQ ID NO: 520100 - protein, 14 aa, Homo sapiens
  CDR3 for beta chain variable domain of TCR clone 260050 (TRBV7-2, TRBJ2-5)
CASSLSGWGETQYF

SEQ ID NO: 520101 - protein, 20 aa, Homo sapiens
  CDR3 for alpha chain variable domain of TCR clone 260051 (TRAV12-1, TRAJ42)
SSVIRPPTPVKGGSQGNLIF

SEQ ID NO: 520102 - protein, 18 aa, Homo sapiens
  CDR3 for beta chain variable domain of TCR clone 260051 (TRBV11-2, TRBJ2-3)
CASSLGGASRGAPNTQYF

SEQ ID NO: 520103 - protein, 14 aa, Homo sapiens
  CDR3 for alpha chain variable domain of TCR clone 260052 (TRAV21, TRAJ58)
CAVRRGRSGPRLTF

SEQ ID NO: 520104 - protein, 13 aa, Homo sapiens
  CDR3 for beta chain variable domain of TCR clone 260052 (TRBV7-2, TRBJ1-6)
CASSLKSDSPLHF

SEQ ID NO: 520105 - protein, 14 aa, Homo sapiens
  CDR3 for alpha chain variable domain of TCR clone 260053 (TRAV12-2, TRAJ45)
CAANIGGGADGLTF

SEQ ID NO: 520106 - protein, 13 aa, Homo sapiens
  CDR3 for beta chain variable domain of TCR clone 260053 (TRBV19, TRBJ2-2)
CASGIWSTGELFF

SEQ ID NO: 520107 - protein, 13 aa, Homo sapiens
  CDR3 for alpha chain variable domain of TCR clone 260054 (TRAV8-6, TRAJ21)
CAVSPSSLNKFYF

SEQ ID NO: 520108 - protein, 17 aa, Homo sapiens
  CDR3 for beta chain variable domain of TCR clone 260054 (TRBV5-1, TRBJ2-2)
CASSEKPNFANTGELFF

SEQ ID NO: 520109 - protein, 13 aa, Homo sapiens
  CDR3 for alpha chain variable domain of TCR clone 260055 (TRAV2, TRAJ40)
CAVVTSGTYNYLF

SEQ ID NO: 520110 - protein, 14 aa, Homo sapiens
  CDR3 for beta chain variable domain of TCR clone 260055 (TRBV19, TRBJ2-1)
CASPTFVLSGEQFF

SEQ ID NO: 520111 - protein, 14 aa, Homo sapiens
  CDR3 for alpha chain variable domain of TCR clone 260056 (TRAV4, TRAJ17)
CLVGDMAAGNKLTF

SEQ ID NO: 520112 - protein, 14 aa, Homo sapiens
  CDR3 for beta chain variable domain of TCR clone 260056 (TRBV7-2, TRBJ2-7)
CASSLYPGRYEQYF

SEQ ID NO: 520113 - protein, 13 aa, Homo sapiens
  CDR3 for alpha chain variable domain of TCR clone 260057 (TRAV8-3, TRAJ4)
WVFYSGDYNKLIF

SEQ ID NO: 520114 - protein, 14 aa, Homo sapiens
  CDR3 for beta chain variable domain of TCR clone 260057 (TRBV4-1, TRBJ2-2)
CASSQAVNTGELFF

SEQ ID NO: 520115 - protein, 14 aa, Homo sapiens
  CDR3 for alpha chain variable domain of TCR clone 260058 (TRAV12-2, TRAJ13)
CAVKQTGGSQKVTF

SEQ ID NO: 520116 - protein, 15 aa, Homo sapiens
  CDR3 for beta chain variable domain of TCR clone 260058 (TRBV27, TRBJ2-1)
CASSNGGGSSNEQFF

SEQ ID NO: 520117 - protein, 12 aa, Homo sapiens
  CDR3 for alpha chain variable domain of TCR clone 260059 (TRAV21, TRAJ33)
CAKMDSNYQLIW

SEQ ID NO: 520118 - protein, 14 aa, Homo sapiens
  CDR3 for beta chain variable domain of TCR clone 260059 (TRBV6-3, TRBJ1-5)
CASSYSRFAQPQHF

SEQ ID NO: 520119 - protein, 14 aa, Homo sapiens
  CDR3 for alpha chain variable domain of TCR clone 260060 (TRAV12-2, TRAJ13)
CAVKKTGGYQKVTF

SEQ ID NO: 520120 - protein, 15 aa, Homo sapiens
  CDR3 for beta chain variable domain of TCR clone 260060 (TRBV27, TRBJ2-1)
CASSNGVGSSNEQFF

SEQ ID NO: 520121 - protein, 14 aa, Homo sapiens
  CDR3 for alpha chain variable domain of TCR clone 260061 (TRAV2, TRAJ9)
CAVEDRSGGFKTIF

SEQ ID NO: 520122 - protein, 14 aa, Homo sapiens
  CDR3 for beta chain variable domain of TCR clone 260061 (TRBV18, TRBJ2-7)
CASSPRGGGYEQYF

SEQ ID NO: 520123 - protein, 15 aa, Homo sapiens
  CDR3 for alpha chain variable domain of TCR clone 260062 (TRAV21, TRAJ52)
CAVRGGGTSYGKLTF

SEQ ID NO: 520124 - protein, 14 aa, Homo sapiens
  CDR3 for beta chain variable domain of TCR clone 260062 (TRBV11-2, TRBJ1-2)
CASSLGTANYGYTF

SEQ ID NO: 520125 - protein, 15 aa, Homo sapiens
  CDR3 for alpha chain variable domain of TCR clone 260063 (TRAV35, TRAJ40)
CAGQLCDSGTYKYIS

SEQ ID NO: 520126 - protein, 12 aa, Homo sapiens
  CDR3 for beta chain variable domain of TCR clone 260063 (TRBV7-8, TRBJ2-7)
CASSLAGYEQYF

SEQ ID NO: 520127 - protein, 12 aa, Homo sapiens
  CDR3 for alpha chain variable domain of TCR clone 260064 (TRAV12-3, TRAJ20)
CAMVRGDYKLSF

SEQ ID NO: 520128 - protein, 12 aa, Homo sapiens
  CDR3 for beta chain variable domain of TCR clone 260064 (TRBV10-3, TRBJ1-1)
CATMDRPPEAFF

SEQ ID NO: 520129 - protein, 10 aa, Homo sapiens
  CDR3 for alpha chain variable domain of TCR clone 260065 (TRAV36/DV7, TRAJ56)
SAGPAVELTF

SEQ ID NO: 520130 - protein, 13 aa, Homo sapiens
  CDR3 for beta chain variable domain of TCR clone 260065 (TRBV7-9, TRBJ2-7)
CASSFWSSYERYF

SEQ ID NO: 520131 - protein, 16 aa, Homo sapiens
  CDR3 for alpha chain variable domain of TCR clone 260066 (TRAV30, TRAJ24)
RGTEIVDADSWGKFQF

SEQ ID NO: 520132 - protein, 14 aa, Homo sapiens
  CDR3 for beta chain variable domain of TCR clone 260066 (TRBV12-5, TRBJ2-5)
CASGSRAHQETQYF

SEQ ID NO: 520133 - protein, 14 aa, Homo sapiens
  CDR3 for alpha chain variable domain of TCR clone 260067 (TRAV1-2, TRAJ16)
CAVNRFSDGQKLRF

SEQ ID NO: 520134 - protein, 16 aa, Homo sapiens
  CDR3 for beta chain variable domain of TCR clone 260067 (TRBV19, TRBJ2-3)
CASSPEWDRGTDTQYF

SEQ ID NO: 520135 - protein, 14 aa, Homo sapiens
  CDR3 for alpha chain variable domain of TCR clone 260068 (TRAV26-1, TRAJ38)
CIADNAGNNRKLIW

SEQ ID NO: 520136 - protein, 17 aa, Homo sapiens
  CDR3 for beta chain variable domain of TCR clone 260068 (TRBV7-9, TRBJ2-3)
CASSPTVVGDLTDTQYF

SEQ ID NO: 520137 - protein, 19 aa, Homo sapiens
  CDR3 for alpha chain variable domain of TCR clone 260069 (TRAV17, TRAJ17)
CATDGRPGVIKAAGNKLTF

SEQ ID NO: 520138 - protein, 12 aa, Homo sapiens
  CDR3 for beta chain variable domain of TCR clone 260069 (TRBV11-2, TRBJ2-2)
CASSLPTGELFF

SEQ ID NO: 520139 - protein, 12 aa, Homo sapiens
  CDR3 for alpha chain variable domain of TCR clone 260070 (TRAV13-1, TRAJ53)
AASGGSNYKLTF

SEQ ID NO: 520140 - protein, 15 aa, Homo sapiens
  CDR3 for beta chain variable domain of TCR clone 260070 (TRBV7-3, TRBJ2-1)
CASILDGNSYNEQFF

SEQ ID NO: 520141 - protein, 14 aa, Homo sapiens
  CDR3 for alpha chain variable domain of TCR clone 260071 (TRAV38-1, TRAJ26)
CAFMPDNYGQNFVF

SEQ ID NO: 520142 - protein, 13 aa, Homo sapiens
  CDR3 for beta chain variable domain of TCR clone 260071 (TRBV7-9, TRBJ1-2)
CASSLKQNYGYTF

SEQ ID NO: 520143 - protein, 15 aa, Homo sapiens
  CDR3 for alpha chain variable domain of TCR clone 260072 (TRAV3, TRAJ20)
CAVRDIKLSDYKLSF

SEQ ID NO: 520144 - protein, 11 aa, Homo sapiens
  CDR3 for beta chain variable domain of TCR clone 260072 (TRBV11-2, TRBJ2-2)
CASSLPGELFF

SEQ ID NO: 520145 - protein, 11 aa, Homo sapiens
  CDR3 for alpha chain variable domain of TCR clone 260073 (TRAV12-3, TRAJ43)
CAMSVSNDMRF

SEQ ID NO: 520146 - protein, 18 aa, Homo sapiens
  CDR3 for beta chain variable domain of TCR clone 260073 (TRBV5-4, TRBJ2-3)
CASSPTAGFLPSTDTQYF

SEQ ID NO: 520147 - protein, 13 aa, Homo sapiens
  CDR3 for alpha chain variable domain of TCR clone 260074 (TRAV30, TRAJ24)
CGTVTDSWGKLQS

SEQ ID NO: 520148 - protein, 14 aa, Homo sapiens
  CDR3 for beta chain variable domain of TCR clone 260074 (TRBV6-3, TRBJ2-2)
CASTYTPDTGELFF

SEQ ID NO: 520149 - protein, 14 aa, Homo sapiens
  CDR3 for alpha chain variable domain of TCR clone 260075 (TRAV17, TRAJ57)
CATDPQGGSEKLVF

SEQ ID NO: 520150 - protein, 13 aa, Homo sapiens
  CDR3 for beta chain variable domain of TCR clone 260075 (TRBV29-1, TRBJ2-1)
CSVEGGRVNEQFC

SEQ ID NO: 520151 - protein, 15 aa, Homo sapiens
  CDR3 for alpha chain variable domain of TCR clone 260076 (TRAV12-1, TRAJ23)
CGERSRCNQGGKLIF

SEQ ID NO: 520152 - protein, 11 aa, Homo sapiens
  CDR3 for beta chain variable domain of TCR clone 260076 (TRBV12-4, TRBJ2-3)
CASTATDTQYF

SEQ ID NO: 520153 - protein, 17 aa, Homo sapiens
  CDR3 for alpha chain variable domain of TCR clone 260077 (TRAV38-1, TRAJ45)
CAFMKHYMGGGADGLTF

SEQ ID NO: 520154 - protein, 13 aa, Homo sapiens
  CDR3 for beta chain variable domain of TCR clone 260077 (TRBV2, TRBJ1-4)
CASSGRAGEQLFF

SEQ ID NO: 520155 - protein, 14 aa, Homo sapiens
  CDR3 for alpha chain variable domain of TCR clone 260078 (TRAV38-1, TRAJ29)
CAFITPSGNTPLVF

SEQ ID NO: 520156 - protein, 17 aa, Homo sapiens
  CDR3 for beta chain variable domain of TCR clone 260078 (TRBV19, TRBJ1-6)
CASSISRTQSGNSPLHF

SEQ ID NO: 520157 - protein, 13 aa, Homo sapiens
  CDR3 for alpha chain variable domain of TCR clone 260079 (TRAV8-3, TRAJ4)
WVFYSGGYNKQIF

SEQ ID NO: 520158 - protein, 14 aa, Homo sapiens
  CDR3 for beta chain variable domain of TCR clone 260079 (TRBV7-9, TRBJ2-3)
CASSLEDGTDTQYF

SEQ ID NO: 520159 - protein, 12 aa, Homo sapiens
  CDR3 for alpha chain variable domain of TCR clone 260080 (TRAV23/DV6, TRAJ32)
CSMPGATNKLIF

SEQ ID NO: 520160 - protein, 15 aa, Homo sapiens
  CDR3 for beta chain variable domain of TCR clone 260080 (TRBV20-1, TRBJ2-7)
CSARDRVSGMDEQYF

SEQ ID NO: 520161 - protein, 17 aa, Homo sapiens
  CDR3 for alpha chain variable domain of TCR clone 260081 (TRAV3, TRAJ42)
CAVRDRDYGGSQGNLIF

SEQ ID NO: 520162 - protein, 12 aa, Homo sapiens
  CDR3 for beta chain variable domain of TCR clone 260081 (TRBV28, TRBJ2-7)
CASSFSSYEQYF

SEQ ID NO: 520163 - protein, 14 aa, Homo sapiens
  CDR3 for alpha chain variable domain of TCR clone 260082 (TRAV8-3, TRAJ27)
CAGGRNTNAGKSTF

SEQ ID NO: 520164 - protein, 14 aa, Homo sapiens
  CDR3 for beta chain variable domain of TCR clone 260082 (TRBV25-1, TRBJ1-1)
CASTHLGGNTEAFF

SEQ ID NO: 520165 - protein, 15 aa, Homo sapiens
  CDR3 for alpha chain variable domain of TCR clone 260083 (TRAV13-2, TRAJ35)
CAESPNIGFGNVLHC

SEQ ID NO: 520166 - protein, 14 aa, Homo sapiens
  CDR3 for beta chain variable domain of TCR clone 260083 (TRBV11-2, TRBJ2-7)
CASSLGAGAYEQYF

SEQ ID NO: 520167 - protein, 16 aa, Homo sapiens
  CDR3 for alpha chain variable domain of TCR clone 260084 (TRAV17, TRAJ17)
CATALQEEAAGNKLTI

SEQ ID NO: 520168 - protein, 12 aa, Homo sapiens
  CDR3 for beta chain variable domain of TCR clone 260084 (TRBV4-2, TRBJ2-5)
CASGGAQETQYF

SEQ ID NO: 520169 - protein, 13 aa, Homo sapiens
  CDR3 for alpha chain variable domain of TCR clone 260085 (TRAV2, TRAJ11)
CAVEEIGYRTLTF

SEQ ID NO: 520170 - protein, 20 aa, Homo sapiens
  CDR3 for beta chain variable domain of TCR clone 260085 (TRBV28, TRBJ2-1)
CASTPIGRSPGLAGGNEQFF

SEQ ID NO: 520171 - protein, 11 aa, Homo sapiens
  CDR3 for alpha chain variable domain of TCR clone 260086 (TRAV17, TRAJ9)
CGFTGGFKTIF

SEQ ID NO: 520172 - protein, 12 aa, Homo sapiens
  CDR3 for beta chain variable domain of TCR clone 260086 (TRBV11-2, TRBJ2-2)
CASSLGGGKLFF

SEQ ID NO: 520173 - protein, 13 aa, Homo sapiens
  CDR3 for alpha chain variable domain of TCR clone 260087 (TRAV3, TRAJ5)
CAGREGGRRALTF

SEQ ID NO: 520174 - protein, 13 aa, Homo sapiens
  CDR3 for beta chain variable domain of TCR clone 260087 (TRBV14, TRBJ1-2)
CASSQDRRYGYTF

SEQ ID NO: 520175 - protein, 16 aa, Homo sapiens
  CDR3 for alpha chain variable domain of TCR clone 260088 (TRAV30, TRAJ24)
CGTEIVDADIWGKFQF

SEQ ID NO: 520176 - protein, 15 aa, Homo sapiens
  CDR3 for beta chain variable domain of TCR clone 260088 (TRBV20-1, TRBJ2-4)
CSARDLTGGPNIQYF

SEQ ID NO: 520177 - protein, 11 aa, Homo sapiens
  CDR3 for alpha chain variable domain of TCR clone 260089 (TRAV2, TRAJ21)
CVVFHFNKFYF

SEQ ID NO: 520178 - protein, 14 aa, Homo sapiens
  CDR3 for beta chain variable domain of TCR clone 260089 (TRBV15, TRBJ2-3)
CATRSGTSTDTQYF

SEQ ID NO: 520179 - protein, 14 aa, Homo sapiens
  CDR3 for alpha chain variable domain of TCR clone 260090 (TRAV13-1, TRAJ44)
CAAKATGTASKLTL

SEQ ID NO: 520180 - protein, 15 aa, Homo sapiens
  CDR3 for beta chain variable domain of TCR clone 260090 (TRBV20-1, TRBJ2-7)
CSARDRVSGMDEQYF

SEQ ID NO: 520181 - protein, 17 aa, Homo sapiens
  CDR3 for alpha chain variable domain of TCR clone 260091 (TRAV3, TRAJ6)
FAVRDGPRAGGSNIPTF

SEQ ID NO: 520182 - protein, 14 aa, Homo sapiens
  CDR3 for beta chain variable domain of TCR clone 260091 (TRBV7-2, TRBJ2-7)
CASSPKTSFYEQYF

SEQ ID NO: 520183 - protein, 12 aa, Homo sapiens
  CDR3 for alpha chain variable domain of TCR clone 260092 (TRAV13-1, TRAJ48)
CAANFGNEKLTF

SEQ ID NO: 520184 - protein, 15 aa, Homo sapiens
  CDR3 for beta chain variable domain of TCR clone 260092 (TRBV20-1, TRBJ2-7)
CSARVPAAYFYEQYF

SEQ ID NO: 520185 - protein, 12 aa, Homo sapiens
  CDR3 for alpha chain variable domain of TCR clone 260093 (TRAV12-1, TRAJ34)
CVVAGATDKLIF

SEQ ID NO: 520186 - protein, 14 aa, Homo sapiens
  CDR3 for beta chain variable domain of TCR clone 260093 (TRBV7-2, TRBJ2-1)
CASSPGTLYNEQFF

SEQ ID NO: 520187 - protein, 11 aa, Homo sapiens
  CDR3 for alpha chain variable domain of TCR clone 260094 (TRAV13-1, TRAJ15)
CAATPGTALIF

SEQ ID NO: 520188 - protein, 13 aa, Homo sapiens
  CDR3 for beta chain variable domain of TCR clone 260094 (TRBV20-1, TRBJ1-1)
CSARGGGNTEAFF

SEQ ID NO: 520189 - protein, 14 aa, Homo sapiens
  CDR3 for alpha chain variable domain of TCR clone 260095 (TRAV12-3, TRAJ10)
SHLPLTGGGNKLTF

SEQ ID NO: 520190 - protein, 13 aa, Homo sapiens
  CDR3 for beta chain variable domain of TCR clone 260095 (TRBV9, TRBJ2-1)
CASSPSVGNEQFF

SEQ ID NO: 520191 - protein, 16 aa, Homo sapiens
  CDR3 for alpha chain variable domain of TCR clone 260096 (TRAV3, TRAJ27)
CAVRDPQGTNAGKSTF

SEQ ID NO: 520192 - protein, 17 aa, Homo sapiens
  CDR3 for beta chain variable domain of TCR clone 260096 (TRBV4-1, TRBJ2-7)
CASSQARGLQTSYEQYF

SEQ ID NO: 520193 - protein, 11 aa, Homo sapiens
  CDR3 for alpha chain variable domain of TCR clone 260097 (TRAV12-3, TRAJ43)
CAMSVSNDMRF

SEQ ID NO: 520194 - protein, 20 aa, Homo sapiens
  CDR3 for beta chain variable domain of TCR clone 260097 (TRBV28, TRBJ2-1)
CASPPIGRSPGLAGGNEQFF

SEQ ID NO: 520195 - protein, 16 aa, Homo sapiens
  CDR3 for alpha chain variable domain of TCR clone 260098 (TRAV20, TRAJ53)
CAVQGNSGGSNYKLTF

SEQ ID NO: 520196 - protein, 16 aa, Homo sapiens
  CDR3 for beta chain variable domain of TCR clone 260098 (TRBV7-3, TRBJ2-2)
CASSLKRGTLSGELVF

SEQ ID NO: 520197 - protein, 17 aa, Homo sapiens
  CDR3 for alpha chain variable domain of TCR clone 260099 (TRAV3, TRAJ6)
CAVRDGPRAGGSYIPTF

SEQ ID NO: 520198 - protein, 16 aa, Homo sapiens
  CDR3 for beta chain variable domain of TCR clone 260099 (TRBV3-1, TRBJ2-5)
CASSQDWASGQETQYF

SEQ ID NO: 520199 - protein, 13 aa, Homo sapiens
  CDR3 for alpha chain variable domain of TCR clone 260100 (TRAV27, TRAJ26)
CAGVANYGQNFVF

SEQ ID NO: 520200 - protein, 15 aa, Homo sapiens
  CDR3 for beta chain variable domain of TCR clone 260100 (TRBV28, TRBJ2-5)
CASSSGRTIQETQYF

SEQ ID NO: 520201 - protein, 15 aa, Homo sapiens
  CDR3 for alpha chain variable domain of TCR clone 260101 (TRAV3, TRAJ22)
CAVRDRGGSARQLTF

SEQ ID NO: 520202 - protein, 15 aa, Homo sapiens
  CDR3 for beta chain variable domain of TCR clone 260101 (TRBV12-4, TRBJ2-7)
CASSQTGAISYEQYF

SEQ ID NO: 520203 - protein, 11 aa, Homo sapiens
  CDR3 for alpha chain variable domain of TCR clone 260102 (TRAV4, TRAJ20)
CLVGDKVTTTS

SEQ ID NO: 520204 - protein, 15 aa, Homo sapiens
  CDR3 for beta chain variable domain of TCR clone 260102 (TRBV18, TRBJ2-7)
CDSSPSSTGNYEQYF

SEQ ID NO: 520205 - protein, 13 aa, Homo sapiens
  CDR3 for alpha chain variable domain of TCR clone 260103 (TRAV2, TRAJ21)
CAVEDLNFNKFYF

SEQ ID NO: 520206 - protein, 15 aa, Homo sapiens
  CDR3 for beta chain variable domain of TCR clone 260103 (TRBV28, TRBJ2-5)
CARSPGQGSIETQYF

SEQ ID NO: 520207 - protein, 14 aa, Homo sapiens
  CDR3 for alpha chain variable domain of TCR clone 260104 (TRAV3, TRAJ34)
CAVRDINNTDKLIF

SEQ ID NO: 520208 - protein, 13 aa, Homo sapiens
  CDR3 for beta chain variable domain of TCR clone 260104 (TRBV7-9, TRBJ1-2)
CASSLKQNYGYTF

SEQ ID NO: 520209 - protein, 16 aa, Homo sapiens
  CDR3 for alpha chain variable domain of TCR clone 260105 (TRAV12-2, TRAJ37)
CAVKEKGSSNKGKLIF

SEQ ID NO: 520210 - protein, 12 aa, Homo sapiens
  CDR3 for beta chain variable domain of TCR clone 260105 (TRBV10-1, TRBJ1-5)
CASSDSNQPQHF

SEQ ID NO: 520211 - protein, 13 aa, Homo sapiens
  CDR3 for alpha chain variable domain of TCR clone 260106 (TRAV27, TRAJ45)
CRSSGGGADGLTF

SEQ ID NO: 520212 - protein, 15 aa, Homo sapiens
  CDR3 for beta chain variable domain of TCR clone 260106 (TRBV5-5, TRBJ1-5)
CASSLEGASNQPQHF

SEQ ID NO: 520213 - protein, 18 aa, Homo sapiens
  CDR3 for alpha chain variable domain of TCR clone 260107 (TRAV13-1, TRAJ10)
CAASKGRAVTGGGNKLTF

SEQ ID NO: 520214 - protein, 15 aa, Homo sapiens
  CDR3 for beta chain variable domain of TCR clone 260107 (TRBV27, TRBJ2-7)
CASSPIVKGAYEQYF

SEQ ID NO: 520215 - protein, 12 aa, Homo sapiens
  CDR3 for alpha chain variable domain of TCR clone 260108 (TRAV13-1, TRAJ40)
CAAIAYLRNLQI

SEQ ID NO: 520216 - protein, 16 aa, Homo sapiens
  CDR3 for beta chain variable domain of TCR clone 260108 (TRBV13, TRBJ2-2)
CASSPRTGEHTGELFF

SEQ ID NO: 520217 - protein, 14 aa, Homo sapiens
  CDR3 for alpha chain variable domain of TCR clone 260109 (TRAV20, TRAJ9)
CAVQASTGGFKTIF

SEQ ID NO: 520218 - protein, 14 aa, Homo sapiens
  CDR3 for beta chain variable domain of TCR clone 260109 (TRBV4-1, TRBJ2-7)
CASRLTSGSYEQYF

SEQ ID NO: 520219 - protein, 17 aa, Homo sapiens
  CDR3 for alpha chain variable domain of TCR clone 260110 (TRAV8-1, TRAJ43)
CAVTNDIRFGAGTRLTV

SEQ ID NO: 520220 - protein, 14 aa, Homo sapiens
  CDR3 for beta chain variable domain of TCR clone 260110 (TRBV6-1, TRBJ1-3)
CASVQGGGGNTIYF

SEQ ID NO: 520221 - protein, 12 aa, Homo sapiens
  CDR3 for alpha chain variable domain of TCR clone 260111 (TRAV12-3, TRAJ17)
CAMTLTGNELTF

SEQ ID NO: 520222 - protein, 17 aa, Homo sapiens
  CDR3 for beta chain variable domain of TCR clone 260111 (TRBV7-8, TRBJ2-6)
CASSAGTGGAGANVLTF

SEQ ID NO: 520223 - protein, 17 aa, Homo sapiens
  CDR3 for alpha chain variable domain of TCR clone 260112 (TRAV3, TRAJ6)
CAVRDGPRAGGSSIPTF

SEQ ID NO: 520224 - protein, 11 aa, Homo sapiens
  CDR3 for beta chain variable domain of TCR clone 260112 (TRBV29-1, TRBJ2-5)
CSEDRTGTQYF

SEQ ID NO: 520225 - protein, 10 aa, Homo sapiens
  CDR3 for alpha chain variable domain of TCR clone 260113 (TRAV12-3, TRAJ18)
CAMSAEAQPC

SEQ ID NO: 520226 - protein, 14 aa, Homo sapiens
  CDR3 for beta chain variable domain of TCR clone 260113 (TRBV2, TRBJ2-5)
CASTWGRAQETQYF

SEQ ID NO: 520227 - protein, 12 aa, Homo sapiens
  CDR3 for alpha chain variable domain of TCR clone 260114 (TRAV12-3, TRAJ40)
CAMSSGTYKYIF

SEQ ID NO: 520228 - protein, 13 aa, Homo sapiens
  CDR3 for beta chain variable domain of TCR clone 260114 (TRBV19, TRBJ2-7)
CASSPRQSYEQYF

SEQ ID NO: 520229 - protein, 16 aa, Homo sapiens
  CDR3 for alpha chain variable domain of TCR clone 260115 (TRAV8-4, TRAJ18)
CAVTANGGSTLGRLDF

SEQ ID NO: 520230 - protein, 14 aa, Homo sapiens
  CDR3 for beta chain variable domain of TCR clone 260115 (TRBV12-4, TRBJ1-2)
CASSSAGHIYGYTF

SEQ ID NO: 520231 - protein, 15 aa, Homo sapiens
  CDR3 for alpha chain variable domain of TCR clone 260116 (TRAV12-3, TRAJ6)
CAMSATTGGSYIPTF

SEQ ID NO: 520232 - protein, 16 aa, Homo sapiens
  CDR3 for beta chain variable domain of TCR clone 260116 (TRBV20-1, TRBJ2-1)
CSASASGYSSYNEQFF

SEQ ID NO: 520233 - protein, 14 aa, Homo sapiens
  CDR3 for alpha chain variable domain of TCR clone 260117 (TRAV1-2, TRAJ17)
CALRRGAAGNKLTF

SEQ ID NO: 520234 - protein, 12 aa, Homo sapiens
  CDR3 for beta chain variable domain of TCR clone 260117 (TRBV11-2, TRBJ2-2)
CASSLGGGELFF

SEQ ID NO: 520235 - protein, 14 aa, Homo sapiens
  CDR3 for alpha chain variable domain of TCR clone 260118 (TRAV21, TRAJ48)
CAVRSNFGNEKLTF

SEQ ID NO: 520236 - protein, 15 aa, Homo sapiens
  CDR3 for beta chain variable domain of TCR clone 260118 (TRBV19, TRBJ1-1)
CASTSGQIQNTEAFF

SEQ ID NO: 520237 - protein, 14 aa, Homo sapiens
  CDR3 for alpha chain variable domain of TCR clone 260119 (TRAV1-2, TRAJ16)
CAVNRFSDGQKLLF

SEQ ID NO: 520238 - protein, 13 aa, Homo sapiens
  CDR3 for beta chain variable domain of TCR clone 260119 (TRBV10-3, TRBJ2-1)
CATGLVDNNEQFF

SEQ ID NO: 520239 - protein, 21 aa, Homo sapiens
  CDR3 for alpha chain variable domain of TCR clone 260120 (TRAV26-1, TRAJ30)
CIVRVESMTRSSLEKGQDFIF

SEQ ID NO: 520240 - protein, 15 aa, Homo sapiens
  CDR3 for beta chain variable domain of TCR clone 260120 (TRBV6-1, TRBJ2-3)
CASSERGGITDTQYF

SEQ ID NO: 520241 - protein, 16 aa, Homo sapiens
  CDR3 for alpha chain variable domain of TCR clone 260121 (TRAV12-3, TRAJ53)
CAMSPGSGGSNYKLTF

SEQ ID NO: 520242 - protein, 16 aa, Homo sapiens
  CDR3 for beta chain variable domain of TCR clone 260121 (TRBV4-2, TRBJ1-1)
CASSQEGFGMNTEAFF

SEQ ID NO: 520243 - protein, 12 aa, Homo sapiens
  CDR3 for alpha chain variable domain of TCR clone 260122 (TRAV8-3, TRAJ26)
CAGDNYGQNFVF

SEQ ID NO: 520244 - protein, 17 aa, Homo sapiens
  CDR3 for beta chain variable domain of TCR clone 260122 (TRBV7-3, TRBJ2-5)
CASSLGSGRSGSETQYF

SEQ ID NO: 520245 - protein, 14 aa, Homo sapiens
  CDR3 for alpha chain variable domain of TCR clone 260123 (TRAV17, TRAJ35)
CATDRPGFGNVLHC

SEQ ID NO: 520246 - protein, 12 aa, Homo sapiens
  CDR3 for beta chain variable domain of TCR clone 260123 (TRBV12-4, TRBJ2-7)
CASSLGGYEQYF

SEQ ID NO: 520247 - protein, 11 aa, Homo sapiens
  CDR3 for alpha chain variable domain of TCR clone 260124 (TRAV1-2, TRAJ20)
CAVANDYKLSF

SEQ ID NO: 520248 - protein, 18 aa, Homo sapiens
  CDR3 for beta chain variable domain of TCR clone 260124 (TRBV20-1, TRBJ2-6)
SAVLRRHQLTAGANVLTF

SEQ ID NO: 520249 - protein, 17 aa, Homo sapiens
  CDR3 for alpha chain variable domain of TCR clone 260125 (TRAV13-1, TRAJ52)
CAAISGAGGTSYGKLTF

SEQ ID NO: 520250 - protein, 15 aa, Homo sapiens
  CDR3 for beta chain variable domain of TCR clone 260125 (TRBV2, TRBJ2-1)
CASSELAGSYNEQFF

SEQ ID NO: 520251 - protein, 14 aa, Homo sapiens
  CDR3 for alpha chain variable domain of TCR clone 260126 (TRAV24, TRAJ23)
CASPFYNQGGKLIF

SEQ ID NO: 520252 - protein, 14 aa, Homo sapiens
  CDR3 for beta chain variable domain of TCR clone 260126 (TRBV7-9, TRBJ2-2)
CASSLVQDTGELFF

SEQ ID NO: 520253 - protein, 17 aa, Homo sapiens
  CDR3 for alpha chain variable domain of TCR clone 260127 (TRAV8-1, TRAJ42)
CAVKWGTYGGSQGTLIF

SEQ ID NO: 520254 - protein, 15 aa, Homo sapiens
  CDR3 for beta chain variable domain of TCR clone 260127 (TRBV9, TRBJ1-6)
CASSVAGTGDSPLHF

SEQ ID NO: 520255 - protein, 16 aa, Homo sapiens
  CDR3 for alpha chain variable domain of TCR clone 260128 (TRAV30, TRAJ24)
CGTEIVDADSWGKFQF

SEQ ID NO: 520256 - protein, 14 aa, Homo sapiens
  CDR3 for beta chain variable domain of TCR clone 260128 (TRBV12-5, TRBJ2-5)
CASGSREHQETQYF

SEQ ID NO: 520257 - protein, 19 aa, Homo sapiens
  CDR3 for alpha chain variable domain of TCR clone 260129 (TRAV1-2, TRAJ26)
CLLPLCCERPDNYGQNFVF

SEQ ID NO: 520258 - protein, 14 aa, Homo sapiens
  CDR3 for beta chain variable domain of TCR clone 260129 (TRBV7-8, TRBJ2-3)
CASSSRDSTDTQYF

SEQ ID NO: 520259 - protein, 17 aa, Homo sapiens
  CDR3 for alpha chain variable domain of TCR clone 260130 (TRAV26-1, TRAJ37)
CIVRVITVSSNPGKLIF

SEQ ID NO: 520260 - protein, 13 aa, Homo sapiens
  CDR3 for beta chain variable domain of TCR clone 260130 (TRBV18, TRBJ2-5)
CASSLQGQETQYF

SEQ ID NO: 520261 - protein, 18 aa, Homo sapiens
  CDR3 for alpha chain variable domain of TCR clone 260131 (TRAV21, TRAJ52)
CAVRPSPAGATSYGKLTF

SEQ ID NO: 520262 - protein, 15 aa, Homo sapiens
  CDR3 for beta chain variable domain of TCR clone 260131 (TRBV7-9, TRBJ2-7)
CASSSSGLAVYEQYF

SEQ ID NO: 520263 - protein, 11 aa, Homo sapiens
  CDR3 for alpha chain variable domain of TCR clone 260132 (TRAV21, TRAJ11)
CAVNGYSTLTF

SEQ ID NO: 520264 - protein, 12 aa, Homo sapiens
  CDR3 for beta chain variable domain of TCR clone 260132 (TRBV7-8, TRBJ2-3)
CASSLWDEAQYF

SEQ ID NO: 520265 - protein, 21 aa, Homo sapiens
  CDR3 for alpha chain variable domain of TCR clone 260133 (TRAV26-1, TRAJ17)
CCVLFHRQRSGSKAAGNKLTF

SEQ ID NO: 520266 - protein, 14 aa, Homo sapiens
  CDR3 for beta chain variable domain of TCR clone 260133 (TRBV28, TRBJ1-2)
CASRIQGANYGYTF

SEQ ID NO: 520267 - protein, 14 aa, Homo sapiens
  CDR3 for alpha chain variable domain of TCR clone 260134 (TRAV12-2, TRAJ17)
CAVLFKAAGNKLTV

SEQ ID NO: 520268 - protein, 14 aa, Homo sapiens
  CDR3 for beta chain variable domain of TCR clone 260134 (TRBV7-2, TRBJ2-7)
CASRSQGAAYEQYF

SEQ ID NO: 520269 - protein, 16 aa, Homo sapiens
  CDR3 for alpha chain variable domain of TCR clone 260135 (TRAV20, TRAJ38)
CAVQASNAGNNRKPIW

SEQ ID NO: 520270 - protein, 16 aa, Homo sapiens
  CDR3 for beta chain variable domain of TCR clone 260135 (TRBV7-3, TRBJ2-2)
CASSLKRGTLSGELFF

SEQ ID NO: 520271 - protein, 15 aa, Homo sapiens
  CDR3 for alpha chain variable domain of TCR clone 260136 (TRAV17, TRAJ39)
CFLLLCYEPLHMLTF

SEQ ID NO: 520272 - protein, 13 aa, Homo sapiens
  CDR3 for beta chain variable domain of TCR clone 260136 (TRBV7-8, TRBJ2-1)
CASTRDAVGEQFF

SEQ ID NO: 520273 - protein, 16 aa, Homo sapiens
  CDR3 for alpha chain variable domain of TCR clone 260137 (TRAV26-2, )
CILLDIQNPDPAVYQL

SEQ ID NO: 520274 - protein, 15 aa, Homo sapiens
  CDR3 for beta chain variable domain of TCR clone 260137 (TRBV6-3, TRBJ2-7)
CASSSPGTVFYEQYF

SEQ ID NO: 520275 - protein, 12 aa, Homo sapiens
  CDR3 for alpha chain variable domain of TCR clone 260138 (TRAV13-2, TRAJ23)
CAERHRGGKLIF

SEQ ID NO: 520276 - protein, 11 aa, Homo sapiens
  CDR3 for beta chain variable domain of TCR clone 260138 (TRBV6-3, TRBJ2-3)
CATGQADTQYF

SEQ ID NO: 520277 - protein, 13 aa, Homo sapiens
  CDR3 for alpha chain variable domain of TCR clone 260139 (TRAV12-3, TRAJ43)
CAMIRPNNNDMRF

SEQ ID NO: 520278 - protein, 13 aa, Homo sapiens
  CDR3 for beta chain variable domain of TCR clone 260139 (TRBV15, TRBJ1-6)
CATSGGLNSPLHF

SEQ ID NO: 520279 - protein, 16 aa, Homo sapiens
  CDR3 for alpha chain variable domain of TCR clone 260140 (TRAV8-3, TRAJ28)
CAVGATLGLGVTNSLS

SEQ ID NO: 520280 - protein, 14 aa, Homo sapiens
  CDR3 for beta chain variable domain of TCR clone 260140 (TRBV7-2, TRBJ2-1)
CASSLGVCYNEQFF

SEQ ID NO: 520281 - protein, 12 aa, Homo sapiens
  CDR3 for alpha chain variable domain of TCR clone 260141 (TRAV1-1, TRAJ30)
CAVRGRDDKIIF

SEQ ID NO: 520282 - protein, 16 aa, Homo sapiens
  CDR3 for beta chain variable domain of TCR clone 260141 (TRBV6-1, TRBJ1-3)
CASVQGGVETPYILER

SEQ ID NO: 520283 - protein, 14 aa, Homo sapiens
  CDR3 for alpha chain variable domain of TCR clone 260142 (TRAV30, TRAJ33)
CGTVAPRSNYQLIW

SEQ ID NO: 520284 - protein, 16 aa, Homo sapiens
  CDR3 for beta chain variable domain of TCR clone 260142 (TRBV3-1, TRBJ2-5)
CASSPGQLNGFATQYF

SEQ ID NO: 520285 - protein, 14 aa, Homo sapiens
  CDR3 for alpha chain variable domain of TCR clone 260143 (TRAV12-1, TRAJ24)
CVVRSTDSWGKFQF

SEQ ID NO: 520286 - protein, 17 aa, Homo sapiens
  CDR3 for beta chain variable domain of TCR clone 260143 (TRBV2, TRBJ2-1)
CASILLGGSSSYNEQFF

SEQ ID NO: 520287 - protein, 14 aa, Homo sapiens
  CDR3 for alpha chain variable domain of TCR clone 260144 (TRAV13-1, TRAJ35)
CAASKGGFGNVLHC

SEQ ID NO: 520288 - protein, 13 aa, Homo sapiens
  CDR3 for beta chain variable domain of TCR clone 260144 (TRBV12-4, TRBJ1-1)
CASSPGTGFEAFF

SEQ ID NO: 520289 - protein, 15 aa, Homo sapiens
  CDR3 for alpha chain variable domain of TCR clone 260145 (TRAV8-4, TRAJ3)
CAVTGENLVQQCFQD

SEQ ID NO: 520290 - protein, 16 aa, Homo sapiens
  CDR3 for beta chain variable domain of TCR clone 260145 (TRBV11-2, TRBJ2-7)
CASSLAPTGVNYEQYF

SEQ ID NO: 520291 - protein, 14 aa, Homo sapiens
  CDR3 for alpha chain variable domain of TCR clone 260146 (TRAV12-3, TRAJ47)
CAMSVREYGNNLVF

SEQ ID NO: 520292 - protein, 15 aa, Homo sapiens
  CDR3 for beta chain variable domain of TCR clone 260146 (TRBV20-1, TRBJ2-2)
CSARDTRLNTGELFF

SEQ ID NO: 520293 - protein, 14 aa, Homo sapiens
  CDR3 for alpha chain variable domain of TCR clone 260147 (TRAV16, TRAJ31)
CALSGRNNNARLMF

SEQ ID NO: 520294 - protein, 15 aa, Homo sapiens
  CDR3 for beta chain variable domain of TCR clone 260147 (TRBV4-1, TRBJ1-4)
CASSDTGGTNEKLFF

SEQ ID NO: 520295 - protein, 14 aa, Homo sapiens
  CDR3 for alpha chain variable domain of TCR clone 260148 (TRAV3, TRAJ17)
CCERQGAAGNKLTF

SEQ ID NO: 520296 - protein, 14 aa, Homo sapiens
  CDR3 for beta chain variable domain of TCR clone 260148 (TRBV6-3, TRBJ1-1)
CASSNLLPGAEAFF

SEQ ID NO: 520297 - protein, 17 aa, Homo sapiens
  CDR3 for alpha chain variable domain of TCR clone 260149 (TRAV3, TRAJ6)
CAVRDGPRAGGSYIPTF

SEQ ID NO: 520298 - protein, 14 aa, Homo sapiens
  CDR3 for beta chain variable domain of TCR clone 260149 (TRBV15, TRBJ2-5)
CATSGDRGQETQYF

SEQ ID NO: 520299 - protein, 21 aa, Homo sapiens
  CDR3 for alpha chain variable domain of TCR clone 260150 (TRAV25, TRAJ47)
TATQTTDVGTYFWEYGNKLVF

SEQ ID NO: 520300 - protein, 16 aa, Homo sapiens
  CDR3 for beta chain variable domain of TCR clone 260150 (TRBV6-6, TRBJ2-1)
CASSSGGQGPYNEQFF

SEQ ID NO: 520301 - protein, 14 aa, Homo sapiens
  CDR3 for alpha chain variable domain of TCR clone 260151 (TRAV17, TRAJ49)
CATDARDTGNQFYF

SEQ ID NO: 520302 - protein, 14 aa, Homo sapiens
  CDR3 for beta chain variable domain of TCR clone 260151 (TRBV5-5, TRBJ1-2)
CASSFGHINYGYNF

SEQ ID NO: 520303 - protein, 14 aa, Homo sapiens
  CDR3 for alpha chain variable domain of TCR clone 260152 (TRAV13-1, TRAJ53)
CAASISGSNYKLTF

SEQ ID NO: 520304 - protein, 15 aa, Homo sapiens
  CDR3 for beta chain variable domain of TCR clone 260152 (TRBV4-1, TRBJ2-7)
CASSQGRGGDLEQYF

SEQ ID NO: 520305 - protein, 11 aa, Homo sapiens
  CDR3 for alpha chain variable domain of TCR clone 260153 (TRAV27, TRAJ49)
CAGVPPNQFYF

SEQ ID NO: 520306 - protein, 16 aa, Homo sapiens
  CDR3 for beta chain variable domain of TCR clone 260153 (TRBV6-1, TRBJ2-5)
CASSETLDRGAETQYF

SEQ ID NO: 520307 - protein, 13 aa, Homo sapiens
  CDR3 for alpha chain variable domain of TCR clone 260154 (TRAV35, TRAJ43)
CAGYPYNNNDMRS

SEQ ID NO: 520308 - protein, 15 aa, Homo sapiens
  CDR3 for beta chain variable domain of TCR clone 260154 (TRBV25-1, TRBJ1-4)
CASSKRIATNEKLFF

SEQ ID NO: 520309 - protein, 16 aa, Homo sapiens
  CDR3 for alpha chain variable domain of TCR clone 260155 (TRAV8-6, TRAJ39)
CAVMPMNNNAGKMLTF

SEQ ID NO: 520310 - protein, 16 aa, Homo sapiens
  CDR3 for beta chain variable domain of TCR clone 260155 (TRBV15, TRBJ2-5)
CATSRYLEAAQETQYF

SEQ ID NO: 520311 - protein, 14 aa, Homo sapiens
  CDR3 for alpha chain variable domain of TCR clone 260156 (TRAV9-2, TRAJ39)
CALYIYNAGNMITF

SEQ ID NO: 520312 - protein, 14 aa, Homo sapiens
  CDR3 for beta chain variable domain of TCR clone 260156 (TRBV11-2, TRBJ2-3)
CASSRLARTDTQYF

SEQ ID NO: 520313 - protein, 14 aa, Homo sapiens
  CDR3 for alpha chain variable domain of TCR clone 260157 (TRAV1-2, TRAJ16)
CAVNRFSDGQKLLF

SEQ ID NO: 520314 - protein, 18 aa, Homo sapiens
  CDR3 for beta chain variable domain of TCR clone 260157 (TRBV7-6, TRBJ2-1)
CASSPRTSGMSFYNEQFF

SEQ ID NO: 520315 - protein, 14 aa, Homo sapiens
  CDR3 for alpha chain variable domain of TCR clone 260158 (TRAV16, TRAJ33)
CALSAMDSIYQLIW

SEQ ID NO: 520316 - protein, 12 aa, Homo sapiens
  CDR3 for beta chain variable domain of TCR clone 260158 (TRBV5-1, TRBJ1-2)
CASIQDTYGYTF

SEQ ID NO: 520317 - protein, 17 aa, Homo sapiens
  CDR3 for alpha chain variable domain of TCR clone 260159 (TRAV3, TRAJ42)
CAARDRDYGGSQGNLIF

SEQ ID NO: 520318 - protein, 14 aa, Homo sapiens
  CDR3 for beta chain variable domain of TCR clone 260159 (TRBV19, TRBJ2-2)
CTSSGQGIAGELFF

SEQ ID NO: 520319 - protein, 23 aa, Homo sapiens
  CDR3 for alpha chain variable domain of TCR clone 260160 (TRAV26-1, TRAJ38)
CIADNAGNNHIQNPDPAVYQLRH

SEQ ID NO: 520320 - protein, 12 aa, Homo sapiens
  CDR3 for beta chain variable domain of TCR clone 260160 (TRBV11-2, TRBJ2-2)
CASSLGGGELFF

SEQ ID NO: 520321 - protein, 17 aa, Homo sapiens
  CDR3 for alpha chain variable domain of TCR clone 260161 (TRAV8-2, )
CVVNTQNPDPAVYQLRD

SEQ ID NO: 520322 - protein, 14 aa, Homo sapiens
  CDR3 for beta chain variable domain of TCR clone 260161 (TRBV7-9, TRBJ2-5)
CASSLVGGEETQYF

SEQ ID NO: 520323 - protein, 16 aa, Homo sapiens
  CDR3 for alpha chain variable domain of TCR clone 260162 (TRAV8-4, TRAJ52)
CAVSDPGGTSYGKLTF

SEQ ID NO: 520324 - protein, 14 aa, Homo sapiens
  CDR3 for beta chain variable domain of TCR clone 260162 (TRBV11-2, TRBJ2-3)
CASSRLARTDTQYF

SEQ ID NO: 520325 - protein, 12 aa, Homo sapiens
  CDR3 for alpha chain variable domain of TCR clone 260163 (TRAV36/DV7, TRAJ54)
CAVVRGAQKLVF

SEQ ID NO: 520326 - protein, 17 aa, Homo sapiens
  CDR3 for beta chain variable domain of TCR clone 260163 (TRBV25-1, TRBJ2-1)
CASSAYGQGRGVYEQFF

SEQ ID NO: 520327 - protein, 14 aa, Homo sapiens
  CDR3 for alpha chain variable domain of TCR clone 260164 (TRAV30, TRAJ26)
CGTEIVSYGQNFVF

SEQ ID NO: 520328 - protein, 20 aa, Homo sapiens
  CDR3 for beta chain variable domain of TCR clone 260164 (TRBV4-1, TRBJ2-2)
CASSQASPPGLASNTGELFF

SEQ ID NO: 520329 - protein, 13 aa, Homo sapiens
  CDR3 for alpha chain variable domain of TCR clone 260165 (TRAV2, TRAJ10)
CAVETGGGNKLTF

SEQ ID NO: 520330 - protein, 14 aa, Homo sapiens
  CDR3 for beta chain variable domain of TCR clone 260165 (TRBV20-1, TRBJ2-3)
CSSGGRRGTDTQYF

SEQ ID NO: 520331 - protein, 12 aa, Homo sapiens
  CDR3 for alpha chain variable domain of TCR clone 260166 (TRAV16, TRAJ10)
CSRPGGGNKLTF

SEQ ID NO: 520332 - protein, 15 aa, Homo sapiens
  CDR3 for beta chain variable domain of TCR clone 260166 (TRBV6-3, TRBJ2-7)
CASSSPGTVFYEQYF

SEQ ID NO: 520333 - protein, 16 aa, Homo sapiens
  CDR3 for alpha chain variable domain of TCR clone 260167 (TRAV21, TRAJ52)
CAVTNAGGTSYGKVTF

SEQ ID NO: 520334 - protein, 13 aa, Homo sapiens
  CDR3 for beta chain variable domain of TCR clone 260167 (TRBV20-1, TRBJ2-3)
CSARLAGTDTQYF

SEQ ID NO: 520335 - protein, 14 aa, Homo sapiens
  CDR3 for alpha chain variable domain of TCR clone 260168 (TRAV35, TRAJ13)
CAGSPSGGYQKVTF

SEQ ID NO: 520336 - protein, 13 aa, Homo sapiens
  CDR3 for beta chain variable domain of TCR clone 260168 (TRBV7-9, TRBJ1-2)
CASSLKQNYGYTF

SEQ ID NO: 520337 - protein, 14 aa, Homo sapiens
  CDR3 for alpha chain variable domain of TCR clone 260169 (TRAV16, TRAJ26)
CALSSANYGQNSVS

SEQ ID NO: 520338 - protein, 16 aa, Homo sapiens
  CDR3 for beta chain variable domain of TCR clone 260169 (TRBV20-1, TRBJ1-4)
CSAPGQGLLTNEKLFF

SEQ ID NO: 520339 - protein, 12 aa, Homo sapiens
  CDR3 for alpha chain variable domain of TCR clone 260170 (TRAV16, TRAJ57)
CALEGGSEKLVL

SEQ ID NO: 520340 - protein, 12 aa, Homo sapiens
  CDR3 for beta chain variable domain of TCR clone 260170 (TRBV28, TRBJ2-7)
CASSGRPYEQYF

SEQ ID NO: 520341 - protein, 14 aa, Homo sapiens
  CDR3 for alpha chain variable domain of TCR clone 260171 (TRAV26-1, TRAJ38)
CIADNAGNNRKLIW

SEQ ID NO: 520342 - protein, 15 aa, Homo sapiens
  CDR3 for beta chain variable domain of TCR clone 260171 (TRBV27, TRBJ2-1)
CASSNGGGSSNGQFF

SEQ ID NO: 520343 - protein, 12 aa, Homo sapiens
  CDR3 for alpha chain variable domain of TCR clone 260172 (TRAV3, TRAJ20)
CAVRDPDCKLSF

SEQ ID NO: 520344 - protein, 13 aa, Homo sapiens
  CDR3 for beta chain variable domain of TCR clone 260172 (TRBV3-1, TRBJ1-1)
CASSPGVITEAFF

SEQ ID NO: 520345 - protein, 16 aa, Homo sapiens
  CDR3 for alpha chain variable domain of TCR clone 260173 (TRAV16, TRAJ4)
CALSRMFSGGYNKLIF

SEQ ID NO: 520346 - protein, 16 aa, Homo sapiens
  CDR3 for beta chain variable domain of TCR clone 260173 (TRBV24-1, TRBJ2-3)
CATNDPGTGAADTQYF

SEQ ID NO: 520347 - protein, 12 aa, Homo sapiens
  CDR3 for alpha chain variable domain of TCR clone 260174 (TRAV29/DV5, TRAJ26)
CAAIPSGHNFVF

SEQ ID NO: 520348 - protein, 15 aa, Homo sapiens
  CDR3 for beta chain variable domain of TCR clone 260174 (TRBV19, TRBJ1-5)
CASSDSGPRNQPQHF

SEQ ID NO: 520349 - protein, 18 aa, Homo sapiens
  CDR3 for alpha chain variable domain of TCR clone 260175 (TRAV26-1, TRAJ27)
CIVRPSFNYNTNAGKSTI

SEQ ID NO: 520350 - protein, 14 aa, Homo sapiens
  CDR3 for beta chain variable domain of TCR clone 260175 (TRBV10-3, TRBJ1-6)
CAISVDGDESPLHF

SEQ ID NO: 520351 - protein, 13 aa, Homo sapiens
  CDR3 for alpha chain variable domain of TCR clone 260176 (TRAV1-2, TRAJ9)
CAVLNTGGFKTIF

SEQ ID NO: 520352 - protein, 16 aa, Homo sapiens
  CDR3 for beta chain variable domain of TCR clone 260176 (TRBV7-9, TRBJ2-1)
CASSDVAGGSYNEQFF

SEQ ID NO: 520353 - protein, 12 aa, Homo sapiens
  CDR3 for alpha chain variable domain of TCR clone 260177 (TRAV21, TRAJ23)
CAVMLQGGTLIF

SEQ ID NO: 520354 - protein, 14 aa, Homo sapiens
  CDR3 for beta chain variable domain of TCR clone 260177 (TRBV7-9, TRBJ1-4)
CAITEGEANEKLFL

SEQ ID NO: 520355 - protein, 13 aa, Homo sapiens
  CDR3 for alpha chain variable domain of TCR clone 260178 (TRAV16, TRAJ27)
CALSGGNAGKSTF

SEQ ID NO: 520356 - protein, 13 aa, Homo sapiens
  CDR3 for beta chain variable domain of TCR clone 260178 (TRBV7-3, TRBJ1-1)
CASSQDWGAEPFF

SEQ ID NO: 520357 - protein, 12 aa, Homo sapiens
  CDR3 for alpha chain variable domain of TCR clone 260179 (TRAV1-1, TRAJ12)
CAVGDSSSKLIF

SEQ ID NO: 520358 - protein, 14 aa, Homo sapiens
  CDR3 for beta chain variable domain of TCR clone 260179 (TRBV20-1, TRBJ2-7)
CSAPELAGVGEQYF

SEQ ID NO: 520359 - protein, 11 aa, Homo sapiens
  CDR3 for alpha chain variable domain of TCR clone 260180 (TRAV8-3, TRAJ42)
NYGGSQGNLIF

SEQ ID NO: 520360 - protein, 17 aa, Homo sapiens
  CDR3 for beta chain variable domain of TCR clone 260180 (TRBV6-5, TRBJ2-2)
CASSYPTSGGNTGELFF

SEQ ID NO: 520361 - protein, 12 aa, Homo sapiens
  CDR3 for alpha chain variable domain of TCR clone 260181 (TRAV12-1, TRAJ40)
CVFYSGTYKYIF

SEQ ID NO: 520362 - protein, 11 aa, Homo sapiens
  CDR3 for beta chain variable domain of TCR clone 260181 (TRBV11-2, TRBJ2-2)
CASSLPGELFF

SEQ ID NO: 520363 - protein, 12 aa, Homo sapiens
  CDR3 for alpha chain variable domain of TCR clone 260182 (TRAV12-1, TRAJ23)
CVVNIPGGKLIF

SEQ ID NO: 520364 - protein, 14 aa, Homo sapiens
  CDR3 for beta chain variable domain of TCR clone 260182 (TRBV20-1, TRBJ2-1)
CSPNDEASYNEQFF

SEQ ID NO: 520365 - protein, 14 aa, Homo sapiens
  CDR3 for alpha chain variable domain of TCR clone 260183 (TRAV17, TRAJ31)
CATVLRNNNARLMF

SEQ ID NO: 520366 - protein, 14 aa, Homo sapiens
  CDR3 for beta chain variable domain of TCR clone 260183 (TRBV12-3, TRBJ2-5)
CASSLWQKQETQYF

SEQ ID NO: 520367 - protein, 15 aa, Homo sapiens
  CDR3 for alpha chain variable domain of TCR clone 260184 (TRAV17, TRAJ28)
CATVDSGAGSYQLTF

SEQ ID NO: 520368 - protein, 15 aa, Homo sapiens
  CDR3 for beta chain variable domain of TCR clone 260184 (TRBV6-6, TRBJ2-7)
CASSYSYGGSYEQYF

SEQ ID NO: 520369 - protein, 13 aa, Homo sapiens
  CDR3 for alpha chain variable domain of TCR clone 260185 (TRAV17, TRAJ5)
CAPMDTGRRALTF

SEQ ID NO: 520370 - protein, 13 aa, Homo sapiens
  CDR3 for beta chain variable domain of TCR clone 260185 (TRBV7-9, TRBJ1-2)
CPSSLKQNYGYTF

SEQ ID NO: 520371 - protein, 13 aa, Homo sapiens
  CDR3 for alpha chain variable domain of TCR clone 260186 (TRAV17, TRAJ39)
CATEDNAGNMLTF

SEQ ID NO: 520372 - protein, 14 aa, Homo sapiens
  CDR3 for beta chain variable domain of TCR clone 260186 (TRBV19, TRBJ1-2)
CASSPTGGAGGCAF

SEQ ID NO: 520373 - protein, 15 aa, Homo sapiens
  CDR3 for alpha chain variable domain of TCR clone 260187 (TRAV3, TRAJ3)
CAVRDRDSSSSKIIF

SEQ ID NO: 520374 - protein, 12 aa, Homo sapiens
  CDR3 for beta chain variable domain of TCR clone 260187 (TRBV29-1, TRBJ2-3)
CSVTGGADTQYF

SEQ ID NO: 520375 - protein, 15 aa, Homo sapiens
  CDR3 for alpha chain variable domain of TCR clone 260188 (TRAV8-3, TRAJ27)
CAVGPSKTNAGKSTF

SEQ ID NO: 520376 - protein, 15 aa, Homo sapiens
  CDR3 for beta chain variable domain of TCR clone 260188 (TRBV7-3, TRBJ2-1)
CQQLKFGRGAKEQFF

SEQ ID NO: 520377 - protein, 15 aa, Homo sapiens
  CDR3 for alpha chain variable domain of TCR clone 260189 (TRAV8-3, TRAJ45)
CASSYSGGGADGLTF

SEQ ID NO: 520378 - protein, 13 aa, Homo sapiens
  CDR3 for beta chain variable domain of TCR clone 260189 (TRBV24-1, TRBJ2-1)
CATSAGPYNEQFF

SEQ ID NO: 520379 - protein, 13 aa, Homo sapiens
  CDR3 for alpha chain variable domain of TCR clone 260190 (TRAV3, TRAJ21)
CAVREPDFNKFYF

SEQ ID NO: 520380 - protein, 12 aa, Homo sapiens
  CDR3 for beta chain variable domain of TCR clone 260190 (TRBV11-2, TRBJ2-2)
CASSLGGGELFL

SEQ ID NO: 520381 - protein, 14 aa, Homo sapiens
  CDR3 for alpha chain variable domain of TCR clone 260191 (TRAV12-3, TRAJ53)
CGATSGGSNYKLTF

SEQ ID NO: 520382 - protein, 13 aa, Homo sapiens
  CDR3 for beta chain variable domain of TCR clone 260191 (TRBV19, TRBJ1-5)
CASSTQDGKPQHF

SEQ ID NO: 520383 - protein, 14 aa, Homo sapiens
  CDR3 for alpha chain variable domain of TCR clone 260192 (TRAV8-3, TRAJ4)
CAVGVAGGYNKLIF

SEQ ID NO: 520384 - protein, 15 aa, Homo sapiens
  CDR3 for beta chain variable domain of TCR clone 260192 (TRBV6-5, TRBJ2-1)
CASSYDAGAGNDQFF

SEQ ID NO: 520385 - protein, 11 aa, Homo sapiens
  CDR3 for alpha chain variable domain of TCR clone 260193 (TRAV27, TRAJ47)
SIVEYGNKMVF

SEQ ID NO: 520386 - protein, 18 aa, Homo sapiens
  CDR3 for beta chain variable domain of TCR clone 260193 (TRBV2, TRBJ2-1)
CASRGLAGGPRTYNEQFF

SEQ ID NO: 520387 - protein, 14 aa, Homo sapiens
  CDR3 for alpha chain variable domain of TCR clone 260194 (TRAV8-1, TRAJ24)
CAVNAAASWGKLQF

SEQ ID NO: 520388 - protein, 16 aa, Homo sapiens
  CDR3 for beta chain variable domain of TCR clone 260194 (TRBV4-3, TRBJ2-1)
CASSPALDRGVNEQFF

SEQ ID NO: 520389 - protein, 13 aa, Homo sapiens
  CDR3 for alpha chain variable domain of TCR clone 260195 (TRAV13-1, TRAJ49)
CVAMLYTGNQFYF

SEQ ID NO: 520390 - protein, 15 aa, Homo sapiens
  CDR3 for beta chain variable domain of TCR clone 260195 (TRBV12-4, TRBJ1-5)
CASTRGSGFGQPQHF

SEQ ID NO: 520391 - protein, 12 aa, Homo sapiens
  CDR3 for alpha chain variable domain of TCR clone 260196 (TRAV12-2, TRAJ9)
CAVYNGGFKTIF

SEQ ID NO: 520392 - protein, 16 aa, Homo sapiens
  CDR3 for beta chain variable domain of TCR clone 260196 (TRBV7-6, TRBJ2-1)
CASSAPGPSSYNEQFF

SEQ ID NO: 520393 - protein, 18 aa, Homo sapiens
  CDR3 for alpha chain variable domain of TCR clone 260197 (TRAV13-1, TRAJ52)
CAAKNPNAGGTSYGKLTF

SEQ ID NO: 520394 - protein, 12 aa, Homo sapiens
  CDR3 for beta chain variable domain of TCR clone 260197 (TRBV12-4, TRBJ2-1)
CASSPGRNEQFF

SEQ ID NO: 520395 - protein, 16 aa, Homo sapiens
  CDR3 for alpha chain variable domain of TCR clone 260198 (TRAV3, TRAJ6)
CAVRRPQGRRKLHTYI

SEQ ID NO: 520396 - protein, 20 aa, Homo sapiens
  CDR3 for beta chain variable domain of TCR clone 260198 (TRBV28, TRBJ2-1)
CASTPIGRSPGLAGGNEQFF

SEQ ID NO: 520397 - protein, 16 aa, Homo sapiens
  CDR3 for alpha chain variable domain of TCR clone 260199 (TRAV23/DV6, TRAJ3)
CSKHAVSYSSASKIIF

SEQ ID NO: 520398 - protein, 16 aa, Homo sapiens
  CDR3 for beta chain variable domain of TCR clone 260199 (TRBV13, TRBJ2-2)
CASSPRTGEHTGELFF

SEQ ID NO: 520399 - protein, 15 aa, Homo sapiens
  CDR3 for alpha chain variable domain of TCR clone 260200 (TRAV3, TRAJ17)
CAVRDTGAAGNKQTF

SEQ ID NO: 520400 - protein, 14 aa, Homo sapiens
  CDR3 for beta chain variable domain of TCR clone 260200 (TRBV6-3, TRBJ1-1)
CASSNLLPGAEAFF

SEQ ID NO: 520401 - protein, 13 aa, Homo sapiens
  CDR3 for alpha chain variable domain of TCR clone 260201 (TRAV8-1, TRAJ30)
CAVIMNRDDKIIF

SEQ ID NO: 520402 - protein, 14 aa, Homo sapiens
  CDR3 for beta chain variable domain of TCR clone 260201 (TRBV7-2, TRBJ1-6)
CATSLQGANSPLHF

SEQ ID NO: 520403 - protein, 14 aa, Homo sapiens
  CDR3 for alpha chain variable domain of TCR clone 260202 (TRAV21, TRAJ35)
CAVMPIGFGNVLHC

SEQ ID NO: 520404 - protein, 15 aa, Homo sapiens
  CDR3 for beta chain variable domain of TCR clone 260202 (TRBV7-2, TRBJ2-1)
CASTHGTGIYNEQFF

SEQ ID NO: 520405 - protein, 16 aa, Homo sapiens
  CDR3 for alpha chain variable domain of TCR clone 260203 (TRAV12-3, TRAJ37)
CAMSAYSSSNTGKLVF

SEQ ID NO: 520406 - protein, 16 aa, Homo sapiens
  CDR3 for beta chain variable domain of TCR clone 260203 (TRBV7-6, TRBJ2-1)
CASSAPGPSSYNEQFF

SEQ ID NO: 520407 - protein, 14 aa, Homo sapiens
  CDR3 for alpha chain variable domain of TCR clone 260204 (TRAV13-1, TRAJ35)
CAASNGGFGNVLHC

SEQ ID NO: 520408 - protein, 14 aa, Homo sapiens
  CDR3 for beta chain variable domain of TCR clone 260204 (TRBV20-1, TRBJ2-2)
CSAPDTANTGELFF

SEQ ID NO: 520409 - protein, 13 aa, Homo sapiens
  CDR3 for alpha chain variable domain of TCR clone 260205 (TRAV26-2, TRAJ43)
CILRAVNNNDMRF

SEQ ID NO: 520410 - protein, 11 aa, Homo sapiens
  CDR3 for beta chain variable domain of TCR clone 260205 (TRBV29-1, TRBJ2-5)
CSEDRTGTQYF

SEQ ID NO: 520411 - protein, 18 aa, Homo sapiens
  CDR3 for alpha chain variable domain of TCR clone 260206 (TRAV3, TRAJ17)
CAVRARRGGRSCRQQPNF

SEQ ID NO: 520412 - protein, 14 aa, Homo sapiens
  CDR3 for beta chain variable domain of TCR clone 260206 (TRBV4-1, TRBJ2-2)
CASSQAVNTGELFF

SEQ ID NO: 520413 - protein, 15 aa, Homo sapiens
  CDR3 for alpha chain variable domain of TCR clone 260207 (TRAV26-1, TRAJ22)
CIVRVSFWFCKATDL

SEQ ID NO: 520414 - protein, 13 aa, Homo sapiens
  CDR3 for beta chain variable domain of TCR clone 260207 (TRBV7-9, TRBJ1-2)
CGSSLKQNYGYTF

SEQ ID NO: 520415 - protein, 11 aa, Homo sapiens
  CDR3 for alpha chain variable domain of TCR clone 260208 (TRAV2, TRAJ13)
CASGGYQKVTF

SEQ ID NO: 520416 - protein, 16 aa, Homo sapiens
  CDR3 for beta chain variable domain of TCR clone 260208 (TRBV4-2, TRBJ2-7)
CASSQEELAGTYEQYF

SEQ ID NO: 520417 - protein, 13 aa, Homo sapiens
  CDR3 for alpha chain variable domain of TCR clone 260209 (TRAV12-2, TRAJ20)
CAVNRFDDDKLSF

SEQ ID NO: 520418 - protein, 12 aa, Homo sapiens
  CDR3 for beta chain variable domain of TCR clone 260209 (TRBV19, TRBJ2-1)
CASSQISNEQFF

SEQ ID NO: 520419 - protein, 16 aa, Homo sapiens
  CDR3 for alpha chain variable domain of TCR clone 260210 (TRAV3, TRAJ37)
CAVRPPGSGNTVKLIF

SEQ ID NO: 520420 - protein, 16 aa, Homo sapiens
  CDR3 for beta chain variable domain of TCR clone 260210 (TRBV9, TRBJ1-2)
CASSVEEKVSPYGYTF

SEQ ID NO: 520421 - protein, 13 aa, Homo sapiens
  CDR3 for alpha chain variable domain of TCR clone 260211 (TRAV21, TRAJ57)
CAVIEGGSEKLVF

SEQ ID NO: 520422 - protein, 14 aa, Homo sapiens
  CDR3 for beta chain variable domain of TCR clone 260211 (TRBV12-5, TRBJ2-5)
CASGSRTHQEAQYF

SEQ ID NO: 520423 - protein, 13 aa, Homo sapiens
  CDR3 for alpha chain variable domain of TCR clone 260212 (TRAV8-3, TRAJ48)
CAVVPFGHEKLTF

SEQ ID NO: 520424 - protein, 14 aa, Homo sapiens
  CDR3 for beta chain variable domain of TCR clone 260212 (TRBV18, TRBJ2-7)
CASSPRGGAYEQYF

SEQ ID NO: 520425 - protein, 16 aa, Homo sapiens
  CDR3 for alpha chain variable domain of TCR clone 260213 (TRAV30, TRAJ24)
CGTEIVDADSWGKFQF

SEQ ID NO: 520426 - protein, 13 aa, Homo sapiens
  CDR3 for beta chain variable domain of TCR clone 260213 (TRBV15, TRBJ1-6)
CATAGGLNSPLHF

SEQ ID NO: 520427 - protein, 11 aa, Homo sapiens
  CDR3 for alpha chain variable domain of TCR clone 260214 (TRAV2, TRAJ13)
CASVGYQKVTF

SEQ ID NO: 520428 - protein, 16 aa, Homo sapiens
  CDR3 for beta chain variable domain of TCR clone 260214 (TRBV6-1, TRBJ2-5)
CASSETLDRGAETKYF

SEQ ID NO: 520429 - protein, 14 aa, Homo sapiens
  CDR3 for alpha chain variable domain of TCR clone 260215 (TRAV8-3, TRAJ11)
CAVGSNSGYSTLTF

SEQ ID NO: 520430 - protein, 15 aa, Homo sapiens
  CDR3 for beta chain variable domain of TCR clone 260215 (TRBV7-2, TRBJ2-3)
CASSSTGLETDTQYF

SEQ ID NO: 520431 - protein, 15 aa, Homo sapiens
  CDR3 for alpha chain variable domain of TCR clone 260216 (TRAV1-2, TRAJ26)
CAVRDLITMVRILSL

SEQ ID NO: 520432 - protein, 13 aa, Homo sapiens
  CDR3 for beta chain variable domain of TCR clone 260216 (TRBV19, TRBJ2-7)
CASSPRQSYEQYF

SEQ ID NO: 520433 - protein, 12 aa, Homo sapiens
  CDR3 for alpha chain variable domain of TCR clone 260217 (TRAV1-1, TRAJ39)
CAVPVVGNMLTF

SEQ ID NO: 520434 - protein, 15 aa, Homo sapiens
  CDR3 for beta chain variable domain of TCR clone 260217 (TRBV18, TRBJ2-1)
CASSPPSASYNEQFF

SEQ ID NO: 520435 - protein, 15 aa, Homo sapiens
  CDR3 for alpha chain variable domain of TCR clone 260218 (TRAV3, TRAJ4)
CAVRDGTGGYNKLIF

SEQ ID NO: 520436 - protein, 15 aa, Homo sapiens
  CDR3 for beta chain variable domain of TCR clone 260218 (TRBV27, TRBJ2-7)
CASTPDQGRLYEQYF

SEQ ID NO: 520437 - protein, 17 aa, Homo sapiens
  CDR3 for alpha chain variable domain of TCR clone 260219 (TRAV19, TRAJ28)
CALSEASSGAGSYQLTF

SEQ ID NO: 520438 - protein, 13 aa, Homo sapiens
  CDR3 for beta chain variable domain of TCR clone 260219 (TRBV29-1, TRBJ2-3)
CSVEAGGTDTQYF

SEQ ID NO: 520439 - protein, 12 aa, Homo sapiens
  CDR3 for alpha chain variable domain of TCR clone 260220 (TRAV25, TRAJ53)
CQSVGSNYKLTF

SEQ ID NO: 520440 - protein, 15 aa, Homo sapiens
  CDR3 for beta chain variable domain of TCR clone 260220 (TRBV5-1, TRBJ2-2)
CASSWTSPNTGELFF

SEQ ID NO: 520441 - protein, 14 aa, Homo sapiens
  CDR3 for alpha chain variable domain of TCR clone 260221 (TRAV1-2, TRAJ16)
CAVNRFSDGQKLLF

SEQ ID NO: 520442 - protein, 17 aa, Homo sapiens
  CDR3 for beta chain variable domain of TCR clone 260221 (TRBV28, TRBJ2-5)
RASSRQGGLAGAETQYF

SEQ ID NO: 520443 - protein, 16 aa, Homo sapiens
  CDR3 for alpha chain variable domain of TCR clone 260222 (TRAV13-1, TRAJ18)
CAASRMGGSTLGRLDF

SEQ ID NO: 520444 - protein, 16 aa, Homo sapiens
  CDR3 for beta chain variable domain of TCR clone 260222 (TRBV27, TRBJ1-1)
CASSSRGRTGYTEAFF

SEQ ID NO: 520445 - protein, 10 aa, Homo sapiens
  CDR3 for alpha chain variable domain of TCR clone 260223 (TRAV2, TRAJ34)
CAVGNDKLIF

SEQ ID NO: 520446 - protein, 15 aa, Homo sapiens
  CDR3 for beta chain variable domain of TCR clone 260223 (TRBV3-1, TRBJ2-2)
CASSQDWTRAGELFF

SEQ ID NO: 520447 - protein, 13 aa, Homo sapiens
  CDR3 for alpha chain variable domain of TCR clone 260224 (TRAV8-3, TRAJ36)
CAVGATGANNLFF

SEQ ID NO: 520448 - protein, 16 aa, Homo sapiens
  CDR3 for beta chain variable domain of TCR clone 260224 (TRBV5-1, TRBJ2-7)
CASSLVAGGPSGEQYF

SEQ ID NO: 520449 - protein, 22 aa, Homo sapiens
  CDR3 for alpha chain variable domain of TCR clone 260225 (TRAV1-1, TRAJ30)
CAVRDQTEMTRSSLEKGHDFIF

SEQ ID NO: 520450 - protein, 11 aa, Homo sapiens
  CDR3 for beta chain variable domain of TCR clone 260225 (TRBV28, TRBJ2-6)
CHPGWANVLTF

SEQ ID NO: 520451 - protein, 14 aa, Homo sapiens
  CDR3 for alpha chain variable domain of TCR clone 260226 (TRAV13-1, TRAJ35)
CAASKGGFGNVLHC

SEQ ID NO: 520452 - protein, 17 aa, Homo sapiens
  CDR3 for beta chain variable domain of TCR clone 260226 (TRBV5-1, TRBJ2-2)
CASSEKPNGANTGEPFF

SEQ ID NO: 520453 - protein, 17 aa, Homo sapiens
  CDR3 for alpha chain variable domain of TCR clone 260227 (TRAV3, TRAJ6)
CAVSRRTDTGGSYIPTF

SEQ ID NO: 520454 - protein, 17 aa, Homo sapiens
  CDR3 for beta chain variable domain of TCR clone 260227 (TRBV4-1, TRBJ2-3)
CASSQGYVSGGTDTQYF

SEQ ID NO: 520455 - protein, 11 aa, Homo sapiens
  CDR3 for alpha chain variable domain of TCR clone 260228 (TRAV13-1, TRAJ30)
CAASRDDKIIF

SEQ ID NO: 520456 - protein, 15 aa, Homo sapiens
  CDR3 for beta chain variable domain of TCR clone 260228 (TRBV18, TRBJ1-1)
CASSPSIWVNTEAFF

SEQ ID NO: 520457 - protein, 13 aa, Homo sapiens
  CDR3 for alpha chain variable domain of TCR clone 260229 (TRAV12-3, TRAJ13)
CAMSSGVYQKVTF

SEQ ID NO: 520458 - protein, 13 aa, Homo sapiens
  CDR3 for beta chain variable domain of TCR clone 260229 (TRBV20-1, TRBJ1-1)
CSAPPGGHTEAFF

SEQ ID NO: 520459 - protein, 17 aa, Homo sapiens
  CDR3 for alpha chain variable domain of TCR clone 260230 (TRAV3, TRAJ42)
CAVRARDYGGSQGNLIF

SEQ ID NO: 520460 - protein, 12 aa, Homo sapiens
  CDR3 for beta chain variable domain of TCR clone 260230 (TRBV29-1, TRBJ2-2)
CSVDKYTGELFF

SEQ ID NO: 520461 - protein, 14 aa, Homo sapiens
  CDR3 for alpha chain variable domain of TCR clone 260231 (TRAV1-2, TRAJ16)
CAVNRFSDGQKLLF

SEQ ID NO: 520462 - protein, 14 aa, Homo sapiens
  CDR3 for beta chain variable domain of TCR clone 260231 (TRBV12-4, TRBJ1-2)
CASTHGTSNYGYTL

SEQ ID NO: 520463 - protein, 14 aa, Homo sapiens
  CDR3 for alpha chain variable domain of TCR clone 260232 (TRAV12-2, TRAJ13)
CAVKKTGGYQTVTF

SEQ ID NO: 520464 - protein, 16 aa, Homo sapiens
  CDR3 for beta chain variable domain of TCR clone 260232 (TRBV12-4, TRBJ2-5)
CASSFFVRGRQETQYF

SEQ ID NO: 520465 - protein, 15 aa, Homo sapiens
  CDR3 for alpha chain variable domain of TCR clone 260233 (TRAV20, TRAJ6)
CAVRLQSGGSYIPTF

SEQ ID NO: 520466 - protein, 14 aa, Homo sapiens
  CDR3 for beta chain variable domain of TCR clone 260233 (TRBV12-4, TRBJ2-7)
CASSGSGGWYEQYF

SEQ ID NO: 520467 - protein, 13 aa, Homo sapiens
  CDR3 for alpha chain variable domain of TCR clone 260234 (TRAV12-1, TRAJ39)
CVVNYNAGNKLTF

SEQ ID NO: 520468 - protein, 14 aa, Homo sapiens
  CDR3 for beta chain variable domain of TCR clone 260234 (TRBV27, TRBJ2-3)
CASSPLGTTDTQYF

SEQ ID NO: 520469 - protein, 14 aa, Homo sapiens
  CDR3 for alpha chain variable domain of TCR clone 260235 (TRAV12-2, TRAJ17)
CAVLFKAAGNTLTF

SEQ ID NO: 520470 - protein, 14 aa, Homo sapiens
  CDR3 for beta chain variable domain of TCR clone 260235 (TRBV4-1, TRBJ2-2)
CASSQAVNTGELFF

SEQ ID NO: 520471 - protein, 12 aa, Homo sapiens
  CDR3 for alpha chain variable domain of TCR clone 260236 (TRAV12-2, TRAJ16)
CAVAPDGQKLLF

SEQ ID NO: 520472 - protein, 16 aa, Homo sapiens
  CDR3 for beta chain variable domain of TCR clone 260236 (TRBV11-2, TRBJ1-2)
CASSLDRGGNNYGYTF

SEQ ID NO: 520473 - protein, 13 aa, Homo sapiens
  CDR3 for alpha chain variable domain of TCR clone 260237 (TRAV8-6, TRAJ49)
CAVITNTGNQFYF

SEQ ID NO: 520474 - protein, 15 aa, Homo sapiens
  CDR3 for beta chain variable domain of TCR clone 260237 (TRBV20-1, TRBJ2-7)
CSARVPAAYFYEQYF

SEQ ID NO: 520475 - protein, 11 aa, Homo sapiens
  CDR3 for alpha chain variable domain of TCR clone 260238 (TRAV12-2, TRAJ29)
CAVTLRSPLVF

SEQ ID NO: 520476 - protein, 15 aa, Homo sapiens
  CDR3 for beta chain variable domain of TCR clone 260238 (TRBV18, TRBJ1-5)
CASSETGGNNQPQHF

SEQ ID NO: 520477 - protein, 12 aa, Homo sapiens
  CDR3 for alpha chain variable domain of TCR clone 260239 (TRAV12-1, TRAJ6)
CVVSERSYITTF

SEQ ID NO: 520478 - protein, 21 aa, Homo sapiens
  CDR3 for beta chain variable domain of TCR clone 260239 (TRBV7-3, TRBJ2-1)
GGTQPCISVPAAYGLAGAQFF

SEQ ID NO: 520479 - protein, 13 aa, Homo sapiens
  CDR3 for alpha chain variable domain of TCR clone 260240 (TRAV35, TRAJ57)
CWSPQGGSEKLVF

SEQ ID NO: 520480 - protein, 15 aa, Homo sapiens
  CDR3 for beta chain variable domain of TCR clone 260240 (TRBV2, TRBJ2-1)
CASSEEREGDNEQFF

SEQ ID NO: 520481 - protein, 12 aa, Homo sapiens
  CDR3 for alpha chain variable domain of TCR clone 260241 (TRAV8-3, TRAJ26)
CAGDNYGQNFVF

SEQ ID NO: 520482 - protein, 18 aa, Homo sapiens
  CDR3 for beta chain variable domain of TCR clone 260241 (TRBV12-4, TRBJ2-2)
CATSLVAGTRGRTGELFF

SEQ ID NO: 520483 - protein, 13 aa, Homo sapiens
  CDR3 for alpha chain variable domain of TCR clone 260242 (TRAV22, TRAJ29)
CAVGGSGNPPLVF

SEQ ID NO: 520484 - protein, 13 aa, Homo sapiens
  CDR3 for beta chain variable domain of TCR clone 260242 (TRBV4-2, TRBJ1-1)
CASSQAGNTEAFF

SEQ ID NO: 520485 - protein, 14 aa, Homo sapiens
  CDR3 for alpha chain variable domain of TCR clone 260243 (TRAV12-2, TRAJ17)
CAVLFKAAGNKLTF

SEQ ID NO: 520486 - protein, 14 aa, Homo sapiens
  CDR3 for beta chain variable domain of TCR clone 260243 (TRBV12-5, TRBJ2-5)
CAGGSRAHQETQYF

SEQ ID NO: 520487 - protein, 13 aa, Homo sapiens
  CDR3 for alpha chain variable domain of TCR clone 260244 (TRAV12-3, TRAJ47)
CAMKKEYGNKLVF

SEQ ID NO: 520488 - protein, 16 aa, Homo sapiens
  CDR3 for beta chain variable domain of TCR clone 260244 (TRBV3-1, TRBJ2-6)
CASSLTWVSGANALTF

SEQ ID NO: 520489 - protein, 12 aa, Homo sapiens
  CDR3 for alpha chain variable domain of TCR clone 260245 (TRAV13-1, TRAJ21)
CAAKEGFNKSYF

SEQ ID NO: 520490 - protein, 17 aa, Homo sapiens
  CDR3 for beta chain variable domain of TCR clone 260245 (TRBV20-1, TRBJ2-1)
CSASSSGLAGSYNEQFF

SEQ ID NO: 520491 - protein, 11 aa, Homo sapiens
  CDR3 for alpha chain variable domain of TCR clone 260246 (TRAV30, TRAJ24)
WMLTAGGKFRF

SEQ ID NO: 520492 - protein, 14 aa, Homo sapiens
  CDR3 for beta chain variable domain of TCR clone 260246 (TRBV12-5, TRBJ2-5)
CASGSRTHQETQYF

SEQ ID NO: 520493 - protein, 15 aa, Homo sapiens
  CDR3 for alpha chain variable domain of TCR clone 260247 (TRAV12-2, TRAJ53)
CAVNGGGGSNYKLTF

SEQ ID NO: 520494 - protein, 17 aa, Homo sapiens
  CDR3 for beta chain variable domain of TCR clone 260247 (TRBV7-3, TRBJ2-3)
CASSLRKRVRGADTQYF

SEQ ID NO: 520495 - protein, 17 aa, Homo sapiens
  CDR3 for alpha chain variable domain of TCR clone 260248 (TRAV4, )
CLVDIQNPDPAVYQLRD

SEQ ID NO: 520496 - protein, 15 aa, Homo sapiens
  CDR3 for beta chain variable domain of TCR clone 260248 (TRBV20-1, TRBJ1-5)
CSAKVGRVVSQPQHF

SEQ ID NO: 520497 - protein, 14 aa, Homo sapiens
  CDR3 for alpha chain variable domain of TCR clone 260249 (TRAV26-1, TRAJ45)
FIEVTGGGADGLTF

SEQ ID NO: 520498 - protein, 15 aa, Homo sapiens
  CDR3 for beta chain variable domain of TCR clone 260249 (TRBV6-5, TRBJ2-1)
CASSYDAGAGNEQFF

SEQ ID NO: 520499 - protein, 14 aa, Homo sapiens
  CDR3 for alpha chain variable domain of TCR clone 260250 (TRAV17, TRAJ29)
CATDSNSGNTPLVF

SEQ ID NO: 520500 - protein, 17 aa, Homo sapiens
  CDR3 for beta chain variable domain of TCR clone 260250 (TRBV5-4, TRBJ2-1)
CASSSAGGRGPYNEQFF

SEQ ID NO: 520501 - protein, 13 aa, Homo sapiens
  CDR3 for alpha chain variable domain of TCR clone 260251 (TRAV29/DV5, TRAJ31)
CAASRNNNARLMF

SEQ ID NO: 520502 - protein, 14 aa, Homo sapiens
  CDR3 for beta chain variable domain of TCR clone 260251 (TRBV6-1, TRBJ2-6)
CASQQGAGANVLTF

SEQ ID NO: 520503 - protein, 18 aa, Homo sapiens
  CDR3 for alpha chain variable domain of TCR clone 260252 (TRAV13-1, TRAJ52)
CAAKNPNAGGTSYGKLTF

SEQ ID NO: 520504 - protein, 15 aa, Homo sapiens
  CDR3 for beta chain variable domain of TCR clone 260252 (TRBV2, TRBJ2-1)
CASSELAGSYNEQFF

SEQ ID NO: 520505 - protein, 13 aa, Homo sapiens
  CDR3 for alpha chain variable domain of TCR clone 260253 (TRAV17, TRAJ53)
CATDAGSNYKLTF

SEQ ID NO: 520506 - protein, 15 aa, Homo sapiens
  CDR3 for beta chain variable domain of TCR clone 260253 (TRBV6-3, TRBJ2-7)
CASSSPGTVFYEQYF

SEQ ID NO: 520507 - protein, 15 aa, Homo sapiens
  CDR3 for alpha chain variable domain of TCR clone 260254 (TRAV8-3, TRAJ40)
CADPSLGSGTYRYIF

SEQ ID NO: 520508 - protein, 16 aa, Homo sapiens
  CDR3 for beta chain variable domain of TCR clone 260254 (TRBV7-3, TRBJ2-3)
CASSLSGYRPEDTQYF

SEQ ID NO: 520509 - protein, 23 aa, Homo sapiens
  CDR3 for alpha chain variable domain of TCR clone 260255 (TRAV13-2, TRAJ6)
CAEEVHQEEATYLHLEEEPALLF

SEQ ID NO: 520510 - protein, 13 aa, Homo sapiens
  CDR3 for beta chain variable domain of TCR clone 260255 (TRBV9, TRBJ2-7)
CASSVAEYYEQYF

SEQ ID NO: 520511 - protein, 13 aa, Homo sapiens
  CDR3 for alpha chain variable domain of TCR clone 260256 (TRAV12-1, TRAJ3)
CVVNPRGASKISF

SEQ ID NO: 520512 - protein, 13 aa, Homo sapiens
  CDR3 for beta chain variable domain of TCR clone 260256 (TRBV28, TRBJ1-5)
CASSDRGNQTQHF

SEQ ID NO: 520513 - protein, 15 aa, Homo sapiens
  CDR3 for alpha chain variable domain of TCR clone 260257 (TRAV12-1, TRAJ37)
CVVNLPTSNTGKLIF

SEQ ID NO: 520514 - protein, 14 aa, Homo sapiens
  CDR3 for beta chain variable domain of TCR clone 260257 (TRBV11-1, TRBJ2-7)
CASSFRQGSYEQYF

SEQ ID NO: 520515 - protein, 14 aa, Homo sapiens
  CDR3 for alpha chain variable domain of TCR clone 260258 (TRAV27, TRAJ36)
CAGPPKRGANNLFF

SEQ ID NO: 520516 - protein, 17 aa, Homo sapiens
  CDR3 for beta chain variable domain of TCR clone 260258 (TRBV20-1, TRBJ2-2)
CSASGSGQGGLTGELFF

SEQ ID NO: 520517 - protein, 13 aa, Homo sapiens
  CDR3 for alpha chain variable domain of TCR clone 260259 (TRAV2, TRAJ15)
CSVASQAGTALIF

SEQ ID NO: 520518 - protein, 17 aa, Homo sapiens
  CDR3 for beta chain variable domain of TCR clone 260259 (TRBV20-1, TRBJ2-2)
CSASGSGQGGLTGELFF

SEQ ID NO: 520519 - protein, 12 aa, Homo sapiens
  CDR3 for alpha chain variable domain of TCR clone 260260 (TRAV13-1, TRAJ53)
AASGGSNYKLTF

SEQ ID NO: 520520 - protein, 17 aa, Homo sapiens
  CDR3 for beta chain variable domain of TCR clone 260260 (TRBV20-1, TRBJ2-1)
CSASSSGLAGSYNEQFF

SEQ ID NO: 520521 - protein, 14 aa, Homo sapiens
  CDR3 for alpha chain variable domain of TCR clone 260261 (TRAV12-3, TRAJ57)
CAMSAWGGSKKLVF

SEQ ID NO: 520522 - protein, 14 aa, Homo sapiens
  CDR3 for beta chain variable domain of TCR clone 260261 (TRBV18, TRBJ2-5)
CASSPGVSQETQYF

SEQ ID NO: 520523 - protein, 14 aa, Homo sapiens
  CDR3 for alpha chain variable domain of TCR clone 260262 (TRAV21, TRAJ15)
CAVSLNQAGTALIF

SEQ ID NO: 520524 - protein, 16 aa, Homo sapiens
  CDR3 for beta chain variable domain of TCR clone 260262 (TRBV4-2, TRBJ2-7)
CASSQEGLANSYEQYF

SEQ ID NO: 520525 - protein, 15 aa, Homo sapiens
  CDR3 for alpha chain variable domain of TCR clone 260263 (TRAV8-3, TRAJ23)
CAVGAVYNQGGKLIF

SEQ ID NO: 520526 - protein, 12 aa, Homo sapiens
  CDR3 for beta chain variable domain of TCR clone 260263 (TRBV11-2, TRBJ2-2)
CASSLGGGELFF

SEQ ID NO: 520527 - protein, 13 aa, Homo sapiens
  CDR3 for alpha chain variable domain of TCR clone 260264 (TRAV17, TRAJ40)
CATAPGGTYKYIY

SEQ ID NO: 520528 - protein, 12 aa, Homo sapiens
  CDR3 for beta chain variable domain of TCR clone 260264 (TRBV2, TRBJ1-5)
CASSENRTPQHF

SEQ ID NO: 520529 - protein, 13 aa, Homo sapiens
  CDR3 for alpha chain variable domain of TCR clone 260265 (TRAV21, TRAJ20)
CAVGLRADYKLSF

SEQ ID NO: 520530 - protein, 15 aa, Homo sapiens
  CDR3 for beta chain variable domain of TCR clone 260265 (TRBV29-1, TRBJ2-1)
CSVPTGLALYNEQFF

SEQ ID NO: 520531 - protein, 12 aa, Homo sapiens
  CDR3 for alpha chain variable domain of TCR clone 260266 (TRAV27, TRAJ13)
CAGVRGYQKVTF

SEQ ID NO: 520532 - protein, 16 aa, Homo sapiens
  CDR3 for beta chain variable domain of TCR clone 260266 (TRBV28, TRBJ2-1)
CVSSSSYSGGLNEQFF

SEQ ID NO: 520533 - protein, 15 aa, Homo sapiens
  CDR3 for alpha chain variable domain of TCR clone 260267 (TRAV3, TRAJ20)
SAVRDIKLSDYKLSF

SEQ ID NO: 520534 - protein, 15 aa, Homo sapiens
  CDR3 for beta chain variable domain of TCR clone 260267 (TRBV7-9, TRBJ1-6)
CASSSPGRGNSPLHF

SEQ ID NO: 520535 - protein, 13 aa, Homo sapiens
  CDR3 for alpha chain variable domain of TCR clone 260268 (TRAV13-1, TRAJ9)
CAARGTGGCKTIF

SEQ ID NO: 520536 - protein, 13 aa, Homo sapiens
  CDR3 for beta chain variable domain of TCR clone 260268 (TRBV12-4, TRBJ2-7)
CASSLERVREQYF

SEQ ID NO: 520537 - protein, 12 aa, Homo sapiens
  CDR3 for alpha chain variable domain of TCR clone 260269 (TRAV2, TRAJ9)
CAVGAGGFKTIF

SEQ ID NO: 520538 - protein, 16 aa, Homo sapiens
  CDR3 for beta chain variable domain of TCR clone 260269 (TRBV13, TRBJ2-2)
CVSSPRTGEHTGELFF

SEQ ID NO: 520539 - protein, 14 aa, Homo sapiens
  CDR3 for alpha chain variable domain of TCR clone 260270 (TRAV13-1, TRAJ24)
CAARRTDSWGKLQF

SEQ ID NO: 520540 - protein, 15 aa, Homo sapiens
  CDR3 for beta chain variable domain of TCR clone 260270 (TRBV6-1, TRBJ2-1)
CYSSAAVAGSVEQFF

SEQ ID NO: 520541 - protein, 15 aa, Homo sapiens
  CDR3 for alpha chain variable domain of TCR clone 260271 (TRAV25, TRAJ52)
CAGRPGGTSYGKLTF

SEQ ID NO: 520542 - protein, 13 aa, Homo sapiens
  CDR3 for beta chain variable domain of TCR clone 260271 (TRBV27, TRBJ1-1)
CASSLSIGAEAFF

SEQ ID NO: 520543 - protein, 11 aa, Homo sapiens
  CDR3 for alpha chain variable domain of TCR clone 260272 (TRAV2, TRAJ33)
CAVESNYQLIW

SEQ ID NO: 520544 - protein, 13 aa, Homo sapiens
  CDR3 for beta chain variable domain of TCR clone 260272 (TRBV27, TRBJ1-4)
RASSLMGDEKLFF

SEQ ID NO: 520545 - protein, 12 aa, Homo sapiens
  CDR3 for alpha chain variable domain of TCR clone 260273 (TRAV27, TRAJ41)
CAGRNSGYALNF

SEQ ID NO: 520546 - protein, 15 aa, Homo sapiens
  CDR3 for beta chain variable domain of TCR clone 260273 (TRBV6-3, TRBJ2-7)
CASSSPGTVCYEQYF

SEQ ID NO: 520547 - protein, 14 aa, Homo sapiens
  CDR3 for alpha chain variable domain of TCR clone 260274 (TRAV26-1, TRAJ38)
CTADNAGNNRKLIW

SEQ ID NO: 520548 - protein, 13 aa, Homo sapiens
  CDR3 for beta chain variable domain of TCR clone 260274 (TRBV4-2, TRBJ1-1)
CASSQAGNTEAFF

SEQ ID NO: 520549 - protein, 13 aa, Homo sapiens
  CDR3 for alpha chain variable domain of TCR clone 260275 (TRAV21, TRAJ20)
CAVGLRVDCKLSF

SEQ ID NO: 520550 - protein, 16 aa, Homo sapiens
  CDR3 for beta chain variable domain of TCR clone 260275 (TRBV7-8, TRBJ2-6)
CASRVGDSSGANVLTF

SEQ ID NO: 520551 - protein, 12 aa, Homo sapiens
  CDR3 for alpha chain variable domain of TCR clone 260276 (TRAV4, TRAJ9)
CLVPTGGFKTIF

SEQ ID NO: 520552 - protein, 15 aa, Homo sapiens
  CDR3 for beta chain variable domain of TCR clone 260276 (TRBV13, TRBJ1-1)
CASSPPTGGVGKAFF

SEQ ID NO: 520553 - protein, 13 aa, Homo sapiens
  CDR3 for alpha chain variable domain of TCR clone 260277 (TRAV26-1, TRAJ34)
CIVRVADTDKLIF

SEQ ID NO: 520554 - protein, 13 aa, Homo sapiens
  CDR3 for beta chain variable domain of TCR clone 260277 (TRBV10-3, TRBJ2-7)
CASKLAVNYEQYF

SEQ ID NO: 520555 - protein, 11 aa, Homo sapiens
  CDR3 for alpha chain variable domain of TCR clone 260278 (TRAV12-3, TRAJ27)
CAMANAGKSTF

SEQ ID NO: 520556 - protein, 14 aa, Homo sapiens
  CDR3 for beta chain variable domain of TCR clone 260278 (TRBV2, TRBJ2-7)
CASTVGRSSYEQYF

SEQ ID NO: 520557 - protein, 13 aa, Homo sapiens
  CDR3 for alpha chain variable domain of TCR clone 260279 (TRAV1-1, TRAJ15)
CAVVDQAGTALIF

SEQ ID NO: 520558 - protein, 14 aa, Homo sapiens
  CDR3 for beta chain variable domain of TCR clone 260279 (TRBV5-4, TRBJ1-6)
CASSLWSDNSPLHL

SEQ ID NO: 520559 - protein, 14 aa, Homo sapiens
  CDR3 for alpha chain variable domain of TCR clone 260280 (TRAV12-2, TRAJ13)
CAVKKTGGYQTVTF

SEQ ID NO: 520560 - protein, 13 aa, Homo sapiens
  CDR3 for beta chain variable domain of TCR clone 260280 (TRBV28, TRBJ2-7)
CASKAGGVYEQYF

SEQ ID NO: 520561 - protein, 13 aa, Homo sapiens
  CDR3 for alpha chain variable domain of TCR clone 260281 (TRAV3, TRAJ21)
CAVREPDFNKFYF

SEQ ID NO: 520562 - protein, 11 aa, Homo sapiens
  CDR3 for beta chain variable domain of TCR clone 260281 (TRBV28, TRBJ2-6)
CHPGWANVLTF

SEQ ID NO: 520563 - protein, 15 aa, Homo sapiens
  CDR3 for alpha chain variable domain of TCR clone 260282 (TRAV4, TRAJ39)
CLVGPNNNAGNMLTF

SEQ ID NO: 520564 - protein, 12 aa, Homo sapiens
  CDR3 for beta chain variable domain of TCR clone 260282 (TRBV11-2, TRBJ2-2)
CASSLPTGELFF

SEQ ID NO: 520565 - protein, 15 aa, Homo sapiens
  CDR3 for alpha chain variable domain of TCR clone 260283 (TRAV2, TRAJ9)
CAVEDRGTGGFKTVF

SEQ ID NO: 520566 - protein, 13 aa, Homo sapiens
  CDR3 for beta chain variable domain of TCR clone 260283 (TRBV19, TRBJ1-2)
CASSVPGQDGYTF

SEQ ID NO: 520567 - protein, 18 aa, Homo sapiens
  CDR3 for alpha chain variable domain of TCR clone 260284 (TRAV3, TRAJ17)
CAVRARRGGRSSRQQANF

SEQ ID NO: 520568 - protein, 14 aa, Homo sapiens
  CDR3 for beta chain variable domain of TCR clone 260284 (TRBV4-1, TRBJ2-2)
CASSQAVNTGELFF

SEQ ID NO: 520569 - protein, 12 aa, Homo sapiens
  CDR3 for alpha chain variable domain of TCR clone 260285 (TRAV13-2, TRAJ23)
CAERHKGGKLIF

SEQ ID NO: 520570 - protein, 12 aa, Homo sapiens
  CDR3 for beta chain variable domain of TCR clone 260285 (TRBV5-5, TRBJ2-5)
CASSYFGETQYF

SEQ ID NO: 520571 - protein, 13 aa, Homo sapiens
  CDR3 for alpha chain variable domain of TCR clone 260286 (TRAV21, TRAJ27)
CAARPGNAGKSTF

SEQ ID NO: 520572 - protein, 16 aa, Homo sapiens
  CDR3 for beta chain variable domain of TCR clone 260286 (TRBV5-1, TRBJ2-1)
CASSLDLGGPEGSSSS

SEQ ID NO: 520573 - protein, 11 aa, Homo sapiens
  CDR3 for alpha chain variable domain of TCR clone 260287 (TRAV12-3, TRAJ43)
CAMSVSNDMRF

SEQ ID NO: 520574 - protein, 14 aa, Homo sapiens
  CDR3 for beta chain variable domain of TCR clone 260287 (TRBV7-3, TRBJ2-1)
CASSLAGGTNEEFF

SEQ ID NO: 520575 - protein, 12 aa, Homo sapiens
  CDR3 for alpha chain variable domain of TCR clone 260288 (TRAV26-1, TRAJ26)
CIVFIYGQNFVF

SEQ ID NO: 520576 - protein, 16 aa, Homo sapiens
  CDR3 for beta chain variable domain of TCR clone 260288 (TRBV12-5, TRBJ2-5)
CASGPRTSGNQETQYF

SEQ ID NO: 520577 - protein, 11 aa, Homo sapiens
  CDR3 for alpha chain variable domain of TCR clone 260289 (TRAV1-1, TRAJ23)
CAVRQGGKLIF

SEQ ID NO: 520578 - protein, 15 aa, Homo sapiens
  CDR3 for beta chain variable domain of TCR clone 260289 (TRBV7-9, TRBJ2-7)
CASSLALAEAYEQYF

SEQ ID NO: 520579 - protein, 14 aa, Homo sapiens
  CDR3 for alpha chain variable domain of TCR clone 260290 (TRAV1-2, TRAJ8)
CAVREDTGFRKLVF

SEQ ID NO: 520580 - protein, 15 aa, Homo sapiens
  CDR3 for beta chain variable domain of TCR clone 260290 (TRBV6-3, TRBJ2-7)
WASSAPGTVFYEQYF

SEQ ID NO: 520581 - protein, 11 aa, Homo sapiens
  CDR3 for alpha chain variable domain of TCR clone 260291 (TRAV27, TRAJ57)
CAGVRRADLKS

SEQ ID NO: 520582 - protein, 15 aa, Homo sapiens
  CDR3 for beta chain variable domain of TCR clone 260291 (TRBV20-1, TRBJ2-7)
CSARDRVSGMDEQYF

SEQ ID NO: 520583 - protein, 12 aa, Homo sapiens
  CDR3 for alpha chain variable domain of TCR clone 260292 (TRAV3, TRAJ26)
CAVRDYGQNFVF

SEQ ID NO: 520584 - protein, 13 aa, Homo sapiens
  CDR3 for beta chain variable domain of TCR clone 260292 (TRBV11-2, TRBJ1-2)
CASSPSGGRLTMA

SEQ ID NO: 520585 - protein, 13 aa, Homo sapiens
  CDR3 for alpha chain variable domain of TCR clone 260293 (TRAV8-2, TRAJ43)
CVVSDQGDNGMRF

SEQ ID NO: 520586 - protein, 12 aa, Homo sapiens
  CDR3 for beta chain variable domain of TCR clone 260293 (TRBV7-8, TRBJ2-7)
CASSLGDREQYF

SEQ ID NO: 520587 - protein, 13 aa, Homo sapiens
  CDR3 for alpha chain variable domain of TCR clone 260294 (TRAV13-1, TRAJ6)
CARGSGGSYIPTF

SEQ ID NO: 520588 - protein, 14 aa, Homo sapiens
  CDR3 for beta chain variable domain of TCR clone 260294 (TRBV2, TRBJ2-7)
CASSLTSGGYEQYF

SEQ ID NO: 520589 - protein, 13 aa, Homo sapiens
  CDR3 for alpha chain variable domain of TCR clone 260295 (TRAV2, TRAJ15)
CAVASQAGTALIF

SEQ ID NO: 520590 - protein, 12 aa, Homo sapiens
  CDR3 for beta chain variable domain of TCR clone 260295 (TRBV6-1, TRBJ2-7)
CASSDYSYEQYF

SEQ ID NO: 520591 - protein, 12 aa, Homo sapiens
  CDR3 for alpha chain variable domain of TCR clone 260296 (TRAV17, TRAJ49)
CATVTTGNQFYF

SEQ ID NO: 520592 - protein, 18 aa, Homo sapiens
  CDR3 for beta chain variable domain of TCR clone 260296 (TRBV11-2, TRBJ2-6)
CASSLNPFLGTGANALTF

SEQ ID NO: 520593 - protein, 17 aa, Homo sapiens
  CDR3 for alpha chain variable domain of TCR clone 260297 (TRAV13-1, TRAJ31)
CAPRDRLMFGDGTQLVV

SEQ ID NO: 520594 - protein, 14 aa, Homo sapiens
  CDR3 for beta chain variable domain of TCR clone 260297 (TRBV10-2, TRBJ1-3)
CASTRTDTGNAIYF

SEQ ID NO: 520595 - protein, 11 aa, Homo sapiens
  CDR3 for alpha chain variable domain of TCR clone 260298 (TRAV2, TRAJ13)
CASGGYQKVTF

SEQ ID NO: 520596 - protein, 14 aa, Homo sapiens
  CDR3 for beta chain variable domain of TCR clone 260298 (TRBV19, TRBJ2-7)
CASSMGQGASEQYF

SEQ ID NO: 520597 - protein, 22 aa, Homo sapiens
  CDR3 for alpha chain variable domain of TCR clone 260299 (TRAV21, )
CAVRQDAGNNHIQNPDPAVYQL

SEQ ID NO: 520598 - protein, 15 aa, Homo sapiens
  CDR3 for beta chain variable domain of TCR clone 260299 (TRBV7-9, TRBJ1-6)
CASSSPGRGNSPLHF

SEQ ID NO: 520599 - protein, 16 aa, Homo sapiens
  CDR3 for alpha chain variable domain of TCR clone 260300 (TRAV13-1, TRAJ48)
CAASIFGNFGNEKLTF

SEQ ID NO: 520600 - protein, 14 aa, Homo sapiens
  CDR3 for beta chain variable domain of TCR clone 260300 (TRBV24-1, TRBJ1-1)
CATSVPRGDTEAFF

SEQ ID NO: 520601 - protein, 14 aa, Homo sapiens
  CDR3 for alpha chain variable domain of TCR clone 260301 (TRAV20, TRAJ4)
CAVRLGGCYNKLIF

SEQ ID NO: 520602 - protein, 21 aa, Homo sapiens
  CDR3 for beta chain variable domain of TCR clone 260301 (TRBV15, TRBJ2-1)
AWGTQPCTCVPPAEVDTARFF

SEQ ID NO: 520603 - protein, 12 aa, Homo sapiens
  CDR3 for alpha chain variable domain of TCR clone 260302 (TRAV12-3, TRAJ17)
CAMTLTGNKLTF

SEQ ID NO: 520604 - protein, 14 aa, Homo sapiens
  CDR3 for beta chain variable domain of TCR clone 260302 (TRBV7-7, TRBJ2-2)
CASSRDRSAGELFF

SEQ ID NO: 520605 - protein, 14 aa, Homo sapiens
  CDR3 for alpha chain variable domain of TCR clone 260303 (TRAV16, TRAJ17)
CALSGRAAGNKLTF

SEQ ID NO: 520606 - protein, 13 aa, Homo sapiens
  CDR3 for beta chain variable domain of TCR clone 260303 (TRBV7-3, TRBJ1-1)
CASSLTQGTEAFF

SEQ ID NO: 520607 - protein, 14 aa, Homo sapiens
  CDR3 for alpha chain variable domain of TCR clone 260304 (TRAV20, TRAJ36)
CAVQARTGANNLFF

SEQ ID NO: 520608 - protein, 14 aa, Homo sapiens
  CDR3 for beta chain variable domain of TCR clone 260304 (TRBV23-1, TRBJ2-5)
CASSFLRSQETQYF

SEQ ID NO: 520609 - protein, 12 aa, Homo sapiens
  CDR3 for alpha chain variable domain of TCR clone 260305 (TRAV21, TRAJ11)
CAATSEYSTLTF

SEQ ID NO: 520610 - protein, 16 aa, Homo sapiens
  CDR3 for beta chain variable domain of TCR clone 260305 (TRBV12-5, TRBJ2-5)
CASGPRTSGNQETQYF

SEQ ID NO: 520611 - protein, 11 aa, Homo sapiens
  CDR3 for alpha chain variable domain of TCR clone 260306 (TRAV30, TRAJ23)
CGTEIAGKLIF

SEQ ID NO: 520612 - protein, 14 aa, Homo sapiens
  CDR3 for beta chain variable domain of TCR clone 260306 (TRBV7-2, TRBJ1-2)
CASSQTGSTYGYTF

SEQ ID NO: 520613 - protein, 15 aa, Homo sapiens
  CDR3 for alpha chain variable domain of TCR clone 260307 (TRAV25, TRAJ53)
CAATGGGGSNYKLTF

SEQ ID NO: 520614 - protein, 19 aa, Homo sapiens
  CDR3 for beta chain variable domain of TCR clone 260307 (TRBV7-8, TRBJ2-3)
CASSFLSRKWGGGTDTQYF

SEQ ID NO: 520615 - protein, 14 aa, Homo sapiens
  CDR3 for alpha chain variable domain of TCR clone 260308 (TRAV12-1, TRAJ43)
CVVNGRSTNNDMRF

SEQ ID NO: 520616 - protein, 13 aa, Homo sapiens
  CDR3 for beta chain variable domain of TCR clone 260308 (TRBV10-3, TRBJ2-7)
CASKLAVNYEQYF

SEQ ID NO: 520617 - protein, 12 aa, Homo sapiens
  CDR3 for alpha chain variable domain of TCR clone 260309 (TRAV17, TRAJ28)
WASGAGSYQLTF

SEQ ID NO: 520618 - protein, 13 aa, Homo sapiens
  CDR3 for beta chain variable domain of TCR clone 260309 (TRBV11-3, TRBJ1-1)
CASSRQPNTEAFF

SEQ ID NO: 520619 - protein, 14 aa, Homo sapiens
  CDR3 for alpha chain variable domain of TCR clone 260310 (TRAV38-1, TRAJ29)
CAFFTPSGNTPLVF

SEQ ID NO: 520620 - protein, 14 aa, Homo sapiens
  CDR3 for beta chain variable domain of TCR clone 260310 (TRBV18, TRBJ2-7)
CASSPRGGAYEQYF

SEQ ID NO: 520621 - protein, 23 aa, Homo sapiens
  CDR3 for alpha chain variable domain of TCR clone 260311 (TRAV36/DV7, TRAJ50)
CAVEPENLLRQDIQNPDPAVYQL

SEQ ID NO: 520622 - protein, 15 aa, Homo sapiens
  CDR3 for beta chain variable domain of TCR clone 260311 (TRBV2, TRBJ2-7)
CASTLLGSGATEQYF

SEQ ID NO: 520623 - protein, 18 aa, Homo sapiens
  CDR3 for alpha chain variable domain of TCR clone 260312 (TRAV21, TRAJ52)
CAVRPSPAGGTSYGKLTF

SEQ ID NO: 520624 - protein, 15 aa, Homo sapiens
  CDR3 for beta chain variable domain of TCR clone 260312 (TRBV7-9, TRBJ1-1)
CASSLLEQGGTEAFF

SEQ ID NO: 520625 - protein, 11 aa, Homo sapiens
  CDR3 for alpha chain variable domain of TCR clone 260313 (TRAV17, TRAJ9)
CATTRGFKTIF

SEQ ID NO: 520626 - protein, 14 aa, Homo sapiens
  CDR3 for beta chain variable domain of TCR clone 260313 (TRBV7-9, TRBJ2-2)
CASSGLADTGELFL

SEQ ID NO: 520627 - protein, 14 aa, Homo sapiens
  CDR3 for alpha chain variable domain of TCR clone 260314 (TRAV12-2, TRAJ8)
CAVKENTGFQKLVF

SEQ ID NO: 520628 - protein, 13 aa, Homo sapiens
  CDR3 for beta chain variable domain of TCR clone 260314 (TRBV18, TRBJ1-2)
CASSASETEGYTF

SEQ ID NO: 520629 - protein, 17 aa, Homo sapiens
  CDR3 for alpha chain variable domain of TCR clone 260315 (TRAV3, TRAJ6)
CAVRDGPRAGGSYITTF

SEQ ID NO: 520630 - protein, 14 aa, Homo sapiens
  CDR3 for beta chain variable domain of TCR clone 260315 (TRBV7-2, TRBJ2-7)
CASSPKTSFYEQYV

SEQ ID NO: 520631 - protein, 14 aa, Homo sapiens
  CDR3 for alpha chain variable domain of TCR clone 260316 (TRAV12-3, TRAJ10)
SHLPLTGGGNKLTF

SEQ ID NO: 520632 - protein, 15 aa, Homo sapiens
  CDR3 for beta chain variable domain of TCR clone 260316 (TRBV10-2, TRBJ2-6)
CASSTQSPGANDLTF

SEQ ID NO: 520633 - protein, 15 aa, Homo sapiens
  CDR3 for alpha chain variable domain of TCR clone 260317 (TRAV17, TRAJ56)
CATDANTGANSKLTF

SEQ ID NO: 520634 - protein, 14 aa, Homo sapiens
  CDR3 for beta chain variable domain of TCR clone 260317 (TRBV19, TRBJ1-5)
CASRLGTGGQPQHF

SEQ ID NO: 520635 - protein, 13 aa, Homo sapiens
  CDR3 for alpha chain variable domain of TCR clone 260318 (TRAV1-2, TRAJ9)
CAVLNTGGFKTIF

SEQ ID NO: 520636 - protein, 16 aa, Homo sapiens
  CDR3 for beta chain variable domain of TCR clone 260318 (TRBV29-1, TRBJ2-7)
CSVEDAEDGTAYEQYF

SEQ ID NO: 520637 - protein, 16 aa, Homo sapiens
  CDR3 for alpha chain variable domain of TCR clone 260319 (TRAV12-2, TRAJ40)
CAVIRGGTSGTYKYIF

SEQ ID NO: 520638 - protein, 13 aa, Homo sapiens
  CDR3 for beta chain variable domain of TCR clone 260319 (TRBV7-9, TRBJ1-2)
CASSLKQNYGDAF

SEQ ID NO: 520639 - protein, 13 aa, Homo sapiens
  CDR3 for alpha chain variable domain of TCR clone 260320 (TRAV21, TRAJ27)
CAARPGNAGKSTF

SEQ ID NO: 520640 - protein, 12 aa, Homo sapiens
  CDR3 for beta chain variable domain of TCR clone 260320 (TRBV13, TRBJ2-7)
CASSLWGREQYF

SEQ ID NO: 520641 - protein, 14 aa, Homo sapiens
  CDR3 for alpha chain variable domain of TCR clone 260321 (TRAV12-2, TRAJ13)
CAVMKTGGYQKVTF

SEQ ID NO: 520642 - protein, 12 aa, Homo sapiens
  CDR3 for beta chain variable domain of TCR clone 260321 (TRBV12-4, TRBJ1-2)
CASSFIWLHLRF

SEQ ID NO: 520643 - protein, 15 aa, Homo sapiens
  CDR3 for alpha chain variable domain of TCR clone 260322 (TRAV3, TRAJ5)
FAVRDLAKGRRALTF

SEQ ID NO: 520644 - protein, 13 aa, Homo sapiens
  CDR3 for beta chain variable domain of TCR clone 260322 (TRBV12-4, TRBJ2-7)
CASSPTETYEQYF

SEQ ID NO: 520645 - protein, 13 aa, Homo sapiens
  CDR3 for alpha chain variable domain of TCR clone 260323 (TRAV17, TRAJ29)
CATDAFRKHTSCL

SEQ ID NO: 520646 - protein, 13 aa, Homo sapiens
  CDR3 for beta chain variable domain of TCR clone 260323 (TRBV7-8, TRBJ2-7)
CASSFAGLYEQYF

SEQ ID NO: 520647 - protein, 13 aa, Homo sapiens
  CDR3 for alpha chain variable domain of TCR clone 260324 (TRAV12-3, TRAJ33)
CAMSLNSNYQLIW

SEQ ID NO: 520648 - protein, 13 aa, Homo sapiens
  CDR3 for beta chain variable domain of TCR clone 260324 (TRBV7-2, TRBJ2-2)
CARSLAVTGELFF

SEQ ID NO: 520649 - protein, 15 aa, Homo sapiens
  CDR3 for alpha chain variable domain of TCR clone 260325 (TRAV21, TRAJ53)
CATLNSGGSNYKLTF

SEQ ID NO: 520650 - protein, 14 aa, Homo sapiens
  CDR3 for beta chain variable domain of TCR clone 260325 (TRBV9, TRBJ1-2)
CASSFSTRSYGYTF

SEQ ID NO: 520651 - protein, 12 aa, Homo sapiens
  CDR3 for alpha chain variable domain of TCR clone 260326 (TRAV17, TRAJ20)
CATQANDYKLTF

SEQ ID NO: 520652 - protein, 12 aa, Homo sapiens
  CDR3 for beta chain variable domain of TCR clone 260326 (TRBV6-1, TRBJ1-1)
CASNSPTAEAFF

SEQ ID NO: 520653 - protein, 12 aa, Homo sapiens
  CDR3 for alpha chain variable domain of TCR clone 260327 (TRAV27, TRAJ33)
CAGADSNYQLIW

SEQ ID NO: 520654 - protein, 17 aa, Homo sapiens
  CDR3 for beta chain variable domain of TCR clone 260327 (TRBV7-3, TRBJ1-3)
CASSPLGRGTPGNTIYF

SEQ ID NO: 520655 - protein, 16 aa, Homo sapiens
  CDR3 for alpha chain variable domain of TCR clone 260328 (TRAV16, TRAJ4)
CITVLPFSGGYNKLIF

SEQ ID NO: 520656 - protein, 15 aa, Homo sapiens
  CDR3 for beta chain variable domain of TCR clone 260328 (TRBV4-1, TRBJ1-4)
CASSDTGGTNEKLFF

SEQ ID NO: 520657 - protein, 12 aa, Homo sapiens
  CDR3 for alpha chain variable domain of TCR clone 260329 (TRAV12-3, TRAJ17)
CAMTLTGNKLTF

SEQ ID NO: 520658 - protein, 20 aa, Homo sapiens
  CDR3 for beta chain variable domain of TCR clone 260329 (TRBV28, TRBJ2-1)
CASTLIGRSPGLAGGNEQFF

SEQ ID NO: 520659 - protein, 15 aa, Homo sapiens
  CDR3 for alpha chain variable domain of TCR clone 260330 (TRAV2, TRAJ15)
CAVEDRNQAGTALIV

SEQ ID NO: 520660 - protein, 13 aa, Homo sapiens
  CDR3 for beta chain variable domain of TCR clone 260330 (TRBV10-2, TRBJ2-1)
CASGASGDAKQFF

SEQ ID NO: 520661 - protein, 12 aa, Homo sapiens
  CDR3 for alpha chain variable domain of TCR clone 260331 (TRAV16, TRAJ10)
CSRTGGGNKLTS

SEQ ID NO: 520662 - protein, 16 aa, Homo sapiens
  CDR3 for beta chain variable domain of TCR clone 260331 (TRBV7-3, TRBJ2-2)
CASSLKRGTLSGELFF

SEQ ID NO: 520663 - protein, 14 aa, Homo sapiens
  CDR3 for alpha chain variable domain of TCR clone 260332 (TRAV26-1, TRAJ39)
CIVRGSRAGNMLTF

SEQ ID NO: 520664 - protein, 14 aa, Homo sapiens
  CDR3 for beta chain variable domain of TCR clone 260332 (TRBV4-1, TRBJ2-2)
CASSQAVNTGELFF

SEQ ID NO: 520665 - protein, 15 aa, Homo sapiens
  CDR3 for alpha chain variable domain of TCR clone 260333 (TRAV13-1, TRAJ16)
CAARYQIARSCSLQG

SEQ ID NO: 520666 - protein, 13 aa, Homo sapiens
  CDR3 for beta chain variable domain of TCR clone 260333 (TRBV4-1, TRBJ2-1)
CASSQAGGDEQFF

SEQ ID NO: 520667 - protein, 14 aa, Homo sapiens
  CDR3 for alpha chain variable domain of TCR clone 260334 (TRAV12-1, TRAJ30)
CVVNIGGRDDKIIF

SEQ ID NO: 520668 - protein, 14 aa, Homo sapiens
  CDR3 for beta chain variable domain of TCR clone 260334 (TRBV5-4, TRBJ1-1)
CASSLDSRRDEAFF

SEQ ID NO: 520669 - protein, 13 aa, Homo sapiens
  CDR3 for alpha chain variable domain of TCR clone 260335 (TRAV12-1, TRAJ34)
CVVTGYNTDKLIF

SEQ ID NO: 520670 - protein, 13 aa, Homo sapiens
  CDR3 for beta chain variable domain of TCR clone 260335 (TRBV28, TRBJ2-7)
CASKEGGVYEQYF

SEQ ID NO: 520671 - protein, 14 aa, Homo sapiens
  CDR3 for alpha chain variable domain of TCR clone 260336 (TRAV12-1, TRAJ3)
CVVILYSSASKIIF

SEQ ID NO: 520672 - protein, 12 aa, Homo sapiens
  CDR3 for beta chain variable domain of TCR clone 260336 (TRBV7-2, TRBJ2-5)
CASSLYQETQYF

SEQ ID NO: 520673 - protein, 15 aa, Homo sapiens
  CDR3 for alpha chain variable domain of TCR clone 260337 (TRAV2, TRAJ15)
CAVEDRGQAGTALIF

SEQ ID NO: 520674 - protein, 17 aa, Homo sapiens
  CDR3 for beta chain variable domain of TCR clone 260337 (TRBV28, TRBJ2-5)
CASSTPEGDALQETQYF

SEQ ID NO: 520675 - protein, 12 aa, Homo sapiens
  CDR3 for alpha chain variable domain of TCR clone 260338 (TRAV1-1, TRAJ30)
CAVRGRDDKIIF

SEQ ID NO: 520676 - protein, 14 aa, Homo sapiens
  CDR3 for beta chain variable domain of TCR clone 260338 (TRBV6-1, TRBJ1-3)
CASVHGGGGNTIYF

SEQ ID NO: 520677 - protein, 14 aa, Homo sapiens
  CDR3 for alpha chain variable domain of TCR clone 260339 (TRAV3, TRAJ33)
CAVRDMDSNYQLIW

SEQ ID NO: 520678 - protein, 19 aa, Homo sapiens
  CDR3 for beta chain variable domain of TCR clone 260339 (TRBV7-3, TRBJ1-2)
CASSFPQRNDGELWLHLRF

SEQ ID NO: 520679 - protein, 10 aa, Homo sapiens
  CDR3 for alpha chain variable domain of TCR clone 260340 (TRAV1-2, TRAJ34)
CAVNTDKLIF

SEQ ID NO: 520680 - protein, 15 aa, Homo sapiens
  CDR3 for beta chain variable domain of TCR clone 260340 (TRBV7-3, TRBJ2-1)
CASSPTGGGEVEQFF

SEQ ID NO: 520681 - protein, 13 aa, Homo sapiens
  CDR3 for alpha chain variable domain of TCR clone 260341 (TRAV21, TRAJ8)
CAAPNTGFQKLEF

SEQ ID NO: 520682 - protein, 13 aa, Homo sapiens
  CDR3 for beta chain variable domain of TCR clone 260341 (TRBV6-3, TRBJ2-3)
CASTLQGIDTQYF

SEQ ID NO: 520683 - protein, 23 aa, Homo sapiens
  CDR3 for alpha chain variable domain of TCR clone 260342 (TRAV26-1, TRAJ38)
CIADNAGNNHIQNPDPAVYQLRD

SEQ ID NO: 520684 - protein, 19 aa, Homo sapiens
  CDR3 for beta chain variable domain of TCR clone 260342 (TRBV7-2, TRBJ2-3)
CASSFLSRNWGGGTDTQYF

SEQ ID NO: 520685 - protein, 18 aa, Homo sapiens
  CDR3 for alpha chain variable domain of TCR clone 260343 (TRAV26-1, TRAJ22)
CIVRVALISSGSARQLTF

SEQ ID NO: 520686 - protein, 13 aa, Homo sapiens
  CDR3 for beta chain variable domain of TCR clone 260343 (TRBV13, TRBJ2-5)
CASSPEVGETQYL

SEQ ID NO: 520687 - protein, 16 aa, Homo sapiens
  CDR3 for alpha chain variable domain of TCR clone 260344 (TRAV14/DV4, TRAJ54)
CAMREGRIQGAQKLVF

SEQ ID NO: 520688 - protein, 15 aa, Homo sapiens
  CDR3 for beta chain variable domain of TCR clone 260344 (TRBV20-1, TRBJ2-7)
CSAKDRVSGMDEQYF

SEQ ID NO: 520689 - protein, 14 aa, Homo sapiens
  CDR3 for alpha chain variable domain of TCR clone 260345 (TRAV17, TRAJ12)
CATNEKDSSYKLIF

SEQ ID NO: 520690 - protein, 16 aa, Homo sapiens
  CDR3 for beta chain variable domain of TCR clone 260345 (TRBV11-2, TRBJ2-1)
CASSPRLAGVYNEQFF

SEQ ID NO: 520691 - protein, 10 aa, Homo sapiens
  CDR3 for alpha chain variable domain of TCR clone 260346 (TRAV23/DV6, TRAJ57)
CAASSTLSQC

SEQ ID NO: 520692 - protein, 14 aa, Homo sapiens
  CDR3 for beta chain variable domain of TCR clone 260346 (TRBV19, TRBJ2-1)
CASSKDRGQDEQFF

SEQ ID NO: 520693 - protein, 17 aa, Homo sapiens
  CDR3 for alpha chain variable domain of TCR clone 260347 (TRAV3, TRAJ42)
CAVRARDYGGSQGNLIF

SEQ ID NO: 520694 - protein, 14 aa, Homo sapiens
  CDR3 for beta chain variable domain of TCR clone 260347 (TRBV4-1, TRBJ2-2)
CASSQAVNTGELFF

SEQ ID NO: 520695 - protein, 11 aa, Homo sapiens
  CDR3 for alpha chain variable domain of TCR clone 260348 (TRAV17, TRAJ9)
CATTGGFKTIF

SEQ ID NO: 520696 - protein, 13 aa, Homo sapiens
  CDR3 for beta chain variable domain of TCR clone 260348 (TRBV29-1, TRBJ2-1)
CSVEGGRVNEQFF

SEQ ID NO: 520697 - protein, 16 aa, Homo sapiens
  CDR3 for alpha chain variable domain of TCR clone 260349 (TRAV3, TRAJ37)
CAVRPHGPGNTGKLIF

SEQ ID NO: 520698 - protein, 16 aa, Homo sapiens
  CDR3 for beta chain variable domain of TCR clone 260349 (TRBV9, TRBJ1-2)
CASSVEEKVSPYGHTF

SEQ ID NO: 520699 - protein, 14 aa, Homo sapiens
  CDR3 for alpha chain variable domain of TCR clone 260350 (TRAV1-2, TRAJ8)
CAVREDTGFQKLVF

SEQ ID NO: 520700 - protein, 16 aa, Homo sapiens
  CDR3 for beta chain variable domain of TCR clone 260350 (TRBV7-3, TRBJ2-2)
CASSLKRGTLSGEPVF

SEQ ID NO: 520701 - protein, 13 aa, Homo sapiens
  CDR3 for alpha chain variable domain of TCR clone 260351 (TRAV23/DV6, TRAJ31)
CAARRGNNARPMF

SEQ ID NO: 520702 - protein, 15 aa, Homo sapiens
  CDR3 for beta chain variable domain of TCR clone 260351 (TRBV5-4, TRBJ2-3)
CASSLAGRVTDTQYF

SEQ ID NO: 520703 - protein, 14 aa, Homo sapiens
  CDR3 for alpha chain variable domain of TCR clone 260352 (TRAV23/DV6, TRAJ13)
CAASETGGYQKVTF

SEQ ID NO: 520704 - protein, 16 aa, Homo sapiens
  CDR3 for beta chain variable domain of TCR clone 260352 (TRBV5-1, TRBJ1-3)
CASSPRAPSSGNTIYF

SEQ ID NO: 520705 - protein, 13 aa, Homo sapiens
  CDR3 for alpha chain variable domain of TCR clone 260353 (TRAV2, TRAJ20)
CAVEDPSEYNLSF

SEQ ID NO: 520706 - protein, 16 aa, Homo sapiens
  CDR3 for beta chain variable domain of TCR clone 260353 (TRBV25-1, TRBJ2-7)
CASSELTGGGIYEQYF

SEQ ID NO: 520707 - protein, 11 aa, Homo sapiens
  CDR3 for alpha chain variable domain of TCR clone 260354 (TRAV3, TRAJ17)
PRGAAGNKLTF

SEQ ID NO: 520708 - protein, 12 aa, Homo sapiens
  CDR3 for beta chain variable domain of TCR clone 260354 (TRBV11-2, TRBJ2-2)
CASSLVGGELFF

SEQ ID NO: 520709 - protein, 13 aa, Homo sapiens
  CDR3 for alpha chain variable domain of TCR clone 260355 (TRAV8-1, TRAJ24)
CAGSTDSWGKLQF

SEQ ID NO: 520710 - protein, 12 aa, Homo sapiens
  CDR3 for beta chain variable domain of TCR clone 260355 (TRBV11-2, TRBJ2-2)
CASSLGGGELFF

SEQ ID NO: 520711 - protein, 11 aa, Homo sapiens
  CDR3 for alpha chain variable domain of TCR clone 260356 (TRAV35, TRAJ30)
CAGPGDDKIIF

SEQ ID NO: 520712 - protein, 13 aa, Homo sapiens
  CDR3 for beta chain variable domain of TCR clone 260356 (TRBV7-3, TRBJ1-1)
CASSQDWGAEAFV

SEQ ID NO: 520713 - protein, 13 aa, Homo sapiens
  CDR3 for alpha chain variable domain of TCR clone 260357 (TRAV4, TRAJ34)
CLVGDDNTDKLIF

SEQ ID NO: 520714 - protein, 23 aa, Homo sapiens
  CDR3 for beta chain variable domain of TCR clone 260357 (TRBV4-2, TRBJ2-3)
CASSQDPPRASSISGGRGDTQYF

SEQ ID NO: 520715 - protein, 16 aa, Homo sapiens
  CDR3 for alpha chain variable domain of TCR clone 260358 (TRAV30, TRAJ24)
CGTEIVDADSWGKFQF

SEQ ID NO: 520716 - protein, 15 aa, Homo sapiens
  CDR3 for beta chain variable domain of TCR clone 260358 (TRBV3-1, TRBJ2-7)
CASSQVAGAQYEQYF

SEQ ID NO: 520717 - protein, 14 aa, Homo sapiens
  CDR3 for alpha chain variable domain of TCR clone 260359 (TRAV13-1, TRAJ40)
CAARSTSGTYKYIF

SEQ ID NO: 520718 - protein, 15 aa, Homo sapiens
  CDR3 for beta chain variable domain of TCR clone 260359 (TRBV18, TRBJ1-5)
CASSETGGNNHPQHF

SEQ ID NO: 520719 - protein, 14 aa, Homo sapiens
  CDR3 for alpha chain variable domain of TCR clone 260360 (TRAV27, TRAJ13)
CRSSNSGGYQKDTF

SEQ ID NO: 520720 - protein, 12 aa, Homo sapiens
  CDR3 for beta chain variable domain of TCR clone 260360 (TRBV14, TRBJ2-5)
CASSQLKETQYF

SEQ ID NO: 520721 - protein, 14 aa, Homo sapiens
  CDR3 for alpha chain variable domain of TCR clone 260361 (TRAV12-2, TRAJ9)
CSVNALEGGFETIF

SEQ ID NO: 520722 - protein, 16 aa, Homo sapiens
  CDR3 for beta chain variable domain of TCR clone 260361 (TRBV19, TRBJ1-6)
CASSVAPVAGNSPLHF

SEQ ID NO: 520723 - protein, 18 aa, Homo sapiens
  CDR3 for alpha chain variable domain of TCR clone 260362 (TRAV8-4, TRAJ52)
CAVTRANAGGTSYGKLKF

SEQ ID NO: 520724 - protein, 20 aa, Homo sapiens
  CDR3 for beta chain variable domain of TCR clone 260362 (TRBV19, TRBJ2-1)
CASSISRTVTSTRLNNEQFF

SEQ ID NO: 520725 - protein, 11 aa, Homo sapiens
  CDR3 for alpha chain variable domain of TCR clone 260363 (TRAV21, TRAJ39)
LLVNAGNMLTF

SEQ ID NO: 520726 - protein, 13 aa, Homo sapiens
  CDR3 for beta chain variable domain of TCR clone 260363 (TRBV19, TRBJ1-5)
CASSINFNQPQHF

SEQ ID NO: 520727 - protein, 12 aa, Homo sapiens
  CDR3 for alpha chain variable domain of TCR clone 260364 (TRAV12-3, TRAJ17)
CAMTLTGNKLTF

SEQ ID NO: 520728 - protein, 12 aa, Homo sapiens
  CDR3 for beta chain variable domain of TCR clone 260364 (TRBV29-1, TRBJ2-5)
SAAGDRTGTQYF

SEQ ID NO: 520729 - protein, 15 aa, Homo sapiens
  CDR3 for alpha chain variable domain of TCR clone 260365 (TRAV26-1, TRAJ40)
CIVRAVPSGTYKYIF

SEQ ID NO: 520730 - protein, 15 aa, Homo sapiens
  CDR3 for beta chain variable domain of TCR clone 260365 (TRBV7-2, TRBJ2-1)
CASTHGTGIYNEQFF

SEQ ID NO: 520731 - protein, 14 aa, Homo sapiens
  CDR3 for alpha chain variable domain of TCR clone 260366 (TRAV12-1, TRAJ46)
CVATAKSSGDKLTF

SEQ ID NO: 520732 - protein, 17 aa, Homo sapiens
  CDR3 for beta chain variable domain of TCR clone 260366 (TRBV4-1, TRBJ2-3)
CASSQDPAGGPLDTQYF

SEQ ID NO: 520733 - protein, 13 aa, Homo sapiens
  CDR3 for alpha chain variable domain of TCR clone 260367 (TRAV20, TRAJ53)
CCAGGGSNYKLTF

SEQ ID NO: 520734 - protein, 14 aa, Homo sapiens
  CDR3 for beta chain variable domain of TCR clone 260367 (TRBV25-1, TRBJ1-1)
CASTHLGGNTEAFF

SEQ ID NO: 520735 - protein, 12 aa, Homo sapiens
  CDR3 for alpha chain variable domain of TCR clone 260368 (TRAV13-1, TRAJ20)
CAASMGDYKLSF

SEQ ID NO: 520736 - protein, 14 aa, Homo sapiens
  CDR3 for beta chain variable domain of TCR clone 260368 (TRBV20-1, TRBJ2-5)
CSASDAGSGETQYF

SEQ ID NO: 520737 - protein, 13 aa, Homo sapiens
  CDR3 for alpha chain variable domain of TCR clone 260369 (TRAV12-3, TRAJ43)
CAMMRPNNNDMRF

SEQ ID NO: 520738 - protein, 12 aa, Homo sapiens
  CDR3 for beta chain variable domain of TCR clone 260369 (TRBV11-2, TRBJ2-5)
CASSLGQETQYF

SEQ ID NO: 520739 - protein, 16 aa, Homo sapiens
  CDR3 for alpha chain variable domain of TCR clone 260370 (TRAV3, TRAJ10)
CAVKDMRAGGGNKLTF

SEQ ID NO: 520740 - protein, 14 aa, Homo sapiens
  CDR3 for beta chain variable domain of TCR clone 260370 (TRBV25-1, TRBJ1-1)
CASTHLGGNTEAFF

SEQ ID NO: 520741 - protein, 15 aa, Homo sapiens
  CDR3 for alpha chain variable domain of TCR clone 260371 (TRAV26-1, TRAJ22)
CIVRVSFWLCKATDL

SEQ ID NO: 520742 - protein, 12 aa, Homo sapiens
  CDR3 for beta chain variable domain of TCR clone 260371 (TRBV11-2, TRBJ2-2)
CASSLGGGELFF

SEQ ID NO: 520743 - protein, 14 aa, Homo sapiens
  CDR3 for alpha chain variable domain of TCR clone 260372 (TRAV20, TRAJ33)
CAVLTRDSNYQLIW

SEQ ID NO: 520744 - protein, 15 aa, Homo sapiens
  CDR3 for beta chain variable domain of TCR clone 260372 (TRBV23-1, TRBJ2-2)
CASRGQVVYTGELFF

SEQ ID NO: 520745 - protein, 11 aa, Homo sapiens
  CDR3 for alpha chain variable domain of TCR clone 260373 (TRAV21, TRAJ34)
CAVTNTDKLIF

SEQ ID NO: 520746 - protein, 12 aa, Homo sapiens
  CDR3 for beta chain variable domain of TCR clone 260373 (TRBV7-9, TRBJ1-1)
CASSVVRGEAFF

SEQ ID NO: 520747 - protein, 14 aa, Homo sapiens
  CDR3 for alpha chain variable domain of TCR clone 260374 (TRAV2, TRAJ9)
CAVEDRSGGFKTIF

SEQ ID NO: 520748 - protein, 15 aa, Homo sapiens
  CDR3 for beta chain variable domain of TCR clone 260374 (TRBV19, TRBJ2-1)
RASSHRDRGPNEQFF

SEQ ID NO: 520749 - protein, 16 aa, Homo sapiens
  CDR3 for alpha chain variable domain of TCR clone 260375 (TRAV1-1, TRAJ36)
CAVRDTLLPGANNLFF

SEQ ID NO: 520750 - protein, 17 aa, Homo sapiens
  CDR3 for beta chain variable domain of TCR clone 260375 (TRBV7-8, TRBJ2-6)
CASSAGTGGAGANVLTF

SEQ ID NO: 520751 - protein, 13 aa, Homo sapiens
  CDR3 for alpha chain variable domain of TCR clone 260376 (TRAV23/DV6, TRAJ15)
CAALPAGRNCSDL

SEQ ID NO: 520752 - protein, 17 aa, Homo sapiens
  CDR3 for beta chain variable domain of TCR clone 260376 (TRBV13, TRBJ2-3)
CASSLSRVAGGRNTQYF

SEQ ID NO: 520753 - protein, 16 aa, Homo sapiens
  CDR3 for alpha chain variable domain of TCR clone 260377 (TRAV23/DV6, TRAJ9)
CSASIGGNTGGFKTIF

SEQ ID NO: 520754 - protein, 14 aa, Homo sapiens
  CDR3 for beta chain variable domain of TCR clone 260377 (TRBV9, TRBJ2-7)
CASSVGVGSYEQYF

SEQ ID NO: 520755 - protein, 15 aa, Homo sapiens
  CDR3 for alpha chain variable domain of TCR clone 260378 (TRAV21, TRAJ53)
CATLNSGGSNYKLTF

SEQ ID NO: 520756 - protein, 15 aa, Homo sapiens
  CDR3 for beta chain variable domain of TCR clone 260378 (TRBV7-2, TRBJ2-3)
CASSSTGLETDTQYF

SEQ ID NO: 520757 - protein, 12 aa, Homo sapiens
  CDR3 for alpha chain variable domain of TCR clone 260379 (TRAV2, TRAJ9)
CAVGAGGFKTIF

SEQ ID NO: 520758 - protein, 14 aa, Homo sapiens
  CDR3 for beta chain variable domain of TCR clone 260379 (TRBV5-1, TRBJ2-7)
CASSRGESLYEQYF

SEQ ID NO: 520759 - protein, 15 aa, Homo sapiens
  CDR3 for alpha chain variable domain of TCR clone 260380 (TRAV21, TRAJ32)
CAAAPYGGATNKLIF

SEQ ID NO: 520760 - protein, 15 aa, Homo sapiens
  CDR3 for beta chain variable domain of TCR clone 260380 (TRBV2, TRBJ2-7)
CASSEGLARSYEQYF

SEQ ID NO: 520761 - protein, 13 aa, Homo sapiens
  CDR3 for alpha chain variable domain of TCR clone 260381 (TRAV12-2, TRAJ20)
CAVYPSNDYKLSF

SEQ ID NO: 520762 - protein, 13 aa, Homo sapiens
  CDR3 for beta chain variable domain of TCR clone 260381 (TRBV19, TRBJ2-2)
CASSIWSTGELFF

SEQ ID NO: 520763 - protein, 12 aa, Homo sapiens
  CDR3 for alpha chain variable domain of TCR clone 260382 (TRAV12-2, TRAJ21)
CAVRYNFNKFYF

SEQ ID NO: 520764 - protein, 15 aa, Homo sapiens
  CDR3 for beta chain variable domain of TCR clone 260382 (TRBV28, TRBJ2-7)
CASSPGGRGFYEQYF

SEQ ID NO: 520765 - protein, 14 aa, Homo sapiens
  CDR3 for alpha chain variable domain of TCR clone 260383 (TRAV21, TRAJ35)
CAVMPIGFGYVLPC

SEQ ID NO: 520766 - protein, 12 aa, Homo sapiens
  CDR3 for beta chain variable domain of TCR clone 260383 (TRBV7-9, TRBJ2-7)
CASSIKREEQYF

SEQ ID NO: 520767 - protein, 12 aa, Homo sapiens
  CDR3 for alpha chain variable domain of TCR clone 260384 (TRAV21, TRAJ13)
PGSSGGYQKVTF

SEQ ID NO: 520768 - protein, 15 aa, Homo sapiens
  CDR3 for beta chain variable domain of TCR clone 260384 (TRBV7-9, TRBJ1-6)
CASSSPGRGNSPLHF

SEQ ID NO: 520769 - protein, 14 aa, Homo sapiens
  CDR3 for alpha chain variable domain of TCR clone 260385 (TRAV13-1, TRAJ6)
CAASNGGGSYIPTF

SEQ ID NO: 520770 - protein, 15 aa, Homo sapiens
  CDR3 for beta chain variable domain of TCR clone 260385 (TRBV10-3, TRBJ2-5)
CACRPGDVDLGTQYF

SEQ ID NO: 520771 - protein, 14 aa, Homo sapiens
  CDR3 for alpha chain variable domain of TCR clone 260386 (TRAV21, TRAJ37)
CAVKGSSNTGKLIF

SEQ ID NO: 520772 - protein, 15 aa, Homo sapiens
  CDR3 for beta chain variable domain of TCR clone 260386 (TRBV7-2, TRBJ2-1)
CASTHGTGIYNEQFF

SEQ ID NO: 520773 - protein, 15 aa, Homo sapiens
  CDR3 for alpha chain variable domain of TCR clone 260387 (TRAV8-3, TRAJ27)
CAAGPSKTNSGKSTV

SEQ ID NO: 520774 - protein, 15 aa, Homo sapiens
  CDR3 for beta chain variable domain of TCR clone 260387 (TRBV7-2, TRBJ2-1)
CASSSGLAGGNEQFF

SEQ ID NO: 520775 - protein, 14 aa, Homo sapiens
  CDR3 for alpha chain variable domain of TCR clone 260388 (TRAV26-1, TRAJ39)
CIVRGSRAGNMLTF

SEQ ID NO: 520776 - protein, 15 aa, Homo sapiens
  CDR3 for beta chain variable domain of TCR clone 260388 (TRBV7-9, TRBJ1-5)
CAISQGHQPNQPQHV

SEQ ID NO: 520777 - protein, 13 aa, Homo sapiens
  CDR3 for alpha chain variable domain of TCR clone 260389 (TRAV22, TRAJ29)
CAVGGSRNTPLVF

SEQ ID NO: 520778 - protein, 13 aa, Homo sapiens
  CDR3 for beta chain variable domain of TCR clone 260389 (TRBV4-2, TRBJ1-1)
CASSQAGNTEAFF

SEQ ID NO: 520779 - protein, 14 aa, Homo sapiens
  CDR3 for alpha chain variable domain of TCR clone 260390 (TRAV12-2, TRAJ17)
CAVLFKAAGNKLAF

SEQ ID NO: 520780 - protein, 20 aa, Homo sapiens
  CDR3 for beta chain variable domain of TCR clone 260390 (TRBV7-8, TRBJ2-2)
CASSHLFPGPTIHMTGELFF

SEQ ID NO: 520781 - protein, 14 aa, Homo sapiens
  CDR3 for alpha chain variable domain of TCR clone 260391 (TRAV35, TRAJ40)
CAGSTTSGTYKYIF

SEQ ID NO: 520782 - protein, 16 aa, Homo sapiens
  CDR3 for beta chain variable domain of TCR clone 260391 (TRBV10-3, TRBJ2-1)
CAIRGGGRGDYNEQFF

SEQ ID NO: 520783 - protein, 15 aa, Homo sapiens
  CDR3 for alpha chain variable domain of TCR clone 260392 (TRAV13-1, TRAJ48)
CAASGANFGNEKLTF

SEQ ID NO: 520784 - protein, 15 aa, Homo sapiens
  CDR3 for beta chain variable domain of TCR clone 260392 (TRBV11-3, TRBJ2-3)
CASLKDGREGDTQYF

SEQ ID NO: 520785 - protein, 10 aa, Homo sapiens
  CDR3 for alpha chain variable domain of TCR clone 260393 (TRAV14/DV4, TRAJ27)
CAMREANQPL

SEQ ID NO: 520786 - protein, 14 aa, Homo sapiens
  CDR3 for beta chain variable domain of TCR clone 260393 (TRBV11-2, TRBJ2-3)
CASSRLARTDTQYF

SEQ ID NO: 520787 - protein, 15 aa, Homo sapiens
  CDR3 for alpha chain variable domain of TCR clone 260394 (TRAV23/DV6, TRAJ13)
CAAWPGGGGYQKVTF

SEQ ID NO: 520788 - protein, 15 aa, Homo sapiens
  CDR3 for beta chain variable domain of TCR clone 260394 (TRBV7-9, TRBJ2-7)
CASSPGGGLTYEQYF

SEQ ID NO: 520789 - protein, 12 aa, Homo sapiens
  CDR3 for alpha chain variable domain of TCR clone 260395 (TRAV4, TRAJ26)
CLVGVYGQNFVF

SEQ ID NO: 520790 - protein, 16 aa, Homo sapiens
  CDR3 for beta chain variable domain of TCR clone 260395 (TRBV7-2, TRBJ1-2)
CASSSNQDRRGHGYTF

SEQ ID NO: 520791 - protein, 15 aa, Homo sapiens
  CDR3 for alpha chain variable domain of TCR clone 260396 (TRAV8-3, TRAJ37)
CAVVARASNTGKLIF

SEQ ID NO: 520792 - protein, 15 aa, Homo sapiens
  CDR3 for beta chain variable domain of TCR clone 260396 (TRBV5-4, TRBJ2-3)
CASSLAGRVTDTQYF

SEQ ID NO: 520793 - protein, 14 aa, Homo sapiens
  CDR3 for alpha chain variable domain of TCR clone 260397 (TRAV12-2, TRAJ17)
CAVLFKAAGNKLTF

SEQ ID NO: 520794 - protein, 15 aa, Homo sapiens
  CDR3 for beta chain variable domain of TCR clone 260397 (TRBV7-9, TRBJ2-1)
CASRLLIGSYNEQFF

SEQ ID NO: 520795 - protein, 14 aa, Homo sapiens
  CDR3 for alpha chain variable domain of TCR clone 260398 (TRAV38-1, TRAJ45)
CAYYSGGGADGLTF

SEQ ID NO: 520796 - protein, 13 aa, Homo sapiens
  CDR3 for beta chain variable domain of TCR clone 260398 (TRBV12-4, TRBJ1-2)
CASSSGLTVISTF

SEQ ID NO: 520797 - protein, 12 aa, Homo sapiens
  CDR3 for alpha chain variable domain of TCR clone 260399 (TRAV27, TRAJ9)
CAGESGGFKTIF

SEQ ID NO: 520798 - protein, 12 aa, Homo sapiens
  CDR3 for beta chain variable domain of TCR clone 260399 (TRBV5-5, TRBJ2-5)
CASSYFGETQYF

SEQ ID NO: 520799 - protein, 10 aa, Homo sapiens
  CDR3 for alpha chain variable domain of TCR clone 260400 (TRAV12-3, TRAJ49)
CAMNDDQLHF

SEQ ID NO: 520800 - protein, 13 aa, Homo sapiens
  CDR3 for beta chain variable domain of TCR clone 260400 (TRBV12-4, TRBJ1-1)
CASSPGTGFEAFF

SEQ ID NO: 520801 - protein, 11 aa, Homo sapiens
  CDR3 for alpha chain variable domain of TCR clone 260401 (TRAV12-3, TRAJ41)
CAVNARDALNF

SEQ ID NO: 520802 - protein, 16 aa, Homo sapiens
  CDR3 for beta chain variable domain of TCR clone 260401 (TRBV7-8, TRBJ2-3)
CASSTEGQRETDTQYF

SEQ ID NO: 520803 - protein, 16 aa, Homo sapiens
  CDR3 for alpha chain variable domain of TCR clone 260402 (TRAV14/DV4, TRAJ11)
CAIREGGNSGYSTLTF

SEQ ID NO: 520804 - protein, 16 aa, Homo sapiens
  CDR3 for beta chain variable domain of TCR clone 260402 (TRBV5-1, TRBJ2-2)
CASSSRTGGRTGELFF

SEQ ID NO: 520805 - protein, 14 aa, Homo sapiens
  CDR3 for alpha chain variable domain of TCR clone 260403 (TRAV26-1, TRAJ45)
CIEVTGGGADGLTF

SEQ ID NO: 520806 - protein, 12 aa, Homo sapiens
  CDR3 for beta chain variable domain of TCR clone 260403 (TRBV12-4, TRBJ2-7)
CASSLGGYEQYV

SEQ ID NO: 520807 - protein, 13 aa, Homo sapiens
  CDR3 for alpha chain variable domain of TCR clone 260404 (TRAV27, TRAJ49)
CEPRPYTGNQFYF

SEQ ID NO: 520808 - protein, 16 aa, Homo sapiens
  CDR3 for beta chain variable domain of TCR clone 260404 (TRBV4-1, TRBJ1-2)
CASSQDAGQVLYGYTF

SEQ ID NO: 520809 - protein, 12 aa, Homo sapiens
  CDR3 for alpha chain variable domain of TCR clone 260405 (TRAV36/DV7, TRAJ17)
CAVEAAGNKLTF

SEQ ID NO: 520810 - protein, 16 aa, Homo sapiens
  CDR3 for beta chain variable domain of TCR clone 260405 (TRBV28, TRBJ1-1)
CASSSGGQPVATEAFF

SEQ ID NO: 520811 - protein, 16 aa, Homo sapiens
  CDR3 for alpha chain variable domain of TCR clone 260406 (TRAV16, TRAJ54)
CALSPPLIQGAQKLVF

SEQ ID NO: 520812 - protein, 15 aa, Homo sapiens
  CDR3 for beta chain variable domain of TCR clone 260406 (TRBV19, TRBJ2-7)
CASSIASGGFYEQYF

SEQ ID NO: 520813 - protein, 14 aa, Homo sapiens
  CDR3 for alpha chain variable domain of TCR clone 260407 (TRAV8-6, TRAJ49)
CAVSGPGTGNQFYF

SEQ ID NO: 520814 - protein, 16 aa, Homo sapiens
  CDR3 for beta chain variable domain of TCR clone 260407 (TRBV24-1, TRBJ2-1)
CATSVVAGANYNEQFF

SEQ ID NO: 520815 - protein, 13 aa, Homo sapiens
  CDR3 for alpha chain variable domain of TCR clone 260408 (TRAV36/DV7, TRAJ7)
CAGTRYGNNRLAF

SEQ ID NO: 520816 - protein, 13 aa, Homo sapiens
  CDR3 for beta chain variable domain of TCR clone 260408 (TRBV7-9, TRBJ2-5)
CQQLDTAQETQYF

SEQ ID NO: 520817 - protein, 14 aa, Homo sapiens
  CDR3 for alpha chain variable domain of TCR clone 260409 (TRAV16, TRAJ15)
CALSFNQAGTALIF

SEQ ID NO: 520818 - protein, 15 aa, Homo sapiens
  CDR3 for beta chain variable domain of TCR clone 260409 (TRBV3-1, TRBJ2-2)
CASSQAVRETGELFF

SEQ ID NO: 520819 - protein, 14 aa, Homo sapiens
  CDR3 for alpha chain variable domain of TCR clone 260410 (TRAV12-2, TRAJ44)
CAVKKAGTASKLTF

SEQ ID NO: 520820 - protein, 12 aa, Homo sapiens
  CDR3 for beta chain variable domain of TCR clone 260410 (TRBV19, TRBJ1-4)
CASKDWPRGLFF

SEQ ID NO: 520821 - protein, 17 aa, Homo sapiens
  CDR3 for alpha chain variable domain of TCR clone 260411 (TRAV26-1, TRAJ22)
FIVRVPSHSGSARQLTF

SEQ ID NO: 520822 - protein, 16 aa, Homo sapiens
  CDR3 for beta chain variable domain of TCR clone 260411 (TRBV28, TRBJ2-1)
CASRRSGRVVGNEQFF

SEQ ID NO: 520823 - protein, 17 aa, Homo sapiens
  CDR3 for alpha chain variable domain of TCR clone 260412 (TRAV23/DV6, TRAJ57)
CAASSTLSQGGSEKLVF

SEQ ID NO: 520824 - protein, 17 aa, Homo sapiens
  CDR3 for beta chain variable domain of TCR clone 260412 (TRBV10-3, TRBJ2-6)
CAISETTAPSGANVLTF

SEQ ID NO: 520825 - protein, 12 aa, Homo sapiens
  CDR3 for alpha chain variable domain of TCR clone 260413 (TRAV12-1, TRAJ34)
CVVAGATDKLIF

SEQ ID NO: 520826 - protein, 14 aa, Homo sapiens
  CDR3 for beta chain variable domain of TCR clone 260413 (TRBV2, TRBJ2-7)
CASSLTSGGYEQYF

SEQ ID NO: 520827 - protein, 13 aa, Homo sapiens
  CDR3 for alpha chain variable domain of TCR clone 260414 (TRAV2, TRAJ15)
CAVASQAGTALIF

SEQ ID NO: 520828 - protein, 15 aa, Homo sapiens
  CDR3 for beta chain variable domain of TCR clone 260414 (TRBV7-3, TRBJ2-2)
CASSETGQGTGELIF

SEQ ID NO: 520829 - protein, 16 aa, Homo sapiens
  CDR3 for alpha chain variable domain of TCR clone 260415 (TRAV20, TRAJ10)
CAVLRGLTGGGNQLTF

SEQ ID NO: 520830 - protein, 14 aa, Homo sapiens
  CDR3 for beta chain variable domain of TCR clone 260415 (TRBV19, TRBJ1-5)
CASRAPDRFLSQHF

SEQ ID NO: 520831 - protein, 14 aa, Homo sapiens
  CDR3 for alpha chain variable domain of TCR clone 260416 (TRAV1-2, TRAJ16)
CAVNRFSDGQKLLF

SEQ ID NO: 520832 - protein, 14 aa, Homo sapiens
  CDR3 for beta chain variable domain of TCR clone 260416 (TRBV7-3, TRBJ2-1)
CTSSLAGGTNEQFF

SEQ ID NO: 520833 - protein, 12 aa, Homo sapiens
  CDR3 for alpha chain variable domain of TCR clone 260417 (TRAV12-3, TRAJ17)
CAMTITGNKLTF

SEQ ID NO: 520834 - protein, 20 aa, Homo sapiens
  CDR3 for beta chain variable domain of TCR clone 260417 (TRBV28, TRBJ2-1)
CASAPIGRSPGLAGGNEQFF

SEQ ID NO: 520835 - protein, 14 aa, Homo sapiens
  CDR3 for alpha chain variable domain of TCR clone 260418 (TRAV12-2, TRAJ40)
CAVKIPSGTYKYIF

SEQ ID NO: 520836 - protein, 14 aa, Homo sapiens
  CDR3 for beta chain variable domain of TCR clone 260418 (TRBV20-1, TRBJ1-1)
CSAQARIGVTEAFF

SEQ ID NO: 520837 - protein, 14 aa, Homo sapiens
  CDR3 for alpha chain variable domain of TCR clone 260419 (TRAV6, TRAJ6)
CALPTSGGSYIPTF

SEQ ID NO: 520838 - protein, 14 aa, Homo sapiens
  CDR3 for beta chain variable domain of TCR clone 260419 (TRBV5-4, TRBJ1-1)
CASSLDSRRDEAFF

SEQ ID NO: 520839 - protein, 16 aa, Homo sapiens
  CDR3 for alpha chain variable domain of TCR clone 260420 (TRAV3, TRAJ37)
CAVRPHGSGNTGRLIF

SEQ ID NO: 520840 - protein, 16 aa, Homo sapiens
  CDR3 for beta chain variable domain of TCR clone 260420 (TRBV20-1, TRBJ1-4)
CSAPGQGLLTNEKLFF

SEQ ID NO: 520841 - protein, 12 aa, Homo sapiens
  CDR3 for alpha chain variable domain of TCR clone 260421 (TRAV12-3, TRAJ17)
CAMTLTGKKLTF

SEQ ID NO: 520842 - protein, 15 aa, Homo sapiens
  CDR3 for beta chain variable domain of TCR clone 260421 (TRBV20-1, TRBJ2-7)
CSARDRVTGMDEQYF

SEQ ID NO: 520843 - protein, 12 aa, Homo sapiens
  CDR3 for alpha chain variable domain of TCR clone 260422 (TRAV8-3, TRAJ20)
CAVGGGDYKLSF

SEQ ID NO: 520844 - protein, 16 aa, Homo sapiens
  CDR3 for beta chain variable domain of TCR clone 260422 (TRBV7-3, TRBJ2-3)
CASSLSGYRPEDTQYF

SEQ ID NO: 520845 - protein, 14 aa, Homo sapiens
  CDR3 for alpha chain variable domain of TCR clone 260423 (TRAV12-1, TRAJ17)
CVVNYKAAGNKLTF

SEQ ID NO: 520846 - protein, 14 aa, Homo sapiens
  CDR3 for beta chain variable domain of TCR clone 260423 (TRBV7-2, TRBJ2-7)
CASRSQGAAYEQYS

SEQ ID NO: 520847 - protein, 13 aa, Homo sapiens
  CDR3 for alpha chain variable domain of TCR clone 260424 (TRAV8-6, TRAJ9)
CAVWDTGGFKTIF

SEQ ID NO: 520848 - protein, 15 aa, Homo sapiens
  CDR3 for beta chain variable domain of TCR clone 260424 (TRBV12-4, TRBJ2-5)
CASSPPTGLQETQYF

SEQ ID NO: 520849 - protein, 14 aa, Homo sapiens
  CDR3 for alpha chain variable domain of TCR clone 260425 (TRAV26-1, TRAJ11)
CIVPLYSGYSTLTF

SEQ ID NO: 520850 - protein, 16 aa, Homo sapiens
  CDR3 for beta chain variable domain of TCR clone 260425 (TRBV11-3, TRBJ2-5)
CASSSVVAGSTETQYF

SEQ ID NO: 520851 - protein, 14 aa, Homo sapiens
  CDR3 for alpha chain variable domain of TCR clone 260426 (TRAV38-1, TRAJ43)
CAFMKHNNNNDMRF

SEQ ID NO: 520852 - protein, 17 aa, Homo sapiens
  CDR3 for beta chain variable domain of TCR clone 260426 (TRBV7-7, TRBJ1-4)
CASSLVGQGASNEKLLF

SEQ ID NO: 520853 - protein, 16 aa, Homo sapiens
  CDR3 for alpha chain variable domain of TCR clone 260427 (TRAV26-2, TRAJ57)
CILRDVGSRGSEKLVF

SEQ ID NO: 520854 - protein, 13 aa, Homo sapiens
  CDR3 for beta chain variable domain of TCR clone 260427 (TRBV18, TRBJ2-3)
CASSPGVTDTQYF

SEQ ID NO: 520855 - protein, 11 aa, Homo sapiens
  CDR3 for alpha chain variable domain of TCR clone 260428 (TRAV16, TRAJ33)
CALHSNYQLLW

SEQ ID NO: 520856 - protein, 15 aa, Homo sapiens
  CDR3 for beta chain variable domain of TCR clone 260428 (TRBV4-1, TRBJ2-7)
CASSQQGQGLDEQYF

SEQ ID NO: 520857 - protein, 15 aa, Homo sapiens
  CDR3 for alpha chain variable domain of TCR clone 260429 (TRAV12-3, TRAJ6)
CAMSATTGGSYIPTF

SEQ ID NO: 520858 - protein, 16 aa, Homo sapiens
  CDR3 for beta chain variable domain of TCR clone 260429 (TRBV20-1, TRBJ1-2)
GSASRGQGVANYGYTF

SEQ ID NO: 520859 - protein, 11 aa, Homo sapiens
  CDR3 for alpha chain variable domain of TCR clone 260430 (TRAV3, TRAJ21)
CAVGNFNNFYF

SEQ ID NO: 520860 - protein, 16 aa, Homo sapiens
  CDR3 for beta chain variable domain of TCR clone 260430 (TRBV19, TRBJ2-1)
CASSKAGPSSYNEQLF

SEQ ID NO: 520861 - protein, 14 aa, Homo sapiens
  CDR3 for alpha chain variable domain of TCR clone 260431 (TRAV12-3, TRAJ9)
CAMSPNTGGFKTIF

SEQ ID NO: 520862 - protein, 12 aa, Homo sapiens
  CDR3 for beta chain variable domain of TCR clone 260431 (TRBV11-2, TRBJ2-2)
CVSSLGGGELFF

SEQ ID NO: 520863 - protein, 11 aa, Homo sapiens
  CDR3 for alpha chain variable domain of TCR clone 260432 (TRAV3, TRAJ21)
CAVGNFNKFYF

SEQ ID NO: 520864 - protein, 14 aa, Homo sapiens
  CDR3 for beta chain variable domain of TCR clone 260432 (TRBV29-1, TRBJ2-2)
GSGRGSGNTGELFF

SEQ ID NO: 520865 - protein, 17 aa, Homo sapiens
  CDR3 for alpha chain variable domain of TCR clone 260433 (TRAV35, TRAJ52)
CSGQLAAGGTSYGKLTF

SEQ ID NO: 520866 - protein, 12 aa, Homo sapiens
  CDR3 for beta chain variable domain of TCR clone 260433 (TRBV20-1, TRBJ2-7)
CSAGRRQSEQYF

SEQ ID NO: 520867 - protein, 11 aa, Homo sapiens
  CDR3 for alpha chain variable domain of TCR clone 260434 (TRAV12-3, TRAJ27)
CAMANAGKSTF

SEQ ID NO: 520868 - protein, 13 aa, Homo sapiens
  CDR3 for beta chain variable domain of TCR clone 260434 (TRBV9, TRBJ2-7)
CASRVAEYYEQYF

SEQ ID NO: 520869 - protein, 20 aa, Homo sapiens
  CDR3 for alpha chain variable domain of TCR clone 260435 (TRAV12-1, TRAJ42)
SSVIQPPTSVKGGSQGNLIF

SEQ ID NO: 520870 - protein, 15 aa, Homo sapiens
  CDR3 for beta chain variable domain of TCR clone 260435 (TRBV20-1, TRBJ2-7)
CSARDRVSGMDEQYF

SEQ ID NO: 520871 - protein, 14 aa, Homo sapiens
  CDR3 for alpha chain variable domain of TCR clone 260436 (TRAV1-2, TRAJ16)
CAVNRFSDGQKLLF

SEQ ID NO: 520872 - protein, 14 aa, Homo sapiens
  CDR3 for beta chain variable domain of TCR clone 260436 (TRBV7-3, TRBJ1-1)
CASSLGTGYTESFF

SEQ ID NO: 520873 - protein, 11 aa, Homo sapiens
  CDR3 for alpha chain variable domain of TCR clone 260437 (TRAV3, TRAJ21)
CAVGNFNNFYF

SEQ ID NO: 520874 - protein, 13 aa, Homo sapiens
  CDR3 for beta chain variable domain of TCR clone 260437 (TRBV7-3, TRBJ1-2)
CASSLKRGYGYTF

SEQ ID NO: 520875 - protein, 14 aa, Homo sapiens
  CDR3 for alpha chain variable domain of TCR clone 260438 (TRAV12-2, TRAJ13)
CAGKKTGGYQKVTF

SEQ ID NO: 520876 - protein, 15 aa, Homo sapiens
  CDR3 for beta chain variable domain of TCR clone 260438 (TRBV27, TRBJ2-1)
CASSDGGGSSNEQFF

SEQ ID NO: 520877 - protein, 15 aa, Homo sapiens
  CDR3 for alpha chain variable domain of TCR clone 260439 (TRAV3, TRAJ7)
CAVRDKDNGNNRLAF

SEQ ID NO: 520878 - protein, 19 aa, Homo sapiens
  CDR3 for beta chain variable domain of TCR clone 260439 (TRBV5-8, TRBJ2-3)
CASSFLGTSVSHRTDTQYF

SEQ ID NO: 520879 - protein, 12 aa, Homo sapiens
  CDR3 for alpha chain variable domain of TCR clone 260440 (TRAV10, TRAJ31)
CVVRAHRARLML

SEQ ID NO: 520880 - protein, 17 aa, Homo sapiens
  CDR3 for beta chain variable domain of TCR clone 260440 (TRBV14, TRBJ2-1)
CASSQDRRDSIYNEQFF

SEQ ID NO: 520881 - protein, 10 aa, Homo sapiens
  CDR3 for alpha chain variable domain of TCR clone 260441 (TRAV8-4, TRAJ43)
CAVSADDMRF

SEQ ID NO: 520882 - protein, 17 aa, Homo sapiens
  CDR3 for beta chain variable domain of TCR clone 260441 (TRBV7-8, TRBJ2-6)
CASSAGTGGAGANVPTF

SEQ ID NO: 520883 - protein, 14 aa, Homo sapiens
  CDR3 for alpha chain variable domain of TCR clone 260442 (TRAV8-4, TRAJ9)
CAVRINTGGFKTIF

SEQ ID NO: 520884 - protein, 15 aa, Homo sapiens
  CDR3 for beta chain variable domain of TCR clone 260442 (TRBV28, TRBJ2-1)
CASSIIAGGRSEQFF

SEQ ID NO: 520885 - protein, 10 aa, Homo sapiens
  CDR3 for alpha chain variable domain of TCR clone 260443 (TRAV12-2, TRAJ22)
CAVNETQLTF

SEQ ID NO: 520886 - protein, 12 aa, Homo sapiens
  CDR3 for beta chain variable domain of TCR clone 260443 (TRBV9, TRBJ2-2)
CASSLVTGELFF

SEQ ID NO: 520887 - protein, 14 aa, Homo sapiens
  CDR3 for alpha chain variable domain of TCR clone 260444 (TRAV17, TRAJ39)
CATDPVRAGNTLTF

SEQ ID NO: 520888 - protein, 13 aa, Homo sapiens
  CDR3 for beta chain variable domain of TCR clone 260444 (TRBV19, TRBJ1-2)
CASSVPGQDGYTF

SEQ ID NO: 520889 - protein, 17 aa, Homo sapiens
  CDR3 for alpha chain variable domain of TCR clone 260445 (TRAV3, TRAJ42)
CAVRDRDYGGSQGHLIF

SEQ ID NO: 520890 - protein, 15 aa, Homo sapiens
  CDR3 for beta chain variable domain of TCR clone 260445 (TRBV6-6, TRBJ2-7)
CASSYSYGGSYKQYF

SEQ ID NO: 520891 - protein, 12 aa, Homo sapiens
  CDR3 for alpha chain variable domain of TCR clone 260446 (TRAV21, TRAJ12)
CAVMDSSYKLIF

SEQ ID NO: 520892 - protein, 16 aa, Homo sapiens
  CDR3 for beta chain variable domain of TCR clone 260446 (TRBV7-9, TRBJ2-5)
CASRLEIGTREETQYF

SEQ ID NO: 520893 - protein, 18 aa, Homo sapiens
  CDR3 for alpha chain variable domain of TCR clone 260447 (TRAV26-1, TRAJ23)
CIVRGGLDVWNQGGKLIF

SEQ ID NO: 520894 - protein, 15 aa, Homo sapiens
  CDR3 for beta chain variable domain of TCR clone 260447 (TRBV9, TRBJ1-6)
CASSVAGTGDSPLHF

SEQ ID NO: 520895 - protein, 14 aa, Homo sapiens
  CDR3 for alpha chain variable domain of TCR clone 260448 (TRAV36/DV7, TRAJ23)
CAPLIYNQGGKLIF

SEQ ID NO: 520896 - protein, 15 aa, Homo sapiens
  CDR3 for beta chain variable domain of TCR clone 260448 (TRBV30, TRBJ1-2)
CAWNIRDRGFSGYTF

SEQ ID NO: 520897 - protein, 15 aa, Homo sapiens
  CDR3 for alpha chain variable domain of TCR clone 260449 (TRAV12-3, TRAJ6)
CAMSATTGGSYIPTF

SEQ ID NO: 520898 - protein, 19 aa, Homo sapiens
  CDR3 for beta chain variable domain of TCR clone 260449 (TRBV25-1, TRBJ2-2)
CAILVCRVDRGRKTGELFF

SEQ ID NO: 520899 - protein, 15 aa, Homo sapiens
  CDR3 for alpha chain variable domain of TCR clone 260450 (TRAV40, TRAJ45)
CLLGDLGGGADGLTF

SEQ ID NO: 520900 - protein, 13 aa, Homo sapiens
  CDR3 for beta chain variable domain of TCR clone 260450 (TRBV7-9, TRBJ1-2)
CASSFKQNYGYTF

SEQ ID NO: 520901 - protein, 16 aa, Homo sapiens
  CDR3 for alpha chain variable domain of TCR clone 260451 (TRAV3, TRAJ10)
CAVRDMRAGGGNKIPF

SEQ ID NO: 520902 - protein, 15 aa, Homo sapiens
  CDR3 for beta chain variable domain of TCR clone 260451 (TRBV11-2, TRBJ1-6)
CASTGFGTAVSPLHF

SEQ ID NO: 520903 - protein, 13 aa, Homo sapiens
  CDR3 for alpha chain variable domain of TCR clone 260452 (TRAV8-2, TRAJ34)
CVVGDRRTDKLIF

SEQ ID NO: 520904 - protein, 15 aa, Homo sapiens
  CDR3 for beta chain variable domain of TCR clone 260452 (TRBV20-1, TRBJ2-3)
CSARVVGGSTDTQYF

SEQ ID NO: 520905 - protein, 12 aa, Homo sapiens
  CDR3 for alpha chain variable domain of TCR clone 260453 (TRAV3, TRAJ31)
CAVRDGNARLLF

SEQ ID NO: 520906 - protein, 15 aa, Homo sapiens
  CDR3 for beta chain variable domain of TCR clone 260453 (TRBV9, TRBJ1-6)
CASSVAGTGDSPLHF

SEQ ID NO: 520907 - protein, 15 aa, Homo sapiens
  CDR3 for alpha chain variable domain of TCR clone 260454 (TRAV13-1, TRAJ10)
CAATILTGGGNKLTF

SEQ ID NO: 520908 - protein, 14 aa, Homo sapiens
  CDR3 for beta chain variable domain of TCR clone 260454 (TRBV7-9, TRBJ1-1)
CASSLGGANTEAFF

SEQ ID NO: 520909 - protein, 15 aa, Homo sapiens
  CDR3 for alpha chain variable domain of TCR clone 260455 (TRAV2, TRAJ15)
CAVEDRGQAGTALIF

SEQ ID NO: 520910 - protein, 15 aa, Homo sapiens
  CDR3 for beta chain variable domain of TCR clone 260455 (TRBV6-3, TRBJ2-7)
CASSSPGTIFYEQYF

SEQ ID NO: 520911 - protein, 14 aa, Homo sapiens
  CDR3 for alpha chain variable domain of TCR clone 260456 (TRAV8-3, TRAJ4)
CAVGAAGGYNKLIF

SEQ ID NO: 520912 - protein, 13 aa, Homo sapiens
  CDR3 for beta chain variable domain of TCR clone 260456 (TRBV20-1, TRBJ2-1)
CSASTGTSNEQFF

SEQ ID NO: 520913 - protein, 11 aa, Homo sapiens
  CDR3 for alpha chain variable domain of TCR clone 260457 (TRAV16, TRAJ42)
CALASQGNLIF

SEQ ID NO: 520914 - protein, 12 aa, Homo sapiens
  CDR3 for beta chain variable domain of TCR clone 260457 (TRBV11-2, TRBJ2-2)
CASSLGGGELFF

SEQ ID NO: 520915 - protein, 15 aa, Homo sapiens
  CDR3 for alpha chain variable domain of TCR clone 260458 (TRAV12-3, TRAJ6)
CAMSATTGGSYIPTF

SEQ ID NO: 520916 - protein, 11 aa, Homo sapiens
  CDR3 for beta chain variable domain of TCR clone 260458 (TRBV11-2, TRBJ2-2)
YASSLPGELFF

SEQ ID NO: 520917 - protein, 14 aa, Homo sapiens
  CDR3 for alpha chain variable domain of TCR clone 260459 (TRAV1-1, TRAJ27)
CAVIYNTNAVKSTF

SEQ ID NO: 520918 - protein, 15 aa, Homo sapiens
  CDR3 for beta chain variable domain of TCR clone 260459 (TRBV7-2, TRBJ2-1)
CAGSSGLAGGNEQFF

SEQ ID NO: 520919 - protein, 15 aa, Homo sapiens
  CDR3 for alpha chain variable domain of TCR clone 260460 (TRAV21, TRAJ52)
CAVRGGGTSYGKLKF

SEQ ID NO: 520920 - protein, 15 aa, Homo sapiens
  CDR3 for beta chain variable domain of TCR clone 260460 (TRBV18, TRBJ1-5)
CASSPSDRSNQPQHF

SEQ ID NO: 520921 - protein, 14 aa, Homo sapiens
  CDR3 for alpha chain variable domain of TCR clone 260461 (TRAV30, TRAJ26)
CGTEIVSYGQHFVF

SEQ ID NO: 520922 - protein, 13 aa, Homo sapiens
  CDR3 for beta chain variable domain of TCR clone 260461 (TRBV10-3, TRBJ2-7)
CASKLAVNYEQYF

SEQ ID NO: 520923 - protein, 15 aa, Homo sapiens
  CDR3 for alpha chain variable domain of TCR clone 260462 (TRAV21, TRAJ53)
CATLNSGGSNYKLTF

SEQ ID NO: 520924 - protein, 14 aa, Homo sapiens
  CDR3 for beta chain variable domain of TCR clone 260462 (TRBV13, TRBJ2-5)
CASSLERVGETQYF

SEQ ID NO: 520925 - protein, 14 aa, Homo sapiens
  CDR3 for alpha chain variable domain of TCR clone 260463 (TRAV1-2, TRAJ8)
CAVREDTGFEKLVF

SEQ ID NO: 520926 - protein, 15 aa, Homo sapiens
  CDR3 for beta chain variable domain of TCR clone 260463 (TRBV4-1, TRBJ2-7)
CASSQNTGRLYEQYF

SEQ ID NO: 520927 - protein, 15 aa, Homo sapiens
  CDR3 for alpha chain variable domain of TCR clone 260464 (TRAV4, TRAJ39)
CLVGPNNNAGNMLTF

SEQ ID NO: 520928 - protein, 16 aa, Homo sapiens
  CDR3 for beta chain variable domain of TCR clone 260464 (TRBV12-4, TRBJ1-5)
CASSRPVGGSNQPQHF

SEQ ID NO: 520929 - protein, 13 aa, Homo sapiens
  CDR3 for alpha chain variable domain of TCR clone 260465 (TRAV6, TRAJ45)
SPFSGGGADGLTF

SEQ ID NO: 520930 - protein, 11 aa, Homo sapiens
  CDR3 for beta chain variable domain of TCR clone 260465 (TRBV11-2, TRBJ2-2)
CASSLPGELFF

SEQ ID NO: 520931 - protein, 11 aa, Homo sapiens
  CDR3 for alpha chain variable domain of TCR clone 260466 (TRAV2, TRAJ23)
CAVETRGKLIF

SEQ ID NO: 520932 - protein, 14 aa, Homo sapiens
  CDR3 for beta chain variable domain of TCR clone 260466 (TRBV2, TRBJ2-3)
CASSVGQNTDTQYF

SEQ ID NO: 520933 - protein, 13 aa, Homo sapiens
  CDR3 for alpha chain variable domain of TCR clone 260467 (TRAV27, TRAJ41)
CAGEGNSGYALNF

SEQ ID NO: 520934 - protein, 11 aa, Homo sapiens
  CDR3 for beta chain variable domain of TCR clone 260467 (TRBV19, TRBJ2-2)
CASRYSGELFF

SEQ ID NO: 520935 - protein, 14 aa, Homo sapiens
  CDR3 for alpha chain variable domain of TCR clone 260468 (TRAV35, TRAJ10)
CAGILTGGGNKLTF

SEQ ID NO: 520936 - protein, 15 aa, Homo sapiens
  CDR3 for beta chain variable domain of TCR clone 260468 (TRBV20-1, TRBJ1-5)
CSATSDRGLGQPQHF

SEQ ID NO: 520937 - protein, 18 aa, Homo sapiens
  CDR3 for alpha chain variable domain of TCR clone 260469 (TRAV13-1, TRAJ52)
CAAKNPNAGGTSYGKLTF

SEQ ID NO: 520938 - protein, 17 aa, Homo sapiens
  CDR3 for beta chain variable domain of TCR clone 260469 (TRBV11-2, TRBJ2-1)
CASSLYPPGVEFNEQFF

SEQ ID NO: 520939 - protein, 17 aa, Homo sapiens
  CDR3 for alpha chain variable domain of TCR clone 260470 (TRAV3, TRAJ6)
CAVRDGPRAGGSYIPTF

SEQ ID NO: 520940 - protein, 11 aa, Homo sapiens
  CDR3 for beta chain variable domain of TCR clone 260470 (TRBV6-3, TRBJ2-3)
CSTGQADTQYF

SEQ ID NO: 520941 - protein, 14 aa, Homo sapiens
  CDR3 for alpha chain variable domain of TCR clone 260471 (TRAV8-3, TRAJ4)
CAVGASGGYNKLIF

SEQ ID NO: 520942 - protein, 16 aa, Homo sapiens
  CDR3 for beta chain variable domain of TCR clone 260471 (TRBV4-3, TRBJ2-2)
CATSHLQGSGTGELFF

SEQ ID NO: 520943 - protein, 11 aa, Homo sapiens
  CDR3 for alpha chain variable domain of TCR clone 260472 (TRAV12-3, TRAJ27)
CAMANAGKSTF

SEQ ID NO: 520944 - protein, 14 aa, Homo sapiens
  CDR3 for beta chain variable domain of TCR clone 260472 (TRBV7-7, TRBJ2-2)
CATRQDSDTGELFF

SEQ ID NO: 520945 - protein, 14 aa, Homo sapiens
  CDR3 for alpha chain variable domain of TCR clone 260473 (TRAV23/DV6, TRAJ8)
CAASKNTGFQKLVF

SEQ ID NO: 520946 - protein, 14 aa, Homo sapiens
  CDR3 for beta chain variable domain of TCR clone 260473 (TRBV6-1, TRBJ1-3)
CASVQGGGGNTIYF

SEQ ID NO: 520947 - protein, 12 aa, Homo sapiens
  CDR3 for alpha chain variable domain of TCR clone 260474 (TRAV12-3, TRAJ5)
CAMGSGRRALTF

SEQ ID NO: 520948 - protein, 14 aa, Homo sapiens
  CDR3 for beta chain variable domain of TCR clone 260474 (TRBV7-3, TRBJ2-3)
CASSPSARTDTQYF

SEQ ID NO: 520949 - protein, 14 aa, Homo sapiens
  CDR3 for alpha chain variable domain of TCR clone 260475 (TRAV21, TRAJ35)
CAVMPIGFGNVLHC

SEQ ID NO: 520950 - protein, 13 aa, Homo sapiens
  CDR3 for beta chain variable domain of TCR clone 260475 (TRBV19, TRBJ1-2)
CASSVPGQDGYTF

SEQ ID NO: 520951 - protein, 12 aa, Homo sapiens
  CDR3 for alpha chain variable domain of TCR clone 260476 (TRAV1-1, TRAJ39)
CAVPVVGNMLTF

SEQ ID NO: 520952 - protein, 15 aa, Homo sapiens
  CDR3 for beta chain variable domain of TCR clone 260476 (TRBV19, TRBJ1-6)
CASSTQAAVGSPLHF

SEQ ID NO: 520953 - protein, 15 aa, Homo sapiens
  CDR3 for alpha chain variable domain of TCR clone 260477 (TRAV26-1, TRAJ15)
CIVRAANQAGTALIF

SEQ ID NO: 520954 - protein, 13 aa, Homo sapiens
  CDR3 for beta chain variable domain of TCR clone 260477 (TRBV7-9, TRBJ1-2)
CASSLKQNYGYTF

SEQ ID NO: 520955 - protein, 12 aa, Homo sapiens
  CDR3 for alpha chain variable domain of TCR clone 260478 (TRAV12-2, TRAJ9)
CRERTGGCKTIF

SEQ ID NO: 520956 - protein, 15 aa, Homo sapiens
  CDR3 for beta chain variable domain of TCR clone 260478 (TRBV4-2, TRBJ1-2)
CASSGGGAGIGGYTF

SEQ ID NO: 520957 - protein, 12 aa, Homo sapiens
  CDR3 for alpha chain variable domain of TCR clone 260479 (TRAV12-3, TRAJ17)
CAMTLTGNKLTF

SEQ ID NO: 520958 - protein, 13 aa, Homo sapiens
  CDR3 for beta chain variable domain of TCR clone 260479 (TRBV4-1, TRBJ1-1)
CASSLRGPTEAFF

SEQ ID NO: 520959 - protein, 14 aa, Homo sapiens
  CDR3 for alpha chain variable domain of TCR clone 260480 (TRAV12-2, TRAJ13)
CAVMKTGGYQKVTF

SEQ ID NO: 520960 - protein, 15 aa, Homo sapiens
  CDR3 for beta chain variable domain of TCR clone 260480 (TRBV27, TRBJ2-1)
CASSNGGESSNEQFF

SEQ ID NO: 520961 - protein, 13 aa, Homo sapiens
  CDR3 for alpha chain variable domain of TCR clone 260481 (TRAV17, TRAJ9)
CATDYTVGFKPIF

SEQ ID NO: 520962 - protein, 16 aa, Homo sapiens
  CDR3 for beta chain variable domain of TCR clone 260481 (TRBV7-7, TRBJ2-1)
CASSLASGTSYNEQFF

SEQ ID NO: 520963 - protein, 15 aa, Homo sapiens
  CDR3 for alpha chain variable domain of TCR clone 260482 (TRAV27, TRAJ38)
CAARRNAGNNRKLIW

SEQ ID NO: 520964 - protein, 19 aa, Homo sapiens
  CDR3 for beta chain variable domain of TCR clone 260482 (TRBV7-9, TRBJ2-6)
CASSLESATVLPGANVLTF

SEQ ID NO: 520965 - protein, 11 aa, Homo sapiens
  CDR3 for alpha chain variable domain of TCR clone 260483 (TRAV23/DV6, TRAJ49)
CAVAPVTISIL

SEQ ID NO: 520966 - protein, 13 aa, Homo sapiens
  CDR3 for beta chain variable domain of TCR clone 260483 (TRBV6-1, TRBJ1-1)
CASSRQGNTEAFF

SEQ ID NO: 520967 - protein, 14 aa, Homo sapiens
  CDR3 for alpha chain variable domain of TCR clone 260484 (TRAV1-2, TRAJ16)
CAVNRLSAGQKLLF

SEQ ID NO: 520968 - protein, 15 aa, Homo sapiens
  CDR3 for beta chain variable domain of TCR clone 260484 (TRBV9, TRBJ2-1)
CASSLAGSSYNEQFF

SEQ ID NO: 520969 - protein, 15 aa, Homo sapiens
  CDR3 for alpha chain variable domain of TCR clone 260485 (TRAV34, TRAJ38)
CGADFTPGNNRKLFW

SEQ ID NO: 520970 - protein, 12 aa, Homo sapiens
  CDR3 for beta chain variable domain of TCR clone 260485 (TRBV7-9, TRBJ2-7)
CATRTDAYEQYF

SEQ ID NO: 520971 - protein, 15 aa, Homo sapiens
  CDR3 for alpha chain variable domain of TCR clone 260486 (TRAV3, TRAJ5)
CAVRDLDTGRRALTF

SEQ ID NO: 520972 - protein, 14 aa, Homo sapiens
  CDR3 for beta chain variable domain of TCR clone 260486 (TRBV25-1, TRBJ1-1)
CANTHLGGNTEAFL

SEQ ID NO: 520973 - protein, 12 aa, Homo sapiens
  CDR3 for alpha chain variable domain of TCR clone 260487 (TRAV23/DV6, TRAJ16)
CAARGRGQKLLF

SEQ ID NO: 520974 - protein, 12 aa, Homo sapiens
  CDR3 for beta chain variable domain of TCR clone 260487 (TRBV11-2, TRBJ2-1)
CASSPGNNEQFF

SEQ ID NO: 520975 - protein, 14 aa, Homo sapiens
  CDR3 for alpha chain variable domain of TCR clone 260488 (TRAV1-2, TRAJ16)
CAVNRFSDGQKLLF

SEQ ID NO: 520976 - protein, 14 aa, Homo sapiens
  CDR3 for beta chain variable domain of TCR clone 260488 (TRBV2, TRBJ2-5)
CASSGVLAQETQYF

SEQ ID NO: 520977 - protein, 12 aa, Homo sapiens
  CDR3 for alpha chain variable domain of TCR clone 260489 (TRAV12-3, TRAJ21)
CAMFNNFNKFYF

SEQ ID NO: 520978 - protein, 16 aa, Homo sapiens
  CDR3 for beta chain variable domain of TCR clone 260489 (TRBV7-9, TRBJ1-2)
CASSLAPSRAAYGYTF

SEQ ID NO: 520979 - protein, 13 aa, Homo sapiens
  CDR3 for alpha chain variable domain of TCR clone 260490 (TRAV20, TRAJ48)
CAVQGVGYEKLTF

SEQ ID NO: 520980 - protein, 14 aa, Homo sapiens
  CDR3 for beta chain variable domain of TCR clone 260490 (TRBV27, TRBJ2-7)
CASSFRDGPYEQYF

SEQ ID NO: 520981 - protein, 15 aa, Homo sapiens
  CDR3 for alpha chain variable domain of TCR clone 260491 (TRAV3, TRAJ22)
CAVRDWGGSARQLTF

SEQ ID NO: 520982 - protein, 16 aa, Homo sapiens
  CDR3 for beta chain variable domain of TCR clone 260491 (TRBV5-4, TRBJ2-3)
CASQQPGAGGADTQYF

SEQ ID NO: 520983 - protein, 18 aa, Homo sapiens
  CDR3 for alpha chain variable domain of TCR clone 260492 (TRAV8-4, TRAJ52)
CAVASFNAGGTSYGKLTF

SEQ ID NO: 520984 - protein, 13 aa, Homo sapiens
  CDR3 for beta chain variable domain of TCR clone 260492 (TRBV7-3, TRBJ1-1)
CASSQDWGAEAFC

SEQ ID NO: 520985 - protein, 16 aa, Homo sapiens
  CDR3 for alpha chain variable domain of TCR clone 260493 (TRAV12-2, TRAJ10)
CAVNRVLTGGGNKITF

SEQ ID NO: 520986 - protein, 14 aa, Homo sapiens
  CDR3 for beta chain variable domain of TCR clone 260493 (TRBV9, TRBJ2-1)
CASSVALAVNEQFF

SEQ ID NO: 520987 - protein, 12 aa, Homo sapiens
  CDR3 for alpha chain variable domain of TCR clone 260494 (TRAV20, TRAJ54)
CAVQEGAQKLVF

SEQ ID NO: 520988 - protein, 17 aa, Homo sapiens
  CDR3 for beta chain variable domain of TCR clone 260494 (TRBV13, TRBJ2-3)
CASSISRVAGGRNTQYF

SEQ ID NO: 520989 - protein, 15 aa, Homo sapiens
  CDR3 for alpha chain variable domain of TCR clone 260495 (TRAV34, TRAJ38)
CGADFTPDNNRKLIW

SEQ ID NO: 520990 - protein, 15 aa, Homo sapiens
  CDR3 for beta chain variable domain of TCR clone 260495 (TRBV9, TRBJ1-6)
CASSVAGTGDSPLHF

SEQ ID NO: 520991 - protein, 14 aa, Homo sapiens
  CDR3 for alpha chain variable domain of TCR clone 260496 (TRAV8-3, TRAJ39)
CAEGANNAGNMLTF

SEQ ID NO: 520992 - protein, 13 aa, Homo sapiens
  CDR3 for beta chain variable domain of TCR clone 260496 (TRBV3-1, TRBJ2-5)
CASSPVLSKTQYF

SEQ ID NO: 520993 - protein, 14 aa, Homo sapiens
  CDR3 for alpha chain variable domain of TCR clone 260497 (TRAV3, TRAJ9)
CAVRLNTGGFKTIF

SEQ ID NO: 520994 - protein, 15 aa, Homo sapiens
  CDR3 for beta chain variable domain of TCR clone 260497 (TRBV7-2, TRBJ2-1)
CGSSLASGRVNEQFF

SEQ ID NO: 520995 - protein, 13 aa, Homo sapiens
  CDR3 for alpha chain variable domain of TCR clone 260498 (TRAV2, TRAJ21)
CALEDNNFNKFYF

SEQ ID NO: 520996 - protein, 14 aa, Homo sapiens
  CDR3 for beta chain variable domain of TCR clone 260498 (TRBV6-1, TRBJ2-7)
CASSERVNPYEQYF

SEQ ID NO: 520997 - protein, 16 aa, Homo sapiens
  CDR3 for alpha chain variable domain of TCR clone 260499 (TRAV12-3, TRAJ58)
CAMTDTEETSGSSLTF

SEQ ID NO: 520998 - protein, 15 aa, Homo sapiens
  CDR3 for beta chain variable domain of TCR clone 260499 (TRBV11-3, TRBJ2-3)
CASLKDGREGDTQYF

SEQ ID NO: 520999 - protein, 13 aa, Homo sapiens
  CDR3 for alpha chain variable domain of TCR clone 260500 (TRAV1-1, TRAJ9)
CAAKNTGGFKTIL

SEQ ID NO: 521000 - protein, 16 aa, Homo sapiens
  CDR3 for beta chain variable domain of TCR clone 260500 (TRBV12-5, TRBJ2-5)
CASGPRTSGNQETQYF

SEQ ID NO: 521001 - protein, 12 aa, Homo sapiens
  CDR3 for alpha chain variable domain of TCR clone 260501 (TRAV12-2, TRAJ23)
CAVNNGGGKLIF

SEQ ID NO: 521002 - protein, 16 aa, Homo sapiens
  CDR3 for beta chain variable domain of TCR clone 260501 (TRBV12-4, TRBJ1-5)
CASSRPVGGSNQPQHF

SEQ ID NO: 521003 - protein, 14 aa, Homo sapiens
  CDR3 for alpha chain variable domain of TCR clone 260502 (TRAV12-2, TRAJ17)
CAVLFKAAGNKLTF

SEQ ID NO: 521004 - protein, 14 aa, Homo sapiens
  CDR3 for beta chain variable domain of TCR clone 260502 (TRBV4-1, TRBJ2-7)
CASRLTSGSYEQYF

SEQ ID NO: 521005 - protein, 14 aa, Homo sapiens
  CDR3 for alpha chain variable domain of TCR clone 260503 (TRAV29/DV5, TRAJ45)
CAASFRGGADGLTF

SEQ ID NO: 521006 - protein, 17 aa, Homo sapiens
  CDR3 for beta chain variable domain of TCR clone 260503 (TRBV7-8, TRBJ2-6)
CASSAGTGGAGANVLTF

SEQ ID NO: 521007 - protein, 16 aa, Homo sapiens
  CDR3 for alpha chain variable domain of TCR clone 260504 (TRAV3, TRAJ37)
CAVIPHGSGNTGKLIF

SEQ ID NO: 521008 - protein, 15 aa, Homo sapiens
  CDR3 for beta chain variable domain of TCR clone 260504 (TRBV10-3, TRBJ2-3)
CAISLTSGGTDTQYF

SEQ ID NO: 521009 - protein, 15 aa, Homo sapiens
  CDR3 for alpha chain variable domain of TCR clone 260505 (TRAV25, TRAJ52)
CAGRPGGTSYGKLTF

SEQ ID NO: 521010 - protein, 16 aa, Homo sapiens
  CDR3 for beta chain variable domain of TCR clone 260505 (TRBV6-1, TRBJ2-1)
CASILRQGSSYNEQFF

SEQ ID NO: 521011 - protein, 16 aa, Homo sapiens
  CDR3 for alpha chain variable domain of TCR clone 260506 (TRAV23/DV6, TRAJ48)
FAASGVVNFGNEKLTF

SEQ ID NO: 521012 - protein, 15 aa, Homo sapiens
  CDR3 for beta chain variable domain of TCR clone 260506 (TRBV20-1, TRBJ2-5)
CSAGLAGVSQETQYF

SEQ ID NO: 521013 - protein, 11 aa, Homo sapiens
  CDR3 for alpha chain variable domain of TCR clone 260507 (TRAV1-2, TRAJ11)
CAVRGYSTLTF

SEQ ID NO: 521014 - protein, 18 aa, Homo sapiens
  CDR3 for beta chain variable domain of TCR clone 260507 (TRBV20-1, TRBJ2-6)
CSAETTPTHGSGANVLNF

SEQ ID NO: 521015 - protein, 15 aa, Homo sapiens
  CDR3 for alpha chain variable domain of TCR clone 260508 (TRAV26-1, TRAJ29)
CIVRVEGSGNIPLVF

SEQ ID NO: 521016 - protein, 15 aa, Homo sapiens
  CDR3 for beta chain variable domain of TCR clone 260508 (TRBV28, TRBJ2-5)
CASSPGQGSIETQYF

SEQ ID NO: 521017 - protein, 11 aa, Homo sapiens
  CDR3 for alpha chain variable domain of TCR clone 260509 (TRAV2, TRAJ33)
SAVDSNYQLIW

SEQ ID NO: 521018 - protein, 14 aa, Homo sapiens
  CDR3 for beta chain variable domain of TCR clone 260509 (TRBV19, TRBJ1-5)
CASSLGTGGQPQHF

SEQ ID NO: 521019 - protein, 13 aa, Homo sapiens
  CDR3 for alpha chain variable domain of TCR clone 260510 (TRAV26-1, TRAJ34)
CIVRVHNTDKLIF

SEQ ID NO: 521020 - protein, 15 aa, Homo sapiens
  CDR3 for beta chain variable domain of TCR clone 260510 (TRBV4-1, TRBJ2-7)
CASSQEWGPSYEQYF

SEQ ID NO: 521021 - protein, 15 aa, Homo sapiens
  CDR3 for alpha chain variable domain of TCR clone 260511 (TRAV29/DV5, TRAJ42)
CAATTDGGSQGNLIF

SEQ ID NO: 521022 - protein, 15 aa, Homo sapiens
  CDR3 for beta chain variable domain of TCR clone 260511 (TRBV5-1, TRBJ2-2)
CASSSQGGNTGELFF

SEQ ID NO: 521023 - protein, 16 aa, Homo sapiens
  CDR3 for alpha chain variable domain of TCR clone 260512 (TRAV3, TRAJ37)
CAVRPHGSGNTGKLIF

SEQ ID NO: 521024 - protein, 15 aa, Homo sapiens
  CDR3 for beta chain variable domain of TCR clone 260512 (TRBV5-5, TRBJ2-7)
CASSLAAPFSYEQYF

SEQ ID NO: 521025 - protein, 13 aa, Homo sapiens
  CDR3 for alpha chain variable domain of TCR clone 260513 (TRAV8-3, TRAJ43)
CAVVPYNNNDMRF

SEQ ID NO: 521026 - protein, 17 aa, Homo sapiens
  CDR3 for beta chain variable domain of TCR clone 260513 (TRBV7-7, TRBJ1-1)
CASIGDRPNLGVTEASF

SEQ ID NO: 521027 - protein, 14 aa, Homo sapiens
  CDR3 for alpha chain variable domain of TCR clone 260514 (TRAV9-2, TRAJ39)
CALYIYNAGNMLTF

SEQ ID NO: 521028 - protein, 17 aa, Homo sapiens
  CDR3 for beta chain variable domain of TCR clone 260514 (TRBV7-3, TRBJ2-3)
SASSPRGQGYGTDTQYF

SEQ ID NO: 521029 - protein, 16 aa, Homo sapiens
  CDR3 for alpha chain variable domain of TCR clone 260515 (TRAV3, TRAJ37)
CAVRPHGSGNTGKLSL

SEQ ID NO: 521030 - protein, 15 aa, Homo sapiens
  CDR3 for beta chain variable domain of TCR clone 260515 (TRBV5-5, TRBJ2-7)
CASSLAAPLSYEQYF

SEQ ID NO: 521031 - protein, 14 aa, Homo sapiens
  CDR3 for alpha chain variable domain of TCR clone 260516 (TRAV12-2, TRAJ40)
CAVKIPSGTHKYIF

SEQ ID NO: 521032 - protein, 17 aa, Homo sapiens
  CDR3 for beta chain variable domain of TCR clone 260516 (TRBV13, TRBJ2-3)
CASSLSRVAGGRSTQYF

SEQ ID NO: 521033 - protein, 14 aa, Homo sapiens
  CDR3 for alpha chain variable domain of TCR clone 260517 (TRAV12-2, TRAJ40)
CAVKIPPGTYKYIF

SEQ ID NO: 521034 - protein, 17 aa, Homo sapiens
  CDR3 for beta chain variable domain of TCR clone 260517 (TRBV7-8, TRBJ2-6)
CASSAGTGGAGANVLTF

SEQ ID NO: 521035 - protein, 13 aa, Homo sapiens
  CDR3 for alpha chain variable domain of TCR clone 260518 (TRAV1-2, TRAJ12)
CAVSMDSSNKLIF

SEQ ID NO: 521036 - protein, 15 aa, Homo sapiens
  CDR3 for beta chain variable domain of TCR clone 260518 (TRBV27, TRBJ2-5)
CASSLIPSGGETQYF

SEQ ID NO: 521037 - protein, 15 aa, Homo sapiens
  CDR3 for alpha chain variable domain of TCR clone 260519 (TRAV41, TRAJ45)
CAASYSGGGADGLTF

SEQ ID NO: 521038 - protein, 15 aa, Homo sapiens
  CDR3 for beta chain variable domain of TCR clone 260519 (TRBV7-9, TRBJ1-5)
CASSQGHQPNQPQHF

SEQ ID NO: 521039 - protein, 16 aa, Homo sapiens
  CDR3 for alpha chain variable domain of TCR clone 260520 (TRAV30, TRAJ24)
CGTEVVDADSWGKFQF

SEQ ID NO: 521040 - protein, 13 aa, Homo sapiens
  CDR3 for beta chain variable domain of TCR clone 260520 (TRBV7-2, TRBJ1-4)
CASSLAGLEKLFF

SEQ ID NO: 521041 - protein, 15 aa, Homo sapiens
  CDR3 for alpha chain variable domain of TCR clone 260521 (TRAV2, TRAJ9)
CAVEDRGTGGFKTIF

SEQ ID NO: 521042 - protein, 16 aa, Homo sapiens
  CDR3 for beta chain variable domain of TCR clone 260521 (TRBV27, TRBJ2-2)
CASSFRGLVRTGELFF

SEQ ID NO: 521043 - protein, 14 aa, Homo sapiens
  CDR3 for alpha chain variable domain of TCR clone 260522 (TRAV26-1, TRAJ54)
CIVRRTQGAQKLVF

SEQ ID NO: 521044 - protein, 16 aa, Homo sapiens
  CDR3 for beta chain variable domain of TCR clone 260522 (TRBV19, TRBJ2-1)
CASSKAGPSSYNEQFF

SEQ ID NO: 521045 - protein, 15 aa, Homo sapiens
  CDR3 for alpha chain variable domain of TCR clone 260523 (TRAV12-3, TRAJ13)
CAMTSGGYQKVTLEL

SEQ ID NO: 521046 - protein, 13 aa, Homo sapiens
  CDR3 for beta chain variable domain of TCR clone 260523 (TRBV20-1, TRBJ2-2)
CSALSGGAGELFF

SEQ ID NO: 521047 - protein, 11 aa, Homo sapiens
  CDR3 for alpha chain variable domain of TCR clone 260524 (TRAV17, TRAJ9)
CGFTGGFKSIF

SEQ ID NO: 521048 - protein, 18 aa, Homo sapiens
  CDR3 for beta chain variable domain of TCR clone 260524 (TRBV12-4, TRBJ2-2)
CASSLVAGTRGRTGELFF

SEQ ID NO: 521049 - protein, 16 aa, Homo sapiens
  CDR3 for alpha chain variable domain of TCR clone 260525 (TRAV21, TRAJ52)
CAVTNAGCTSYGKLTF

SEQ ID NO: 521050 - protein, 13 aa, Homo sapiens
  CDR3 for beta chain variable domain of TCR clone 260525 (TRBV20-1, TRBJ2-3)
CSARLAGTDTQYF

SEQ ID NO: 521051 - protein, 16 aa, Homo sapiens
  CDR3 for alpha chain variable domain of TCR clone 260526 (TRAV13-1, TRAJ22)
CAAKGCRSGSARQLTF

SEQ ID NO: 521052 - protein, 15 aa, Homo sapiens
  CDR3 for beta chain variable domain of TCR clone 260526 (TRBV9, TRBJ1-6)
CASSVAGTGDSPLHF

SEQ ID NO: 521053 - protein, 17 aa, Homo sapiens
  CDR3 for alpha chain variable domain of TCR clone 260527 (TRAV23/DV6, TRAJ12)
CAAIDLGAMDRSYKLIF

SEQ ID NO: 521054 - protein, 12 aa, Homo sapiens
  CDR3 for beta chain variable domain of TCR clone 260527 (TRBV10-3, TRBJ2-2)
CAIRENTGELFF

SEQ ID NO: 521055 - protein, 11 aa, Homo sapiens
  CDR3 for alpha chain variable domain of TCR clone 260528 (TRAV16, TRAJ31)
CALFNNARLMF

SEQ ID NO: 521056 - protein, 15 aa, Homo sapiens
  CDR3 for beta chain variable domain of TCR clone 260528 (TRBV18, TRBJ1-1)
CASSPRQGENNEAFF

SEQ ID NO: 521057 - protein, 13 aa, Homo sapiens
  CDR3 for alpha chain variable domain of TCR clone 260529 (TRAV2, TRAJ15)
CAVEAQAGTALIF

SEQ ID NO: 521058 - protein, 15 aa, Homo sapiens
  CDR3 for beta chain variable domain of TCR clone 260529 (TRBV19, TRBJ2-7)
CASSPAGSGEALRYF

SEQ ID NO: 521059 - protein, 15 aa, Homo sapiens
  CDR3 for alpha chain variable domain of TCR clone 260530 (TRAV26-1, TRAJ48)
CIVRVGDFGNEKLTF

SEQ ID NO: 521060 - protein, 16 aa, Homo sapiens
  CDR3 for beta chain variable domain of TCR clone 260530 (TRBV4-1, TRBJ2-3)
CDSSQRAGGLTDTQYF

SEQ ID NO: 521061 - protein, 14 aa, Homo sapiens
  CDR3 for alpha chain variable domain of TCR clone 260531 (TRAV26-1, TRAJ45)
CIVRVVGGAYVLTF

SEQ ID NO: 521062 - protein, 16 aa, Homo sapiens
  CDR3 for beta chain variable domain of TCR clone 260531 (TRBV7-9, TRBJ1-1)
CASSLTQVRSNTEAFF

SEQ ID NO: 521063 - protein, 13 aa, Homo sapiens
  CDR3 for alpha chain variable domain of TCR clone 260532 (TRAV2, TRAJ29)
CAAGNSGNTPLCF

SEQ ID NO: 521064 - protein, 12 aa, Homo sapiens
  CDR3 for beta chain variable domain of TCR clone 260532 (TRBV7-9, TRBJ2-7)
CASSLGDREQYF

SEQ ID NO: 521065 - protein, 13 aa, Homo sapiens
  CDR3 for alpha chain variable domain of TCR clone 260533 (TRAV17, TRAJ5)
CAPMDTGRRALTF

SEQ ID NO: 521066 - protein, 14 aa, Homo sapiens
  CDR3 for beta chain variable domain of TCR clone 260533 (TRBV7-8, TRBJ2-3)
CASSSRDSTDTQYF

SEQ ID NO: 521067 - protein, 14 aa, Homo sapiens
  CDR3 for alpha chain variable domain of TCR clone 260534 (TRAV9-2, TRAJ38)
CALSNAGNNRKLIG

SEQ ID NO: 521068 - protein, 17 aa, Homo sapiens
  CDR3 for beta chain variable domain of TCR clone 260534 (TRBV20-1, TRBJ2-1)
CSARDPLAGVWDNEQFF

SEQ ID NO: 521069 - protein, 11 aa, Homo sapiens
  CDR3 for alpha chain variable domain of TCR clone 260535 (TRAV4, TRAJ28)
CLVGDNRAETL

SEQ ID NO: 521070 - protein, 15 aa, Homo sapiens
  CDR3 for beta chain variable domain of TCR clone 260535 (TRBV6-5, TRBJ2-1)
CASRGDFDSYNEQFF

SEQ ID NO: 521071 - protein, 13 aa, Homo sapiens
  CDR3 for alpha chain variable domain of TCR clone 260536 (TRAV38-1, TRAJ42)
CARWGGSQGKRIF

SEQ ID NO: 521072 - protein, 10 aa, Homo sapiens
  CDR3 for beta chain variable domain of TCR clone 260536 (TRBV2, TRBJ2-5)
CASSAATQYF

SEQ ID NO: 521073 - protein, 12 aa, Homo sapiens
  CDR3 for alpha chain variable domain of TCR clone 260537 (TRAV13-2, TRAJ8)
CAPWLGFQKLVF

SEQ ID NO: 521074 - protein, 14 aa, Homo sapiens
  CDR3 for beta chain variable domain of TCR clone 260537 (TRBV18, TRBJ1-5)
CDSSRQQRNQPQHF

SEQ ID NO: 521075 - protein, 14 aa, Homo sapiens
  CDR3 for alpha chain variable domain of TCR clone 260538 (TRAV1-1, TRAJ27)
CAVIYNTNAGKSTF

SEQ ID NO: 521076 - protein, 13 aa, Homo sapiens
  CDR3 for beta chain variable domain of TCR clone 260538 (TRBV7-2, TRBJ2-7)
CASSSPSGSEQYF

SEQ ID NO: 521077 - protein, 13 aa, Homo sapiens
  CDR3 for alpha chain variable domain of TCR clone 260539 (TRAV27, TRAJ6)
CAGGTRGSYIHTF

SEQ ID NO: 521078 - protein, 15 aa, Homo sapiens
  CDR3 for beta chain variable domain of TCR clone 260539 (TRBV11-2, TRBJ1-3)
CASSLSPLVRDTIYF

SEQ ID NO: 521079 - protein, 17 aa, Homo sapiens
  CDR3 for alpha chain variable domain of TCR clone 260540 (TRAV3, TRAJ42)
CAVRDRDYGGSQGNLIF

SEQ ID NO: 521080 - protein, 13 aa, Homo sapiens
  CDR3 for beta chain variable domain of TCR clone 260540 (TRBV12-4, TRBJ2-5)
CDSSPGTVETQYF

SEQ ID NO: 521081 - protein, 11 aa, Homo sapiens
  CDR3 for alpha chain variable domain of TCR clone 260541 (TRAV1-1, TRAJ20)
CAVFNDYKLSF

SEQ ID NO: 521082 - protein, 15 aa, Homo sapiens
  CDR3 for beta chain variable domain of TCR clone 260541 (TRBV7-2, TRBJ2-3)
CASSLAGAFIDTQYF

SEQ ID NO: 521083 - protein, 14 aa, Homo sapiens
  CDR3 for alpha chain variable domain of TCR clone 260542 (TRAV13-1, TRAJ52)
CAALDGTSYGKLTF

SEQ ID NO: 521084 - protein, 14 aa, Homo sapiens
  CDR3 for beta chain variable domain of TCR clone 260542 (TRBV7-2, TRBJ2-5)
CASSFTQGQETQYF

SEQ ID NO: 521085 - protein, 12 aa, Homo sapiens
  CDR3 for alpha chain variable domain of TCR clone 260543 (TRAV3, TRAJ43)
CAVRDPNNDMRF

SEQ ID NO: 521086 - protein, 14 aa, Homo sapiens
  CDR3 for beta chain variable domain of TCR clone 260543 (TRBV5-1, TRBJ2-3)
CASSLFGTTDTQYF

SEQ ID NO: 521087 - protein, 15 aa, Homo sapiens
  CDR3 for alpha chain variable domain of TCR clone 260544 (TRAV27, TRAJ38)
CAARRNAGNNRKLIW

SEQ ID NO: 521088 - protein, 15 aa, Homo sapiens
  CDR3 for beta chain variable domain of TCR clone 260544 (TRBV7-9, TRBJ2-2)
CASSPETGAGGELFF

SEQ ID NO: 521089 - protein, 18 aa, Homo sapiens
  CDR3 for alpha chain variable domain of TCR clone 260545 (TRAV12-3, TRAJ52)
CAMSVGGAGGTSFGKLTF

SEQ ID NO: 521090 - protein, 16 aa, Homo sapiens
  CDR3 for beta chain variable domain of TCR clone 260545 (TRBV7-9, TRBJ2-1)
CASSDVAGGSYNEQFF

SEQ ID NO: 521091 - protein, 17 aa, Homo sapiens
  CDR3 for alpha chain variable domain of TCR clone 260546 (TRAV3, TRAJ28)
CAVRAAYSGAGSYQLTF

SEQ ID NO: 521092 - protein, 18 aa, Homo sapiens
  CDR3 for beta chain variable domain of TCR clone 260546 (TRBV27, TRBJ2-1)
CASGNRAVGVGSKNEQFF

SEQ ID NO: 521093 - protein, 15 aa, Homo sapiens
  CDR3 for alpha chain variable domain of TCR clone 260547 (TRAV8-4, TRAJ12)
CAVSDRVDSSYKLIF

SEQ ID NO: 521094 - protein, 15 aa, Homo sapiens
  CDR3 for beta chain variable domain of TCR clone 260547 (TRBV11-3, TRBJ2-1)
CASSLAGQTYNDQFF

SEQ ID NO: 521095 - protein, 17 aa, Homo sapiens
  CDR3 for alpha chain variable domain of TCR clone 260548 (TRAV2, TRAJ32)
CCLLLWGGGGATNKLIF

SEQ ID NO: 521096 - protein, 13 aa, Homo sapiens
  CDR3 for beta chain variable domain of TCR clone 260548 (TRBV20-1, TRBJ1-1)
CSARGGGNTEAVF

SEQ ID NO: 521097 - protein, 13 aa, Homo sapiens
  CDR3 for alpha chain variable domain of TCR clone 260549 (TRAV21, TRAJ27)
CAARPGNAGKSTF

SEQ ID NO: 521098 - protein, 15 aa, Homo sapiens
  CDR3 for beta chain variable domain of TCR clone 260549 (TRBV6-3, TRBJ2-7)
RASSSPGTVFYEQYF

SEQ ID NO: 521099 - protein, 16 aa, Homo sapiens
  CDR3 for alpha chain variable domain of TCR clone 260550 (TRAV12-2, TRAJ45)
CAVKRNPGGGADGLTF

SEQ ID NO: 521100 - protein, 12 aa, Homo sapiens
  CDR3 for beta chain variable domain of TCR clone 260550 (TRBV6-1, TRBJ2-5)
CARSEGRETQYF

SEQ ID NO: 521101 - protein, 15 aa, Homo sapiens
  CDR3 for alpha chain variable domain of TCR clone 260551 (TRAV25, TRAJ52)
CAGTSGGTSYGKLTF

SEQ ID NO: 521102 - protein, 16 aa, Homo sapiens
  CDR3 for beta chain variable domain of TCR clone 260551 (TRBV12-4, TRBJ1-5)
CASSRPVGGSNQPQHF

SEQ ID NO: 521103 - protein, 14 aa, Homo sapiens
  CDR3 for alpha chain variable domain of TCR clone 260552 (TRAV38-1, TRAJ45)
CAYYSGGGADGLTF

SEQ ID NO: 521104 - protein, 15 aa, Homo sapiens
  CDR3 for beta chain variable domain of TCR clone 260552 (TRBV6-5, TRBJ1-2)
CASSYSQAFNYGYTF

SEQ ID NO: 521105 - protein, 13 aa, Homo sapiens
  CDR3 for alpha chain variable domain of TCR clone 260553 (TRAV2, TRAJ40)
CAVVTSGTYKYIF

SEQ ID NO: 521106 - protein, 17 aa, Homo sapiens
  CDR3 for beta chain variable domain of TCR clone 260553 (TRBV19, TRBJ1-5)
CASSPGRTFYSNQPQHF

SEQ ID NO: 521107 - protein, 16 aa, Homo sapiens
  CDR3 for alpha chain variable domain of TCR clone 260554 (TRAV26-1, TRAJ38)
CIVRVSGAGNNRKMIW

SEQ ID NO: 521108 - protein, 14 aa, Homo sapiens
  CDR3 for beta chain variable domain of TCR clone 260554 (TRBV25-1, TRBJ1-1)
CASTHLGGNTEAFF

SEQ ID NO: 521109 - protein, 14 aa, Homo sapiens
  CDR3 for alpha chain variable domain of TCR clone 260555 (TRAV12-2, TRAJ15)
CAPHTGQAGTALIF

SEQ ID NO: 521110 - protein, 17 aa, Homo sapiens
  CDR3 for beta chain variable domain of TCR clone 260555 (TRBV5-5, TRBJ1-2)
CASSLGSLDGESEGYTF

SEQ ID NO: 521111 - protein, 14 aa, Homo sapiens
  CDR3 for alpha chain variable domain of TCR clone 260556 (TRAV1-2, TRAJ16)
CAVNRLSDGQKLLF

SEQ ID NO: 521112 - protein, 15 aa, Homo sapiens
  CDR3 for beta chain variable domain of TCR clone 260556 (TRBV7-9, TRBJ1-6)
CARSSPGRGNSPLHF

SEQ ID NO: 521113 - protein, 15 aa, Homo sapiens
  CDR3 for alpha chain variable domain of TCR clone 260557 (TRAV35, TRAJ40)
CAGQLGTSGTYKYVF

SEQ ID NO: 521114 - protein, 14 aa, Homo sapiens
  CDR3 for beta chain variable domain of TCR clone 260557 (TRBV7-3, TRBJ2-1)
CASSVAGGTNEQFF

SEQ ID NO: 521115 - protein, 13 aa, Homo sapiens
  CDR3 for alpha chain variable domain of TCR clone 260558 (TRAV3, TRAJ27)
CAVRPLGAGKSTF

SEQ ID NO: 521116 - protein, 14 aa, Homo sapiens
  CDR3 for beta chain variable domain of TCR clone 260558 (TRBV7-3, TRBJ2-7)
CASSLKADSYEQYF

SEQ ID NO: 521117 - protein, 11 aa, Homo sapiens
  CDR3 for alpha chain variable domain of TCR clone 260559 (TRAV1-2, TRAJ20)
CAVANDSKLSF

SEQ ID NO: 521118 - protein, 18 aa, Homo sapiens
  CDR3 for beta chain variable domain of TCR clone 260559 (TRBV20-1, TRBJ2-6)
CSAETTPTRGSGANVLTF

SEQ ID NO: 521119 - protein, 12 aa, Homo sapiens
  CDR3 for alpha chain variable domain of TCR clone 260560 (TRAV12-3, TRAJ40)
CAMSSGTYKYIF

SEQ ID NO: 521120 - protein, 13 aa, Homo sapiens
  CDR3 for beta chain variable domain of TCR clone 260560 (TRBV28, TRBJ2-7)
CAGAQQGLDEQYF

SEQ ID NO: 521121 - protein, 13 aa, Homo sapiens
  CDR3 for alpha chain variable domain of TCR clone 260561 (TRAV39, TRAJ33)
CAANPDSNYQLIW

SEQ ID NO: 521122 - protein, 17 aa, Homo sapiens
  CDR3 for beta chain variable domain of TCR clone 260561 (TRBV20-1, TRBJ2-2)
CSASGSGQGGLTGELFF

SEQ ID NO: 521123 - protein, 11 aa, Homo sapiens
  CDR3 for alpha chain variable domain of TCR clone 260562 (TRAV3, TRAJ21)
CAVGNFNKFYF

SEQ ID NO: 521124 - protein, 15 aa, Homo sapiens
  CDR3 for beta chain variable domain of TCR clone 260562 (TRBV5-7, TRBJ2-2)
CASSLASSNTGELFF

SEQ ID NO: 521125 - protein, 14 aa, Homo sapiens
  CDR3 for alpha chain variable domain of TCR clone 260563 (TRAV1-2, TRAJ16)
CAVNRFSGGQKLLF

SEQ ID NO: 521126 - protein, 16 aa, Homo sapiens
  CDR3 for beta chain variable domain of TCR clone 260563 (TRBV9, TRBJ2-1)
CASGVGGGGNYNEQFF

SEQ ID NO: 521127 - protein, 16 aa, Homo sapiens
  CDR3 for alpha chain variable domain of TCR clone 260564 (TRAV23/DV6, TRAJ9)
CAASLGGNTGGFKTIF

SEQ ID NO: 521128 - protein, 14 aa, Homo sapiens
  CDR3 for beta chain variable domain of TCR clone 260564 (TRBV9, TRBJ2-7)
CASSVGVGSYEQYF

SEQ ID NO: 521129 - protein, 13 aa, Homo sapiens
  CDR3 for alpha chain variable domain of TCR clone 260565 (TRAV14/DV4, TRAJ41)
CKRGSRSGYALNF

SEQ ID NO: 521130 - protein, 15 aa, Homo sapiens
  CDR3 for beta chain variable domain of TCR clone 260565 (TRBV19, TRBJ2-1)
CASSIQATSYNEQFF

SEQ ID NO: 521131 - protein, 17 aa, Homo sapiens
  CDR3 for alpha chain variable domain of TCR clone 260566 (TRAV26-1, TRAJ53)
CIVRVDDSGGSNYKLTF

SEQ ID NO: 521132 - protein, 11 aa, Homo sapiens
  CDR3 for beta chain variable domain of TCR clone 260566 (TRBV7-2, TRBJ2-7)
CASSSGLWQYF

SEQ ID NO: 521133 - protein, 13 aa, Homo sapiens
  CDR3 for alpha chain variable domain of TCR clone 260567 (TRAV13-2, TRAJ48)
CAEVDFGNEKLTF

SEQ ID NO: 521134 - protein, 15 aa, Homo sapiens
  CDR3 for beta chain variable domain of TCR clone 260567 (TRBV7-9, TRBJ1-6)
CAGSSPGRGNSPLHF

SEQ ID NO: 521135 - protein, 12 aa, Homo sapiens
  CDR3 for alpha chain variable domain of TCR clone 260568 (TRAV13-2, TRAJ48)
CRDGLWDEKLTF

SEQ ID NO: 521136 - protein, 15 aa, Homo sapiens
  CDR3 for beta chain variable domain of TCR clone 260568 (TRBV7-9, TRBJ1-6)
CASSSPGRGNSPLHF

SEQ ID NO: 521137 - protein, 15 aa, Homo sapiens
  CDR3 for alpha chain variable domain of TCR clone 260569 (TRAV34, TRAJ38)
FGADFTPGNNRKLIW

SEQ ID NO: 521138 - protein, 16 aa, Homo sapiens
  CDR3 for beta chain variable domain of TCR clone 260569 (TRBV12-5, TRBJ2-5)
CASGPRTSGNQETQYF

SEQ ID NO: 521139 - protein, 15 aa, Homo sapiens
  CDR3 for alpha chain variable domain of TCR clone 260570 (TRAV13-1, TRAJ45)
CAASGSGGGADGLTF

SEQ ID NO: 521140 - protein, 12 aa, Homo sapiens
  CDR3 for beta chain variable domain of TCR clone 260570 (TRBV11-2, TRBJ2-2)
CANSLGGGELFF

SEQ ID NO: 521141 - protein, 15 aa, Homo sapiens
  CDR3 for alpha chain variable domain of TCR clone 260571 (TRAV25, TRAJ53)
CAATGGGGSNYKLTF

SEQ ID NO: 521142 - protein, 17 aa, Homo sapiens
  CDR3 for beta chain variable domain of TCR clone 260571 (TRBV7-3, TRBJ2-3)
CASSLMKRMRGADTQYF

SEQ ID NO: 521143 - protein, 13 aa, Homo sapiens
  CDR3 for alpha chain variable domain of TCR clone 260572 (TRAV30, TRAJ22)
CGTLSGSARQLTF

SEQ ID NO: 521144 - protein, 14 aa, Homo sapiens
  CDR3 for beta chain variable domain of TCR clone 260572 (TRBV6-1, TRBJ2-1)
CASSEATRVDEQFF

SEQ ID NO: 521145 - protein, 13 aa, Homo sapiens
  CDR3 for alpha chain variable domain of TCR clone 260573 (TRAV12-1, TRAJ26)
CVVRRNYGQHFVF

SEQ ID NO: 521146 - protein, 15 aa, Homo sapiens
  CDR3 for beta chain variable domain of TCR clone 260573 (TRBV27, TRBJ2-1)
CASSNGGGSSNEQFF

SEQ ID NO: 521147 - protein, 18 aa, Homo sapiens
  CDR3 for alpha chain variable domain of TCR clone 260574 (TRAV12-3, TRAJ52)
CAMSVGGAGGTSYGKLTF

SEQ ID NO: 521148 - protein, 13 aa, Homo sapiens
  CDR3 for beta chain variable domain of TCR clone 260574 (TRBV12-5, TRBJ2-3)
CASQNRGTDTQYF

SEQ ID NO: 521149 - protein, 16 aa, Homo sapiens
  CDR3 for alpha chain variable domain of TCR clone 260575 (TRAV12-3, TRAJ53)
CAMSPGSGGSNHKLTF

SEQ ID NO: 521150 - protein, 20 aa, Homo sapiens
  CDR3 for beta chain variable domain of TCR clone 260575 (TRBV7-8, TRBJ2-2)
CASSHLFPGPTIHITGELFF

SEQ ID NO: 521151 - protein, 14 aa, Homo sapiens
  CDR3 for alpha chain variable domain of TCR clone 260576 (TRAV34, TRAJ44)
CGADGTGTASKLTF

SEQ ID NO: 521152 - protein, 15 aa, Homo sapiens
  CDR3 for beta chain variable domain of TCR clone 260576 (TRBV5-1, TRBJ2-1)
CAISPPRAPYNEQFF

SEQ ID NO: 521153 - protein, 15 aa, Homo sapiens
  CDR3 for alpha chain variable domain of TCR clone 260577 (TRAV17, TRAJ57)
CATGPSQGGSAKLVF

SEQ ID NO: 521154 - protein, 14 aa, Homo sapiens
  CDR3 for beta chain variable domain of TCR clone 260577 (TRBV11-2, TRBJ1-2)
CASSLYRGNYGYTF

SEQ ID NO: 521155 - protein, 17 aa, Homo sapiens
  CDR3 for alpha chain variable domain of TCR clone 260578 (TRAV12-2, TRAJ4)
CAVNVRPVSGGYNKLIF

SEQ ID NO: 521156 - protein, 13 aa, Homo sapiens
  CDR3 for beta chain variable domain of TCR clone 260578 (TRBV4-1, TRBJ2-7)
CASSQGQAYEQYF

SEQ ID NO: 521157 - protein, 15 aa, Homo sapiens
  CDR3 for alpha chain variable domain of TCR clone 260579 (TRAV1-2, TRAJ32)
CAVRGYGGATNKLIF

SEQ ID NO: 521158 - protein, 15 aa, Homo sapiens
  CDR3 for beta chain variable domain of TCR clone 260579 (TRBV25-1, TRBJ2-5)
CASSDTGTHQDTQYF

SEQ ID NO: 521159 - protein, 15 aa, Homo sapiens
  CDR3 for alpha chain variable domain of TCR clone 260580 (TRAV17, TRAJ16)
CATALRFSDGQKLLF

SEQ ID NO: 521160 - protein, 15 aa, Homo sapiens
  CDR3 for beta chain variable domain of TCR clone 260580 (TRBV20-1, TRBJ2-7)
CSARDRVSGMDEQYF

SEQ ID NO: 521161 - protein, 14 aa, Homo sapiens
  CDR3 for alpha chain variable domain of TCR clone 260581 (TRAV12-2, TRAJ17)
CTVLFKAAGNKLTF

SEQ ID NO: 521162 - protein, 14 aa, Homo sapiens
  CDR3 for beta chain variable domain of TCR clone 260581 (TRBV7-7, TRBJ2-2)
CATRQDSDTGELFF

SEQ ID NO: 521163 - protein, 15 aa, Homo sapiens
  CDR3 for alpha chain variable domain of TCR clone 260582 (TRAV3, TRAJ4)
CAVRDGTGGYNKPIF

SEQ ID NO: 521164 - protein, 16 aa, Homo sapiens
  CDR3 for beta chain variable domain of TCR clone 260582 (TRBV12-4, TRBJ2-5)
CASSWRPSGDLETQYF

SEQ ID NO: 521165 - protein, 10 aa, Homo sapiens
  CDR3 for alpha chain variable domain of TCR clone 260583 (TRAV8-3, TRAJ43)
CVVALADMRF

SEQ ID NO: 521166 - protein, 17 aa, Homo sapiens
  CDR3 for beta chain variable domain of TCR clone 260583 (TRBV10-1, TRBJ2-1)
CASSPQRAGGPFNEQFF

SEQ ID NO: 521167 - protein, 13 aa, Homo sapiens
  CDR3 for alpha chain variable domain of TCR clone 260584 (TRAV2, TRAJ40)
CAVATSGTYKYIF

SEQ ID NO: 521168 - protein, 14 aa, Homo sapiens
  CDR3 for beta chain variable domain of TCR clone 260584 (TRBV19, TRBJ2-1)
CASPTVVLSGEQFF

SEQ ID NO: 521169 - protein, 16 aa, Homo sapiens
  CDR3 for alpha chain variable domain of TCR clone 260585 (TRAV30, TRAJ24)
CGTEIVDADSWGKFQF

SEQ ID NO: 521170 - protein, 15 aa, Homo sapiens
  CDR3 for beta chain variable domain of TCR clone 260585 (TRBV9, TRBJ2-1)
CASSHAGSSYNEQFF

SEQ ID NO: 521171 - protein, 10 aa, Homo sapiens
  CDR3 for alpha chain variable domain of TCR clone 260586 (TRAV30, TRAJ48)
CGIGNEKLTF

SEQ ID NO: 521172 - protein, 14 aa, Homo sapiens
  CDR3 for beta chain variable domain of TCR clone 260586 (TRBV7-6, TRBJ2-3)
CDSSVAGGTDTQYF

SEQ ID NO: 521173 - protein, 13 aa, Homo sapiens
  CDR3 for alpha chain variable domain of TCR clone 260587 (TRAV23/DV6, TRAJ47)
CAASIRNGIWEQT

SEQ ID NO: 521174 - protein, 13 aa, Homo sapiens
  CDR3 for beta chain variable domain of TCR clone 260587 (TRBV19, TRBJ1-2)
CASSQGQVYGYTF

SEQ ID NO: 521175 - protein, 13 aa, Homo sapiens
  CDR3 for alpha chain variable domain of TCR clone 260588 (TRAV12-2, TRAJ13)
CREEDWGLPKVTF

SEQ ID NO: 521176 - protein, 15 aa, Homo sapiens
  CDR3 for beta chain variable domain of TCR clone 260588 (TRBV27, TRBJ2-1)
CASSNGGGSSNEQFF

SEQ ID NO: 521177 - protein, 18 aa, Homo sapiens
  CDR3 for alpha chain variable domain of TCR clone 260589 (TRAV21, TRAJ52)
CAVRPSPAGGTSYGNLTF

SEQ ID NO: 521178 - protein, 12 aa, Homo sapiens
  CDR3 for beta chain variable domain of TCR clone 260589 (TRBV7-2, TRBJ2-2)
CATQIVTGELFF

SEQ ID NO: 521179 - protein, 13 aa, Homo sapiens
  CDR3 for alpha chain variable domain of TCR clone 260590 (TRAV27, TRAJ17)
CAGAAAAGNKLTV

SEQ ID NO: 521180 - protein, 15 aa, Homo sapiens
  CDR3 for beta chain variable domain of TCR clone 260590 (TRBV5-1, TRBJ2-3)
CASRNQAGSTDTQYF

SEQ ID NO: 521181 - protein, 14 aa, Homo sapiens
  CDR3 for alpha chain variable domain of TCR clone 260591 (TRAV12-1, TRAJ12)
CVVTRMDSSYKLIF

SEQ ID NO: 521182 - protein, 13 aa, Homo sapiens
  CDR3 for beta chain variable domain of TCR clone 260591 (TRBV20-1, TRBJ1-1)
CSARDGGNTEAFF

SEQ ID NO: 521183 - protein, 15 aa, Homo sapiens
  CDR3 for alpha chain variable domain of TCR clone 260592 (TRAV12-3, TRAJ10)
CASHILTGGGNKLTF

SEQ ID NO: 521184 - protein, 15 aa, Homo sapiens
  CDR3 for beta chain variable domain of TCR clone 260592 (TRBV7-2, TRBJ1-6)
CASSLGPDRGMPLHF

SEQ ID NO: 521185 - protein, 13 aa, Homo sapiens
  CDR3 for alpha chain variable domain of TCR clone 260593 (TRAV26-2, TRAJ43)
CILRAVSNYDMRF

SEQ ID NO: 521186 - protein, 15 aa, Homo sapiens
  CDR3 for beta chain variable domain of TCR clone 260593 (TRBV7-2, TRBJ2-1)
CASTHGTGIYNEQFF

SEQ ID NO: 521187 - protein, 15 aa, Homo sapiens
  CDR3 for alpha chain variable domain of TCR clone 260594 (TRAV12-2, TRAJ53)
CAVNVGGGSNYKLTF

SEQ ID NO: 521188 - protein, 15 aa, Homo sapiens
  CDR3 for beta chain variable domain of TCR clone 260594 (TRBV20-1, TRBJ2-7)
CSARDRVSGMDEQYF

SEQ ID NO: 521189 - protein, 11 aa, Homo sapiens
  CDR3 for alpha chain variable domain of TCR clone 260595 (TRAV21, TRAJ34)
CVVTNTDKLIF

SEQ ID NO: 521190 - protein, 13 aa, Homo sapiens
  CDR3 for beta chain variable domain of TCR clone 260595 (TRBV7-3, TRBJ2-1)
CASSPVAYNEQFF

SEQ ID NO: 521191 - protein, 11 aa, Homo sapiens
  CDR3 for alpha chain variable domain of TCR clone 260596 (TRAV12-2, TRAJ21)
CVVNNFNKFYF

SEQ ID NO: 521192 - protein, 17 aa, Homo sapiens
  CDR3 for beta chain variable domain of TCR clone 260596 (TRBV7-8, TRBJ2-1)
CASSPPTGTLAYNEQFF

SEQ ID NO: 521193 - protein, 14 aa, Homo sapiens
  CDR3 for alpha chain variable domain of TCR clone 260597 (TRAV8-6, TRAJ5)
CAVSVDTGRRALPF

SEQ ID NO: 521194 - protein, 14 aa, Homo sapiens
  CDR3 for beta chain variable domain of TCR clone 260597 (TRBV6-1, TRBJ1-3)
CASVQGGGGNTIYF

SEQ ID NO: 521195 - protein, 17 aa, Homo sapiens
  CDR3 for alpha chain variable domain of TCR clone 260598 (TRAV3, TRAJ12)
CAVRDGGRMDSSYKLIF

SEQ ID NO: 521196 - protein, 13 aa, Homo sapiens
  CDR3 for beta chain variable domain of TCR clone 260598 (TRBV2, TRBJ2-7)
CASTGGSSYEQYF

SEQ ID NO: 521197 - protein, 17 aa, Homo sapiens
  CDR3 for alpha chain variable domain of TCR clone 260599 (TRAV13-1, TRAJ52)
CAASSGAGGTSYGKLTF

SEQ ID NO: 521198 - protein, 15 aa, Homo sapiens
  CDR3 for beta chain variable domain of TCR clone 260599 (TRBV12-4, TRBJ1-5)
CANTRGSGVGQPQHF

SEQ ID NO: 521199 - protein, 15 aa, Homo sapiens
  CDR3 for alpha chain variable domain of TCR clone 260600 (TRAV2, TRAJ24)
CAVVRLKNSWGKLEF

SEQ ID NO: 521200 - protein, 17 aa, Homo sapiens
  CDR3 for beta chain variable domain of TCR clone 260600 (TRBV13, TRBJ2-3)
CASSLSRVAGGRNTQYF

SEQ ID NO: 521201 - protein, 16 aa, Homo sapiens
  CDR3 for alpha chain variable domain of TCR clone 260601 (TRAV12-1, TRAJ48)
CVVNMVSNFGNEKLTF

SEQ ID NO: 521202 - protein, 18 aa, Homo sapiens
  CDR3 for beta chain variable domain of TCR clone 260601 (TRBV11-2, TRBJ2-6)
YASSLNPFLGTGANVLTF

SEQ ID NO: 521203 - protein, 14 aa, Homo sapiens
  CDR3 for alpha chain variable domain of TCR clone 260602 (TRAV21, TRAJ23)
CAVSLYNQGGKLIF

SEQ ID NO: 521204 - protein, 14 aa, Homo sapiens
  CDR3 for beta chain variable domain of TCR clone 260602 (TRBV7-3, TRBJ2-1)
CASSLAGGTNEQFF

SEQ ID NO: 521205 - protein, 11 aa, Homo sapiens
  CDR3 for alpha chain variable domain of TCR clone 260603 (TRAV16, TRAJ31)
CALFNNARLMF

SEQ ID NO: 521206 - protein, 15 aa, Homo sapiens
  CDR3 for beta chain variable domain of TCR clone 260603 (TRBV19, TRBJ2-1)
CASSTQATSYNEQFF

SEQ ID NO: 521207 - protein, 14 aa, Homo sapiens
  CDR3 for alpha chain variable domain of TCR clone 260604 (TRAV8-3, TRAJ9)
CAVVYNTGGFKTIF

SEQ ID NO: 521208 - protein, 14 aa, Homo sapiens
  CDR3 for beta chain variable domain of TCR clone 260604 (TRBV7-3, TRBJ2-2)
CDGSSGGYTGELFF

SEQ ID NO: 521209 - protein, 15 aa, Homo sapiens
  CDR3 for alpha chain variable domain of TCR clone 260605 (TRAV26-1, TRAJ44)
CIARVPFGTASKLTF

SEQ ID NO: 521210 - protein, 16 aa, Homo sapiens
  CDR3 for beta chain variable domain of TCR clone 260605 (TRBV3-1, TRBJ2-5)
CASSQDWASGQETQYF

SEQ ID NO: 521211 - protein, 14 aa, Homo sapiens
  CDR3 for alpha chain variable domain of TCR clone 260606 (TRAV26-1, TRAJ34)
CIVRVAYNTDKLIF

SEQ ID NO: 521212 - protein, 15 aa, Homo sapiens
  CDR3 for beta chain variable domain of TCR clone 260606 (TRBV7-3, TRBJ2-1)
CASRPTGGGEVEQFF

SEQ ID NO: 521213 - protein, 12 aa, Homo sapiens
  CDR3 for alpha chain variable domain of TCR clone 260607 (TRAV23/DV6, TRAJ37)
CAASMNTGKLIF

SEQ ID NO: 521214 - protein, 16 aa, Homo sapiens
  CDR3 for beta chain variable domain of TCR clone 260607 (TRBV20-1, TRBJ1-4)
CSAPGQGLLTNEKLFF

SEQ ID NO: 521215 - protein, 13 aa, Homo sapiens
  CDR3 for alpha chain variable domain of TCR clone 260608 (TRAV26-1, TRAJ48)
CIVRDVGDEKLTF

SEQ ID NO: 521216 - protein, 19 aa, Homo sapiens
  CDR3 for beta chain variable domain of TCR clone 260608 (TRBV11-3, TRBJ2-2)
CASSTRPGAKTTNTGELFF

SEQ ID NO: 521217 - protein, 15 aa, Homo sapiens
  CDR3 for alpha chain variable domain of TCR clone 260609 (TRAV8-6, TRAJ37)
CAVIFSSGKTGKLIF

SEQ ID NO: 521218 - protein, 15 aa, Homo sapiens
  CDR3 for beta chain variable domain of TCR clone 260609 (TRBV25-1, TRBJ2-4)
CASSETESAKNIQYF

SEQ ID NO: 521219 - protein, 18 aa, Homo sapiens
  CDR3 for alpha chain variable domain of TCR clone 260610 (TRAV13-1, TRAJ52)
CAASKRSAGGTSYGKLTF

SEQ ID NO: 521220 - protein, 13 aa, Homo sapiens
  CDR3 for beta chain variable domain of TCR clone 260610 (TRBV12-4, TRBJ1-2)
CASILRQGKGYTF

SEQ ID NO: 521221 - protein, 13 aa, Homo sapiens
  CDR3 for alpha chain variable domain of TCR clone 260611 (TRAV36/DV7, TRAJ37)
CAVFSSNTGKLIF

SEQ ID NO: 521222 - protein, 16 aa, Homo sapiens
  CDR3 for beta chain variable domain of TCR clone 260611 (TRBV3-1, TRBJ2-5)
CASSTGQFNGFGTQYF

SEQ ID NO: 521223 - protein, 14 aa, Homo sapiens
  CDR3 for alpha chain variable domain of TCR clone 260612 (TRAV3, TRAJ33)
FAVRDMDSNYQLIW

SEQ ID NO: 521224 - protein, 19 aa, Homo sapiens
  CDR3 for beta chain variable domain of TCR clone 260612 (TRBV7-3, TRBJ1-2)
CASSFPQGNDGELWLHLRF

SEQ ID NO: 521225 - protein, 15 aa, Homo sapiens
  CDR3 for alpha chain variable domain of TCR clone 260613 (TRAV3, TRAJ22)
CAVRDRGGSARQLTF

SEQ ID NO: 521226 - protein, 16 aa, Homo sapiens
  CDR3 for beta chain variable domain of TCR clone 260613 (TRBV4-2, TRBJ2-3)
CASSQELAGDTDTQYF

SEQ ID NO: 521227 - protein, 16 aa, Homo sapiens
  CDR3 for alpha chain variable domain of TCR clone 260614 (TRAV12-3, TRAJ53)
CAMSPGSGGSNYKLTF

SEQ ID NO: 521228 - protein, 13 aa, Homo sapiens
  CDR3 for beta chain variable domain of TCR clone 260614 (TRBV7-2, TRBJ2-5)
CASRQTSVETQYF

SEQ ID NO: 521229 - protein, 12 aa, Homo sapiens
  CDR3 for alpha chain variable domain of TCR clone 260615 (TRAV14/DV4, TRAJ11)
CAMSLYDSTLTF

SEQ ID NO: 521230 - protein, 19 aa, Homo sapiens
  CDR3 for beta chain variable domain of TCR clone 260615 (TRBV28, TRBJ2-4)
CASSFQPGGPAHSKNSQYF

SEQ ID NO: 521231 - protein, 15 aa, Homo sapiens
  CDR3 for alpha chain variable domain of TCR clone 260616 (TRAV4, TRAJ39)
CLVGPNNNAGNMLTF

SEQ ID NO: 521232 - protein, 14 aa, Homo sapiens
  CDR3 for beta chain variable domain of TCR clone 260616 (TRBV5-7, TRBJ2-7)
CASSFKGATGEHYF

SEQ ID NO: 521233 - protein, 10 aa, Homo sapiens
  CDR3 for alpha chain variable domain of TCR clone 260617 (TRAV23/DV6, TRAJ3)
CAATTFPLGG

SEQ ID NO: 521234 - protein, 15 aa, Homo sapiens
  CDR3 for beta chain variable domain of TCR clone 260617 (TRBV19, TRBJ1-6)
CASSTQGAVGSPLHF

SEQ ID NO: 521235 - protein, 13 aa, Homo sapiens
  CDR3 for alpha chain variable domain of TCR clone 260618 (TRAV3, TRAJ21)
CAVREPDFNKFYF

SEQ ID NO: 521236 - protein, 13 aa, Homo sapiens
  CDR3 for beta chain variable domain of TCR clone 260618 (TRBV9, TRBJ2-1)
CASSPSVGNESSS

SEQ ID NO: 521237 - protein, 16 aa, Homo sapiens
  CDR3 for alpha chain variable domain of TCR clone 260619 (TRAV30, TRAJ24)
RGTEIVDADSWGKFQF

SEQ ID NO: 521238 - protein, 15 aa, Homo sapiens
  CDR3 for beta chain variable domain of TCR clone 260619 (TRBV20-1, TRBJ2-4)
CSARDRTGGPNIQYF

SEQ ID NO: 521239 - protein, 12 aa, Homo sapiens
  CDR3 for alpha chain variable domain of TCR clone 260620 (TRAV26-1, TRAJ36)
CIARVRADNLFF

SEQ ID NO: 521240 - protein, 15 aa, Homo sapiens
  CDR3 for beta chain variable domain of TCR clone 260620 (TRBV6-3, TRBJ2-7)
CASSSPGTVFYEQYF

SEQ ID NO: 521241 - protein, 13 aa, Homo sapiens
  CDR3 for alpha chain variable domain of TCR clone 260621 (TRAV12-3, TRAJ33)
CAMSVNSNYHLIW

SEQ ID NO: 521242 - protein, 15 aa, Homo sapiens
  CDR3 for beta chain variable domain of TCR clone 260621 (TRBV20-1, TRBJ2-7)
CSARDRVSGMDEQYF

SEQ ID NO: 521243 - protein, 13 aa, Homo sapiens
  CDR3 for alpha chain variable domain of TCR clone 260622 (TRAV26-1, TRAJ48)
CIVLRVRNEKLTF

SEQ ID NO: 521244 - protein, 17 aa, Homo sapiens
  CDR3 for beta chain variable domain of TCR clone 260622 (TRBV13, TRBJ2-3)
CASSLSRVAGGRNTQYF

SEQ ID NO: 521245 - protein, 19 aa, Homo sapiens
  CDR3 for alpha chain variable domain of TCR clone 260623 (TRAV4, TRAJ13)
CLVVSRGLLGVTRKLPLEL

SEQ ID NO: 521246 - protein, 18 aa, Homo sapiens
  CDR3 for beta chain variable domain of TCR clone 260623 (TRBV15, TRBJ2-3)
CATSRDGARSWDTDTQYF

SEQ ID NO: 521247 - protein, 17 aa, Homo sapiens
  CDR3 for alpha chain variable domain of TCR clone 260624 (TRAV3, TRAJ6)
CAVRDGPRAGGSYIPNV

SEQ ID NO: 521248 - protein, 14 aa, Homo sapiens
  CDR3 for beta chain variable domain of TCR clone 260624 (TRBV7-2, TRBJ2-7)
CASSPKTSFYEQYF

SEQ ID NO: 521249 - protein, 12 aa, Homo sapiens
  CDR3 for alpha chain variable domain of TCR clone 260625 (TRAV13-2, TRAJ23)
FAERHRGGKLIF

SEQ ID NO: 521250 - protein, 15 aa, Homo sapiens
  CDR3 for beta chain variable domain of TCR clone 260625 (TRBV11-2, TRBJ2-2)
CASSSDRVNAGELFF

SEQ ID NO: 521251 - protein, 12 aa, Homo sapiens
  CDR3 for alpha chain variable domain of TCR clone 260626 (TRAV13-2, TRAJ8)
CAPWLGFQKLVF

SEQ ID NO: 521252 - protein, 13 aa, Homo sapiens
  CDR3 for beta chain variable domain of TCR clone 260626 (TRBV4-1, TRBJ2-2)
CASSQENTGELFF

SEQ ID NO: 521253 - protein, 11 aa, Homo sapiens
  CDR3 for alpha chain variable domain of TCR clone 260627 (TRAV17, TRAJ43)
CATDVTGDMRF

SEQ ID NO: 521254 - protein, 12 aa, Homo sapiens
  CDR3 for beta chain variable domain of TCR clone 260627 (TRBV11-2, TRBJ2-1)
CASSPGNNEQFF

SEQ ID NO: 521255 - protein, 14 aa, Homo sapiens
  CDR3 for alpha chain variable domain of TCR clone 260628 (TRAV12-3, TRAJ56)
CAMSVTGANSKLTF

SEQ ID NO: 521256 - protein, 17 aa, Homo sapiens
  CDR3 for beta chain variable domain of TCR clone 260628 (TRBV20-1, TRBJ2-3)
CSVSLRGRGGSADTQYF

SEQ ID NO: 521257 - protein, 16 aa, Homo sapiens
  CDR3 for alpha chain variable domain of TCR clone 260629 (TRAV12-2, TRAJ28)
CAVITDSGAGSYQLTF

SEQ ID NO: 521258 - protein, 16 aa, Homo sapiens
  CDR3 for beta chain variable domain of TCR clone 260629 (TRBV11-2, TRBJ2-3)
CASSSELGSSTDTQYF

SEQ ID NO: 521259 - protein, 18 aa, Homo sapiens
  CDR3 for alpha chain variable domain of TCR clone 260630 (TRAV3, TRAJ17)
CAVRARRGGRSCRQQANF

SEQ ID NO: 521260 - protein, 14 aa, Homo sapiens
  CDR3 for beta chain variable domain of TCR clone 260630 (TRBV4-1, TRBJ2-2)
CASSQEVNTGELFF

SEQ ID NO: 521261 - protein, 14 aa, Homo sapiens
  CDR3 for alpha chain variable domain of TCR clone 260631 (TRAV12-3, TRAJ6)
CAMSATGGSYIPTF

SEQ ID NO: 521262 - protein, 16 aa, Homo sapiens
  CDR3 for beta chain variable domain of TCR clone 260631 (TRBV4-2, TRBJ2-1)
GASSPRAGQGANEQFF

SEQ ID NO: 521263 - protein, 14 aa, Homo sapiens
  CDR3 for alpha chain variable domain of TCR clone 260632 (TRAV13-1, TRAJ44)
CAAKATGSASKLTF

SEQ ID NO: 521264 - protein, 14 aa, Homo sapiens
  CDR3 for beta chain variable domain of TCR clone 260632 (TRBV25-1, TRBJ1-1)
CASTHLGGNTEAFF

SEQ ID NO: 521265 - protein, 14 aa, Homo sapiens
  CDR3 for alpha chain variable domain of TCR clone 260633 (TRAV1-1, TRAJ23)
CAVSIYNQGGKLIF

SEQ ID NO: 521266 - protein, 13 aa, Homo sapiens
  CDR3 for beta chain variable domain of TCR clone 260633 (TRBV7-7, TRBJ2-3)
CASSLSRADTQYF

SEQ ID NO: 521267 - protein, 14 aa, Homo sapiens
  CDR3 for alpha chain variable domain of TCR clone 260634 (TRAV12-2, TRAJ13)
CAVKKNGGYQQVTF

SEQ ID NO: 521268 - protein, 15 aa, Homo sapiens
  CDR3 for beta chain variable domain of TCR clone 260634 (TRBV27, TRBJ2-1)
CASSNGGGSSNEQFF

SEQ ID NO: 521269 - protein, 18 aa, Homo sapiens
  CDR3 for alpha chain variable domain of TCR clone 260635 (TRAV21, TRAJ52)
CAVRPSPAGGTSYGKLTF

SEQ ID NO: 521270 - protein, 16 aa, Homo sapiens
  CDR3 for beta chain variable domain of TCR clone 260635 (TRBV4-1, TRBJ2-5)
CASSSGLAGVLGTQYF

SEQ ID NO: 521271 - protein, 12 aa, Homo sapiens
  CDR3 for alpha chain variable domain of TCR clone 260636 (TRAV27, TRAJ9)
CAGESAGFKTIF

SEQ ID NO: 521272 - protein, 14 aa, Homo sapiens
  CDR3 for beta chain variable domain of TCR clone 260636 (TRBV6-1, TRBJ2-1)
CASAKDGFYNEQFF

SEQ ID NO: 521273 - protein, 13 aa, Homo sapiens
  CDR3 for alpha chain variable domain of TCR clone 260637 (TRAV3, TRAJ21)
CAVRDPDFNKFYF

SEQ ID NO: 521274 - protein, 14 aa, Homo sapiens
  CDR3 for beta chain variable domain of TCR clone 260637 (TRBV4-1, TRBJ2-2)
CASSQAVNTGELFC

SEQ ID NO: 521275 - protein, 13 aa, Homo sapiens
  CDR3 for alpha chain variable domain of TCR clone 260638 (TRAV8-6, TRAJ9)
CAVSETGGFKTIF

SEQ ID NO: 521276 - protein, 14 aa, Homo sapiens
  CDR3 for beta chain variable domain of TCR clone 260638 (TRBV7-6, TRBJ2-3)
CASSVAGGTDTQYF

SEQ ID NO: 521277 - protein, 16 aa, Homo sapiens
  CDR3 for alpha chain variable domain of TCR clone 260639 (TRAV22, TRAJ45)
CAVERGKRGGADGLTF

SEQ ID NO: 521278 - protein, 14 aa, Homo sapiens
  CDR3 for beta chain variable domain of TCR clone 260639 (TRBV7-8, TRBJ1-5)
CASSLGAFNQPQHF

SEQ ID NO: 521279 - protein, 17 aa, Homo sapiens
  CDR3 for alpha chain variable domain of TCR clone 260640 (TRAV1-2, TRAJ23)
CAVRPHSIYNQGGKLIF

SEQ ID NO: 521280 - protein, 18 aa, Homo sapiens
  CDR3 for beta chain variable domain of TCR clone 260640 (TRBV11-3, TRBJ2-3)
CASSLGGASRGAPNTQYF

SEQ ID NO: 521281 - protein, 14 aa, Homo sapiens
  CDR3 for alpha chain variable domain of TCR clone 260641 (TRAV35, TRAJ33)
GAGSSQDSNYQLIW

SEQ ID NO: 521282 - protein, 15 aa, Homo sapiens
  CDR3 for beta chain variable domain of TCR clone 260641 (TRBV29-1, TRBJ2-7)
CSVEFFDRGSYEQYF

SEQ ID NO: 521283 - protein, 15 aa, Homo sapiens
  CDR3 for alpha chain variable domain of TCR clone 260642 (TRAV8-6, TRAJ6)
CAVSFTSGGSFIPTF

SEQ ID NO: 521284 - protein, 13 aa, Homo sapiens
  CDR3 for beta chain variable domain of TCR clone 260642 (TRBV29-1, TRBJ2-1)
CSVEGGRVNEQFF

SEQ ID NO: 521285 - protein, 14 aa, Homo sapiens
  CDR3 for alpha chain variable domain of TCR clone 260643 (TRAV1-2, TRAJ8)
CAVREDTGFQKLVF

SEQ ID NO: 521286 - protein, 18 aa, Homo sapiens
  CDR3 for beta chain variable domain of TCR clone 260643 (TRBV7-6, TRBJ2-1)
CASSPRTSGMSSYNEQFF

SEQ ID NO: 521287 - protein, 14 aa, Homo sapiens
  CDR3 for alpha chain variable domain of TCR clone 260644 (TRAV3, TRAJ22)
CAVRDDGSARQLTF

SEQ ID NO: 521288 - protein, 13 aa, Homo sapiens
  CDR3 for beta chain variable domain of TCR clone 260644 (TRBV11-2, TRBJ2-5)
CASGHGAKETQYF

SEQ ID NO: 521289 - protein, 13 aa, Homo sapiens
  CDR3 for alpha chain variable domain of TCR clone 260645 (TRAV3, TRAJ21)
CSVREPDFNKFYF

SEQ ID NO: 521290 - protein, 14 aa, Homo sapiens
  CDR3 for beta chain variable domain of TCR clone 260645 (TRBV20-1, TRBJ1-1)
CSARAVNGYTEAFF

SEQ ID NO: 521291 - protein, 11 aa, Homo sapiens
  CDR3 for alpha chain variable domain of TCR clone 260646 (TRAV3, TRAJ21)
CSVGNFNKFYF

SEQ ID NO: 521292 - protein, 16 aa, Homo sapiens
  CDR3 for beta chain variable domain of TCR clone 260646 (TRBV19, TRBJ2-1)
CASGKAGPSSYNEQFF

SEQ ID NO: 521293 - protein, 15 aa, Homo sapiens
  CDR3 for alpha chain variable domain of TCR clone 260647 (TRAV29/DV5, TRAJ8)
CPASGRNTGFQKLVF

SEQ ID NO: 521294 - protein, 15 aa, Homo sapiens
  CDR3 for beta chain variable domain of TCR clone 260647 (TRBV5-1, TRBJ2-1)
CASTGSGRTYNEQFF

SEQ ID NO: 521295 - protein, 19 aa, Homo sapiens
  CDR3 for alpha chain variable domain of TCR clone 260648 (TRAV2, TRAJ37)
CAPWLWQHRQTNLWARDNF

SEQ ID NO: 521296 - protein, 17 aa, Homo sapiens
  CDR3 for beta chain variable domain of TCR clone 260648 (TRBV28, TRBJ2-5)
CASCRQGGLAGAETQYF

SEQ ID NO: 521297 - protein, 14 aa, Homo sapiens
  CDR3 for alpha chain variable domain of TCR clone 260649 (TRAV1-2, TRAJ8)
CAVREDTGFQKLVF

SEQ ID NO: 521298 - protein, 12 aa, Homo sapiens
  CDR3 for beta chain variable domain of TCR clone 260649 (TRBV24-1, TRBJ2-2)
CHSDWSTGELFF

SEQ ID NO: 521299 - protein, 17 aa, Homo sapiens
  CDR3 for alpha chain variable domain of TCR clone 260650 (TRAV4, TRAJ13)
CLVGVQGSSGGYQKVTF

SEQ ID NO: 521300 - protein, 16 aa, Homo sapiens
  CDR3 for beta chain variable domain of TCR clone 260650 (TRBV13, TRBJ2-2)
CASSPRTGEHTGELFF

SEQ ID NO: 521301 - protein, 14 aa, Homo sapiens
  CDR3 for alpha chain variable domain of TCR clone 260651 (TRAV1-2, TRAJ8)
CAVREDTGFQKLVV

SEQ ID NO: 521302 - protein, 12 aa, Homo sapiens
  CDR3 for beta chain variable domain of TCR clone 260651 (TRBV2, TRBJ2-1)
CAYGPPGNEQFF

SEQ ID NO: 521303 - protein, 15 aa, Homo sapiens
  CDR3 for alpha chain variable domain of TCR clone 260652 (TRAV14/DV4, TRAJ48)
CAMTLSNFGNEKLTF

SEQ ID NO: 521304 - protein, 11 aa, Homo sapiens
  CDR3 for beta chain variable domain of TCR clone 260652 (TRBV7-9, TRBJ2-3)
CASSYTDTQYF

SEQ ID NO: 521305 - protein, 13 aa, Homo sapiens
  CDR3 for alpha chain variable domain of TCR clone 260653 (TRAV1-2, TRAJ9)
CAALNTGGFKTIF

SEQ ID NO: 521306 - protein, 13 aa, Homo sapiens
  CDR3 for beta chain variable domain of TCR clone 260653 (TRBV29-1, TRBJ1-1)
CSVGDSRNTEAFF

SEQ ID NO: 521307 - protein, 11 aa, Homo sapiens
  CDR3 for alpha chain variable domain of TCR clone 260654 (TRAV2, TRAJ33)
CAVVSNYQLIW

SEQ ID NO: 521308 - protein, 15 aa, Homo sapiens
  CDR3 for beta chain variable domain of TCR clone 260654 (TRBV24-1, TRBJ2-2)
TSVPPVIGPPGSCFF

SEQ ID NO: 521309 - protein, 14 aa, Homo sapiens
  CDR3 for alpha chain variable domain of TCR clone 260655 (TRAV38-1, TRAJ40)
WALRPTSGTYKYIF

SEQ ID NO: 521310 - protein, 15 aa, Homo sapiens
  CDR3 for beta chain variable domain of TCR clone 260655 (TRBV28, TRBJ1-3)
CASSMGWASGNTIYF

SEQ ID NO: 521311 - protein, 14 aa, Homo sapiens
  CDR3 for alpha chain variable domain of TCR clone 260656 (TRAV38-1, TRAJ45)
CAYYSGGGADGLTF

SEQ ID NO: 521312 - protein, 14 aa, Homo sapiens
  CDR3 for beta chain variable domain of TCR clone 260656 (TRBV7-9, TRBJ2-4)
CASSLAMGGNIQYF

SEQ ID NO: 521313 - protein, 14 aa, Homo sapiens
  CDR3 for alpha chain variable domain of TCR clone 260657 (TRAV1-2, TRAJ16)
CAVRGFSDGQKLPF

SEQ ID NO: 521314 - protein, 12 aa, Homo sapiens
  CDR3 for beta chain variable domain of TCR clone 260657 (TRBV14, TRBJ2-7)
CASSRLKGEQYF

SEQ ID NO: 521315 - protein, 17 aa, Homo sapiens
  CDR3 for alpha chain variable domain of TCR clone 260658 (TRAV19, TRAJ28)
CALSEASSGAGSYQLTF

SEQ ID NO: 521316 - protein, 16 aa, Homo sapiens
  CDR3 for beta chain variable domain of TCR clone 260658 (TRBV7-9, TRBJ1-2)
CASSLGFSSGEDGYTF

SEQ ID NO: 521317 - protein, 14 aa, Homo sapiens
  CDR3 for alpha chain variable domain of TCR clone 260659 (TRAV27, TRAJ36)
CAGPPKIGANNLFF

SEQ ID NO: 521318 - protein, 15 aa, Homo sapiens
  CDR3 for beta chain variable domain of TCR clone 260659 (TRBV18, TRBJ2-7)
CASSPASTPNYEQYF

SEQ ID NO: 521319 - protein, 12 aa, Homo sapiens
  CDR3 for alpha chain variable domain of TCR clone 260660 (TRAV3, TRAJ20)
CAVRDGDYRLSF

SEQ ID NO: 521320 - protein, 17 aa, Homo sapiens
  CDR3 for beta chain variable domain of TCR clone 260660 (TRBV7-9, TRBJ2-1)
CASSLVASYPSYNEQFF

SEQ ID NO: 521321 - protein, 12 aa, Homo sapiens
  CDR3 for alpha chain variable domain of TCR clone 260661 (TRAV1-1, TRAJ39)
CAVPVVGNMLTF

SEQ ID NO: 521322 - protein, 12 aa, Homo sapiens
  CDR3 for beta chain variable domain of TCR clone 260661 (TRBV2, TRBJ1-2)
CASSGQTYGYAF

SEQ ID NO: 521323 - protein, 14 aa, Homo sapiens
  CDR3 for alpha chain variable domain of TCR clone 260662 (TRAV17, TRAJ57)
CATDPQGGSEKLAF

SEQ ID NO: 521324 - protein, 13 aa, Homo sapiens
  CDR3 for beta chain variable domain of TCR clone 260662 (TRBV12-4, TRBJ2-7)
CASSPTETYEQYF

SEQ ID NO: 521325 - protein, 14 aa, Homo sapiens
  CDR3 for alpha chain variable domain of TCR clone 260663 (TRAV12-2, TRAJ13)
CVVKKTGGYQKVTF

SEQ ID NO: 521326 - protein, 15 aa, Homo sapiens
  CDR3 for beta chain variable domain of TCR clone 260663 (TRBV27, TRBJ2-1)
CASSNGGGSANEQFF

SEQ ID NO: 521327 - protein, 16 aa, Homo sapiens
  CDR3 for alpha chain variable domain of TCR clone 260664 (TRAV3, TRAJ10)
CAVRDMRAGGGNKLTF

SEQ ID NO: 521328 - protein, 15 aa, Homo sapiens
  CDR3 for beta chain variable domain of TCR clone 260664 (TRBV20-1, TRBJ2-3)
CSALGAGGLGDTQYF

SEQ ID NO: 521329 - protein, 12 aa, Homo sapiens
  CDR3 for alpha chain variable domain of TCR clone 260665 (TRAV20, TRAJ33)
CAVRGSNYQLNW

SEQ ID NO: 521330 - protein, 13 aa, Homo sapiens
  CDR3 for beta chain variable domain of TCR clone 260665 (TRBV4-3, TRBJ1-1)
CASSPTGNTEAVF

SEQ ID NO: 521331 - protein, 14 aa, Homo sapiens
  CDR3 for alpha chain variable domain of TCR clone 260666 (TRAV17, TRAJ54)
CATDANQGAQKLVF

SEQ ID NO: 521332 - protein, 12 aa, Homo sapiens
  CDR3 for beta chain variable domain of TCR clone 260666 (TRBV6-3, TRBJ2-1)
CASSGSYNDQFF

SEQ ID NO: 521333 - protein, 16 aa, Homo sapiens
  CDR3 for alpha chain variable domain of TCR clone 260667 (TRAV30, TRAJ24)
CGTEIVDADSWGKFQF

SEQ ID NO: 521334 - protein, 15 aa, Homo sapiens
  CDR3 for beta chain variable domain of TCR clone 260667 (TRBV12-4, TRBJ1-2)
CASRLGVAGNYGYTF

SEQ ID NO: 521335 - protein, 14 aa, Homo sapiens
  CDR3 for alpha chain variable domain of TCR clone 260668 (TRAV13-1, TRAJ9)
CAASALTGGFKTIF

SEQ ID NO: 521336 - protein, 13 aa, Homo sapiens
  CDR3 for beta chain variable domain of TCR clone 260668 (TRBV20-1, TRBJ1-1)
CSAGTIGNTEAFF

SEQ ID NO: 521337 - protein, 13 aa, Homo sapiens
  CDR3 for alpha chain variable domain of TCR clone 260669 (TRAV20, TRAJ31)
CAVQAIGGARLMF

SEQ ID NO: 521338 - protein, 14 aa, Homo sapiens
  CDR3 for beta chain variable domain of TCR clone 260669 (TRBV6-5, TRBJ2-7)
CASSSGVPPYEQYF

SEQ ID NO: 521339 - protein, 17 aa, Homo sapiens
  CDR3 for alpha chain variable domain of TCR clone 260670 (TRAV13-1, TRAJ52)
CAAGRNDGGTSYGQLTF

SEQ ID NO: 521340 - protein, 13 aa, Homo sapiens
  CDR3 for beta chain variable domain of TCR clone 260670 (TRBV7-2, TRBJ1-1)
CASNLKGAKVAFF

SEQ ID NO: 521341 - protein, 12 aa, Homo sapiens
  CDR3 for alpha chain variable domain of TCR clone 260671 (TRAV3, TRAJ26)
CAVRDYGQNFVF

SEQ ID NO: 521342 - protein, 16 aa, Homo sapiens
  CDR3 for beta chain variable domain of TCR clone 260671 (TRBV11-2, TRBJ1-2)
CASSPSVREANYGYTF

SEQ ID NO: 521343 - protein, 16 aa, Homo sapiens
  CDR3 for alpha chain variable domain of TCR clone 260672 (TRAV9-2, TRAJ10)
CALSEGGTGGGKKLTF

SEQ ID NO: 521344 - protein, 16 aa, Homo sapiens
  CDR3 for beta chain variable domain of TCR clone 260672 (TRBV7-2, TRBJ1-4)
CASSPVGRFDREKLFF

SEQ ID NO: 521345 - protein, 15 aa, Homo sapiens
  CDR3 for alpha chain variable domain of TCR clone 260673 (TRAV23/DV6, TRAJ18)
CAARYRGSTLGRLDF

SEQ ID NO: 521346 - protein, 13 aa, Homo sapiens
  CDR3 for beta chain variable domain of TCR clone 260673 (TRBV7-2, TRBJ2-7)
CASSSPGGSEQYF

SEQ ID NO: 521347 - protein, 16 aa, Homo sapiens
  CDR3 for alpha chain variable domain of TCR clone 260674 (TRAV12-3, TRAJ53)
CAMSPGSGGSNYKLTF

SEQ ID NO: 521348 - protein, 17 aa, Homo sapiens
  CDR3 for beta chain variable domain of TCR clone 260674 (TRBV28, TRBJ2-5)
CASSTHEGDALQETQYF

SEQ ID NO: 521349 - protein, 15 aa, Homo sapiens
  CDR3 for alpha chain variable domain of TCR clone 260675 (TRAV8-4, TRAJ52)
CAESDGGTSYGKLTL

SEQ ID NO: 521350 - protein, 12 aa, Homo sapiens
  CDR3 for beta chain variable domain of TCR clone 260675 (TRBV29-1, TRBJ2-3)
CSVTSGGDTQYF

SEQ ID NO: 521351 - protein, 12 aa, Homo sapiens
  CDR3 for alpha chain variable domain of TCR clone 260676 (TRAV8-6, TRAJ57)
CAVQGGSEKLVF

SEQ ID NO: 521352 - protein, 11 aa, Homo sapiens
  CDR3 for beta chain variable domain of TCR clone 260676 (TRBV19, TRBJ1-1)
CASSIGGEAFF

SEQ ID NO: 521353 - protein, 12 aa, Homo sapiens
  CDR3 for alpha chain variable domain of TCR clone 260677 (TRAV26-1, TRAJ35)
CIGLSFGNVLHC

SEQ ID NO: 521354 - protein, 17 aa, Homo sapiens
  CDR3 for beta chain variable domain of TCR clone 260677 (TRBV11-3, TRBJ2-5)
WASSLPGVRGGKETQYF

SEQ ID NO: 521355 - protein, 12 aa, Homo sapiens
  CDR3 for alpha chain variable domain of TCR clone 260678 (TRAV26-2, TRAJ47)
CILVEYGNKLVF

SEQ ID NO: 521356 - protein, 16 aa, Homo sapiens
  CDR3 for beta chain variable domain of TCR clone 260678 (TRBV18, TRBJ1-4)
CASSPLVGDSAEKLFL

SEQ ID NO: 521357 - protein, 17 aa, Homo sapiens
  CDR3 for alpha chain variable domain of TCR clone 260679 (TRAV3, TRAJ6)
CAVRDGPRAGGSYIPTF

SEQ ID NO: 521358 - protein, 15 aa, Homo sapiens
  CDR3 for beta chain variable domain of TCR clone 260679 (TRBV20-1, TRBJ2-3)
CSATGTSGFTDTQYF

SEQ ID NO: 521359 - protein, 13 aa, Homo sapiens
  CDR3 for alpha chain variable domain of TCR clone 260680 (TRAV35, TRAJ48)
CAGHEFGNEKFTF

SEQ ID NO: 521360 - protein, 16 aa, Homo sapiens
  CDR3 for beta chain variable domain of TCR clone 260680 (TRBV12-5, TRBJ2-5)
CASGPRTSGNQETQYF

SEQ ID NO: 521361 - protein, 17 aa, Homo sapiens
  CDR3 for alpha chain variable domain of TCR clone 260681 (TRAV1-1, TRAJ4)
CALYNKLIFGAGTRLAV

SEQ ID NO: 521362 - protein, 18 aa, Homo sapiens
  CDR3 for beta chain variable domain of TCR clone 260681 (TRBV27, TRBJ2-7)
CASRTGQFFPGACDEQYF

SEQ ID NO: 521363 - protein, 15 aa, Homo sapiens
  CDR3 for alpha chain variable domain of TCR clone 260682 (TRAV19, TRAJ9)
CALSEARTGGFKTIF

SEQ ID NO: 521364 - protein, 15 aa, Homo sapiens
  CDR3 for beta chain variable domain of TCR clone 260682 (TRBV11-2, TRBJ1-1)
CASSSRYSLLLSLDK

SEQ ID NO: 521365 - protein, 14 aa, Homo sapiens
  CDR3 for alpha chain variable domain of TCR clone 260683 (TRAV12-2, TRAJ53)
CAVNDGGSNYKLTF

SEQ ID NO: 521366 - protein, 13 aa, Homo sapiens
  CDR3 for beta chain variable domain of TCR clone 260683 (TRBV19, TRBJ1-2)
CASSVPGQDGYTF

SEQ ID NO: 521367 - protein, 14 aa, Homo sapiens
  CDR3 for alpha chain variable domain of TCR clone 260684 (TRAV12-2, TRAJ17)
CAVLFKAAGNKLTF

SEQ ID NO: 521368 - protein, 16 aa, Homo sapiens
  CDR3 for beta chain variable domain of TCR clone 260684 (TRBV4-2, TRBJ1-5)
CASSQGQGASNQPQHF

SEQ ID NO: 521369 - protein, 12 aa, Homo sapiens
  CDR3 for alpha chain variable domain of TCR clone 260685 (TRAV2, TRAJ9)
CAVGAGGFKTIF

SEQ ID NO: 521370 - protein, 15 aa, Homo sapiens
  CDR3 for beta chain variable domain of TCR clone 260685 (TRBV13, TRBJ2-2)
CQSPRTGEHTGELFF

SEQ ID NO: 521371 - protein, 15 aa, Homo sapiens
  CDR3 for alpha chain variable domain of TCR clone 260686 (TRAV21, TRAJ53)
CATLNSGGSNYTLTF

SEQ ID NO: 521372 - protein, 15 aa, Homo sapiens
  CDR3 for beta chain variable domain of TCR clone 260686 (TRBV11-3, TRBJ2-3)
CASLKDGREGDTQYF

SEQ ID NO: 521373 - protein, 14 aa, Homo sapiens
  CDR3 for alpha chain variable domain of TCR clone 260687 (TRAV36/DV7, TRAJ40)
CAVETTSGTYKYIF

SEQ ID NO: 521374 - protein, 13 aa, Homo sapiens
  CDR3 for beta chain variable domain of TCR clone 260687 (TRBV11-2, TRBJ2-5)
CASSSTGEETQYF

SEQ ID NO: 521375 - protein, 15 aa, Homo sapiens
  CDR3 for alpha chain variable domain of TCR clone 260688 (TRAV21, TRAJ53)
CAVRQSGGINYKLTF

SEQ ID NO: 521376 - protein, 14 aa, Homo sapiens
  CDR3 for beta chain variable domain of TCR clone 260688 (TRBV18, TRBJ2-5)
CASSPGVSQETQYF

SEQ ID NO: 521377 - protein, 12 aa, Homo sapiens
  CDR3 for alpha chain variable domain of TCR clone 260689 (TRAV1-2, TRAJ26)
CAVIYYGQNFVF

SEQ ID NO: 521378 - protein, 14 aa, Homo sapiens
  CDR3 for beta chain variable domain of TCR clone 260689 (TRBV11-1, TRBJ2-7)
CASSFRQGSYEQYF

SEQ ID NO: 521379 - protein, 13 aa, Homo sapiens
  CDR3 for alpha chain variable domain of TCR clone 260690 (TRAV12-3, TRAJ13)
CAMGTEGYQKVTF

SEQ ID NO: 521380 - protein, 16 aa, Homo sapiens
  CDR3 for beta chain variable domain of TCR clone 260690 (TRBV9, TRBJ2-1)
CASSVGGGGNYNEQFF

SEQ ID NO: 521381 - protein, 14 aa, Homo sapiens
  CDR3 for alpha chain variable domain of TCR clone 260691 (TRAV17, TRAJ6)
CATPAMGGSYIPPF

SEQ ID NO: 521382 - protein, 14 aa, Homo sapiens
  CDR3 for beta chain variable domain of TCR clone 260691 (TRBV7-6, TRBJ2-3)
CASSLGTVTDTQYC

SEQ ID NO: 521383 - protein, 12 aa, Homo sapiens
  CDR3 for alpha chain variable domain of TCR clone 260692 (TRAV12-3, TRAJ4)
CAMTGAGTRLAV

SEQ ID NO: 521384 - protein, 21 aa, Homo sapiens
  CDR3 for beta chain variable domain of TCR clone 260692 (TRBV4-2, TRBJ2-3)
PCSQKTRPCISVPAAPDTQYF

SEQ ID NO: 521385 - protein, 15 aa, Homo sapiens
  CDR3 for alpha chain variable domain of TCR clone 260693 (TRAV3, TRAJ5)
CAVRDLYTGRRALTF

SEQ ID NO: 521386 - protein, 14 aa, Homo sapiens
  CDR3 for beta chain variable domain of TCR clone 260693 (TRBV27, TRBJ2-5)
CASSRTFLVDTQYF

SEQ ID NO: 521387 - protein, 14 aa, Homo sapiens
  CDR3 for alpha chain variable domain of TCR clone 260694 (TRAV13-1, TRAJ35)
CAASKGGFGNVLHC

SEQ ID NO: 521388 - protein, 13 aa, Homo sapiens
  CDR3 for beta chain variable domain of TCR clone 260694 (TRBV7-3, TRBJ1-1)
WASSQDWGAEAFF

SEQ ID NO: 521389 - protein, 15 aa, Homo sapiens
  CDR3 for alpha chain variable domain of TCR clone 260695 (TRAV26-1, TRAJ22)
CIVRVSFWFCNATDL

SEQ ID NO: 521390 - protein, 16 aa, Homo sapiens
  CDR3 for beta chain variable domain of TCR clone 260695 (TRBV24-1, TRBJ2-3)
CATSDPGTGATETQYF

SEQ ID NO: 521391 - protein, 18 aa, Homo sapiens
  CDR3 for alpha chain variable domain of TCR clone 260696 (TRAV21, TRAJ52)
CAVRPSPAGGTSYGKLTF

SEQ ID NO: 521392 - protein, 13 aa, Homo sapiens
  CDR3 for beta chain variable domain of TCR clone 260696 (TRBV7-9, TRBJ1-2)
CASSLKQNYGYSF

SEQ ID NO: 521393 - protein, 15 aa, Homo sapiens
  CDR3 for alpha chain variable domain of TCR clone 260697 (TRAV3, TRAJ22)
CAVRDRGGSARQLTF

SEQ ID NO: 521394 - protein, 13 aa, Homo sapiens
  CDR3 for beta chain variable domain of TCR clone 260697 (TRBV7-3, TRBJ2-5)
CASSFRGGETQYF

SEQ ID NO: 521395 - protein, 16 aa, Homo sapiens
  CDR3 for alpha chain variable domain of TCR clone 260698 (TRAV16, TRAJ4)
CITVLPFSGGYNKLIF

SEQ ID NO: 521396 - protein, 15 aa, Homo sapiens
  CDR3 for beta chain variable domain of TCR clone 260698 (TRBV7-2, TRBJ2-1)
CASSSGLAGGNEQFF

SEQ ID NO: 521397 - protein, 12 aa, Homo sapiens
  CDR3 for alpha chain variable domain of TCR clone 260699 (TRAV13-1, TRAJ42)
ENYGGSQGNLIF

SEQ ID NO: 521398 - protein, 15 aa, Homo sapiens
  CDR3 for beta chain variable domain of TCR clone 260699 (TRBV20-1, TRBJ2-1)
CSASSAGSSYNEQFF

SEQ ID NO: 521399 - protein, 13 aa, Homo sapiens
  CDR3 for alpha chain variable domain of TCR clone 260700 (TRAV35, TRAJ57)
CAGSQGGSEKLVF

SEQ ID NO: 521400 - protein, 14 aa, Homo sapiens
  CDR3 for beta chain variable domain of TCR clone 260700 (TRBV25-1, TRBJ1-1)
CASTHLRGNTEAFF

SEQ ID NO: 521401 - protein, 16 aa, Homo sapiens
  CDR3 for alpha chain variable domain of TCR clone 260701 (TRAV21, TRAJ52)
CAVTNAGGTSYGKLTF

SEQ ID NO: 521402 - protein, 19 aa, Homo sapiens
  CDR3 for beta chain variable domain of TCR clone 260701 (TRBV28, TRBJ2-5)
CTSASSRQGGLAGAETQYF

SEQ ID NO: 521403 - protein, 10 aa, Homo sapiens
  CDR3 for alpha chain variable domain of TCR clone 260702 (TRAV27, TRAJ58)
SETSGSRLTF

SEQ ID NO: 521404 - protein, 15 aa, Homo sapiens
  CDR3 for beta chain variable domain of TCR clone 260702 (TRBV6-3, TRBJ2-7)
CASSSPGTVCYEQYF

SEQ ID NO: 521405 - protein, 11 aa, Homo sapiens
  CDR3 for alpha chain variable domain of TCR clone 260703 (TRAV35, TRAJ34)
CWARNTDKLIF

SEQ ID NO: 521406 - protein, 17 aa, Homo sapiens
  CDR3 for beta chain variable domain of TCR clone 260703 (TRBV7-8, TRBJ2-6)
CASSAGTGGAGANVLTF

SEQ ID NO: 521407 - protein, 15 aa, Homo sapiens
  CDR3 for alpha chain variable domain of TCR clone 260704 (TRAV27, TRAJ50)
CAGVGRGTSYDKLIF

SEQ ID NO: 521408 - protein, 14 aa, Homo sapiens
  CDR3 for beta chain variable domain of TCR clone 260704 (TRBV18, TRBJ2-5)
CASSPGVSQETQYF

SEQ ID NO: 521409 - protein, 12 aa, Homo sapiens
  CDR3 for alpha chain variable domain of TCR clone 260705 (TRAV17, TRAJ20)
CATLANDYKLSF

SEQ ID NO: 521410 - protein, 14 aa, Homo sapiens
  CDR3 for beta chain variable domain of TCR clone 260705 (TRBV10-3, TRBJ1-2)
CAISEDTLYYGYTF

SEQ ID NO: 521411 - protein, 14 aa, Homo sapiens
  CDR3 for alpha chain variable domain of TCR clone 260706 (TRAV12-1, TRAJ17)
CVVNYKAAGNKLTF

SEQ ID NO: 521412 - protein, 13 aa, Homo sapiens
  CDR3 for beta chain variable domain of TCR clone 260706 (TRBV7-8, TRBJ2-5)
CASSQTSVETQYF

SEQ ID NO: 521413 - protein, 11 aa, Homo sapiens
  CDR3 for alpha chain variable domain of TCR clone 260707 (TRAV12-2, TRAJ30)
CAVGRDDKIIF

SEQ ID NO: 521414 - protein, 17 aa, Homo sapiens
  CDR3 for beta chain variable domain of TCR clone 260707 (TRBV7-3, TRBJ2-3)
CASSLMKRMRGADTQYF

SEQ ID NO: 521415 - protein, 15 aa, Homo sapiens
  CDR3 for alpha chain variable domain of TCR clone 260708 (TRAV2, TRAJ9)
CAVAALNTGSLKTIF

SEQ ID NO: 521416 - protein, 15 aa, Homo sapiens
  CDR3 for beta chain variable domain of TCR clone 260708 (TRBV6-3, TRBJ2-7)
CASSSPGTVFYEQYF

SEQ ID NO: 521417 - protein, 13 aa, Homo sapiens
  CDR3 for alpha chain variable domain of TCR clone 260709 (TRAV12-3, TRAJ50)
CARGGTSYDKVIF

SEQ ID NO: 521418 - protein, 15 aa, Homo sapiens
  CDR3 for beta chain variable domain of TCR clone 260709 (TRBV11-2, TRBJ2-1)
CASSLGTSGLNEQFF

SEQ ID NO: 521419 - protein, 18 aa, Homo sapiens
  CDR3 for alpha chain variable domain of TCR clone 260710 (TRAV26-1, TRAJ23)
CIVRVGLEVRNQGGKLIF

SEQ ID NO: 521420 - protein, 19 aa, Homo sapiens
  CDR3 for beta chain variable domain of TCR clone 260710 (TRBV6-3, TRBJ2-1)
CASSYSWTSGRATYNEQFF

SEQ ID NO: 521421 - protein, 14 aa, Homo sapiens
  CDR3 for alpha chain variable domain of TCR clone 260711 (TRAV12-2, TRAJ13)
CAVKKTGGYQKVTF

SEQ ID NO: 521422 - protein, 16 aa, Homo sapiens
  CDR3 for beta chain variable domain of TCR clone 260711 (TRBV27, TRBJ2-1)
CASSSPEYPRDNEQFF

SEQ ID NO: 521423 - protein, 13 aa, Homo sapiens
  CDR3 for alpha chain variable domain of TCR clone 260712 (TRAV3, TRAJ21)
CALRERDFNKFYF

SEQ ID NO: 521424 - protein, 13 aa, Homo sapiens
  CDR3 for beta chain variable domain of TCR clone 260712 (TRBV9, TRBJ2-1)
CASSPSGGNEQFF

SEQ ID NO: 521425 - protein, 15 aa, Homo sapiens
  CDR3 for alpha chain variable domain of TCR clone 260713 (TRAV17, TRAJ22)
FATVAPSGSARQLTF

SEQ ID NO: 521426 - protein, 14 aa, Homo sapiens
  CDR3 for beta chain variable domain of TCR clone 260713 (TRBV4-1, TRBJ2-2)
CASSQAVNTGELFC

SEQ ID NO: 521427 - protein, 12 aa, Homo sapiens
  CDR3 for alpha chain variable domain of TCR clone 260714 (TRAV21, TRAJ58)
CALSASGSRLTF

SEQ ID NO: 521428 - protein, 15 aa, Homo sapiens
  CDR3 for beta chain variable domain of TCR clone 260714 (TRBV7-9, TRBJ2-2)
CASGPLDTLPGELFF

SEQ ID NO: 521429 - protein, 14 aa, Homo sapiens
  CDR3 for alpha chain variable domain of TCR clone 260715 (TRAV1-2, TRAJ27)
CAVRSGTNAGKSTF

SEQ ID NO: 521430 - protein, 19 aa, Homo sapiens
  CDR3 for beta chain variable domain of TCR clone 260715 (TRBV18, TRBJ2-7)
CASSPLGKNLRAVLRAGHQ

SEQ ID NO: 521431 - protein, 19 aa, Homo sapiens
  CDR3 for alpha chain variable domain of TCR clone 260716 (TRAV13-1, TRAJ52)
CAASPYQNAGGTSYGKLTI

SEQ ID NO: 521432 - protein, 14 aa, Homo sapiens
  CDR3 for beta chain variable domain of TCR clone 260716 (TRBV19, TRBJ2-7)
CASTVQGRPYEQYF

SEQ ID NO: 521433 - protein, 12 aa, Homo sapiens
  CDR3 for alpha chain variable domain of TCR clone 260717 (TRAV1-1, TRAJ39)
CAVPVVGNMLTF

SEQ ID NO: 521434 - protein, 21 aa, Homo sapiens
  CDR3 for beta chain variable domain of TCR clone 260717 (TRBV19, TRBJ1-6)
CASSTGGSRFTPPLWERDQAH

SEQ ID NO: 521435 - protein, 12 aa, Homo sapiens
  CDR3 for alpha chain variable domain of TCR clone 260718 (TRAV38-1, TRAJ54)
CAFHEGAQKLVF

SEQ ID NO: 521436 - protein, 17 aa, Homo sapiens
  CDR3 for beta chain variable domain of TCR clone 260718 (TRBV13, TRBJ2-3)
CASSLSRVAGGRNTQYF

SEQ ID NO: 521437 - protein, 18 aa, Homo sapiens
  CDR3 for alpha chain variable domain of TCR clone 260719 (TRAV26-2, TRAJ45)
CILRVDKYSVGGADGLTF

SEQ ID NO: 521438 - protein, 14 aa, Homo sapiens
  CDR3 for beta chain variable domain of TCR clone 260719 (TRBV7-2, TRBJ2-7)
CASRSQGAAYEQYF

SEQ ID NO: 521439 - protein, 17 aa, Homo sapiens
  CDR3 for alpha chain variable domain of TCR clone 260720 (TRAV3, TRAJ6)
CAVRDGPWAGGSYIPSF

SEQ ID NO: 521440 - protein, 14 aa, Homo sapiens
  CDR3 for beta chain variable domain of TCR clone 260720 (TRBV7-2, TRBJ2-7)
CASSPKTSFYEQYF

SEQ ID NO: 521441 - protein, 13 aa, Homo sapiens
  CDR3 for alpha chain variable domain of TCR clone 260721 (TRAV2, TRAJ40)
CAVVTSGPYKYIF

SEQ ID NO: 521442 - protein, 16 aa, Homo sapiens
  CDR3 for beta chain variable domain of TCR clone 260721 (TRBV29-1, TRBJ1-2)
CSVEANRDIANYGYTF

SEQ ID NO: 521443 - protein, 14 aa, Homo sapiens
  CDR3 for alpha chain variable domain of TCR clone 260722 (TRAV12-2, TRAJ13)
CAVKKTGGYQKVTF

SEQ ID NO: 521444 - protein, 19 aa, Homo sapiens
  CDR3 for beta chain variable domain of TCR clone 260722 (TRBV10-3, TRBJ2-3)
CAISEPTSGGAMSTDTQYF

SEQ ID NO: 521445 - protein, 14 aa, Homo sapiens
  CDR3 for alpha chain variable domain of TCR clone 260723 (TRAV1-2, TRAJ29)
CAVRELTSAHPLVF

SEQ ID NO: 521446 - protein, 14 aa, Homo sapiens
  CDR3 for beta chain variable domain of TCR clone 260723 (TRBV3-1, TRBJ2-5)
CASSQGPDQETQYF

SEQ ID NO: 521447 - protein, 13 aa, Homo sapiens
  CDR3 for alpha chain variable domain of TCR clone 260724 (TRAV2, TRAJ12)
CAVGADSSYKLIF

SEQ ID NO: 521448 - protein, 13 aa, Homo sapiens
  CDR3 for beta chain variable domain of TCR clone 260724 (TRBV20-1, TRBJ2-1)
CSSRSSPRDEQFF

SEQ ID NO: 521449 - protein, 16 aa, Homo sapiens
  CDR3 for alpha chain variable domain of TCR clone 260725 (TRAV30, TRAJ24)
CGTEIVAADSWGKFQF

SEQ ID NO: 521450 - protein, 16 aa, Homo sapiens
  CDR3 for beta chain variable domain of TCR clone 260725 (TRBV7-3, TRBJ2-2)
CASSLKRGTLSGELFF

SEQ ID NO: 521451 - protein, 17 aa, Homo sapiens
  CDR3 for alpha chain variable domain of TCR clone 260726 (TRAV3, TRAJ6)
CAVRDGPRVGGSYIPTL

SEQ ID NO: 521452 - protein, 15 aa, Homo sapiens
  CDR3 for beta chain variable domain of TCR clone 260726 (TRBV7-6, TRBJ2-3)
CASSPIIYSTDTQYF

SEQ ID NO: 521453 - protein, 12 aa, Homo sapiens
  CDR3 for alpha chain variable domain of TCR clone 260727 (TRAV13-1, TRAJ42)
CIPGGSQGNLIF

SEQ ID NO: 521454 - protein, 14 aa, Homo sapiens
  CDR3 for beta chain variable domain of TCR clone 260727 (TRBV7-2, TRBJ2-7)
CASSLRWEVNEQYF

SEQ ID NO: 521455 - protein, 11 aa, Homo sapiens
  CDR3 for alpha chain variable domain of TCR clone 260728 (TRAV2, TRAJ20)
CAVLNDYKLSV

SEQ ID NO: 521456 - protein, 16 aa, Homo sapiens
  CDR3 for beta chain variable domain of TCR clone 260728 (TRBV11-1, TRBJ2-2)
CASSAEGLKNTGELFF

SEQ ID NO: 521457 - protein, 14 aa, Homo sapiens
  CDR3 for alpha chain variable domain of TCR clone 260729 (TRAV12-3, TRAJ10)
SHLPLTGGGNKLTF

SEQ ID NO: 521458 - protein, 11 aa, Homo sapiens
  CDR3 for beta chain variable domain of TCR clone 260729 (TRBV7-3, TRBJ2-5)
CQQLPGGTQYF

SEQ ID NO: 521459 - protein, 19 aa, Homo sapiens
  CDR3 for alpha chain variable domain of TCR clone 260730 (TRAV3, TRAJ6)
CAVRDRNPSRSGGSYIPTF

SEQ ID NO: 521460 - protein, 15 aa, Homo sapiens
  CDR3 for beta chain variable domain of TCR clone 260730 (TRBV18, TRBJ2-7)
CASTPTFMDSYEQYF

SEQ ID NO: 521461 - protein, 16 aa, Homo sapiens
  CDR3 for alpha chain variable domain of TCR clone 260731 (TRAV3, TRAJ37)
CAVRPHGSGNTGKLIF

SEQ ID NO: 521462 - protein, 17 aa, Homo sapiens
  CDR3 for beta chain variable domain of TCR clone 260731 (TRBV7-2, TRBJ2-7)
CASSFETSGYTSSTSGR

SEQ ID NO: 521463 - protein, 16 aa, Homo sapiens
  CDR3 for alpha chain variable domain of TCR clone 260732 (TRAV30, TRAJ24)
CGTEIVDADSWGKFQF

SEQ ID NO: 521464 - protein, 18 aa, Homo sapiens
  CDR3 for beta chain variable domain of TCR clone 260732 (TRBV7-8, TRBJ2-1)
CASSPYLGQRGSNNEQFF

SEQ ID NO: 521465 - protein, 18 aa, Homo sapiens
  CDR3 for alpha chain variable domain of TCR clone 260733 (TRAV3, TRAJ6)
CAVRDGPRAGGSYLHLEE

SEQ ID NO: 521466 - protein, 14 aa, Homo sapiens
  CDR3 for beta chain variable domain of TCR clone 260733 (TRBV7-2, TRBJ2-7)
CASSPKTSFYEQYF

SEQ ID NO: 521467 - protein, 10 aa, Homo sapiens
  CDR3 for alpha chain variable domain of TCR clone 260734 (TRAV1-2, TRAJ18)
CAVRGEAQPC

SEQ ID NO: 521468 - protein, 19 aa, Homo sapiens
  CDR3 for beta chain variable domain of TCR clone 260734 (TRBV6-3, TRBJ1-2)
CASSYSKGRTGPPNYGYTF

SEQ ID NO: 521469 - protein, 14 aa, Homo sapiens
  CDR3 for alpha chain variable domain of TCR clone 260735 (TRAV12-3, TRAJ56)
CAMSVNGANSNLTF

SEQ ID NO: 521470 - protein, 17 aa, Homo sapiens
  CDR3 for beta chain variable domain of TCR clone 260735 (TRBV20-1, TRBJ2-3)
CSASLLGRGGSADTQYF

SEQ ID NO: 521471 - protein, 18 aa, Homo sapiens
  CDR3 for alpha chain variable domain of TCR clone 260736 (TRAV21, TRAJ52)
CAVTPSPAVGTSYGKLTF

SEQ ID NO: 521472 - protein, 17 aa, Homo sapiens
  CDR3 for beta chain variable domain of TCR clone 260736 (TRBV13, TRBJ2-3)
CASSLSRVAGGRNTQYF

SEQ ID NO: 521473 - protein, 15 aa, Homo sapiens
  CDR3 for alpha chain variable domain of TCR clone 260737 (TRAV23/DV6, TRAJ44)
CAARTLTGTASKPTF

SEQ ID NO: 521474 - protein, 17 aa, Homo sapiens
  CDR3 for beta chain variable domain of TCR clone 260737 (TRBV24-1, TRBJ2-1)
CATSDVSTSGTYNEQFF

SEQ ID NO: 521475 - protein, 16 aa, Homo sapiens
  CDR3 for alpha chain variable domain of TCR clone 260738 (TRAV3, TRAJ37)
CAVRGKGSVNTGKLIF

SEQ ID NO: 521476 - protein, 15 aa, Homo sapiens
  CDR3 for beta chain variable domain of TCR clone 260738 (TRBV7-9, TRBJ1-6)
CASSSPGRGNSPLHF

SEQ ID NO: 521477 - protein, 12 aa, Homo sapiens
  CDR3 for alpha chain variable domain of TCR clone 260739 (TRAV12-2, TRAJ45)
CAVTGGADGLTF

SEQ ID NO: 521478 - protein, 13 aa, Homo sapiens
  CDR3 for beta chain variable domain of TCR clone 260739 (TRBV5-7, TRBJ2-6)
CASTSSGANDLTF

SEQ ID NO: 521479 - protein, 11 aa, Homo sapiens
  CDR3 for alpha chain variable domain of TCR clone 260740 (TRAV12-2, TRAJ31)
CAILNNARLMF

SEQ ID NO: 521480 - protein, 16 aa, Homo sapiens
  CDR3 for beta chain variable domain of TCR clone 260740 (TRBV28, TRBJ2-7)
CASSLFFETGGPEQYF

SEQ ID NO: 521481 - protein, 11 aa, Homo sapiens
  CDR3 for alpha chain variable domain of TCR clone 260741 (TRAV21, TRAJ11)
CAVNGYSTLTF

SEQ ID NO: 521482 - protein, 15 aa, Homo sapiens
  CDR3 for beta chain variable domain of TCR clone 260741 (TRBV19, TRBJ2-1)
CASSTGTSSYNEQFF

SEQ ID NO: 521483 - protein, 15 aa, Homo sapiens
  CDR3 for alpha chain variable domain of TCR clone 260742 (TRAV29/DV5, TRAJ24)
CAASGATDSWGKLQF

SEQ ID NO: 521484 - protein, 20 aa, Homo sapiens
  CDR3 for beta chain variable domain of TCR clone 260742 (TRBV11-2, TRBJ2-2)
LRARPCISVPAASLPGSCFF

SEQ ID NO: 521485 - protein, 17 aa, Homo sapiens
  CDR3 for alpha chain variable domain of TCR clone 260743 (TRAV23/DV6, TRAJ57)
CAASSTLSQGGSETLAF

SEQ ID NO: 521486 - protein, 14 aa, Homo sapiens
  CDR3 for beta chain variable domain of TCR clone 260743 (TRBV25-1, TRBJ1-1)
CASTHLGGNTEAFF

SEQ ID NO: 521487 - protein, 17 aa, Homo sapiens
  CDR3 for alpha chain variable domain of TCR clone 260744 (TRAV27, TRAJ52)
CAGAGWAGGNSYGKLTF

SEQ ID NO: 521488 - protein, 16 aa, Homo sapiens
  CDR3 for beta chain variable domain of TCR clone 260744 (TRBV19, TRBJ2-1)
CASSKAGPSSYNEQFF

SEQ ID NO: 521489 - protein, 11 aa, Homo sapiens
  CDR3 for alpha chain variable domain of TCR clone 260745 (TRAV23/DV6, TRAJ48)
CAPRWGEKLTF

SEQ ID NO: 521490 - protein, 13 aa, Homo sapiens
  CDR3 for beta chain variable domain of TCR clone 260745 (TRBV7-2, TRBJ1-1)
CASNLKGAKVAFF

SEQ ID NO: 521491 - protein, 18 aa, Homo sapiens
  CDR3 for alpha chain variable domain of TCR clone 260746 (TRAV26-2, TRAJ33)
CCVLLHPEEPASNYQLIW

SEQ ID NO: 521492 - protein, 13 aa, Homo sapiens
  CDR3 for beta chain variable domain of TCR clone 260746 (TRBV24-1, TRBJ2-2)
CATSDWCTGELFF

SEQ ID NO: 521493 - protein, 13 aa, Homo sapiens
  CDR3 for alpha chain variable domain of TCR clone 260747 (TRAV1-2, TRAJ20)
CAVPRSNDYKLSF

SEQ ID NO: 521494 - protein, 13 aa, Homo sapiens
  CDR3 for beta chain variable domain of TCR clone 260747 (TRBV20-1, TRBJ2-5)
CSAREAFQETQYF

SEQ ID NO: 521495 - protein, 12 aa, Homo sapiens
  CDR3 for alpha chain variable domain of TCR clone 260748 (TRAV12-2, TRAJ47)
CAVAECGNKLVL

SEQ ID NO: 521496 - protein, 14 aa, Homo sapiens
  CDR3 for beta chain variable domain of TCR clone 260748 (TRBV20-1, TRBJ1-1)
CSAMGGTANTEAFF

SEQ ID NO: 521497 - protein, 14 aa, Homo sapiens
  CDR3 for alpha chain variable domain of TCR clone 260749 (TRAV35, TRAJ13)
CAGSPSGGSQKVTF

SEQ ID NO: 521498 - protein, 15 aa, Homo sapiens
  CDR3 for beta chain variable domain of TCR clone 260749 (TRBV2, TRBJ2-1)
CASSEEREGDNEQFF

SEQ ID NO: 521499 - protein, 13 aa, Homo sapiens
  CDR3 for alpha chain variable domain of TCR clone 260750 (TRAV3, TRAJ20)
CCEAFCNDYKLSF

SEQ ID NO: 521500 - protein, 16 aa, Homo sapiens
  CDR3 for beta chain variable domain of TCR clone 260750 (TRBV12-5, TRBJ2-5)
CASGPRTSGKQETQYF

SEQ ID NO: 521501 - protein, 14 aa, Homo sapiens
  CDR3 for alpha chain variable domain of TCR clone 260751 (TRAV1-2, TRAJ16)
CAVNRFSDGQKLLF

SEQ ID NO: 521502 - protein, 16 aa, Homo sapiens
  CDR3 for beta chain variable domain of TCR clone 260751 (TRBV20-1, TRBJ1-4)
CSARTYGGELNEKLFF

SEQ ID NO: 521503 - protein, 14 aa, Homo sapiens
  CDR3 for alpha chain variable domain of TCR clone 260752 (TRAV29/DV5, TRAJ45)
CAASFRGGADGLTF

SEQ ID NO: 521504 - protein, 12 aa, Homo sapiens
  CDR3 for beta chain variable domain of TCR clone 260752 (TRBV12-4, TRBJ2-7)
CASSLGGYEQYF

SEQ ID NO: 521505 - protein, 15 aa, Homo sapiens
  CDR3 for alpha chain variable domain of TCR clone 260753 (TRAV3, TRAJ4)
CAVRDGTGGYNKLTF

SEQ ID NO: 521506 - protein, 17 aa, Homo sapiens
  CDR3 for beta chain variable domain of TCR clone 260753 (TRBV20-1, TRBJ2-2)
CSASGSGQGGLTGELFF

SEQ ID NO: 521507 - protein, 11 aa, Homo sapiens
  CDR3 for alpha chain variable domain of TCR clone 260754 (TRAV21, TRAJ34)
CAQYNTDKLIF

SEQ ID NO: 521508 - protein, 13 aa, Homo sapiens
  CDR3 for beta chain variable domain of TCR clone 260754 (TRBV7-6, TRBJ1-2)
CASSLVADYGYTF

SEQ ID NO: 521509 - protein, 14 aa, Homo sapiens
  CDR3 for alpha chain variable domain of TCR clone 260755 (TRAV36/DV7, TRAJ45)
CPLYSGGGADGLTF

SEQ ID NO: 521510 - protein, 16 aa, Homo sapiens
  CDR3 for beta chain variable domain of TCR clone 260755 (TRBV2, TRBJ2-1)
CASSVGGSLSYNEQFF

SEQ ID NO: 521511 - protein, 14 aa, Homo sapiens
  CDR3 for alpha chain variable domain of TCR clone 260756 (TRAV1-2, TRAJ16)
CAVNRFSDGQKLLF

SEQ ID NO: 521512 - protein, 13 aa, Homo sapiens
  CDR3 for beta chain variable domain of TCR clone 260756 (TRBV10-3, TRBJ2-7)
CASKLAVNYELYF

SEQ ID NO: 521513 - protein, 15 aa, Homo sapiens
  CDR3 for alpha chain variable domain of TCR clone 260757 (TRAV8-6, TRAJ40)
CAVSEAPSGTYKYIF

SEQ ID NO: 521514 - protein, 14 aa, Homo sapiens
  CDR3 for beta chain variable domain of TCR clone 260757 (TRBV6-5, TRBJ2-7)
CASSTAGGNYEQYF

SEQ ID NO: 521515 - protein, 11 aa, Homo sapiens
  CDR3 for alpha chain variable domain of TCR clone 260758 (TRAV12-3, TRAJ27)
CAMANACKSTF

SEQ ID NO: 521516 - protein, 14 aa, Homo sapiens
  CDR3 for beta chain variable domain of TCR clone 260758 (TRBV4-1, TRBJ2-2)
CASSQAVNTGELFF

SEQ ID NO: 521517 - protein, 14 aa, Homo sapiens
  CDR3 for alpha chain variable domain of TCR clone 260759 (TRAV38-1, TRAJ45)
CAYYSGGGADGLTF

SEQ ID NO: 521518 - protein, 16 aa, Homo sapiens
  CDR3 for beta chain variable domain of TCR clone 260759 (TRBV27, TRBJ2-2)
CASSSSGVSNTGELFF

SEQ ID NO: 521519 - protein, 15 aa, Homo sapiens
  CDR3 for alpha chain variable domain of TCR clone 260760 (TRAV21, TRAJ24)
CAARSSTDSWGKLQL

SEQ ID NO: 521520 - protein, 12 aa, Homo sapiens
  CDR3 for beta chain variable domain of TCR clone 260760 (TRBV11-2, TRBJ2-4)
CASSSASGSEYF

SEQ ID NO: 521521 - protein, 15 aa, Homo sapiens
  CDR3 for alpha chain variable domain of TCR clone 260761 (TRAV2, TRAJ22)
CAVPSRWCSARQLTF

SEQ ID NO: 521522 - protein, 11 aa, Homo sapiens
  CDR3 for beta chain variable domain of TCR clone 260761 (TRBV27, TRBJ2-3)
CASSLGDTQYF

SEQ ID NO: 521523 - protein, 17 aa, Homo sapiens
  CDR3 for alpha chain variable domain of TCR clone 260762 (TRAV4, TRAJ13)
CLVGVQGSSGCYQKVTL

SEQ ID NO: 521524 - protein, 15 aa, Homo sapiens
  CDR3 for beta chain variable domain of TCR clone 260762 (TRBV9, TRBJ1-6)
CASSVAGTGDSPLHF

SEQ ID NO: 521525 - protein, 11 aa, Homo sapiens
  CDR3 for alpha chain variable domain of TCR clone 260763 (TRAV26-1, TRAJ37)
CIVRVGRKLIF

SEQ ID NO: 521526 - protein, 13 aa, Homo sapiens
  CDR3 for beta chain variable domain of TCR clone 260763 (TRBV14, TRBJ1-2)
CASSEDRRYGYTV

SEQ ID NO: 521527 - protein, 13 aa, Homo sapiens
  CDR3 for alpha chain variable domain of TCR clone 260764 (TRAV12-3, TRAJ4)
CKEQAGGYNKLIF

SEQ ID NO: 521528 - protein, 15 aa, Homo sapiens
  CDR3 for beta chain variable domain of TCR clone 260764 (TRBV5-1, TRBJ1-1)
CASSLSDLGGTEAFF

SEQ ID NO: 521529 - protein, 14 aa, Homo sapiens
  CDR3 for alpha chain variable domain of TCR clone 260765 (TRAV29/DV5, TRAJ36)
CAARRKTGANNISF

SEQ ID NO: 521530 - protein, 14 aa, Homo sapiens
  CDR3 for beta chain variable domain of TCR clone 260765 (TRBV12-5, TRBJ2-5)
CASGSRTHQETQYF

SEQ ID NO: 521531 - protein, 16 aa, Homo sapiens
  CDR3 for alpha chain variable domain of TCR clone 260766 (TRAV30, TRAJ24)
CGTEIVDADSWGKLQF

SEQ ID NO: 521532 - protein, 14 aa, Homo sapiens
  CDR3 for beta chain variable domain of TCR clone 260766 (TRBV12-5, TRBJ2-5)
CASGTRTHQETQYF

SEQ ID NO: 521533 - protein, 11 aa, Homo sapiens
  CDR3 for alpha chain variable domain of TCR clone 260767 (TRAV23/DV6, TRAJ48)
CAPRWGEKLTF

SEQ ID NO: 521534 - protein, 14 aa, Homo sapiens
  CDR3 for beta chain variable domain of TCR clone 260767 (TRBV29-1, TRBJ1-3)
CSVGDRVVGNTIYF

SEQ ID NO: 521535 - protein, 11 aa, Homo sapiens
  CDR3 for alpha chain variable domain of TCR clone 260768 (TRAV13-1, TRAJ41)
CAADSGYALNF

SEQ ID NO: 521536 - protein, 16 aa, Homo sapiens
  CDR3 for beta chain variable domain of TCR clone 260768 (TRBV2, TRBJ2-1)
CASSPGQGASYNEQFF

SEQ ID NO: 521537 - protein, 13 aa, Homo sapiens
  CDR3 for alpha chain variable domain of TCR clone 260769 (TRAV12-1, TRAJ37)
CVVNAGNTGKLIF

SEQ ID NO: 521538 - protein, 14 aa, Homo sapiens
  CDR3 for beta chain variable domain of TCR clone 260769 (TRBV7-2, TRBJ2-3)
CASRRGLAADTQHF

SEQ ID NO: 521539 - protein, 13 aa, Homo sapiens
  CDR3 for alpha chain variable domain of TCR clone 260770 (TRAV35, TRAJ57)
CAGSHGGSEKLVF

SEQ ID NO: 521540 - protein, 12 aa, Homo sapiens
  CDR3 for beta chain variable domain of TCR clone 260770 (TRBV11-3, TRBJ1-1)
CASSHRQGEAFF

SEQ ID NO: 521541 - protein, 15 aa, Homo sapiens
  CDR3 for alpha chain variable domain of TCR clone 260771 (TRAV2, TRAJ9)
CAVEDRGTGGFKTIF

SEQ ID NO: 521542 - protein, 13 aa, Homo sapiens
  CDR3 for beta chain variable domain of TCR clone 260771 (TRBV20-1, TRBJ1-1)
CSARLGQGTEAFF

SEQ ID NO: 521543 - protein, 16 aa, Homo sapiens
  CDR3 for alpha chain variable domain of TCR clone 260772 (TRAV8-3, TRAJ44)
CALGTLMTGTASKLPF

SEQ ID NO: 521544 - protein, 13 aa, Homo sapiens
  CDR3 for beta chain variable domain of TCR clone 260772 (TRBV11-2, TRBJ2-1)
CASSLRLTHEQFF

SEQ ID NO: 521545 - protein, 14 aa, Homo sapiens
  CDR3 for alpha chain variable domain of TCR clone 260773 (TRAV12-1, TRAJ33)
YVVNPEDSNYQLIW

SEQ ID NO: 521546 - protein, 11 aa, Homo sapiens
  CDR3 for beta chain variable domain of TCR clone 260773 (TRBV7-6, TRBJ2-1)
CASSNYGEQFF

SEQ ID NO: 521547 - protein, 15 aa, Homo sapiens
  CDR3 for alpha chain variable domain of TCR clone 260774 (TRAV40, TRAJ48)
CPLFISNFGNEKLTF

SEQ ID NO: 521548 - protein, 13 aa, Homo sapiens
  CDR3 for beta chain variable domain of TCR clone 260774 (TRBV19, TRBJ1-5)
CASSINFNQPQHF

SEQ ID NO: 521549 - protein, 13 aa, Homo sapiens
  CDR3 for alpha chain variable domain of TCR clone 260775 (TRAV13-1, TRAJ10)
CAALEGGGNKLTF

SEQ ID NO: 521550 - protein, 14 aa, Homo sapiens
  CDR3 for beta chain variable domain of TCR clone 260775 (TRBV28, TRBJ2-4)
CASSPRARGNIQYF

SEQ ID NO: 521551 - protein, 19 aa, Homo sapiens
  CDR3 for alpha chain variable domain of TCR clone 260776 (TRAV27, TRAJ49)
TAAQPGYTGLYPTSNQFYF

SEQ ID NO: 521552 - protein, 11 aa, Homo sapiens
  CDR3 for beta chain variable domain of TCR clone 260776 (TRBV5-1, TRBJ2-2)
CASSPSRCEHR

SEQ ID NO: 521553 - protein, 13 aa, Homo sapiens
  CDR3 for alpha chain variable domain of TCR clone 260777 (TRAV36/DV7, TRAJ54)
CAVCTQGAQKLVF

SEQ ID NO: 521554 - protein, 13 aa, Homo sapiens
  CDR3 for beta chain variable domain of TCR clone 260777 (TRBV7-6, TRBJ2-7)
FASSLDHTHEQYF

SEQ ID NO: 521555 - protein, 12 aa, Homo sapiens
  CDR3 for alpha chain variable domain of TCR clone 260778 (TRAV36/DV7, TRAJ40)
CAVGTGTYEYIF

SEQ ID NO: 521556 - protein, 13 aa, Homo sapiens
  CDR3 for beta chain variable domain of TCR clone 260778 (TRBV7-7, TRBJ1-5)
CASSPGKNQPQHF

SEQ ID NO: 521557 - protein, 11 aa, Homo sapiens
  CDR3 for alpha chain variable domain of TCR clone 260779 (TRAV26-1, TRAJ37)
CIVRVGKKLIF

SEQ ID NO: 521558 - protein, 14 aa, Homo sapiens
  CDR3 for beta chain variable domain of TCR clone 260779 (TRBV20-1, TRBJ1-1)
CSAQTRIGGTEAFF

SEQ ID NO: 521559 - protein, 14 aa, Homo sapiens
  CDR3 for alpha chain variable domain of TCR clone 260780 (TRAV9-2, TRAJ39)
CALYIYNSGNMLTF

SEQ ID NO: 521560 - protein, 15 aa, Homo sapiens
  CDR3 for beta chain variable domain of TCR clone 260780 (TRBV7-9, TRBJ1-4)
CASSARTGGNEKLFF

SEQ ID NO: 521561 - protein, 14 aa, Homo sapiens
  CDR3 for alpha chain variable domain of TCR clone 260781 (TRAV27, TRAJ37)
CRSQGSSNTGKLIL

SEQ ID NO: 521562 - protein, 13 aa, Homo sapiens
  CDR3 for beta chain variable domain of TCR clone 260781 (TRBV7-9, TRBJ1-2)
CASSLKQNYGYTF

SEQ ID NO: 521563 - protein, 18 aa, Homo sapiens
  CDR3 for alpha chain variable domain of TCR clone 260782 (TRAV26-2, TRAJ54)
CILRDVEVGIQGAQKLVF

SEQ ID NO: 521564 - protein, 17 aa, Homo sapiens
  CDR3 for beta chain variable domain of TCR clone 260782 (TRBV20-1, TRBJ1-5)
CSASLSPGQGGNQHQHF

SEQ ID NO: 521565 - protein, 15 aa, Homo sapiens
  CDR3 for alpha chain variable domain of TCR clone 260783 (TRAV13-1, TRAJ32)
CAASIFGGATNKLIF

SEQ ID NO: 521566 - protein, 17 aa, Homo sapiens
  CDR3 for beta chain variable domain of TCR clone 260783 (TRBV7-3, TRBJ2-5)
CASSLGSGRSGSETQYF

SEQ ID NO: 521567 - protein, 12 aa, Homo sapiens
  CDR3 for alpha chain variable domain of TCR clone 260784 (TRAV3, TRAJ43)
CAVRDPNNDIRF

SEQ ID NO: 521568 - protein, 15 aa, Homo sapiens
  CDR3 for beta chain variable domain of TCR clone 260784 (TRBV6-5, TRBJ2-1)
CASSYDAGAGNEQFL

SEQ ID NO: 521569 - protein, 14 aa, Homo sapiens
  CDR3 for alpha chain variable domain of TCR clone 260785 (TRAV23/DV6, TRAJ4)
CAANLSGGYDKLIF

SEQ ID NO: 521570 - protein, 11 aa, Homo sapiens
  CDR3 for beta chain variable domain of TCR clone 260785 (TRBV7-9, TRBJ2-3)
CASSPTDTQYF

SEQ ID NO: 521571 - protein, 16 aa, Homo sapiens
  CDR3 for alpha chain variable domain of TCR clone 260786 (TRAV8-3, TRAJ44)
CAVGASNTGTASKLTF

SEQ ID NO: 521572 - protein, 15 aa, Homo sapiens
  CDR3 for beta chain variable domain of TCR clone 260786 (TRBV7-9, TRBJ1-5)
CASSQGHQPNQPQHF

SEQ ID NO: 521573 - protein, 15 aa, Homo sapiens
  CDR3 for alpha chain variable domain of TCR clone 260787 (TRAV8-3, TRAJ45)
GASSYSGGGADGRTF

SEQ ID NO: 521574 - protein, 13 aa, Homo sapiens
  CDR3 for beta chain variable domain of TCR clone 260787 (TRBV10-3, TRBJ2-7)
CASKLAVNYEQYF

SEQ ID NO: 521575 - protein, 13 aa, Homo sapiens
  CDR3 for alpha chain variable domain of TCR clone 260788 (TRAV8-3, TRAJ48)
CAVVPFGNEKLTF

SEQ ID NO: 521576 - protein, 15 aa, Homo sapiens
  CDR3 for beta chain variable domain of TCR clone 260788 (TRBV27, TRBJ2-1)
CASSNGGGSSNEQFF

SEQ ID NO: 521577 - protein, 12 aa, Homo sapiens
  CDR3 for alpha chain variable domain of TCR clone 260789 (TRAV8-3, TRAJ26)
CAGDNYGQNFVF

SEQ ID NO: 521578 - protein, 13 aa, Homo sapiens
  CDR3 for beta chain variable domain of TCR clone 260789 (TRBV20-1, TRBJ2-5)
CSARGDYQETQYF

SEQ ID NO: 521579 - protein, 15 aa, Homo sapiens
  CDR3 for alpha chain variable domain of TCR clone 260790 (TRAV13-1, TRAJ5)
CAASPRGHGQESTYC

SEQ ID NO: 521580 - protein, 17 aa, Homo sapiens
  CDR3 for beta chain variable domain of TCR clone 260790 (TRBV3-1, TRBJ2-2)
CASSQFRDKVDTGELFF

SEQ ID NO: 521581 - protein, 14 aa, Homo sapiens
  CDR3 for alpha chain variable domain of TCR clone 260791 (TRAV8-6, TRAJ54)
CAVSGLQGAQKLVF

SEQ ID NO: 521582 - protein, 14 aa, Homo sapiens
  CDR3 for beta chain variable domain of TCR clone 260791 (TRBV19, TRBJ2-1)
CASPTFVLSGEQFF

SEQ ID NO: 521583 - protein, 16 aa, Homo sapiens
  CDR3 for alpha chain variable domain of TCR clone 260792 (TRAV8-3, TRAJ44)
CAVGASNTGTASKLTF

SEQ ID NO: 521584 - protein, 14 aa, Homo sapiens
  CDR3 for beta chain variable domain of TCR clone 260792 (TRBV7-6, TRBJ2-3)
CASSLGTVTDTQYC

SEQ ID NO: 521585 - protein, 14 aa, Homo sapiens
  CDR3 for alpha chain variable domain of TCR clone 260793 (TRAV1-2, TRAJ16)
CAVSRFSDGQKLLF

SEQ ID NO: 521586 - protein, 12 aa, Homo sapiens
  CDR3 for beta chain variable domain of TCR clone 260793 (TRBV7-3, TRBJ2-1)
CASSFINNEQFF

SEQ ID NO: 521587 - protein, 14 aa, Homo sapiens
  CDR3 for alpha chain variable domain of TCR clone 260794 (TRAV12-1, TRAJ8)
CVVNSNTGFQKLVF

SEQ ID NO: 521588 - protein, 14 aa, Homo sapiens
  CDR3 for beta chain variable domain of TCR clone 260794 (TRBV7-2, TRBJ1-2)
CASSRGGTNYGYTF

SEQ ID NO: 521589 - protein, 13 aa, Homo sapiens
  CDR3 for alpha chain variable domain of TCR clone 260795 (TRAV21, TRAJ20)
CAVGLRVDYKLSF

SEQ ID NO: 521590 - protein, 14 aa, Homo sapiens
  CDR3 for beta chain variable domain of TCR clone 260795 (TRBV7-6, TRBJ2-3)
CTSSLGTVTDTQYF

SEQ ID NO: 521591 - protein, 14 aa, Homo sapiens
  CDR3 for alpha chain variable domain of TCR clone 260796 (TRAV8-3, TRAJ39)
CAVGANNAGNMLTF

SEQ ID NO: 521592 - protein, 13 aa, Homo sapiens
  CDR3 for beta chain variable domain of TCR clone 260796 (TRBV3-1, TRBJ2-5)
CASSPVLSDTQYF

SEQ ID NO: 521593 - protein, 15 aa, Homo sapiens
  CDR3 for alpha chain variable domain of TCR clone 260797 (TRAV23/DV6, TRAJ58)
CAARLLRGETRGSRL

SEQ ID NO: 521594 - protein, 13 aa, Homo sapiens
  CDR3 for beta chain variable domain of TCR clone 260797 (TRBV4-1, TRBJ2-5)
CASSQEVQETQYF

SEQ ID NO: 521595 - protein, 14 aa, Homo sapiens
  CDR3 for alpha chain variable domain of TCR clone 260798 (TRAV2, TRAJ37)
CAVDFTSNTVKLIF

SEQ ID NO: 521596 - protein, 13 aa, Homo sapiens
  CDR3 for beta chain variable domain of TCR clone 260798 (TRBV4-2, TRBJ1-1)
CASSQAGNTEAFF

SEQ ID NO: 521597 - protein, 15 aa, Homo sapiens
  CDR3 for alpha chain variable domain of TCR clone 260799 (TRAV17, TRAJ40)
CATVSSTSGTYKYIF

SEQ ID NO: 521598 - protein, 13 aa, Homo sapiens
  CDR3 for beta chain variable domain of TCR clone 260799 (TRBV12-5, TRBJ2-3)
CASGDRQSDTQYF

SEQ ID NO: 521599 - protein, 13 aa, Homo sapiens
  CDR3 for alpha chain variable domain of TCR clone 260800 (TRAV21, TRAJ15)
CAVANQAGTALIF

SEQ ID NO: 521600 - protein, 16 aa, Homo sapiens
  CDR3 for beta chain variable domain of TCR clone 260800 (TRBV4-1, TRBJ2-7)
CASSQNDRDNSYEQYF

SEQ ID NO: 521601 - protein, 13 aa, Homo sapiens
  CDR3 for alpha chain variable domain of TCR clone 260801 (TRAV17, TRAJ4)
CATKSGCYNKLIF

SEQ ID NO: 521602 - protein, 14 aa, Homo sapiens
  CDR3 for beta chain variable domain of TCR clone 260801 (TRBV20-1, TRBJ1-5)
CSARDDRGNQPQHF

SEQ ID NO: 521603 - protein, 15 aa, Homo sapiens
  CDR3 for alpha chain variable domain of TCR clone 260802 (TRAV4, TRAJ39)
CLVGPNNNAGNMLTF

SEQ ID NO: 521604 - protein, 14 aa, Homo sapiens
  CDR3 for beta chain variable domain of TCR clone 260802 (TRBV19, TRBJ2-7)
CASNCRDTFTGMYF

SEQ ID NO: 521605 - protein, 11 aa, Homo sapiens
  CDR3 for alpha chain variable domain of TCR clone 260803 (TRAV1-2, TRAJ11)
CAVRGYSTLTF

SEQ ID NO: 521606 - protein, 14 aa, Homo sapiens
  CDR3 for beta chain variable domain of TCR clone 260803 (TRBV7-2, TRBJ2-7)
CASSPKTSFYEQYF

SEQ ID NO: 521607 - protein, 12 aa, Homo sapiens
  CDR3 for alpha chain variable domain of TCR clone 260804 (TRAV12-2, TRAJ31)
CAVNTPDARLMF

SEQ ID NO: 521608 - protein, 13 aa, Homo sapiens
  CDR3 for beta chain variable domain of TCR clone 260804 (TRBV7-9, TRBJ1-2)
CASSLKQNYGYTF

SEQ ID NO: 521609 - protein, 15 aa, Homo sapiens
  CDR3 for alpha chain variable domain of TCR clone 260805 (TRAV17, TRAJ40)
CATVSSTSGTYKYIF

SEQ ID NO: 521610 - protein, 12 aa, Homo sapiens
  CDR3 for beta chain variable domain of TCR clone 260805 (TRBV12-4, TRBJ2-7)
CASSLGGYEQYF

SEQ ID NO: 521611 - protein, 13 aa, Homo sapiens
  CDR3 for alpha chain variable domain of TCR clone 260806 (TRAV23/DV6, TRAJ58)
CAAMGTSGSRLTF

SEQ ID NO: 521612 - protein, 13 aa, Homo sapiens
  CDR3 for beta chain variable domain of TCR clone 260806 (TRBV5-5, TRBJ1-2)
CASSFWRGEDYTF

SEQ ID NO: 521613 - protein, 16 aa, Homo sapiens
  CDR3 for alpha chain variable domain of TCR clone 260807 (TRAV16, TRAJ42)
CARKVNYGGSQGNPIF

SEQ ID NO: 521614 - protein, 15 aa, Homo sapiens
  CDR3 for beta chain variable domain of TCR clone 260807 (TRBV20-1, TRBJ2-7)
CSAREGRDSLYEQYF

SEQ ID NO: 521615 - protein, 17 aa, Homo sapiens
  CDR3 for alpha chain variable domain of TCR clone 260808 (TRAV13-1, TRAJ5)
CSNPSLSRDTGRRALTF

SEQ ID NO: 521616 - protein, 17 aa, Homo sapiens
  CDR3 for beta chain variable domain of TCR clone 260808 (TRBV24-1, TRBJ2-1)
WSTSDVSTSGTYNEQFF

SEQ ID NO: 521617 - protein, 16 aa, Homo sapiens
  CDR3 for alpha chain variable domain of TCR clone 260809 (TRAV27, TRAJ53)
CAAPEGSGGSNSKLTF

SEQ ID NO: 521618 - protein, 15 aa, Homo sapiens
  CDR3 for beta chain variable domain of TCR clone 260809 (TRBV20-1, TRBJ1-1)
CSASRGVTGNTEAFF

SEQ ID NO: 521619 - protein, 14 aa, Homo sapiens
  CDR3 for alpha chain variable domain of TCR clone 260810 (TRAV12-3, TRAJ10)
SHLPLTGGGNKLTF

SEQ ID NO: 521620 - protein, 12 aa, Homo sapiens
  CDR3 for beta chain variable domain of TCR clone 260810 (TRBV7-9, TRBJ2-7)
CASRIKREEQYF

SEQ ID NO: 521621 - protein, 11 aa, Homo sapiens
  CDR3 for alpha chain variable domain of TCR clone 260811 (TRAV2, TRAJ13)
CASGGYQKVTF

SEQ ID NO: 521622 - protein, 14 aa, Homo sapiens
  CDR3 for beta chain variable domain of TCR clone 260811 (TRBV19, TRBJ2-1)
CARSKDRGQDEQFF

SEQ ID NO: 521623 - protein, 14 aa, Homo sapiens
  CDR3 for alpha chain variable domain of TCR clone 260812 (TRAV8-2, TRAJ26)
CVGPRDNYGQNFVF

SEQ ID NO: 521624 - protein, 12 aa, Homo sapiens
  CDR3 for beta chain variable domain of TCR clone 260812 (TRBV7-6, TRBJ2-5)
CASSLSQETQYF

SEQ ID NO: 521625 - protein, 14 aa, Homo sapiens
  CDR3 for alpha chain variable domain of TCR clone 260813 (TRAV12-3, TRAJ13)
CAMKNSGGYQKVTF

SEQ ID NO: 521626 - protein, 12 aa, Homo sapiens
  CDR3 for beta chain variable domain of TCR clone 260813 (TRBV11-2, TRBJ2-2)
CASSLGGGELFF

SEQ ID NO: 521627 - protein, 12 aa, Homo sapiens
  CDR3 for alpha chain variable domain of TCR clone 260814 (TRAV12-3, TRAJ17)
CAMTLTGKKLTF

SEQ ID NO: 521628 - protein, 14 aa, Homo sapiens
  CDR3 for beta chain variable domain of TCR clone 260814 (TRBV7-9, TRBJ2-2)
CASSGLADTGELFF

SEQ ID NO: 521629 - protein, 11 aa, Homo sapiens
  CDR3 for alpha chain variable domain of TCR clone 260815 (TRAV21, TRAJ11)
CAVNGYSTLTF

SEQ ID NO: 521630 - protein, 16 aa, Homo sapiens
  CDR3 for beta chain variable domain of TCR clone 260815 (TRBV28, TRBJ2-7)
CASSPWVATGDLSQYF

SEQ ID NO: 521631 - protein, 14 aa, Homo sapiens
  CDR3 for alpha chain variable domain of TCR clone 260816 (TRAV38-1, TRAJ43)
CAFMKHNNNNDMRV

SEQ ID NO: 521632 - protein, 17 aa, Homo sapiens
  CDR3 for beta chain variable domain of TCR clone 260816 (TRBV7-7, TRBJ1-4)
CASSLVGQGASNEKLFF

SEQ ID NO: 521633 - protein, 13 aa, Homo sapiens
  CDR3 for alpha chain variable domain of TCR clone 260817 (TRAV23/DV6, TRAJ22)
CASRAGSARQMTF

SEQ ID NO: 521634 - protein, 14 aa, Homo sapiens
  CDR3 for beta chain variable domain of TCR clone 260817 (TRBV7-2, TRBJ2-7)
CASSPKTSFYEQYF

SEQ ID NO: 521635 - protein, 17 aa, Homo sapiens
  CDR3 for alpha chain variable domain of TCR clone 260818 (TRAV3, TRAJ42)
CAVRDRDYVGSQGNLIF

SEQ ID NO: 521636 - protein, 14 aa, Homo sapiens
  CDR3 for beta chain variable domain of TCR clone 260818 (TRBV19, TRBJ2-5)
CASSMTGQQETQYF

SEQ ID NO: 521637 - protein, 16 aa, Homo sapiens
  CDR3 for alpha chain variable domain of TCR clone 260819 (TRAV3, TRAJ10)
CAVRDMRAGGGNKLTF

SEQ ID NO: 521638 - protein, 17 aa, Homo sapiens
  CDR3 for beta chain variable domain of TCR clone 260819 (TRBV5-4, TRBJ2-3)
CISVPAVLTASTDTQYF

SEQ ID NO: 521639 - protein, 12 aa, Homo sapiens
  CDR3 for alpha chain variable domain of TCR clone 260820 (TRAV13-1, TRAJ53)
AASGGSNYKLTF

SEQ ID NO: 521640 - protein, 15 aa, Homo sapiens
  CDR3 for beta chain variable domain of TCR clone 260820 (TRBV7-9, TRBJ1-4)
CASSRTGGFNEKLFF

SEQ ID NO: 521641 - protein, 12 aa, Homo sapiens
  CDR3 for alpha chain variable domain of TCR clone 260821 (TRAV23/DV6, TRAJ8)
CAASKATGFQKL

SEQ ID NO: 521642 - protein, 15 aa, Homo sapiens
  CDR3 for beta chain variable domain of TCR clone 260821 (TRBV28, TRBJ2-3)
CASSPDRQGANTQYF

SEQ ID NO: 521643 - protein, 14 aa, Homo sapiens
  CDR3 for alpha chain variable domain of TCR clone 260822 (TRAV20, TRAJ33)
CAVLTRDSNYQLIW

SEQ ID NO: 521644 - protein, 16 aa, Homo sapiens
  CDR3 for beta chain variable domain of TCR clone 260822 (TRBV4-1, TRBJ2-3)
CASSQSTSGAEDTQYF

SEQ ID NO: 521645 - protein, 12 aa, Homo sapiens
  CDR3 for alpha chain variable domain of TCR clone 260823 (TRAV12-2, TRAJ10)
WGVTGGGNKLTF

SEQ ID NO: 521646 - protein, 14 aa, Homo sapiens
  CDR3 for beta chain variable domain of TCR clone 260823 (TRBV20-1, TRBJ2-7)
CSVGGRGPRSEQYF

SEQ ID NO: 521647 - protein, 12 aa, Homo sapiens
  CDR3 for alpha chain variable domain of TCR clone 260824 (TRAV21, TRAJ3)
CCFYSSASKIIF

SEQ ID NO: 521648 - protein, 16 aa, Homo sapiens
  CDR3 for beta chain variable domain of TCR clone 260824 (TRBV19, TRBJ2-1)
CASSKAGPSSYNEQFC

SEQ ID NO: 521649 - protein, 19 aa, Homo sapiens
  CDR3 for alpha chain variable domain of TCR clone 260825 (TRAV2, TRAJ32)
TTVLSNPPSQGGATNKLIF

SEQ ID NO: 521650 - protein, 12 aa, Homo sapiens
  CDR3 for beta chain variable domain of TCR clone 260825 (TRBV20-1, TRBJ2-7)
CSAITPTKEQYF

SEQ ID NO: 521651 - protein, 18 aa, Homo sapiens
  CDR3 for alpha chain variable domain of TCR clone 260826 (TRAV13-1, TRAJ52)
CAAKNPNAGGTSYGKLTF

SEQ ID NO: 521652 - protein, 13 aa, Homo sapiens
  CDR3 for beta chain variable domain of TCR clone 260826 (TRBV19, TRBJ2-7)
CASSKTGTHEQYF

SEQ ID NO: 521653 - protein, 14 aa, Homo sapiens
  CDR3 for alpha chain variable domain of TCR clone 260827 (TRAV1-2, TRAJ6)
CAVSVSGGSYIPTF

SEQ ID NO: 521654 - protein, 15 aa, Homo sapiens
  CDR3 for beta chain variable domain of TCR clone 260827 (TRBV28, TRBJ2-7)
CASSPGGRGFYEQYV

SEQ ID NO: 521655 - protein, 13 aa, Homo sapiens
  CDR3 for alpha chain variable domain of TCR clone 260828 (TRAV3, TRAJ27)
CAVRPLGAGKSTF

SEQ ID NO: 521656 - protein, 13 aa, Homo sapiens
  CDR3 for beta chain variable domain of TCR clone 260828 (TRBV11-3, TRBJ2-3)
CASSHDTKDTQYF

SEQ ID NO: 521657 - protein, 13 aa, Homo sapiens
  CDR3 for alpha chain variable domain of TCR clone 260829 (TRAV27, TRAJ29)
CAGAHSGNTPLVF

SEQ ID NO: 521658 - protein, 18 aa, Homo sapiens
  CDR3 for beta chain variable domain of TCR clone 260829 (TRBV6-6, TRBJ1-3)
CASSYSKWDAISGNTMYF

SEQ ID NO: 521659 - protein, 13 aa, Homo sapiens
  CDR3 for alpha chain variable domain of TCR clone 260830 (TRAV27, TRAJ41)
CAGEGNSGYALNF

SEQ ID NO: 521660 - protein, 14 aa, Homo sapiens
  CDR3 for beta chain variable domain of TCR clone 260830 (TRBV7-7, TRBJ2-7)
CASSLGRGVGEQYF

SEQ ID NO: 521661 - protein, 15 aa, Homo sapiens
  CDR3 for alpha chain variable domain of TCR clone 260831 (TRAV12-3, TRAJ6)
CAMSATSGGSYIPTF

SEQ ID NO: 521662 - protein, 15 aa, Homo sapiens
  CDR3 for beta chain variable domain of TCR clone 260831 (TRBV28, TRBJ2-5)
CASSPGQGSIETQYF

SEQ ID NO: 521663 - protein, 14 aa, Homo sapiens
  CDR3 for alpha chain variable domain of TCR clone 260832 (TRAV12-2, TRAJ45)
CAVNIGGGADVLTF

SEQ ID NO: 521664 - protein, 13 aa, Homo sapiens
  CDR3 for beta chain variable domain of TCR clone 260832 (TRBV19, TRBJ2-2)
CASSIWSTGELFF

SEQ ID NO: 521665 - protein, 17 aa, Homo sapiens
  CDR3 for alpha chain variable domain of TCR clone 260833 (TRAV26-1, TRAJ53)
CIVRVDDSGGRNYKMTF

SEQ ID NO: 521666 - protein, 15 aa, Homo sapiens
  CDR3 for beta chain variable domain of TCR clone 260833 (TRBV20-1, TRBJ2-7)
CSARVPAAYFYEQYF

SEQ ID NO: 521667 - protein, 14 aa, Homo sapiens
  CDR3 for alpha chain variable domain of TCR clone 260834 (TRAV38-2/DV8, TRAJ23)
CAYRSQKQGGKIIF

SEQ ID NO: 521668 - protein, 13 aa, Homo sapiens
  CDR3 for beta chain variable domain of TCR clone 260834 (TRBV24-1, TRBJ2-1)
CATSAGPYNEQFF

SEQ ID NO: 521669 - protein, 14 aa, Homo sapiens
  CDR3 for alpha chain variable domain of TCR clone 260835 (TRAV9-2, TRAJ9)
CALSDTTGGFKTIF

SEQ ID NO: 521670 - protein, 14 aa, Homo sapiens
  CDR3 for beta chain variable domain of TCR clone 260835 (TRBV20-1, TRBJ2-4)
CSARDRGQGGIQYF

SEQ ID NO: 521671 - protein, 12 aa, Homo sapiens
  CDR3 for alpha chain variable domain of TCR clone 260836 (TRAV13-1, TRAJ21)
CAAKESFNKFYF

SEQ ID NO: 521672 - protein, 14 aa, Homo sapiens
  CDR3 for beta chain variable domain of TCR clone 260836 (TRBV18, TRBJ2-7)
CASSPRGGAYEQYF

SEQ ID NO: 521673 - protein, 11 aa, Homo sapiens
  CDR3 for alpha chain variable domain of TCR clone 260837 (TRAV4, TRAJ23)
CLVAPGGKLIF

SEQ ID NO: 521674 - protein, 14 aa, Homo sapiens
  CDR3 for beta chain variable domain of TCR clone 260837 (TRBV7-2, TRBJ2-7)
CASSPKTSFYEQYF

SEQ ID NO: 521675 - protein, 16 aa, Homo sapiens
  CDR3 for alpha chain variable domain of TCR clone 260838 (TRAV30, TRAJ24)
CGTEIVDADSWGKFQF

SEQ ID NO: 521676 - protein, 12 aa, Homo sapiens
  CDR3 for beta chain variable domain of TCR clone 260838 (TRBV11-2, TRBJ2-7)
CASSLPTYEQYF

SEQ ID NO: 521677 - protein, 15 aa, Homo sapiens
  CDR3 for alpha chain variable domain of TCR clone 260839 (TRAV26-1, TRAJ48)
CIVRVGDSGKEQLTF

SEQ ID NO: 521678 - protein, 16 aa, Homo sapiens
  CDR3 for beta chain variable domain of TCR clone 260839 (TRBV4-1, TRBJ2-3)
CASSQRAGGLTDTQYF

SEQ ID NO: 521679 - protein, 16 aa, Homo sapiens
  CDR3 for alpha chain variable domain of TCR clone 260840 (TRAV3, TRAJ10)
CAVRDMRAGGGNKLTF

SEQ ID NO: 521680 - protein, 15 aa, Homo sapiens
  CDR3 for beta chain variable domain of TCR clone 260840 (TRBV20-1, TRBJ2-7)
CGARDRVSGMDEQYF

SEQ ID NO: 521681 - protein, 11 aa, Homo sapiens
  CDR3 for alpha chain variable domain of TCR clone 260841 (TRAV12-1, TRAJ21)
CVVYNFNKFYF

SEQ ID NO: 521682 - protein, 19 aa, Homo sapiens
  CDR3 for beta chain variable domain of TCR clone 260841 (TRBV9, TRBJ2-2)
CISVTAATWEKGTPGSCFF

SEQ ID NO: 521683 - protein, 16 aa, Homo sapiens
  CDR3 for alpha chain variable domain of TCR clone 260842 (TRAV26-1, TRAJ23)
CIVRPRGNNQGGKLIF

SEQ ID NO: 521684 - protein, 13 aa, Homo sapiens
  CDR3 for beta chain variable domain of TCR clone 260842 (TRBV27, TRBJ2-7)
CASSLTTGYEQYF

SEQ ID NO: 521685 - protein, 12 aa, Homo sapiens
  CDR3 for alpha chain variable domain of TCR clone 260843 (TRAV27, TRAJ21)
CAGVRQLQQILL

SEQ ID NO: 521686 - protein, 22 aa, Homo sapiens
  CDR3 for beta chain variable domain of TCR clone 260843 (TRBV7-9, TRBJ1-4)
CASSLGTVRKTVFWQWNPALCL

SEQ ID NO: 521687 - protein, 14 aa, Homo sapiens
  CDR3 for alpha chain variable domain of TCR clone 260844 (TRAV13-1, TRAJ3)
CAASKSSSASKIIF

SEQ ID NO: 521688 - protein, 12 aa, Homo sapiens
  CDR3 for beta chain variable domain of TCR clone 260844 (TRBV3-1, TRBJ2-1)
CASSQGSSGQFF

SEQ ID NO: 521689 - protein, 10 aa, Homo sapiens
  CDR3 for alpha chain variable domain of TCR clone 260845 (TRAV1-2, TRAJ31)
CAFFDARLMF

SEQ ID NO: 521690 - protein, 16 aa, Homo sapiens
  CDR3 for beta chain variable domain of TCR clone 260845 (TRBV7-3, TRBJ2-1)
CASSLEGYRSYNEQFF

SEQ ID NO: 521691 - protein, 12 aa, Homo sapiens
  CDR3 for alpha chain variable domain of TCR clone 260846 (TRAV2, TRAJ10)
CASTGGGNKLTF

SEQ ID NO: 521692 - protein, 14 aa, Homo sapiens
  CDR3 for beta chain variable domain of TCR clone 260846 (TRBV7-2, TRBJ2-2)
CVSRGQGAAGELFF

SEQ ID NO: 521693 - protein, 12 aa, Homo sapiens
  CDR3 for alpha chain variable domain of TCR clone 260847 (TRAV2, TRAJ24)
CAATDSWGKFQF

SEQ ID NO: 521694 - protein, 15 aa, Homo sapiens
  CDR3 for beta chain variable domain of TCR clone 260847 (TRBV10-3, TRBJ2-2)
YAIYTGGTGTGELFF

SEQ ID NO: 521695 - protein, 19 aa, Homo sapiens
  CDR3 for alpha chain variable domain of TCR clone 260848 (TRAV2, TRAJ20)
ILQVREADAAVYRDCKLSF

SEQ ID NO: 521696 - protein, 13 aa, Homo sapiens
  CDR3 for beta chain variable domain of TCR clone 260848 (TRBV11-2, TRBJ2-1)
CASSLDLVNEQFF

SEQ ID NO: 521697 - protein, 14 aa, Homo sapiens
  CDR3 for alpha chain variable domain of TCR clone 260849 (TRAV12-2, TRAJ6)
CASKWGGGSYIYTF

SEQ ID NO: 521698 - protein, 13 aa, Homo sapiens
  CDR3 for beta chain variable domain of TCR clone 260849 (TRBV2, TRBJ1-1)
CASSEGGNTEAFF

SEQ ID NO: 521699 - protein, 15 aa, Homo sapiens
  CDR3 for alpha chain variable domain of TCR clone 260850 (TRAV8-3, TRAJ45)
CASSYSGGGADGLTI

SEQ ID NO: 521700 - protein, 13 aa, Homo sapiens
  CDR3 for beta chain variable domain of TCR clone 260850 (TRBV12-4, TRBJ2-3)
CASSSPLGGTQYF

SEQ ID NO: 521701 - protein, 13 aa, Homo sapiens
  CDR3 for alpha chain variable domain of TCR clone 260851 (TRAV8-6, TRAJ54)
CAVSEERAQKLVF

SEQ ID NO: 521702 - protein, 15 aa, Homo sapiens
  CDR3 for beta chain variable domain of TCR clone 260851 (TRBV27, TRBJ2-5)
CASSLYPRGGETQYF

SEQ ID NO: 521703 - protein, 15 aa, Homo sapiens
  CDR3 for alpha chain variable domain of TCR clone 260852 (TRAV12-1, TRAJ42)
CVVLNYGGSQGNLIF

SEQ ID NO: 521704 - protein, 19 aa, Homo sapiens
  CDR3 for beta chain variable domain of TCR clone 260852 (TRBV27, TRBJ2-6)
CASSTLHWRGSSGANVLTF

SEQ ID NO: 521705 - protein, 13 aa, Homo sapiens
  CDR3 for alpha chain variable domain of TCR clone 260853 (TRAV26-1, TRAJ41)
CIVRINSGYALNF

SEQ ID NO: 521706 - protein, 13 aa, Homo sapiens
  CDR3 for beta chain variable domain of TCR clone 260853 (TRBV20-1, TRBJ1-5)
CSAPAAGGQTQHF

SEQ ID NO: 521707 - protein, 14 aa, Homo sapiens
  CDR3 for alpha chain variable domain of TCR clone 260854 (TRAV12-2, TRAJ9)
CAVNALEGGFKTIF

SEQ ID NO: 521708 - protein, 16 aa, Homo sapiens
  CDR3 for beta chain variable domain of TCR clone 260854 (TRBV4-2, TRBJ1-5)
CASSQGQGASNQPQHF

SEQ ID NO: 521709 - protein, 16 aa, Homo sapiens
  CDR3 for alpha chain variable domain of TCR clone 260855 (TRAV1-2, TRAJ10)
CAVRGVLTGGGNKLTF

SEQ ID NO: 521710 - protein, 15 aa, Homo sapiens
  CDR3 for beta chain variable domain of TCR clone 260855 (TRBV6-5, TRBJ2-1)
CASSYDAGAGNEQFF

SEQ ID NO: 521711 - protein, 12 aa, Homo sapiens
  CDR3 for alpha chain variable domain of TCR clone 260856 (TRAV21, TRAJ11)
CAATSGYSTLTF

SEQ ID NO: 521712 - protein, 14 aa, Homo sapiens
  CDR3 for beta chain variable domain of TCR clone 260856 (TRBV20-1, TRBJ2-7)
CSASELAGGGEQYF

SEQ ID NO: 521713 - protein, 12 aa, Homo sapiens
  CDR3 for alpha chain variable domain of TCR clone 260857 (TRAV12-2, TRAJ20)
CAVRPSDYKLSF

SEQ ID NO: 521714 - protein, 15 aa, Homo sapiens
  CDR3 for beta chain variable domain of TCR clone 260857 (TRBV11-2, TRBJ2-1)
CASSPAGQSLNEQFF

SEQ ID NO: 521715 - protein, 12 aa, Homo sapiens
  CDR3 for alpha chain variable domain of TCR clone 260858 (TRAV2, TRAJ9)
CAVGAGGFKAIF

SEQ ID NO: 521716 - protein, 11 aa, Homo sapiens
  CDR3 for beta chain variable domain of TCR clone 260858 (TRBV13, TRBJ2-2)
CASSPRTGEHT

SEQ ID NO: 521717 - protein, 21 aa, Homo sapiens
  CDR3 for alpha chain variable domain of TCR clone 260859 (TRAV12-1, TRAJ6)
CVVFQGEATYLHLEEKPALLF

SEQ ID NO: 521718 - protein, 12 aa, Homo sapiens
  CDR3 for beta chain variable domain of TCR clone 260859 (TRBV11-2, TRBJ2-2)
CASSLGGGELFF

SEQ ID NO: 521719 - protein, 17 aa, Homo sapiens
  CDR3 for alpha chain variable domain of TCR clone 260860 (TRAV13-1, TRAJ31)
CAPRDRLMFGDGTQLVV

SEQ ID NO: 521720 - protein, 12 aa, Homo sapiens
  CDR3 for beta chain variable domain of TCR clone 260860 (TRBV7-9, TRBJ2-7)
CARSLEGYEQYF

SEQ ID NO: 521721 - protein, 14 aa, Homo sapiens
  CDR3 for alpha chain variable domain of TCR clone 260861 (TRAV4, TRAJ30)
CLVGDFRRDDKIIF

SEQ ID NO: 521722 - protein, 17 aa, Homo sapiens
  CDR3 for beta chain variable domain of TCR clone 260861 (TRBV7-8, TRBJ2-6)
CASSAGTGGAGANVLTF

SEQ ID NO: 521723 - protein, 12 aa, Homo sapiens
  CDR3 for alpha chain variable domain of TCR clone 260862 (TRAV12-1, TRAJ23)
CVVNIPGGKLIF

SEQ ID NO: 521724 - protein, 15 aa, Homo sapiens
  CDR3 for beta chain variable domain of TCR clone 260862 (TRBV7-2, TRBJ2-7)
CGSSLVSSGSYVQYF

SEQ ID NO: 521725 - protein, 13 aa, Homo sapiens
  CDR3 for alpha chain variable domain of TCR clone 260863 (TRAV8-3, TRAJ28)
CAVGAVGSYQLTF

SEQ ID NO: 521726 - protein, 15 aa, Homo sapiens
  CDR3 for beta chain variable domain of TCR clone 260863 (TRBV7-9, TRBJ1-5)
CASSQRHQPNQPQHF

SEQ ID NO: 521727 - protein, 13 aa, Homo sapiens
  CDR3 for alpha chain variable domain of TCR clone 260864 (TRAV8-3, TRAJ28)
CAVGAVGSYQLTF

SEQ ID NO: 521728 - protein, 16 aa, Homo sapiens
  CDR3 for beta chain variable domain of TCR clone 260864 (TRBV10-3, TRBJ2-1)
CAISGVGDGGGGEQFF

SEQ ID NO: 521729 - protein, 14 aa, Homo sapiens
  CDR3 for alpha chain variable domain of TCR clone 260865 (TRAV27, TRAJ23)
CAGAFDNQGGKLIF

SEQ ID NO: 521730 - protein, 15 aa, Homo sapiens
  CDR3 for beta chain variable domain of TCR clone 260865 (TRBV7-3, TRBJ2-7)
CASSVTGQGKYEQYF

SEQ ID NO: 521731 - protein, 15 aa, Homo sapiens
  CDR3 for alpha chain variable domain of TCR clone 260866 (TRAV3, TRAJ22)
CAVRDRGGSTRQLTF

SEQ ID NO: 521732 - protein, 16 aa, Homo sapiens
  CDR3 for beta chain variable domain of TCR clone 260866 (TRBV4-2, TRBJ2-4)
CASSQELRRAKNIQYF

SEQ ID NO: 521733 - protein, 16 aa, Homo sapiens
  CDR3 for alpha chain variable domain of TCR clone 260867 (TRAV30, TRAJ24)
CGTVIVDADSWGKFQF

SEQ ID NO: 521734 - protein, 14 aa, Homo sapiens
  CDR3 for beta chain variable domain of TCR clone 260867 (TRBV12-5, TRBJ2-5)
CASGSRTRQETQYF

SEQ ID NO: 521735 - protein, 10 aa, Homo sapiens
  CDR3 for alpha chain variable domain of TCR clone 260868 (TRAV25, TRAJ20)
CAVNDYKLSF

SEQ ID NO: 521736 - protein, 18 aa, Homo sapiens
  CDR3 for beta chain variable domain of TCR clone 260868 (TRBV20-1, TRBJ2-6)
CSAETTPTHGSEANVLTF

SEQ ID NO: 521737 - protein, 14 aa, Homo sapiens
  CDR3 for alpha chain variable domain of TCR clone 260869 (TRAV12-2, TRAJ13)
CAVKKTGGYQKVTF

SEQ ID NO: 521738 - protein, 15 aa, Homo sapiens
  CDR3 for beta chain variable domain of TCR clone 260869 (TRBV27, TRBJ2-1)
CASSNGGGSANGQFF

SEQ ID NO: 521739 - protein, 13 aa, Homo sapiens
  CDR3 for alpha chain variable domain of TCR clone 260870 (TRAV8-3, TRAJ21)
CAVGAYNFNKFYF

SEQ ID NO: 521740 - protein, 15 aa, Homo sapiens
  CDR3 for beta chain variable domain of TCR clone 260870 (TRBV6-1, TRBJ2-3)
CASSERGGITDTQYF

SEQ ID NO: 521741 - protein, 14 aa, Homo sapiens
  CDR3 for alpha chain variable domain of TCR clone 260871 (TRAV21, TRAJ21)
CAVRPRDNFNKFYF

SEQ ID NO: 521742 - protein, 14 aa, Homo sapiens
  CDR3 for beta chain variable domain of TCR clone 260871 (TRBV7-9, TRBJ2-1)
CASSLASGSNELFF

SEQ ID NO: 521743 - protein, 12 aa, Homo sapiens
  CDR3 for alpha chain variable domain of TCR clone 260872 (TRAV2, TRAJ32)
CAVGGATNKLIF

SEQ ID NO: 521744 - protein, 15 aa, Homo sapiens
  CDR3 for beta chain variable domain of TCR clone 260872 (TRBV4-1, TRBJ2-5)
CASSQWDLYQETQYF

SEQ ID NO: 521745 - protein, 14 aa, Homo sapiens
  CDR3 for alpha chain variable domain of TCR clone 260873 (TRAV8-2, TRAJ4)
CVVSPSGGDNKLIF

SEQ ID NO: 521746 - protein, 15 aa, Homo sapiens
  CDR3 for beta chain variable domain of TCR clone 260873 (TRBV4-1, TRBJ1-4)
CASSDTGGTNENLFF

SEQ ID NO: 521747 - protein, 11 aa, Homo sapiens
  CDR3 for alpha chain variable domain of TCR clone 260874 (TRAV2, TRAJ33)
CAVDSNYQLIL

SEQ ID NO: 521748 - protein, 13 aa, Homo sapiens
  CDR3 for beta chain variable domain of TCR clone 260874 (TRBV10-3, TRBJ2-7)
CASKLAVNYEQYF

SEQ ID NO: 521749 - protein, 14 aa, Homo sapiens
  CDR3 for alpha chain variable domain of TCR clone 260875 (TRAV1-2, TRAJ16)
CAVNRFSDGQKLLF

SEQ ID NO: 521750 - protein, 13 aa, Homo sapiens
  CDR3 for beta chain variable domain of TCR clone 260875 (TRBV10-3, TRBJ2-7)
CASKLAVNYEQFF

SEQ ID NO: 521751 - protein, 15 aa, Homo sapiens
  CDR3 for alpha chain variable domain of TCR clone 260876 (TRAV13-1, TRAJ8)
CAASIPNTGFQKLVF

SEQ ID NO: 521752 - protein, 14 aa, Homo sapiens
  CDR3 for beta chain variable domain of TCR clone 260876 (TRBV12-4, TRBJ1-1)
CASSLGTGGTEAFF

SEQ ID NO: 521753 - protein, 14 aa, Homo sapiens
  CDR3 for alpha chain variable domain of TCR clone 260877 (TRAV35, TRAJ50)
FAGHRKTSYDKVIF

SEQ ID NO: 521754 - protein, 13 aa, Homo sapiens
  CDR3 for beta chain variable domain of TCR clone 260877 (TRBV14, TRBJ1-2)
CASSEDRRYGYTF

SEQ ID NO: 521755 - protein, 13 aa, Homo sapiens
  CDR3 for alpha chain variable domain of TCR clone 260878 (TRAV21, TRAJ57)
CAVTQGGSEKLGF

SEQ ID NO: 521756 - protein, 13 aa, Homo sapiens
  CDR3 for beta chain variable domain of TCR clone 260878 (TRBV25-1, TRBJ2-5)
CASSPPARGEEYF

SEQ ID NO: 521757 - protein, 13 aa, Homo sapiens
  CDR3 for alpha chain variable domain of TCR clone 260879 (TRAV21, TRAJ15)
CPVANQAGTALIF

SEQ ID NO: 521758 - protein, 15 aa, Homo sapiens
  CDR3 for beta chain variable domain of TCR clone 260879 (TRBV20-1, TRBJ2-7)
CSARDRVSGMDEQYF

SEQ ID NO: 521759 - protein, 13 aa, Homo sapiens
  CDR3 for alpha chain variable domain of TCR clone 260880 (TRAV35, TRAJ42)
CAGFPGSQGNLIF

SEQ ID NO: 521760 - protein, 12 aa, Homo sapiens
  CDR3 for beta chain variable domain of TCR clone 260880 (TRBV19, TRBJ2-1)
CASSMQDTEQFF

SEQ ID NO: 521761 - protein, 17 aa, Homo sapiens
  CDR3 for alpha chain variable domain of TCR clone 260881 (TRAV8-3, TRAJ34)
CAIPGKLIFGTGTRLQV

SEQ ID NO: 521762 - protein, 15 aa, Homo sapiens
  CDR3 for beta chain variable domain of TCR clone 260881 (TRBV5-7, TRBJ2-1)
CASSRRLAGDNEQFV

SEQ ID NO: 521763 - protein, 14 aa, Homo sapiens
  CDR3 for alpha chain variable domain of TCR clone 260882 (TRAV30, TRAJ33)
CGKVAPRSNYQLIW

SEQ ID NO: 521764 - protein, 16 aa, Homo sapiens
  CDR3 for beta chain variable domain of TCR clone 260882 (TRBV3-1, TRBJ2-5)
CASSPGQFNGFGTQYF

SEQ ID NO: 521765 - protein, 12 aa, Homo sapiens
  CDR3 for alpha chain variable domain of TCR clone 260883 (TRAV38-1, TRAJ36)
CAFETGANNLFF

SEQ ID NO: 521766 - protein, 14 aa, Homo sapiens
  CDR3 for beta chain variable domain of TCR clone 260883 (TRBV7-2, TRBJ2-7)
CASRSQGAAYEQYF

SEQ ID NO: 521767 - protein, 11 aa, Homo sapiens
  CDR3 for alpha chain variable domain of TCR clone 260884 (TRAV21, TRAJ11)
CAVNGYSTLTF

SEQ ID NO: 521768 - protein, 15 aa, Homo sapiens
  CDR3 for beta chain variable domain of TCR clone 260884 (TRBV7-2, TRBJ2-5)
CASSFLRGGEETQYF

SEQ ID NO: 521769 - protein, 15 aa, Homo sapiens
  CDR3 for alpha chain variable domain of TCR clone 260885 (TRAV8-3, TRAJ11)
CAVGLLNSGYSTLTF

SEQ ID NO: 521770 - protein, 17 aa, Homo sapiens
  CDR3 for beta chain variable domain of TCR clone 260885 (TRBV7-8, TRBJ1-2)
CASSLRPLQGHLYGYTF

SEQ ID NO: 521771 - protein, 15 aa, Homo sapiens
  CDR3 for alpha chain variable domain of TCR clone 260886 (TRAV23/DV6, TRAJ18)
CAARYRGSTLGRLYF

SEQ ID NO: 521772 - protein, 15 aa, Homo sapiens
  CDR3 for beta chain variable domain of TCR clone 260886 (TRBV20-1, TRBJ2-7)
CSARDRVSGMHEQYF

SEQ ID NO: 521773 - protein, 12 aa, Homo sapiens
  CDR3 for alpha chain variable domain of TCR clone 260887 (TRAV20, TRAJ39)
CAVGNAGNMLTF

SEQ ID NO: 521774 - protein, 10 aa, Homo sapiens
  CDR3 for beta chain variable domain of TCR clone 260887 (TRBV15, TRBJ1-2)
CATSRGPRTG

SEQ ID NO: 521775 - protein, 14 aa, Homo sapiens
  CDR3 for alpha chain variable domain of TCR clone 260888 (TRAV27, TRAJ22)
CAGVSVLGKRQLPF

SEQ ID NO: 521776 - protein, 17 aa, Homo sapiens
  CDR3 for beta chain variable domain of TCR clone 260888 (TRBV14, TRBJ2-1)
CASSQDRRVTSYNEQFF

SEQ ID NO: 521777 - protein, 14 aa, Homo sapiens
  CDR3 for alpha chain variable domain of TCR clone 260889 (TRAV8-3, TRAJ4)
GAVGASGGYNKLIF

SEQ ID NO: 521778 - protein, 13 aa, Homo sapiens
  CDR3 for beta chain variable domain of TCR clone 260889 (TRBV18, TRBJ2-5)
CASSLQGQETQYF

SEQ ID NO: 521779 - protein, 14 aa, Homo sapiens
  CDR3 for alpha chain variable domain of TCR clone 260890 (TRAV26-1, TRAJ49)
CIVRLTNTGNQFYF

SEQ ID NO: 521780 - protein, 14 aa, Homo sapiens
  CDR3 for beta chain variable domain of TCR clone 260890 (TRBV4-2, TRBJ2-1)
CASGLDRAYNEQFF

SEQ ID NO: 521781 - protein, 15 aa, Homo sapiens
  CDR3 for alpha chain variable domain of TCR clone 260891 (TRAV26-1, TRAJ29)
CVDRVEGSGNTPLVF

SEQ ID NO: 521782 - protein, 15 aa, Homo sapiens
  CDR3 for beta chain variable domain of TCR clone 260891 (TRBV7-9, TRBJ1-5)
CASSQGHQPNQPQHF

SEQ ID NO: 521783 - protein, 14 aa, Homo sapiens
  CDR3 for alpha chain variable domain of TCR clone 260892 (TRAV12-2, TRAJ9)
CAVNALEGGFKTIF

SEQ ID NO: 521784 - protein, 16 aa, Homo sapiens
  CDR3 for beta chain variable domain of TCR clone 260892 (TRBV19, TRBJ1-6)
CASSVAPEAGNSPLHF

SEQ ID NO: 521785 - protein, 11 aa, Homo sapiens
  CDR3 for alpha chain variable domain of TCR clone 260893 (TRAV3, TRAJ21)
CAVCNFNKFYF

SEQ ID NO: 521786 - protein, 13 aa, Homo sapiens
  CDR3 for beta chain variable domain of TCR clone 260893 (TRBV7-3, TRBJ1-1)
CASSQDWGAEAFF

SEQ ID NO: 521787 - protein, 14 aa, Homo sapiens
  CDR3 for alpha chain variable domain of TCR clone 260894 (TRAV12-3, TRAJ10)
SHLPLTGGGNNLTF

SEQ ID NO: 521788 - protein, 15 aa, Homo sapiens
  CDR3 for beta chain variable domain of TCR clone 260894 (TRBV11-3, TRBJ2-3)
CASLKDGREGDTQYF

SEQ ID NO: 521789 - protein, 14 aa, Homo sapiens
  CDR3 for alpha chain variable domain of TCR clone 260895 (TRAV16, TRAJ15)
CALSSPQAGTALIF

SEQ ID NO: 521790 - protein, 12 aa, Homo sapiens
  CDR3 for beta chain variable domain of TCR clone 260895 (TRBV18, TRBJ2-5)
CASSHSKETQYF

SEQ ID NO: 521791 - protein, 15 aa, Homo sapiens
  CDR3 for alpha chain variable domain of TCR clone 260896 (TRAV8-3, TRAJ23)
CAVGDRYNQGGKRIF

SEQ ID NO: 521792 - protein, 17 aa, Homo sapiens
  CDR3 for beta chain variable domain of TCR clone 260896 (TRBV4-1, TRBJ1-4)
CASSQEGPRGVEEKLFF

SEQ ID NO: 521793 - protein, 16 aa, Homo sapiens
  CDR3 for alpha chain variable domain of TCR clone 260897 (TRAV13-2, TRAJ28)
CAVKSYSGAGSYQLTF

SEQ ID NO: 521794 - protein, 16 aa, Homo sapiens
  CDR3 for beta chain variable domain of TCR clone 260897 (TRBV19, TRBJ2-1)
CASSKAGPSSYNEQFF

SEQ ID NO: 521795 - protein, 17 aa, Homo sapiens
  CDR3 for alpha chain variable domain of TCR clone 260898 (TRAV4, TRAJ13)
CLVGVQGSSGGYQKVTF

SEQ ID NO: 521796 - protein, 18 aa, Homo sapiens
  CDR3 for beta chain variable domain of TCR clone 260898 (TRBV13, TRBJ2-6)
CASSPMTSGGSGANVLTF

SEQ ID NO: 521797 - protein, 15 aa, Homo sapiens
  CDR3 for alpha chain variable domain of TCR clone 260899 (TRAV26-1, TRAJ29)
CIVRVEGSGNTPLVF

SEQ ID NO: 521798 - protein, 13 aa, Homo sapiens
  CDR3 for beta chain variable domain of TCR clone 260899 (TRBV7-2, TRBJ2-4)
CASSREHANIQHF

SEQ ID NO: 521799 - protein, 14 aa, Homo sapiens
  CDR3 for alpha chain variable domain of TCR clone 260900 (TRAV8-1, TRAJ23)
CAVGTYHQGGKLIF

SEQ ID NO: 521800 - protein, 16 aa, Homo sapiens
  CDR3 for beta chain variable domain of TCR clone 260900 (TRBV18, TRBJ1-5)
CASSPSTGNSNQPQHF

SEQ ID NO: 521801 - protein, 16 aa, Homo sapiens
  CDR3 for alpha chain variable domain of TCR clone 260901 (TRAV30, TRAJ24)
CGTEIVDADSWGKFQF

SEQ ID NO: 521802 - protein, 13 aa, Homo sapiens
  CDR3 for beta chain variable domain of TCR clone 260901 (TRBV7-3, TRBJ2-5)
CASSFRGGETQDF

SEQ ID NO: 521803 - protein, 13 aa, Homo sapiens
  CDR3 for alpha chain variable domain of TCR clone 260902 (TRAV3, TRAJ27)
CAVGPLGAGKSTV

SEQ ID NO: 521804 - protein, 13 aa, Homo sapiens
  CDR3 for beta chain variable domain of TCR clone 260902 (TRBV7-9, TRBJ2-3)
CASSPGSTDTQYF

SEQ ID NO: 521805 - protein, 14 aa, Homo sapiens
  CDR3 for alpha chain variable domain of TCR clone 260903 (TRAV17, TRAJ15)
CATDRGQAGTALIL

SEQ ID NO: 521806 - protein, 17 aa, Homo sapiens
  CDR3 for beta chain variable domain of TCR clone 260903 (TRBV29-1, TRBJ2-1)
CSVVGLAGAYSYNEQFF

SEQ ID NO: 521807 - protein, 15 aa, Homo sapiens
  CDR3 for alpha chain variable domain of TCR clone 260904 (TRAV21, TRAJ24)
CAARSSTDSWGKLQF

SEQ ID NO: 521808 - protein, 15 aa, Homo sapiens
  CDR3 for beta chain variable domain of TCR clone 260904 (TRBV19, TRBJ1-1)
CASTSGQIQNTEACF

SEQ ID NO: 521809 - protein, 14 aa, Homo sapiens
  CDR3 for alpha chain variable domain of TCR clone 260905 (TRAV1-2, TRAJ16)
CAVNRFSDGQKLRF

SEQ ID NO: 521810 - protein, 13 aa, Homo sapiens
  CDR3 for beta chain variable domain of TCR clone 260905 (TRBV4-2, TRBJ1-1)
CASSQAGNTEAFF

SEQ ID NO: 521811 - protein, 13 aa, Homo sapiens
  CDR3 for alpha chain variable domain of TCR clone 260906 (TRAV12-3, TRAJ9)
CAMRNTGGFKTIF

SEQ ID NO: 521812 - protein, 13 aa, Homo sapiens
  CDR3 for beta chain variable domain of TCR clone 260906 (TRBV11-2, TRBJ1-6)
CASSLAGVSPLHF

SEQ ID NO: 521813 - protein, 14 aa, Homo sapiens
  CDR3 for alpha chain variable domain of TCR clone 260907 (TRAV12-1, TRAJ13)
CVVIDSGGYQKVTF

SEQ ID NO: 521814 - protein, 13 aa, Homo sapiens
  CDR3 for beta chain variable domain of TCR clone 260907 (TRBV20-1, TRBJ1-1)
CSAPPGGLTEAFF

SEQ ID NO: 521815 - protein, 15 aa, Homo sapiens
  CDR3 for alpha chain variable domain of TCR clone 260908 (TRAV8-6, TRAJ26)
CAVSDQSPGGQNFVF

SEQ ID NO: 521816 - protein, 13 aa, Homo sapiens
  CDR3 for beta chain variable domain of TCR clone 260908 (TRBV27, TRBJ2-7)
CASSVRHRYEQYF

SEQ ID NO: 521817 - protein, 15 aa, Homo sapiens
  CDR3 for alpha chain variable domain of TCR clone 260909 (TRAV21, TRAJ53)
CATLNSGGSNYKLTF

SEQ ID NO: 521818 - protein, 13 aa, Homo sapiens
  CDR3 for beta chain variable domain of TCR clone 260909 (TRBV7-3, TRBJ2-1)
CASSLDSYNEQFF

SEQ ID NO: 521819 - protein, 14 aa, Homo sapiens
  CDR3 for alpha chain variable domain of TCR clone 260910 (TRAV35, TRAJ38)
CAGSNAGNNRKLIW

SEQ ID NO: 521820 - protein, 12 aa, Homo sapiens
  CDR3 for beta chain variable domain of TCR clone 260910 (TRBV19, TRBJ2-7)
CASTERGYEQYF

SEQ ID NO: 521821 - protein, 14 aa, Homo sapiens
  CDR3 for alpha chain variable domain of TCR clone 260911 (TRAV12-2, TRAJ40)
CAVKIPSGTYKYIF

SEQ ID NO: 521822 - protein, 17 aa, Homo sapiens
  CDR3 for beta chain variable domain of TCR clone 260911 (TRBV28, TRBJ2-5)
CASSRRGGLAGAETQYF

SEQ ID NO: 521823 - protein, 12 aa, Homo sapiens
  CDR3 for alpha chain variable domain of TCR clone 260912 (TRAV13-1, TRAJ53)
CAAGGSNYKLTF

SEQ ID NO: 521824 - protein, 13 aa, Homo sapiens
  CDR3 for beta chain variable domain of TCR clone 260912 (TRBV11-2, TRBJ2-5)
CASSSTGEETQYF

SEQ ID NO: 521825 - protein, 15 aa, Homo sapiens
  CDR3 for alpha chain variable domain of TCR clone 260913 (TRAV3, TRAJ22)
CAVRDRGGSARQLTF

SEQ ID NO: 521826 - protein, 15 aa, Homo sapiens
  CDR3 for beta chain variable domain of TCR clone 260913 (TRBV19, TRBJ2-5)
CASSRLAGVEETQYF

SEQ ID NO: 521827 - protein, 17 aa, Homo sapiens
  CDR3 for alpha chain variable domain of TCR clone 260914 (TRAV3, TRAJ6)
CAVRDGPRAGGIYIPTF

SEQ ID NO: 521828 - protein, 18 aa, Homo sapiens
  CDR3 for beta chain variable domain of TCR clone 260914 (TRBV7-9, TRBJ2-7)
CASSLTTSGSRTWYEQYF

SEQ ID NO: 521829 - protein, 14 aa, Homo sapiens
  CDR3 for alpha chain variable domain of TCR clone 260915 (TRAV1-2, TRAJ16)
CAVNRFSDGQKLLF

SEQ ID NO: 521830 - protein, 16 aa, Homo sapiens
  CDR3 for beta chain variable domain of TCR clone 260915 (TRBV12-5, TRBJ2-5)
YASGPRTSGNQETQYF

SEQ ID NO: 521831 - protein, 13 aa, Homo sapiens
  CDR3 for alpha chain variable domain of TCR clone 260916 (TRAV21, TRAJ57)
CAVIEGGSEKLVF

SEQ ID NO: 521832 - protein, 16 aa, Homo sapiens
  CDR3 for beta chain variable domain of TCR clone 260916 (TRBV12-5, TRBJ2-5)
CASGPRTSGNQETQYF

SEQ ID NO: 521833 - protein, 13 aa, Homo sapiens
  CDR3 for alpha chain variable domain of TCR clone 260917 (TRAV16, TRAJ39)
CALKDNAGNMLTF

SEQ ID NO: 521834 - protein, 15 aa, Homo sapiens
  CDR3 for beta chain variable domain of TCR clone 260917 (TRBV20-1, TRBJ2-7)
CSARDRVSEMDEQYF

SEQ ID NO: 521835 - protein, 12 aa, Homo sapiens
  CDR3 for alpha chain variable domain of TCR clone 260918 (TRAV13-1, TRAJ49)
CAAPNSGNQFYF

SEQ ID NO: 521836 - protein, 17 aa, Homo sapiens
  CDR3 for beta chain variable domain of TCR clone 260918 (TRBV25-1, TRBJ2-7)
CASSDARVVFSSYEQYF

SEQ ID NO: 521837 - protein, 12 aa, Homo sapiens
  CDR3 for alpha chain variable domain of TCR clone 260919 (TRAV12-2, TRAJ9)
CAVYNGGFKTIF

SEQ ID NO: 521838 - protein, 16 aa, Homo sapiens
  CDR3 for beta chain variable domain of TCR clone 260919 (TRBV19, TRBJ2-3)
CASGTGPNDGTDTQYF

SEQ ID NO: 521839 - protein, 13 aa, Homo sapiens
  CDR3 for alpha chain variable domain of TCR clone 260920 (TRAV12-2, TRAJ20)
CAVYPSNDYKLSF

SEQ ID NO: 521840 - protein, 17 aa, Homo sapiens
  CDR3 for beta chain variable domain of TCR clone 260920 (TRBV7-3, TRBJ2-3)
CASSLMKRMRGADTQYF

SEQ ID NO: 521841 - protein, 14 aa, Homo sapiens
  CDR3 for alpha chain variable domain of TCR clone 260921 (TRAV13-1, TRAJ26)
CAASSAHYGQNFVF

SEQ ID NO: 521842 - protein, 16 aa, Homo sapiens
  CDR3 for beta chain variable domain of TCR clone 260921 (TRBV25-1, TRBJ2-5)
CQSRRGGRGGQETQYF

SEQ ID NO: 521843 - protein, 13 aa, Homo sapiens
  CDR3 for alpha chain variable domain of TCR clone 260922 (TRAV12-3, TRAJ15)
CAMSDQAGTALIF

SEQ ID NO: 521844 - protein, 13 aa, Homo sapiens
  CDR3 for beta chain variable domain of TCR clone 260922 (TRBV20-1, TRBJ2-1)
GSAQDGGPNEQFF

SEQ ID NO: 521845 - protein, 14 aa, Homo sapiens
  CDR3 for alpha chain variable domain of TCR clone 260923 (TRAV26-1, TRAJ45)
CIEVTGGGADGLTF

SEQ ID NO: 521846 - protein, 15 aa, Homo sapiens
  CDR3 for beta chain variable domain of TCR clone 260923 (TRBV28, TRBJ2-7)
CASSPGGRGFYEQYF

SEQ ID NO: 521847 - protein, 16 aa, Homo sapiens
  CDR3 for alpha chain variable domain of TCR clone 260924 (TRAV12-3, TRAJ53)
CAMSPGSGGSHSKLTF

SEQ ID NO: 521848 - protein, 11 aa, Homo sapiens
  CDR3 for beta chain variable domain of TCR clone 260924 (TRBV29-1, TRBJ2-5)
CSEDRTGTQYF

SEQ ID NO: 521849 - protein, 14 aa, Homo sapiens
  CDR3 for alpha chain variable domain of TCR clone 260925 (TRAV12-2, TRAJ13)
CAVKKTGGYQKVTF

SEQ ID NO: 521850 - protein, 16 aa, Homo sapiens
  CDR3 for beta chain variable domain of TCR clone 260925 (TRBV2, TRBJ2-1)
CASRSPAGGKYNAQFF

SEQ ID NO: 521851 - protein, 14 aa, Homo sapiens
  CDR3 for alpha chain variable domain of TCR clone 260926 (TRAV12-1, TRAJ11)
CVVRPNSGYSTLTF

SEQ ID NO: 521852 - protein, 17 aa, Homo sapiens
  CDR3 for beta chain variable domain of TCR clone 260926 (TRBV24-1, TRBJ2-1)
CATSDVSTSGTYNEQFF

SEQ ID NO: 521853 - protein, 14 aa, Homo sapiens
  CDR3 for alpha chain variable domain of TCR clone 260927 (TRAV12-2, TRAJ5)
CAVNRSTGRRALTF

SEQ ID NO: 521854 - protein, 15 aa, Homo sapiens
  CDR3 for beta chain variable domain of TCR clone 260927 (TRBV2, TRBJ2-7)
CASSEGLARSYEQYF

SEQ ID NO: 521855 - protein, 13 aa, Homo sapiens
  CDR3 for alpha chain variable domain of TCR clone 260928 (TRAV13-2, TRAJ20)
CAEKSWNDYKLSF

SEQ ID NO: 521856 - protein, 15 aa, Homo sapiens
  CDR3 for beta chain variable domain of TCR clone 260928 (TRBV28, TRBJ2-5)
CASSSGRTIQETQYF

SEQ ID NO: 521857 - protein, 13 aa, Homo sapiens
  CDR3 for alpha chain variable domain of TCR clone 260929 (TRAV12-2, TRAJ24)
CAVSTDSWGNCSL

SEQ ID NO: 521858 - protein, 14 aa, Homo sapiens
  CDR3 for beta chain variable domain of TCR clone 260929 (TRBV25-1, TRBJ1-1)
CASTHLGGNTEAFF

SEQ ID NO: 521859 - protein, 11 aa, Homo sapiens
  CDR3 for alpha chain variable domain of TCR clone 260930 (TRAV21, TRAJ34)
CAVTNTDKLIF

SEQ ID NO: 521860 - protein, 17 aa, Homo sapiens
  CDR3 for beta chain variable domain of TCR clone 260930 (TRBV7-9, TRBJ2-3)
CASSPTVAGDLTDTQYF

SEQ ID NO: 521861 - protein, 15 aa, Homo sapiens
  CDR3 for alpha chain variable domain of TCR clone 260931 (TRAV27, TRAJ33)
CAGADIMDSNYQLIW

SEQ ID NO: 521862 - protein, 13 aa, Homo sapiens
  CDR3 for beta chain variable domain of TCR clone 260931 (TRBV28, TRBJ1-2)
CARSLQGRGGYSF

SEQ ID NO: 521863 - protein, 16 aa, Homo sapiens
  CDR3 for alpha chain variable domain of TCR clone 260932 (TRAV13-2, TRAJ32)
CAENMNYGGATDKLIF

SEQ ID NO: 521864 - protein, 14 aa, Homo sapiens
  CDR3 for beta chain variable domain of TCR clone 260932 (TRBV15, TRBJ2-5)
CATSSTGYQETQYF

SEQ ID NO: 521865 - protein, 13 aa, Homo sapiens
  CDR3 for alpha chain variable domain of TCR clone 260933 (TRAV38-1, TRAJ42)
CAQWGGSQGNLIF

SEQ ID NO: 521866 - protein, 14 aa, Homo sapiens
  CDR3 for beta chain variable domain of TCR clone 260933 (TRBV19, TRBJ2-1)
CASPTFVLSGEQFF

SEQ ID NO: 521867 - protein, 17 aa, Homo sapiens
  CDR3 for alpha chain variable domain of TCR clone 260934 (TRAV13-2, TRAJ42)
CAEKGKNYGGSQGNLIF

SEQ ID NO: 521868 - protein, 16 aa, Homo sapiens
  CDR3 for beta chain variable domain of TCR clone 260934 (TRBV7-9, TRBJ2-1)
CASSLGTGWYYNEQFF

SEQ ID NO: 521869 - protein, 22 aa, Homo sapiens
  CDR3 for alpha chain variable domain of TCR clone 260935 (TRAV8-3, TRAJ8)
CAVGPNEHRLSETCIWNWHPTS

SEQ ID NO: 521870 - protein, 14 aa, Homo sapiens
  CDR3 for beta chain variable domain of TCR clone 260935 (TRBV5-4, TRBJ2-2)
CASSLEANTGELFF

SEQ ID NO: 521871 - protein, 14 aa, Homo sapiens
  CDR3 for alpha chain variable domain of TCR clone 260936 (TRAV1-2, TRAJ8)
CAVREDTGFQKLVF

SEQ ID NO: 521872 - protein, 14 aa, Homo sapiens
  CDR3 for beta chain variable domain of TCR clone 260936 (TRBV2, TRBJ2-7)
CASSVLGAAYEQYF

SEQ ID NO: 521873 - protein, 12 aa, Homo sapiens
  CDR3 for alpha chain variable domain of TCR clone 260937 (TRAV12-3, TRAJ5)
CAMDTGRRALTF

SEQ ID NO: 521874 - protein, 19 aa, Homo sapiens
  CDR3 for beta chain variable domain of TCR clone 260937 (TRBV25-1, TRBJ2-2)
CAILVYRVDRGRKTGELFF

SEQ ID NO: 521875 - protein, 12 aa, Homo sapiens
  CDR3 for alpha chain variable domain of TCR clone 260938 (TRAV16, TRAJ12)
CALEDSSYKLIF

SEQ ID NO: 521876 - protein, 14 aa, Homo sapiens
  CDR3 for beta chain variable domain of TCR clone 260938 (TRBV18, TRBJ2-5)
CASSPGVSQETQYF

SEQ ID NO: 521877 - protein, 15 aa, Homo sapiens
  CDR3 for alpha chain variable domain of TCR clone 260939 (TRAV21, TRAJ40)
CAVRPQTSGTYKYIS

SEQ ID NO: 521878 - protein, 13 aa, Homo sapiens
  CDR3 for beta chain variable domain of TCR clone 260939 (TRBV7-2, TRBJ2-2)
CASGSVRARELFF

SEQ ID NO: 521879 - protein, 16 aa, Homo sapiens
  CDR3 for alpha chain variable domain of TCR clone 260940 (TRAV27, TRAJ13)
CAGAKSDSGGYQKVTF

SEQ ID NO: 521880 - protein, 12 aa, Homo sapiens
  CDR3 for beta chain variable domain of TCR clone 260940 (TRBV7-9, TRBJ1-4)
CASSTDREKLFF

SEQ ID NO: 521881 - protein, 14 aa, Homo sapiens
  CDR3 for alpha chain variable domain of TCR clone 260941 (TRAV26-1, TRAJ26)
CVVRATFLGQNFVF

SEQ ID NO: 521882 - protein, 16 aa, Homo sapiens
  CDR3 for beta chain variable domain of TCR clone 260941 (TRBV12-4, TRBJ2-7)
CASRSTGTGRSYEQYF

SEQ ID NO: 521883 - protein, 16 aa, Homo sapiens
  CDR3 for alpha chain variable domain of TCR clone 260942 (TRAV3, TRAJ3)
CAVRDRAKSSASKIIF

SEQ ID NO: 521884 - protein, 13 aa, Homo sapiens
  CDR3 for beta chain variable domain of TCR clone 260942 (TRBV4-1, TRBJ2-2)
CASSQENTGELFF

SEQ ID NO: 521885 - protein, 18 aa, Homo sapiens
  CDR3 for alpha chain variable domain of TCR clone 260943 (TRAV21, TRAJ52)
CAVRPSPAGGTIYVKLTF

SEQ ID NO: 521886 - protein, 12 aa, Homo sapiens
  CDR3 for beta chain variable domain of TCR clone 260943 (TRBV11-2, TRBJ2-2)
CASSLGGGELFF

SEQ ID NO: 521887 - protein, 14 aa, Homo sapiens
  CDR3 for alpha chain variable domain of TCR clone 260944 (TRAV3, TRAJ9)
CAVRINTGGFKTIF

SEQ ID NO: 521888 - protein, 15 aa, Homo sapiens
  CDR3 for beta chain variable domain of TCR clone 260944 (TRBV10-2, TRBJ2-6)
CASSEQGTGANVLTF

SEQ ID NO: 521889 - protein, 13 aa, Homo sapiens
  CDR3 for alpha chain variable domain of TCR clone 260945 (TRAV13-1, TRAJ39)
CSKYSNAGNMLTF

SEQ ID NO: 521890 - protein, 16 aa, Homo sapiens
  CDR3 for beta chain variable domain of TCR clone 260945 (TRBV20-1, TRBJ1-4)
CSAPGQGLLTNEKLFV

SEQ ID NO: 521891 - protein, 11 aa, Homo sapiens
  CDR3 for alpha chain variable domain of TCR clone 260946 (TRAV2, TRAJ13)
CASGGYQKVTF

SEQ ID NO: 521892 - protein, 15 aa, Homo sapiens
  CDR3 for beta chain variable domain of TCR clone 260946 (TRBV14, TRBJ2-3)
CASSQEMLAGATQYF

SEQ ID NO: 521893 - protein, 14 aa, Homo sapiens
  CDR3 for alpha chain variable domain of TCR clone 260947 (TRAV1-2, TRAJ8)
CAVREDTGFQKLVF

SEQ ID NO: 521894 - protein, 16 aa, Homo sapiens
  CDR3 for beta chain variable domain of TCR clone 260947 (TRBV7-6, TRBJ2-3)
CASSLWREMGPDTQYF

SEQ ID NO: 521895 - protein, 12 aa, Homo sapiens
  CDR3 for alpha chain variable domain of TCR clone 260948 (TRAV27, TRAJ42)
CAGGGSPGNLIF

SEQ ID NO: 521896 - protein, 20 aa, Homo sapiens
  CDR3 for beta chain variable domain of TCR clone 260948 (TRBV7-8, TRBJ2-2)
CASSHLFPGPTIHITGELFF

SEQ ID NO: 521897 - protein, 19 aa, Homo sapiens
  CDR3 for alpha chain variable domain of TCR clone 260949 (TRAV8-1, TRAJ18)
CAVNARRADRGSTLGRLYF

SEQ ID NO: 521898 - protein, 11 aa, Homo sapiens
  CDR3 for beta chain variable domain of TCR clone 260949 (TRBV20-1, TRBJ2-5)
CSADRAETQYF

SEQ ID NO: 521899 - protein, 13 aa, Homo sapiens
  CDR3 for alpha chain variable domain of TCR clone 260950 (TRAV8-4, TRAJ27)
CAVSPRNAGKSTF

SEQ ID NO: 521900 - protein, 17 aa, Homo sapiens
  CDR3 for beta chain variable domain of TCR clone 260950 (TRBV19, TRBJ1-1)
CASSIAGRGLMNTEAFF

SEQ ID NO: 521901 - protein, 11 aa, Homo sapiens
  CDR3 for alpha chain variable domain of TCR clone 260951 (TRAV1-2, TRAJ31)
CAVNNNARLMF

SEQ ID NO: 521902 - protein, 15 aa, Homo sapiens
  CDR3 for beta chain variable domain of TCR clone 260951 (TRBV6-3, TRBJ2-2)
CASSFLATLTGELFF

SEQ ID NO: 521903 - protein, 12 aa, Homo sapiens
  CDR3 for alpha chain variable domain of TCR clone 260952 (TRAV27, TRAJ34)
CAGAKNTDTLIF

SEQ ID NO: 521904 - protein, 13 aa, Homo sapiens
  CDR3 for beta chain variable domain of TCR clone 260952 (TRBV4-1, TRBJ2-1)
CASSQEVQYEQFF

SEQ ID NO: 521905 - protein, 12 aa, Homo sapiens
  CDR3 for alpha chain variable domain of TCR clone 260953 (TRAV13-2, TRAJ23)
CAERHRGGKLIF

SEQ ID NO: 521906 - protein, 13 aa, Homo sapiens
  CDR3 for beta chain variable domain of TCR clone 260953 (TRBV20-1, TRBJ2-2)
CSALIGGAGELFF

SEQ ID NO: 521907 - protein, 12 aa, Homo sapiens
  CDR3 for alpha chain variable domain of TCR clone 260954 (TRAV13-2, TRAJ23)
CAERHWGGKLIF

SEQ ID NO: 521908 - protein, 16 aa, Homo sapiens
  CDR3 for beta chain variable domain of TCR clone 260954 (TRBV20-1, TRBJ1-4)
CSAPGQGLLTNEKLFF

SEQ ID NO: 521909 - protein, 14 aa, Homo sapiens
  CDR3 for alpha chain variable domain of TCR clone 260955 (TRAV12-3, TRAJ12)
CAMSRMDSSYKLIF

SEQ ID NO: 521910 - protein, 13 aa, Homo sapiens
  CDR3 for beta chain variable domain of TCR clone 260955 (TRBV7-9, TRBJ1-2)
CASSLKQNYGYTF

SEQ ID NO: 521911 - protein, 14 aa, Homo sapiens
  CDR3 for alpha chain variable domain of TCR clone 260956 (TRAV3, TRAJ17)
CAVRDAAAGNKLNF

SEQ ID NO: 521912 - protein, 15 aa, Homo sapiens
  CDR3 for beta chain variable domain of TCR clone 260956 (TRBV9, TRBJ1-6)
CASSVAGTGDSPLHF

SEQ ID NO: 521913 - protein, 21 aa, Homo sapiens
  CDR3 for alpha chain variable domain of TCR clone 260957 (TRAV35, TRAJ52)
CWAGYADGPNAGGTSYGKLTF

SEQ ID NO: 521914 - protein, 13 aa, Homo sapiens
  CDR3 for beta chain variable domain of TCR clone 260957 (TRBV19, TRBJ1-2)
CASSVPGQDGYTF

SEQ ID NO: 521915 - protein, 13 aa, Homo sapiens
  CDR3 for alpha chain variable domain of TCR clone 260958 (TRAV21, TRAJ27)
CAARPGNAGKSTF

SEQ ID NO: 521916 - protein, 14 aa, Homo sapiens
  CDR3 for beta chain variable domain of TCR clone 260958 (TRBV25-1, TRBJ1-1)
CASNHLGGNTEAFF

SEQ ID NO: 521917 - protein, 12 aa, Homo sapiens
  CDR3 for alpha chain variable domain of TCR clone 260959 (TRAV20, TRAJ36)
CAVLTGANNLFF

SEQ ID NO: 521918 - protein, 12 aa, Homo sapiens
  CDR3 for beta chain variable domain of TCR clone 260959 (TRBV7-9, TRBJ2-7)
CASSLEGYEQYF

SEQ ID NO: 521919 - protein, 12 aa, Homo sapiens
  CDR3 for alpha chain variable domain of TCR clone 260960 (TRAV13-2, TRAJ23)
CAERHRGGKIIF

SEQ ID NO: 521920 - protein, 14 aa, Homo sapiens
  CDR3 for beta chain variable domain of TCR clone 260960 (TRBV4-1, TRBJ2-2)
CASSQAVNTGELFF

SEQ ID NO: 521921 - protein, 18 aa, Homo sapiens
  CDR3 for alpha chain variable domain of TCR clone 260961 (TRAV26-1, TRAJ23)
CIVRVGLEVGNQGGKIIF

SEQ ID NO: 521922 - protein, 14 aa, Homo sapiens
  CDR3 for beta chain variable domain of TCR clone 260961 (TRBV7-9, TRBJ2-4)
CASSLAMGGNIQYF

SEQ ID NO: 521923 - protein, 14 aa, Homo sapiens
  CDR3 for alpha chain variable domain of TCR clone 260962 (TRAV1-2, TRAJ16)
CAVNRFSDGQKLLF

SEQ ID NO: 521924 - protein, 17 aa, Homo sapiens
  CDR3 for beta chain variable domain of TCR clone 260962 (TRBV20-1, TRBJ2-2)
CSASGSGRGGLTGELFF

SEQ ID NO: 521925 - protein, 13 aa, Homo sapiens
  CDR3 for alpha chain variable domain of TCR clone 260963 (TRAV29/DV5, TRAJ47)
CAASAEYGNKLVF

SEQ ID NO: 521926 - protein, 12 aa, Homo sapiens
  CDR3 for beta chain variable domain of TCR clone 260963 (TRBV28, TRBJ2-1)
CASSVQINEQFF

SEQ ID NO: 521927 - protein, 13 aa, Homo sapiens
  CDR3 for alpha chain variable domain of TCR clone 260964 (TRAV1-2, TRAJ13)
CAVNSGGYQKVTF

SEQ ID NO: 521928 - protein, 14 aa, Homo sapiens
  CDR3 for beta chain variable domain of TCR clone 260964 (TRBV4-1, TRBJ1-5)
CASSPKGDKQPQHF

SEQ ID NO: 521929 - protein, 13 aa, Homo sapiens
  CDR3 for alpha chain variable domain of TCR clone 260965 (TRAV26-1, TRAJ38)
IADNAGNNRKLIW

SEQ ID NO: 521930 - protein, 15 aa, Homo sapiens
  CDR3 for beta chain variable domain of TCR clone 260965 (TRBV7-2, TRBJ2-1)
CASSLVAGRYNEQFF

SEQ ID NO: 521931 - protein, 13 aa, Homo sapiens
  CDR3 for alpha chain variable domain of TCR clone 260966 (TRAV21, TRAJ20)
CAVGLRVDYKLIF

SEQ ID NO: 521932 - protein, 13 aa, Homo sapiens
  CDR3 for beta chain variable domain of TCR clone 260966 (TRBV6-3, TRBJ2-5)
CASRGPAEETQYF

SEQ ID NO: 521933 - protein, 12 aa, Homo sapiens
  CDR3 for alpha chain variable domain of TCR clone 260967 (TRAV12-3, TRAJ17)
CAMTLTGNKLTF

SEQ ID NO: 521934 - protein, 15 aa, Homo sapiens
  CDR3 for beta chain variable domain of TCR clone 260967 (TRBV20-1, TRBJ2-7)
CSARDQVSGIDEQYF

SEQ ID NO: 521935 - protein, 12 aa, Homo sapiens
  CDR3 for alpha chain variable domain of TCR clone 260968 (TRAV12-3, TRAJ40)
CAMSSGTYKYIF

SEQ ID NO: 521936 - protein, 18 aa, Homo sapiens
  CDR3 for beta chain variable domain of TCR clone 260968 (TRBV11-2, TRBJ2-3)
CASSLGGASRGAPNTQYF

SEQ ID NO: 521937 - protein, 11 aa, Homo sapiens
  CDR3 for alpha chain variable domain of TCR clone 260969 (TRAV20, TRAJ34)
CRAKGTDKLIF

SEQ ID NO: 521938 - protein, 12 aa, Homo sapiens
  CDR3 for beta chain variable domain of TCR clone 260969 (TRBV2, TRBJ2-1)
CAYGPPGNEQFF

SEQ ID NO: 521939 - protein, 11 aa, Homo sapiens
  CDR3 for alpha chain variable domain of TCR clone 260970 (TRAV1-2, TRAJ31)
CAVKNNARLMF

SEQ ID NO: 521940 - protein, 13 aa, Homo sapiens
  CDR3 for beta chain variable domain of TCR clone 260970 (TRBV7-2, TRBJ2-4)
CASSREHANIQYF

SEQ ID NO: 521941 - protein, 17 aa, Homo sapiens
  CDR3 for alpha chain variable domain of TCR clone 260971 (TRAV14/DV4, TRAJ28)
CAMREGYSGAGSYQLTF

SEQ ID NO: 521942 - protein, 12 aa, Homo sapiens
  CDR3 for beta chain variable domain of TCR clone 260971 (TRBV7-8, TRBJ2-7)
CASSLGDREQYF

SEQ ID NO: 521943 - protein, 22 aa, Homo sapiens
  CDR3 for alpha chain variable domain of TCR clone 260972 (TRAV8-6, TRAJ21)
HLSKPSVHISDTAEYFWHKFYF

SEQ ID NO: 521944 - protein, 15 aa, Homo sapiens
  CDR3 for beta chain variable domain of TCR clone 260972 (TRBV12-4, TRBJ2-7)
CASSQTGAISYEQYF

SEQ ID NO: 521945 - protein, 14 aa, Homo sapiens
  CDR3 for alpha chain variable domain of TCR clone 260973 (TRAV8-1, TRAJ5)
CAVRTDTDRRALTF

SEQ ID NO: 521946 - protein, 12 aa, Homo sapiens
  CDR3 for beta chain variable domain of TCR clone 260973 (TRBV12-5, TRBJ2-3)
CASQASTDTQYF

SEQ ID NO: 521947 - protein, 18 aa, Homo sapiens
  CDR3 for alpha chain variable domain of TCR clone 260974 (TRAV13-1, TRAJ52)
CAASKRSAGGTSYGKLTF

SEQ ID NO: 521948 - protein, 15 aa, Homo sapiens
  CDR3 for beta chain variable domain of TCR clone 260974 (TRBV5-1, TRBJ2-7)
CASSLMTSGSNEQYF

SEQ ID NO: 521949 - protein, 12 aa, Homo sapiens
  CDR3 for alpha chain variable domain of TCR clone 260975 (TRAV12-3, TRAJ17)
CAMTLTGNKLTF

SEQ ID NO: 521950 - protein, 16 aa, Homo sapiens
  CDR3 for beta chain variable domain of TCR clone 260975 (TRBV7-2, TRBJ2-3)
CDSSLAGAGSGDTQYF

SEQ ID NO: 521951 - protein, 16 aa, Homo sapiens
  CDR3 for alpha chain variable domain of TCR clone 260976 (TRAV16, TRAJ4)
CALSRMFSGGYNKLIF

SEQ ID NO: 521952 - protein, 13 aa, Homo sapiens
  CDR3 for beta chain variable domain of TCR clone 260976 (TRBV12-4, TRBJ1-5)
CASSPRQYQPQHF

SEQ ID NO: 521953 - protein, 17 aa, Homo sapiens
  CDR3 for alpha chain variable domain of TCR clone 260977 (TRAV3, TRAJ6)
CAVRDGPRAGGSYIPTF

SEQ ID NO: 521954 - protein, 15 aa, Homo sapiens
  CDR3 for beta chain variable domain of TCR clone 260977 (TRBV7-2, TRBJ2-7)
CASSSGLAGRREQYF

SEQ ID NO: 521955 - protein, 19 aa, Homo sapiens
  CDR3 for alpha chain variable domain of TCR clone 260978 (TRAV8-4, TRAJ3)
CAVTGENLVQQCFQDNLWI

SEQ ID NO: 521956 - protein, 16 aa, Homo sapiens
  CDR3 for beta chain variable domain of TCR clone 260978 (TRBV5-7, TRBJ2-7)
PAANEGGGRGSYEQYF

SEQ ID NO: 521957 - protein, 11 aa, Homo sapiens
  CDR3 for alpha chain variable domain of TCR clone 260979 (TRAV3, TRAJ21)
CAVGNFNKFYF

SEQ ID NO: 521958 - protein, 16 aa, Homo sapiens
  CDR3 for beta chain variable domain of TCR clone 260979 (TRBV5-4, TRBJ2-1)
CASSLALAGAYNEQFF

SEQ ID NO: 521959 - protein, 15 aa, Homo sapiens
  CDR3 for alpha chain variable domain of TCR clone 260980 (TRAV26-1, TRAJ40)
CIIRVTTSVTYKYIF

SEQ ID NO: 521960 - protein, 12 aa, Homo sapiens
  CDR3 for beta chain variable domain of TCR clone 260980 (TRBV7-9, TRBJ1-4)
CASSTDREKLFF

SEQ ID NO: 521961 - protein, 11 aa, Homo sapiens
  CDR3 for alpha chain variable domain of TCR clone 260981 (TRAV27, TRAJ20)
CAGADDYKLSF

SEQ ID NO: 521962 - protein, 16 aa, Homo sapiens
  CDR3 for beta chain variable domain of TCR clone 260981 (TRBV11-3, TRBJ2-1)
CASSKAGPSSYNEQFF

SEQ ID NO: 521963 - protein, 16 aa, Homo sapiens
  CDR3 for alpha chain variable domain of TCR clone 260982 (TRAV3, TRAJ21)
CAVRDIERGNFNKFYF

SEQ ID NO: 521964 - protein, 13 aa, Homo sapiens
  CDR3 for beta chain variable domain of TCR clone 260982 (TRBV27, TRBJ2-7)
CAGSLTTGYEQYF

SEQ ID NO: 521965 - protein, 12 aa, Homo sapiens
  CDR3 for alpha chain variable domain of TCR clone 260983 (TRAV21, TRAJ33)
CAKMDSNYQLIC

SEQ ID NO: 521966 - protein, 18 aa, Homo sapiens
  CDR3 for beta chain variable domain of TCR clone 260983 (TRBV15, TRBJ2-3)
CATSRDGARSWDTDTQYF

SEQ ID NO: 521967 - protein, 14 aa, Homo sapiens
  CDR3 for alpha chain variable domain of TCR clone 260984 (TRAV10, TRAJ6)
CVRPRTGGSYIPTF

SEQ ID NO: 521968 - protein, 15 aa, Homo sapiens
  CDR3 for beta chain variable domain of TCR clone 260984 (TRBV20-1, TRBJ2-7)
CSARDRVSGMYEQYF

SEQ ID NO: 521969 - protein, 15 aa, Homo sapiens
  CDR3 for alpha chain variable domain of TCR clone 260985 (TRAV3, TRAJ47)
CAVRDIGEYGNKLVF

SEQ ID NO: 521970 - protein, 13 aa, Homo sapiens
  CDR3 for beta chain variable domain of TCR clone 260985 (TRBV12-5, TRBJ2-3)
CASGDRQSDTQYF

SEQ ID NO: 521971 - protein, 13 aa, Homo sapiens
  CDR3 for alpha chain variable domain of TCR clone 260986 (TRAV21, TRAJ29)
CAGLDSGNTPLVF

SEQ ID NO: 521972 - protein, 13 aa, Homo sapiens
  CDR3 for beta chain variable domain of TCR clone 260986 (TRBV27, TRBJ1-1)
CASSLSIGAEAFF

SEQ ID NO: 521973 - protein, 16 aa, Homo sapiens
  CDR3 for alpha chain variable domain of TCR clone 260987 (TRAV8-3, TRAJ52)
CAVQPAGGTSYGKLTF

SEQ ID NO: 521974 - protein, 17 aa, Homo sapiens
  CDR3 for beta chain variable domain of TCR clone 260987 (TRBV11-2, TRBJ2-7)
CASSLAGGWLPSSTSGR

SEQ ID NO: 521975 - protein, 12 aa, Homo sapiens
  CDR3 for alpha chain variable domain of TCR clone 260988 (TRAV8-3, TRAJ20)
CAVGANDYKLSF

SEQ ID NO: 521976 - protein, 14 aa, Homo sapiens
  CDR3 for beta chain variable domain of TCR clone 260988 (TRBV7-2, TRBJ2-7)
CASSPKTIFYEQYF

SEQ ID NO: 521977 - protein, 13 aa, Homo sapiens
  CDR3 for alpha chain variable domain of TCR clone 260989 (TRAV12-3, TRAJ13)
CAMGTGGYQKVTF

SEQ ID NO: 521978 - protein, 14 aa, Homo sapiens
  CDR3 for beta chain variable domain of TCR clone 260989 (TRBV19, TRBJ2-5)
CASSMTGQQETQYF

SEQ ID NO: 521979 - protein, 14 aa, Homo sapiens
  CDR3 for alpha chain variable domain of TCR clone 260990 (TRAV1-2, TRAJ16)
CAVNRFSDGEKLLF

SEQ ID NO: 521980 - protein, 13 aa, Homo sapiens
  CDR3 for beta chain variable domain of TCR clone 260990 (TRBV4-2, TRBJ2-1)
CASSPGTYNEQFF

SEQ ID NO: 521981 - protein, 11 aa, Homo sapiens
  CDR3 for alpha chain variable domain of TCR clone 260991 (TRAV29/DV5, TRAJ49)
CAAVPGNQFYF

SEQ ID NO: 521982 - protein, 18 aa, Homo sapiens
  CDR3 for beta chain variable domain of TCR clone 260991 (TRBV20-1, TRBJ2-6)
CSAETTPTHGSGANVLTF

SEQ ID NO: 521983 - protein, 11 aa, Homo sapiens
  CDR3 for alpha chain variable domain of TCR clone 260992 (TRAV1-2, TRAJ31)
CAVNNNARLMF

SEQ ID NO: 521984 - protein, 13 aa, Homo sapiens
  CDR3 for beta chain variable domain of TCR clone 260992 (TRBV5-5, TRBJ1-2)
CASSFWRGEDYTF

SEQ ID NO: 521985 - protein, 13 aa, Homo sapiens
  CDR3 for alpha chain variable domain of TCR clone 260993 (TRAV21, TRAJ20)
CAVGLRVDYKLSF

SEQ ID NO: 521986 - protein, 13 aa, Homo sapiens
  CDR3 for beta chain variable domain of TCR clone 260993 (TRBV11-3, TRBJ2-3)
CASSHDTKDTQYF

SEQ ID NO: 521987 - protein, 12 aa, Homo sapiens
  CDR3 for alpha chain variable domain of TCR clone 260994 (TRAV21, TRAJ13)
PGPSGGYQKVTF

SEQ ID NO: 521988 - protein, 15 aa, Homo sapiens
  CDR3 for beta chain variable domain of TCR clone 260994 (TRBV9, TRBJ1-6)
CASSVAGTGDSPLHF

SEQ ID NO: 521989 - protein, 11 aa, Homo sapiens
  CDR3 for alpha chain variable domain of TCR clone 260995 (TRAV12-2, )
CAVASLATTIS

SEQ ID NO: 521990 - protein, 16 aa, Homo sapiens
  CDR3 for beta chain variable domain of TCR clone 260995 (TRBV5-1, TRBJ2-2)
CASSSRTGRRTGELFF

SEQ ID NO: 521991 - protein, 17 aa, Homo sapiens
  CDR3 for alpha chain variable domain of TCR clone 260996 (TRAV3, TRAJ12)
CAVRDGGRMDSSYKLIF

SEQ ID NO: 521992 - protein, 12 aa, Homo sapiens
  CDR3 for beta chain variable domain of TCR clone 260996 (TRBV5-1, TRBJ1-2)
CASSQDTYGYSF

SEQ ID NO: 521993 - protein, 12 aa, Homo sapiens
  CDR3 for alpha chain variable domain of TCR clone 260997 (TRAV25, TRAJ11)
CAGASGYSTLPF

SEQ ID NO: 521994 - protein, 14 aa, Homo sapiens
  CDR3 for beta chain variable domain of TCR clone 260997 (TRBV5-8, TRBJ2-3)
CASSLGQGTDTQYF

SEQ ID NO: 521995 - protein, 14 aa, Homo sapiens
  CDR3 for alpha chain variable domain of TCR clone 260998 (TRAV14/DV4, TRAJ42)
CPRGSLRSQGNLIF

SEQ ID NO: 521996 - protein, 13 aa, Homo sapiens
  CDR3 for beta chain variable domain of TCR clone 260998 (TRBV7-3, TRBJ2-5)
CASSVRGGETQYF

SEQ ID NO: 521997 - protein, 13 aa, Homo sapiens
  CDR3 for alpha chain variable domain of TCR clone 260999 (TRAV26-2, TRAJ43)
CILRAVNNNDMRF

SEQ ID NO: 521998 - protein, 13 aa, Homo sapiens
  CDR3 for beta chain variable domain of TCR clone 260999 (TRBV20-1, TRBJ1-1)
CSAPPGGHTEAFF

SEQ ID NO: 521999 - protein, 19 aa, Homo sapiens
  CDR3 for alpha chain variable domain of TCR clone 261000 (TRAV3, TRAJ37)
CAVRDIVGGYPSNTVKLIF

SEQ ID NO: 522000 - protein, 14 aa, Homo sapiens
  CDR3 for beta chain variable domain of TCR clone 261000 (TRBV7-8, TRBJ2-3)
CASSLEAGTDTQYF

SEQ ID NO: 522001 - protein, 11 aa, Homo sapiens
  CDR3 for alpha chain variable domain of TCR clone 261001 (TRAV1-1, TRAJ23)
CAVRQGGKLIF

SEQ ID NO: 522002 - protein, 20 aa, Homo sapiens
  CDR3 for beta chain variable domain of TCR clone 261001 (TRBV7-8, TRBJ2-2)
CASSHLFPGPPIHITGELFF

SEQ ID NO: 522003 - protein, 11 aa, Homo sapiens
  CDR3 for alpha chain variable domain of TCR clone 261002 (TRAV21, TRAJ39)
LLVNAGNMLTF

SEQ ID NO: 522004 - protein, 16 aa, Homo sapiens
  CDR3 for beta chain variable domain of TCR clone 261002 (TRBV7-3, TRBJ2-1)
CASSLVSGSSNNEQFF

SEQ ID NO: 522005 - protein, 16 aa, Homo sapiens
  CDR3 for alpha chain variable domain of TCR clone 261003 (TRAV3, TRAJ10)
CAVRDLRAGGGNKLTF

SEQ ID NO: 522006 - protein, 15 aa, Homo sapiens
  CDR3 for beta chain variable domain of TCR clone 261003 (TRBV20-1, TRBJ2-1)
CSASSAGSSYNEQFF

SEQ ID NO: 522007 - protein, 15 aa, Homo sapiens
  CDR3 for alpha chain variable domain of TCR clone 261004 (TRAV8-3, TRAJ45)
CASSYSGGGADGLTF

SEQ ID NO: 522008 - protein, 17 aa, Homo sapiens
  CDR3 for beta chain variable domain of TCR clone 261004 (TRBV7-8, TRBJ1-2)
CASSLRPLQGHLYCYTF

SEQ ID NO: 522009 - protein, 14 aa, Homo sapiens
  CDR3 for alpha chain variable domain of TCR clone 261005 (TRAV38-2/DV8, TRAJ30)
CAYMDGLGGDKIIF

SEQ ID NO: 522010 - protein, 15 aa, Homo sapiens
  CDR3 for beta chain variable domain of TCR clone 261005 (TRBV7-9, TRBJ2-2)
CASRPADRNTGELFF

SEQ ID NO: 522011 - protein, 15 aa, Homo sapiens
  CDR3 for alpha chain variable domain of TCR clone 261006 (TRAV8-3, TRAJ45)
CASSYSGGGSDGLTF

SEQ ID NO: 522012 - protein, 13 aa, Homo sapiens
  CDR3 for beta chain variable domain of TCR clone 261006 (TRBV10-3, TRBJ2-7)
CASKLAVNYEQYF

SEQ ID NO: 522013 - protein, 17 aa, Homo sapiens
  CDR3 for alpha chain variable domain of TCR clone 261007 (TRAV3, TRAJ6)
CAVRDGPRAGGSYIPTF

SEQ ID NO: 522014 - protein, 15 aa, Homo sapiens
  CDR3 for beta chain variable domain of TCR clone 261007 (TRBV7-2, TRBJ2-2)
CASRRPGQNTGELFF

SEQ ID NO: 522015 - protein, 11 aa, Homo sapiens
  CDR3 for alpha chain variable domain of TCR clone 261008 (TRAV1-1, TRAJ20)
CAVFNDYKLSF

SEQ ID NO: 522016 - protein, 14 aa, Homo sapiens
  CDR3 for beta chain variable domain of TCR clone 261008 (TRBV19, TRBJ2-1)
CANSKDRGQDEQFF

SEQ ID NO: 522017 - protein, 12 aa, Homo sapiens
  CDR3 for alpha chain variable domain of TCR clone 261009 (TRAV12-1, TRAJ40)
CVVYSGTYKYIF

SEQ ID NO: 522018 - protein, 15 aa, Homo sapiens
  CDR3 for beta chain variable domain of TCR clone 261009 (TRBV6-1, TRBJ2-1)
CASSELRGQYNEQFF

SEQ ID NO: 522019 - protein, 15 aa, Homo sapiens
  CDR3 for alpha chain variable domain of TCR clone 261010 (TRAV29/DV5, TRAJ29)
CAASERSSGNTPLVF

SEQ ID NO: 522020 - protein, 14 aa, Homo sapiens
  CDR3 for beta chain variable domain of TCR clone 261010 (TRBV12-5, TRBJ1-6)
CASRVGQINSPLHF

SEQ ID NO: 522021 - protein, 13 aa, Homo sapiens
  CDR3 for alpha chain variable domain of TCR clone 261011 (TRAV2, TRAJ40)
CAVVTSGTYKYIF

SEQ ID NO: 522022 - protein, 15 aa, Homo sapiens
  CDR3 for beta chain variable domain of TCR clone 261011 (TRBV28, TRBJ2-7)
CANSRWDRGSYEQYF

SEQ ID NO: 522023 - protein, 15 aa, Homo sapiens
  CDR3 for alpha chain variable domain of TCR clone 261012 (TRAV12-2, TRAJ53)
CAVNGGGGSNYKLTF

SEQ ID NO: 522024 - protein, 16 aa, Homo sapiens
  CDR3 for beta chain variable domain of TCR clone 261012 (TRBV5-4, TRBJ2-3)
CASQQPGAGGADTQYF

SEQ ID NO: 522025 - protein, 10 aa, Homo sapiens
  CDR3 for alpha chain variable domain of TCR clone 261013 (TRAV13-1, TRAJ33)
CAASRAGTIS

SEQ ID NO: 522026 - protein, 12 aa, Homo sapiens
  CDR3 for beta chain variable domain of TCR clone 261013 (TRBV11-2, TRBJ1-2)
CASSREGDGYTF

SEQ ID NO: 522027 - protein, 10 aa, Homo sapiens
  CDR3 for alpha chain variable domain of TCR clone 261014 (TRAV1-2, TRAJ31)
CAFFDARLMF

SEQ ID NO: 522028 - protein, 14 aa, Homo sapiens
  CDR3 for beta chain variable domain of TCR clone 261014 (TRBV12-4, TRBJ2-7)
CASSFSGADYEQYF

SEQ ID NO: 522029 - protein, 12 aa, Homo sapiens
  CDR3 for alpha chain variable domain of TCR clone 261015 (TRAV3, TRAJ20)
CAVRDGDYKLSF

SEQ ID NO: 522030 - protein, 14 aa, Homo sapiens
  CDR3 for beta chain variable domain of TCR clone 261015 (TRBV19, TRBJ2-5)
CASSMTGQQETQYF

SEQ ID NO: 522031 - protein, 14 aa, Homo sapiens
  CDR3 for alpha chain variable domain of TCR clone 261016 (TRAV12-2, TRAJ33)
CAVKRARSNYQLIW

SEQ ID NO: 522032 - protein, 12 aa, Homo sapiens
  CDR3 for beta chain variable domain of TCR clone 261016 (TRBV24-1, TRBJ2-3)
CATSDSTDTKYF

SEQ ID NO: 522033 - protein, 14 aa, Homo sapiens
  CDR3 for alpha chain variable domain of TCR clone 261017 (TRAV12-2, TRAJ40)
CAVKIPSGTYKYIF

SEQ ID NO: 522034 - protein, 20 aa, Homo sapiens
  CDR3 for beta chain variable domain of TCR clone 261017 (TRBV28, TRBJ2-1)
CASTPIGRAPGLAGGNEQFF

SEQ ID NO: 522035 - protein, 13 aa, Homo sapiens
  CDR3 for alpha chain variable domain of TCR clone 261018 (TRAV21, TRAJ45)
CAVMGGGADGLTF

SEQ ID NO: 522036 - protein, 14 aa, Homo sapiens
  CDR3 for beta chain variable domain of TCR clone 261018 (TRBV11-1, TRBJ2-7)
CASTFSVPSYEQYF

SEQ ID NO: 522037 - protein, 12 aa, Homo sapiens
  CDR3 for alpha chain variable domain of TCR clone 261019 (TRAV3, TRAJ20)
CAVRDHDYKLSF

SEQ ID NO: 522038 - protein, 13 aa, Homo sapiens
  CDR3 for beta chain variable domain of TCR clone 261019 (TRBV9, TRBJ2-7)
CSSSVGQGGEQYF

SEQ ID NO: 522039 - protein, 14 aa, Homo sapiens
  CDR3 for alpha chain variable domain of TCR clone 261020 (TRAV1-2, TRAJ16)
CAVNRFSDGQKLLF

SEQ ID NO: 522040 - protein, 12 aa, Homo sapiens
  CDR3 for beta chain variable domain of TCR clone 261020 (TRBV5-4, TRBJ2-7)
CASSLEAYEQYF

SEQ ID NO: 522041 - protein, 14 aa, Homo sapiens
  CDR3 for alpha chain variable domain of TCR clone 261021 (TRAV8-2, TRAJ23)
CVVSDDNQGGKLIF

SEQ ID NO: 522042 - protein, 14 aa, Homo sapiens
  CDR3 for beta chain variable domain of TCR clone 261021 (TRBV12-4, TRBJ1-1)
CASSLGTGGTEAFF

SEQ ID NO: 522043 - protein, 13 aa, Homo sapiens
  CDR3 for alpha chain variable domain of TCR clone 261022 (TRAV21, TRAJ27)
CAARPGNAGKSTF

SEQ ID NO: 522044 - protein, 13 aa, Homo sapiens
  CDR3 for beta chain variable domain of TCR clone 261022 (TRBV7-3, TRBJ2-7)
CTSSQAGGYEQYF

SEQ ID NO: 522045 - protein, 11 aa, Homo sapiens
  CDR3 for alpha chain variable domain of TCR clone 261023 (TRAV12-1, TRAJ30)
CVVNGQDKFIF

SEQ ID NO: 522046 - protein, 15 aa, Homo sapiens
  CDR3 for beta chain variable domain of TCR clone 261023 (TRBV28, TRBJ2-5)
CASSSGRTIQETQYF

SEQ ID NO: 522047 - protein, 14 aa, Homo sapiens
  CDR3 for alpha chain variable domain of TCR clone 261024 (TRAV23/DV6, TRAJ57)
CAASNQGGSEKLVF

SEQ ID NO: 522048 - protein, 13 aa, Homo sapiens
  CDR3 for beta chain variable domain of TCR clone 261024 (TRBV11-2, TRBJ2-7)
CVSSSYPSYEQYF

SEQ ID NO: 522049 - protein, 13 aa, Homo sapiens
  CDR3 for alpha chain variable domain of TCR clone 261025 (TRAV8-3, TRAJ44)
CAVVPGTASKLTF

SEQ ID NO: 522050 - protein, 14 aa, Homo sapiens
  CDR3 for beta chain variable domain of TCR clone 261025 (TRBV11-2, TRBJ2-3)
CASSKLARTDTQYF

SEQ ID NO: 522051 - protein, 15 aa, Homo sapiens
  CDR3 for alpha chain variable domain of TCR clone 261026 (TRAV3, TRAJ20)
CAVRDIKLSDYKLSF

SEQ ID NO: 522052 - protein, 17 aa, Homo sapiens
  CDR3 for beta chain variable domain of TCR clone 261026 (TRBV7-9, TRBJ1-6)
CASSSPGRGNSPLHLGT

SEQ ID NO: 522053 - protein, 15 aa, Homo sapiens
  CDR3 for alpha chain variable domain of TCR clone 261027 (TRAV3, TRAJ29)
CAARDSISGNTPLVF

SEQ ID NO: 522054 - protein, 15 aa, Homo sapiens
  CDR3 for beta chain variable domain of TCR clone 261027 (TRBV18, TRBJ2-3)
CASSPGLAGGDTQYF

SEQ ID NO: 522055 - protein, 14 aa, Homo sapiens
  CDR3 for alpha chain variable domain of TCR clone 261028 (TRAV8-2, TRAJ4)
CVVSPSGGSNKLIF

SEQ ID NO: 522056 - protein, 14 aa, Homo sapiens
  CDR3 for beta chain variable domain of TCR clone 261028 (TRBV19, TRBJ2-5)
CASSSSGIQETQYF

SEQ ID NO: 522057 - protein, 14 aa, Homo sapiens
  CDR3 for alpha chain variable domain of TCR clone 261029 (TRAV12-2, TRAJ48)
CAVTAFFGNEKLTF

SEQ ID NO: 522058 - protein, 13 aa, Homo sapiens
  CDR3 for beta chain variable domain of TCR clone 261029 (TRBV28, TRBJ2-7)
CAGAQQGLDEQYF

SEQ ID NO: 522059 - protein, 13 aa, Homo sapiens
  CDR3 for alpha chain variable domain of TCR clone 261030 (TRAV38-2/DV8, TRAJ45)
CAYVGGGADGLTF

SEQ ID NO: 522060 - protein, 13 aa, Homo sapiens
  CDR3 for beta chain variable domain of TCR clone 261030 (TRBV29-1, TRBJ2-1)
CSVEGGSVNEQFF

SEQ ID NO: 522061 - protein, 11 aa, Homo sapiens
  CDR3 for alpha chain variable domain of TCR clone 261031 (TRAV17, TRAJ31)
CATSNNARLMF

SEQ ID NO: 522062 - protein, 14 aa, Homo sapiens
  CDR3 for beta chain variable domain of TCR clone 261031 (TRBV7-2, TRBJ2-7)
CASSLYPGRYEQYF

SEQ ID NO: 522063 - protein, 14 aa, Homo sapiens
  CDR3 for alpha chain variable domain of TCR clone 261032 (TRAV38-2/DV8, TRAJ23)
CAYRSQNQGGKLIF

SEQ ID NO: 522064 - protein, 13 aa, Homo sapiens
  CDR3 for beta chain variable domain of TCR clone 261032 (TRBV24-1, TRBJ2-1)
CAASAGPYNEQFF

SEQ ID NO: 522065 - protein, 14 aa, Homo sapiens
  CDR3 for alpha chain variable domain of TCR clone 261033 (TRAV29/DV5, TRAJ34)
CAASASRETDKLIF

SEQ ID NO: 522066 - protein, 14 aa, Homo sapiens
  CDR3 for beta chain variable domain of TCR clone 261033 (TRBV19, TRBJ2-1)
CASPTFVLSGEQFF

SEQ ID NO: 522067 - protein, 15 aa, Homo sapiens
  CDR3 for alpha chain variable domain of TCR clone 261034 (TRAV30, TRAJ32)
CGTEILGGVTNKLIF

SEQ ID NO: 522068 - protein, 17 aa, Homo sapiens
  CDR3 for beta chain variable domain of TCR clone 261034 (TRBV5-4, TRBJ2-1)
CASSSAGGRGPYNEQFF

SEQ ID NO: 522069 - protein, 13 aa, Homo sapiens
  CDR3 for alpha chain variable domain of TCR clone 261035 (TRAV13-1, TRAJ6)
CAASRGGSYIPTF

SEQ ID NO: 522070 - protein, 15 aa, Homo sapiens
  CDR3 for beta chain variable domain of TCR clone 261035 (TRBV20-1, TRBJ2-7)
CSARDRVSGMDEQYF

SEQ ID NO: 522071 - protein, 13 aa, Homo sapiens
  CDR3 for alpha chain variable domain of TCR clone 261036 (TRAV38-1, TRAJ42)
CAFRSGSQGNLIF

SEQ ID NO: 522072 - protein, 15 aa, Homo sapiens
  CDR3 for beta chain variable domain of TCR clone 261036 (TRBV20-1, TRBJ1-1)
CSASRGVTGNTEAFF

SEQ ID NO: 522073 - protein, 15 aa, Homo sapiens
  CDR3 for alpha chain variable domain of TCR clone 261037 (TRAV8-3, TRAJ40)
CAAPSLGSGTYRYIF

SEQ ID NO: 522074 - protein, 16 aa, Homo sapiens
  CDR3 for beta chain variable domain of TCR clone 261037 (TRBV7-3, TRBJ2-3)
CASSLSGYRPEDTEYF

SEQ ID NO: 522075 - protein, 16 aa, Homo sapiens
  CDR3 for alpha chain variable domain of TCR clone 261038 (TRAV4, TRAJ18)
CCVLLIGGSTLGRLYF

SEQ ID NO: 522076 - protein, 13 aa, Homo sapiens
  CDR3 for beta chain variable domain of TCR clone 261038 (TRBV28, TRBJ2-2)
CASNSENTGELFF

SEQ ID NO: 522077 - protein, 12 aa, Homo sapiens
  CDR3 for alpha chain variable domain of TCR clone 261039 (TRAV17, TRAJ12)
CATLRSSYKLIF

SEQ ID NO: 522078 - protein, 15 aa, Homo sapiens
  CDR3 for beta chain variable domain of TCR clone 261039 (TRBV7-9, TRBJ1-2)
CASSSGTDYNYGYTF

SEQ ID NO: 522079 - protein, 15 aa, Homo sapiens
  CDR3 for alpha chain variable domain of TCR clone 261040 (TRAV3, TRAJ3)
CAVRDRDSSASKIIF

SEQ ID NO: 522080 - protein, 18 aa, Homo sapiens
  CDR3 for beta chain variable domain of TCR clone 261040 (TRBV7-2, TRBJ2-3)
CASSLKREGSGITDTQYF

SEQ ID NO: 522081 - protein, 14 aa, Homo sapiens
  CDR3 for alpha chain variable domain of TCR clone 261041 (TRAV12-3, TRAJ10)
SHLPLTGGGNKLTF

SEQ ID NO: 522082 - protein, 13 aa, Homo sapiens
  CDR3 for beta chain variable domain of TCR clone 261041 (TRBV7-7, TRBJ2-5)
CPSSRSGQETQYF

SEQ ID NO: 522083 - protein, 14 aa, Homo sapiens
  CDR3 for alpha chain variable domain of TCR clone 261042 (TRAV26-1, TRAJ38)
CIADNAGNNRKLIW

SEQ ID NO: 522084 - protein, 15 aa, Homo sapiens
  CDR3 for beta chain variable domain of TCR clone 261042 (TRBV10-3, TRBJ2-7)
CATREQGLRSYEQYF

SEQ ID NO: 522085 - protein, 14 aa, Homo sapiens
  CDR3 for alpha chain variable domain of TCR clone 261043 (TRAV17, TRAJ57)
CATDPQGGSEKLVF

SEQ ID NO: 522086 - protein, 12 aa, Homo sapiens
  CDR3 for beta chain variable domain of TCR clone 261043 (TRBV5-1, TRBJ1-2)
CASSQDTYGYTF

SEQ ID NO: 522087 - protein, 13 aa, Homo sapiens
  CDR3 for alpha chain variable domain of TCR clone 261044 (TRAV26-2, TRAJ43)
CILRAVNNNDMRF

SEQ ID NO: 522088 - protein, 18 aa, Homo sapiens
  CDR3 for beta chain variable domain of TCR clone 261044 (TRBV7-9, TRBJ2-3)
CASSLPINGQISTDTQYF

SEQ ID NO: 522089 - protein, 15 aa, Homo sapiens
  CDR3 for alpha chain variable domain of TCR clone 261045 (TRAV23/DV6, TRAJ18)
CAARYRGSTLGRLYF

SEQ ID NO: 522090 - protein, 16 aa, Homo sapiens
  CDR3 for beta chain variable domain of TCR clone 261045 (TRBV4-3, TRBJ2-1)
CASSYRRLGSWDEQFF

SEQ ID NO: 522091 - protein, 13 aa, Homo sapiens
  CDR3 for alpha chain variable domain of TCR clone 261046 (TRAV16, TRAJ5)
CALTNTGRRALTF

SEQ ID NO: 522092 - protein, 15 aa, Homo sapiens
  CDR3 for beta chain variable domain of TCR clone 261046 (TRBV11-2, TRBJ2-4)
CASSRPGTGISIQYF

SEQ ID NO: 522093 - protein, 12 aa, Homo sapiens
  CDR3 for alpha chain variable domain of TCR clone 261047 (TRAV8-3, TRAJ26)
CAGDNDGQNFVF

SEQ ID NO: 522094 - protein, 15 aa, Homo sapiens
  CDR3 for beta chain variable domain of TCR clone 261047 (TRBV11-2, TRBJ2-1)
CASSLGTSGLNEQFF

SEQ ID NO: 522095 - protein, 15 aa, Homo sapiens
  CDR3 for alpha chain variable domain of TCR clone 261048 (TRAV40, TRAJ53)
CLLANRGGSNYKLTF

SEQ ID NO: 522096 - protein, 15 aa, Homo sapiens
  CDR3 for beta chain variable domain of TCR clone 261048 (TRBV7-6, TRBJ2-2)
CASRRTSGNTGELFF

SEQ ID NO: 522097 - protein, 14 aa, Homo sapiens
  CDR3 for alpha chain variable domain of TCR clone 261049 (TRAV2, TRAJ37)
CAVHFTSNTGKLIF

SEQ ID NO: 522098 - protein, 15 aa, Homo sapiens
  CDR3 for beta chain variable domain of TCR clone 261049 (TRBV20-1, TRBJ1-1)
CSASRGVTGNTEAFF

SEQ ID NO: 522099 - protein, 11 aa, Homo sapiens
  CDR3 for alpha chain variable domain of TCR clone 261050 (TRAV13-1, TRAJ40)
CAVSGTYKYIF

SEQ ID NO: 522100 - protein, 12 aa, Homo sapiens
  CDR3 for beta chain variable domain of TCR clone 261050 (TRBV12-4, TRBJ2-7)
CASSLGGYEQYF

SEQ ID NO: 522101 - protein, 14 aa, Homo sapiens
  CDR3 for alpha chain variable domain of TCR clone 261051 (TRAV1-2, TRAJ16)
CAVNRFSDGQKLLF

SEQ ID NO: 522102 - protein, 13 aa, Homo sapiens
  CDR3 for beta chain variable domain of TCR clone 261051 (TRBV7-6, TRBJ1-3)
CASSSQQGNTIYF

SEQ ID NO: 522103 - protein, 21 aa, Homo sapiens
  CDR3 for alpha chain variable domain of TCR clone 261052 (TRAV8-3, TRAJ6)
CAVGGEEATYLHLEEEPALLF

SEQ ID NO: 522104 - protein, 16 aa, Homo sapiens
  CDR3 for beta chain variable domain of TCR clone 261052 (TRBV7-2, TRBJ2-7)
CASSLEAGGPWYEQYF

SEQ ID NO: 522105 - protein, 17 aa, Homo sapiens
  CDR3 for alpha chain variable domain of TCR clone 261053 (TRAV12-2, TRAJ4)
CAVNVRPVSGGYNELIF

SEQ ID NO: 522106 - protein, 17 aa, Homo sapiens
  CDR3 for beta chain variable domain of TCR clone 261053 (TRBV6-3, TRBJ2-1)
CASSYSSGTRGLDEQFF

SEQ ID NO: 522107 - protein, 14 aa, Homo sapiens
  CDR3 for alpha chain variable domain of TCR clone 261054 (TRAV2, TRAJ9)
CAVEDRSGGFKTIF

SEQ ID NO: 522108 - protein, 12 aa, Homo sapiens
  CDR3 for beta chain variable domain of TCR clone 261054 (TRBV7-6, TRBJ2-7)
CASSLADSEQYF

SEQ ID NO: 522109 - protein, 10 aa, Homo sapiens
  CDR3 for alpha chain variable domain of TCR clone 261055 (TRAV8-3, TRAJ43)
CAVALADLRF

SEQ ID NO: 522110 - protein, 14 aa, Homo sapiens
  CDR3 for beta chain variable domain of TCR clone 261055 (TRBV4-2, TRBJ2-1)
CASGLDRAYNEQFF

SEQ ID NO: 522111 - protein, 14 aa, Homo sapiens
  CDR3 for alpha chain variable domain of TCR clone 261056 (TRAV1-2, TRAJ16)
CAVNRFSDGQKLLS

SEQ ID NO: 522112 - protein, 16 aa, Homo sapiens
  CDR3 for beta chain variable domain of TCR clone 261056 (TRBV7-7, TRBJ2-1)
CASSLASGTSYNEQFF

SEQ ID NO: 522113 - protein, 12 aa, Homo sapiens
  CDR3 for alpha chain variable domain of TCR clone 261057 (TRAV8-6, TRAJ4)
CAVSDHPNKLIF

SEQ ID NO: 522114 - protein, 14 aa, Homo sapiens
  CDR3 for beta chain variable domain of TCR clone 261057 (TRBV6-6, TRBJ1-5)
CSSVDSGFNQPQHF

SEQ ID NO: 522115 - protein, 14 aa, Homo sapiens
  CDR3 for alpha chain variable domain of TCR clone 261058 (TRAV13-1, TRAJ31)
CAASSRPNNASLMF

SEQ ID NO: 522116 - protein, 15 aa, Homo sapiens
  CDR3 for beta chain variable domain of TCR clone 261058 (TRBV4-2, TRBJ2-4)
CASSPLGAAKNIQYF

SEQ ID NO: 522117 - protein, 16 aa, Homo sapiens
  CDR3 for alpha chain variable domain of TCR clone 261059 (TRAV12-3, TRAJ53)
CAMSPGSGGSNYKRTF

SEQ ID NO: 522118 - protein, 15 aa, Homo sapiens
  CDR3 for beta chain variable domain of TCR clone 261059 (TRBV25-1, TRBJ1-4)
CASSKRIATNEKLFF

SEQ ID NO: 522119 - protein, 11 aa, Homo sapiens
  CDR3 for alpha chain variable domain of TCR clone 261060 (TRAV12-3, TRAJ27)
CAMANAGKSTF

SEQ ID NO: 522120 - protein, 16 aa, Homo sapiens
  CDR3 for beta chain variable domain of TCR clone 261060 (TRBV5-1, TRBJ1-1)
CASSSGGNSLNTEAFF

SEQ ID NO: 522121 - protein, 14 aa, Homo sapiens
  CDR3 for alpha chain variable domain of TCR clone 261061 (TRAV35, TRAJ22)
CAGLRPGSARQLTF

SEQ ID NO: 522122 - protein, 16 aa, Homo sapiens
  CDR3 for beta chain variable domain of TCR clone 261061 (TRBV11-2, TRBJ2-2)
CASRKPGQGFTGELFF

SEQ ID NO: 522123 - protein, 13 aa, Homo sapiens
  CDR3 for alpha chain variable domain of TCR clone 261062 (TRAV36/DV7, TRAJ54)
CAVLIQRAQKLVF

SEQ ID NO: 522124 - protein, 13 aa, Homo sapiens
  CDR3 for beta chain variable domain of TCR clone 261062 (TRBV29-1, TRBJ2-4)
CSVGEGTKNIQYF

SEQ ID NO: 522125 - protein, 12 aa, Homo sapiens
  CDR3 for alpha chain variable domain of TCR clone 261063 (TRAV25, TRAJ45)
DYSGGGADGLTF

SEQ ID NO: 522126 - protein, 14 aa, Homo sapiens
  CDR3 for beta chain variable domain of TCR clone 261063 (TRBV7-3, TRBJ2-7)
CASSLKADSYEQYF

SEQ ID NO: 522127 - protein, 12 aa, Homo sapiens
  CDR3 for alpha chain variable domain of TCR clone 261064 (TRAV13-1, TRAJ49)
CAASPMGNQFYF

SEQ ID NO: 522128 - protein, 14 aa, Homo sapiens
  CDR3 for beta chain variable domain of TCR clone 261064 (TRBV18, TRBJ2-5)
CASSPGVSQETQYF

SEQ ID NO: 522129 - protein, 14 aa, Homo sapiens
  CDR3 for alpha chain variable domain of TCR clone 261065 (TRAV12-2, TRAJ36)
CAVKISPGANNLFF

SEQ ID NO: 522130 - protein, 14 aa, Homo sapiens
  CDR3 for beta chain variable domain of TCR clone 261065 (TRBV20-1, TRBJ2-3)
CSARGGTSTDTQYF

SEQ ID NO: 522131 - protein, 14 aa, Homo sapiens
  CDR3 for alpha chain variable domain of TCR clone 261066 (TRAV12-2, TRAJ13)
CAVKKTGGYQKVTF

SEQ ID NO: 522132 - protein, 13 aa, Homo sapiens
  CDR3 for beta chain variable domain of TCR clone 261066 (TRBV20-1, TRBJ2-2)
CSALSGGAGELFF

SEQ ID NO: 522133 - protein, 15 aa, Homo sapiens
  CDR3 for alpha chain variable domain of TCR clone 261067 (TRAV16, TRAJ16)
CALSGLVTGMARSCS

SEQ ID NO: 522134 - protein, 16 aa, Homo sapiens
  CDR3 for beta chain variable domain of TCR clone 261067 (TRBV2, TRBJ2-7)
CASRKGSLGLVYEQYF

SEQ ID NO: 522135 - protein, 15 aa, Homo sapiens
  CDR3 for alpha chain variable domain of TCR clone 261068 (TRAV3, TRAJ12)
CTSVPWMGSSYKLIF

SEQ ID NO: 522136 - protein, 14 aa, Homo sapiens
  CDR3 for beta chain variable domain of TCR clone 261068 (TRBV7-8, TRBJ2-3)
CASSLEAGTDTQYF

SEQ ID NO: 522137 - protein, 18 aa, Homo sapiens
  CDR3 for alpha chain variable domain of TCR clone 261069 (TRAV21, TRAJ52)
CAVRPSPAGGTSHGKLTF

SEQ ID NO: 522138 - protein, 16 aa, Homo sapiens
  CDR3 for beta chain variable domain of TCR clone 261069 (TRBV4-3, TRBJ2-1)
CASSPALDRGVNEQFF

SEQ ID NO: 522139 - protein, 16 aa, Homo sapiens
  CDR3 for alpha chain variable domain of TCR clone 261070 (TRAV14/DV4, TRAJ54)
CAMREGRIQGAQKLEF

SEQ ID NO: 522140 - protein, 13 aa, Homo sapiens
  CDR3 for beta chain variable domain of TCR clone 261070 (TRBV4-2, TRBJ1-1)
CASSQAGNTEAFF

SEQ ID NO: 522141 - protein, 11 aa, Homo sapiens
  CDR3 for alpha chain variable domain of TCR clone 261071 (TRAV12-2, TRAJ31)
CAVTRWARLMF

SEQ ID NO: 522142 - protein, 20 aa, Homo sapiens
  CDR3 for beta chain variable domain of TCR clone 261071 (TRBV5-1, TRBJ2-5)
GSWCSVSAGCWGAGEKTQYF

SEQ ID NO: 522143 - protein, 18 aa, Homo sapiens
  CDR3 for alpha chain variable domain of TCR clone 261072 (TRAV29/DV5, TRAJ26)
CSVLLCSKRKPEGQNFVF

SEQ ID NO: 522144 - protein, 17 aa, Homo sapiens
  CDR3 for beta chain variable domain of TCR clone 261072 (TRBV20-1, TRBJ2-2)
CSASGSGQGGSTGELFF

SEQ ID NO: 522145 - protein, 11 aa, Homo sapiens
  CDR3 for alpha chain variable domain of TCR clone 261073 (TRAV3, TRAJ49)
CAPITGNQFYF

SEQ ID NO: 522146 - protein, 15 aa, Homo sapiens
  CDR3 for beta chain variable domain of TCR clone 261073 (TRBV10-3, TRBJ2-5)
CAISEFGRGQETQYF

SEQ ID NO: 522147 - protein, 10 aa, Homo sapiens
  CDR3 for alpha chain variable domain of TCR clone 261074 (TRAV13-2, TRAJ20)
CAENICRLQA

SEQ ID NO: 522148 - protein, 15 aa, Homo sapiens
  CDR3 for beta chain variable domain of TCR clone 261074 (TRBV18, TRBJ1-2)
CASSPGNGLGHGYTF

SEQ ID NO: 522149 - protein, 19 aa, Homo sapiens
  CDR3 for alpha chain variable domain of TCR clone 261075 (TRAV1-2, TRAJ28)
CLLPLCCPILWAGSYQLTF

SEQ ID NO: 522150 - protein, 13 aa, Homo sapiens
  CDR3 for beta chain variable domain of TCR clone 261075 (TRBV4-2, TRBJ1-1)
CASSQAGNTEAFF

SEQ ID NO: 522151 - protein, 16 aa, Homo sapiens
  CDR3 for alpha chain variable domain of TCR clone 261076 (TRAV8-3, TRAJ10)
CAVGPGVTGGGNKLTF

SEQ ID NO: 522152 - protein, 13 aa, Homo sapiens
  CDR3 for beta chain variable domain of TCR clone 261076 (TRBV18, TRBJ1-1)
CASSPGPSGEAFF

SEQ ID NO: 522153 - protein, 13 aa, Homo sapiens
  CDR3 for alpha chain variable domain of TCR clone 261077 (TRAV26-1, TRAJ48)
CIARVVGDEKLTF

SEQ ID NO: 522154 - protein, 19 aa, Homo sapiens
  CDR3 for beta chain variable domain of TCR clone 261077 (TRBV11-3, TRBJ2-2)
CASSTRPGAKTTSTGELFF

SEQ ID NO: 522155 - protein, 16 aa, Homo sapiens
  CDR3 for alpha chain variable domain of TCR clone 261078 (TRAV30, TRAJ24)
CGTEIVNADSWGKFQF

SEQ ID NO: 522156 - protein, 15 aa, Homo sapiens
  CDR3 for beta chain variable domain of TCR clone 261078 (TRBV7-9, TRBJ1-4)
CASSARTGGNEKLFF

SEQ ID NO: 522157 - protein, 12 aa, Homo sapiens
  CDR3 for alpha chain variable domain of TCR clone 261079 (TRAV12-3, TRAJ17)
CAMTLTGNKITF

SEQ ID NO: 522158 - protein, 20 aa, Homo sapiens
  CDR3 for beta chain variable domain of TCR clone 261079 (TRBV19, TRBJ2-1)
CASSISRTVTSTRLNNEQFF

SEQ ID NO: 522159 - protein, 17 aa, Homo sapiens
  CDR3 for alpha chain variable domain of TCR clone 261080 (TRAV3, TRAJ12)
CAVRDGGRMDSSYKFIF

SEQ ID NO: 522160 - protein, 13 aa, Homo sapiens
  CDR3 for beta chain variable domain of TCR clone 261080 (TRBV15, TRBJ1-6)
CATSGGLNSPLHF

SEQ ID NO: 522161 - protein, 17 aa, Homo sapiens
  CDR3 for alpha chain variable domain of TCR clone 261081 (TRAV8-6, TRAJ58)
CAVSSWVGETSGSRLTF

SEQ ID NO: 522162 - protein, 15 aa, Homo sapiens
  CDR3 for beta chain variable domain of TCR clone 261081 (TRBV5-7, TRBJ1-5)
CASSYGKLWDQPQHF

SEQ ID NO: 522163 - protein, 14 aa, Homo sapiens
  CDR3 for alpha chain variable domain of TCR clone 261082 (TRAV26-1, TRAJ57)
CIHAGQGGSEKLVF

SEQ ID NO: 522164 - protein, 13 aa, Homo sapiens
  CDR3 for beta chain variable domain of TCR clone 261082 (TRBV19, TRBJ2-7)
CASSLTTSYEQYF

SEQ ID NO: 522165 - protein, 14 aa, Homo sapiens
  CDR3 for alpha chain variable domain of TCR clone 261083 (TRAV12-2, TRAJ13)
CAVKKTGGHQKVTF

SEQ ID NO: 522166 - protein, 15 aa, Homo sapiens
  CDR3 for beta chain variable domain of TCR clone 261083 (TRBV27, TRBJ2-1)
RASSNGGGSSNEQFF

SEQ ID NO: 522167 - protein, 22 aa, Homo sapiens
  CDR3 for alpha chain variable domain of TCR clone 261084 (TRAV26-1, TRAJ27)
CIVRVLTPMQANQPLGMGLSSL

SEQ ID NO: 522168 - protein, 13 aa, Homo sapiens
  CDR3 for beta chain variable domain of TCR clone 261084 (TRBV20-1, TRBJ2-7)
CSATHTSGYEQYF

SEQ ID NO: 522169 - protein, 13 aa, Homo sapiens
  CDR3 for alpha chain variable domain of TCR clone 261085 (TRAV19, TRAJ26)
CALTFDYGQNVVF

SEQ ID NO: 522170 - protein, 14 aa, Homo sapiens
  CDR3 for beta chain variable domain of TCR clone 261085 (TRBV7-8, TRBJ2-3)
CASSLEAGTDTQYF

SEQ ID NO: 522171 - protein, 14 aa, Homo sapiens
  CDR3 for alpha chain variable domain of TCR clone 261086 (TRAV26-1, TRAJ38)
CIADNAGNNRKLIW

SEQ ID NO: 522172 - protein, 16 aa, Homo sapiens
  CDR3 for beta chain variable domain of TCR clone 261086 (TRBV10-3, TRBJ2-1)
CAISLTSGNSYNEQFF

SEQ ID NO: 522173 - protein, 14 aa, Homo sapiens
  CDR3 for alpha chain variable domain of TCR clone 261087 (TRAV8-2, TRAJ4)
CVVRPSGGYNKLIF

SEQ ID NO: 522174 - protein, 17 aa, Homo sapiens
  CDR3 for beta chain variable domain of TCR clone 261087 (TRBV13, TRBJ2-3)
CASSLSRVAGGRNTQYF

SEQ ID NO: 522175 - protein, 15 aa, Homo sapiens
  CDR3 for alpha chain variable domain of TCR clone 261088 (TRAV21, TRAJ53)
CATWNSGGSNYKLTF

SEQ ID NO: 522176 - protein, 17 aa, Homo sapiens
  CDR3 for beta chain variable domain of TCR clone 261088 (TRBV20-1, TRBJ2-2)
GSASGSGQGGLTGELFF

SEQ ID NO: 522177 - protein, 14 aa, Homo sapiens
  CDR3 for alpha chain variable domain of TCR clone 261089 (TRAV1-2, TRAJ16)
CAVNRFSDGQKLLF

SEQ ID NO: 522178 - protein, 15 aa, Homo sapiens
  CDR3 for beta chain variable domain of TCR clone 261089 (TRBV27, TRBJ1-5)
CASSLGTGFDQPQHF

SEQ ID NO: 522179 - protein, 14 aa, Homo sapiens
  CDR3 for alpha chain variable domain of TCR clone 261090 (TRAV3, TRAJ17)
CAVRDSAAGNKLTF

SEQ ID NO: 522180 - protein, 16 aa, Homo sapiens
  CDR3 for beta chain variable domain of TCR clone 261090 (TRBV20-1, TRBJ1-2)
CSASMGQGVANYGYTF

SEQ ID NO: 522181 - protein, 15 aa, Homo sapiens
  CDR3 for alpha chain variable domain of TCR clone 261091 (TRAV3, TRAJ24)
CAVRDKITAGGNCSL

SEQ ID NO: 522182 - protein, 14 aa, Homo sapiens
  CDR3 for beta chain variable domain of TCR clone 261091 (TRBV7-2, TRBJ2-3)
CASSQTGSSYTQYF

SEQ ID NO: 522183 - protein, 14 aa, Homo sapiens
  CDR3 for alpha chain variable domain of TCR clone 261092 (TRAV12-1, TRAJ22)
CVAFSSGSARQLTF

SEQ ID NO: 522184 - protein, 21 aa, Homo sapiens
  CDR3 for beta chain variable domain of TCR clone 261092 (TRBV15, TRBJ2-1)
AWGTQPCTCVPPAEVDTTRFF

SEQ ID NO: 522185 - protein, 14 aa, Homo sapiens
  CDR3 for alpha chain variable domain of TCR clone 261093 (TRAV17, TRAJ37)
CATDGSSNTGKLIF

SEQ ID NO: 522186 - protein, 15 aa, Homo sapiens
  CDR3 for beta chain variable domain of TCR clone 261093 (TRBV20-1, TRBJ2-7)
CSARDRVSGMDEQYF

SEQ ID NO: 522187 - protein, 13 aa, Homo sapiens
  CDR3 for alpha chain variable domain of TCR clone 261094 (TRAV10, TRAJ49)
CGERTNTGNQFYF

SEQ ID NO: 522188 - protein, 15 aa, Homo sapiens
  CDR3 for beta chain variable domain of TCR clone 261094 (TRBV6-3, TRBJ2-7)
CASSSPGTVFYEQYF

SEQ ID NO: 522189 - protein, 17 aa, Homo sapiens
  CDR3 for alpha chain variable domain of TCR clone 261095 (TRAV26-1, TRAJ53)
CIVRVDDSGGSNYKLTF

SEQ ID NO: 522190 - protein, 15 aa, Homo sapiens
  CDR3 for beta chain variable domain of TCR clone 261095 (TRBV2, TRBJ1-5)
CASAPPGGSNQPQHF

SEQ ID NO: 522191 - protein, 13 aa, Homo sapiens
  CDR3 for alpha chain variable domain of TCR clone 261096 (TRAV13-1, TRAJ20)
CAARVSNDFKLSF

SEQ ID NO: 522192 - protein, 12 aa, Homo sapiens
  CDR3 for beta chain variable domain of TCR clone 261096 (TRBV20-1, TRBJ2-1)
CSARLGTDEQFF

SEQ ID NO: 522193 - protein, 17 aa, Homo sapiens
  CDR3 for alpha chain variable domain of TCR clone 261097 (TRAV3, TRAJ42)
FAVRDRDYGGRQGNLIF

SEQ ID NO: 522194 - protein, 15 aa, Homo sapiens
  CDR3 for beta chain variable domain of TCR clone 261097 (TRBV6-6, TRBJ2-7)
CASSYSYGGSYEQYF

SEQ ID NO: 522195 - protein, 12 aa, Homo sapiens
  CDR3 for alpha chain variable domain of TCR clone 261098 (TRAV13-1, TRAJ9)
CASHTGGFKTIS

SEQ ID NO: 522196 - protein, 13 aa, Homo sapiens
  CDR3 for beta chain variable domain of TCR clone 261098 (TRBV27, TRBJ2-7)
CASSFSQGYEQYF

SEQ ID NO: 522197 - protein, 16 aa, Homo sapiens
  CDR3 for alpha chain variable domain of TCR clone 261099 (TRAV4, TRAJ18)
CCVLLIGGSTLGRLYF

SEQ ID NO: 522198 - protein, 20 aa, Homo sapiens
  CDR3 for beta chain variable domain of TCR clone 261099 (TRBV7-8, TRBJ2-2)
CASSHLFPGPTIHITGELFF

SEQ ID NO: 522199 - protein, 10 aa, Homo sapiens
  CDR3 for alpha chain variable domain of TCR clone 261100 (TRAV30, TRAJ48)
CDIRNEKLTF

SEQ ID NO: 522200 - protein, 14 aa, Homo sapiens
  CDR3 for beta chain variable domain of TCR clone 261100 (TRBV7-6, TRBJ2-3)
CASSVAGGTDTQYF

SEQ ID NO: 522201 - protein, 11 aa, Homo sapiens
  CDR3 for alpha chain variable domain of TCR clone 261101 (TRAV21, TRAJ9)
CAVPGGFKTIF

SEQ ID NO: 522202 - protein, 15 aa, Homo sapiens
  CDR3 for beta chain variable domain of TCR clone 261101 (TRBV6-5, TRBJ2-1)
CASSKGLAGNNEQFF

SEQ ID NO: 522203 - protein, 13 aa, Homo sapiens
  CDR3 for alpha chain variable domain of TCR clone 261102 (TRAV23/DV6, TRAJ29)
CAARNSGNTPLVF

SEQ ID NO: 522204 - protein, 12 aa, Homo sapiens
  CDR3 for beta chain variable domain of TCR clone 261102 (TRBV11-2, TRBJ2-1)
CASSPGNNEQFF

SEQ ID NO: 522205 - protein, 11 aa, Homo sapiens
  CDR3 for alpha chain variable domain of TCR clone 261103 (TRAV2, TRAJ13)
CASGGHQKVTF

SEQ ID NO: 522206 - protein, 17 aa, Homo sapiens
  CDR3 for beta chain variable domain of TCR clone 261103 (TRBV13, TRBJ2-3)
CASSLSRVAGGRNTQYF

SEQ ID NO: 522207 - protein, 14 aa, Homo sapiens
  CDR3 for alpha chain variable domain of TCR clone 261104 (TRAV38-1, TRAJ39)
CAFSHNNAGNMLTF

SEQ ID NO: 522208 - protein, 15 aa, Homo sapiens
  CDR3 for beta chain variable domain of TCR clone 261104 (TRBV19, TRBJ2-6)
CASSTGPSGANVLTF

SEQ ID NO: 522209 - protein, 12 aa, Homo sapiens
  CDR3 for alpha chain variable domain of TCR clone 261105 (TRAV9-2, TRAJ26)
CALRGYGQNFVF

SEQ ID NO: 522210 - protein, 15 aa, Homo sapiens
  CDR3 for beta chain variable domain of TCR clone 261105 (TRBV28, TRBJ2-5)
CASSSGRTIQETQYF

SEQ ID NO: 522211 - protein, 13 aa, Homo sapiens
  CDR3 for alpha chain variable domain of TCR clone 261106 (TRAV13-1, TRAJ39)
CSKYSNAGNMLTF

SEQ ID NO: 522212 - protein, 16 aa, Homo sapiens
  CDR3 for beta chain variable domain of TCR clone 261106 (TRBV20-1, TRBJ1-4)
CTAPGQGLLTNEKLFF

SEQ ID NO: 522213 - protein, 13 aa, Homo sapiens
  CDR3 for alpha chain variable domain of TCR clone 261107 (TRAV12-1, TRAJ29)
CVVNGPGNTPLVF

SEQ ID NO: 522214 - protein, 14 aa, Homo sapiens
  CDR3 for beta chain variable domain of TCR clone 261107 (TRBV20-1, TRBJ2-5)
CSAHRQGLWETQYF

SEQ ID NO: 522215 - protein, 11 aa, Homo sapiens
  CDR3 for alpha chain variable domain of TCR clone 261108 (TRAV12-3, TRAJ49)
CAMSSGNEFYF

SEQ ID NO: 522216 - protein, 17 aa, Homo sapiens
  CDR3 for beta chain variable domain of TCR clone 261108 (TRBV5-7, TRBJ2-7)
CASSLWRVLAGSYEQYF

SEQ ID NO: 522217 - protein, 12 aa, Homo sapiens
  CDR3 for alpha chain variable domain of TCR clone 261109 (TRAV12-3, TRAJ17)
CAMTLTGNKLTL

SEQ ID NO: 522218 - protein, 15 aa, Homo sapiens
  CDR3 for beta chain variable domain of TCR clone 261109 (TRBV20-1, TRBJ2-7)
CSARDRVSGMAEQYF

SEQ ID NO: 522219 - protein, 14 aa, Homo sapiens
  CDR3 for alpha chain variable domain of TCR clone 261110 (TRAV17, TRAJ22)
CATSPSGSARQLTF

SEQ ID NO: 522220 - protein, 15 aa, Homo sapiens
  CDR3 for beta chain variable domain of TCR clone 261110 (TRBV7-2, TRBJ2-7)
CASSLKGALTYEQYF

SEQ ID NO: 522221 - protein, 13 aa, Homo sapiens
  CDR3 for alpha chain variable domain of TCR clone 261111 (TRAV2, TRAJ40)
CAVVTSGTSTYIF

SEQ ID NO: 522222 - protein, 14 aa, Homo sapiens
  CDR3 for beta chain variable domain of TCR clone 261111 (TRBV19, TRBJ2-1)
CASPTFVLSGEQFF

SEQ ID NO: 522223 - protein, 14 aa, Homo sapiens
  CDR3 for alpha chain variable domain of TCR clone 261112 (TRAV17, TRAJ57)
CATDPQGGSEKLAF

SEQ ID NO: 522224 - protein, 15 aa, Homo sapiens
  CDR3 for beta chain variable domain of TCR clone 261112 (TRBV5-1, TRBJ2-7)
CASSLDLTSSYEQYF

SEQ ID NO: 522225 - protein, 17 aa, Homo sapiens
  CDR3 for alpha chain variable domain of TCR clone 261113 (TRAV26-1, TRAJ36)
CIVRPPGDQTGANNLFF

SEQ ID NO: 522226 - protein, 15 aa, Homo sapiens
  CDR3 for beta chain variable domain of TCR clone 261113 (TRBV20-1, TRBJ2-7)
CSARDRVSGMDEQYF

SEQ ID NO: 522227 - protein, 19 aa, Homo sapiens
  CDR3 for alpha chain variable domain of TCR clone 261114 (TRAV1-1, TRAJ37)
CLLLLRCERSGSNTGKLIF

SEQ ID NO: 522228 - protein, 12 aa, Homo sapiens
  CDR3 for beta chain variable domain of TCR clone 261114 (TRBV12-4, TRBJ2-7)
CASSLGGYEQYF

SEQ ID NO: 522229 - protein, 15 aa, Homo sapiens
  CDR3 for alpha chain variable domain of TCR clone 261115 (TRAV4, TRAJ39)
CLVGPNNNAGNMFTF

SEQ ID NO: 522230 - protein, 14 aa, Homo sapiens
  CDR3 for beta chain variable domain of TCR clone 261115 (TRBV19, TRBJ2-1)
CASPTFVLSGEQFF

SEQ ID NO: 522231 - protein, 14 aa, Homo sapiens
  CDR3 for alpha chain variable domain of TCR clone 261116 (TRAV3, TRAJ7)
CAVREEEREQQSRF

SEQ ID NO: 522232 - protein, 15 aa, Homo sapiens
  CDR3 for beta chain variable domain of TCR clone 261116 (TRBV20-1, TRBJ1-5)
CSAFKNGQRNQPQHF

SEQ ID NO: 522233 - protein, 14 aa, Homo sapiens
  CDR3 for alpha chain variable domain of TCR clone 261117 (TRAV1-2, TRAJ16)
CAVNRCSDGQKLLF

SEQ ID NO: 522234 - protein, 14 aa, Homo sapiens
  CDR3 for beta chain variable domain of TCR clone 261117 (TRBV4-2, TRBJ2-1)
CASGLDRAYNEQFF

SEQ ID NO: 522235 - protein, 12 aa, Homo sapiens
  CDR3 for alpha chain variable domain of TCR clone 261118 (TRAV2, TRAJ3)
CAVRSSASKIIF

SEQ ID NO: 522236 - protein, 11 aa, Homo sapiens
  CDR3 for beta chain variable domain of TCR clone 261118 (TRBV29-1, TRBJ2-5)
CSEDRTGTQYF

SEQ ID NO: 522237 - protein, 13 aa, Homo sapiens
  CDR3 for alpha chain variable domain of TCR clone 261119 (TRAV27, TRAJ6)
CAGGTRGSYIPTF

SEQ ID NO: 522238 - protein, 17 aa, Homo sapiens
  CDR3 for beta chain variable domain of TCR clone 261119 (TRBV4-2, TRBJ1-1)
CASTQFGGGSGNTEAFF

SEQ ID NO: 522239 - protein, 14 aa, Homo sapiens
  CDR3 for alpha chain variable domain of TCR clone 261120 (TRAV23/DV6, TRAJ4)
CAAPSSGGYNKLIF

SEQ ID NO: 522240 - protein, 16 aa, Homo sapiens
  CDR3 for beta chain variable domain of TCR clone 261120 (TRBV19, TRBJ1-1)
CASRFGGPVTGTEAVF

SEQ ID NO: 522241 - protein, 12 aa, Homo sapiens
  CDR3 for alpha chain variable domain of TCR clone 261121 (TRAV1-1, TRAJ30)
CAVRGRDDKIIF

SEQ ID NO: 522242 - protein, 14 aa, Homo sapiens
  CDR3 for beta chain variable domain of TCR clone 261121 (TRBV12-4, TRBJ2-1)
CASSWGHSVDEQFF

SEQ ID NO: 522243 - protein, 12 aa, Homo sapiens
  CDR3 for alpha chain variable domain of TCR clone 261122 (TRAV12-3, TRAJ17)
CAMTLTGNKLTF

SEQ ID NO: 522244 - protein, 13 aa, Homo sapiens
  CDR3 for beta chain variable domain of TCR clone 261122 (TRBV7-9, TRBJ1-2)
CASSLKQKYGYPF

SEQ ID NO: 522245 - protein, 12 aa, Homo sapiens
  CDR3 for alpha chain variable domain of TCR clone 261123 (TRAV1-2, TRAJ26)
CAVRYYGQNFVF

SEQ ID NO: 522246 - protein, 14 aa, Homo sapiens
  CDR3 for beta chain variable domain of TCR clone 261123 (TRBV11-1, TRBJ2-7)
CASSCRQGSYEQYF

SEQ ID NO: 522247 - protein, 15 aa, Homo sapiens
  CDR3 for alpha chain variable domain of TCR clone 261124 (TRAV27, TRAJ38)
CAGRVNAGNNRKLIW

SEQ ID NO: 522248 - protein, 13 aa, Homo sapiens
  CDR3 for beta chain variable domain of TCR clone 261124 (TRBV7-9, TRBJ1-2)
CASSPSNFWGYTF

SEQ ID NO: 522249 - protein, 14 aa, Homo sapiens
  CDR3 for alpha chain variable domain of TCR clone 261125 (TRAV2, TRAJ9)
CAVEDRSGGFKTIF

SEQ ID NO: 522250 - protein, 14 aa, Homo sapiens
  CDR3 for beta chain variable domain of TCR clone 261125 (TRBV7-8, TRBJ2-7)
CASSPGLADYEQYF

SEQ ID NO: 522251 - protein, 17 aa, Homo sapiens
  CDR3 for alpha chain variable domain of TCR clone 261126 (TRAV35, TRAJ38)
CAGQLQRNAGNNRKLIW

SEQ ID NO: 522252 - protein, 15 aa, Homo sapiens
  CDR3 for beta chain variable domain of TCR clone 261126 (TRBV7-9, TRBJ2-1)
CASSLGLAGGTKQFF

SEQ ID NO: 522253 - protein, 11 aa, Homo sapiens
  CDR3 for alpha chain variable domain of TCR clone 261127 (TRAV12-1, TRAJ40)
CVVPGTYKYIF

SEQ ID NO: 522254 - protein, 15 aa, Homo sapiens
  CDR3 for beta chain variable domain of TCR clone 261127 (TRBV4-1, TRBJ1-4)
CASSDTGGTNEKLFF

SEQ ID NO: 522255 - protein, 11 aa, Homo sapiens
  CDR3 for alpha chain variable domain of TCR clone 261128 (TRAV12-2, TRAJ43)
CAAYNNNDMRF

SEQ ID NO: 522256 - protein, 14 aa, Homo sapiens
  CDR3 for beta chain variable domain of TCR clone 261128 (TRBV7-9, TRBJ2-1)
CASSPRDSLYEQFF

SEQ ID NO: 522257 - protein, 11 aa, Homo sapiens
  CDR3 for alpha chain variable domain of TCR clone 261129 (TRAV3, TRAJ21)
CAVCNFNKFYF

SEQ ID NO: 522258 - protein, 17 aa, Homo sapiens
  CDR3 for beta chain variable domain of TCR clone 261129 (TRBV20-1, TRBJ2-1)
CSASSSGLAGSYNEQFF

SEQ ID NO: 522259 - protein, 12 aa, Homo sapiens
  CDR3 for alpha chain variable domain of TCR clone 261130 (TRAV3, TRAJ26)
CAVRDYGQNVVF

SEQ ID NO: 522260 - protein, 16 aa, Homo sapiens
  CDR3 for beta chain variable domain of TCR clone 261130 (TRBV11-2, TRBJ1-2)
CAGSPSGREANYGYTF

SEQ ID NO: 522261 - protein, 15 aa, Homo sapiens
  CDR3 for alpha chain variable domain of TCR clone 261131 (TRAV27, TRAJ38)
CAARRNAGNNRKLIW

SEQ ID NO: 522262 - protein, 15 aa, Homo sapiens
  CDR3 for beta chain variable domain of TCR clone 261131 (TRBV12-5, TRBJ2-3)
CIFVLVVIDSDTQYF

SEQ ID NO: 522263 - protein, 11 aa, Homo sapiens
  CDR3 for alpha chain variable domain of TCR clone 261132 (TRAV13-1, TRAJ5)
SAPKGRRALTF

SEQ ID NO: 522264 - protein, 15 aa, Homo sapiens
  CDR3 for beta chain variable domain of TCR clone 261132 (TRBV11-2, TRBJ1-1)
CASSSRSSLLLSLDK

SEQ ID NO: 522265 - protein, 13 aa, Homo sapiens
  CDR3 for alpha chain variable domain of TCR clone 261133 (TRAV21, TRAJ27)
CAARPGNAGKSTF

SEQ ID NO: 522266 - protein, 12 aa, Homo sapiens
  CDR3 for beta chain variable domain of TCR clone 261133 (TRBV12-4, TRBJ2-1)
CASSLQGSEQFF

SEQ ID NO: 522267 - protein, 13 aa, Homo sapiens
  CDR3 for alpha chain variable domain of TCR clone 261134 (TRAV21, TRAJ15)
CAVRNQAGTALIF

SEQ ID NO: 522268 - protein, 13 aa, Homo sapiens
  CDR3 for beta chain variable domain of TCR clone 261134 (TRBV3-1, TRBJ1-1)
CASSPGVITEAFF

SEQ ID NO: 522269 - protein, 16 aa, Homo sapiens
  CDR3 for alpha chain variable domain of TCR clone 261135 (TRAV12-2, TRAJ45)
CAVNRGSGGGADGLTL

SEQ ID NO: 522270 - protein, 14 aa, Homo sapiens
  CDR3 for beta chain variable domain of TCR clone 261135 (TRBV23-1, TRBJ2-2)
EDRGVEKDTGELFF

SEQ ID NO: 522271 - protein, 15 aa, Homo sapiens
  CDR3 for alpha chain variable domain of TCR clone 261136 (TRAV17, TRAJ57)
CATGPSQGGSEKLVF

SEQ ID NO: 522272 - protein, 15 aa, Homo sapiens
  CDR3 for beta chain variable domain of TCR clone 261136 (TRBV6-3, TRBJ2-7)
CASSSPGTVFYEQYY

SEQ ID NO: 522273 - protein, 15 aa, Homo sapiens
  CDR3 for alpha chain variable domain of TCR clone 261137 (TRAV12-1, TRAJ44)
CVVFVNTGTASKLTF

SEQ ID NO: 522274 - protein, 18 aa, Homo sapiens
  CDR3 for beta chain variable domain of TCR clone 261137 (TRBV28, TRBJ2-1)
CASSSTSGRANSYNEQFF

SEQ ID NO: 522275 - protein, 12 aa, Homo sapiens
  CDR3 for alpha chain variable domain of TCR clone 261138 (TRAV3, TRAJ31)
SAVRDGNARLMF

SEQ ID NO: 522276 - protein, 18 aa, Homo sapiens
  CDR3 for beta chain variable domain of TCR clone 261138 (TRBV7-2, TRBJ2-3)
CASSLKREGSGITDTQYF

SEQ ID NO: 522277 - protein, 15 aa, Homo sapiens
  CDR3 for alpha chain variable domain of TCR clone 261139 (TRAV17, TRAJ57)
CATGPSQGGSEKLVF

SEQ ID NO: 522278 - protein, 17 aa, Homo sapiens
  CDR3 for beta chain variable domain of TCR clone 261139 (TRBV20-1, TRBJ2-1)
CSASSSGLAGSYNEQVF

SEQ ID NO: 522279 - protein, 13 aa, Homo sapiens
  CDR3 for alpha chain variable domain of TCR clone 261140 (TRAV8-6, TRAJ16)
CAVSSPNGQKLLF

SEQ ID NO: 522280 - protein, 16 aa, Homo sapiens
  CDR3 for beta chain variable domain of TCR clone 261140 (TRBV5-7, TRBJ2-3)
CASSSLGGAITDTQYF

SEQ ID NO: 522281 - protein, 15 aa, Homo sapiens
  CDR3 for alpha chain variable domain of TCR clone 261141 (TRAV3, TRAJ22)
CAVRDRGGSARQLTF

SEQ ID NO: 522282 - protein, 14 aa, Homo sapiens
  CDR3 for beta chain variable domain of TCR clone 261141 (TRBV7-9, TRBJ1-2)
CASSRQGANYGYTF

SEQ ID NO: 522283 - protein, 14 aa, Homo sapiens
  CDR3 for alpha chain variable domain of TCR clone 261142 (TRAV1-2, TRAJ8)
CAVREDTGFQKLVF

SEQ ID NO: 522284 - protein, 14 aa, Homo sapiens
  CDR3 for beta chain variable domain of TCR clone 261142 (TRBV4-2, TRBJ1-2)
CASSQDRREGGYTF

SEQ ID NO: 522285 - protein, 14 aa, Homo sapiens
  CDR3 for alpha chain variable domain of TCR clone 261143 (TRAV20, TRAJ42)
CAVQAGGSQGNLIF

SEQ ID NO: 522286 - protein, 14 aa, Homo sapiens
  CDR3 for beta chain variable domain of TCR clone 261143 (TRBV28, TRBJ1-2)
CASRIQRANYGYTF

SEQ ID NO: 522287 - protein, 14 aa, Homo sapiens
  CDR3 for alpha chain variable domain of TCR clone 261144 (TRAV12-2, TRAJ13)
CAVKKTGGSQKVTF

SEQ ID NO: 522288 - protein, 13 aa, Homo sapiens
  CDR3 for beta chain variable domain of TCR clone 261144 (TRBV10-3, TRBJ2-7)
CASKLAVNYEQYF

SEQ ID NO: 522289 - protein, 16 aa, Homo sapiens
  CDR3 for alpha chain variable domain of TCR clone 261145 (TRAV3, TRAJ37)
CAVRPHGSGNTGTLIF

SEQ ID NO: 522290 - protein, 16 aa, Homo sapiens
  CDR3 for beta chain variable domain of TCR clone 261145 (TRBV28, TRBJ1-4)
CASSSRTGAANEKLFF

SEQ ID NO: 522291 - protein, 13 aa, Homo sapiens
  CDR3 for alpha chain variable domain of TCR clone 261146 (TRAV23/DV6, TRAJ35)
CAAQLGFGHVLHC

SEQ ID NO: 522292 - protein, 15 aa, Homo sapiens
  CDR3 for beta chain variable domain of TCR clone 261146 (TRBV27, TRBJ2-2)
CASSKQGASTGELFF

SEQ ID NO: 522293 - protein, 10 aa, Homo sapiens
  CDR3 for alpha chain variable domain of TCR clone 261147 (TRAV30, TRAJ16)
CGTGGQKLLF

SEQ ID NO: 522294 - protein, 17 aa, Homo sapiens
  CDR3 for beta chain variable domain of TCR clone 261147 (TRBV7-8, TRBJ2-6)
CASSAGTGGAGANVLTF

SEQ ID NO: 522295 - protein, 18 aa, Homo sapiens
  CDR3 for alpha chain variable domain of TCR clone 261148 (TRAV12-3, TRAJ52)
CAMSVGGAGGTSYGKLTF

SEQ ID NO: 522296 - protein, 16 aa, Homo sapiens
  CDR3 for beta chain variable domain of TCR clone 261148 (TRBV4-2, TRBJ1-1)
CASSQAGFGMNTEAFF

SEQ ID NO: 522297 - protein, 12 aa, Homo sapiens
  CDR3 for alpha chain variable domain of TCR clone 261149 (TRAV25, TRAJ20)
CAGSSNDYKLSF

SEQ ID NO: 522298 - protein, 12 aa, Homo sapiens
  CDR3 for beta chain variable domain of TCR clone 261149 (TRBV5-4, TRBJ2-7)
CASSPRTDEQYF

SEQ ID NO: 522299 - protein, 19 aa, Homo sapiens
  CDR3 for alpha chain variable domain of TCR clone 261150 (TRAV26-1, TRAJ28)
CIVRVAHAYSGAGSYQLTF

SEQ ID NO: 522300 - protein, 20 aa, Homo sapiens
  CDR3 for beta chain variable domain of TCR clone 261150 (TRBV19, TRBJ2-1)
CASSISRTVTSTRLNNEQFF

SEQ ID NO: 522301 - protein, 13 aa, Homo sapiens
  CDR3 for alpha chain variable domain of TCR clone 261151 (TRAV12-3, TRAJ33)
CAMSVNSNYQLIW

SEQ ID NO: 522302 - protein, 18 aa, Homo sapiens
  CDR3 for beta chain variable domain of TCR clone 261151 (TRBV11-2, TRBJ2-3)
CASRLGGASRGAPNTQYF

SEQ ID NO: 522303 - protein, 16 aa, Homo sapiens
  CDR3 for alpha chain variable domain of TCR clone 261152 (TRAV13-2, TRAJ32)
CAENMNYGGATNKLIF

SEQ ID NO: 522304 - protein, 14 aa, Homo sapiens
  CDR3 for beta chain variable domain of TCR clone 261152 (TRBV15, TRBJ2-5)
CATSSTGYQETQNF

SEQ ID NO: 522305 - protein, 12 aa, Homo sapiens
  CDR3 for alpha chain variable domain of TCR clone 261153 (TRAV21, TRAJ58)
CAAETSCSRLTF

SEQ ID NO: 522306 - protein, 15 aa, Homo sapiens
  CDR3 for beta chain variable domain of TCR clone 261153 (TRBV20-1, TRBJ2-7)
CSARDPVKGEGEQYF

SEQ ID NO: 522307 - protein, 13 aa, Homo sapiens
  CDR3 for alpha chain variable domain of TCR clone 261154 (TRAV1-2, TRAJ29)
TSVVPSGNTPLVF

SEQ ID NO: 522308 - protein, 12 aa, Homo sapiens
  CDR3 for beta chain variable domain of TCR clone 261154 (TRBV12-4, TRBJ2-7)
CASSLGGYEQYF

SEQ ID NO: 522309 - protein, 13 aa, Homo sapiens
  CDR3 for alpha chain variable domain of TCR clone 261155 (TRAV12-2, TRAJ38)
CAVNAGNNRKLIW

SEQ ID NO: 522310 - protein, 13 aa, Homo sapiens
  CDR3 for beta chain variable domain of TCR clone 261155 (TRBV5-5, TRBJ1-2)
CASSFWRGEDYTF

SEQ ID NO: 522311 - protein, 14 aa, Homo sapiens
  CDR3 for alpha chain variable domain of TCR clone 261156 (TRAV12-1, TRAJ45)
CVVNIGGGADGLTF

SEQ ID NO: 522312 - protein, 13 aa, Homo sapiens
  CDR3 for beta chain variable domain of TCR clone 261156 (TRBV12-4, TRBJ1-2)
CASSLRQGKGYTF

SEQ ID NO: 522313 - protein, 14 aa, Homo sapiens
  CDR3 for alpha chain variable domain of TCR clone 261157 (TRAV12-2, TRAJ5)
CAVNRSTGRRALTF

SEQ ID NO: 522314 - protein, 15 aa, Homo sapiens
  CDR3 for beta chain variable domain of TCR clone 261157 (TRBV4-1, TRBJ2-5)
CASSQWDLYQETQYF

SEQ ID NO: 522315 - protein, 12 aa, Homo sapiens
  CDR3 for alpha chain variable domain of TCR clone 261158 (TRAV13-1, TRAJ5)
CAVDTGRRALTF

SEQ ID NO: 522316 - protein, 13 aa, Homo sapiens
  CDR3 for beta chain variable domain of TCR clone 261158 (TRBV7-2, TRBJ1-4)
CASSLAGLEKLFF

SEQ ID NO: 522317 - protein, 13 aa, Homo sapiens
  CDR3 for alpha chain variable domain of TCR clone 261159 (TRAV12-2, TRAJ10)
CAVPTGGGNNLTF

SEQ ID NO: 522318 - protein, 11 aa, Homo sapiens
  CDR3 for beta chain variable domain of TCR clone 261159 (TRBV6-1, TRBJ2-1)
CASISSNEQFF

SEQ ID NO: 522319 - protein, 15 aa, Homo sapiens
  CDR3 for alpha chain variable domain of TCR clone 261160 (TRAV3, TRAJ30)
CAVRDEYGGDDKSIF

SEQ ID NO: 522320 - protein, 16 aa, Homo sapiens
  CDR3 for beta chain variable domain of TCR clone 261160 (TRBV5-1, TRBJ2-5)
CASSLANHRGRETQYF

SEQ ID NO: 522321 - protein, 10 aa, Homo sapiens
  CDR3 for alpha chain variable domain of TCR clone 261161 (TRAV16, TRAJ22)
SAMYLRLLTF

SEQ ID NO: 522322 - protein, 15 aa, Homo sapiens
  CDR3 for beta chain variable domain of TCR clone 261161 (TRBV7-9, TRBJ1-6)
CASSSPGRGNSPLHF

SEQ ID NO: 522323 - protein, 13 aa, Homo sapiens
  CDR3 for alpha chain variable domain of TCR clone 261162 (TRAV8-3, TRAJ36)
CAVGATGANNLFF

SEQ ID NO: 522324 - protein, 15 aa, Homo sapiens
  CDR3 for beta chain variable domain of TCR clone 261162 (TRBV7-2, TRBJ1-2)
CAGSPRAGWYYGYTF

SEQ ID NO: 522325 - protein, 12 aa, Homo sapiens
  CDR3 for alpha chain variable domain of TCR clone 261163 (TRAV12-3, TRAJ20)
CAMVRGDYKLSF

SEQ ID NO: 522326 - protein, 13 aa, Homo sapiens
  CDR3 for beta chain variable domain of TCR clone 261163 (TRBV4-1, TRBJ2-2)
CASSQENTGELFF

SEQ ID NO: 522327 - protein, 14 aa, Homo sapiens
  CDR3 for alpha chain variable domain of TCR clone 261164 (TRAV1-2, TRAJ8)
CAVREATGFQKLVF

SEQ ID NO: 522328 - protein, 14 aa, Homo sapiens
  CDR3 for beta chain variable domain of TCR clone 261164 (TRBV7-6, TRBJ2-3)
CASSLGTVTDTQYF

SEQ ID NO: 522329 - protein, 14 aa, Homo sapiens
  CDR3 for alpha chain variable domain of TCR clone 261165 (TRAV1-2, TRAJ16)
CAVNRFSDDQKLLF

SEQ ID NO: 522330 - protein, 13 aa, Homo sapiens
  CDR3 for beta chain variable domain of TCR clone 261165 (TRBV29-1, TRBJ1-1)
CSVGDSRNTEAFF

SEQ ID NO: 522331 - protein, 10 aa, Homo sapiens
  CDR3 for alpha chain variable domain of TCR clone 261166 (TRAV24, TRAJ23)
CAFLGGKLIF

SEQ ID NO: 522332 - protein, 15 aa, Homo sapiens
  CDR3 for beta chain variable domain of TCR clone 261166 (TRBV7-2, TRBJ2-1)
CASSLASGRVNEQFF

SEQ ID NO: 522333 - protein, 13 aa, Homo sapiens
  CDR3 for alpha chain variable domain of TCR clone 261167 (TRAV12-1, TRAJ26)
CVVRRNYGQNFVF

SEQ ID NO: 522334 - protein, 16 aa, Homo sapiens
  CDR3 for beta chain variable domain of TCR clone 261167 (TRBV2, TRBJ1-5)
CASSESPQGLNQPQHF

SEQ ID NO: 522335 - protein, 14 aa, Homo sapiens
  CDR3 for alpha chain variable domain of TCR clone 261168 (TRAV6, TRAJ39)
CALPNNNAGNMLTF

SEQ ID NO: 522336 - protein, 13 aa, Homo sapiens
  CDR3 for beta chain variable domain of TCR clone 261168 (TRBV7-9, TRBJ1-2)
CASSLKQNYGYTF

SEQ ID NO: 522337 - protein, 16 aa, Homo sapiens
  CDR3 for alpha chain variable domain of TCR clone 261169 (TRAV12-1, TRAJ4)
CVVRRLPAGGYNKLIF

SEQ ID NO: 522338 - protein, 15 aa, Homo sapiens
  CDR3 for beta chain variable domain of TCR clone 261169 (TRBV6-3, TRBJ2-2)
CASSFLATLTGELFF

SEQ ID NO: 522339 - protein, 11 aa, Homo sapiens
  CDR3 for alpha chain variable domain of TCR clone 261170 (TRAV21, TRAJ39)
LLVNAGNMLTF

SEQ ID NO: 522340 - protein, 20 aa, Homo sapiens
  CDR3 for beta chain variable domain of TCR clone 261170 (TRBV19, TRBJ2-1)
CASSISRTVTSTRLNNEQFF

SEQ ID NO: 522341 - protein, 13 aa, Homo sapiens
  CDR3 for alpha chain variable domain of TCR clone 261171 (TRAV1-2, TRAJ26)
CAVRPNYGQNFVF

SEQ ID NO: 522342 - protein, 14 aa, Homo sapiens
  CDR3 for beta chain variable domain of TCR clone 261171 (TRBV4-1, TRBJ2-5)
CASSQDLALEAQYF

SEQ ID NO: 522343 - protein, 14 aa, Homo sapiens
  CDR3 for alpha chain variable domain of TCR clone 261172 (TRAV12-2, TRAJ54)
CAVNRRQGAQKLVF

SEQ ID NO: 522344 - protein, 17 aa, Homo sapiens
  CDR3 for beta chain variable domain of TCR clone 261172 (TRBV4-1, TRBJ1-4)
CASSQEGPRGVEEKLFF

SEQ ID NO: 522345 - protein, 14 aa, Homo sapiens
  CDR3 for alpha chain variable domain of TCR clone 261173 (TRAV1-2, TRAJ16)
CAVNRFSDAQKLLF

SEQ ID NO: 522346 - protein, 14 aa, Homo sapiens
  CDR3 for beta chain variable domain of TCR clone 261173 (TRBV13, TRBJ2-5)
CASSLGRGRETQYF

SEQ ID NO: 522347 - protein, 14 aa, Homo sapiens
  CDR3 for alpha chain variable domain of TCR clone 261174 (TRAV1-2, TRAJ16)
CAVNRFSDGQKLLF

SEQ ID NO: 522348 - protein, 14 aa, Homo sapiens
  CDR3 for beta chain variable domain of TCR clone 261174 (TRBV6-1, TRBJ2-2)
CASTWQGNTGELVF

SEQ ID NO: 522349 - protein, 14 aa, Homo sapiens
  CDR3 for alpha chain variable domain of TCR clone 261175 (TRAV29/DV5, TRAJ32)
CAASQGGATNKLIF

SEQ ID NO: 522350 - protein, 17 aa, Homo sapiens
  CDR3 for beta chain variable domain of TCR clone 261175 (TRBV20-1, TRBJ2-2)
CSASGSGQGGLTGELFF

SEQ ID NO: 522351 - protein, 14 aa, Homo sapiens
  CDR3 for alpha chain variable domain of TCR clone 261176 (TRAV2, TRAJ21)
CAVEDLNNFNKFYF

SEQ ID NO: 522352 - protein, 11 aa, Homo sapiens
  CDR3 for beta chain variable domain of TCR clone 261176 (TRBV10-3, TRBJ2-1)
CAISDRGLQFF

SEQ ID NO: 522353 - protein, 13 aa, Homo sapiens
  CDR3 for alpha chain variable domain of TCR clone 261177 (TRAV2, TRAJ23)
CAVMGNQGGKLIF

SEQ ID NO: 522354 - protein, 15 aa, Homo sapiens
  CDR3 for beta chain variable domain of TCR clone 261177 (TRBV5-1, TRBJ2-1)
CASSPPRAPYNEQFF

SEQ ID NO: 522355 - protein, 16 aa, Homo sapiens
  CDR3 for alpha chain variable domain of TCR clone 261178 (TRAV16, TRAJ57)
CAPYLITQGGSEKLVF

SEQ ID NO: 522356 - protein, 17 aa, Homo sapiens
  CDR3 for beta chain variable domain of TCR clone 261178 (TRBV24-1, TRBJ2-4)
CATIDAEARGVRNIQYF

SEQ ID NO: 522357 - protein, 12 aa, Homo sapiens
  CDR3 for alpha chain variable domain of TCR clone 261179 (TRAV13-1, TRAJ21)
CAAREGFNKFYF

SEQ ID NO: 522358 - protein, 14 aa, Homo sapiens
  CDR3 for beta chain variable domain of TCR clone 261179 (TRBV18, TRBJ2-7)
CASSPRGGAYEQYF

SEQ ID NO: 522359 - protein, 17 aa, Homo sapiens
  CDR3 for alpha chain variable domain of TCR clone 261180 (TRAV26-1, TRAJ53)
CIVRVDDSGGSNYKLTF

SEQ ID NO: 522360 - protein, 12 aa, Homo sapiens
  CDR3 for beta chain variable domain of TCR clone 261180 (TRBV14, TRBJ2-7)
CASSRLKGEQYF

SEQ ID NO: 522361 - protein, 10 aa, Homo sapiens
  CDR3 for alpha chain variable domain of TCR clone 261181 (TRAV13-1, TRAJ7)
LIGGNNRLAF

SEQ ID NO: 522362 - protein, 16 aa, Homo sapiens
  CDR3 for beta chain variable domain of TCR clone 261181 (TRBV4-1, TRBJ1-2)
CASSQDAGQVLYGYSF

SEQ ID NO: 522363 - protein, 16 aa, Homo sapiens
  CDR3 for alpha chain variable domain of TCR clone 261182 (TRAV3, TRAJ21)
CAVRDSERGNFNKFYF

SEQ ID NO: 522364 - protein, 13 aa, Homo sapiens
  CDR3 for beta chain variable domain of TCR clone 261182 (TRBV27, TRBJ2-7)
CASSLTTGYEQYF

SEQ ID NO: 522365 - protein, 13 aa, Homo sapiens
  CDR3 for alpha chain variable domain of TCR clone 261183 (TRAV21, TRAJ27)
CAARPGNAGKSTF

SEQ ID NO: 522366 - protein, 18 aa, Homo sapiens
  CDR3 for beta chain variable domain of TCR clone 261183 (TRBV11-2, TRBJ2-4)
CASSQEGRGAWTFSTSAP

SEQ ID NO: 522367 - protein, 10 aa, Homo sapiens
  CDR3 for alpha chain variable domain of TCR clone 261184 (TRAV2, TRAJ34)
CAVVNDKLIF

SEQ ID NO: 522368 - protein, 14 aa, Homo sapiens
  CDR3 for beta chain variable domain of TCR clone 261184 (TRBV12-5, TRBJ2-5)
CASGSRTHQETQYF

SEQ ID NO: 522369 - protein, 15 aa, Homo sapiens
  CDR3 for alpha chain variable domain of TCR clone 261185 (TRAV26-1, TRAJ44)
CIVRATTGTASKLPF

SEQ ID NO: 522370 - protein, 16 aa, Homo sapiens
  CDR3 for beta chain variable domain of TCR clone 261185 (TRBV7-7, TRBJ2-1)
CASSLASGTSYNEQFF

SEQ ID NO: 522371 - protein, 13 aa, Homo sapiens
  CDR3 for alpha chain variable domain of TCR clone 261186 (TRAV16, TRAJ47)
CALSRGYGNKLVF

SEQ ID NO: 522372 - protein, 16 aa, Homo sapiens
  CDR3 for beta chain variable domain of TCR clone 261186 (TRBV4-1, TRBJ2-7)
CASSQNDRDNSYEQYF

SEQ ID NO: 522373 - protein, 12 aa, Homo sapiens
  CDR3 for alpha chain variable domain of TCR clone 261187 (TRAV21, TRAJ56)
CAVGVNRSKLTF

SEQ ID NO: 522374 - protein, 12 aa, Homo sapiens
  CDR3 for beta chain variable domain of TCR clone 261187 (TRBV11-2, TRBJ2-7)
CASSPPAYEQYF

SEQ ID NO: 522375 - protein, 17 aa, Homo sapiens
  CDR3 for alpha chain variable domain of TCR clone 261188 (TRAV20, TRAJ45)
CAVQAPDSGGGADGLTF

SEQ ID NO: 522376 - protein, 15 aa, Homo sapiens
  CDR3 for beta chain variable domain of TCR clone 261188 (TRBV7-2, TRBJ2-2)
CASRRPGQNTGEPFF

SEQ ID NO: 522377 - protein, 16 aa, Homo sapiens
  CDR3 for alpha chain variable domain of TCR clone 261189 (TRAV30, TRAJ24)
CGTEIVDADSWGKFQF

SEQ ID NO: 522378 - protein, 15 aa, Homo sapiens
  CDR3 for beta chain variable domain of TCR clone 261189 (TRBV4-1, TRBJ1-4)
CASSDTGGTNENLFF

SEQ ID NO: 522379 - protein, 14 aa, Homo sapiens
  CDR3 for alpha chain variable domain of TCR clone 261190 (TRAV29/DV5, TRAJ37)
CAASGSGNTGKLIF

SEQ ID NO: 522380 - protein, 17 aa, Homo sapiens
  CDR3 for beta chain variable domain of TCR clone 261190 (TRBV4-1, TRBJ2-7)
CASSPFLTSGWVVEQYF

SEQ ID NO: 522381 - protein, 16 aa, Homo sapiens
  CDR3 for alpha chain variable domain of TCR clone 261191 (TRAV26-1, TRAJ32)
CIVRTNYGGATNKLIF

SEQ ID NO: 522382 - protein, 16 aa, Homo sapiens
  CDR3 for beta chain variable domain of TCR clone 261191 (TRBV15, TRBJ2-6)
CATSVNGGFLANVLTF

SEQ ID NO: 522383 - protein, 13 aa, Homo sapiens
  CDR3 for alpha chain variable domain of TCR clone 261192 (TRAV21, TRAJ20)
CAVGLRVDYKLRF

SEQ ID NO: 522384 - protein, 15 aa, Homo sapiens
  CDR3 for beta chain variable domain of TCR clone 261192 (TRBV19, TRBJ1-2)
CASNLGGETPYGYTF

SEQ ID NO: 522385 - protein, 13 aa, Homo sapiens
  CDR3 for alpha chain variable domain of TCR clone 261193 (TRAV12-2, TRAJ10)
CAVPTGGGNKFTF

SEQ ID NO: 522386 - protein, 11 aa, Homo sapiens
  CDR3 for beta chain variable domain of TCR clone 261193 (TRBV6-1, TRBJ2-1)
CASISSNEQFF

SEQ ID NO: 522387 - protein, 12 aa, Homo sapiens
  CDR3 for alpha chain variable domain of TCR clone 261194 (TRAV17, TRAJ29)
CYASSGNTPLVF

SEQ ID NO: 522388 - protein, 17 aa, Homo sapiens
  CDR3 for beta chain variable domain of TCR clone 261194 (TRBV13, TRBJ2-3)
CASSLSRVAGGRNTQYF

SEQ ID NO: 522389 - protein, 16 aa, Homo sapiens
  CDR3 for alpha chain variable domain of TCR clone 261195 (TRAV3, TRAJ37)
CAVRGKGSGNTGKLIF

SEQ ID NO: 522390 - protein, 16 aa, Homo sapiens
  CDR3 for beta chain variable domain of TCR clone 261195 (TRBV12-5, TRBJ2-5)
CASGPRTSGSQDTQYF

SEQ ID NO: 522391 - protein, 13 aa, Homo sapiens
  CDR3 for alpha chain variable domain of TCR clone 261196 (TRAV21, TRAJ20)
CAVGLRVDYKLSF

SEQ ID NO: 522392 - protein, 14 aa, Homo sapiens
  CDR3 for beta chain variable domain of TCR clone 261196 (TRBV7-9, TRBJ2-2)
CASSGLADTGELFF

SEQ ID NO: 522393 - protein, 16 aa, Homo sapiens
  CDR3 for alpha chain variable domain of TCR clone 261197 (TRAV1-2, TRAJ10)
CAVRGVLMGGGNKLTF

SEQ ID NO: 522394 - protein, 12 aa, Homo sapiens
  CDR3 for beta chain variable domain of TCR clone 261197 (TRBV11-2, TRBJ2-1)
CASSPGNNEQFF

SEQ ID NO: 522395 - protein, 14 aa, Homo sapiens
  CDR3 for alpha chain variable domain of TCR clone 261198 (TRAV12-2, TRAJ13)
CAVKKTGGYQKVTF

SEQ ID NO: 522396 - protein, 18 aa, Homo sapiens
  CDR3 for beta chain variable domain of TCR clone 261198 (TRBV3-1, TRBJ2-7)
CASSRISSGGRSSYEQYF

SEQ ID NO: 522397 - protein, 12 aa, Homo sapiens
  CDR3 for alpha chain variable domain of TCR clone 261199 (TRAV12-3, TRAJ17)
CAMALTGNKLTF

SEQ ID NO: 522398 - protein, 15 aa, Homo sapiens
  CDR3 for beta chain variable domain of TCR clone 261199 (TRBV2, TRBJ2-1)
CASSELAGSYNEQFF

SEQ ID NO: 522399 - protein, 12 aa, Homo sapiens
  CDR3 for alpha chain variable domain of TCR clone 261200 (TRAV1-1, TRAJ43)
CAPRVSSNDMRF

SEQ ID NO: 522400 - protein, 14 aa, Homo sapiens
  CDR3 for beta chain variable domain of TCR clone 261200 (TRBV12-4, TRBJ1-1)
CASSLGTGGTEAFF

SEQ ID NO: 522401 - protein, 14 aa, Homo sapiens
  CDR3 for alpha chain variable domain of TCR clone 261201 (TRAV8-1, TRAJ15)
CAVNGQQAGTALIF

SEQ ID NO: 522402 - protein, 17 aa, Homo sapiens
  CDR3 for beta chain variable domain of TCR clone 261201 (TRBV11-2, TRBJ2-1)
CASNLYPPGVEYNEQFF

SEQ ID NO: 522403 - protein, 16 aa, Homo sapiens
  CDR3 for alpha chain variable domain of TCR clone 261202 (TRAV12-1, TRAJ12)
CVVNTLLMDSSYKLIF

SEQ ID NO: 522404 - protein, 16 aa, Homo sapiens
  CDR3 for beta chain variable domain of TCR clone 261202 (TRBV24-1, TRBJ2-3)
CATSDPGTGATDTQYF

SEQ ID NO: 522405 - protein, 14 aa, Homo sapiens
  CDR3 for alpha chain variable domain of TCR clone 261203 (TRAV12-2, TRAJ13)
CAVEKTGGYQKVTF

SEQ ID NO: 522406 - protein, 15 aa, Homo sapiens
  CDR3 for beta chain variable domain of TCR clone 261203 (TRBV6-6, TRBJ1-1)
CASSYPTAMNTEAFF

SEQ ID NO: 522407 - protein, 13 aa, Homo sapiens
  CDR3 for alpha chain variable domain of TCR clone 261204 (TRAV25, TRAJ24)
CAGGTDSWGKFQF

SEQ ID NO: 522408 - protein, 16 aa, Homo sapiens
  CDR3 for beta chain variable domain of TCR clone 261204 (TRBV28, TRBJ2-3)
CASSVFTGVSTDTQYF

SEQ ID NO: 522409 - protein, 17 aa, Homo sapiens
  CDR3 for alpha chain variable domain of TCR clone 261205 (TRAV29/DV5, TRAJ52)
CAASANAGGTSYGKLTF

SEQ ID NO: 522410 - protein, 15 aa, Homo sapiens
  CDR3 for beta chain variable domain of TCR clone 261205 (TRBV7-3, TRBJ2-3)
CANSLTSGVGDTQYF

SEQ ID NO: 522411 - protein, 12 aa, Homo sapiens
  CDR3 for alpha chain variable domain of TCR clone 261206 (TRAV3, TRAJ20)
CAVRDGDYKLSF

SEQ ID NO: 522412 - protein, 13 aa, Homo sapiens
  CDR3 for beta chain variable domain of TCR clone 261206 (TRBV9, TRBJ2-1)
CASSVGQGGEKFF

SEQ ID NO: 522413 - protein, 13 aa, Homo sapiens
  CDR3 for alpha chain variable domain of TCR clone 261207 (TRAV2, TRAJ40)
CAVVTSGTYKYIF

SEQ ID NO: 522414 - protein, 15 aa, Homo sapiens
  CDR3 for beta chain variable domain of TCR clone 261207 (TRBV19, TRBJ2-5)
CASHGLAGAQETQYF

SEQ ID NO: 522415 - protein, 18 aa, Homo sapiens
  CDR3 for alpha chain variable domain of TCR clone 261208 (TRAV12-3, TRAJ52)
CAMSRTNAGGTSYGKLTF

SEQ ID NO: 522416 - protein, 17 aa, Homo sapiens
  CDR3 for beta chain variable domain of TCR clone 261208 (TRBV11-2, TRBJ2-1)
CASSLCPPGVEYNEQFF

SEQ ID NO: 522417 - protein, 12 aa, Homo sapiens
  CDR3 for alpha chain variable domain of TCR clone 261209 (TRAV3, TRAJ20)
CAVRDPDYKLSF

SEQ ID NO: 522418 - protein, 16 aa, Homo sapiens
  CDR3 for beta chain variable domain of TCR clone 261209 (TRBV7-2, TRBJ1-4)
CASSPVGRFDREKLFF

SEQ ID NO: 522419 - protein, 13 aa, Homo sapiens
  CDR3 for alpha chain variable domain of TCR clone 261210 (TRAV23/DV6, TRAJ34)
CAAMENNTDKLIF

SEQ ID NO: 522420 - protein, 13 aa, Homo sapiens
  CDR3 for beta chain variable domain of TCR clone 261210 (TRBV29-1, TRBJ2-7)
CSVGPSGGYEQYF

SEQ ID NO: 522421 - protein, 14 aa, Homo sapiens
  CDR3 for alpha chain variable domain of TCR clone 261211 (TRAV20, TRAJ18)
CAVGRGSTLGRLYF

SEQ ID NO: 522422 - protein, 14 aa, Homo sapiens
  CDR3 for beta chain variable domain of TCR clone 261211 (TRBV28, TRBJ2-4)
CASTQVTGVNNQYF

SEQ ID NO: 522423 - protein, 14 aa, Homo sapiens
  CDR3 for alpha chain variable domain of TCR clone 261212 (TRAV8-4, TRAJ9)
CAVRINTGGFKTIF

SEQ ID NO: 522424 - protein, 15 aa, Homo sapiens
  CDR3 for beta chain variable domain of TCR clone 261212 (TRBV10-2, TRBJ2-6)
CASSEQVTGANVLSF

SEQ ID NO: 522425 - protein, 13 aa, Homo sapiens
  CDR3 for alpha chain variable domain of TCR clone 261213 (TRAV23/DV6, TRAJ22)
CAPYSGSARQLTF

SEQ ID NO: 522426 - protein, 15 aa, Homo sapiens
  CDR3 for beta chain variable domain of TCR clone 261213 (TRBV28, TRBJ2-5)
CASSQTSGSLETQYF

SEQ ID NO: 522427 - protein, 11 aa, Homo sapiens
  CDR3 for alpha chain variable domain of TCR clone 261214 (TRAV21, TRAJ17)
CAAPAGNKLTF

SEQ ID NO: 522428 - protein, 14 aa, Homo sapiens
  CDR3 for beta chain variable domain of TCR clone 261214 (TRBV7-9, TRBJ2-1)
CASSPRDSLYEQFF

SEQ ID NO: 522429 - protein, 12 aa, Homo sapiens
  CDR3 for alpha chain variable domain of TCR clone 261215 (TRAV12-1, TRAJ16)
CVVFRDGQKLLF

SEQ ID NO: 522430 - protein, 15 aa, Homo sapiens
  CDR3 for beta chain variable domain of TCR clone 261215 (TRBV10-2, TRBJ2-6)
CASSEQGTGANVLTF

SEQ ID NO: 522431 - protein, 13 aa, Homo sapiens
  CDR3 for alpha chain variable domain of TCR clone 261216 (TRAV26-2, TRAJ43)
CILRAVNNNDMRF

SEQ ID NO: 522432 - protein, 14 aa, Homo sapiens
  CDR3 for beta chain variable domain of TCR clone 261216 (TRBV19, TRBJ2-1)
CASPTFVLCGEQFF

SEQ ID NO: 522433 - protein, 17 aa, Homo sapiens
  CDR3 for alpha chain variable domain of TCR clone 261217 (TRAV4, TRAJ18)
CLVVAAGRGSTLGRLYF

SEQ ID NO: 522434 - protein, 17 aa, Homo sapiens
  CDR3 for beta chain variable domain of TCR clone 261217 (TRBV28, TRBJ2-2)
CASSLATGMGDAWELFF

SEQ ID NO: 522435 - protein, 15 aa, Homo sapiens
  CDR3 for alpha chain variable domain of TCR clone 261218 (TRAV3, TRAJ37)
CCERKGVWNTGKLIF

SEQ ID NO: 522436 - protein, 15 aa, Homo sapiens
  CDR3 for beta chain variable domain of TCR clone 261218 (TRBV7-3, TRBJ2-2)
CASSETGQGTGELFF

SEQ ID NO: 522437 - protein, 14 aa, Homo sapiens
  CDR3 for alpha chain variable domain of TCR clone 261219 (TRAV8-2, TRAJ11)
CVVSEKSGYSTLTF

SEQ ID NO: 522438 - protein, 14 aa, Homo sapiens
  CDR3 for beta chain variable domain of TCR clone 261219 (TRBV28, TRBJ2-4)
CASTQVTGVNIQYF

SEQ ID NO: 522439 - protein, 17 aa, Homo sapiens
  CDR3 for alpha chain variable domain of TCR clone 261220 (TRAV23/DV6, TRAJ57)
CAASSTLSQGGSEKLVF

SEQ ID NO: 522440 - protein, 15 aa, Homo sapiens
  CDR3 for beta chain variable domain of TCR clone 261220 (TRBV9, TRBJ1-6)
CASSVAGTGDSPLHF

SEQ ID NO: 522441 - protein, 18 aa, Homo sapiens
  CDR3 for alpha chain variable domain of TCR clone 261221 (TRAV26-2, TRAJ45)
CILRVDKYSGGGADGLTF

SEQ ID NO: 522442 - protein, 14 aa, Homo sapiens
  CDR3 for beta chain variable domain of TCR clone 261221 (TRBV7-2, TRBJ2-7)
CSSRSQGAAYEQYF

SEQ ID NO: 522443 - protein, 15 aa, Homo sapiens
  CDR3 for alpha chain variable domain of TCR clone 261222 (TRAV12-3, TRAJ17)
CAMSPSLAAGNKLTF

SEQ ID NO: 522444 - protein, 14 aa, Homo sapiens
  CDR3 for beta chain variable domain of TCR clone 261222 (TRBV6-5, TRBJ1-3)
CASSYRSSGNTMYF

SEQ ID NO: 522445 - protein, 13 aa, Homo sapiens
  CDR3 for alpha chain variable domain of TCR clone 261223 (TRAV12-3, TRAJ13)
CAMSSGGYQKVTF

SEQ ID NO: 522446 - protein, 12 aa, Homo sapiens
  CDR3 for beta chain variable domain of TCR clone 261223 (TRBV12-4, TRBJ2-7)
CASSLGGYEQYF

SEQ ID NO: 522447 - protein, 13 aa, Homo sapiens
  CDR3 for alpha chain variable domain of TCR clone 261224 (TRAV12-3, TRAJ46)
CAVKKSSGDELTF

SEQ ID NO: 522448 - protein, 13 aa, Homo sapiens
  CDR3 for beta chain variable domain of TCR clone 261224 (TRBV6-1, TRBJ2-1)
CASSHDRNNEQFF

SEQ ID NO: 522449 - protein, 15 aa, Homo sapiens
  CDR3 for alpha chain variable domain of TCR clone 261225 (TRAV8-3, TRAJ45)
CASSYSGGGADGLTF

SEQ ID NO: 522450 - protein, 15 aa, Homo sapiens
  CDR3 for beta chain variable domain of TCR clone 261225 (TRBV28, TRBJ2-7)
CASNKPSGRAYEQYF

SEQ ID NO: 522451 - protein, 14 aa, Homo sapiens
  CDR3 for alpha chain variable domain of TCR clone 261226 (TRAV2, TRAJ26)
CAVEDWNYGQNFVF

SEQ ID NO: 522452 - protein, 14 aa, Homo sapiens
  CDR3 for beta chain variable domain of TCR clone 261226 (TRBV5-4, TRBJ1-1)
CASSLDSRRDEAFF

SEQ ID NO: 522453 - protein, 15 aa, Homo sapiens
  CDR3 for alpha chain variable domain of TCR clone 261227 (TRAV13-1, TRAJ44)
CAASKGGGTASKLTF

SEQ ID NO: 522454 - protein, 15 aa, Homo sapiens
  CDR3 for beta chain variable domain of TCR clone 261227 (TRBV20-1, TRBJ2-7)
CSAESGTSGAYEQYF

SEQ ID NO: 522455 - protein, 13 aa, Homo sapiens
  CDR3 for alpha chain variable domain of TCR clone 261228 (TRAV8-6, TRAJ49)
CAVITNTGNKFYF

SEQ ID NO: 522456 - protein, 17 aa, Homo sapiens
  CDR3 for beta chain variable domain of TCR clone 261228 (TRBV11-2, TRBJ2-1)
CASSLYPPGVEYNEQFF

SEQ ID NO: 522457 - protein, 15 aa, Homo sapiens
  CDR3 for alpha chain variable domain of TCR clone 261229 (TRAV3, TRAJ5)
CAVRDLDTGRRALTF

SEQ ID NO: 522458 - protein, 13 aa, Homo sapiens
  CDR3 for beta chain variable domain of TCR clone 261229 (TRBV10-3, TRBJ1-2)
CAINADLNYGYTF

SEQ ID NO: 522459 - protein, 14 aa, Homo sapiens
  CDR3 for alpha chain variable domain of TCR clone 261230 (TRAV21, TRAJ35)
CAVMPIGFGNVLHC

SEQ ID NO: 522460 - protein, 14 aa, Homo sapiens
  CDR3 for beta chain variable domain of TCR clone 261230 (TRBV5-1, TRBJ2-7)
CASSRGESLYEQYF

SEQ ID NO: 522461 - protein, 14 aa, Homo sapiens
  CDR3 for alpha chain variable domain of TCR clone 261231 (TRAV12-2, TRAJ13)
CAVKKTGGFQKVTF

SEQ ID NO: 522462 - protein, 13 aa, Homo sapiens
  CDR3 for beta chain variable domain of TCR clone 261231 (TRBV19, TRBJ1-5)
CASSIGGEQPQHF

SEQ ID NO: 522463 - protein, 13 aa, Homo sapiens
  CDR3 for alpha chain variable domain of TCR clone 261232 (TRAV2, TRAJ15)
CAVASQAGTAPIF

SEQ ID NO: 522464 - protein, 16 aa, Homo sapiens
  CDR3 for beta chain variable domain of TCR clone 261232 (TRBV20-1, TRBJ1-4)
CSAPGQGLLTNEKLFF

SEQ ID NO: 522465 - protein, 14 aa, Homo sapiens
  CDR3 for alpha chain variable domain of TCR clone 261233 (TRAV2, TRAJ9)
CAVEGRSGGFKTIF

SEQ ID NO: 522466 - protein, 17 aa, Homo sapiens
  CDR3 for beta chain variable domain of TCR clone 261233 (TRBV11-2, TRBJ2-1)
CASSLYPPGVEYNEQFF

SEQ ID NO: 522467 - protein, 14 aa, Homo sapiens
  CDR3 for alpha chain variable domain of TCR clone 261234 (TRAV35, TRAJ13)
CAGSPSGGYQKVTF

SEQ ID NO: 522468 - protein, 17 aa, Homo sapiens
  CDR3 for beta chain variable domain of TCR clone 261234 (TRBV7-6, TRBJ2-5)
CASSPGLADAGGETQYF

SEQ ID NO: 522469 - protein, 17 aa, Homo sapiens
  CDR3 for alpha chain variable domain of TCR clone 261235 (TRAV3, TRAJ42)
CAVRDRDYGGSQGNLIF

SEQ ID NO: 522470 - protein, 13 aa, Homo sapiens
  CDR3 for beta chain variable domain of TCR clone 261235 (TRBV20-1, TRBJ2-5)
CSARRGAGATQYF

SEQ ID NO: 522471 - protein, 14 aa, Homo sapiens
  CDR3 for alpha chain variable domain of TCR clone 261236 (TRAV1-2, TRAJ8)
CAVKEDTGFQKLVF

SEQ ID NO: 522472 - protein, 12 aa, Homo sapiens
  CDR3 for beta chain variable domain of TCR clone 261236 (TRBV2, TRBJ2-1)
CAYGPPGNEQFF

SEQ ID NO: 522473 - protein, 13 aa, Homo sapiens
  CDR3 for alpha chain variable domain of TCR clone 261237 (TRAV12-2, TRAJ10)
CAVPTGGGNKLTF

SEQ ID NO: 522474 - protein, 13 aa, Homo sapiens
  CDR3 for beta chain variable domain of TCR clone 261237 (TRBV19, TRBJ1-2)
CASSVPGQDGYTF

SEQ ID NO: 522475 - protein, 11 aa, Homo sapiens
  CDR3 for alpha chain variable domain of TCR clone 261238 (TRAV21, TRAJ11)
CAVNGYSTLTF

SEQ ID NO: 522476 - protein, 11 aa, Homo sapiens
  CDR3 for beta chain variable domain of TCR clone 261238 (TRBV19, TRBJ1-1)
CAISIGSEAFF

SEQ ID NO: 522477 - protein, 14 aa, Homo sapiens
  CDR3 for alpha chain variable domain of TCR clone 261239 (TRAV8-3, TRAJ39)
CAVGANNAGNMLTF

SEQ ID NO: 522478 - protein, 17 aa, Homo sapiens
  CDR3 for beta chain variable domain of TCR clone 261239 (TRBV6-5, TRBJ2-7)
CASSYSFWGQGSYEQYF

SEQ ID NO: 522479 - protein, 14 aa, Homo sapiens
  CDR3 for alpha chain variable domain of TCR clone 261240 (TRAV4, TRAJ33)
CLVGDVQSNYQLIW

SEQ ID NO: 522480 - protein, 15 aa, Homo sapiens
  CDR3 for beta chain variable domain of TCR clone 261240 (TRBV6-5, TRBJ2-1)
CASSYDAGAVNEQFF

SEQ ID NO: 522481 - protein, 13 aa, Homo sapiens
  CDR3 for alpha chain variable domain of TCR clone 261241 (TRAV21, TRAJ24)
GLMTTDSWGELQF

SEQ ID NO: 522482 - protein, 12 aa, Homo sapiens
  CDR3 for beta chain variable domain of TCR clone 261241 (TRBV11-2, TRBJ2-7)
CASSPPADEQYF

SEQ ID NO: 522483 - protein, 15 aa, Homo sapiens
  CDR3 for alpha chain variable domain of TCR clone 261242 (TRAV8-3, TRAJ45)
CASSYSGGGADGLTF

SEQ ID NO: 522484 - protein, 14 aa, Homo sapiens
  CDR3 for beta chain variable domain of TCR clone 261242 (TRBV6-3, TRBJ1-2)
CASSEGGGSYGYTF

SEQ ID NO: 522485 - protein, 15 aa, Homo sapiens
  CDR3 for alpha chain variable domain of TCR clone 261243 (TRAV20, TRAJ58)
CAVQDLETSGPRLTF

SEQ ID NO: 522486 - protein, 16 aa, Homo sapiens
  CDR3 for beta chain variable domain of TCR clone 261243 (TRBV19, TRBJ2-1)
CASSKAGPSSYNEQFF

SEQ ID NO: 522487 - protein, 15 aa, Homo sapiens
  CDR3 for alpha chain variable domain of TCR clone 261244 (TRAV3, TRAJ17)
CAVRDGPAAGDKLTF

SEQ ID NO: 522488 - protein, 12 aa, Homo sapiens
  CDR3 for beta chain variable domain of TCR clone 261244 (TRBV12-4, TRBJ2-1)
CASSPGRNEQFF

SEQ ID NO: 522489 - protein, 13 aa, Homo sapiens
  CDR3 for alpha chain variable domain of TCR clone 261245 (TRAV35, TRAJ22)
CAGLSGSARQLTF

SEQ ID NO: 522490 - protein, 15 aa, Homo sapiens
  CDR3 for beta chain variable domain of TCR clone 261245 (TRBV7-9, TRBJ2-1)
CQSLVLTGQGNEQFF

SEQ ID NO: 522491 - protein, 16 aa, Homo sapiens
  CDR3 for alpha chain variable domain of TCR clone 261246 (TRAV30, TRAJ24)
CGTEIVDAHSWGKFKF

SEQ ID NO: 522492 - protein, 14 aa, Homo sapiens
  CDR3 for beta chain variable domain of TCR clone 261246 (TRBV12-5, TRBJ2-5)
CASGSRTHQETQYF

SEQ ID NO: 522493 - protein, 13 aa, Homo sapiens
  CDR3 for alpha chain variable domain of TCR clone 261247 (TRAV20, TRAJ37)
CAGCSSNTGKLIF

SEQ ID NO: 522494 - protein, 11 aa, Homo sapiens
  CDR3 for beta chain variable domain of TCR clone 261247 (TRBV12-4, TRBJ2-3)
CASKATDTQYF

SEQ ID NO: 522495 - protein, 15 aa, Homo sapiens
  CDR3 for alpha chain variable domain of TCR clone 261248 (TRAV2, TRAJ36)
CAVADRGNWGKQPLL

SEQ ID NO: 522496 - protein, 14 aa, Homo sapiens
  CDR3 for beta chain variable domain of TCR clone 261248 (TRBV7-9, TRBJ2-5)
CASSLDTAQETQYF

SEQ ID NO: 522497 - protein, 13 aa, Homo sapiens
  CDR3 for alpha chain variable domain of TCR clone 261249 (TRAV2, TRAJ5)
CSVPDTGRRALTF

SEQ ID NO: 522498 - protein, 13 aa, Homo sapiens
  CDR3 for beta chain variable domain of TCR clone 261249 (TRBV19, TRBJ1-2)
CASSVPGQDGYTF

SEQ ID NO: 522499 - protein, 14 aa, Homo sapiens
  CDR3 for alpha chain variable domain of TCR clone 261250 (TRAV12-3, TRAJ10)
SHLPLTGGGNKLTF

SEQ ID NO: 522500 - protein, 13 aa, Homo sapiens
  CDR3 for beta chain variable domain of TCR clone 261250 (TRBV7-9, TRBJ2-3)
CARSPGSTDTQYF

SEQ ID NO: 522501 - protein, 13 aa, Homo sapiens
  CDR3 for alpha chain variable domain of TCR clone 261251 (TRAV12-2, TRAJ39)
CAVNNNAGNMLTF

SEQ ID NO: 522502 - protein, 13 aa, Homo sapiens
  CDR3 for beta chain variable domain of TCR clone 261251 (TRBV2, TRBJ1-5)
CATAGPCNQPQHF

SEQ ID NO: 522503 - protein, 13 aa, Homo sapiens
  CDR3 for alpha chain variable domain of TCR clone 261252 (TRAV14/DV4, TRAJ49)
CAMVENTGNQFYF

SEQ ID NO: 522504 - protein, 13 aa, Homo sapiens
  CDR3 for beta chain variable domain of TCR clone 261252 (TRBV11-3, TRBJ2-1)
CASSARRVDEQFF

SEQ ID NO: 522505 - protein, 13 aa, Homo sapiens
  CDR3 for alpha chain variable domain of TCR clone 261253 (TRAV21, TRAJ36)
CAVIKTGANNLFF

SEQ ID NO: 522506 - protein, 13 aa, Homo sapiens
  CDR3 for beta chain variable domain of TCR clone 261253 (TRBV11-2, TRBJ2-5)
CASSSTGEETQYF

SEQ ID NO: 522507 - protein, 14 aa, Homo sapiens
  CDR3 for alpha chain variable domain of TCR clone 261254 (TRAV12-2, TRAJ17)
CAVNIKAAGNKLTF

SEQ ID NO: 522508 - protein, 15 aa, Homo sapiens
  CDR3 for beta chain variable domain of TCR clone 261254 (TRBV10-3, TRBJ1-5)
CAISDTGLGGQPQHF

SEQ ID NO: 522509 - protein, 14 aa, Homo sapiens
  CDR3 for alpha chain variable domain of TCR clone 261255 (TRAV17, TRAJ22)
CATSPPGSARQLTF

SEQ ID NO: 522510 - protein, 15 aa, Homo sapiens
  CDR3 for beta chain variable domain of TCR clone 261255 (TRBV4-1, TRBJ2-5)
CASSQWDLYQETQNF

SEQ ID NO: 522511 - protein, 14 aa, Homo sapiens
  CDR3 for alpha chain variable domain of TCR clone 261256 (TRAV2, TRAJ22)
CAVGRGGSARQLTF

SEQ ID NO: 522512 - protein, 14 aa, Homo sapiens
  CDR3 for beta chain variable domain of TCR clone 261256 (TRBV7-6, TRBJ2-3)
CASSLGTVTDTQYF

SEQ ID NO: 522513 - protein, 14 aa, Homo sapiens
  CDR3 for alpha chain variable domain of TCR clone 261257 (TRAV38-1, TRAJ40)
CALRPTSGTYKYIF

SEQ ID NO: 522514 - protein, 13 aa, Homo sapiens
  CDR3 for beta chain variable domain of TCR clone 261257 (TRBV24-1, TRBJ2-2)
CATRAGSSGELFF

SEQ ID NO: 522515 - protein, 15 aa, Homo sapiens
  CDR3 for alpha chain variable domain of TCR clone 261258 (TRAV1-2, TRAJ35)
CAVRDREGFGNVLHC

SEQ ID NO: 522516 - protein, 16 aa, Homo sapiens
  CDR3 for beta chain variable domain of TCR clone 261258 (TRBV28, TRBJ1-4)
CASSRTVGNENCFLAV

SEQ ID NO: 522517 - protein, 16 aa, Homo sapiens
  CDR3 for alpha chain variable domain of TCR clone 261259 (TRAV1-2, TRAJ10)
CAVRGVLTGGGNKLTF

SEQ ID NO: 522518 - protein, 14 aa, Homo sapiens
  CDR3 for beta chain variable domain of TCR clone 261259 (TRBV7-8, TRBJ2-7)
CASSLGDRESTSGR

SEQ ID NO: 522519 - protein, 15 aa, Homo sapiens
  CDR3 for alpha chain variable domain of TCR clone 261260 (TRAV27, TRAJ38)
CAARRNAGNNRKLIW

SEQ ID NO: 522520 - protein, 13 aa, Homo sapiens
  CDR3 for beta chain variable domain of TCR clone 261260 (TRBV12-5, TRBJ2-3)
CASGEGQSDTQYF

SEQ ID NO: 522521 - protein, 15 aa, Homo sapiens
  CDR3 for alpha chain variable domain of TCR clone 261261 (TRAV36/DV7, TRAJ53)
CAVGGSGGSNYKLTF

SEQ ID NO: 522522 - protein, 16 aa, Homo sapiens
  CDR3 for beta chain variable domain of TCR clone 261261 (TRBV27, TRBJ2-2)
CASSLSGVWVTGELFF

SEQ ID NO: 522523 - protein, 13 aa, Homo sapiens
  CDR3 for alpha chain variable domain of TCR clone 261262 (TRAV35, TRAJ22)
CAGLPGSARQLTF

SEQ ID NO: 522524 - protein, 16 aa, Homo sapiens
  CDR3 for beta chain variable domain of TCR clone 261262 (TRBV7-9, TRBJ2-1)
CASSLVLTGQGNEQFF

SEQ ID NO: 522525 - protein, 13 aa, Homo sapiens
  CDR3 for alpha chain variable domain of TCR clone 261263 (TRAV1-2, TRAJ9)
CAALNTGGFKTIL

SEQ ID NO: 522526 - protein, 13 aa, Homo sapiens
  CDR3 for beta chain variable domain of TCR clone 261263 (TRBV4-2, TRBJ1-1)
CASSQAGNTEAFF

SEQ ID NO: 522527 - protein, 17 aa, Homo sapiens
  CDR3 for alpha chain variable domain of TCR clone 261264 (TRAV21, TRAJ52)
CAVGVNAGGPSYGMLTF

SEQ ID NO: 522528 - protein, 13 aa, Homo sapiens
  CDR3 for beta chain variable domain of TCR clone 261264 (TRBV5-1, TRBJ1-2)
CASSFQGNYGYTF

SEQ ID NO: 522529 - protein, 12 aa, Homo sapiens
  CDR3 for alpha chain variable domain of TCR clone 261265 (TRAV8-6, TRAJ43)
CAVRYNNNDMRF

SEQ ID NO: 522530 - protein, 14 aa, Homo sapiens
  CDR3 for beta chain variable domain of TCR clone 261265 (TRBV7-2, TRBJ1-1)
CASSFLTGTTEAFF

SEQ ID NO: 522531 - protein, 13 aa, Homo sapiens
  CDR3 for alpha chain variable domain of TCR clone 261266 (TRAV21, TRAJ27)
CAARPGNAGKSTL

SEQ ID NO: 522532 - protein, 16 aa, Homo sapiens
  CDR3 for beta chain variable domain of TCR clone 261266 (TRBV20-1, TRBJ1-4)
CSAPGQGLLTNEKLFF

SEQ ID NO: 522533 - protein, 14 aa, Homo sapiens
  CDR3 for alpha chain variable domain of TCR clone 261267 (TRAV12-1, TRAJ17)
CVVNYKSTCNKLTF

SEQ ID NO: 522534 - protein, 17 aa, Homo sapiens
  CDR3 for beta chain variable domain of TCR clone 261267 (TRBV20-1, TRBJ2-1)
CSASSSGLAGSYNEQFF

SEQ ID NO: 522535 - protein, 15 aa, Homo sapiens
  CDR3 for alpha chain variable domain of TCR clone 261268 (TRAV17, TRAJ52)
CATEAGGTSYGKLTF

SEQ ID NO: 522536 - protein, 14 aa, Homo sapiens
  CDR3 for beta chain variable domain of TCR clone 261268 (TRBV28, TRBJ1-5)
CASSLGVLVKPKHF

SEQ ID NO: 522537 - protein, 11 aa, Homo sapiens
  CDR3 for alpha chain variable domain of TCR clone 261269 (TRAV1-2, TRAJ40)
CAVPGTYKYIF

SEQ ID NO: 522538 - protein, 16 aa, Homo sapiens
  CDR3 for beta chain variable domain of TCR clone 261269 (TRBV29-1, TRBJ2-7)
CSVGVVGTSGSYEQYF

SEQ ID NO: 522539 - protein, 17 aa, Homo sapiens
  CDR3 for alpha chain variable domain of TCR clone 261270 (TRAV13-1, TRAJ31)
CAPRDRLMFGDGTQLVV

SEQ ID NO: 522540 - protein, 12 aa, Homo sapiens
  CDR3 for beta chain variable domain of TCR clone 261270 (TRBV7-9, TRBJ2-7)
YASSLEGYEQYF

SEQ ID NO: 522541 - protein, 15 aa, Homo sapiens
  CDR3 for alpha chain variable domain of TCR clone 261271 (TRAV23/DV6, TRAJ30)
CAASSQESRDDKIIF

SEQ ID NO: 522542 - protein, 13 aa, Homo sapiens
  CDR3 for beta chain variable domain of TCR clone 261271 (TRBV5-5, TRBJ1-2)
CASSFWRGEDYTF

SEQ ID NO: 522543 - protein, 16 aa, Homo sapiens
  CDR3 for alpha chain variable domain of TCR clone 261272 (TRAV3, TRAJ23)
CAVKIGIYNQGGKLIF

SEQ ID NO: 522544 - protein, 13 aa, Homo sapiens
  CDR3 for beta chain variable domain of TCR clone 261272 (TRBV9, TRBJ2-1)
CASSPSGGNEQFF

SEQ ID NO: 522545 - protein, 13 aa, Homo sapiens
  CDR3 for alpha chain variable domain of TCR clone 261273 (TRAV8-3, TRAJ20)
CAVGRPNDYKLSF

SEQ ID NO: 522546 - protein, 14 aa, Homo sapiens
  CDR3 for beta chain variable domain of TCR clone 261273 (TRBV12-5, TRBJ2-5)
CASGPRTHQETQYF

SEQ ID NO: 522547 - protein, 16 aa, Homo sapiens
  CDR3 for alpha chain variable domain of TCR clone 261274 (TRAV3, TRAJ4)
CAVRAFFSGGYNKLIF

SEQ ID NO: 522548 - protein, 13 aa, Homo sapiens
  CDR3 for beta chain variable domain of TCR clone 261274 (TRBV7-9, TRBJ2-1)
CASSLDVGNEQFF

SEQ ID NO: 522549 - protein, 10 aa, Homo sapiens
  CDR3 for alpha chain variable domain of TCR clone 261275 (TRAV12-2, TRAJ43)
CAVKVLSMRF

SEQ ID NO: 522550 - protein, 14 aa, Homo sapiens
  CDR3 for beta chain variable domain of TCR clone 261275 (TRBV11-2, TRBJ2-7)
CASSLGDSLYEQYF

SEQ ID NO: 522551 - protein, 16 aa, Homo sapiens
  CDR3 for alpha chain variable domain of TCR clone 261276 (TRAV3, TRAJ37)
CAVRGKGAGNTGKLIF

SEQ ID NO: 522552 - protein, 14 aa, Homo sapiens
  CDR3 for beta chain variable domain of TCR clone 261276 (TRBV12-4, TRBJ1-1)
CASSLGTGGTEAFF

SEQ ID NO: 522553 - protein, 14 aa, Homo sapiens
  CDR3 for alpha chain variable domain of TCR clone 261277 (TRAV27, TRAJ22)
CAGLPSGSARQLTF

SEQ ID NO: 522554 - protein, 13 aa, Homo sapiens
  CDR3 for beta chain variable domain of TCR clone 261277 (TRBV7-2, TRBJ2-7)
CASSSPSGSQQYF

SEQ ID NO: 522555 - protein, 13 aa, Homo sapiens
  CDR3 for alpha chain variable domain of TCR clone 261278 (TRAV8-3, TRAJ28)
CAVGAVGGYQLTF

SEQ ID NO: 522556 - protein, 14 aa, Homo sapiens
  CDR3 for beta chain variable domain of TCR clone 261278 (TRBV7-2, TRBJ2-7)
CASRSQGAEYEQYF

SEQ ID NO: 522557 - protein, 14 aa, Homo sapiens
  CDR3 for alpha chain variable domain of TCR clone 261279 (TRAV12-2, TRAJ40)
CAVKIPSGTYKYIF

SEQ ID NO: 522558 - protein, 16 aa, Homo sapiens
  CDR3 for beta chain variable domain of TCR clone 261279 (TRBV2, TRBJ2-1)
CASRPRSGGPYGEQFF

SEQ ID NO: 522559 - protein, 15 aa, Homo sapiens
  CDR3 for alpha chain variable domain of TCR clone 261280 (TRAV3, TRAJ5)
CAVRDRKTGRRALTF

SEQ ID NO: 522560 - protein, 13 aa, Homo sapiens
  CDR3 for beta chain variable domain of TCR clone 261280 (TRBV10-3, TRBJ2-7)
CASKLAVNYEQYF

SEQ ID NO: 522561 - protein, 15 aa, Homo sapiens
  CDR3 for alpha chain variable domain of TCR clone 261281 (TRAV26-1, TRAJ29)
CIVRVEGSGNTPLVF

SEQ ID NO: 522562 - protein, 15 aa, Homo sapiens
  CDR3 for beta chain variable domain of TCR clone 261281 (TRBV6-6, TRBJ2-5)
CASSPGGGLEETQYF

SEQ ID NO: 522563 - protein, 13 aa, Homo sapiens
  CDR3 for alpha chain variable domain of TCR clone 261282 (TRAV17, TRAJ6)
CATGFGGIYIPTF

SEQ ID NO: 522564 - protein, 14 aa, Homo sapiens
  CDR3 for beta chain variable domain of TCR clone 261282 (TRBV5-1, TRBJ2-5)
CASSFGGSQETQYF

SEQ ID NO: 522565 - protein, 12 aa, Homo sapiens
  CDR3 for alpha chain variable domain of TCR clone 261283 (TRAV13-1, TRAJ21)
CAAKEGFNKFYF

SEQ ID NO: 522566 - protein, 15 aa, Homo sapiens
  CDR3 for beta chain variable domain of TCR clone 261283 (TRBV11-2, TRBJ2-7)
CASSLVGGRGYEQYF

SEQ ID NO: 522567 - protein, 15 aa, Homo sapiens
  CDR3 for alpha chain variable domain of TCR clone 261284 (TRAV26-1, TRAJ40)
CIVRAVPSGTYKYIF

SEQ ID NO: 522568 - protein, 15 aa, Homo sapiens
  CDR3 for beta chain variable domain of TCR clone 261284 (TRBV7-2, TRBJ2-3)
CASSLNLRDTDTQYF

SEQ ID NO: 522569 - protein, 16 aa, Homo sapiens
  CDR3 for alpha chain variable domain of TCR clone 261285 (TRAV13-1, TRAJ48)
CAASIFGNFGNEKVTF

SEQ ID NO: 522570 - protein, 13 aa, Homo sapiens
  CDR3 for beta chain variable domain of TCR clone 261285 (TRBV4-2, TRBJ1-1)
CASSQAGNTEAFF

SEQ ID NO: 522571 - protein, 13 aa, Homo sapiens
  CDR3 for alpha chain variable domain of TCR clone 261286 (TRAV8-1, TRAJ23)
CALRDNQGGKLIF

SEQ ID NO: 522572 - protein, 10 aa, Homo sapiens
  CDR3 for beta chain variable domain of TCR clone 261286 (TRBV2, TRBJ2-5)
CASSAATQYF

SEQ ID NO: 522573 - protein, 15 aa, Homo sapiens
  CDR3 for alpha chain variable domain of TCR clone 261287 (TRAV12-3, TRAJ6)
CAMSATTGGSYIPTF

SEQ ID NO: 522574 - protein, 15 aa, Homo sapiens
  CDR3 for beta chain variable domain of TCR clone 261287 (TRBV5-4, TRBJ2-6)
CASSSGRTGANVLTF

SEQ ID NO: 522575 - protein, 14 aa, Homo sapiens
  CDR3 for alpha chain variable domain of TCR clone 261288 (TRAV12-2, TRAJ36)
CAVNPPTGANNLFF

SEQ ID NO: 522576 - protein, 14 aa, Homo sapiens
  CDR3 for beta chain variable domain of TCR clone 261288 (TRBV28, TRBJ1-1)
CASKTGVLNTEAFF

SEQ ID NO: 522577 - protein, 12 aa, Homo sapiens
  CDR3 for alpha chain variable domain of TCR clone 261289 (TRAV26-1, TRAJ36)
CIVRVRADNLFF

SEQ ID NO: 522578 - protein, 12 aa, Homo sapiens
  CDR3 for beta chain variable domain of TCR clone 261289 (TRBV11-2, TRBJ2-5)
CQQPRAIRDQYF

SEQ ID NO: 522579 - protein, 12 aa, Homo sapiens
  CDR3 for alpha chain variable domain of TCR clone 261290 (TRAV8-4, TRAJ43)
CAVSVHNNDMRF

SEQ ID NO: 522580 - protein, 14 aa, Homo sapiens
  CDR3 for beta chain variable domain of TCR clone 261290 (TRBV11-2, TRBJ1-2)
CASSLGTANYGYTF

SEQ ID NO: 522581 - protein, 14 aa, Homo sapiens
  CDR3 for alpha chain variable domain of TCR clone 261291 (TRAV12-2, TRAJ17)
CAVLFKAAGNKLTF

SEQ ID NO: 522582 - protein, 15 aa, Homo sapiens
  CDR3 for beta chain variable domain of TCR clone 261291 (TRBV28, TRBJ1-4)
CASSVSGSGLGKLFF

SEQ ID NO: 522583 - protein, 13 aa, Homo sapiens
  CDR3 for alpha chain variable domain of TCR clone 261292 (TRAV21, TRAJ57)
CAVTQGESEKLVF

SEQ ID NO: 522584 - protein, 15 aa, Homo sapiens
  CDR3 for beta chain variable domain of TCR clone 261292 (TRBV28, TRBJ2-5)
CASSSGRTIQETQYF

SEQ ID NO: 522585 - protein, 13 aa, Homo sapiens
  CDR3 for alpha chain variable domain of TCR clone 261293 (TRAV2, TRAJ15)
CAVASQAGTALIF

SEQ ID NO: 522586 - protein, 13 aa, Homo sapiens
  CDR3 for beta chain variable domain of TCR clone 261293 (TRBV28, TRBJ2-7)
CASKAGGVYEQYF

SEQ ID NO: 522587 - protein, 16 aa, Homo sapiens
  CDR3 for alpha chain variable domain of TCR clone 261294 (TRAV8-3, TRAJ13)
CAVGAYPSGVYHKVTF

SEQ ID NO: 522588 - protein, 15 aa, Homo sapiens
  CDR3 for beta chain variable domain of TCR clone 261294 (TRBV19, TRBJ1-5)
CASSIVWADNQPQHF

SEQ ID NO: 522589 - protein, 11 aa, Homo sapiens
  CDR3 for alpha chain variable domain of TCR clone 261295 (TRAV17, TRAJ9)
CATPGGFKTIF

SEQ ID NO: 522590 - protein, 11 aa, Homo sapiens
  CDR3 for beta chain variable domain of TCR clone 261295 (TRBV29-1, TRBJ2-5)
CSEDRTGTQYF

SEQ ID NO: 522591 - protein, 11 aa, Homo sapiens
  CDR3 for alpha chain variable domain of TCR clone 261296 (TRAV21, TRAJ27)
CAVRMQANQPL

SEQ ID NO: 522592 - protein, 13 aa, Homo sapiens
  CDR3 for beta chain variable domain of TCR clone 261296 (TRBV14, TRBJ1-1)
CASSREFGTEAFF

SEQ ID NO: 522593 - protein, 15 aa, Homo sapiens
  CDR3 for alpha chain variable domain of TCR clone 261297 (TRAV21, TRAJ22)
CVVRLFFWFCKATDL

SEQ ID NO: 522594 - protein, 14 aa, Homo sapiens
  CDR3 for beta chain variable domain of TCR clone 261297 (TRBV19, TRBJ1-5)
CASRAPDSFLSQHF

SEQ ID NO: 522595 - protein, 14 aa, Homo sapiens
  CDR3 for alpha chain variable domain of TCR clone 261298 (TRAV9-2, TRAJ39)
CALYIYNAGNMPAF

SEQ ID NO: 522596 - protein, 12 aa, Homo sapiens
  CDR3 for beta chain variable domain of TCR clone 261298 (TRBV11-2, TRBJ2-2)
CASSLGGGELFF

SEQ ID NO: 522597 - protein, 14 aa, Homo sapiens
  CDR3 for alpha chain variable domain of TCR clone 261299 (TRAV8-3, TRAJ35)
CAVVPQGFGNVLHC

SEQ ID NO: 522598 - protein, 15 aa, Homo sapiens
  CDR3 for beta chain variable domain of TCR clone 261299 (TRBV6-1, TRBJ2-2)
CASSAGKGYTGELFF

SEQ ID NO: 522599 - protein, 11 aa, Homo sapiens
  CDR3 for alpha chain variable domain of TCR clone 261300 (TRAV2, TRAJ21)
CAVFNYNKFYF

SEQ ID NO: 522600 - protein, 14 aa, Homo sapiens
  CDR3 for beta chain variable domain of TCR clone 261300 (TRBV15, TRBJ2-3)
CATRSGTSTDTQYF

SEQ ID NO: 522601 - protein, 15 aa, Homo sapiens
  CDR3 for alpha chain variable domain of TCR clone 261301 (TRAV26-1, TRAJ40)
CIVRAVPSGTYKYIF

SEQ ID NO: 522602 - protein, 14 aa, Homo sapiens
  CDR3 for beta chain variable domain of TCR clone 261301 (TRBV19, TRBJ2-1)
CASKDPGPANEQFF

SEQ ID NO: 522603 - protein, 11 aa, Homo sapiens
  CDR3 for alpha chain variable domain of TCR clone 261302 (TRAV26-1, TRAJ27)
CIDPNAGKSTF

SEQ ID NO: 522604 - protein, 18 aa, Homo sapiens
  CDR3 for beta chain variable domain of TCR clone 261302 (TRBV7-9, TRBJ2-6)
CASSFPGAGISAANVLTF

SEQ ID NO: 522605 - protein, 12 aa, Homo sapiens
  CDR3 for alpha chain variable domain of TCR clone 261303 (TRAV12-1, TRAJ20)
CVVSPDDYKLSF

SEQ ID NO: 522606 - protein, 12 aa, Homo sapiens
  CDR3 for beta chain variable domain of TCR clone 261303 (TRBV11-2, TRBJ2-2)
CASSLGGGELFF

SEQ ID NO: 522607 - protein, 14 aa, Homo sapiens
  CDR3 for alpha chain variable domain of TCR clone 261304 (TRAV20, TRAJ56)
CAVQFGGANSKLTF

SEQ ID NO: 522608 - protein, 18 aa, Homo sapiens
  CDR3 for beta chain variable domain of TCR clone 261304 (TRBV20-1, TRBJ2-5)
CSAKTGTTTNLYQETQYF

SEQ ID NO: 522609 - protein, 14 aa, Homo sapiens
  CDR3 for alpha chain variable domain of TCR clone 261305 (TRAV1-2, TRAJ16)
CAVNRFSDGQKLLF

SEQ ID NO: 522610 - protein, 15 aa, Homo sapiens
  CDR3 for beta chain variable domain of TCR clone 261305 (TRBV9, TRBJ1-6)
CASSVAGTGDSPQHF

SEQ ID NO: 522611 - protein, 11 aa, Homo sapiens
  CDR3 for alpha chain variable domain of TCR clone 261306 (TRAV21, TRAJ34)
CAHYNTDKLIF

SEQ ID NO: 522612 - protein, 15 aa, Homo sapiens
  CDR3 for beta chain variable domain of TCR clone 261306 (TRBV7-3, TRBJ2-1)
GASSPTGGGEVEQFF

SEQ ID NO: 522613 - protein, 13 aa, Homo sapiens
  CDR3 for alpha chain variable domain of TCR clone 261307 (TRAV8-4, TRAJ42)
CAVKEGSQGNLIF

SEQ ID NO: 522614 - protein, 15 aa, Homo sapiens
  CDR3 for beta chain variable domain of TCR clone 261307 (TRBV19, TRBJ1-1)
CASMGFRDVNTEAFF

SEQ ID NO: 522615 - protein, 14 aa, Homo sapiens
  CDR3 for alpha chain variable domain of TCR clone 261308 (TRAV8-2, TRAJ4)
CVVSPSGGYNKRIF

SEQ ID NO: 522616 - protein, 15 aa, Homo sapiens
  CDR3 for beta chain variable domain of TCR clone 261308 (TRBV4-1, TRBJ1-4)
CASSDTGGTNENLFF

SEQ ID NO: 522617 - protein, 14 aa, Homo sapiens
  CDR3 for alpha chain variable domain of TCR clone 261309 (TRAV12-3, TRAJ58)
CAMGTETSGSRLTF

SEQ ID NO: 522618 - protein, 15 aa, Homo sapiens
  CDR3 for beta chain variable domain of TCR clone 261309 (TRBV11-3, TRBJ2-3)
CASLKDGREGDTQYF

SEQ ID NO: 522619 - protein, 12 aa, Homo sapiens
  CDR3 for alpha chain variable domain of TCR clone 261310 (TRAV12-3, TRAJ3)
CAIDSSASKIIF

SEQ ID NO: 522620 - protein, 17 aa, Homo sapiens
  CDR3 for beta chain variable domain of TCR clone 261310 (TRBV7-9, TRBJ2-3)
CASSLEEAVAYPDTQYF

SEQ ID NO: 522621 - protein, 14 aa, Homo sapiens
  CDR3 for alpha chain variable domain of TCR clone 261311 (TRAV17, TRAJ32)
CATDPGGATNKLIF

SEQ ID NO: 522622 - protein, 17 aa, Homo sapiens
  CDR3 for beta chain variable domain of TCR clone 261311 (TRBV7-8, TRBJ2-6)
CASSAGTGGAGANVLTF

SEQ ID NO: 522623 - protein, 13 aa, Homo sapiens
  CDR3 for alpha chain variable domain of TCR clone 261312 (TRAV8-1, TRAJ34)
CAVRPYNTDKLIF

SEQ ID NO: 522624 - protein, 17 aa, Homo sapiens
  CDR3 for beta chain variable domain of TCR clone 261312 (TRBV7-8, TRBJ2-6)
CASSAGTGGAGANVLTF

SEQ ID NO: 522625 - protein, 13 aa, Homo sapiens
  CDR3 for alpha chain variable domain of TCR clone 261313 (TRAV13-2, TRAJ48)
CAEMDFGNEKLTF

SEQ ID NO: 522626 - protein, 15 aa, Homo sapiens
  CDR3 for beta chain variable domain of TCR clone 261313 (TRBV7-2, TRBJ1-6)
CASSSPGRGNSPLHF

SEQ ID NO: 522627 - protein, 13 aa, Homo sapiens
  CDR3 for alpha chain variable domain of TCR clone 261314 (TRAV27, TRAJ57)
CRSAQGGSEKLVF

SEQ ID NO: 522628 - protein, 11 aa, Homo sapiens
  CDR3 for beta chain variable domain of TCR clone 261314 (TRBV11-2, TRBJ1-1)
CASSINAEAFF

SEQ ID NO: 522629 - protein, 11 aa, Homo sapiens
  CDR3 for alpha chain variable domain of TCR clone 261315 (TRAV35, TRAJ30)
CAGPGDDKIMF

SEQ ID NO: 522630 - protein, 14 aa, Homo sapiens
  CDR3 for beta chain variable domain of TCR clone 261315 (TRBV7-6, TRBJ1-6)
CASSQAGGGSPLHF

SEQ ID NO: 522631 - protein, 12 aa, Homo sapiens
  CDR3 for alpha chain variable domain of TCR clone 261316 (TRAV30, TRAJ43)
CGTEERGNDMRF

SEQ ID NO: 522632 - protein, 13 aa, Homo sapiens
  CDR3 for beta chain variable domain of TCR clone 261316 (TRBV7-9, TRBJ2-3)
CASGPGSTDTQYF

SEQ ID NO: 522633 - protein, 12 aa, Homo sapiens
  CDR3 for alpha chain variable domain of TCR clone 261317 (TRAV17, TRAJ53)
CATEGSNYKLTF

SEQ ID NO: 522634 - protein, 19 aa, Homo sapiens
  CDR3 for beta chain variable domain of TCR clone 261317 (TRBV5-1, TRBJ2-3)
CASRLWTSGGITTPDTQYF

SEQ ID NO: 522635 - protein, 12 aa, Homo sapiens
  CDR3 for alpha chain variable domain of TCR clone 261318 (TRAV21, TRAJ26)
CAVDNYGQNFVF

SEQ ID NO: 522636 - protein, 16 aa, Homo sapiens
  CDR3 for beta chain variable domain of TCR clone 261318 (TRBV7-2, TRBJ1-3)
CASSSGRVLSGNTIYF

SEQ ID NO: 522637 - protein, 14 aa, Homo sapiens
  CDR3 for alpha chain variable domain of TCR clone 261319 (TRAV12-1, TRAJ37)
CWVTGSSNTGKLIF

SEQ ID NO: 522638 - protein, 20 aa, Homo sapiens
  CDR3 for beta chain variable domain of TCR clone 261319 (TRBV23-1, TRBJ2-5)
CISAPAVPERVLLIQETQYF

SEQ ID NO: 522639 - protein, 14 aa, Homo sapiens
  CDR3 for alpha chain variable domain of TCR clone 261320 (TRAV1-2, TRAJ8)
CAVREDTGFQKLVF

SEQ ID NO: 522640 - protein, 16 aa, Homo sapiens
  CDR3 for beta chain variable domain of TCR clone 261320 (TRBV10-2, TRBJ1-2)
CASSERRGPDNYGYTF

SEQ ID NO: 522641 - protein, 18 aa, Homo sapiens
  CDR3 for alpha chain variable domain of TCR clone 261321 (TRAV13-1, TRAJ52)
CAAKNPNAVGTSYGKLTF

SEQ ID NO: 522642 - protein, 14 aa, Homo sapiens
  CDR3 for beta chain variable domain of TCR clone 261321 (TRBV4-1, TRBJ2-2)
CASSQAVNTGELFF

SEQ ID NO: 522643 - protein, 12 aa, Homo sapiens
  CDR3 for alpha chain variable domain of TCR clone 261322 (TRAV2, TRAJ9)
CAVGAGGFKTIF

SEQ ID NO: 522644 - protein, 12 aa, Homo sapiens
  CDR3 for beta chain variable domain of TCR clone 261322 (TRBV7-8, TRBJ2-7)
CASSLAGYEQYF

SEQ ID NO: 522645 - protein, 18 aa, Homo sapiens
  CDR3 for alpha chain variable domain of TCR clone 261323 (TRAV17, TRAJ45)
CATSLDLYSGGGADGLTF

SEQ ID NO: 522646 - protein, 16 aa, Homo sapiens
  CDR3 for beta chain variable domain of TCR clone 261323 (TRBV18, TRBJ1-5)
CASSPSTGNSNQPQHF

SEQ ID NO: 522647 - protein, 14 aa, Homo sapiens
  CDR3 for alpha chain variable domain of TCR clone 261324 (TRAV1-2, TRAJ16)
CAVNRFSDGQKLLF

SEQ ID NO: 522648 - protein, 16 aa, Homo sapiens
  CDR3 for beta chain variable domain of TCR clone 261324 (TRBV7-3, TRBJ2-2)
CASSFKRGALSGELFF

SEQ ID NO: 522649 - protein, 14 aa, Homo sapiens
  CDR3 for alpha chain variable domain of TCR clone 261325 (TRAV12-2, TRAJ13)
CAVNPSGVYQKVTF

SEQ ID NO: 522650 - protein, 14 aa, Homo sapiens
  CDR3 for beta chain variable domain of TCR clone 261325 (TRBV12-4, TRBJ1-1)
CASSLGTGGTEAFF

SEQ ID NO: 522651 - protein, 14 aa, Homo sapiens
  CDR3 for alpha chain variable domain of TCR clone 261326 (TRAV8-6, TRAJ49)
CAVSGPGTGNQFYF

SEQ ID NO: 522652 - protein, 14 aa, Homo sapiens
  CDR3 for beta chain variable domain of TCR clone 261326 (TRBV19, TRBJ2-1)
CASEVTGARNEQFF

SEQ ID NO: 522653 - protein, 13 aa, Homo sapiens
  CDR3 for alpha chain variable domain of TCR clone 261327 (TRAV1-2, TRAJ20)
CAVRDGNDYKLSF

SEQ ID NO: 522654 - protein, 14 aa, Homo sapiens
  CDR3 for beta chain variable domain of TCR clone 261327 (TRBV7-6, TRBJ2-3)
CASSLGTVTDTQYF

SEQ ID NO: 522655 - protein, 14 aa, Homo sapiens
  CDR3 for alpha chain variable domain of TCR clone 261328 (TRAV12-2, TRAJ40)
CAVKIPSGTYKYIF

SEQ ID NO: 522656 - protein, 20 aa, Homo sapiens
  CDR3 for beta chain variable domain of TCR clone 261328 (TRBV28, TRBJ2-1)
CASTPIGRSPGLAGGNEQLF

SEQ ID NO: 522657 - protein, 15 aa, Homo sapiens
  CDR3 for alpha chain variable domain of TCR clone 261329 (TRAV27, TRAJ38)
CAARRNDGNNRKLIW

SEQ ID NO: 522658 - protein, 13 aa, Homo sapiens
  CDR3 for beta chain variable domain of TCR clone 261329 (TRBV7-3, TRBJ2-1)
CASSLDSYNEQFF

SEQ ID NO: 522659 - protein, 14 aa, Homo sapiens
  CDR3 for alpha chain variable domain of TCR clone 261330 (TRAV1-1, TRAJ27)
CAVIYNTNAGKSTF

SEQ ID NO: 522660 - protein, 15 aa, Homo sapiens
  CDR3 for beta chain variable domain of TCR clone 261330 (TRBV5-1, TRBJ2-3)
CASSLETASTDTQYF

SEQ ID NO: 522661 - protein, 15 aa, Homo sapiens
  CDR3 for alpha chain variable domain of TCR clone 261331 (TRAV12-3, TRAJ47)
CAMSALVEYGNKLVF

SEQ ID NO: 522662 - protein, 16 aa, Homo sapiens
  CDR3 for beta chain variable domain of TCR clone 261331 (TRBV27, TRBJ2-2)
CASSSDRGTGTGELFF

SEQ ID NO: 522663 - protein, 14 aa, Homo sapiens
  CDR3 for alpha chain variable domain of TCR clone 261332 (TRAV12-2, TRAJ33)
CAVKRARSNYQLIW

SEQ ID NO: 522664 - protein, 12 aa, Homo sapiens
  CDR3 for beta chain variable domain of TCR clone 261332 (TRBV24-1, TRBJ2-3)
CATSNSTDTQYF

SEQ ID NO: 522665 - protein, 15 aa, Homo sapiens
  CDR3 for alpha chain variable domain of TCR clone 261333 (TRAV26-1, TRAJ29)
CIVRVEGSGNTPLVF

SEQ ID NO: 522666 - protein, 14 aa, Homo sapiens
  CDR3 for beta chain variable domain of TCR clone 261333 (TRBV5-1, TRBJ2-5)
CASSFGGRQETQYF

SEQ ID NO: 522667 - protein, 11 aa, Homo sapiens
  CDR3 for alpha chain variable domain of TCR clone 261334 (TRAV17, TRAJ9)
CGFTGGFKTIF

SEQ ID NO: 522668 - protein, 15 aa, Homo sapiens
  CDR3 for beta chain variable domain of TCR clone 261334 (TRBV5-5, TRBJ1-1)
CASSLVGKDNTEAFF

SEQ ID NO: 522669 - protein, 15 aa, Homo sapiens
  CDR3 for alpha chain variable domain of TCR clone 261335 (TRAV8-6, TRAJ23)
CAVREFYNQGGKLIF

SEQ ID NO: 522670 - protein, 13 aa, Homo sapiens
  CDR3 for beta chain variable domain of TCR clone 261335 (TRBV20-1, TRBJ2-5)
CSARGDYQETQYF

SEQ ID NO: 522671 - protein, 11 aa, Homo sapiens
  CDR3 for alpha chain variable domain of TCR clone 261336 (TRAV17, TRAJ9)
CGFTGGFTTIF

SEQ ID NO: 522672 - protein, 12 aa, Homo sapiens
  CDR3 for beta chain variable domain of TCR clone 261336 (TRBV29-1, TRBJ2-3)
CSVTRGADTQYF

SEQ ID NO: 522673 - protein, 14 aa, Homo sapiens
  CDR3 for alpha chain variable domain of TCR clone 261337 (TRAV3, TRAJ9)
CAVRGNSGGFKTIF

SEQ ID NO: 522674 - protein, 14 aa, Homo sapiens
  CDR3 for beta chain variable domain of TCR clone 261337 (TRBV15, TRBJ2-1)
CATSGVEDYNEQFF

SEQ ID NO: 522675 - protein, 11 aa, Homo sapiens
  CDR3 for alpha chain variable domain of TCR clone 261338 (TRAV12-3, TRAJ17)
CAMALTGKLTF

SEQ ID NO: 522676 - protein, 15 aa, Homo sapiens
  CDR3 for beta chain variable domain of TCR clone 261338 (TRBV20-1, TRBJ2-7)
CSARDRVSGMDEQYF

SEQ ID NO: 522677 - protein, 14 aa, Homo sapiens
  CDR3 for alpha chain variable domain of TCR clone 261339 (TRAV12-3, TRAJ10)
SHLPLTGEGNKLTF

SEQ ID NO: 522678 - protein, 14 aa, Homo sapiens
  CDR3 for beta chain variable domain of TCR clone 261339 (TRBV7-6, TRBJ2-3)
CASSLGTVTDTQYF

SEQ ID NO: 522679 - protein, 13 aa, Homo sapiens
  CDR3 for alpha chain variable domain of TCR clone 261340 (TRAV8-3, TRAJ28)
CAVGAVGSYQLTF

SEQ ID NO: 522680 - protein, 15 aa, Homo sapiens
  CDR3 for beta chain variable domain of TCR clone 261340 (TRBV28, TRBJ2-5)
CASSRGQGSIETQYF

SEQ ID NO: 522681 - protein, 15 aa, Homo sapiens
  CDR3 for alpha chain variable domain of TCR clone 261341 (TRAV8-2, TRAJ40)
CVVLGTTSGTYKYIF

SEQ ID NO: 522682 - protein, 14 aa, Homo sapiens
  CDR3 for beta chain variable domain of TCR clone 261341 (TRBV7-2, TRBJ1-2)
CASSLGGQGYGYTF

SEQ ID NO: 522683 - protein, 11 aa, Homo sapiens
  CDR3 for alpha chain variable domain of TCR clone 261342 (TRAV13-1, TRAJ39)
CASHAGNMLTF

SEQ ID NO: 522684 - protein, 14 aa, Homo sapiens
  CDR3 for beta chain variable domain of TCR clone 261342 (TRBV11-2, TRBJ1-5)
CASSLDRGRQPKHF

SEQ ID NO: 522685 - protein, 13 aa, Homo sapiens
  CDR3 for alpha chain variable domain of TCR clone 261343 (TRAV13-1, TRAJ5)
CAASDTGRRALTF

SEQ ID NO: 522686 - protein, 13 aa, Homo sapiens
  CDR3 for beta chain variable domain of TCR clone 261343 (TRBV6-1, TRBJ1-1)
CASSRQGSTEAFF

SEQ ID NO: 522687 - protein, 15 aa, Homo sapiens
  CDR3 for alpha chain variable domain of TCR clone 261344 (TRAV23/DV6, TRAJ33)
CAASNSGGGNYQLIW

SEQ ID NO: 522688 - protein, 15 aa, Homo sapiens
  CDR3 for beta chain variable domain of TCR clone 261344 (TRBV4-1, TRBJ2-7)
CASSQNTGRLYEQYF

SEQ ID NO: 522689 - protein, 14 aa, Homo sapiens
  CDR3 for alpha chain variable domain of TCR clone 261345 (TRAV8-6, TRAJ30)
CAVRPVNRDDKNIF

SEQ ID NO: 522690 - protein, 17 aa, Homo sapiens
  CDR3 for beta chain variable domain of TCR clone 261345 (TRBV7-8, TRBJ2-6)
CASSAGTGGAGANVLTF

SEQ ID NO: 522691 - protein, 16 aa, Homo sapiens
  CDR3 for alpha chain variable domain of TCR clone 261346 (TRAV30, TRAJ24)
CGTEIVDADSWGKFQF

SEQ ID NO: 522692 - protein, 13 aa, Homo sapiens
  CDR3 for beta chain variable domain of TCR clone 261346 (TRBV18, TRBJ2-3)
CASSTGRTDTQYF

SEQ ID NO: 522693 - protein, 10 aa, Homo sapiens
  CDR3 for alpha chain variable domain of TCR clone 261347 (TRAV26-1, TRAJ56)
CIVRVDNGAN

SEQ ID NO: 522694 - protein, 15 aa, Homo sapiens
  CDR3 for beta chain variable domain of TCR clone 261347 (TRBV20-1, TRBJ2-7)
CSARDPTEVGHEQYF

SEQ ID NO: 522695 - protein, 15 aa, Homo sapiens
  CDR3 for alpha chain variable domain of TCR clone 261348 (TRAV21, TRAJ53)
RATLNSGGSNYKLTF

SEQ ID NO: 522696 - protein, 16 aa, Homo sapiens
  CDR3 for beta chain variable domain of TCR clone 261348 (TRBV12-4, TRBJ1-5)
CASSRPVGGSNQPQHF

SEQ ID NO: 522697 - protein, 12 aa, Homo sapiens
  CDR3 for alpha chain variable domain of TCR clone 261349 (TRAV21, TRAJ49)
CAVRNTGNQFYF

SEQ ID NO: 522698 - protein, 12 aa, Homo sapiens
  CDR3 for beta chain variable domain of TCR clone 261349 (TRBV7-9, TRBJ2-7)
YATRTDAYEQYF

SEQ ID NO: 522699 - protein, 17 aa, Homo sapiens
  CDR3 for alpha chain variable domain of TCR clone 261350 (TRAV3, TRAJ6)
CAVRDGPRAGGSYIPTF

SEQ ID NO: 522700 - protein, 15 aa, Homo sapiens
  CDR3 for beta chain variable domain of TCR clone 261350 (TRBV12-4, TRBJ2-5)
CASTLNSGRGETQYF

SEQ ID NO: 522701 - protein, 12 aa, Homo sapiens
  CDR3 for alpha chain variable domain of TCR clone 261351 (TRAV12-2, TRAJ42)
CAVGGSQGNLIF

SEQ ID NO: 522702 - protein, 17 aa, Homo sapiens
  CDR3 for beta chain variable domain of TCR clone 261351 (TRBV10-3, TRBJ1-4)
CAISESYGRWKNEKLFF

SEQ ID NO: 522703 - protein, 16 aa, Homo sapiens
  CDR3 for alpha chain variable domain of TCR clone 261352 (TRAV4, TRAJ26)
CCVLLLVGDYGQNFVF

SEQ ID NO: 522704 - protein, 16 aa, Homo sapiens
  CDR3 for beta chain variable domain of TCR clone 261352 (TRBV7-2, TRBJ1-2)
CASSSNQDRRGHGYTF

SEQ ID NO: 522705 - protein, 17 aa, Homo sapiens
  CDR3 for alpha chain variable domain of TCR clone 261353 (TRAV3, TRAJ6)
CAVRDGPRAGGSYIPTF

SEQ ID NO: 522706 - protein, 16 aa, Homo sapiens
  CDR3 for beta chain variable domain of TCR clone 261353 (TRBV4-1, TRBJ2-3)
CASSQSTSGAEDAQYF

SEQ ID NO: 522707 - protein, 15 aa, Homo sapiens
  CDR3 for alpha chain variable domain of TCR clone 261354 (TRAV21, TRAJ22)
CAVRLFFWFCKATDL

SEQ ID NO: 522708 - protein, 14 aa, Homo sapiens
  CDR3 for beta chain variable domain of TCR clone 261354 (TRBV5-8, TRBJ2-3)
CASSLGQGTDTQYF

SEQ ID NO: 522709 - protein, 13 aa, Homo sapiens
  CDR3 for alpha chain variable domain of TCR clone 261355 (TRAV2, TRAJ47)
CAVDREYGNTLVF

SEQ ID NO: 522710 - protein, 17 aa, Homo sapiens
  CDR3 for beta chain variable domain of TCR clone 261355 (TRBV15, TRBJ1-5)
CATSRVKGIYSNQPQHF

SEQ ID NO: 522711 - protein, 11 aa, Homo sapiens
  CDR3 for alpha chain variable domain of TCR clone 261356 (TRAV2, TRAJ21)
CAVFNFNKFYF

SEQ ID NO: 522712 - protein, 16 aa, Homo sapiens
  CDR3 for beta chain variable domain of TCR clone 261356 (TRBV6-1, TRBJ2-5)
CASSETLDRGAETQYF

SEQ ID NO: 522713 - protein, 11 aa, Homo sapiens
  CDR3 for alpha chain variable domain of TCR clone 261357 (TRAV23/DV6, TRAJ20)
CSKQRDYKLSF

SEQ ID NO: 522714 - protein, 13 aa, Homo sapiens
  CDR3 for beta chain variable domain of TCR clone 261357 (TRBV7-9, TRBJ2-3)
CASSPSGGTTQYF

SEQ ID NO: 522715 - protein, 13 aa, Homo sapiens
  CDR3 for alpha chain variable domain of TCR clone 261358 (TRAV30, TRAJ24)
CGTVTDSWGKLQF

SEQ ID NO: 522716 - protein, 16 aa, Homo sapiens
  CDR3 for beta chain variable domain of TCR clone 261358 (TRBV7-3, TRBJ2-2)
CASSLKRGTLSGELFF

SEQ ID NO: 522717 - protein, 14 aa, Homo sapiens
  CDR3 for alpha chain variable domain of TCR clone 261359 (TRAV13-1, TRAJ48)
CAASTDFGNEKLTF

SEQ ID NO: 522718 - protein, 15 aa, Homo sapiens
  CDR3 for beta chain variable domain of TCR clone 261359 (TRBV28, TRBJ2-7)
CASSPGGRGFYEQYF

SEQ ID NO: 522719 - protein, 12 aa, Homo sapiens
  CDR3 for alpha chain variable domain of TCR clone 261360 (TRAV13-1, TRAJ53)
AASGGSNYKLTF

SEQ ID NO: 522720 - protein, 12 aa, Homo sapiens
  CDR3 for beta chain variable domain of TCR clone 261360 (TRBV18, TRBJ1-4)
YASSPSREKLFF

SEQ ID NO: 522721 - protein, 15 aa, Homo sapiens
  CDR3 for alpha chain variable domain of TCR clone 261361 (TRAV12-3, TRAJ6)
CAMSPASGGSYIPTF

SEQ ID NO: 522722 - protein, 13 aa, Homo sapiens
  CDR3 for beta chain variable domain of TCR clone 261361 (TRBV7-3, TRBJ1-1)
CASSQDWGAEAFF

SEQ ID NO: 522723 - protein, 17 aa, Homo sapiens
  CDR3 for alpha chain variable domain of TCR clone 261362 (TRAV3, TRAJ42)
CAVRDRDYGGRQGNLIF

SEQ ID NO: 522724 - protein, 16 aa, Homo sapiens
  CDR3 for beta chain variable domain of TCR clone 261362 (TRBV12-5, TRBJ2-5)
CASGPRTSGNQETQYF

SEQ ID NO: 522725 - protein, 14 aa, Homo sapiens
  CDR3 for alpha chain variable domain of TCR clone 261363 (TRAV1-2, TRAJ16)
CAVNRVSDGQKLLF

SEQ ID NO: 522726 - protein, 15 aa, Homo sapiens
  CDR3 for beta chain variable domain of TCR clone 261363 (TRBV9, TRBJ1-6)
CASSGAGTGDSPLHF

SEQ ID NO: 522727 - protein, 12 aa, Homo sapiens
  CDR3 for alpha chain variable domain of TCR clone 261364 (TRAV12-3, TRAJ4)
CAMTGAGTRLAV

SEQ ID NO: 522728 - protein, 16 aa, Homo sapiens
  CDR3 for beta chain variable domain of TCR clone 261364 (TRBV10-3, TRBJ1-1)
CAISDTDRGVELSLDK

SEQ ID NO: 522729 - protein, 11 aa, Homo sapiens
  CDR3 for alpha chain variable domain of TCR clone 261365 (TRAV30, TRAJ23)
CGTEIAGKLIF

SEQ ID NO: 522730 - protein, 18 aa, Homo sapiens
  CDR3 for beta chain variable domain of TCR clone 261365 (TRBV7-2, TRBJ2-7)
CASTSQAASGGTSSTSGR

SEQ ID NO: 522731 - protein, 14 aa, Homo sapiens
  CDR3 for alpha chain variable domain of TCR clone 261366 (TRAV1-2, TRAJ29)
CAVRELTSETPLVF

SEQ ID NO: 522732 - protein, 14 aa, Homo sapiens
  CDR3 for beta chain variable domain of TCR clone 261366 (TRBV3-1, TRBJ2-5)
CASSQGPDQETQYF

SEQ ID NO: 522733 - protein, 16 aa, Homo sapiens
  CDR3 for alpha chain variable domain of TCR clone 261367 (TRAV1-2, TRAJ40)
CAVRGSRTSGTYKYIF

SEQ ID NO: 522734 - protein, 14 aa, Homo sapiens
  CDR3 for beta chain variable domain of TCR clone 261367 (TRBV4-1, TRBJ2-3)
CASSQDAGTDTQYF

SEQ ID NO: 522735 - protein, 16 aa, Homo sapiens
  CDR3 for alpha chain variable domain of TCR clone 261368 (TRAV10, TRAJ13)
CVGSARNSGGYQKVTF

SEQ ID NO: 522736 - protein, 19 aa, Homo sapiens
  CDR3 for beta chain variable domain of TCR clone 261368 (TRBV12-4, TRBJ2-1)
CASTLAFDPRDKEANEQFF

SEQ ID NO: 522737 - protein, 13 aa, Homo sapiens
  CDR3 for alpha chain variable domain of TCR clone 261369 (TRAV21, TRAJ20)
CAVGVFAAYKLSF

SEQ ID NO: 522738 - protein, 15 aa, Homo sapiens
  CDR3 for beta chain variable domain of TCR clone 261369 (TRBV11-3, TRBJ2-3)
CASLKDGREGDTQYF

SEQ ID NO: 522739 - protein, 17 aa, Homo sapiens
  CDR3 for alpha chain variable domain of TCR clone 261370 (TRAV3, TRAJ6)
CAVRDGPRAGGSYIPTF

SEQ ID NO: 522740 - protein, 12 aa, Homo sapiens
  CDR3 for beta chain variable domain of TCR clone 261370 (TRBV11-2, TRBJ2-2)
CASSLPTGELFF

SEQ ID NO: 522741 - protein, 15 aa, Homo sapiens
  CDR3 for alpha chain variable domain of TCR clone 261371 (TRAV26-1, TRAJ29)
RIVRVEGSGNTPLVL

SEQ ID NO: 522742 - protein, 14 aa, Homo sapiens
  CDR3 for beta chain variable domain of TCR clone 261371 (TRBV18, TRBJ2-5)
CASSPGVSQETQYF

SEQ ID NO: 522743 - protein, 14 aa, Homo sapiens
  CDR3 for alpha chain variable domain of TCR clone 261372 (TRAV20, TRAJ18)
CSVGRGSTLGRLYF

SEQ ID NO: 522744 - protein, 14 aa, Homo sapiens
  CDR3 for beta chain variable domain of TCR clone 261372 (TRBV28, TRBJ2-4)
CASTQVTGVNIQYF

SEQ ID NO: 522745 - protein, 10 aa, Homo sapiens
  CDR3 for alpha chain variable domain of TCR clone 261373 (TRAV30, TRAJ16)
CGTGGQKLLF

SEQ ID NO: 522746 - protein, 14 aa, Homo sapiens
  CDR3 for beta chain variable domain of TCR clone 261373 (TRBV6-1, TRBJ1-2)
CASCTGWPPTGYTF

SEQ ID NO: 522747 - protein, 12 aa, Homo sapiens
  CDR3 for alpha chain variable domain of TCR clone 261374 (TRAV21, TRAJ11)
CAATSGYSTLTF

SEQ ID NO: 522748 - protein, 16 aa, Homo sapiens
  CDR3 for beta chain variable domain of TCR clone 261374 (TRBV19, TRBJ2-1)
CASSKAGPSSYNEQFF

SEQ ID NO: 522749 - protein, 18 aa, Homo sapiens
  CDR3 for alpha chain variable domain of TCR clone 261375 (TRAV21, TRAJ52)
CAVRPSPAGGTSYGKLTF

SEQ ID NO: 522750 - protein, 14 aa, Homo sapiens
  CDR3 for beta chain variable domain of TCR clone 261375 (TRBV28, TRBJ1-1)
CASSPRTRCAEAFF

SEQ ID NO: 522751 - protein, 13 aa, Homo sapiens
  CDR3 for alpha chain variable domain of TCR clone 261376 (TRAV29/DV5, TRAJ31)
CAASRNNNARLMF

SEQ ID NO: 522752 - protein, 11 aa, Homo sapiens
  CDR3 for beta chain variable domain of TCR clone 261376 (TRBV27, TRBJ2-3)
CASSLGDTQYF

SEQ ID NO: 522753 - protein, 10 aa, Homo sapiens
  CDR3 for alpha chain variable domain of TCR clone 261377 (TRAV12-3, TRAJ49)
CAMSDDPFYF

SEQ ID NO: 522754 - protein, 13 aa, Homo sapiens
  CDR3 for beta chain variable domain of TCR clone 261377 (TRBV12-4, TRBJ1-1)
CASSPGTGFEAFF

SEQ ID NO: 522755 - protein, 14 aa, Homo sapiens
  CDR3 for alpha chain variable domain of TCR clone 261378 (TRAV26-1, TRAJ40)
CIVRVARGTYKYIF

SEQ ID NO: 522756 - protein, 14 aa, Homo sapiens
  CDR3 for beta chain variable domain of TCR clone 261378 (TRBV7-3, TRBJ2-7)
CASSLKADSYEQFF

SEQ ID NO: 522757 - protein, 12 aa, Homo sapiens
  CDR3 for alpha chain variable domain of TCR clone 261379 (TRAV25, TRAJ20)
CAGSSNDYKLSF

SEQ ID NO: 522758 - protein, 16 aa, Homo sapiens
  CDR3 for beta chain variable domain of TCR clone 261379 (TRBV20-1, TRBJ1-1)
CSARALTQGMNTEAFF

SEQ ID NO: 522759 - protein, 10 aa, Homo sapiens
  CDR3 for alpha chain variable domain of TCR clone 261380 (TRAV8-4, TRAJ43)
CAVSADDMRF

SEQ ID NO: 522760 - protein, 16 aa, Homo sapiens
  CDR3 for beta chain variable domain of TCR clone 261380 (TRBV20-1, TRBJ1-2)
CSASMGQGVANYGYTF

SEQ ID NO: 522761 - protein, 14 aa, Homo sapiens
  CDR3 for alpha chain variable domain of TCR clone 261381 (TRAV12-3, TRAJ42)
CAMNYGGSQGNLIF

SEQ ID NO: 522762 - protein, 15 aa, Homo sapiens
  CDR3 for beta chain variable domain of TCR clone 261381 (TRBV20-1, TRBJ1-1)
CSASRGVTGNTEAFF

SEQ ID NO: 522763 - protein, 12 aa, Homo sapiens
  CDR3 for alpha chain variable domain of TCR clone 261382 (TRAV13-2, TRAJ8)
CAPWLGFQKLVF

SEQ ID NO: 522764 - protein, 13 aa, Homo sapiens
  CDR3 for beta chain variable domain of TCR clone 261382 (TRBV10-2, TRBJ2-6)
CASKSAGANVLTF

SEQ ID NO: 522765 - protein, 19 aa, Homo sapiens
  CDR3 for alpha chain variable domain of TCR clone 261383 (TRAV13-2, TRAJ37)
CLLLCREYEDPGNTGKLIF

SEQ ID NO: 522766 - protein, 13 aa, Homo sapiens
  CDR3 for beta chain variable domain of TCR clone 261383 (TRBV20-1, TRBJ2-7)
CSARSGHPYEQYF

SEQ ID NO: 522767 - protein, 13 aa, Homo sapiens
  CDR3 for alpha chain variable domain of TCR clone 261384 (TRAV8-3, TRAJ21)
CAVGAYNFNKFYF

SEQ ID NO: 522768 - protein, 14 aa, Homo sapiens
  CDR3 for beta chain variable domain of TCR clone 261384 (TRBV25-1, TRBJ1-1)
CASTHLGGNTEAFF

SEQ ID NO: 522769 - protein, 14 aa, Homo sapiens
  CDR3 for alpha chain variable domain of TCR clone 261385 (TRAV12-2, TRAJ4)
CAEDLSGGYNKLIL

SEQ ID NO: 522770 - protein, 12 aa, Homo sapiens
  CDR3 for beta chain variable domain of TCR clone 261385 (TRBV7-9, TRBJ1-2)
CQQLKAELWLHL

SEQ ID NO: 522771 - protein, 17 aa, Homo sapiens
  CDR3 for alpha chain variable domain of TCR clone 261386 (TRAV3, TRAJ37)
CAVKDMRTPGNTGKLIF

SEQ ID NO: 522772 - protein, 15 aa, Homo sapiens
  CDR3 for beta chain variable domain of TCR clone 261386 (TRBV10-3, TRBJ1-1)
CAISDRGGMNTEAFF

SEQ ID NO: 522773 - protein, 14 aa, Homo sapiens
  CDR3 for alpha chain variable domain of TCR clone 261387 (TRAV13-1, TRAJ10)
CASSSTGGGNKLTF

SEQ ID NO: 522774 - protein, 15 aa, Homo sapiens
  CDR3 for beta chain variable domain of TCR clone 261387 (TRBV11-3, TRBJ1-3)
CASSLFGPSGNTIYF

SEQ ID NO: 522775 - protein, 16 aa, Homo sapiens
  CDR3 for alpha chain variable domain of TCR clone 261388 (TRAV30, TRAJ24)
CGTEIVDADSWGKFQF

SEQ ID NO: 522776 - protein, 14 aa, Homo sapiens
  CDR3 for beta chain variable domain of TCR clone 261388 (TRBV12-5, TRBJ2-5)
CAGGSRTHRETQYF

SEQ ID NO: 522777 - protein, 12 aa, Homo sapiens
  CDR3 for alpha chain variable domain of TCR clone 261389 (TRAV21, TRAJ23)
CAVPNQGGKLNF

SEQ ID NO: 522778 - protein, 15 aa, Homo sapiens
  CDR3 for beta chain variable domain of TCR clone 261389 (TRBV27, TRBJ2-1)
CASSFGAGTGPEQFF

SEQ ID NO: 522779 - protein, 11 aa, Homo sapiens
  CDR3 for alpha chain variable domain of TCR clone 261390 (TRAV21, TRAJ34)
CAHYNTDKLIF

SEQ ID NO: 522780 - protein, 15 aa, Homo sapiens
  CDR3 for beta chain variable domain of TCR clone 261390 (TRBV9, TRBJ2-1)
CASSVGSGFYNEQFF

SEQ ID NO: 522781 - protein, 15 aa, Homo sapiens
  CDR3 for alpha chain variable domain of TCR clone 261391 (TRAV12-1, TRAJ4)
CVVNPFSGGYNKLIF

SEQ ID NO: 522782 - protein, 16 aa, Homo sapiens
  CDR3 for beta chain variable domain of TCR clone 261391 (TRBV5-1, TRBJ1-1)
CASSNTGTEVCTEAFF

SEQ ID NO: 522783 - protein, 15 aa, Homo sapiens
  CDR3 for alpha chain variable domain of TCR clone 261392 (TRAV3, TRAJ13)
CAVRGYSGGYQKVTF

SEQ ID NO: 522784 - protein, 15 aa, Homo sapiens
  CDR3 for beta chain variable domain of TCR clone 261392 (TRBV7-2, TRBJ2-1)
CASSSGLAGGNEQFF

SEQ ID NO: 522785 - protein, 10 aa, Homo sapiens
  CDR3 for alpha chain variable domain of TCR clone 261393 (TRAV1-2, TRAJ31)
CVSEDARLMF

SEQ ID NO: 522786 - protein, 13 aa, Homo sapiens
  CDR3 for beta chain variable domain of TCR clone 261393 (TRBV11-2, TRBJ1-3)
CASSLEPVNTIYF

SEQ ID NO: 522787 - protein, 15 aa, Homo sapiens
  CDR3 for alpha chain variable domain of TCR clone 261394 (TRAV8-3, TRAJ15)
CAVGAPNQAGTALIF

SEQ ID NO: 522788 - protein, 14 aa, Homo sapiens
  CDR3 for beta chain variable domain of TCR clone 261394 (TRBV20-1, TRBJ2-1)
CSPSDEAAYNEQFF

SEQ ID NO: 522789 - protein, 14 aa, Homo sapiens
  CDR3 for alpha chain variable domain of TCR clone 261395 (TRAV12-1, TRAJ30)
CVPTGTNRDDKIIF

SEQ ID NO: 522790 - protein, 16 aa, Homo sapiens
  CDR3 for beta chain variable domain of TCR clone 261395 (TRBV7-3, TRBJ2-1)
CASSLEGYRSYNEQFF

SEQ ID NO: 522791 - protein, 13 aa, Homo sapiens
  CDR3 for alpha chain variable domain of TCR clone 261396 (TRAV12-2, TRAJ37)
CAGGYGNTGKLIF

SEQ ID NO: 522792 - protein, 14 aa, Homo sapiens
  CDR3 for beta chain variable domain of TCR clone 261396 (TRBV6-1, TRBJ2-6)
CASQQGAGANVLTF

SEQ ID NO: 522793 - protein, 15 aa, Homo sapiens
  CDR3 for alpha chain variable domain of TCR clone 261397 (TRAV20, TRAJ58)
CAVQDLETSGPRLTF

SEQ ID NO: 522794 - protein, 13 aa, Homo sapiens
  CDR3 for beta chain variable domain of TCR clone 261397 (TRBV20-1, TRBJ1-1)
CSAGGGGNTEAFF

SEQ ID NO: 522795 - protein, 13 aa, Homo sapiens
  CDR3 for alpha chain variable domain of TCR clone 261398 (TRAV17, TRAJ26)
CATVDNYGQNFVF

SEQ ID NO: 522796 - protein, 14 aa, Homo sapiens
  CDR3 for beta chain variable domain of TCR clone 261398 (TRBV7-2, TRBJ1-1)
CASSSLTGTTEAFF

SEQ ID NO: 522797 - protein, 10 aa, Homo sapiens
  CDR3 for alpha chain variable domain of TCR clone 261399 (TRAV12-3, TRAJ20)
CAMDKLSFVA

SEQ ID NO: 522798 - protein, 14 aa, Homo sapiens
  CDR3 for beta chain variable domain of TCR clone 261399 (TRBV5-4, TRBJ2-2)
CASSLTSRTGELFF

SEQ ID NO: 522799 - protein, 14 aa, Homo sapiens
  CDR3 for alpha chain variable domain of TCR clone 261400 (TRAV1-1, TRAJ27)
CSVLYNTNAGKSTF

SEQ ID NO: 522800 - protein, 15 aa, Homo sapiens
  CDR3 for beta chain variable domain of TCR clone 261400 (TRBV7-2, TRBJ2-1)
CASSSGLAGGNEQFF

SEQ ID NO: 522801 - protein, 16 aa, Homo sapiens
  CDR3 for alpha chain variable domain of TCR clone 261401 (TRAV12-3, TRAJ10)
CAMRKGITGGGNKLTL

SEQ ID NO: 522802 - protein, 12 aa, Homo sapiens
  CDR3 for beta chain variable domain of TCR clone 261401 (TRBV20-1, TRBJ2-7)
CSAITPTKEQYF

SEQ ID NO: 522803 - protein, 14 aa, Homo sapiens
  CDR3 for alpha chain variable domain of TCR clone 261402 (TRAV3, TRAJ21)
CAVESQANFNKFYF

SEQ ID NO: 522804 - protein, 18 aa, Homo sapiens
  CDR3 for beta chain variable domain of TCR clone 261402 (TRBV7-9, TRBJ2-1)
CASSLAVSGTSGRNEQFV

SEQ ID NO: 522805 - protein, 14 aa, Homo sapiens
  CDR3 for alpha chain variable domain of TCR clone 261403 (TRAV13-2, TRAJ4)
CAEKGPKGHNKLIF

SEQ ID NO: 522806 - protein, 13 aa, Homo sapiens
  CDR3 for beta chain variable domain of TCR clone 261403 (TRBV18, TRBJ2-5)
CASSPPGKETQYF

SEQ ID NO: 522807 - protein, 15 aa, Homo sapiens
  CDR3 for alpha chain variable domain of TCR clone 261404 (TRAV13-1, TRAJ17)
CAASIERAAGNKLAF

SEQ ID NO: 522808 - protein, 12 aa, Homo sapiens
  CDR3 for beta chain variable domain of TCR clone 261404 (TRBV5-7, TRBJ1-1)
CASSLGRGKAFF

SEQ ID NO: 522809 - protein, 13 aa, Homo sapiens
  CDR3 for alpha chain variable domain of TCR clone 261405 (TRAV12-2, TRAJ23)
CAVMGNQGGKLIF

SEQ ID NO: 522810 - protein, 13 aa, Homo sapiens
  CDR3 for beta chain variable domain of TCR clone 261405 (TRBV12-4, TRBJ2-7)
CASSPTETYEQYF

SEQ ID NO: 522811 - protein, 13 aa, Homo sapiens
  CDR3 for alpha chain variable domain of TCR clone 261406 (TRAV17, TRAJ5)
CDLRGTGRRALTF

SEQ ID NO: 522812 - protein, 13 aa, Homo sapiens
  CDR3 for beta chain variable domain of TCR clone 261406 (TRBV4-2, TRBJ1-1)
CASSQAGNTEAFF

SEQ ID NO: 522813 - protein, 14 aa, Homo sapiens
  CDR3 for alpha chain variable domain of TCR clone 261407 (TRAV12-2, TRAJ45)
CAVNIGGGADGLPF

SEQ ID NO: 522814 - protein, 17 aa, Homo sapiens
  CDR3 for beta chain variable domain of TCR clone 261407 (TRBV20-1, TRBJ2-2)
CSASGSGQGGLTGELFF

SEQ ID NO: 522815 - protein, 10 aa, Homo sapiens
  CDR3 for alpha chain variable domain of TCR clone 261408 (TRAV21, TRAJ35)
CAVFGNVLHC

SEQ ID NO: 522816 - protein, 18 aa, Homo sapiens
  CDR3 for beta chain variable domain of TCR clone 261408 (TRBV4-1, TRBJ1-5)
CASSQDPRGQGLNQPQHF

SEQ ID NO: 522817 - protein, 14 aa, Homo sapiens
  CDR3 for alpha chain variable domain of TCR clone 261409 (TRAV39, TRAJ54)
CAVVLIQGAQKLVF

SEQ ID NO: 522818 - protein, 15 aa, Homo sapiens
  CDR3 for beta chain variable domain of TCR clone 261409 (TRBV2, TRBJ2-1)
CASSELAGSYNEQFF

SEQ ID NO: 522819 - protein, 10 aa, Homo sapiens
  CDR3 for alpha chain variable domain of TCR clone 261410 (TRAV36/DV7, TRAJ49)
CALTGNQFYF

SEQ ID NO: 522820 - protein, 13 aa, Homo sapiens
  CDR3 for beta chain variable domain of TCR clone 261410 (TRBV4-2, TRBJ1-1)
CACSQAGNTEAFF

SEQ ID NO: 522821 - protein, 18 aa, Homo sapiens
  CDR3 for alpha chain variable domain of TCR clone 261411 (TRAV12-3, TRAJ52)
CAMSVGGAGGTSYGKLTF

SEQ ID NO: 522822 - protein, 13 aa, Homo sapiens
  CDR3 for beta chain variable domain of TCR clone 261411 (TRBV7-3, TRBJ2-5)
CASSCRGGETQYF

SEQ ID NO: 522823 - protein, 11 aa, Homo sapiens
  CDR3 for alpha chain variable domain of TCR clone 261412 (TRAV12-3, TRAJ17)
CAMTLSGKLTF

SEQ ID NO: 522824 - protein, 15 aa, Homo sapiens
  CDR3 for beta chain variable domain of TCR clone 261412 (TRBV20-1, TRBJ2-7)
CSARDRVSGMDEQYF

SEQ ID NO: 522825 - protein, 13 aa, Homo sapiens
  CDR3 for alpha chain variable domain of TCR clone 261413 (TRAV8-6, TRAJ32)
CAVSDRATNKLIF

SEQ ID NO: 522826 - protein, 13 aa, Homo sapiens
  CDR3 for beta chain variable domain of TCR clone 261413 (TRBV11-2, TRBJ2-7)
CASSSDLGYEQYF

SEQ ID NO: 522827 - protein, 14 aa, Homo sapiens
  CDR3 for alpha chain variable domain of TCR clone 261414 (TRAV16, TRAJ15)
CALSFNQAGTALMF

SEQ ID NO: 522828 - protein, 16 aa, Homo sapiens
  CDR3 for beta chain variable domain of TCR clone 261414 (TRBV9, TRBJ2-7)
CASSAGPDRSPYEQYF

SEQ ID NO: 522829 - protein, 13 aa, Homo sapiens
  CDR3 for alpha chain variable domain of TCR clone 261415 (TRAV38-1, TRAJ20)
CAFMRDNDYKLSF

SEQ ID NO: 522830 - protein, 12 aa, Homo sapiens
  CDR3 for beta chain variable domain of TCR clone 261415 (TRBV18, TRBJ2-5)
CASSPSKETRYF

SEQ ID NO: 522831 - protein, 16 aa, Homo sapiens
  CDR3 for alpha chain variable domain of TCR clone 261416 (TRAV30, TRAJ26)
CGTESVGDNYGQNFVF

SEQ ID NO: 522832 - protein, 13 aa, Homo sapiens
  CDR3 for beta chain variable domain of TCR clone 261416 (TRBV19, TRBJ1-2)
CASSISEDYGYTC

SEQ ID NO: 522833 - protein, 12 aa, Homo sapiens
  CDR3 for alpha chain variable domain of TCR clone 261417 (TRAV21, TRAJ27)
CAPPGNAGKSTF

SEQ ID NO: 522834 - protein, 13 aa, Homo sapiens
  CDR3 for beta chain variable domain of TCR clone 261417 (TRBV2, TRBJ1-1)
CARNPTGGFHAFL

SEQ ID NO: 522835 - protein, 13 aa, Homo sapiens
  CDR3 for alpha chain variable domain of TCR clone 261418 (TRAV2, TRAJ5)
CAVPDTGRRALTF

SEQ ID NO: 522836 - protein, 12 aa, Homo sapiens
  CDR3 for beta chain variable domain of TCR clone 261418 (TRBV6-3, TRBJ2-1)
CASSGSYNEQFF

SEQ ID NO: 522837 - protein, 11 aa, Homo sapiens
  CDR3 for alpha chain variable domain of TCR clone 261419 (TRAV21, TRAJ34)
CAHYNTDKLIF

SEQ ID NO: 522838 - protein, 13 aa, Homo sapiens
  CDR3 for beta chain variable domain of TCR clone 261419 (TRBV27, TRBJ2-7)
CASSFSQGYEQYF

SEQ ID NO: 522839 - protein, 14 aa, Homo sapiens
  CDR3 for alpha chain variable domain of TCR clone 261420 (TRAV13-1, TRAJ3)
CAASKSSSASKIIF

SEQ ID NO: 522840 - protein, 13 aa, Homo sapiens
  CDR3 for beta chain variable domain of TCR clone 261420 (TRBV25-1, TRBJ2-5)
CASGESGRETQYF

SEQ ID NO: 522841 - protein, 15 aa, Homo sapiens
  CDR3 for alpha chain variable domain of TCR clone 261421 (TRAV20, TRAJ6)
CAVRLQSGGSYIPTF

SEQ ID NO: 522842 - protein, 12 aa, Homo sapiens
  CDR3 for beta chain variable domain of TCR clone 261421 (TRBV5-1, TRBJ2-5)
CASSLGLETQYF

SEQ ID NO: 522843 - protein, 14 aa, Homo sapiens
  CDR3 for alpha chain variable domain of TCR clone 261422 (TRAV35, TRAJ13)
CAGSPSGGFQKVTF

SEQ ID NO: 522844 - protein, 17 aa, Homo sapiens
  CDR3 for beta chain variable domain of TCR clone 261422 (TRBV7-6, TRBJ2-5)
CASSPGLADPWGETQYF

SEQ ID NO: 522845 - protein, 13 aa, Homo sapiens
  CDR3 for alpha chain variable domain of TCR clone 261423 (TRAV12-2, TRAJ53)
CAGVGGSNYKLTF

SEQ ID NO: 522846 - protein, 13 aa, Homo sapiens
  CDR3 for beta chain variable domain of TCR clone 261423 (TRBV7-3, TRBJ1-2)
CASSLKRGYGYTF

SEQ ID NO: 522847 - protein, 15 aa, Homo sapiens
  CDR3 for alpha chain variable domain of TCR clone 261424 (TRAV13-1, TRAJ31)
CAPRDRLMFGGGTQL

SEQ ID NO: 522848 - protein, 12 aa, Homo sapiens
  CDR3 for beta chain variable domain of TCR clone 261424 (TRBV7-9, TRBJ2-7)
CASSLEGYEQYF

SEQ ID NO: 522849 - protein, 16 aa, Homo sapiens
  CDR3 for alpha chain variable domain of TCR clone 261425 (TRAV8-2, TRAJ50)
CVVSDHMKTSYEKVIF

SEQ ID NO: 522850 - protein, 15 aa, Homo sapiens
  CDR3 for beta chain variable domain of TCR clone 261425 (TRBV7-2, TRBJ2-1)
CASSFQADEYNEQFF

SEQ ID NO: 522851 - protein, 14 aa, Homo sapiens
  CDR3 for alpha chain variable domain of TCR clone 261426 (TRAV8-4, TRAJ5)
CAVRLDTGRRALTF

SEQ ID NO: 522852 - protein, 17 aa, Homo sapiens
  CDR3 for beta chain variable domain of TCR clone 261426 (TRBV13, TRBJ2-3)
CASSLSRVAGGRNTQYF

SEQ ID NO: 522853 - protein, 18 aa, Homo sapiens
  CDR3 for alpha chain variable domain of TCR clone 261427 (TRAV21, TRAJ52)
CAVRPSPAGGTSYGKLTF

SEQ ID NO: 522854 - protein, 16 aa, Homo sapiens
  CDR3 for beta chain variable domain of TCR clone 261427 (TRBV10-3, TRBJ2-1)
CAIRGGGRGDYNEQFF

SEQ ID NO: 522855 - protein, 11 aa, Homo sapiens
  CDR3 for alpha chain variable domain of TCR clone 261428 (TRAV1-1, TRAJ30)
CAVSRDDKIIF

SEQ ID NO: 522856 - protein, 14 aa, Homo sapiens
  CDR3 for beta chain variable domain of TCR clone 261428 (TRBV7-2, TRBJ2-7)
CASSPKTSFYEQYF

SEQ ID NO: 522857 - protein, 12 aa, Homo sapiens
  CDR3 for alpha chain variable domain of TCR clone 261429 (TRAV12-3, TRAJ17)
CAMTLTGNTLTF

SEQ ID NO: 522858 - protein, 15 aa, Homo sapiens
  CDR3 for beta chain variable domain of TCR clone 261429 (TRBV20-1, TRBJ2-7)
CGARDRVSGMDEQYF

SEQ ID NO: 522859 - protein, 14 aa, Homo sapiens
  CDR3 for alpha chain variable domain of TCR clone 261430 (TRAV8-3, TRAJ10)
CAVGNAGGGNKLTF

SEQ ID NO: 522860 - protein, 12 aa, Homo sapiens
  CDR3 for beta chain variable domain of TCR clone 261430 (TRBV7-2, TRBJ2-3)
CASNTGTDTQYF

SEQ ID NO: 522861 - protein, 10 aa, Homo sapiens
  CDR3 for alpha chain variable domain of TCR clone 261431 (TRAV30, TRAJ48)
CGIGNEKLTF

SEQ ID NO: 522862 - protein, 15 aa, Homo sapiens
  CDR3 for beta chain variable domain of TCR clone 261431 (TRBV4-1, TRBJ1-2)
CASSQGQGAAYGYTF

SEQ ID NO: 522863 - protein, 15 aa, Homo sapiens
  CDR3 for alpha chain variable domain of TCR clone 261432 (TRAV13-1, TRAJ5)
CAVSPIDTGRRALTF

SEQ ID NO: 522864 - protein, 18 aa, Homo sapiens
  CDR3 for beta chain variable domain of TCR clone 261432 (TRBV4-1, TRBJ2-2)
CASSFRTSGGEGPGELFL

SEQ ID NO: 522865 - protein, 12 aa, Homo sapiens
  CDR3 for alpha chain variable domain of TCR clone 261433 (TRAV36/DV7, TRAJ37)
CACYGNTGKLIF

SEQ ID NO: 522866 - protein, 14 aa, Homo sapiens
  CDR3 for beta chain variable domain of TCR clone 261433 (TRBV6-3, TRBJ1-4)
CASSGQNLNENLFF

SEQ ID NO: 522867 - protein, 15 aa, Homo sapiens
  CDR3 for alpha chain variable domain of TCR clone 261434 (TRAV10, TRAJ43)
CVVSAGRSNNNDMRF

SEQ ID NO: 522868 - protein, 12 aa, Homo sapiens
  CDR3 for beta chain variable domain of TCR clone 261434 (TRBV7-9, TRBJ1-2)
CASSPRGNGYTF

SEQ ID NO: 522869 - protein, 12 aa, Homo sapiens
  CDR3 for alpha chain variable domain of TCR clone 261435 (TRAV1-1, TRAJ39)
CAVPVVGNMLTF

SEQ ID NO: 522870 - protein, 13 aa, Homo sapiens
  CDR3 for beta chain variable domain of TCR clone 261435 (TRBV4-1, TRBJ1-1)
CASSRKMNTEAIF

SEQ ID NO: 522871 - protein, 12 aa, Homo sapiens
  CDR3 for alpha chain variable domain of TCR clone 261436 (TRAV21, TRAJ31)
CAVWGNNARLMF

SEQ ID NO: 522872 - protein, 15 aa, Homo sapiens
  CDR3 for beta chain variable domain of TCR clone 261436 (TRBV12-4, TRBJ2-2)
CASSLVRGLGGELFF

SEQ ID NO: 522873 - protein, 12 aa, Homo sapiens
  CDR3 for alpha chain variable domain of TCR clone 261437 (TRAV16, TRAJ10)
CSRTGGGNKLTF

SEQ ID NO: 522874 - protein, 14 aa, Homo sapiens
  CDR3 for beta chain variable domain of TCR clone 261437 (TRBV6-1, TRBJ1-2)
CASSTGWPPTGYTF

SEQ ID NO: 522875 - protein, 12 aa, Homo sapiens
  CDR3 for alpha chain variable domain of TCR clone 261438 (TRAV12-2, TRAJ30)
CAARNRDDKIIF

SEQ ID NO: 522876 - protein, 15 aa, Homo sapiens
  CDR3 for beta chain variable domain of TCR clone 261438 (TRBV6-3, TRBJ1-5)
RASRVDRWSNQPQHF

SEQ ID NO: 522877 - protein, 16 aa, Homo sapiens
  CDR3 for alpha chain variable domain of TCR clone 261439 (TRAV30, TRAJ24)
CGTEIVDADSWGKFRF

SEQ ID NO: 522878 - protein, 16 aa, Homo sapiens
  CDR3 for beta chain variable domain of TCR clone 261439 (TRBV2, TRBJ1-3)
CASSGGAGRSGNTIYF

SEQ ID NO: 522879 - protein, 12 aa, Homo sapiens
  CDR3 for alpha chain variable domain of TCR clone 261440 (TRAV13-2, TRAJ23)
CAERHRGGKLIF

SEQ ID NO: 522880 - protein, 15 aa, Homo sapiens
  CDR3 for beta chain variable domain of TCR clone 261440 (TRBV27, TRBJ2-1)
CASSNGGWSSNEQFF

SEQ ID NO: 522881 - protein, 14 aa, Homo sapiens
  CDR3 for alpha chain variable domain of TCR clone 261441 (TRAV17, TRAJ34)
CATDSLEGTDKLIF

SEQ ID NO: 522882 - protein, 14 aa, Homo sapiens
  CDR3 for beta chain variable domain of TCR clone 261441 (TRBV10-3, TRBJ2-1)
CAISSDLAYNEQFF

SEQ ID NO: 522883 - protein, 11 aa, Homo sapiens
  CDR3 for alpha chain variable domain of TCR clone 261442 (TRAV1-2, TRAJ20)
CAVSNDYKLSF

SEQ ID NO: 522884 - protein, 17 aa, Homo sapiens
  CDR3 for beta chain variable domain of TCR clone 261442 (TRBV20-1, TRBJ2-7)
CSATRAGGVAGVEEQYF

SEQ ID NO: 522885 - protein, 14 aa, Homo sapiens
  CDR3 for alpha chain variable domain of TCR clone 261443 (TRAV8-3, TRAJ4)
CAVGASGGYNKLIF

SEQ ID NO: 522886 - protein, 15 aa, Homo sapiens
  CDR3 for beta chain variable domain of TCR clone 261443 (TRBV4-1, TRBJ1-2)
CASSKDSTFGYGYTF

SEQ ID NO: 522887 - protein, 13 aa, Homo sapiens
  CDR3 for alpha chain variable domain of TCR clone 261444 (TRAV12-1, TRAJ39)
CVALNNAGNMLTF

SEQ ID NO: 522888 - protein, 14 aa, Homo sapiens
  CDR3 for beta chain variable domain of TCR clone 261444 (TRBV12-5, TRBJ2-5)
CASGSRTHQETQYF

SEQ ID NO: 522889 - protein, 11 aa, Homo sapiens
  CDR3 for alpha chain variable domain of TCR clone 261445 (TRAV35, TRAJ30)
CAGPGDDKIIL

SEQ ID NO: 522890 - protein, 15 aa, Homo sapiens
  CDR3 for beta chain variable domain of TCR clone 261445 (TRBV5-1, TRBJ2-1)
CASSPPRAPYNEQFF

SEQ ID NO: 522891 - protein, 14 aa, Homo sapiens
  CDR3 for alpha chain variable domain of TCR clone 261446 (TRAV13-2, TRAJ39)
CADHPPGAGNMLTF

SEQ ID NO: 522892 - protein, 17 aa, Homo sapiens
  CDR3 for beta chain variable domain of TCR clone 261446 (TRBV15, TRBJ1-4)
CATSRYGTGDPNEKLFF

SEQ ID NO: 522893 - protein, 14 aa, Homo sapiens
  CDR3 for alpha chain variable domain of TCR clone 261447 (TRAV9-2, TRAJ39)
CALYIYNAGNMLTF

SEQ ID NO: 522894 - protein, 13 aa, Homo sapiens
  CDR3 for beta chain variable domain of TCR clone 261447 (TRBV4-1, TRBJ2-5)
CASSLTRGETQYF

SEQ ID NO: 522895 - protein, 17 aa, Homo sapiens
  CDR3 for alpha chain variable domain of TCR clone 261448 (TRAV3, TRAJ6)
CAVRDGPRAGGSYIPTF

SEQ ID NO: 522896 - protein, 13 aa, Homo sapiens
  CDR3 for beta chain variable domain of TCR clone 261448 (TRBV25-1, TRBJ1-5)
CASSGQVNQPQHF

SEQ ID NO: 522897 - protein, 15 aa, Homo sapiens
  CDR3 for alpha chain variable domain of TCR clone 261449 (TRAV3, TRAJ22)
CAVRDRGGSARQLTF

SEQ ID NO: 522898 - protein, 13 aa, Homo sapiens
  CDR3 for beta chain variable domain of TCR clone 261449 (TRBV2, TRBJ1-5)
CATAGPGNQPQHF

SEQ ID NO: 522899 - protein, 12 aa, Homo sapiens
  CDR3 for alpha chain variable domain of TCR clone 261450 (TRAV12-3, TRAJ17)
CAMTLTGNKLTF

SEQ ID NO: 522900 - protein, 15 aa, Homo sapiens
  CDR3 for beta chain variable domain of TCR clone 261450 (TRBV29-1, TRBJ2-6)
CSFTGGWSGANVLTF

SEQ ID NO: 522901 - protein, 16 aa, Homo sapiens
  CDR3 for alpha chain variable domain of TCR clone 261451 (TRAV26-1, TRAJ46)
CIVRVGKEKQRRQADF

SEQ ID NO: 522902 - protein, 14 aa, Homo sapiens
  CDR3 for beta chain variable domain of TCR clone 261451 (TRBV5-1, TRBJ2-2)
CASSLAGGSGELFF

SEQ ID NO: 522903 - protein, 13 aa, Homo sapiens
  CDR3 for alpha chain variable domain of TCR clone 261452 (TRAV1-2, TRAJ12)
CAVSMDSSYKLIF

SEQ ID NO: 522904 - protein, 15 aa, Homo sapiens
  CDR3 for beta chain variable domain of TCR clone 261452 (TRBV27, TRBJ2-5)
CASSLIPSGGETQYL

SEQ ID NO: 522905 - protein, 14 aa, Homo sapiens
  CDR3 for alpha chain variable domain of TCR clone 261453 (TRAV16, TRAJ26)
CALSGCNYGQNFVF

SEQ ID NO: 522906 - protein, 13 aa, Homo sapiens
  CDR3 for beta chain variable domain of TCR clone 261453 (TRBV4-2, TRBJ1-1)
CASSQAGNTEAFF

SEQ ID NO: 522907 - protein, 19 aa, Homo sapiens
  CDR3 for alpha chain variable domain of TCR clone 261454 (TRAV1-2, TRAJ26)
CLLPLCCERPDNYGQNFVF

SEQ ID NO: 522908 - protein, 14 aa, Homo sapiens
  CDR3 for beta chain variable domain of TCR clone 261454 (TRBV7-2, TRBJ2-7)
CASSLPPGQGPQYF

SEQ ID NO: 522909 - protein, 13 aa, Homo sapiens
  CDR3 for alpha chain variable domain of TCR clone 261455 (TRAV3, TRAJ21)
CAVREPDFNKFYF

SEQ ID NO: 522910 - protein, 15 aa, Homo sapiens
  CDR3 for beta chain variable domain of TCR clone 261455 (TRBV12-4, TRBJ2-5)
CASSPGSSRQGTQYF

SEQ ID NO: 522911 - protein, 15 aa, Homo sapiens
  CDR3 for alpha chain variable domain of TCR clone 261456 (TRAV2, TRAJ24)
CAVVRLKNSWGKLTF

SEQ ID NO: 522912 - protein, 16 aa, Homo sapiens
  CDR3 for beta chain variable domain of TCR clone 261456 (TRBV7-7, TRBJ2-3)
CASSPGTSGSTDTQYF

SEQ ID NO: 522913 - protein, 12 aa, Homo sapiens
  CDR3 for alpha chain variable domain of TCR clone 261457 (TRAV21, TRAJ11)
CAATSGYSTLTF

SEQ ID NO: 522914 - protein, 15 aa, Homo sapiens
  CDR3 for beta chain variable domain of TCR clone 261457 (TRBV11-2, TRBJ2-1)
CASSLGTSGLNEQFF

SEQ ID NO: 522915 - protein, 10 aa, Homo sapiens
  CDR3 for alpha chain variable domain of TCR clone 261458 (TRAV23/DV6, TRAJ3)
WAATTFALGG

SEQ ID NO: 522916 - protein, 15 aa, Homo sapiens
  CDR3 for beta chain variable domain of TCR clone 261458 (TRBV19, TRBJ1-6)
CASSTQGAVGSPLHF

SEQ ID NO: 522917 - protein, 14 aa, Homo sapiens
  CDR3 for alpha chain variable domain of TCR clone 261459 (TRAV13-1, TRAJ35)
CAASKGGFGNVLHC

SEQ ID NO: 522918 - protein, 13 aa, Homo sapiens
  CDR3 for beta chain variable domain of TCR clone 261459 (TRBV7-3, TRBJ1-1)
CASSQDWGAGAFF

SEQ ID NO: 522919 - protein, 15 aa, Homo sapiens
  CDR3 for alpha chain variable domain of TCR clone 261460 (TRAV1-1, TRAJ32)
CAVKVDELWWCYKQA

SEQ ID NO: 522920 - protein, 16 aa, Homo sapiens
  CDR3 for beta chain variable domain of TCR clone 261460 (TRBV5-4, TRBJ2-3)
CASQQPGAGGADTQYF

SEQ ID NO: 522921 - protein, 12 aa, Homo sapiens
  CDR3 for alpha chain variable domain of TCR clone 261461 (TRAV8-3, TRAJ26)
CAGDNYGQNFVF

SEQ ID NO: 522922 - protein, 18 aa, Homo sapiens
  CDR3 for beta chain variable domain of TCR clone 261461 (TRBV12-4, TRBJ2-2)
CASSLVAGTRGRTGEMFF

SEQ ID NO: 522923 - protein, 19 aa, Homo sapiens
  CDR3 for alpha chain variable domain of TCR clone 261462 (TRAV16, )
CALSGDIQNPDPAVYQLRD

SEQ ID NO: 522924 - protein, 16 aa, Homo sapiens
  CDR3 for beta chain variable domain of TCR clone 261462 (TRBV12-5, TRBJ2-5)
CASGPRTSGNQETEYF

SEQ ID NO: 522925 - protein, 11 aa, Homo sapiens
  CDR3 for alpha chain variable domain of TCR clone 261463 (TRAV8-3, TRAJ15)
CAVGPGTALIF

SEQ ID NO: 522926 - protein, 12 aa, Homo sapiens
  CDR3 for beta chain variable domain of TCR clone 261463 (TRBV18, TRBJ1-4)
CASSPSREKLFF

SEQ ID NO: 522927 - protein, 18 aa, Homo sapiens
  CDR3 for alpha chain variable domain of TCR clone 261464 (TRAV12-3, TRAJ52)
CAMSVGGAGGASYGKLTL

SEQ ID NO: 522928 - protein, 15 aa, Homo sapiens
  CDR3 for beta chain variable domain of TCR clone 261464 (TRBV27, TRBJ1-6)
CASSFDRGLGSPLHF

SEQ ID NO: 522929 - protein, 13 aa, Homo sapiens
  CDR3 for alpha chain variable domain of TCR clone 261465 (TRAV13-1, TRAJ21)
CAASIYNFNKFYF

SEQ ID NO: 522930 - protein, 15 aa, Homo sapiens
  CDR3 for beta chain variable domain of TCR clone 261465 (TRBV11-3, TRBJ2-3)
CASSAGTVVTNTQYF

SEQ ID NO: 522931 - protein, 13 aa, Homo sapiens
  CDR3 for alpha chain variable domain of TCR clone 261466 (TRAV2, TRAJ40)
CAVVTSGTYKYIF

SEQ ID NO: 522932 - protein, 10 aa, Homo sapiens
  CDR3 for beta chain variable domain of TCR clone 261466 (TRBV19, TRBJ2-1)
RLSLSGEQFF

SEQ ID NO: 522933 - protein, 18 aa, Homo sapiens
  CDR3 for alpha chain variable domain of TCR clone 261467 (TRAV8-4, TRAJ52)
CAVARANAGGTSYGKLTF

SEQ ID NO: 522934 - protein, 20 aa, Homo sapiens
  CDR3 for beta chain variable domain of TCR clone 261467 (TRBV19, TRBJ2-1)
CASSISRTVTSARLNNEQFF

SEQ ID NO: 522935 - protein, 18 aa, Homo sapiens
  CDR3 for alpha chain variable domain of TCR clone 261468 (TRAV21, TRAJ52)
CAVRPSPAGGTSYGKLTF

SEQ ID NO: 522936 - protein, 14 aa, Homo sapiens
  CDR3 for beta chain variable domain of TCR clone 261468 (TRBV25-1, TRBJ1-1)
WASTHLGGNTEAFF

SEQ ID NO: 522937 - protein, 15 aa, Homo sapiens
  CDR3 for alpha chain variable domain of TCR clone 261469 (TRAV3, TRAJ22)
CAVRDRGGSARQLTF

SEQ ID NO: 522938 - protein, 14 aa, Homo sapiens
  CDR3 for beta chain variable domain of TCR clone 261469 (TRBV7-2, TRBJ2-5)
CASSLVVGQETQYF

SEQ ID NO: 522939 - protein, 16 aa, Homo sapiens
  CDR3 for alpha chain variable domain of TCR clone 261470 (TRAV12-2, TRAJ10)
CAVNRVLTGGGNKLTF

SEQ ID NO: 522940 - protein, 20 aa, Homo sapiens
  CDR3 for beta chain variable domain of TCR clone 261470 (TRBV28, TRBJ2-1)
CASTPIGRSPGLAGGNEQFF

SEQ ID NO: 522941 - protein, 13 aa, Homo sapiens
  CDR3 for alpha chain variable domain of TCR clone 261471 (TRAV27, TRAJ11)
CAGARSGYSTLTF

SEQ ID NO: 522942 - protein, 17 aa, Homo sapiens
  CDR3 for beta chain variable domain of TCR clone 261471 (TRBV4-1, TRBJ2-7)
CASSRDPLGVRGGEQYF

SEQ ID NO: 522943 - protein, 17 aa, Homo sapiens
  CDR3 for alpha chain variable domain of TCR clone 261472 (TRAV3, TRAJ6)
CPVRDGPRAGGSYIPTF

SEQ ID NO: 522944 - protein, 12 aa, Homo sapiens
  CDR3 for beta chain variable domain of TCR clone 261472 (TRBV5-4, TRBJ2-5)
CASSSTRETQYF

SEQ ID NO: 522945 - protein, 16 aa, Homo sapiens
  CDR3 for alpha chain variable domain of TCR clone 261473 (TRAV12-1, TRAJ53)
CVVTSVAGGSNYKLTF

SEQ ID NO: 522946 - protein, 16 aa, Homo sapiens
  CDR3 for beta chain variable domain of TCR clone 261473 (TRBV6-6, TRBJ2-3)
CASSYSHAGSTDTRYF

SEQ ID NO: 522947 - protein, 13 aa, Homo sapiens
  CDR3 for alpha chain variable domain of TCR clone 261474 (TRAV17, TRAJ5)
CATGDTGRRALTF

SEQ ID NO: 522948 - protein, 13 aa, Homo sapiens
  CDR3 for beta chain variable domain of TCR clone 261474 (TRBV19, TRBJ1-5)
CASSIEPGQPQHF

SEQ ID NO: 522949 - protein, 14 aa, Homo sapiens
  CDR3 for alpha chain variable domain of TCR clone 261475 (TRAV8-3, TRAJ13)
CAVGAQEGYQKVTF

SEQ ID NO: 522950 - protein, 15 aa, Homo sapiens
  CDR3 for beta chain variable domain of TCR clone 261475 (TRBV3-1, TRBJ1-1)
CASKMRATINTEAFF

SEQ ID NO: 522951 - protein, 14 aa, Homo sapiens
  CDR3 for alpha chain variable domain of TCR clone 261476 (TRAV20, TRAJ29)
CALQAWVVNTPLVF

SEQ ID NO: 522952 - protein, 15 aa, Homo sapiens
  CDR3 for beta chain variable domain of TCR clone 261476 (TRBV29-1, TRBJ2-7)
CSVEFFDRGSYEQYF

SEQ ID NO: 522953 - protein, 14 aa, Homo sapiens
  CDR3 for alpha chain variable domain of TCR clone 261477 (TRAV1-2, TRAJ8)
CAVREDTGFQKLVF

SEQ ID NO: 522954 - protein, 14 aa, Homo sapiens
  CDR3 for beta chain variable domain of TCR clone 261477 (TRBV15, TRBJ1-1)
CHQSTGGRNTEAFF

SEQ ID NO: 522955 - protein, 13 aa, Homo sapiens
  CDR3 for alpha chain variable domain of TCR clone 261478 (TRAV12-3, TRAJ33)
CAMSVNSNYQLIW

SEQ ID NO: 522956 - protein, 18 aa, Homo sapiens
  CDR3 for beta chain variable domain of TCR clone 261478 (TRBV11-2, TRBJ2-6)
CASSLSPFLGTGANVLTF

SEQ ID NO: 522957 - protein, 14 aa, Homo sapiens
  CDR3 for alpha chain variable domain of TCR clone 261479 (TRAV20, TRAJ10)
YAVRVEGGGNKLTF

SEQ ID NO: 522958 - protein, 18 aa, Homo sapiens
  CDR3 for beta chain variable domain of TCR clone 261479 (TRBV24-1, TRBJ2-1)
CATSDLMFLGRGVHEQFF

SEQ ID NO: 522959 - protein, 15 aa, Homo sapiens
  CDR3 for alpha chain variable domain of TCR clone 261480 (TRAV8-3, TRAJ37)
CAVGSPSSNTGKLIF

SEQ ID NO: 522960 - protein, 15 aa, Homo sapiens
  CDR3 for beta chain variable domain of TCR clone 261480 (TRBV11-2, TRBJ1-2)
CASSQMRGLNYGYTF

SEQ ID NO: 522961 - protein, 19 aa, Homo sapiens
  CDR3 for alpha chain variable domain of TCR clone 261481 (TRAV2, TRAJ20)
ILQVREADAAVYRDCKLSF

SEQ ID NO: 522962 - protein, 16 aa, Homo sapiens
  CDR3 for beta chain variable domain of TCR clone 261481 (TRBV19, TRBJ2-1)
CASSKAGPSSYNVQFF

SEQ ID NO: 522963 - protein, 12 aa, Homo sapiens
  CDR3 for alpha chain variable domain of TCR clone 261482 (TRAV1-2, TRAJ29)
CAVPSGNTPLVF

SEQ ID NO: 522964 - protein, 16 aa, Homo sapiens
  CDR3 for beta chain variable domain of TCR clone 261482 (TRBV6-6, TRBJ1-5)
CASSYSTLVGNQPQHF

SEQ ID NO: 522965 - protein, 13 aa, Homo sapiens
  CDR3 for alpha chain variable domain of TCR clone 261483 (TRAV2, TRAJ40)
CAVVTSGTYTYIF

SEQ ID NO: 522966 - protein, 12 aa, Homo sapiens
  CDR3 for beta chain variable domain of TCR clone 261483 (TRBV14, TRBJ2-7)
CASSRLKGERYF

SEQ ID NO: 522967 - protein, 13 aa, Homo sapiens
  CDR3 for alpha chain variable domain of TCR clone 261484 (TRAV21, TRAJ27)
CAARPGNAGKSTF

SEQ ID NO: 522968 - protein, 16 aa, Homo sapiens
  CDR3 for beta chain variable domain of TCR clone 261484 (TRBV19, TRBJ1-3)
CASSMDRALPGNTIYF

SEQ ID NO: 522969 - protein, 13 aa, Homo sapiens
  CDR3 for alpha chain variable domain of TCR clone 261485 (TRAV8-3, TRAJ47)
CAVSLEYGNKLVF

SEQ ID NO: 522970 - protein, 14 aa, Homo sapiens
  CDR3 for beta chain variable domain of TCR clone 261485 (TRBV2, TRBJ1-5)
CASSGTGFNQPQHF

SEQ ID NO: 522971 - protein, 14 aa, Homo sapiens
  CDR3 for alpha chain variable domain of TCR clone 261486 (TRAV12-2, TRAJ45)
CALPERGDADGLTF

SEQ ID NO: 522972 - protein, 14 aa, Homo sapiens
  CDR3 for beta chain variable domain of TCR clone 261486 (TRBV18, TRBJ1-5)
CASSPGNSNQPQHF

SEQ ID NO: 522973 - protein, 12 aa, Homo sapiens
  CDR3 for alpha chain variable domain of TCR clone 261487 (TRAV2, TRAJ31)
CSVDDNNARLMF

SEQ ID NO: 522974 - protein, 16 aa, Homo sapiens
  CDR3 for beta chain variable domain of TCR clone 261487 (TRBV10-3, TRBJ2-1)
CAISGVGDGGGGEQFF

SEQ ID NO: 522975 - protein, 17 aa, Homo sapiens
  CDR3 for alpha chain variable domain of TCR clone 261488 (TRAV3, TRAJ12)
CAVRDGGRMDSSYKLIF

SEQ ID NO: 522976 - protein, 14 aa, Homo sapiens
  CDR3 for beta chain variable domain of TCR clone 261488 (TRBV12-4, TRBJ1-1)
CASSLGTGGTEAVF

SEQ ID NO: 522977 - protein, 11 aa, Homo sapiens
  CDR3 for alpha chain variable domain of TCR clone 261489 (TRAV36/DV7, TRAJ20)
CAANNDYKLSF

SEQ ID NO: 522978 - protein, 14 aa, Homo sapiens
  CDR3 for beta chain variable domain of TCR clone 261489 (TRBV9, TRBJ2-7)
CASSVGVGSYEQYF

SEQ ID NO: 522979 - protein, 11 aa, Homo sapiens
  CDR3 for alpha chain variable domain of TCR clone 261490 (TRAV13-1, TRAJ8)
CASRGFQKLVL

SEQ ID NO: 522980 - protein, 16 aa, Homo sapiens
  CDR3 for beta chain variable domain of TCR clone 261490 (TRBV19, TRBJ1-5)
CASSTRGTRSNQPQHF

SEQ ID NO: 522981 - protein, 18 aa, Homo sapiens
  CDR3 for alpha chain variable domain of TCR clone 261491 (TRAV26-1, TRAJ52)
CIVRVEGAGGTSYGKLSF

SEQ ID NO: 522982 - protein, 13 aa, Homo sapiens
  CDR3 for beta chain variable domain of TCR clone 261491 (TRBV7-3, TRBJ1-2)
CASSLKRGYGYSF

SEQ ID NO: 522983 - protein, 13 aa, Homo sapiens
  CDR3 for alpha chain variable domain of TCR clone 261492 (TRAV17, TRAJ29)
CATFGSGNTPLVF

SEQ ID NO: 522984 - protein, 13 aa, Homo sapiens
  CDR3 for beta chain variable domain of TCR clone 261492 (TRBV28, TRBJ2-7)
CASTPGLAGEQYF

SEQ ID NO: 522985 - protein, 13 aa, Homo sapiens
  CDR3 for alpha chain variable domain of TCR clone 261493 (TRAV20, TRAJ37)
CAGCSSNSGKLIL

SEQ ID NO: 522986 - protein, 11 aa, Homo sapiens
  CDR3 for beta chain variable domain of TCR clone 261493 (TRBV12-4, TRBJ2-3)
CASTATDTQYF

SEQ ID NO: 522987 - protein, 14 aa, Homo sapiens
  CDR3 for alpha chain variable domain of TCR clone 261494 (TRAV13-2, TRAJ15)
CAENPNQAGTALIF

SEQ ID NO: 522988 - protein, 14 aa, Homo sapiens
  CDR3 for beta chain variable domain of TCR clone 261494 (TRBV12-5, TRBJ2-5)
CASGSRTHQETQYF

SEQ ID NO: 522989 - protein, 13 aa, Homo sapiens
  CDR3 for alpha chain variable domain of TCR clone 261495 (TRAV26-1, TRAJ48)
CIVRAVGDEKLTF

SEQ ID NO: 522990 - protein, 17 aa, Homo sapiens
  CDR3 for beta chain variable domain of TCR clone 261495 (TRBV7-3, TRBJ2-2)
CASSLSGTSGGTGELFF

SEQ ID NO: 522991 - protein, 18 aa, Homo sapiens
  CDR3 for alpha chain variable domain of TCR clone 261496 (TRAV12-3, TRAJ52)
CAMSVGGAGGTSYGKLTF

SEQ ID NO: 522992 - protein, 15 aa, Homo sapiens
  CDR3 for beta chain variable domain of TCR clone 261496 (TRBV27, TRBJ1-6)
CASSIDRGLGSPRHF

SEQ ID NO: 522993 - protein, 13 aa, Homo sapiens
  CDR3 for alpha chain variable domain of TCR clone 261497 (TRAV12-1, TRAJ33)
CGDAPDSNYQLIW

SEQ ID NO: 522994 - protein, 15 aa, Homo sapiens
  CDR3 for beta chain variable domain of TCR clone 261497 (TRBV5-1, TRBJ2-5)
CASSFKGGDQETQYF

SEQ ID NO: 522995 - protein, 15 aa, Homo sapiens
  CDR3 for alpha chain variable domain of TCR clone 261498 (TRAV3, TRAJ45)
CAVRTPWVGADGLTF

SEQ ID NO: 522996 - protein, 16 aa, Homo sapiens
  CDR3 for beta chain variable domain of TCR clone 261498 (TRBV7-3, TRBJ2-3)
CASSLSGYRPEDTQYF

SEQ ID NO: 522997 - protein, 14 aa, Homo sapiens
  CDR3 for alpha chain variable domain of TCR clone 261499 (TRAV13-1, TRAJ44)
CAAKATGTASKLTF

SEQ ID NO: 522998 - protein, 13 aa, Homo sapiens
  CDR3 for beta chain variable domain of TCR clone 261499 (TRBV11-2, TRBJ2-1)
CASSLRLTHEQFF

SEQ ID NO: 522999 - protein, 14 aa, Homo sapiens
  CDR3 for alpha chain variable domain of TCR clone 261500 (TRAV1-2, TRAJ8)
CAVREDTGFQTLVF

SEQ ID NO: 523000 - protein, 16 aa, Homo sapiens
  CDR3 for beta chain variable domain of TCR clone 261500 (TRBV20-1, TRBJ2-4)
CSARAILAGQGDIQYF

SEQ ID NO: 523001 - protein, 14 aa, Homo sapiens
  CDR3 for alpha chain variable domain of TCR clone 261501 (TRAV38-1, TRAJ40)
CALRPTSGTYNYIF

SEQ ID NO: 523002 - protein, 12 aa, Homo sapiens
  CDR3 for beta chain variable domain of TCR clone 261501 (TRBV11-2, TRBJ2-2)
CASSLGGGGLFF

SEQ ID NO: 523003 - protein, 17 aa, Homo sapiens
  CDR3 for alpha chain variable domain of TCR clone 261502 (TRAV14/DV4, TRAJ28)
CAMRGTSSGAGSYQLTF

SEQ ID NO: 523004 - protein, 13 aa, Homo sapiens
  CDR3 for beta chain variable domain of TCR clone 261502 (TRBV28, TRBJ2-5)
CASSFAGGDTQYF

SEQ ID NO: 523005 - protein, 16 aa, Homo sapiens
  CDR3 for alpha chain variable domain of TCR clone 261503 (TRAV1-2, TRAJ10)
CAVRGVFTGGGNKLTF

SEQ ID NO: 523006 - protein, 12 aa, Homo sapiens
  CDR3 for beta chain variable domain of TCR clone 261503 (TRBV5-1, TRBJ1-1)
CASSLTGAEAFF

SEQ ID NO: 523007 - protein, 15 aa, Homo sapiens
  CDR3 for alpha chain variable domain of TCR clone 261504 (TRAV2, TRAJ32)
CAVANYGGATNKLIS

SEQ ID NO: 523008 - protein, 15 aa, Homo sapiens
  CDR3 for beta chain variable domain of TCR clone 261504 (TRBV7-7, TRBJ2-5)
CASSQLERAEETQYF

SEQ ID NO: 523009 - protein, 11 aa, Homo sapiens
  CDR3 for alpha chain variable domain of TCR clone 261505 (TRAV12-1, TRAJ3)
CVVSSASKIIF

SEQ ID NO: 523010 - protein, 13 aa, Homo sapiens
  CDR3 for beta chain variable domain of TCR clone 261505 (TRBV12-5, TRBJ2-3)
CASGDRQSDTQYF

SEQ ID NO: 523011 - protein, 16 aa, Homo sapiens
  CDR3 for alpha chain variable domain of TCR clone 261506 (TRAV25, TRAJ24)
CAQRRGATDSWGKLQF

SEQ ID NO: 523012 - protein, 14 aa, Homo sapiens
  CDR3 for beta chain variable domain of TCR clone 261506 (TRBV6-6, TRBJ1-5)
CASSYGPANQPQHF

SEQ ID NO: 523013 - protein, 18 aa, Homo sapiens
  CDR3 for alpha chain variable domain of TCR clone 261507 (TRAV21, TRAJ52)
CAVRPSPAGGTSYGKLTF

SEQ ID NO: 523014 - protein, 13 aa, Homo sapiens
  CDR3 for beta chain variable domain of TCR clone 261507 (TRBV10-3, TRBJ2-7)
CASKLAVNCEQYF

SEQ ID NO: 523015 - protein, 14 aa, Homo sapiens
  CDR3 for alpha chain variable domain of TCR clone 261508 (TRAV13-1, TRAJ20)
CAARPGSNDYKLSL

SEQ ID NO: 523016 - protein, 13 aa, Homo sapiens
  CDR3 for beta chain variable domain of TCR clone 261508 (TRBV6-6, TRBJ2-7)
CASSSSGSYEQYF

SEQ ID NO: 523017 - protein, 15 aa, Homo sapiens
  CDR3 for alpha chain variable domain of TCR clone 261509 (TRAV35, TRAJ50)
CAGQLRKTSYDKVIF

SEQ ID NO: 523018 - protein, 12 aa, Homo sapiens
  CDR3 for beta chain variable domain of TCR clone 261509 (TRBV5-1, TRBJ2-5)
CASSLGFETQYF

SEQ ID NO: 523019 - protein, 15 aa, Homo sapiens
  CDR3 for alpha chain variable domain of TCR clone 261510 (TRAV27, TRAJ38)
CAARRNAGNNRKLNW

SEQ ID NO: 523020 - protein, 13 aa, Homo sapiens
  CDR3 for beta chain variable domain of TCR clone 261510 (TRBV10-3, TRBJ2-7)
CASKLAVNYEQYF

SEQ ID NO: 523021 - protein, 13 aa, Homo sapiens
  CDR3 for alpha chain variable domain of TCR clone 261511 (TRAV26-2, TRAJ43)
CILRAVNNNDMRF

SEQ ID NO: 523022 - protein, 16 aa, Homo sapiens
  CDR3 for beta chain variable domain of TCR clone 261511 (TRBV2, TRBJ2-5)
CASSETQGVGEETQYF

SEQ ID NO: 523023 - protein, 15 aa, Homo sapiens
  CDR3 for alpha chain variable domain of TCR clone 261512 (TRAV23/DV6, TRAJ18)
CAARYRGSTLGRLYF

SEQ ID NO: 523024 - protein, 16 aa, Homo sapiens
  CDR3 for beta chain variable domain of TCR clone 261512 (TRBV20-1, TRBJ1-2)
CSASMGQGVANYSYTF

SEQ ID NO: 523025 - protein, 14 aa, Homo sapiens
  CDR3 for alpha chain variable domain of TCR clone 261513 (TRAV25, TRAJ44)
CAVFPTGTASELTF

SEQ ID NO: 523026 - protein, 14 aa, Homo sapiens
  CDR3 for beta chain variable domain of TCR clone 261513 (TRBV19, TRBJ1-1)
CASTGHRLNTEAFF

SEQ ID NO: 523027 - protein, 18 aa, Homo sapiens
  CDR3 for alpha chain variable domain of TCR clone 261514 (TRAV12-1, TRAJ52)
CVVKLINAGGTSYGKLTF

SEQ ID NO: 523028 - protein, 15 aa, Homo sapiens
  CDR3 for beta chain variable domain of TCR clone 261514 (TRBV7-6, TRBJ2-7)
CQQRGTGALSYEQYF

SEQ ID NO: 523029 - protein, 15 aa, Homo sapiens
  CDR3 for alpha chain variable domain of TCR clone 261515 (TRAV2, TRAJ15)
CAVEVRGQAGTALIF

SEQ ID NO: 523030 - protein, 12 aa, Homo sapiens
  CDR3 for beta chain variable domain of TCR clone 261515 (TRBV7-2, TRBJ2-7)
CASSSHSYEQYF

SEQ ID NO: 523031 - protein, 12 aa, Homo sapiens
  CDR3 for alpha chain variable domain of TCR clone 261516 (TRAV13-2, TRAJ23)
CAERHRGGKLNF

SEQ ID NO: 523032 - protein, 13 aa, Homo sapiens
  CDR3 for beta chain variable domain of TCR clone 261516 (TRBV7-9, TRBJ2-3)
CASSPGSTDTQYF

SEQ ID NO: 523033 - protein, 15 aa, Homo sapiens
  CDR3 for alpha chain variable domain of TCR clone 261517 (TRAV3, TRAJ5)
CAGRDLATGRRALTF

SEQ ID NO: 523034 - protein, 15 aa, Homo sapiens
  CDR3 for beta chain variable domain of TCR clone 261517 (TRBV20-1, TRBJ2-1)
CSARSPGGPGNEQFF

SEQ ID NO: 523035 - protein, 17 aa, Homo sapiens
  CDR3 for alpha chain variable domain of TCR clone 261518 (TRAV14/DV4, TRAJ28)
CAMREVSSGAGSYQLTC

SEQ ID NO: 523036 - protein, 15 aa, Homo sapiens
  CDR3 for beta chain variable domain of TCR clone 261518 (TRBV11-2, TRBJ1-6)
CASTLRETGNSPLHF

SEQ ID NO: 523037 - protein, 16 aa, Homo sapiens
  CDR3 for alpha chain variable domain of TCR clone 261519 (TRAV20, TRAJ26)
CAVQHRRDNYGQNFVF

SEQ ID NO: 523038 - protein, 19 aa, Homo sapiens
  CDR3 for beta chain variable domain of TCR clone 261519 (TRBV11-3, TRBJ2-2)
CASSTRPGAKTTNTGELFF

SEQ ID NO: 523039 - protein, 14 aa, Homo sapiens
  CDR3 for alpha chain variable domain of TCR clone 261520 (TRAV3, TRAJ37)
CAVKEPGNTGKLIF

SEQ ID NO: 523040 - protein, 14 aa, Homo sapiens
  CDR3 for beta chain variable domain of TCR clone 261520 (TRBV2, TRBJ1-5)
CASSENRGGQPQHF

SEQ ID NO: 523041 - protein, 17 aa, Homo sapiens
  CDR3 for alpha chain variable domain of TCR clone 261521 (TRAV8-6, TRAJ58)
CAVSSWVGETSGSRLTF

SEQ ID NO: 523042 - protein, 12 aa, Homo sapiens
  CDR3 for beta chain variable domain of TCR clone 261521 (TRBV28, TRBJ2-3)
CASSLYRDTQYC

SEQ ID NO: 523043 - protein, 16 aa, Homo sapiens
  CDR3 for alpha chain variable domain of TCR clone 261522 (TRAV24, TRAJ53)
CAFNMGGGGSNYKLTF

SEQ ID NO: 523044 - protein, 14 aa, Homo sapiens
  CDR3 for beta chain variable domain of TCR clone 261522 (TRBV7-8, TRBJ2-5)
CASSATGGQETQYF

SEQ ID NO: 523045 - protein, 15 aa, Homo sapiens
  CDR3 for alpha chain variable domain of TCR clone 261523 (TRAV12-1, TRAJ44)
CVGFVNTGTASKLTF

SEQ ID NO: 523046 - protein, 17 aa, Homo sapiens
  CDR3 for beta chain variable domain of TCR clone 261523 (TRBV7-8, TRBJ2-6)
CASSAGTGGAGANVLTF

SEQ ID NO: 523047 - protein, 14 aa, Homo sapiens
  CDR3 for alpha chain variable domain of TCR clone 261524 (TRAV12-3, TRAJ50)
CAMSPKTSYDKVIF

SEQ ID NO: 523048 - protein, 15 aa, Homo sapiens
  CDR3 for beta chain variable domain of TCR clone 261524 (TRBV5-1, TRBJ2-3)
CASSVTAGSTDTQYF

SEQ ID NO: 523049 - protein, 16 aa, Homo sapiens
  CDR3 for alpha chain variable domain of TCR clone 261525 (TRAV12-3, TRAJ53)
CAMSPGSGGSNYKLAL

SEQ ID NO: 523050 - protein, 11 aa, Homo sapiens
  CDR3 for beta chain variable domain of TCR clone 261525 (TRBV29-1, TRBJ2-5)
CSEDRTGTQYF

SEQ ID NO: 523051 - protein, 15 aa, Homo sapiens
  CDR3 for alpha chain variable domain of TCR clone 261526 (TRAV4, TRAJ39)
CLVGPNNNAGNMLTF

SEQ ID NO: 523052 - protein, 20 aa, Homo sapiens
  CDR3 for beta chain variable domain of TCR clone 261526 (TRBV7-8, TRBJ2-2)
CASSHLFPGPTIHITGELFF

SEQ ID NO: 523053 - protein, 13 aa, Homo sapiens
  CDR3 for alpha chain variable domain of TCR clone 261527 (TRAV30, TRAJ20)
CGTEDRSDYKLSF

SEQ ID NO: 523054 - protein, 12 aa, Homo sapiens
  CDR3 for beta chain variable domain of TCR clone 261527 (TRBV12-4, TRBJ2-7)
CASSLGGYEQYF

SEQ ID NO: 523055 - protein, 12 aa, Homo sapiens
  CDR3 for alpha chain variable domain of TCR clone 261528 (TRAV30, TRAJ20)
CATESNDYKLSF

SEQ ID NO: 523056 - protein, 15 aa, Homo sapiens
  CDR3 for beta chain variable domain of TCR clone 261528 (TRBV20-1, TRBJ2-7)
CSARDRVSGMDEQYF

SEQ ID NO: 523057 - protein, 14 aa, Homo sapiens
  CDR3 for alpha chain variable domain of TCR clone 261529 (TRAV1-2, TRAJ8)
CAVREDTGFRKLVF

SEQ ID NO: 523058 - protein, 16 aa, Homo sapiens
  CDR3 for beta chain variable domain of TCR clone 261529 (TRBV7-3, TRBJ2-2)
CASSLKRGTLSGELFF

SEQ ID NO: 523059 - protein, 13 aa, Homo sapiens
  CDR3 for alpha chain variable domain of TCR clone 261530 (TRAV2, TRAJ15)
CAVASQAGTALIF

SEQ ID NO: 523060 - protein, 15 aa, Homo sapiens
  CDR3 for beta chain variable domain of TCR clone 261530 (TRBV7-8, TRBJ1-2)
CASSPSRGGGYGYTF

SEQ ID NO: 523061 - protein, 15 aa, Homo sapiens
  CDR3 for alpha chain variable domain of TCR clone 261531 (TRAV17, TRAJ28)
CATVDSGAGSYQLTF

SEQ ID NO: 523062 - protein, 13 aa, Homo sapiens
  CDR3 for beta chain variable domain of TCR clone 261531 (TRBV5-4, TRBJ2-5)
CASSRQEGETRYF

SEQ ID NO: 523063 - protein, 12 aa, Homo sapiens
  CDR3 for alpha chain variable domain of TCR clone 261532 (TRAV3, TRAJ43)
CAVRDPNNDMRL

SEQ ID NO: 523064 - protein, 17 aa, Homo sapiens
  CDR3 for beta chain variable domain of TCR clone 261532 (TRBV7-8, TRBJ2-6)
CASSAGTGGAGANVLTF

SEQ ID NO: 523065 - protein, 16 aa, Homo sapiens
  CDR3 for alpha chain variable domain of TCR clone 261533 (TRAV16, TRAJ4)
CALSRMFSGGYNKLIF

SEQ ID NO: 523066 - protein, 16 aa, Homo sapiens
  CDR3 for beta chain variable domain of TCR clone 261533 (TRBV24-1, TRBJ2-3)
CATSDPGTGATDTQCF

SEQ ID NO: 523067 - protein, 14 aa, Homo sapiens
  CDR3 for alpha chain variable domain of TCR clone 261534 (TRAV12-2, TRAJ13)
CAVKKTGGYQKVTF

SEQ ID NO: 523068 - protein, 15 aa, Homo sapiens
  CDR3 for beta chain variable domain of TCR clone 261534 (TRBV5-1, TRBJ2-5)
CASSLVLAEQETQYF

SEQ ID NO: 523069 - protein, 12 aa, Homo sapiens
  CDR3 for alpha chain variable domain of TCR clone 261535 (TRAV12-2, TRAJ9)
CAVNTGGFKTIF

SEQ ID NO: 523070 - protein, 15 aa, Homo sapiens
  CDR3 for beta chain variable domain of TCR clone 261535 (TRBV7-2, TRBJ2-2)
CASRRPGQNTGEPFF

SEQ ID NO: 523071 - protein, 11 aa, Homo sapiens
  CDR3 for alpha chain variable domain of TCR clone 261536 (TRAV8-3, TRAJ15)
CAVGPGTALIF

SEQ ID NO: 523072 - protein, 15 aa, Homo sapiens
  CDR3 for beta chain variable domain of TCR clone 261536 (TRBV7-9, TRBJ2-7)
CATSLALAEAYEQYF

SEQ ID NO: 523073 - protein, 14 aa, Homo sapiens
  CDR3 for alpha chain variable domain of TCR clone 261537 (TRAV16, TRAJ15)
CALRPNHAGTALIF

SEQ ID NO: 523074 - protein, 16 aa, Homo sapiens
  CDR3 for beta chain variable domain of TCR clone 261537 (TRBV6-5, TRBJ2-2)
CASSYGRVPDTGELFF

SEQ ID NO: 523075 - protein, 13 aa, Homo sapiens
  CDR3 for alpha chain variable domain of TCR clone 261538 (TRAV8-3, TRAJ21)
CAVGAYNFNRFYF

SEQ ID NO: 523076 - protein, 16 aa, Homo sapiens
  CDR3 for beta chain variable domain of TCR clone 261538 (TRBV19, TRBJ2-1)
CASSMGGGSSYNEQFF

SEQ ID NO: 523077 - protein, 14 aa, Homo sapiens
  CDR3 for alpha chain variable domain of TCR clone 261539 (TRAV35, TRAJ22)
CAGLRPGSARQLTF

SEQ ID NO: 523078 - protein, 13 aa, Homo sapiens
  CDR3 for beta chain variable domain of TCR clone 261539 (TRBV20-1, TRBJ2-7)
CSATHTSGYEQYL

SEQ ID NO: 523079 - protein, 16 aa, Homo sapiens
  CDR3 for alpha chain variable domain of TCR clone 261540 (TRAV12-1, TRAJ43)
CVVNPHRFGAGTRLTV

SEQ ID NO: 523080 - protein, 13 aa, Homo sapiens
  CDR3 for beta chain variable domain of TCR clone 261540 (TRBV20-1, TRBJ1-1)
CGARGGGNTEAFF

SEQ ID NO: 523081 - protein, 14 aa, Homo sapiens
  CDR3 for alpha chain variable domain of TCR clone 261541 (TRAV1-2, TRAJ6)
CAVSLSGGSYIPTF

SEQ ID NO: 523082 - protein, 15 aa, Homo sapiens
  CDR3 for beta chain variable domain of TCR clone 261541 (TRBV28, TRBJ2-7)
CASSPGGRSFYEQYF

SEQ ID NO: 523083 - protein, 15 aa, Homo sapiens
  CDR3 for alpha chain variable domain of TCR clone 261542 (TRAV8-2, TRAJ40)
CVVLGTTSGTYKYIF

SEQ ID NO: 523084 - protein, 16 aa, Homo sapiens
  CDR3 for beta chain variable domain of TCR clone 261542 (TRBV7-3, TRBJ2-1)
CASSLEGDRPYNEQFF

SEQ ID NO: 523085 - protein, 13 aa, Homo sapiens
  CDR3 for alpha chain variable domain of TCR clone 261543 (TRAV21, TRAJ20)
CAVGPRVDYKLSF

SEQ ID NO: 523086 - protein, 14 aa, Homo sapiens
  CDR3 for beta chain variable domain of TCR clone 261543 (TRBV7-2, TRBJ2-5)
CASSPRGSSETQYF

SEQ ID NO: 523087 - protein, 13 aa, Homo sapiens
  CDR3 for alpha chain variable domain of TCR clone 261544 (TRAV23/DV6, TRAJ21)
CAASREQLHQILL

SEQ ID NO: 523088 - protein, 16 aa, Homo sapiens
  CDR3 for beta chain variable domain of TCR clone 261544 (TRBV20-1, TRBJ2-3)
CSAVRDRGPIADTQYF

SEQ ID NO: 523089 - protein, 12 aa, Homo sapiens
  CDR3 for alpha chain variable domain of TCR clone 261545 (TRAV8-3, TRAJ26)
CAGDNYGQNFVF

SEQ ID NO: 523090 - protein, 16 aa, Homo sapiens
  CDR3 for beta chain variable domain of TCR clone 261545 (TRBV7-2, TRBJ1-6)
CASSSFESSYNSPLHF

SEQ ID NO: 523091 - protein, 17 aa, Homo sapiens
  CDR3 for alpha chain variable domain of TCR clone 261546 (TRAV8-6, TRAJ58)
CAVSSWVGETSGSRLTF

SEQ ID NO: 523092 - protein, 14 aa, Homo sapiens
  CDR3 for beta chain variable domain of TCR clone 261546 (TRBV19, TRBJ2-1)
CASPTVVLSGEQFF

SEQ ID NO: 523093 - protein, 11 aa, Homo sapiens
  CDR3 for alpha chain variable domain of TCR clone 261547 (TRAV12-3, TRAJ27)
CAMANAGKSTF

SEQ ID NO: 523094 - protein, 15 aa, Homo sapiens
  CDR3 for beta chain variable domain of TCR clone 261547 (TRBV2, TRBJ2-2)
CASSRQGPNTGELFF

SEQ ID NO: 523095 - protein, 13 aa, Homo sapiens
  CDR3 for alpha chain variable domain of TCR clone 261548 (TRAV21, TRAJ20)
CAVGLRVDYKLSF

SEQ ID NO: 523096 - protein, 12 aa, Homo sapiens
  CDR3 for beta chain variable domain of TCR clone 261548 (TRBV12-4, TRBJ2-3)
CASSSTTDTQYF

SEQ ID NO: 523097 - protein, 12 aa, Homo sapiens
  CDR3 for alpha chain variable domain of TCR clone 261549 (TRAV12-3, TRAJ39)
CAMTQAGSMLTF

SEQ ID NO: 523098 - protein, 14 aa, Homo sapiens
  CDR3 for beta chain variable domain of TCR clone 261549 (TRBV11-1, TRBJ2-7)
CASSFRQGSYEQYF

SEQ ID NO: 523099 - protein, 12 aa, Homo sapiens
  CDR3 for alpha chain variable domain of TCR clone 261550 (TRAV1-1, TRAJ12)
CAVGDSSYKLIF

SEQ ID NO: 523100 - protein, 14 aa, Homo sapiens
  CDR3 for beta chain variable domain of TCR clone 261550 (TRBV15, TRBJ2-3)
CATARGGGGDTQYF

SEQ ID NO: 523101 - protein, 13 aa, Homo sapiens
  CDR3 for alpha chain variable domain of TCR clone 261551 (TRAV16, TRAJ27)
CALRRTNAGKSTF

SEQ ID NO: 523102 - protein, 14 aa, Homo sapiens
  CDR3 for beta chain variable domain of TCR clone 261551 (TRBV18, TRBJ2-2)
CASSPGQNTGELFF

SEQ ID NO: 523103 - protein, 13 aa, Homo sapiens
  CDR3 for alpha chain variable domain of TCR clone 261552 (TRAV29/DV5, TRAJ31)
CAASRNNNARLTF

SEQ ID NO: 523104 - protein, 12 aa, Homo sapiens
  CDR3 for beta chain variable domain of TCR clone 261552 (TRBV14, TRBJ2-7)
CASSLYKDEQYF

SEQ ID NO: 523105 - protein, 17 aa, Homo sapiens
  CDR3 for alpha chain variable domain of TCR clone 261553 (TRAV3, TRAJ13)
CAVRVYSGVTRKLPLEL

SEQ ID NO: 523106 - protein, 15 aa, Homo sapiens
  CDR3 for beta chain variable domain of TCR clone 261553 (TRBV7-2, TRBJ2-3)
CASSLVVRGPDTQYF

SEQ ID NO: 523107 - protein, 14 aa, Homo sapiens
  CDR3 for alpha chain variable domain of TCR clone 261554 (TRAV1-2, TRAJ16)
CAVNPFSDGQKLLF

SEQ ID NO: 523108 - protein, 13 aa, Homo sapiens
  CDR3 for beta chain variable domain of TCR clone 261554 (TRBV10-2, TRBJ2-7)
CASSESGVYEQYF

SEQ ID NO: 523109 - protein, 18 aa, Homo sapiens
  CDR3 for alpha chain variable domain of TCR clone 261555 (TRAV21, TRAJ52)
CAVRPSPAGGTSYGKLTF

SEQ ID NO: 523110 - protein, 15 aa, Homo sapiens
  CDR3 for beta chain variable domain of TCR clone 261555 (TRBV12-4, TRBJ1-5)
CASTRGSGFGQPQHF

SEQ ID NO: 523111 - protein, 15 aa, Homo sapiens
  CDR3 for alpha chain variable domain of TCR clone 261556 (TRAV29/DV5, TRAJ24)
CAASGATDSGGKFQF

SEQ ID NO: 523112 - protein, 20 aa, Homo sapiens
  CDR3 for beta chain variable domain of TCR clone 261556 (TRBV11-2, TRBJ2-2)
LRARPCISVPAASLPGSCFF

SEQ ID NO: 523113 - protein, 14 aa, Homo sapiens
  CDR3 for alpha chain variable domain of TCR clone 261557 (TRAV8-3, TRAJ38)
CAVGASNAGNNHIQ

SEQ ID NO: 523114 - protein, 15 aa, Homo sapiens
  CDR3 for beta chain variable domain of TCR clone 261557 (TRBV11-3, TRBJ1-3)
CASSLFGPSGNTMYF

SEQ ID NO: 523115 - protein, 13 aa, Homo sapiens
  CDR3 for alpha chain variable domain of TCR clone 261558 (TRAV13-1, TRAJ39)
CAASIVMQATCSP

SEQ ID NO: 523116 - protein, 15 aa, Homo sapiens
  CDR3 for beta chain variable domain of TCR clone 261558 (TRBV4-1, TRBJ2-3)
CASSQDRLPPDTQYF

SEQ ID NO: 523117 - protein, 13 aa, Homo sapiens
  CDR3 for alpha chain variable domain of TCR clone 261559 (TRAV1-2, TRAJ9)
CAALNTGGCKTIF

SEQ ID NO: 523118 - protein, 14 aa, Homo sapiens
  CDR3 for beta chain variable domain of TCR clone 261559 (TRBV13, TRBJ2-3)
CASSSGSPTDTQYF

SEQ ID NO: 523119 - protein, 14 aa, Homo sapiens
  CDR3 for alpha chain variable domain of TCR clone 261560 (TRAV13-1, TRAJ26)
CAASSADYGQNFVF

SEQ ID NO: 523120 - protein, 17 aa, Homo sapiens
  CDR3 for beta chain variable domain of TCR clone 261560 (TRBV25-1, TRBJ2-5)
CASSRRGGRGGQETQYF

SEQ ID NO: 523121 - protein, 16 aa, Homo sapiens
  CDR3 for alpha chain variable domain of TCR clone 261561 (TRAV30, TRAJ24)
CGTEIVDADSWGQFQF

SEQ ID NO: 523122 - protein, 16 aa, Homo sapiens
  CDR3 for beta chain variable domain of TCR clone 261561 (TRBV4-2, TRBJ1-1)
CASSQAGFGMNTEAFF

SEQ ID NO: 523123 - protein, 16 aa, Homo sapiens
  CDR3 for alpha chain variable domain of TCR clone 261562 (TRAV30, TRAJ24)
CGTEIVDADSGGNFQF

SEQ ID NO: 523124 - protein, 14 aa, Homo sapiens
  CDR3 for beta chain variable domain of TCR clone 261562 (TRBV12-5, TRBJ2-5)
CASGSRTHQETQYF

SEQ ID NO: 523125 - protein, 16 aa, Homo sapiens
  CDR3 for alpha chain variable domain of TCR clone 261563 (TRAV20, TRAJ10)
CAVLRGLTGRGNKLTF

SEQ ID NO: 523126 - protein, 14 aa, Homo sapiens
  CDR3 for beta chain variable domain of TCR clone 261563 (TRBV19, TRBJ1-5)
CASRAPDSFLSQHF

SEQ ID NO: 523127 - protein, 11 aa, Homo sapiens
  CDR3 for alpha chain variable domain of TCR clone 261564 (TRAV21, TRAJ39)
LLVTAGNMLTF

SEQ ID NO: 523128 - protein, 18 aa, Homo sapiens
  CDR3 for beta chain variable domain of TCR clone 261564 (TRBV7-2, TRBJ2-7)
CASSLSGRGLAGGYEQYF

SEQ ID NO: 523129 - protein, 14 aa, Homo sapiens
  CDR3 for alpha chain variable domain of TCR clone 261565 (TRAV12-1, TRAJ17)
CVVNYKAAGNKRTF

SEQ ID NO: 523130 - protein, 17 aa, Homo sapiens
  CDR3 for beta chain variable domain of TCR clone 261565 (TRBV20-1, TRBJ2-1)
CSASSSGLAGAYNEQFF

SEQ ID NO: 523131 - protein, 11 aa, Homo sapiens
  CDR3 for alpha chain variable domain of TCR clone 261566 (TRAV1-1, TRAJ23)
CAVRQGGKLIF

SEQ ID NO: 523132 - protein, 14 aa, Homo sapiens
  CDR3 for beta chain variable domain of TCR clone 261566 (TRBV10-3, TRBJ1-2)
CAIRAGTGDYGYTF

SEQ ID NO: 523133 - protein, 14 aa, Homo sapiens
  CDR3 for alpha chain variable domain of TCR clone 261567 (TRAV3, TRAJ17)
CAVRDAAAGNKLTF

SEQ ID NO: 523134 - protein, 15 aa, Homo sapiens
  CDR3 for beta chain variable domain of TCR clone 261567 (TRBV6-3, TRBJ2-7)
CASSSPGTVFYEQYF

SEQ ID NO: 523135 - protein, 14 aa, Homo sapiens
  CDR3 for alpha chain variable domain of TCR clone 261568 (TRAV1-2, TRAJ8)
CAVREDTGFQKLVF

SEQ ID NO: 523136 - protein, 14 aa, Homo sapiens
  CDR3 for beta chain variable domain of TCR clone 261568 (TRBV12-5, TRBJ2-5)
CASGSRTQKETQYF

SEQ ID NO: 523137 - protein, 14 aa, Homo sapiens
  CDR3 for alpha chain variable domain of TCR clone 261569 (TRAV23/DV6, TRAJ4)
CEANLSGGYNKLIF

SEQ ID NO: 523138 - protein, 15 aa, Homo sapiens
  CDR3 for beta chain variable domain of TCR clone 261569 (TRBV20-1, TRBJ2-7)
CSARDRVSGMDEQYF

SEQ ID NO: 523139 - protein, 12 aa, Homo sapiens
  CDR3 for alpha chain variable domain of TCR clone 261570 (TRAV12-3, TRAJ20)
CAMVRGDYKLSF

SEQ ID NO: 523140 - protein, 18 aa, Homo sapiens
  CDR3 for beta chain variable domain of TCR clone 261570 (TRBV27, TRBJ2-1)
CASTSGTSGKATYNEQFF

SEQ ID NO: 523141 - protein, 12 aa, Homo sapiens
  CDR3 for alpha chain variable domain of TCR clone 261571 (TRAV23/DV6, TRAJ30)
CAARKGDDKIIF

SEQ ID NO: 523142 - protein, 17 aa, Homo sapiens
  CDR3 for beta chain variable domain of TCR clone 261571 (TRBV13, TRBJ2-3)
CASSLSRVAGGRNTQYF

SEQ ID NO: 523143 - protein, 13 aa, Homo sapiens
  CDR3 for alpha chain variable domain of TCR clone 261572 (TRAV27, TRAJ17)
CAGAATAGNKLNF

SEQ ID NO: 523144 - protein, 15 aa, Homo sapiens
  CDR3 for beta chain variable domain of TCR clone 261572 (TRBV5-1, TRBJ2-3)
CASRNQAGSTDTQYF

SEQ ID NO: 523145 - protein, 15 aa, Homo sapiens
  CDR3 for alpha chain variable domain of TCR clone 261573 (TRAV8-4, TRAJ3)
CAVTGENLVLQCFQD

SEQ ID NO: 523146 - protein, 15 aa, Homo sapiens
  CDR3 for beta chain variable domain of TCR clone 261573 (TRBV6-5, TRBJ2-1)
CASSYDAGAGNEQFF

SEQ ID NO: 523147 - protein, 13 aa, Homo sapiens
  CDR3 for alpha chain variable domain of TCR clone 261574 (TRAV3, TRAJ20)
CCEAFCNDYKLSF

SEQ ID NO: 523148 - protein, 13 aa, Homo sapiens
  CDR3 for beta chain variable domain of TCR clone 261574 (TRBV19, TRBJ1-5)
CASSIGGNQPQHF

SEQ ID NO: 523149 - protein, 12 aa, Homo sapiens
  CDR3 for alpha chain variable domain of TCR clone 261575 (TRAV12-1, TRAJ34)
CVVAGATDKLIF

SEQ ID NO: 523150 - protein, 16 aa, Homo sapiens
  CDR3 for beta chain variable domain of TCR clone 261575 (TRBV7-2, TRBJ1-2)
WASSSNQDRRGHGYTF

SEQ ID NO: 523151 - protein, 14 aa, Homo sapiens
  CDR3 for alpha chain variable domain of TCR clone 261576 (TRAV12-1, TRAJ17)
CVVNYKAAGNKLTF

SEQ ID NO: 523152 - protein, 16 aa, Homo sapiens
  CDR3 for beta chain variable domain of TCR clone 261576 (TRBV4-1, TRBJ2-5)
CASSQAIAASSATQYF

SEQ ID NO: 523153 - protein, 12 aa, Homo sapiens
  CDR3 for alpha chain variable domain of TCR clone 261577 (TRAV13-1, TRAJ21)
CAAQEGFNKFYF

SEQ ID NO: 523154 - protein, 16 aa, Homo sapiens
  CDR3 for beta chain variable domain of TCR clone 261577 (TRBV2, TRBJ2-3)
CASSTSVEGVTDTQYF

SEQ ID NO: 523155 - protein, 15 aa, Homo sapiens
  CDR3 for alpha chain variable domain of TCR clone 261578 (TRAV1-2, TRAJ30)
CAVRPHGNRDDKIIF

SEQ ID NO: 523156 - protein, 12 aa, Homo sapiens
  CDR3 for beta chain variable domain of TCR clone 261578 (TRBV11-2, TRBJ2-2)
CASSLGGGELFF

SEQ ID NO: 523157 - protein, 13 aa, Homo sapiens
  CDR3 for alpha chain variable domain of TCR clone 261579 (TRAV36/DV7, TRAJ37)
CAVFSSNTGKLIF

SEQ ID NO: 523158 - protein, 18 aa, Homo sapiens
  CDR3 for beta chain variable domain of TCR clone 261579 (TRBV25-1, TRBJ1-2)
CASSGLQNGQGLIFGYTF

SEQ ID NO: 523159 - protein, 12 aa, Homo sapiens
  CDR3 for alpha chain variable domain of TCR clone 261580 (TRAV3, TRAJ29)
CAALPGNTPLVF

SEQ ID NO: 523160 - protein, 15 aa, Homo sapiens
  CDR3 for beta chain variable domain of TCR clone 261580 (TRBV7-9, TRBJ1-5)
CAGSQGHQPNQPQHF

SEQ ID NO: 523161 - protein, 15 aa, Homo sapiens
  CDR3 for alpha chain variable domain of TCR clone 261581 (TRAV21, TRAJ13)
CAVRPTSGGYQKVTF

SEQ ID NO: 523162 - protein, 13 aa, Homo sapiens
  CDR3 for beta chain variable domain of TCR clone 261581 (TRBV10-3, TRBJ2-7)
CASKLAVNYEQYF

SEQ ID NO: 523163 - protein, 12 aa, Homo sapiens
  CDR3 for alpha chain variable domain of TCR clone 261582 (TRAV3, TRAJ20)
CAVRDGDYKLSF

SEQ ID NO: 523164 - protein, 16 aa, Homo sapiens
  CDR3 for beta chain variable domain of TCR clone 261582 (TRBV28, TRBJ2-5)
CASSFSPAGGWETQYF

SEQ ID NO: 523165 - protein, 10 aa, Homo sapiens
  CDR3 for alpha chain variable domain of TCR clone 261583 (TRAV26-1, TRAJ22)
CIVSLNFFWF

SEQ ID NO: 523166 - protein, 13 aa, Homo sapiens
  CDR3 for beta chain variable domain of TCR clone 261583 (TRBV12-4, TRBJ2-2)
CASSITGSGELFF

SEQ ID NO: 523167 - protein, 18 aa, Homo sapiens
  CDR3 for alpha chain variable domain of TCR clone 261584 (TRAV26-1, TRAJ5)
CIVRVVPPRDTGRRALTS

SEQ ID NO: 523168 - protein, 15 aa, Homo sapiens
  CDR3 for beta chain variable domain of TCR clone 261584 (TRBV7-9, TRBJ2-7)
CASSLPMGQANEQYF

SEQ ID NO: 523169 - protein, 17 aa, Homo sapiens
  CDR3 for alpha chain variable domain of TCR clone 261585 (TRAV26-1, TRAJ37)
CIVRVITVSSNTGKLIF

SEQ ID NO: 523170 - protein, 14 aa, Homo sapiens
  CDR3 for beta chain variable domain of TCR clone 261585 (TRBV19, TRBJ2-1)
CASPTFFLSGEQFF

SEQ ID NO: 523171 - protein, 18 aa, Homo sapiens
  CDR3 for alpha chain variable domain of TCR clone 261586 (TRAV17, TRAJ45)
CATSLDLYSGGGADGLTF

SEQ ID NO: 523172 - protein, 15 aa, Homo sapiens
  CDR3 for beta chain variable domain of TCR clone 261586 (TRBV11-2, TRBJ2-1)
CASIKNRGLIYEQFF

SEQ ID NO: 523173 - protein, 13 aa, Homo sapiens
  CDR3 for alpha chain variable domain of TCR clone 261587 (TRAV12-2, TRAJ18)
CAVRGSTLGRLYF

SEQ ID NO: 523174 - protein, 18 aa, Homo sapiens
  CDR3 for beta chain variable domain of TCR clone 261587 (TRBV27, TRBJ2-3)
CASSLSGTGGRGTDTQYF

SEQ ID NO: 523175 - protein, 16 aa, Homo sapiens
  CDR3 for alpha chain variable domain of TCR clone 261588 (TRAV20, TRAJ52)
CAVPPDGGTSYGKLTF

SEQ ID NO: 523176 - protein, 12 aa, Homo sapiens
  CDR3 for beta chain variable domain of TCR clone 261588 (TRBV19, TRBJ2-1)
CASSQISNEQFF

SEQ ID NO: 523177 - protein, 16 aa, Homo sapiens
  CDR3 for alpha chain variable domain of TCR clone 261589 (TRAV12-3, TRAJ53)
CDMSVGSGGSNYKLTF

SEQ ID NO: 523178 - protein, 11 aa, Homo sapiens
  CDR3 for beta chain variable domain of TCR clone 261589 (TRBV29-1, TRBJ2-5)
CSVASGETQYF

SEQ ID NO: 523179 - protein, 16 aa, Homo sapiens
  CDR3 for alpha chain variable domain of TCR clone 261590 (TRAV27, TRAJ52)
CAGAPAGGTSYGKLTF

SEQ ID NO: 523180 - protein, 15 aa, Homo sapiens
  CDR3 for beta chain variable domain of TCR clone 261590 (TRBV7-2, TRBJ2-1)
CASTHGTGIYNEQFF

SEQ ID NO: 523181 - protein, 16 aa, Homo sapiens
  CDR3 for alpha chain variable domain of TCR clone 261591 (TRAV30, TRAJ24)
CGTEIVDADSWGKFQF

SEQ ID NO: 523182 - protein, 14 aa, Homo sapiens
  CDR3 for beta chain variable domain of TCR clone 261591 (TRBV12-5, TRBJ2-5)
CASGSRIHQETQYF

SEQ ID NO: 523183 - protein, 13 aa, Homo sapiens
  CDR3 for alpha chain variable domain of TCR clone 261592 (TRAV26-2, TRAJ43)
CILRAVNNNDMRF

SEQ ID NO: 523184 - protein, 14 aa, Homo sapiens
  CDR3 for beta chain variable domain of TCR clone 261592 (TRBV7-3, TRBJ2-3)
CASSSLHTSDTQYF

SEQ ID NO: 523185 - protein, 16 aa, Homo sapiens
  CDR3 for alpha chain variable domain of TCR clone 261593 (TRAV3, TRAJ37)
CAVSGKGSGNTGKLIF

SEQ ID NO: 523186 - protein, 15 aa, Homo sapiens
  CDR3 for beta chain variable domain of TCR clone 261593 (TRBV7-9, TRBJ1-6)
CASSSPGRGNSPLHF

SEQ ID NO: 523187 - protein, 15 aa, Homo sapiens
  CDR3 for alpha chain variable domain of TCR clone 261594 (TRAV8-3, TRAJ41)
CAVGSNSNSGYALNF

SEQ ID NO: 523188 - protein, 15 aa, Homo sapiens
  CDR3 for beta chain variable domain of TCR clone 261594 (TRBV5-1, TRBJ2-1)
CASSPPRAPYNEQFF

SEQ ID NO: 523189 - protein, 17 aa, Homo sapiens
  CDR3 for alpha chain variable domain of TCR clone 261595 (TRAV26-2, TRAJ42)
CILRDVGYGGSQGNLIF

SEQ ID NO: 523190 - protein, 13 aa, Homo sapiens
  CDR3 for beta chain variable domain of TCR clone 261595 (TRBV7-2, TRBJ2-4)
CASSREHANIQYF

SEQ ID NO: 523191 - protein, 15 aa, Homo sapiens
  CDR3 for alpha chain variable domain of TCR clone 261596 (TRAV3, TRAJ22)
CAVRDRGGSAGQLTF

SEQ ID NO: 523192 - protein, 14 aa, Homo sapiens
  CDR3 for beta chain variable domain of TCR clone 261596 (TRBV19, TRBJ2-1)
CASPTFVLSGEQFF

SEQ ID NO: 523193 - protein, 13 aa, Homo sapiens
  CDR3 for alpha chain variable domain of TCR clone 261597 (TRAV3, TRAJ20)
CAVRDTGDYKLSF

SEQ ID NO: 523194 - protein, 15 aa, Homo sapiens
  CDR3 for beta chain variable domain of TCR clone 261597 (TRBV5-1, TRBJ2-2)
CASSSQGGNTGELFF

SEQ ID NO: 523195 - protein, 15 aa, Homo sapiens
  CDR3 for alpha chain variable domain of TCR clone 261598 (TRAV4, TRAJ12)
CLVGDLIDSSYKLIF

SEQ ID NO: 523196 - protein, 14 aa, Homo sapiens
  CDR3 for beta chain variable domain of TCR clone 261598 (TRBV7-2, TRBJ1-1)
CASSHRQGRTEAFF

SEQ ID NO: 523197 - protein, 15 aa, Homo sapiens
  CDR3 for alpha chain variable domain of TCR clone 261599 (TRAV23/DV6, TRAJ18)
CAASFRGSTLGRQYF

SEQ ID NO: 523198 - protein, 13 aa, Homo sapiens
  CDR3 for beta chain variable domain of TCR clone 261599 (TRBV28, TRBJ2-7)
CAILDRAGGEQYF

SEQ ID NO: 523199 - protein, 13 aa, Homo sapiens
  CDR3 for alpha chain variable domain of TCR clone 261600 (TRAV3, TRAJ15)
CAVRDQAGTALIF

SEQ ID NO: 523200 - protein, 15 aa, Homo sapiens
  CDR3 for beta chain variable domain of TCR clone 261600 (TRBV11-1, TRBJ2-7)
CASSLNSGASYEQYF

SEQ ID NO: 523201 - protein, 18 aa, Homo sapiens
  CDR3 for alpha chain variable domain of TCR clone 261601 (TRAV26-2, TRAJ54)
CILRDVEVGIQGAQKLVF

SEQ ID NO: 523202 - protein, 17 aa, Homo sapiens
  CDR3 for beta chain variable domain of TCR clone 261601 (TRBV20-1, TRBJ1-5)
CSASLSPGQGGNQPQQF

SEQ ID NO: 523203 - protein, 14 aa, Homo sapiens
  CDR3 for alpha chain variable domain of TCR clone 261602 (TRAV13-1, TRAJ44)
CAAKATGTASKLTF

SEQ ID NO: 523204 - protein, 13 aa, Homo sapiens
  CDR3 for beta chain variable domain of TCR clone 261602 (TRBV25-1, TRBJ2-7)
CASSEDGDYEQYF

SEQ ID NO: 523205 - protein, 13 aa, Homo sapiens
  CDR3 for alpha chain variable domain of TCR clone 261603 (TRAV21, TRAJ20)
CAVGLRVDYKLSF

SEQ ID NO: 523206 - protein, 16 aa, Homo sapiens
  CDR3 for beta chain variable domain of TCR clone 261603 (TRBV19, TRBJ2-1)
CASSKAGASSYNEQFF

SEQ ID NO: 523207 - protein, 14 aa, Homo sapiens
  CDR3 for alpha chain variable domain of TCR clone 261604 (TRAV27, TRAJ33)
CRSGSRDSNYQLIW

SEQ ID NO: 523208 - protein, 14 aa, Homo sapiens
  CDR3 for beta chain variable domain of TCR clone 261604 (TRBV7-2, TRBJ2-7)
CASRSQGAAYEQYF

SEQ ID NO: 523209 - protein, 13 aa, Homo sapiens
  CDR3 for alpha chain variable domain of TCR clone 261605 (TRAV13-2, TRAJ53)
CAENMGSNFKLTF

SEQ ID NO: 523210 - protein, 13 aa, Homo sapiens
  CDR3 for beta chain variable domain of TCR clone 261605 (TRBV4-1, TRBJ2-2)
CASSQENTGELFF

SEQ ID NO: 523211 - protein, 12 aa, Homo sapiens
  CDR3 for alpha chain variable domain of TCR clone 261606 (TRAV9-2, TRAJ40)
CALTSGTYKYIF

SEQ ID NO: 523212 - protein, 16 aa, Homo sapiens
  CDR3 for beta chain variable domain of TCR clone 261606 (TRBV7-7, TRBJ2-2)
CASSPRTGVNTGELFF

SEQ ID NO: 523213 - protein, 11 aa, Homo sapiens
  CDR3 for alpha chain variable domain of TCR clone 261607 (TRAV2, TRAJ13)
CASGGYQKVNF

SEQ ID NO: 523214 - protein, 14 aa, Homo sapiens
  CDR3 for beta chain variable domain of TCR clone 261607 (TRBV4-2, TRBJ2-3)
CASSQERGTDTQYF

SEQ ID NO: 523215 - protein, 13 aa, Homo sapiens
  CDR3 for alpha chain variable domain of TCR clone 261608 (TRAV12-3, TRAJ9)
CAMRNTGGFKTIF

SEQ ID NO: 523216 - protein, 22 aa, Homo sapiens
  CDR3 for beta chain variable domain of TCR clone 261608 (TRBV11-2, TRBJ1-4)
CASSLDITRRGIPRKDNEKLFF

SEQ ID NO: 523217 - protein, 13 aa, Homo sapiens
  CDR3 for alpha chain variable domain of TCR clone 261609 (TRAV13-2, TRAJ13)
CAERPGGYQKVTF

SEQ ID NO: 523218 - protein, 15 aa, Homo sapiens
  CDR3 for beta chain variable domain of TCR clone 261609 (TRBV4-1, TRBJ1-4)
CASSDTGGTNDKLFF

SEQ ID NO: 523219 - protein, 16 aa, Homo sapiens
  CDR3 for alpha chain variable domain of TCR clone 261610 (TRAV23/DV6, TRAJ9)
CAASIGGNTGGFQTIF

SEQ ID NO: 523220 - protein, 14 aa, Homo sapiens
  CDR3 for beta chain variable domain of TCR clone 261610 (TRBV6-1, TRBJ1-3)
CASVQGGGGNTIYF

SEQ ID NO: 523221 - protein, 13 aa, Homo sapiens
  CDR3 for alpha chain variable domain of TCR clone 261611 (TRAV35, TRAJ32)
CAGVGGATNKLIF

SEQ ID NO: 523222 - protein, 17 aa, Homo sapiens
  CDR3 for beta chain variable domain of TCR clone 261611 (TRBV4-3, TRBJ2-1)
CASSQFSSGRASCEQFF

SEQ ID NO: 523223 - protein, 18 aa, Homo sapiens
  CDR3 for alpha chain variable domain of TCR clone 261612 (TRAV21, TRAJ52)
CAVRPSPAGGTSYGKLTF

SEQ ID NO: 523224 - protein, 16 aa, Homo sapiens
  CDR3 for beta chain variable domain of TCR clone 261612 (TRBV5-1, TRBJ2-3)
CASSLGLAVYTDTQYF

SEQ ID NO: 523225 - protein, 14 aa, Homo sapiens
  CDR3 for alpha chain variable domain of TCR clone 261613 (TRAV1-2, TRAJ16)
CAVSRFSDGQKLPF

SEQ ID NO: 523226 - protein, 11 aa, Homo sapiens
  CDR3 for beta chain variable domain of TCR clone 261613 (TRBV4-1, TRBJ2-2)
CASEHTGELFF

SEQ ID NO: 523227 - protein, 13 aa, Homo sapiens
  CDR3 for alpha chain variable domain of TCR clone 261614 (TRAV17, TRAJ29)
CATGPSGNTPLVF

SEQ ID NO: 523228 - protein, 14 aa, Homo sapiens
  CDR3 for beta chain variable domain of TCR clone 261614 (TRBV2, TRBJ1-6)
CASEVSSYNSPRHF

SEQ ID NO: 523229 - protein, 12 aa, Homo sapiens
  CDR3 for alpha chain variable domain of TCR clone 261615 (TRAV8-3, TRAJ43)
CAVGAGNNDMRF

SEQ ID NO: 523230 - protein, 14 aa, Homo sapiens
  CDR3 for beta chain variable domain of TCR clone 261615 (TRBV4-2, TRBJ1-5)
CASSRERGNQPQHF

SEQ ID NO: 523231 - protein, 11 aa, Homo sapiens
  CDR3 for alpha chain variable domain of TCR clone 261616 (TRAV3, TRAJ21)
CAVGNFNKFYF

SEQ ID NO: 523232 - protein, 15 aa, Homo sapiens
  CDR3 for beta chain variable domain of TCR clone 261616 (TRBV5-1, TRBJ2-1)
CASSVVANSYNEQFF

SEQ ID NO: 523233 - protein, 13 aa, Homo sapiens
  CDR3 for alpha chain variable domain of TCR clone 261617 (TRAV12-2, TRAJ27)
CAVINTNAGKSTF

SEQ ID NO: 523234 - protein, 16 aa, Homo sapiens
  CDR3 for beta chain variable domain of TCR clone 261617 (TRBV7-3, TRBJ2-2)
CASSLKRGTLSGELFF

SEQ ID NO: 523235 - protein, 14 aa, Homo sapiens
  CDR3 for alpha chain variable domain of TCR clone 261618 (TRAV1-2, TRAJ16)
CAVNRFSDGQKLLF

SEQ ID NO: 523236 - protein, 12 aa, Homo sapiens
  CDR3 for beta chain variable domain of TCR clone 261618 (TRBV18, TRBJ2-1)
CASSPGTSEGFF

SEQ ID NO: 523237 - protein, 19 aa, Homo sapiens
  CDR3 for alpha chain variable domain of TCR clone 261619 (TRAV26-1, TRAJ52)
CIFRAHRNAGGTSYGKLTF

SEQ ID NO: 523238 - protein, 15 aa, Homo sapiens
  CDR3 for beta chain variable domain of TCR clone 261619 (TRBV29-1, TRBJ2-1)
CSGRDRKSSYNEQFF

SEQ ID NO: 523239 - protein, 10 aa, Homo sapiens
  CDR3 for alpha chain variable domain of TCR clone 261620 (TRAV12-2, TRAJ20)
CAVYLYKHSF

SEQ ID NO: 523240 - protein, 14 aa, Homo sapiens
  CDR3 for beta chain variable domain of TCR clone 261620 (TRBV10-3, TRBJ2-2)
CAISEVSHSGELFF

SEQ ID NO: 523241 - protein, 12 aa, Homo sapiens
  CDR3 for alpha chain variable domain of TCR clone 261621 (TRAV22, TRAJ43)
CAVELNNNDMRF

SEQ ID NO: 523242 - protein, 16 aa, Homo sapiens
  CDR3 for beta chain variable domain of TCR clone 261621 (TRBV7-3, TRBJ2-2)
CASSLKRGTLSGELFF

SEQ ID NO: 523243 - protein, 16 aa, Homo sapiens
  CDR3 for alpha chain variable domain of TCR clone 261622 (TRAV20, TRAJ4)
CAVAAPFSGGYNKLIF

SEQ ID NO: 523244 - protein, 16 aa, Homo sapiens
  CDR3 for beta chain variable domain of TCR clone 261622 (TRBV7-2, TRBJ2-5)
CASSSKWLSGQETQYF

SEQ ID NO: 523245 - protein, 14 aa, Homo sapiens
  CDR3 for alpha chain variable domain of TCR clone 261623 (TRAV29/DV5, TRAJ36)
CAARRKTGANNLVF

SEQ ID NO: 523246 - protein, 14 aa, Homo sapiens
  CDR3 for beta chain variable domain of TCR clone 261623 (TRBV20-1, TRBJ2-7)
CSAKRGRSSYEQYF

SEQ ID NO: 523247 - protein, 13 aa, Homo sapiens
  CDR3 for alpha chain variable domain of TCR clone 261624 (TRAV35, TRAJ42)
CAGFPGRQGDLIF

SEQ ID NO: 523248 - protein, 14 aa, Homo sapiens
  CDR3 for beta chain variable domain of TCR clone 261624 (TRBV4-1, TRBJ2-2)
CASSQAVNTGELFF

SEQ ID NO: 523249 - protein, 16 aa, Homo sapiens
  CDR3 for alpha chain variable domain of TCR clone 261625 (TRAV21, TRAJ52)
CAGTNAGGTSYGKLTF

SEQ ID NO: 523250 - protein, 13 aa, Homo sapiens
  CDR3 for beta chain variable domain of TCR clone 261625 (TRBV20-1, TRBJ2-3)
CSARLAGTDTQYF

SEQ ID NO: 523251 - protein, 11 aa, Homo sapiens
  CDR3 for alpha chain variable domain of TCR clone 261626 (TRAV2, TRAJ13)
CASGGYQKVTF

SEQ ID NO: 523252 - protein, 13 aa, Homo sapiens
  CDR3 for beta chain variable domain of TCR clone 261626 (TRBV2, TRBJ1-1)
CASSEGGNTEAFF

SEQ ID NO: 523253 - protein, 16 aa, Homo sapiens
  CDR3 for alpha chain variable domain of TCR clone 261627 (TRAV12-2, TRAJ10)
CAVNRALTGGGNKLTF

SEQ ID NO: 523254 - protein, 14 aa, Homo sapiens
  CDR3 for beta chain variable domain of TCR clone 261627 (TRBV9, TRBJ2-1)
CASSVALAVNEQFF

SEQ ID NO: 523255 - protein, 14 aa, Homo sapiens
  CDR3 for alpha chain variable domain of TCR clone 261628 (TRAV13-1, TRAJ35)
CAASKGGFGNVLHC

SEQ ID NO: 523256 - protein, 16 aa, Homo sapiens
  CDR3 for beta chain variable domain of TCR clone 261628 (TRBV5-1, TRBJ2-2)
CARSSRTGGRTGELFF

SEQ ID NO: 523257 - protein, 17 aa, Homo sapiens
  CDR3 for alpha chain variable domain of TCR clone 261629 (TRAV4, TRAJ28)
CLVGDRALGLGVTNSLS

SEQ ID NO: 523258 - protein, 15 aa, Homo sapiens
  CDR3 for beta chain variable domain of TCR clone 261629 (TRBV10-2, TRBJ2-6)
CASSEQGTGANVLTF

SEQ ID NO: 523259 - protein, 15 aa, Homo sapiens
  CDR3 for alpha chain variable domain of TCR clone 261630 (TRAV4, TRAJ26)
CLVGDMNNYGQNFVF

SEQ ID NO: 523260 - protein, 16 aa, Homo sapiens
  CDR3 for beta chain variable domain of TCR clone 261630 (TRBV28, TRBJ1-4)
CASSSRTGSAIEKLFF

SEQ ID NO: 523261 - protein, 15 aa, Homo sapiens
  CDR3 for alpha chain variable domain of TCR clone 261631 (TRAV12-3, TRAJ10)
CASYILTGGGNKLTF

SEQ ID NO: 523262 - protein, 15 aa, Homo sapiens
  CDR3 for beta chain variable domain of TCR clone 261631 (TRBV7-2, TRBJ1-6)
CASSLGADRGTPLHF

SEQ ID NO: 523263 - protein, 12 aa, Homo sapiens
  CDR3 for alpha chain variable domain of TCR clone 261632 (TRAV1-2, TRAJ33)
CAALDSNYQLIW

SEQ ID NO: 523264 - protein, 13 aa, Homo sapiens
  CDR3 for beta chain variable domain of TCR clone 261632 (TRBV7-2, TRBJ2-7)
CASSFGQGKEQYF

SEQ ID NO: 523265 - protein, 14 aa, Homo sapiens
  CDR3 for alpha chain variable domain of TCR clone 261633 (TRAV26-1, TRAJ38)
CIADNAGNNGKLIW

SEQ ID NO: 523266 - protein, 12 aa, Homo sapiens
  CDR3 for beta chain variable domain of TCR clone 261633 (TRBV29-1, TRBJ2-3)
CSVTGGADTQYF

SEQ ID NO: 523267 - protein, 14 aa, Homo sapiens
  CDR3 for alpha chain variable domain of TCR clone 261634 (TRAV12-2, TRAJ45)
CALNIGGGADGLTF

SEQ ID NO: 523268 - protein, 15 aa, Homo sapiens
  CDR3 for beta chain variable domain of TCR clone 261634 (TRBV12-4, TRBJ2-5)
CASSPPTGLQETQYF

SEQ ID NO: 523269 - protein, 15 aa, Homo sapiens
  CDR3 for alpha chain variable domain of TCR clone 261635 (TRAV8-3, TRAJ40)
CAAPSLGSGTYTYIF

SEQ ID NO: 523270 - protein, 13 aa, Homo sapiens
  CDR3 for beta chain variable domain of TCR clone 261635 (TRBV10-3, TRBJ2-7)
CASKLAVNYEQYF

SEQ ID NO: 523271 - protein, 17 aa, Homo sapiens
  CDR3 for alpha chain variable domain of TCR clone 261636 (TRAV27, TRAJ52)
CAGAGWAGGTSCGKLTF

SEQ ID NO: 523272 - protein, 16 aa, Homo sapiens
  CDR3 for beta chain variable domain of TCR clone 261636 (TRBV19, TRBJ2-1)
CASSKAGPSSYNEQFF

SEQ ID NO: 523273 - protein, 15 aa, Homo sapiens
  CDR3 for alpha chain variable domain of TCR clone 261637 (TRAV12-1, TRAJ8)
CVMNVENTGFQKLVF

SEQ ID NO: 523274 - protein, 16 aa, Homo sapiens
  CDR3 for beta chain variable domain of TCR clone 261637 (TRBV7-2, TRBJ2-7)
CASSLEAGGPWYEQYF

SEQ ID NO: 523275 - protein, 17 aa, Homo sapiens
  CDR3 for alpha chain variable domain of TCR clone 261638 (TRAV26-1, TRAJ53)
CIVRVDDSGGSNYKLTF

SEQ ID NO: 523276 - protein, 15 aa, Homo sapiens
  CDR3 for beta chain variable domain of TCR clone 261638 (TRBV20-1, TRBJ2-7)
CSARVPAAYFYQQYF

SEQ ID NO: 523277 - protein, 16 aa, Homo sapiens
  CDR3 for alpha chain variable domain of TCR clone 261639 (TRAV22, TRAJ45)
CAVERGKRGGADALTF

SEQ ID NO: 523278 - protein, 13 aa, Homo sapiens
  CDR3 for beta chain variable domain of TCR clone 261639 (TRBV27, TRBJ1-1)
CASSLSIGAEAFF

SEQ ID NO: 523279 - protein, 15 aa, Homo sapiens
  CDR3 for alpha chain variable domain of TCR clone 261640 (TRAV2, TRAJ15)
CAVEDREQAGTALIF

SEQ ID NO: 523280 - protein, 14 aa, Homo sapiens
  CDR3 for beta chain variable domain of TCR clone 261640 (TRBV11-2, TRBJ2-7)
CASGLGAGAYEQYV

SEQ ID NO: 523281 - protein, 14 aa, Homo sapiens
  CDR3 for alpha chain variable domain of TCR clone 261641 (TRAV13-1, TRAJ3)
CAASKSSSASKIIF

SEQ ID NO: 523282 - protein, 16 aa, Homo sapiens
  CDR3 for beta chain variable domain of TCR clone 261641 (TRBV15, TRBJ2-3)
CATSRDLGIVSDTQYF

SEQ ID NO: 523283 - protein, 16 aa, Homo sapiens
  CDR3 for alpha chain variable domain of TCR clone 261642 (TRAV23/DV6, TRAJ13)
CAASFSFSGGYQKVTF

SEQ ID NO: 523284 - protein, 16 aa, Homo sapiens
  CDR3 for beta chain variable domain of TCR clone 261642 (TRBV7-2, TRBJ2-6)
CAILSGVSSGANVLTF

SEQ ID NO: 523285 - protein, 15 aa, Homo sapiens
  CDR3 for alpha chain variable domain of TCR clone 261643 (TRAV12-3, TRAJ27)
CAMRAYNTNAGKSTF

SEQ ID NO: 523286 - protein, 12 aa, Homo sapiens
  CDR3 for beta chain variable domain of TCR clone 261643 (TRBV11-2, TRBJ2-5)
CQQPRASETQYF

SEQ ID NO: 523287 - protein, 12 aa, Homo sapiens
  CDR3 for alpha chain variable domain of TCR clone 261644 (TRAV1-1, TRAJ9)
CAVDTGGFKTIF

SEQ ID NO: 523288 - protein, 16 aa, Homo sapiens
  CDR3 for beta chain variable domain of TCR clone 261644 (TRBV10-3, TRBJ2-1)
CAIRGGGRGDYNEQFF

SEQ ID NO: 523289 - protein, 11 aa, Homo sapiens
  CDR3 for alpha chain variable domain of TCR clone 261645 (TRAV3, TRAJ21)
CAVGNFNKFYF

SEQ ID NO: 523290 - protein, 14 aa, Homo sapiens
  CDR3 for beta chain variable domain of TCR clone 261645 (TRBV12-5, TRBJ2-5)
CASGSRTHQETRYF

SEQ ID NO: 523291 - protein, 12 aa, Homo sapiens
  CDR3 for alpha chain variable domain of TCR clone 261646 (TRAV1-2, TRAJ17)
CAVRAAGNKQTF

SEQ ID NO: 523292 - protein, 16 aa, Homo sapiens
  CDR3 for beta chain variable domain of TCR clone 261646 (TRBV20-1, TRBJ2-1)
CSAPGLAGSYSDEQFF

SEQ ID NO: 523293 - protein, 17 aa, Homo sapiens
  CDR3 for alpha chain variable domain of TCR clone 261647 (TRAV3, TRAJ42)
CAVRDRDYGGSQGNLIF

SEQ ID NO: 523294 - protein, 16 aa, Homo sapiens
  CDR3 for beta chain variable domain of TCR clone 261647 (TRBV5-1, TRBJ2-7)
CASSYASTSSGGEQYF

SEQ ID NO: 523295 - protein, 14 aa, Homo sapiens
  CDR3 for alpha chain variable domain of TCR clone 261648 (TRAV12-1, TRAJ9)
CVVTGYTGGFKTIF

SEQ ID NO: 523296 - protein, 14 aa, Homo sapiens
  CDR3 for beta chain variable domain of TCR clone 261648 (TRBV25-1, TRBJ1-1)
CASTHLGGNTEAFF

SEQ ID NO: 523297 - protein, 15 aa, Homo sapiens
  CDR3 for alpha chain variable domain of TCR clone 261649 (TRAV17, TRAJ57)
CSTDWTPGGSEKLVC

SEQ ID NO: 523298 - protein, 15 aa, Homo sapiens
  CDR3 for beta chain variable domain of TCR clone 261649 (TRBV27, TRBJ2-1)
CASSLAGGPFNEQFF

SEQ ID NO: 523299 - protein, 14 aa, Homo sapiens
  CDR3 for alpha chain variable domain of TCR clone 261650 (TRAV34, TRAJ22)
CGADTSGSARQLTF

SEQ ID NO: 523300 - protein, 15 aa, Homo sapiens
  CDR3 for beta chain variable domain of TCR clone 261650 (TRBV27, TRBJ2-1)
CAGSNGGGSSNEQFF

SEQ ID NO: 523301 - protein, 14 aa, Homo sapiens
  CDR3 for alpha chain variable domain of TCR clone 261651 (TRAV1-2, TRAJ16)
CAVNRFSDGQKLLF

SEQ ID NO: 523302 - protein, 17 aa, Homo sapiens
  CDR3 for beta chain variable domain of TCR clone 261651 (TRBV11-3, TRBJ2-6)
CASSAGTGGAGANVLTF

SEQ ID NO: 523303 - protein, 13 aa, Homo sapiens
  CDR3 for alpha chain variable domain of TCR clone 261652 (TRAV1-2, TRAJ35)
CAASRGFGNVLHC

SEQ ID NO: 523304 - protein, 15 aa, Homo sapiens
  CDR3 for beta chain variable domain of TCR clone 261652 (TRBV4-1, TRBJ2-7)
CASSQQGQGFDEQYF

SEQ ID NO: 523305 - protein, 13 aa, Homo sapiens
  CDR3 for alpha chain variable domain of TCR clone 261653 (TRAV12-3, TRAJ16)
CAVQLSDGQKLLF

SEQ ID NO: 523306 - protein, 16 aa, Homo sapiens
  CDR3 for beta chain variable domain of TCR clone 261653 (TRBV5-1, TRBJ1-2)
CASSLDVNRGSYGYTF

SEQ ID NO: 523307 - protein, 12 aa, Homo sapiens
  CDR3 for alpha chain variable domain of TCR clone 261654 (TRAV17, TRAJ29)
CYASSGNTPLVF

SEQ ID NO: 523308 - protein, 14 aa, Homo sapiens
  CDR3 for beta chain variable domain of TCR clone 261654 (TRBV6-3, TRBJ1-5)
CASSSIDGDQPQHF

SEQ ID NO: 523309 - protein, 16 aa, Homo sapiens
  CDR3 for alpha chain variable domain of TCR clone 261655 (TRAV23/DV6, TRAJ9)
CAASIGGNTGGVKTIF

SEQ ID NO: 523310 - protein, 13 aa, Homo sapiens
  CDR3 for beta chain variable domain of TCR clone 261655 (TRBV7-9, TRBJ1-2)
CASSLKQNYGYTF

SEQ ID NO: 523311 - protein, 11 aa, Homo sapiens
  CDR3 for alpha chain variable domain of TCR clone 261656 (TRAV3, TRAJ21)
CAVGNFNKFYF

SEQ ID NO: 523312 - protein, 16 aa, Homo sapiens
  CDR3 for beta chain variable domain of TCR clone 261656 (TRBV19, TRBJ2-1)
CASSKAGPSAYNEQVF

SEQ ID NO: 523313 - protein, 12 aa, Homo sapiens
  CDR3 for alpha chain variable domain of TCR clone 261657 (TRAV13-1, TRAJ21)
CAATEGLNKFYF

SEQ ID NO: 523314 - protein, 14 aa, Homo sapiens
  CDR3 for beta chain variable domain of TCR clone 261657 (TRBV5-4, TRBJ1-1)
CASSLDSRRDEAFF

SEQ ID NO: 523315 - protein, 15 aa, Homo sapiens
  CDR3 for alpha chain variable domain of TCR clone 261658 (TRAV17, TRAJ16)
CATALRFSDGQKLLF

SEQ ID NO: 523316 - protein, 12 aa, Homo sapiens
  CDR3 for beta chain variable domain of TCR clone 261658 (TRBV11-2, TRBJ2-2)
CVSSLGGGELFF

SEQ ID NO: 523317 - protein, 11 aa, Homo sapiens
  CDR3 for alpha chain variable domain of TCR clone 261659 (TRAV12-2, TRAJ43)
CAAYNNNDMRF

SEQ ID NO: 523318 - protein, 14 aa, Homo sapiens
  CDR3 for beta chain variable domain of TCR clone 261659 (TRBV7-8, TRBJ1-2)
CASSAGTAIYGYTV

SEQ ID NO: 523319 - protein, 15 aa, Homo sapiens
  CDR3 for alpha chain variable domain of TCR clone 261660 (TRAV21, TRAJ24)
FAARSSTDSWGKLQF

SEQ ID NO: 523320 - protein, 15 aa, Homo sapiens
  CDR3 for beta chain variable domain of TCR clone 261660 (TRBV20-1, TRBJ2-7)
CSARDRVSGMDEQYF

SEQ ID NO: 523321 - protein, 15 aa, Homo sapiens
  CDR3 for alpha chain variable domain of TCR clone 261661 (TRAV12-3, TRAJ22)
CAMRTISVSARQLTF

SEQ ID NO: 523322 - protein, 16 aa, Homo sapiens
  CDR3 for beta chain variable domain of TCR clone 261661 (TRBV20-1, TRBJ2-2)
CSARRPGTGNTGELFF

SEQ ID NO: 523323 - protein, 15 aa, Homo sapiens
  CDR3 for alpha chain variable domain of TCR clone 261662 (TRAV35, TRAJ34)
CAGTSIVRNTDKLIF

SEQ ID NO: 523324 - protein, 13 aa, Homo sapiens
  CDR3 for beta chain variable domain of TCR clone 261662 (TRBV19, TRBJ1-2)
CASSVPGQDGYTF

SEQ ID NO: 523325 - protein, 12 aa, Homo sapiens
  CDR3 for alpha chain variable domain of TCR clone 261663 (TRAV12-3, TRAJ17)
CAMTLTGNKLTF

SEQ ID NO: 523326 - protein, 15 aa, Homo sapiens
  CDR3 for beta chain variable domain of TCR clone 261663 (TRBV27, TRBJ1-4)
CASSNRRGFNEKLFF

SEQ ID NO: 523327 - protein, 12 aa, Homo sapiens
  CDR3 for alpha chain variable domain of TCR clone 261664 (TRAV2, TRAJ9)
CAVGAGGFKTIF

SEQ ID NO: 523328 - protein, 19 aa, Homo sapiens
  CDR3 for beta chain variable domain of TCR clone 261664 (TRBV7-2, TRBJ2-3)
CASSFLSRNWGGGTDTQYF

SEQ ID NO: 523329 - protein, 17 aa, Homo sapiens
  CDR3 for alpha chain variable domain of TCR clone 261665 (TRAV8-1, TRAJ43)
CAVTNDMRFGAGTRLTV

SEQ ID NO: 523330 - protein, 14 aa, Homo sapiens
  CDR3 for beta chain variable domain of TCR clone 261665 (TRBV3-1, TRBJ2-5)
CASSQGPDQETLYF

SEQ ID NO: 523331 - protein, 14 aa, Homo sapiens
  CDR3 for alpha chain variable domain of TCR clone 261666 (TRAV26-1, TRAJ40)
CIVRVARGTYKSIF

SEQ ID NO: 523332 - protein, 14 aa, Homo sapiens
  CDR3 for beta chain variable domain of TCR clone 261666 (TRBV7-3, TRBJ2-7)
CASSLKADSYEQYF

SEQ ID NO: 523333 - protein, 13 aa, Homo sapiens
  CDR3 for alpha chain variable domain of TCR clone 261667 (TRAV3, TRAJ40)
CAVRGSGAYKYIF

SEQ ID NO: 523334 - protein, 18 aa, Homo sapiens
  CDR3 for beta chain variable domain of TCR clone 261667 (TRBV11-2, TRBJ2-3)
CASSLGGASRGAPNTQYF

SEQ ID NO: 523335 - protein, 17 aa, Homo sapiens
  CDR3 for alpha chain variable domain of TCR clone 261668 (TRAV12-2, TRAJ39)
CAVNNMLTYGGGTRLMV

SEQ ID NO: 523336 - protein, 16 aa, Homo sapiens
  CDR3 for beta chain variable domain of TCR clone 261668 (TRBV5-3, TRBJ2-2)
CARSFGTGTNTGELFF

SEQ ID NO: 523337 - protein, 10 aa, Homo sapiens
  CDR3 for alpha chain variable domain of TCR clone 261669 (TRAV1-2, TRAJ20)
CACNDYKLSF

SEQ ID NO: 523338 - protein, 16 aa, Homo sapiens
  CDR3 for beta chain variable domain of TCR clone 261669 (TRBV20-1, TRBJ2-1)
CSARELEQGMNNEQFF

SEQ ID NO: 523339 - protein, 15 aa, Homo sapiens
  CDR3 for alpha chain variable domain of TCR clone 261670 (TRAV4, TRAJ39)
CLVGPNNNAGNMLTF

SEQ ID NO: 523340 - protein, 12 aa, Homo sapiens
  CDR3 for beta chain variable domain of TCR clone 261670 (TRBV5-5, TRBJ2-5)
CASSYFGETQYF

SEQ ID NO: 523341 - protein, 16 aa, Homo sapiens
  CDR3 for alpha chain variable domain of TCR clone 261671 (TRAV3, TRAJ37)
CAVRPHGSGTTGNLIF

SEQ ID NO: 523342 - protein, 15 aa, Homo sapiens
  CDR3 for beta chain variable domain of TCR clone 261671 (TRBV20-1, TRBJ2-7)
CSARDRVSGMDEQYF

SEQ ID NO: 523343 - protein, 16 aa, Homo sapiens
  CDR3 for alpha chain variable domain of TCR clone 261672 (TRAV4, TRAJ22)
CPVGDLYSGSARQLTF

SEQ ID NO: 523344 - protein, 14 aa, Homo sapiens
  CDR3 for beta chain variable domain of TCR clone 261672 (TRBV5-4, TRBJ2-2)
CASRLDGGTGELFF

SEQ ID NO: 523345 - protein, 12 aa, Homo sapiens
  CDR3 for alpha chain variable domain of TCR clone 261673 (TRAV8-3, TRAJ26)
CAGDNYGQNFVF

SEQ ID NO: 523346 - protein, 13 aa, Homo sapiens
  CDR3 for beta chain variable domain of TCR clone 261673 (TRBV20-1, TRBJ1-1)
CSASLGGGTEAFF

SEQ ID NO: 523347 - protein, 16 aa, Homo sapiens
  CDR3 for alpha chain variable domain of TCR clone 261674 (TRAV21, TRAJ52)
CAVTNAGGTSYGKLTF

SEQ ID NO: 523348 - protein, 14 aa, Homo sapiens
  CDR3 for beta chain variable domain of TCR clone 261674 (TRBV4-2, TRBJ2-1)
CASGLDRAYNEQFF

SEQ ID NO: 523349 - protein, 16 aa, Homo sapiens
  CDR3 for alpha chain variable domain of TCR clone 261675 (TRAV21, TRAJ37)
CAVRPRGSSNTGKLIF

SEQ ID NO: 523350 - protein, 18 aa, Homo sapiens
  CDR3 for beta chain variable domain of TCR clone 261675 (TRBV11-2, TRBJ2-3)
CASSLGGASRGAPNTQYF

SEQ ID NO: 523351 - protein, 11 aa, Homo sapiens
  CDR3 for alpha chain variable domain of TCR clone 261676 (TRAV1-2, TRAJ20)
CAVANDYKLSF

SEQ ID NO: 523352 - protein, 14 aa, Homo sapiens
  CDR3 for beta chain variable domain of TCR clone 261676 (TRBV19, TRBJ2-3)
CASSAPRGTDTQYF

SEQ ID NO: 523353 - protein, 18 aa, Homo sapiens
  CDR3 for alpha chain variable domain of TCR clone 261677 (TRAV21, TRAJ52)
CAVAPSPAGGTSYGKLTF

SEQ ID NO: 523354 - protein, 17 aa, Homo sapiens
  CDR3 for beta chain variable domain of TCR clone 261677 (TRBV13, TRBJ2-3)
CASSLSRVAGGRNTQYF

SEQ ID NO: 523355 - protein, 13 aa, Homo sapiens
  CDR3 for alpha chain variable domain of TCR clone 261678 (TRAV13-1, TRAJ37)
CAARSGNTGKLIF

SEQ ID NO: 523356 - protein, 20 aa, Homo sapiens
  CDR3 for beta chain variable domain of TCR clone 261678 (TRBV7-8, TRBJ2-2)
CASSHLFPGPTIHITGELFF

SEQ ID NO: 523357 - protein, 17 aa, Homo sapiens
  CDR3 for alpha chain variable domain of TCR clone 261679 (TRAV26-1, TRAJ53)
CIVRVDDRGGSNYKLTF

SEQ ID NO: 523358 - protein, 15 aa, Homo sapiens
  CDR3 for beta chain variable domain of TCR clone 261679 (TRBV11-2, TRBJ2-2)
CASSSDRVNAGELFF

SEQ ID NO: 523359 - protein, 12 aa, Homo sapiens
  CDR3 for alpha chain variable domain of TCR clone 261680 (TRAV1-1, TRAJ8)
CAGGTGFQRLVF

SEQ ID NO: 523360 - protein, 15 aa, Homo sapiens
  CDR3 for beta chain variable domain of TCR clone 261680 (TRBV7-9, TRBJ1-4)
CAGSRTGGFNEKLFF

SEQ ID NO: 523361 - protein, 16 aa, Homo sapiens
  CDR3 for alpha chain variable domain of TCR clone 261681 (TRAV16, TRAJ52)
FALSAAGGTGYGKLTF

SEQ ID NO: 523362 - protein, 12 aa, Homo sapiens
  CDR3 for beta chain variable domain of TCR clone 261681 (TRBV12-4, TRBJ1-3)
CASSFSGNTIYF

SEQ ID NO: 523363 - protein, 13 aa, Homo sapiens
  CDR3 for alpha chain variable domain of TCR clone 261682 (TRAV21, TRAJ20)
CAVGLRVDYKLSF

SEQ ID NO: 523364 - protein, 13 aa, Homo sapiens
  CDR3 for beta chain variable domain of TCR clone 261682 (TRBV6-1, TRBJ1-1)
CASSRQGNTEACF

SEQ ID NO: 523365 - protein, 12 aa, Homo sapiens
  CDR3 for alpha chain variable domain of TCR clone 261683 (TRAV8-3, TRAJ20)
CAVGANDYKLSF

SEQ ID NO: 523366 - protein, 14 aa, Homo sapiens
  CDR3 for beta chain variable domain of TCR clone 261683 (TRBV12-4, TRBJ1-4)
CASGFPGTPEKLFF

SEQ ID NO: 523367 - protein, 16 aa, Homo sapiens
  CDR3 for alpha chain variable domain of TCR clone 261684 (TRAV12-2, TRAJ32)
CAVNMNYGGATNKLIF

SEQ ID NO: 523368 - protein, 14 aa, Homo sapiens
  CDR3 for beta chain variable domain of TCR clone 261684 (TRBV4-2, TRBJ2-1)
CASGLDRAYNEQFF

SEQ ID NO: 523369 - protein, 17 aa, Homo sapiens
  CDR3 for alpha chain variable domain of TCR clone 261685 (TRAV8-1, TRAJ43)
CAVTNDMRFGAGTRLTV

SEQ ID NO: 523370 - protein, 12 aa, Homo sapiens
  CDR3 for beta chain variable domain of TCR clone 261685 (TRBV6-3, TRBJ2-7)
CASSLTPYEQYF

SEQ ID NO: 523371 - protein, 16 aa, Homo sapiens
  CDR3 for alpha chain variable domain of TCR clone 261686 (TRAV30, TRAJ26)
CGTESVGDNYGQNFVF

SEQ ID NO: 523372 - protein, 13 aa, Homo sapiens
  CDR3 for beta chain variable domain of TCR clone 261686 (TRBV19, TRBJ1-2)
CASSIAEDYGYSF

SEQ ID NO: 523373 - protein, 14 aa, Homo sapiens
  CDR3 for alpha chain variable domain of TCR clone 261687 (TRAV17, TRAJ11)
CATDATSGYSTLTF

SEQ ID NO: 523374 - protein, 15 aa, Homo sapiens
  CDR3 for beta chain variable domain of TCR clone 261687 (TRBV10-2, TRBJ2-6)
CASSEQGTGANVLTF

SEQ ID NO: 523375 - protein, 18 aa, Homo sapiens
  CDR3 for alpha chain variable domain of TCR clone 261688 (TRAV21, TRAJ52)
CAVRPSPAGGTSYGKLTF

SEQ ID NO: 523376 - protein, 17 aa, Homo sapiens
  CDR3 for beta chain variable domain of TCR clone 261688 (TRBV13, TRBJ2-3)
CACSLARVAGGRNTQYF

SEQ ID NO: 523377 - protein, 14 aa, Homo sapiens
  CDR3 for alpha chain variable domain of TCR clone 261689 (TRAV8-4, TRAJ13)
CAVTLSGGYQKVTF

SEQ ID NO: 523378 - protein, 14 aa, Homo sapiens
  CDR3 for beta chain variable domain of TCR clone 261689 (TRBV7-2, TRBJ2-5)
CASSPRGSSETQYF

SEQ ID NO: 523379 - protein, 14 aa, Homo sapiens
  CDR3 for alpha chain variable domain of TCR clone 261690 (TRAV26-1, TRAJ49)
CIVRLTNTGNQFYF

SEQ ID NO: 523380 - protein, 15 aa, Homo sapiens
  CDR3 for beta chain variable domain of TCR clone 261690 (TRBV5-1, TRBJ2-3)
CASSVTSGSTDTQYF

SEQ ID NO: 523381 - protein, 15 aa, Homo sapiens
  CDR3 for alpha chain variable domain of TCR clone 261691 (TRAV13-1, TRAJ5)
CAASPRGHGQESTYF

SEQ ID NO: 523382 - protein, 14 aa, Homo sapiens
  CDR3 for beta chain variable domain of TCR clone 261691 (TRBV7-2, TRBJ1-1)
CASSFLTGTTEAFF

SEQ ID NO: 523383 - protein, 13 aa, Homo sapiens
  CDR3 for alpha chain variable domain of TCR clone 261692 (TRAV4, TRAJ31)
CLVYRNNNARLMF

SEQ ID NO: 523384 - protein, 12 aa, Homo sapiens
  CDR3 for beta chain variable domain of TCR clone 261692 (TRBV5-5, TRBJ2-5)
CASSYFGETQYF

SEQ ID NO: 523385 - protein, 15 aa, Homo sapiens
  CDR3 for alpha chain variable domain of TCR clone 261693 (TRAV26-1, TRAJ44)
CIARVPFGTASKLTF

SEQ ID NO: 523386 - protein, 15 aa, Homo sapiens
  CDR3 for beta chain variable domain of TCR clone 261693 (TRBV24-1, TRBJ1-3)
CATSDHGESGNTIYF

SEQ ID NO: 523387 - protein, 16 aa, Homo sapiens
  CDR3 for alpha chain variable domain of TCR clone 261694 (TRAV14/DV4, TRAJ21)
CAMREGPENNFNKFYF

SEQ ID NO: 523388 - protein, 15 aa, Homo sapiens
  CDR3 for beta chain variable domain of TCR clone 261694 (TRBV10-3, TRBJ2-5)
CAISEFGRGQETQYF

SEQ ID NO: 523389 - protein, 13 aa, Homo sapiens
  CDR3 for alpha chain variable domain of TCR clone 261695 (TRAV12-1, TRAJ49)
CVVPPFTGNQFYF

SEQ ID NO: 523390 - protein, 13 aa, Homo sapiens
  CDR3 for beta chain variable domain of TCR clone 261695 (TRBV20-1, TRBJ1-1)
CSARGGANTEAFF

SEQ ID NO: 523391 - protein, 15 aa, Homo sapiens
  CDR3 for alpha chain variable domain of TCR clone 261696 (TRAV25, TRAJ53)
CAATGGGGSNYKLTF

SEQ ID NO: 523392 - protein, 12 aa, Homo sapiens
  CDR3 for beta chain variable domain of TCR clone 261696 (TRBV11-3, TRBJ1-1)
CASSHRQGEAFF

SEQ ID NO: 523393 - protein, 12 aa, Homo sapiens
  CDR3 for alpha chain variable domain of TCR clone 261697 (TRAV12-3, TRAJ17)
CAMTLTGNKITF

SEQ ID NO: 523394 - protein, 15 aa, Homo sapiens
  CDR3 for beta chain variable domain of TCR clone 261697 (TRBV20-1, TRBJ2-7)
CSARDQVSGMDEQYF

SEQ ID NO: 523395 - protein, 12 aa, Homo sapiens
  CDR3 for alpha chain variable domain of TCR clone 261698 (TRAV13-2, TRAJ23)
CAERHRGGKLIF

SEQ ID NO: 523396 - protein, 13 aa, Homo sapiens
  CDR3 for beta chain variable domain of TCR clone 261698 (TRBV10-3, TRBJ2-7)
CAAKLAVNYEQYF

SEQ ID NO: 523397 - protein, 16 aa, Homo sapiens
  CDR3 for alpha chain variable domain of TCR clone 261699 (TRAV26-1, TRAJ37)
CIVRGDGSGNTGKLIF

SEQ ID NO: 523398 - protein, 17 aa, Homo sapiens
  CDR3 for beta chain variable domain of TCR clone 261699 (TRBV4-1, TRBJ2-7)
CASSRDPLGVRGGEQSF

SEQ ID NO: 523399 - protein, 14 aa, Homo sapiens
  CDR3 for alpha chain variable domain of TCR clone 261700 (TRAV8-3, TRAJ36)
CAVGPITGADNLFF

SEQ ID NO: 523400 - protein, 15 aa, Homo sapiens
  CDR3 for beta chain variable domain of TCR clone 261700 (TRBV4-1, TRBJ2-1)
CASSQDPGNYNEQFF

SEQ ID NO: 523401 - protein, 11 aa, Homo sapiens
  CDR3 for alpha chain variable domain of TCR clone 261701 (TRAV21, TRAJ34)
CAHYNTDKLIF

SEQ ID NO: 523402 - protein, 13 aa, Homo sapiens
  CDR3 for beta chain variable domain of TCR clone 261701 (TRBV9, TRBJ2-1)
CASSVGQGGEQFF

SEQ ID NO: 523403 - protein, 15 aa, Homo sapiens
  CDR3 for alpha chain variable domain of TCR clone 261702 (TRAV3, TRAJ20)
CAVRDVKLSDYKLSF

SEQ ID NO: 523404 - protein, 15 aa, Homo sapiens
  CDR3 for beta chain variable domain of TCR clone 261702 (TRBV7-9, TRBJ1-6)
CASSSPGRGNSTLHF

SEQ ID NO: 523405 - protein, 12 aa, Homo sapiens
  CDR3 for alpha chain variable domain of TCR clone 261703 (TRAV12-2, TRAJ10)
WGVTGGGNKLNF

SEQ ID NO: 523406 - protein, 16 aa, Homo sapiens
  CDR3 for beta chain variable domain of TCR clone 261703 (TRBV6-4, TRBJ1-2)
CASSEAVGDPNYGYTF

SEQ ID NO: 523407 - protein, 13 aa, Homo sapiens
  CDR3 for alpha chain variable domain of TCR clone 261704 (TRAV2, TRAJ15)
CAVASQAGTALIF

SEQ ID NO: 523408 - protein, 13 aa, Homo sapiens
  CDR3 for beta chain variable domain of TCR clone 261704 (TRBV7-2, TRBJ1-1)
CASSRNTNTEAFF

SEQ ID NO: 523409 - protein, 16 aa, Homo sapiens
  CDR3 for alpha chain variable domain of TCR clone 261705 (TRAV13-2, TRAJ53)
CADLANSGGSNYKLTF

SEQ ID NO: 523410 - protein, 16 aa, Homo sapiens
  CDR3 for beta chain variable domain of TCR clone 261705 (TRBV7-3, TRBJ2-2)
CASSLKRGTLSGELFF

SEQ ID NO: 523411 - protein, 17 aa, Homo sapiens
  CDR3 for alpha chain variable domain of TCR clone 261706 (TRAV38-2/DV8, TRAJ23)
CALSRKLIFGQGTELSV

SEQ ID NO: 523412 - protein, 17 aa, Homo sapiens
  CDR3 for beta chain variable domain of TCR clone 261706 (TRBV5-4, TRBJ2-1)
WASSSAGGRGPYNEQFF

SEQ ID NO: 523413 - protein, 13 aa, Homo sapiens
  CDR3 for alpha chain variable domain of TCR clone 261707 (TRAV3, TRAJ15)
CAVRDQAGTALIF

SEQ ID NO: 523414 - protein, 15 aa, Homo sapiens
  CDR3 for beta chain variable domain of TCR clone 261707 (TRBV11-1, TRBJ2-7)
CASSLNYGDSYEQYF

SEQ ID NO: 523415 - protein, 14 aa, Homo sapiens
  CDR3 for alpha chain variable domain of TCR clone 261708 (TRAV35, TRAJ50)
CAGHRKTSYDKGIF

SEQ ID NO: 523416 - protein, 13 aa, Homo sapiens
  CDR3 for beta chain variable domain of TCR clone 261708 (TRBV7-7, TRBJ2-3)
CASSLSRADTQYF

SEQ ID NO: 523417 - protein, 14 aa, Homo sapiens
  CDR3 for alpha chain variable domain of TCR clone 261709 (TRAV12-1, TRAJ9)
CVVTGDTGGFKTIF

SEQ ID NO: 523418 - protein, 16 aa, Homo sapiens
  CDR3 for beta chain variable domain of TCR clone 261709 (TRBV29-1, TRBJ1-2)
CSVEANRDKANYGYTF

SEQ ID NO: 523419 - protein, 14 aa, Homo sapiens
  CDR3 for alpha chain variable domain of TCR clone 261710 (TRAV26-1, TRAJ33)
CIVRNMDSNYQLIW

SEQ ID NO: 523420 - protein, 16 aa, Homo sapiens
  CDR3 for beta chain variable domain of TCR clone 261710 (TRBV24-1, TRBJ2-3)
CATSDPGTGATDTQYF

SEQ ID NO: 523421 - protein, 14 aa, Homo sapiens
  CDR3 for alpha chain variable domain of TCR clone 261711 (TRAV21, TRAJ37)
CAVKGSSNTGKLIF

SEQ ID NO: 523422 - protein, 13 aa, Homo sapiens
  CDR3 for beta chain variable domain of TCR clone 261711 (TRBV7-9, TRBJ2-3)
CASSPGSTDTQYF

SEQ ID NO: 523423 - protein, 13 aa, Homo sapiens
  CDR3 for alpha chain variable domain of TCR clone 261712 (TRAV21, TRAJ27)
CAALNTNAGKSTF

SEQ ID NO: 523424 - protein, 13 aa, Homo sapiens
  CDR3 for beta chain variable domain of TCR clone 261712 (TRBV24-1, TRBJ2-2)
CATSEWSTGELFF

SEQ ID NO: 523425 - protein, 14 aa, Homo sapiens
  CDR3 for alpha chain variable domain of TCR clone 261713 (TRAV2, TRAJ3)
CAVRPYSSASKIII

SEQ ID NO: 523426 - protein, 17 aa, Homo sapiens
  CDR3 for beta chain variable domain of TCR clone 261713 (TRBV7-6, TRBJ2-5)
CASSSPQAGDPSETQYF

SEQ ID NO: 523427 - protein, 16 aa, Homo sapiens
  CDR3 for alpha chain variable domain of TCR clone 261714 (TRAV30, TRAJ24)
CGTEIVDADSWGKFQF

SEQ ID NO: 523428 - protein, 13 aa, Homo sapiens
  CDR3 for beta chain variable domain of TCR clone 261714 (TRBV18, TRBJ1-1)
CASSGGRNTEAVF

SEQ ID NO: 523429 - protein, 20 aa, Homo sapiens
  CDR3 for alpha chain variable domain of TCR clone 261715 (TRAV27, TRAJ21)
CAGVRQLQQILLCILDQTQC

SEQ ID NO: 523430 - protein, 13 aa, Homo sapiens
  CDR3 for beta chain variable domain of TCR clone 261715 (TRBV10-3, TRBJ2-7)
CASKLAVNYEQYF

SEQ ID NO: 523431 - protein, 14 aa, Homo sapiens
  CDR3 for alpha chain variable domain of TCR clone 261716 (TRAV12-2, TRAJ44)
CGVNPAGTASKLTF

SEQ ID NO: 523432 - protein, 13 aa, Homo sapiens
  CDR3 for beta chain variable domain of TCR clone 261716 (TRBV20-1, TRBJ1-6)
CSAPLGVGSPLHF

SEQ ID NO: 523433 - protein, 18 aa, Homo sapiens
  CDR3 for alpha chain variable domain of TCR clone 261717 (TRAV3, TRAJ17)
CAVRARRGGRSCRQQANF

SEQ ID NO: 523434 - protein, 13 aa, Homo sapiens
  CDR3 for beta chain variable domain of TCR clone 261717 (TRBV7-2, TRBJ1-4)
CASSLAGLEKLFF

SEQ ID NO: 523435 - protein, 14 aa, Homo sapiens
  CDR3 for alpha chain variable domain of TCR clone 261718 (TRAV2, TRAJ9)
CAVEERSGGFKTIF

SEQ ID NO: 523436 - protein, 13 aa, Homo sapiens
  CDR3 for beta chain variable domain of TCR clone 261718 (TRBV12-4, TRBJ1-5)
CASSPDRAQPQHF

SEQ ID NO: 523437 - protein, 13 aa, Homo sapiens
  CDR3 for alpha chain variable domain of TCR clone 261719 (TRAV12-1, TRAJ29)
CVVDTSGNTPLVF

SEQ ID NO: 523438 - protein, 14 aa, Homo sapiens
  CDR3 for beta chain variable domain of TCR clone 261719 (TRBV12-4, TRBJ2-3)
CASSLVPSTDTRYF

SEQ ID NO: 523439 - protein, 13 aa, Homo sapiens
  CDR3 for alpha chain variable domain of TCR clone 261720 (TRAV12-2, TRAJ9)
CAVKWAGGFKTIF

SEQ ID NO: 523440 - protein, 16 aa, Homo sapiens
  CDR3 for beta chain variable domain of TCR clone 261720 (TRBV6-6, TRBJ2-5)
CASSYDWAGGSETQYF

SEQ ID NO: 523441 - protein, 14 aa, Homo sapiens
  CDR3 for alpha chain variable domain of TCR clone 261721 (TRAV9-2, TRAJ39)
CALYIYNAGNMLTF

SEQ ID NO: 523442 - protein, 13 aa, Homo sapiens
  CDR3 for beta chain variable domain of TCR clone 261721 (TRBV20-1, TRBJ2-1)
CSARPGRYNEKFF

SEQ ID NO: 523443 - protein, 13 aa, Homo sapiens
  CDR3 for alpha chain variable domain of TCR clone 261722 (TRAV8-3, TRAJ21)
CAVGLDNFNKFYF

SEQ ID NO: 523444 - protein, 14 aa, Homo sapiens
  CDR3 for beta chain variable domain of TCR clone 261722 (TRBV7-9, TRBJ2-1)
CASSPRDSLYEQFF

SEQ ID NO: 523445 - protein, 10 aa, Homo sapiens
  CDR3 for alpha chain variable domain of TCR clone 261723 (TRAV1-2, TRAJ31)
CVSEDARLMF

SEQ ID NO: 523446 - protein, 14 aa, Homo sapiens
  CDR3 for beta chain variable domain of TCR clone 261723 (TRBV20-1, TRBJ1-3)
CSDSPTGAGNTIYF

SEQ ID NO: 523447 - protein, 14 aa, Homo sapiens
  CDR3 for alpha chain variable domain of TCR clone 261724 (TRAV27, TRAJ12)
CAGARMDRSYKLIF

SEQ ID NO: 523448 - protein, 18 aa, Homo sapiens
  CDR3 for beta chain variable domain of TCR clone 261724 (TRBV10-3, TRBJ2-7)
CAISESGRPSGGRVEQYF

SEQ ID NO: 523449 - protein, 11 aa, Homo sapiens
  CDR3 for alpha chain variable domain of TCR clone 261725 (TRAV12-3, TRAJ43)
CAMSCSNDMRF

SEQ ID NO: 523450 - protein, 13 aa, Homo sapiens
  CDR3 for beta chain variable domain of TCR clone 261725 (TRBV20-1, TRBJ1-1)
CSAPLGGGTEAFF

SEQ ID NO: 523451 - protein, 18 aa, Homo sapiens
  CDR3 for alpha chain variable domain of TCR clone 261726 (TRAV13-1, TRAJ52)
CAASKRSAGGNSYGKLTF

SEQ ID NO: 523452 - protein, 13 aa, Homo sapiens
  CDR3 for beta chain variable domain of TCR clone 261726 (TRBV12-4, TRBJ1-2)
CASSLRQGKGYAF

SEQ ID NO: 523453 - protein, 16 aa, Homo sapiens
  CDR3 for alpha chain variable domain of TCR clone 261727 (TRAV12-3, TRAJ53)
CAMSPGSGGSNSKLTF

SEQ ID NO: 523454 - protein, 16 aa, Homo sapiens
  CDR3 for beta chain variable domain of TCR clone 261727 (TRBV4-2, TRBJ1-1)
CASSQAGFGMNTEAFF

SEQ ID NO: 523455 - protein, 16 aa, Homo sapiens
  CDR3 for alpha chain variable domain of TCR clone 261728 (TRAV16, TRAJ52)
CALCAAGGTSYGKLTF

SEQ ID NO: 523456 - protein, 12 aa, Homo sapiens
  CDR3 for beta chain variable domain of TCR clone 261728 (TRBV12-4, TRBJ1-3)
CASSFSGNTIYF

SEQ ID NO: 523457 - protein, 15 aa, Homo sapiens
  CDR3 for alpha chain variable domain of TCR clone 261729 (TRAV2, TRAJ45)
CAVDGTGGGADGLPF

SEQ ID NO: 523458 - protein, 16 aa, Homo sapiens
  CDR3 for beta chain variable domain of TCR clone 261729 (TRBV6-5, TRBJ2-1)
CASSYSLSGGYNEQFF

SEQ ID NO: 523459 - protein, 14 aa, Homo sapiens
  CDR3 for alpha chain variable domain of TCR clone 261730 (TRAV12-2, TRAJ17)
CAVLFKAAGNKLTF

SEQ ID NO: 523460 - protein, 14 aa, Homo sapiens
  CDR3 for beta chain variable domain of TCR clone 261730 (TRBV15, TRBJ2-1)
CATSGVEDYNEQFF

SEQ ID NO: 523461 - protein, 17 aa, Homo sapiens
  CDR3 for alpha chain variable domain of TCR clone 261731 (TRAV3, TRAJ6)
CAVRDGPRAGGSYIPPF

SEQ ID NO: 523462 - protein, 15 aa, Homo sapiens
  CDR3 for beta chain variable domain of TCR clone 261731 (TRBV9, TRBJ1-6)
CASSVAGTGDSPLHF

SEQ ID NO: 523463 - protein, 11 aa, Homo sapiens
  CDR3 for alpha chain variable domain of TCR clone 261732 (TRAV12-2, TRAJ33)
CAVTSNYQLNW

SEQ ID NO: 523464 - protein, 14 aa, Homo sapiens
  CDR3 for beta chain variable domain of TCR clone 261732 (TRBV12-4, TRBJ2-2)
CASNQGANTGELFF

SEQ ID NO: 523465 - protein, 14 aa, Homo sapiens
  CDR3 for alpha chain variable domain of TCR clone 261733 (TRAV1-1, TRAJ23)
CAVSIYNQGGKLIF

SEQ ID NO: 523466 - protein, 15 aa, Homo sapiens
  CDR3 for beta chain variable domain of TCR clone 261733 (TRBV5-8, TRBJ2-2)
RASSLDRGATGELFF

SEQ ID NO: 523467 - protein, 15 aa, Homo sapiens
  CDR3 for alpha chain variable domain of TCR clone 261734 (TRAV8-6, TRAJ10)
CAVSSKGGGGNKLTF

SEQ ID NO: 523468 - protein, 16 aa, Homo sapiens
  CDR3 for beta chain variable domain of TCR clone 261734 (TRBV2, TRBJ2-5)
CASSETQGVGEETLYF

SEQ ID NO: 523469 - protein, 15 aa, Homo sapiens
  CDR3 for alpha chain variable domain of TCR clone 261735 (TRAV17, TRAJ57)
CATGPSQGGSEKLVF

SEQ ID NO: 523470 - protein, 15 aa, Homo sapiens
  CDR3 for beta chain variable domain of TCR clone 261735 (TRBV12-4, TRBJ1-5)
CQQPTGGGSNQPQHS

SEQ ID NO: 523471 - protein, 15 aa, Homo sapiens
  CDR3 for alpha chain variable domain of TCR clone 261736 (TRAV3, TRAJ22)
CAVRDRGGSARQLTF

SEQ ID NO: 523472 - protein, 12 aa, Homo sapiens
  CDR3 for beta chain variable domain of TCR clone 261736 (TRBV7-9, TRBJ2-7)
CASSLEGYEQYF

SEQ ID NO: 523473 - protein, 15 aa, Homo sapiens
  CDR3 for alpha chain variable domain of TCR clone 261737 (TRAV26-1, TRAJ29)
CIVRVEGSGNTPLVF

SEQ ID NO: 523474 - protein, 15 aa, Homo sapiens
  CDR3 for beta chain variable domain of TCR clone 261737 (TRBV7-9, TRBJ1-5)
CASSQGPQPTQPQHF

SEQ ID NO: 523475 - protein, 16 aa, Homo sapiens
  CDR3 for alpha chain variable domain of TCR clone 261738 (TRAV12-3, TRAJ53)
CAMSLGSGGSNYKLTF

SEQ ID NO: 523476 - protein, 17 aa, Homo sapiens
  CDR3 for beta chain variable domain of TCR clone 261738 (TRBV28, TRBJ2-5)
CASSTPEGDARQETQYF

SEQ ID NO: 523477 - protein, 11 aa, Homo sapiens
  CDR3 for alpha chain variable domain of TCR clone 261739 (TRAV13-2, TRAJ23)
CAESPRGKLIF

SEQ ID NO: 523478 - protein, 13 aa, Homo sapiens
  CDR3 for beta chain variable domain of TCR clone 261739 (TRBV12-4, TRBJ1-1)
CASSPGTGFEAFF

SEQ ID NO: 523479 - protein, 15 aa, Homo sapiens
  CDR3 for alpha chain variable domain of TCR clone 261740 (TRAV23/DV6, TRAJ33)
CAASNSGGGNYQLIW

SEQ ID NO: 523480 - protein, 14 aa, Homo sapiens
  CDR3 for beta chain variable domain of TCR clone 261740 (TRBV6-1, TRBJ1-3)
CASVQGGGGNTIYF

SEQ ID NO: 523481 - protein, 13 aa, Homo sapiens
  CDR3 for alpha chain variable domain of TCR clone 261741 (TRAV30, TRAJ24)
CGTVNDRWGKLQF

SEQ ID NO: 523482 - protein, 14 aa, Homo sapiens
  CDR3 for beta chain variable domain of TCR clone 261741 (TRBV6-3, TRBJ2-2)
CASTYTPDTGELFF

SEQ ID NO: 523483 - protein, 13 aa, Homo sapiens
  CDR3 for alpha chain variable domain of TCR clone 261742 (TRAV1-1, TRAJ9)
CAAKDTGGFKTIF

SEQ ID NO: 523484 - protein, 14 aa, Homo sapiens
  CDR3 for beta chain variable domain of TCR clone 261742 (TRBV7-2, TRBJ2-7)
CASSLYPGRYEQYF

SEQ ID NO: 523485 - protein, 15 aa, Homo sapiens
  CDR3 for alpha chain variable domain of TCR clone 261743 (TRAV21, TRAJ24)
CAARSSTDSWGKLQF

SEQ ID NO: 523486 - protein, 13 aa, Homo sapiens
  CDR3 for beta chain variable domain of TCR clone 261743 (TRBV20-1, TRBJ1-1)
CSARAGGNTEAFF

SEQ ID NO: 523487 - protein, 19 aa, Homo sapiens
  CDR3 for alpha chain variable domain of TCR clone 261744 (TRAV26-1, TRAJ50)
CCVLLHRQNPKTSYDKVIF

SEQ ID NO: 523488 - protein, 17 aa, Homo sapiens
  CDR3 for beta chain variable domain of TCR clone 261744 (TRBV4-1, TRBJ1-4)
CASSPEGPRGVEEKLFF

SEQ ID NO: 523489 - protein, 12 aa, Homo sapiens
  CDR3 for alpha chain variable domain of TCR clone 261745 (TRAV8-3, TRAJ15)
CAVGAPLSALIF

SEQ ID NO: 523490 - protein, 16 aa, Homo sapiens
  CDR3 for beta chain variable domain of TCR clone 261745 (TRBV20-1, TRBJ1-4)
CSAPGQGLLTNEKLFF

SEQ ID NO: 523491 - protein, 13 aa, Homo sapiens
  CDR3 for alpha chain variable domain of TCR clone 261746 (TRAV12-3, TRAJ13)
CAISSGGYQEVTF

SEQ ID NO: 523492 - protein, 13 aa, Homo sapiens
  CDR3 for beta chain variable domain of TCR clone 261746 (TRBV20-1, TRBJ1-1)
CSAPPGGHTEAFF

SEQ ID NO: 523493 - protein, 16 aa, Homo sapiens
  CDR3 for alpha chain variable domain of TCR clone 261747 (TRAV3, TRAJ37)
CAVSPHGSGNTGKLIF

SEQ ID NO: 523494 - protein, 13 aa, Homo sapiens
  CDR3 for beta chain variable domain of TCR clone 261747 (TRBV2, TRBJ1-5)
CASGTGGYQPQHF

SEQ ID NO: 523495 - protein, 15 aa, Homo sapiens
  CDR3 for alpha chain variable domain of TCR clone 261748 (TRAV12-3, TRAJ6)
CAMSATTGGSYIPTF

SEQ ID NO: 523496 - protein, 16 aa, Homo sapiens
  CDR3 for beta chain variable domain of TCR clone 261748 (TRBV13, TRBJ2-3)
CQQPLQGSGGRNTQYF

SEQ ID NO: 523497 - protein, 18 aa, Homo sapiens
  CDR3 for alpha chain variable domain of TCR clone 261749 (TRAV8-4, TRAJ52)
CAVTRANAGGTSYGKLTF

SEQ ID NO: 523498 - protein, 14 aa, Homo sapiens
  CDR3 for beta chain variable domain of TCR clone 261749 (TRBV25-1, TRBJ1-1)
CASTHLGGNTEAFF

SEQ ID NO: 523499 - protein, 15 aa, Homo sapiens
  CDR3 for alpha chain variable domain of TCR clone 261750 (TRAV12-3, TRAJ5)
CAMSGLGTGRRELTF

SEQ ID NO: 523500 - protein, 15 aa, Homo sapiens
  CDR3 for beta chain variable domain of TCR clone 261750 (TRBV19, TRBJ1-1)
CASTSGQIQNTEAFF

SEQ ID NO: 523501 - protein, 12 aa, Homo sapiens
  CDR3 for alpha chain variable domain of TCR clone 261751 (TRAV16, TRAJ9)
CALRTGGFKTIF

SEQ ID NO: 523502 - protein, 13 aa, Homo sapiens
  CDR3 for beta chain variable domain of TCR clone 261751 (TRBV4-3, TRBJ1-1)
CASSQVEGSMAFF

SEQ ID NO: 523503 - protein, 14 aa, Homo sapiens
  CDR3 for alpha chain variable domain of TCR clone 261752 (TRAV35, TRAJ42)
CAGRYGRSQGNLIF

SEQ ID NO: 523504 - protein, 14 aa, Homo sapiens
  CDR3 for beta chain variable domain of TCR clone 261752 (TRBV7-6, TRBJ2-3)
CASSVAGGTDTQYF

SEQ ID NO: 523505 - protein, 13 aa, Homo sapiens
  CDR3 for alpha chain variable domain of TCR clone 261753 (TRAV12-1, TRAJ26)
CVVRRNYGQNFVF

SEQ ID NO: 523506 - protein, 14 aa, Homo sapiens
  CDR3 for beta chain variable domain of TCR clone 261753 (TRBV7-2, TRBJ2-7)
CASRSQGAAYEQYV

SEQ ID NO: 523507 - protein, 19 aa, Homo sapiens
  CDR3 for alpha chain variable domain of TCR clone 261754 (TRAV26-1, TRAJ28)
CILRVAHAYSGAGSYQLTF

SEQ ID NO: 523508 - protein, 17 aa, Homo sapiens
  CDR3 for beta chain variable domain of TCR clone 261754 (TRBV9, TRBJ2-2)
CASSVGGQGTDTGELFF

SEQ ID NO: 523509 - protein, 15 aa, Homo sapiens
  CDR3 for alpha chain variable domain of TCR clone 261755 (TRAV25, TRAJ52)
FAGRPGGTSYGKLTF

SEQ ID NO: 523510 - protein, 17 aa, Homo sapiens
  CDR3 for beta chain variable domain of TCR clone 261755 (TRBV7-8, TRBJ2-6)
CASSAGTGGAGANDLTF

SEQ ID NO: 523511 - protein, 15 aa, Homo sapiens
  CDR3 for alpha chain variable domain of TCR clone 261756 (TRAV8-3, TRAJ45)
CASSYSGGGADGLTF

SEQ ID NO: 523512 - protein, 13 aa, Homo sapiens
  CDR3 for beta chain variable domain of TCR clone 261756 (TRBV10-3, TRBJ2-7)
CASNLAVNYEQYC

SEQ ID NO: 523513 - protein, 13 aa, Homo sapiens
  CDR3 for alpha chain variable domain of TCR clone 261757 (TRAV1-2, TRAJ26)
CAVSPNYGQNFVF

SEQ ID NO: 523514 - protein, 14 aa, Homo sapiens
  CDR3 for beta chain variable domain of TCR clone 261757 (TRBV4-1, TRBJ2-5)
CASSQELALETQYF

SEQ ID NO: 523515 - protein, 13 aa, Homo sapiens
  CDR3 for alpha chain variable domain of TCR clone 261758 (TRAV27, TRAJ49)
CAPRPYTGNQFFF

SEQ ID NO: 523516 - protein, 18 aa, Homo sapiens
  CDR3 for beta chain variable domain of TCR clone 261758 (TRBV7-3, TRBJ2-5)
CASSLGGAAQGRWETQYF

SEQ ID NO: 523517 - protein, 16 aa, Homo sapiens
  CDR3 for alpha chain variable domain of TCR clone 261759 (TRAV30, TRAJ24)
CGTEILDADSWGKFQF

SEQ ID NO: 523518 - protein, 15 aa, Homo sapiens
  CDR3 for beta chain variable domain of TCR clone 261759 (TRBV18, TRBJ2-1)
CASLPDRGRDNEQFF

SEQ ID NO: 523519 - protein, 13 aa, Homo sapiens
  CDR3 for alpha chain variable domain of TCR clone 261760 (TRAV3, TRAJ3)
CAVADSSASKIIF

SEQ ID NO: 523520 - protein, 13 aa, Homo sapiens
  CDR3 for beta chain variable domain of TCR clone 261760 (TRBV3-1, TRBJ2-2)
CASLARGSGELFF

SEQ ID NO: 523521 - protein, 14 aa, Homo sapiens
  CDR3 for alpha chain variable domain of TCR clone 261761 (TRAV17, TRAJ32)
CATDQGGATNKLIF

SEQ ID NO: 523522 - protein, 14 aa, Homo sapiens
  CDR3 for beta chain variable domain of TCR clone 261761 (TRBV2, TRBJ1-5)
CASSENRGGQPQHF

SEQ ID NO: 523523 - protein, 11 aa, Homo sapiens
  CDR3 for alpha chain variable domain of TCR clone 261762 (TRAV12-3, TRAJ49)
CAANTGNHFYF

SEQ ID NO: 523524 - protein, 15 aa, Homo sapiens
  CDR3 for beta chain variable domain of TCR clone 261762 (TRBV4-2, TRBJ1-1)
CASSQEDLPRTEAFF

SEQ ID NO: 523525 - protein, 14 aa, Homo sapiens
  CDR3 for alpha chain variable domain of TCR clone 261763 (TRAV13-1, TRAJ35)
CAASQGGFGNVLHC

SEQ ID NO: 523526 - protein, 14 aa, Homo sapiens
  CDR3 for beta chain variable domain of TCR clone 261763 (TRBV7-9, TRBJ1-1)
CASRDTTGDTEAFF

SEQ ID NO: 523527 - protein, 16 aa, Homo sapiens
  CDR3 for alpha chain variable domain of TCR clone 261764 (TRAV3, TRAJ37)
CAVRPHGSGNTGTIIF

SEQ ID NO: 523528 - protein, 16 aa, Homo sapiens
  CDR3 for beta chain variable domain of TCR clone 261764 (TRBV9, TRBJ1-2)
CAGSVEEKVSPYGYTF

SEQ ID NO: 523529 - protein, 15 aa, Homo sapiens
  CDR3 for alpha chain variable domain of TCR clone 261765 (TRAV3, TRAJ36)
CAVRASQTGSNNLFF

SEQ ID NO: 523530 - protein, 15 aa, Homo sapiens
  CDR3 for beta chain variable domain of TCR clone 261765 (TRBV3-1, TRBJ2-1)
CASSQDYTPRGEQFF

SEQ ID NO: 523531 - protein, 14 aa, Homo sapiens
  CDR3 for alpha chain variable domain of TCR clone 261766 (TRAV12-1, TRAJ38)
CVVNDAGNNRKLIW

SEQ ID NO: 523532 - protein, 14 aa, Homo sapiens
  CDR3 for beta chain variable domain of TCR clone 261766 (TRBV19, TRBJ1-5)
CASSIVQGIQPQQF

SEQ ID NO: 523533 - protein, 15 aa, Homo sapiens
  CDR3 for alpha chain variable domain of TCR clone 261767 (TRAV20, TRAJ6)
CAVRLQSGGSYIPTF

SEQ ID NO: 523534 - protein, 17 aa, Homo sapiens
  CDR3 for beta chain variable domain of TCR clone 261767 (TRBV3-1, TRBJ2-5)
CASSNWGGTSGQETQYF

SEQ ID NO: 523535 - protein, 12 aa, Homo sapiens
  CDR3 for alpha chain variable domain of TCR clone 261768 (TRAV1-1, TRAJ9)
CAVDTGGFKTIF

SEQ ID NO: 523536 - protein, 16 aa, Homo sapiens
  CDR3 for beta chain variable domain of TCR clone 261768 (TRBV28, TRBJ2-1)
CASRRSGRVVGNEQFF

SEQ ID NO: 523537 - protein, 13 aa, Homo sapiens
  CDR3 for alpha chain variable domain of TCR clone 261769 (TRAV12-3, TRAJ40)
CAMSDSGIYKYIF

SEQ ID NO: 523538 - protein, 11 aa, Homo sapiens
  CDR3 for beta chain variable domain of TCR clone 261769 (TRBV11-2, TRBJ1-1)
CASSINTEAFF

SEQ ID NO: 523539 - protein, 14 aa, Homo sapiens
  CDR3 for alpha chain variable domain of TCR clone 261770 (TRAV13-1, TRAJ40)
CAASMTSGTYKYIF

SEQ ID NO: 523540 - protein, 15 aa, Homo sapiens
  CDR3 for beta chain variable domain of TCR clone 261770 (TRBV7-3, TRBJ2-1)
CARRTTGGGEVEQFL

SEQ ID NO: 523541 - protein, 14 aa, Homo sapiens
  CDR3 for alpha chain variable domain of TCR clone 261771 (TRAV38-1, TRAJ40)
CALRPTSGTYKYIF

SEQ ID NO: 523542 - protein, 14 aa, Homo sapiens
  CDR3 for beta chain variable domain of TCR clone 261771 (TRBV27, TRBJ2-7)
CASATGTERREQYF

SEQ ID NO: 523543 - protein, 13 aa, Homo sapiens
  CDR3 for alpha chain variable domain of TCR clone 261772 (TRAV8-2, TRAJ43)
CVVSDQGDNDIRF

SEQ ID NO: 523544 - protein, 12 aa, Homo sapiens
  CDR3 for beta chain variable domain of TCR clone 261772 (TRBV7-8, TRBJ2-7)
CASSLGDREQYF

SEQ ID NO: 523545 - protein, 12 aa, Homo sapiens
  CDR3 for alpha chain variable domain of TCR clone 261773 (TRAV3, TRAJ43)
CAVRDPNNDIRF

SEQ ID NO: 523546 - protein, 14 aa, Homo sapiens
  CDR3 for beta chain variable domain of TCR clone 261773 (TRBV7-2, TRBJ2-7)
CASSPKTSFYEQYF

SEQ ID NO: 523547 - protein, 13 aa, Homo sapiens
  CDR3 for alpha chain variable domain of TCR clone 261774 (TRAV27, TRAJ3)
ASLRGSSASKIMF

SEQ ID NO: 523548 - protein, 15 aa, Homo sapiens
  CDR3 for beta chain variable domain of TCR clone 261774 (TRBV28, TRBJ1-3)
CASSMGWASGNTIYF

SEQ ID NO: 523549 - protein, 18 aa, Homo sapiens
  CDR3 for alpha chain variable domain of TCR clone 261775 (TRAV38-1, TRAJ45)
CDVFLCFPFRGGADGLTF

SEQ ID NO: 523550 - protein, 13 aa, Homo sapiens
  CDR3 for beta chain variable domain of TCR clone 261775 (TRBV10-3, TRBJ1-2)
CAISERDSYGYTF

SEQ ID NO: 523551 - protein, 14 aa, Homo sapiens
  CDR3 for alpha chain variable domain of TCR clone 261776 (TRAV21, TRAJ22)
CAVFFSGSARQLTF

SEQ ID NO: 523552 - protein, 14 aa, Homo sapiens
  CDR3 for beta chain variable domain of TCR clone 261776 (TRBV19, TRBJ1-1)
CAGSIREMNTEAFF

SEQ ID NO: 523553 - protein, 13 aa, Homo sapiens
  CDR3 for alpha chain variable domain of TCR clone 261777 (TRAV12-3, TRAJ13)
CAMSSGGYQEVTF

SEQ ID NO: 523554 - protein, 13 aa, Homo sapiens
  CDR3 for beta chain variable domain of TCR clone 261777 (TRBV20-1, TRBJ1-1)
CSAPPGGHTEASF

SEQ ID NO: 523555 - protein, 21 aa, Homo sapiens
  CDR3 for alpha chain variable domain of TCR clone 261778 (TRAV17, TRAJ9)
CATDYTGGSKLSLEQEQDYLL

SEQ ID NO: 523556 - protein, 14 aa, Homo sapiens
  CDR3 for beta chain variable domain of TCR clone 261778 (TRBV19, TRBJ2-5)
CASSMTGQQETQYF

SEQ ID NO: 523557 - protein, 18 aa, Homo sapiens
  CDR3 for alpha chain variable domain of TCR clone 261779 (TRAV21, TRAJ52)
CAVRPSPAGGTSYGKRTF

SEQ ID NO: 523558 - protein, 16 aa, Homo sapiens
  CDR3 for beta chain variable domain of TCR clone 261779 (TRBV7-3, TRBJ2-1)
CASSLEGYRSYNEQFF

SEQ ID NO: 523559 - protein, 16 aa, Homo sapiens
  CDR3 for alpha chain variable domain of TCR clone 261780 (TRAV26-1, TRAJ53)
CIVRVAMGGSNYKLTF

SEQ ID NO: 523560 - protein, 15 aa, Homo sapiens
  CDR3 for beta chain variable domain of TCR clone 261780 (TRBV19, TRBJ1-1)
CASTSGQIQNTEAFF

SEQ ID NO: 523561 - protein, 13 aa, Homo sapiens
  CDR3 for alpha chain variable domain of TCR clone 261781 (TRAV17, TRAJ7)
CATDNYGNNRLAF

SEQ ID NO: 523562 - protein, 16 aa, Homo sapiens
  CDR3 for beta chain variable domain of TCR clone 261781 (TRBV4-1, TRBJ2-5)
CASSQASADSSATQYF

SEQ ID NO: 523563 - protein, 16 aa, Homo sapiens
  CDR3 for alpha chain variable domain of TCR clone 261782 (TRAV3, TRAJ37)
CAVRGKRSGNTGKLIF

SEQ ID NO: 523564 - protein, 12 aa, Homo sapiens
  CDR3 for beta chain variable domain of TCR clone 261782 (TRBV11-2, TRBJ2-2)
CASSLGGGELFF

SEQ ID NO: 523565 - protein, 11 aa, Homo sapiens
  CDR3 for alpha chain variable domain of TCR clone 261783 (TRAV26-1, TRAJ37)
CIVRVGRKLIF

SEQ ID NO: 523566 - protein, 14 aa, Homo sapiens
  CDR3 for beta chain variable domain of TCR clone 261783 (TRBV2, TRBJ2-7)
CASSLTSGGYEQYF

SEQ ID NO: 523567 - protein, 13 aa, Homo sapiens
  CDR3 for alpha chain variable domain of TCR clone 261784 (TRAV23/DV6, TRAJ22)
CAPYSGSARQLTF

SEQ ID NO: 523568 - protein, 13 aa, Homo sapiens
  CDR3 for beta chain variable domain of TCR clone 261784 (TRBV6-1, TRBJ1-1)
CASSRQGNAEAFF

SEQ ID NO: 523569 - protein, 12 aa, Homo sapiens
  CDR3 for alpha chain variable domain of TCR clone 261785 (TRAV12-3, TRAJ17)
CAMTLTGNKLTF

SEQ ID NO: 523570 - protein, 13 aa, Homo sapiens
  CDR3 for beta chain variable domain of TCR clone 261785 (TRBV11-2, TRBJ1-1)
CASSIYRGAEAFF

SEQ ID NO: 523571 - protein, 15 aa, Homo sapiens
  CDR3 for alpha chain variable domain of TCR clone 261786 (TRAV20, TRAJ53)
CAVQASGSSNYKLTF

SEQ ID NO: 523572 - protein, 12 aa, Homo sapiens
  CDR3 for beta chain variable domain of TCR clone 261786 (TRBV7-6, TRBJ2-5)
CASSLSQETQYF

SEQ ID NO: 523573 - protein, 14 aa, Homo sapiens
  CDR3 for alpha chain variable domain of TCR clone 261787 (TRAV17, TRAJ32)
CATENGGATNKLIF

SEQ ID NO: 523574 - protein, 15 aa, Homo sapiens
  CDR3 for beta chain variable domain of TCR clone 261787 (TRBV19, TRBJ1-2)
CASSVGQVLNYGYTF

SEQ ID NO: 523575 - protein, 14 aa, Homo sapiens
  CDR3 for alpha chain variable domain of TCR clone 261788 (TRAV9-2, TRAJ39)
CALYIYNAGNMLTF

SEQ ID NO: 523576 - protein, 13 aa, Homo sapiens
  CDR3 for beta chain variable domain of TCR clone 261788 (TRBV12-5, TRBJ2-3)
CASGDRQSDTQYL

SEQ ID NO: 523577 - protein, 12 aa, Homo sapiens
  CDR3 for alpha chain variable domain of TCR clone 261789 (TRAV20, TRAJ39)
CAVGNAGNMLTF

SEQ ID NO: 523578 - protein, 17 aa, Homo sapiens
  CDR3 for beta chain variable domain of TCR clone 261789 (TRBV4-1, TRBJ2-3)
CASSQGYVSGGTNTQYF

SEQ ID NO: 523579 - protein, 13 aa, Homo sapiens
  CDR3 for alpha chain variable domain of TCR clone 261790 (TRAV13-2, TRAJ5)
CAVMDTGRKALTF

SEQ ID NO: 523580 - protein, 12 aa, Homo sapiens
  CDR3 for beta chain variable domain of TCR clone 261790 (TRBV28, TRBJ2-7)
CASSFSSYEQYF

SEQ ID NO: 523581 - protein, 12 aa, Homo sapiens
  CDR3 for alpha chain variable domain of TCR clone 261791 (TRAV13-1, TRAJ21)
CAAKEGFNKFYF

SEQ ID NO: 523582 - protein, 15 aa, Homo sapiens
  CDR3 for beta chain variable domain of TCR clone 261791 (TRBV15, TRBJ1-3)
CATSRDRGPGNTIYF

SEQ ID NO: 523583 - protein, 11 aa, Homo sapiens
  CDR3 for alpha chain variable domain of TCR clone 261792 (TRAV2, TRAJ33)
CAVESNYQLIW

SEQ ID NO: 523584 - protein, 16 aa, Homo sapiens
  CDR3 for beta chain variable domain of TCR clone 261792 (TRBV28, TRBJ2-1)
CASSSRVRDSYNEQFF

SEQ ID NO: 523585 - protein, 16 aa, Homo sapiens
  CDR3 for alpha chain variable domain of TCR clone 261793 (TRAV30, TRAJ24)
CGTEIVDADSWGKFQS

SEQ ID NO: 523586 - protein, 15 aa, Homo sapiens
  CDR3 for beta chain variable domain of TCR clone 261793 (TRBV20-1, TRBJ2-4)
CSARDLTGGPNIQYF

SEQ ID NO: 523587 - protein, 17 aa, Homo sapiens
  CDR3 for alpha chain variable domain of TCR clone 261794 (TRAV3, TRAJ6)
CAVRDGPRAGGSYIPTF

SEQ ID NO: 523588 - protein, 14 aa, Homo sapiens
  CDR3 for beta chain variable domain of TCR clone 261794 (TRBV10-3, TRBJ1-2)
CAIRAGTGDYGYTF

SEQ ID NO: 523589 - protein, 14 aa, Homo sapiens
  CDR3 for alpha chain variable domain of TCR clone 261795 (TRAV8-3, TRAJ4)
CAVGAAGGYNKLIF

SEQ ID NO: 523590 - protein, 21 aa, Homo sapiens
  CDR3 for beta chain variable domain of TCR clone 261795 (TRBV5-1, TRBJ1-6)
CASSPRGGADSTGGVRSPLHF

SEQ ID NO: 523591 - protein, 23 aa, Homo sapiens
  CDR3 for alpha chain variable domain of TCR clone 261796 (TRAV8-3, TRAJ27)
CAVGPSKTNAGKSPSGDGTTLTV

SEQ ID NO: 523592 - protein, 15 aa, Homo sapiens
  CDR3 for beta chain variable domain of TCR clone 261796 (TRBV7-2, TRBJ2-1)
CASSSGLAGGNEQFF

SEQ ID NO: 523593 - protein, 18 aa, Homo sapiens
  CDR3 for alpha chain variable domain of TCR clone 261797 (TRAV3, TRAJ42)
CAVRDEGTGGGSQGNLLF

SEQ ID NO: 523594 - protein, 16 aa, Homo sapiens
  CDR3 for beta chain variable domain of TCR clone 261797 (TRBV9, TRBJ1-2)
CASSVAKGRVDYGYTF

SEQ ID NO: 523595 - protein, 15 aa, Homo sapiens
  CDR3 for alpha chain variable domain of TCR clone 261798 (TRAV3, TRAJ22)
CAVRDRGGSARQLTF

SEQ ID NO: 523596 - protein, 14 aa, Homo sapiens
  CDR3 for beta chain variable domain of TCR clone 261798 (TRBV19, TRBJ1-5)
CASSLGLIGQPQHS

SEQ ID NO: 523597 - protein, 12 aa, Homo sapiens
  CDR3 for alpha chain variable domain of TCR clone 261799 (TRAV2, TRAJ33)
CAFMDSNYKLIW

SEQ ID NO: 523598 - protein, 16 aa, Homo sapiens
  CDR3 for beta chain variable domain of TCR clone 261799 (TRBV2, TRBJ2-7)
CASSEPWTGPSYEQYF

SEQ ID NO: 523599 - protein, 13 aa, Homo sapiens
  CDR3 for alpha chain variable domain of TCR clone 261800 (TRAV17, TRAJ26)
CATVDNYGQNFVF

SEQ ID NO: 523600 - protein, 15 aa, Homo sapiens
  CDR3 for beta chain variable domain of TCR clone 261800 (TRBV18, TRBJ1-6)
CASSRIQGRNSPLHF

SEQ ID NO: 523601 - protein, 12 aa, Homo sapiens
  CDR3 for alpha chain variable domain of TCR clone 261801 (TRAV21, TRAJ11)
CAATSGYSTITF

SEQ ID NO: 523602 - protein, 13 aa, Homo sapiens
  CDR3 for beta chain variable domain of TCR clone 261801 (TRBV20-1, TRBJ1-1)
CSALLGGGTEAFF

SEQ ID NO: 523603 - protein, 14 aa, Homo sapiens
  CDR3 for alpha chain variable domain of TCR clone 261802 (TRAV12-3, TRAJ10)
SHLPLTGGGNKLTF

SEQ ID NO: 523604 - protein, 13 aa, Homo sapiens
  CDR3 for beta chain variable domain of TCR clone 261802 (TRBV12-4, TRBJ1-2)
CASSYRVNYGYTF

SEQ ID NO: 523605 - protein, 11 aa, Homo sapiens
  CDR3 for alpha chain variable domain of TCR clone 261803 (TRAV21, TRAJ34)
CAVTNTDKLIF

SEQ ID NO: 523606 - protein, 15 aa, Homo sapiens
  CDR3 for beta chain variable domain of TCR clone 261803 (TRBV28, TRBJ2-7)
CASSLISGGSYEQYF

SEQ ID NO: 523607 - protein, 15 aa, Homo sapiens
  CDR3 for alpha chain variable domain of TCR clone 261804 (TRAV8-4, TRAJ3)
CAVSPGCRSASKIIF

SEQ ID NO: 523608 - protein, 13 aa, Homo sapiens
  CDR3 for beta chain variable domain of TCR clone 261804 (TRBV12-4, TRBJ1-1)
CASITGLNTEAFF

SEQ ID NO: 523609 - protein, 13 aa, Homo sapiens
  CDR3 for alpha chain variable domain of TCR clone 261805 (TRAV16, TRAJ34)
CALTGYNTDKLIF

SEQ ID NO: 523610 - protein, 14 aa, Homo sapiens
  CDR3 for beta chain variable domain of TCR clone 261805 (TRBV7-2, TRBJ2-7)
CASSPKTSFYEQYF

SEQ ID NO: 523611 - protein, 15 aa, Homo sapiens
  CDR3 for alpha chain variable domain of TCR clone 261806 (TRAV3, TRAJ5)
CAVRDRKTGRRALTF

SEQ ID NO: 523612 - protein, 14 aa, Homo sapiens
  CDR3 for beta chain variable domain of TCR clone 261806 (TRBV19, TRBJ2-3)
CASSAPRGTDTQYF

SEQ ID NO: 523613 - protein, 15 aa, Homo sapiens
  CDR3 for alpha chain variable domain of TCR clone 261807 (TRAV3, TRAJ4)
CAVRDGTGGYNKLMF

SEQ ID NO: 523614 - protein, 15 aa, Homo sapiens
  CDR3 for beta chain variable domain of TCR clone 261807 (TRBV27, TRBJ2-7)
CASSTAGTGSYEQYF

SEQ ID NO: 523615 - protein, 17 aa, Homo sapiens
  CDR3 for alpha chain variable domain of TCR clone 261808 (TRAV8-1, TRAJ43)
CAVTNDMRFGAGTRLTV

SEQ ID NO: 523616 - protein, 15 aa, Homo sapiens
  CDR3 for beta chain variable domain of TCR clone 261808 (TRBV9, TRBJ2-1)
CASSLAGSSYNEQFF

SEQ ID NO: 523617 - protein, 10 aa, Homo sapiens
  CDR3 for alpha chain variable domain of TCR clone 261809 (TRAV1-2, TRAJ20)
CACNDYKLSF

SEQ ID NO: 523618 - protein, 16 aa, Homo sapiens
  CDR3 for beta chain variable domain of TCR clone 261809 (TRBV20-1, TRBJ2-1)
RSARALKQGMNNEQFF

SEQ ID NO: 523619 - protein, 17 aa, Homo sapiens
  CDR3 for alpha chain variable domain of TCR clone 261810 (TRAV36/DV7, TRAJ52)
CALAQRAGGTSYGKLTF

SEQ ID NO: 523620 - protein, 15 aa, Homo sapiens
  CDR3 for beta chain variable domain of TCR clone 261810 (TRBV6-5, TRBJ1-2)
CASSYSQAFNYGDTF

SEQ ID NO: 523621 - protein, 13 aa, Homo sapiens
  CDR3 for alpha chain variable domain of TCR clone 261811 (TRAV2, TRAJ40)
CAVVTSGTYKYIF

SEQ ID NO: 523622 - protein, 16 aa, Homo sapiens
  CDR3 for beta chain variable domain of TCR clone 261811 (TRBV29-1, TRBJ2-6)
CSVEDIAYSGANVLTF

SEQ ID NO: 523623 - protein, 13 aa, Homo sapiens
  CDR3 for alpha chain variable domain of TCR clone 261812 (TRAV13-1, TRAJ6)
CAARRGGCYIPTF

SEQ ID NO: 523624 - protein, 16 aa, Homo sapiens
  CDR3 for beta chain variable domain of TCR clone 261812 (TRBV7-9, TRBJ2-2)
CASSLATGVGTGELFF

SEQ ID NO: 523625 - protein, 14 aa, Homo sapiens
  CDR3 for alpha chain variable domain of TCR clone 261813 (TRAV38-1, TRAJ45)
CASHSGGGADGLTF

SEQ ID NO: 523626 - protein, 14 aa, Homo sapiens
  CDR3 for beta chain variable domain of TCR clone 261813 (TRBV12-4, TRBJ1-1)
CASSLRSSGTEAFF

SEQ ID NO: 523627 - protein, 15 aa, Homo sapiens
  CDR3 for alpha chain variable domain of TCR clone 261814 (TRAV35, TRAJ41)
CAGQLFSNSGYALNF

SEQ ID NO: 523628 - protein, 14 aa, Homo sapiens
  CDR3 for beta chain variable domain of TCR clone 261814 (TRBV7-2, TRBJ1-2)
CASSRGGINYGYTF

SEQ ID NO: 523629 - protein, 14 aa, Homo sapiens
  CDR3 for alpha chain variable domain of TCR clone 261815 (TRAV1-1, TRAJ27)
CAVIYNTNAGKSTF

SEQ ID NO: 523630 - protein, 14 aa, Homo sapiens
  CDR3 for beta chain variable domain of TCR clone 261815 (TRBV7-2, TRBJ1-5)
CASSTQGAGQPQHF

SEQ ID NO: 523631 - protein, 12 aa, Homo sapiens
  CDR3 for alpha chain variable domain of TCR clone 261816 (TRAV12-3, TRAJ17)
CAMALTGNKLTF

SEQ ID NO: 523632 - protein, 12 aa, Homo sapiens
  CDR3 for beta chain variable domain of TCR clone 261816 (TRBV7-8, TRBJ2-7)
CASSLGDREQYF

SEQ ID NO: 523633 - protein, 14 aa, Homo sapiens
  CDR3 for alpha chain variable domain of TCR clone 261817 (TRAV1-2, TRAJ8)
YAVREDTGFQKLVF

SEQ ID NO: 523634 - protein, 14 aa, Homo sapiens
  CDR3 for beta chain variable domain of TCR clone 261817 (TRBV20-1, TRBJ1-1)
CSAQTRIGGTEAFF

SEQ ID NO: 523635 - protein, 15 aa, Homo sapiens
  CDR3 for alpha chain variable domain of TCR clone 261818 (TRAV12-2, TRAJ53)
CAVNGGGGSNYKLTF

SEQ ID NO: 523636 - protein, 14 aa, Homo sapiens
  CDR3 for beta chain variable domain of TCR clone 261818 (TRBV15, TRBJ2-5)
CATSIGGLGETQYF

SEQ ID NO: 523637 - protein, 12 aa, Homo sapiens
  CDR3 for alpha chain variable domain of TCR clone 261819 (TRAV30, TRAJ43)
CGTEERGNDMRF

SEQ ID NO: 523638 - protein, 15 aa, Homo sapiens
  CDR3 for beta chain variable domain of TCR clone 261819 (TRBV5-4, TRBJ2-7)
CASSRFGTGSYEQYF

SEQ ID NO: 523639 - protein, 13 aa, Homo sapiens
  CDR3 for alpha chain variable domain of TCR clone 261820 (TRAV3, TRAJ27)
CAVRPLGAGKSTF

SEQ ID NO: 523640 - protein, 12 aa, Homo sapiens
  CDR3 for beta chain variable domain of TCR clone 261820 (TRBV7-8, TRBJ2-7)
CASSLGDRGQYF

SEQ ID NO: 523641 - protein, 13 aa, Homo sapiens
  CDR3 for alpha chain variable domain of TCR clone 261821 (TRAV35, TRAJ57)
CAGSQGGSEKLVF

SEQ ID NO: 523642 - protein, 15 aa, Homo sapiens
  CDR3 for beta chain variable domain of TCR clone 261821 (TRBV7-2, TRBJ2-7)
CASSLKGALTYEQYF

SEQ ID NO: 523643 - protein, 15 aa, Homo sapiens
  CDR3 for alpha chain variable domain of TCR clone 261822 (TRAV3, TRAJ17)
CAVSPKEAAGNKLTF

SEQ ID NO: 523644 - protein, 12 aa, Homo sapiens
  CDR3 for beta chain variable domain of TCR clone 261822 (TRBV7-9, TRBJ1-6)
CGSSLMTSPLHF

SEQ ID NO: 523645 - protein, 12 aa, Homo sapiens
  CDR3 for alpha chain variable domain of TCR clone 261823 (TRAV12-3, TRAJ17)
CAMTLTGNKLTF

SEQ ID NO: 523646 - protein, 16 aa, Homo sapiens
  CDR3 for beta chain variable domain of TCR clone 261823 (TRBV19, TRBJ1-5)
CASSIDRGGPRQPQHF

SEQ ID NO: 523647 - protein, 14 aa, Homo sapiens
  CDR3 for alpha chain variable domain of TCR clone 261824 (TRAV12-2, TRAJ13)
CAVKKTGGYQKVNF

SEQ ID NO: 523648 - protein, 13 aa, Homo sapiens
  CDR3 for beta chain variable domain of TCR clone 261824 (TRBV20-1, TRBJ2-3)
CSARLAGTDTQYF

SEQ ID NO: 523649 - protein, 13 aa, Homo sapiens
  CDR3 for alpha chain variable domain of TCR clone 261825 (TRAV27, TRAJ49)
CAPRPYTGNQFYC

SEQ ID NO: 523650 - protein, 16 aa, Homo sapiens
  CDR3 for beta chain variable domain of TCR clone 261825 (TRBV4-1, TRBJ1-2)
CASSQDAGQVLYGYTF

SEQ ID NO: 523651 - protein, 15 aa, Homo sapiens
  CDR3 for alpha chain variable domain of TCR clone 261826 (TRAV8-4, TRAJ12)
CAVSDRVDSSYKLIF

SEQ ID NO: 523652 - protein, 15 aa, Homo sapiens
  CDR3 for beta chain variable domain of TCR clone 261826 (TRBV11-3, TRBJ2-1)
CASSLAGQKYNEQFF

SEQ ID NO: 523653 - protein, 10 aa, Homo sapiens
  CDR3 for alpha chain variable domain of TCR clone 261827 (TRAV23/DV6, TRAJ57)
CAASSTLPQG

SEQ ID NO: 523654 - protein, 14 aa, Homo sapiens
  CDR3 for beta chain variable domain of TCR clone 261827 (TRBV7-8, TRBJ2-5)
CASSATGGQETQYF

SEQ ID NO: 523655 - protein, 18 aa, Homo sapiens
  CDR3 for alpha chain variable domain of TCR clone 261828 (TRAV21, TRAJ52)
CAVRPSPAGGTSYGKLTF

SEQ ID NO: 523656 - protein, 13 aa, Homo sapiens
  CDR3 for beta chain variable domain of TCR clone 261828 (TRBV10-3, TRBJ2-7)
CASNLAVNYEQYF

SEQ ID NO: 523657 - protein, 19 aa, Homo sapiens
  CDR3 for alpha chain variable domain of TCR clone 261829 (TRAV17, TRAJ17)
CATDGRPGVIKAAGNKLTF

SEQ ID NO: 523658 - protein, 17 aa, Homo sapiens
  CDR3 for beta chain variable domain of TCR clone 261829 (TRBV12-4, TRBJ1-1)
CASSLSDFRTMNTGAFF

SEQ ID NO: 523659 - protein, 12 aa, Homo sapiens
  CDR3 for alpha chain variable domain of TCR clone 261830 (TRAV2, TRAJ32)
CAVGGATNKLIF

SEQ ID NO: 523660 - protein, 13 aa, Homo sapiens
  CDR3 for beta chain variable domain of TCR clone 261830 (TRBV4-1, TRBJ2-2)
CASSQENTGELFF

SEQ ID NO: 523661 - protein, 14 aa, Homo sapiens
  CDR3 for alpha chain variable domain of TCR clone 261831 (TRAV17, TRAJ16)
CATADFSDGQKLLF

SEQ ID NO: 523662 - protein, 14 aa, Homo sapiens
  CDR3 for beta chain variable domain of TCR clone 261831 (TRBV28, TRBJ2-3)
CANSWRGRADTQYF

SEQ ID NO: 523663 - protein, 10 aa, Homo sapiens
  CDR3 for alpha chain variable domain of TCR clone 261832 (TRAV13-1, TRAJ27)
CAPLARQIKL

SEQ ID NO: 523664 - protein, 13 aa, Homo sapiens
  CDR3 for beta chain variable domain of TCR clone 261832 (TRBV28, TRBJ1-1)
CASSKQGWTEAFF

SEQ ID NO: 523665 - protein, 15 aa, Homo sapiens
  CDR3 for alpha chain variable domain of TCR clone 261833 (TRAV12-1, TRAJ8)
CVVNVENTGFQKLVF

SEQ ID NO: 523666 - protein, 17 aa, Homo sapiens
  CDR3 for beta chain variable domain of TCR clone 261833 (TRBV13, TRBJ2-3)
CASSLSRVAGGRNTQYF

SEQ ID NO: 523667 - protein, 14 aa, Homo sapiens
  CDR3 for alpha chain variable domain of TCR clone 261834 (TRAV12-1, TRAJ9)
CVVTLTTGGFKTIF

SEQ ID NO: 523668 - protein, 11 aa, Homo sapiens
  CDR3 for beta chain variable domain of TCR clone 261834 (TRBV29-1, TRBJ2-5)
CSEDRTGTQYF

SEQ ID NO: 523669 - protein, 16 aa, Homo sapiens
  CDR3 for alpha chain variable domain of TCR clone 261835 (TRAV3, TRAJ27)
CAVRDPQGTNAGKPTF

SEQ ID NO: 523670 - protein, 15 aa, Homo sapiens
  CDR3 for beta chain variable domain of TCR clone 261835 (TRBV20-1, TRBJ2-7)
CSARDRVSGMDEQYF

SEQ ID NO: 523671 - protein, 16 aa, Homo sapiens
  CDR3 for alpha chain variable domain of TCR clone 261836 (TRAV17, TRAJ52)
CATGIIGGTSYGKLTF

SEQ ID NO: 523672 - protein, 15 aa, Homo sapiens
  CDR3 for beta chain variable domain of TCR clone 261836 (TRBV28, TRBJ2-5)
CASSPPWSYQETQYF

SEQ ID NO: 523673 - protein, 14 aa, Homo sapiens
  CDR3 for alpha chain variable domain of TCR clone 261837 (TRAV38-1, TRAJ40)
CALRPTSGTYKNIF

SEQ ID NO: 523674 - protein, 16 aa, Homo sapiens
  CDR3 for beta chain variable domain of TCR clone 261837 (TRBV6-1, TRBJ1-2)
CASSGAWQGRSHGYTF

SEQ ID NO: 523675 - protein, 14 aa, Homo sapiens
  CDR3 for alpha chain variable domain of TCR clone 261838 (TRAV17, TRAJ40)
CATALTSGTYKYVF

SEQ ID NO: 523676 - protein, 13 aa, Homo sapiens
  CDR3 for beta chain variable domain of TCR clone 261838 (TRBV27, TRBJ2-1)
CASSSGSYNEQFL

SEQ ID NO: 523677 - protein, 17 aa, Homo sapiens
  CDR3 for alpha chain variable domain of TCR clone 261839 (TRAV13-2, TRAJ5)
CAESVVIVGHGQESTYF

SEQ ID NO: 523678 - protein, 18 aa, Homo sapiens
  CDR3 for beta chain variable domain of TCR clone 261839 (TRBV4-1, TRBJ2-3)
CASSHQLAGGRITDTQYF

SEQ ID NO: 523679 - protein, 12 aa, Homo sapiens
  CDR3 for alpha chain variable domain of TCR clone 261840 (TRAV8-3, TRAJ41)
CAVARSVYALNF

SEQ ID NO: 523680 - protein, 16 aa, Homo sapiens
  CDR3 for beta chain variable domain of TCR clone 261840 (TRBV27, TRBJ2-7)
CASSSERRDSAYEQYF

SEQ ID NO: 523681 - protein, 15 aa, Homo sapiens
  CDR3 for alpha chain variable domain of TCR clone 261841 (TRAV38-1, TRAJ37)
CAFIFGSGNTGKLIF

SEQ ID NO: 523682 - protein, 13 aa, Homo sapiens
  CDR3 for beta chain variable domain of TCR clone 261841 (TRBV7-9, TRBJ1-1)
CASSQDWGAEAFF

SEQ ID NO: 523683 - protein, 14 aa, Homo sapiens
  CDR3 for alpha chain variable domain of TCR clone 261842 (TRAV26-1, TRAJ45)
CIEVTGGGADGLTF

SEQ ID NO: 523684 - protein, 15 aa, Homo sapiens
  CDR3 for beta chain variable domain of TCR clone 261842 (TRBV7-6, TRBJ2-3)
CASSSTGLETDTQYF

SEQ ID NO: 523685 - protein, 17 aa, Homo sapiens
  CDR3 for alpha chain variable domain of TCR clone 261843 (TRAV3, TRAJ42)
CAVRDRDYGGSQGNLIF

SEQ ID NO: 523686 - protein, 20 aa, Homo sapiens
  CDR3 for beta chain variable domain of TCR clone 261843 (TRBV28, TRBJ2-1)
CASPPIGRSPGLAGGNEQFF

SEQ ID NO: 523687 - protein, 15 aa, Homo sapiens
  CDR3 for alpha chain variable domain of TCR clone 261844 (TRAV12-3, TRAJ10)
CASYILPGGGNKLTF

SEQ ID NO: 523688 - protein, 15 aa, Homo sapiens
  CDR3 for beta chain variable domain of TCR clone 261844 (TRBV7-2, TRBJ1-6)
CASSLGPDRGMPLHF

SEQ ID NO: 523689 - protein, 12 aa, Homo sapiens
  CDR3 for alpha chain variable domain of TCR clone 261845 (TRAV12-3, TRAJ17)
CAMTLTGNKLNF

SEQ ID NO: 523690 - protein, 15 aa, Homo sapiens
  CDR3 for beta chain variable domain of TCR clone 261845 (TRBV20-1, TRBJ2-7)
CSARDRVSGTDEQYF

SEQ ID NO: 523691 - protein, 17 aa, Homo sapiens
  CDR3 for alpha chain variable domain of TCR clone 261846 (TRAV14/DV4, TRAJ28)
CAMRVTSSGAGSYQLTF

SEQ ID NO: 523692 - protein, 13 aa, Homo sapiens
  CDR3 for beta chain variable domain of TCR clone 261846 (TRBV28, TRBJ2-5)
CASSFAGGETQYF

SEQ ID NO: 523693 - protein, 14 aa, Homo sapiens
  CDR3 for alpha chain variable domain of TCR clone 261847 (TRAV8-4, TRAJ9)
CAVRINTGGFKTIF

SEQ ID NO: 523694 - protein, 14 aa, Homo sapiens
  CDR3 for beta chain variable domain of TCR clone 261847 (TRBV20-1, TRBJ1-5)
CSARGRGSNQPQHF

SEQ ID NO: 523695 - protein, 14 aa, Homo sapiens
  CDR3 for alpha chain variable domain of TCR clone 261848 (TRAV1-2, TRAJ8)
CAVREGTGFQKLVF

SEQ ID NO: 523696 - protein, 16 aa, Homo sapiens
  CDR3 for beta chain variable domain of TCR clone 261848 (TRBV12-4, TRBJ1-5)
CASSRPVGGSNQPQHF

SEQ ID NO: 523697 - protein, 15 aa, Homo sapiens
  CDR3 for alpha chain variable domain of TCR clone 261849 (TRAV8-2, TRAJ16)
CVVSDGFSDGQKLLF

SEQ ID NO: 523698 - protein, 14 aa, Homo sapiens
  CDR3 for beta chain variable domain of TCR clone 261849 (TRBV7-3, TRBJ1-1)
CASSLGKGYTEAFF

SEQ ID NO: 523699 - protein, 13 aa, Homo sapiens
  CDR3 for alpha chain variable domain of TCR clone 261850 (TRAV12-2, TRAJ34)
CAVRGYNTDKLIF

SEQ ID NO: 523700 - protein, 18 aa, Homo sapiens
  CDR3 for beta chain variable domain of TCR clone 261850 (TRBV11-2, TRBJ2-3)
CASSLGGATRGAPNTQYF

SEQ ID NO: 523701 - protein, 16 aa, Homo sapiens
  CDR3 for alpha chain variable domain of TCR clone 261851 (TRAV26-1, TRAJ23)
CIVRVHPYNQGGKLIF

SEQ ID NO: 523702 - protein, 13 aa, Homo sapiens
  CDR3 for beta chain variable domain of TCR clone 261851 (TRBV19, TRBJ1-3)
CASRLSLGSTIYF

SEQ ID NO: 523703 - protein, 14 aa, Homo sapiens
  CDR3 for alpha chain variable domain of TCR clone 261852 (TRAV16, TRAJ33)
CALSAMDSNYQLIW

SEQ ID NO: 523704 - protein, 17 aa, Homo sapiens
  CDR3 for beta chain variable domain of TCR clone 261852 (TRBV13, TRBJ2-3)
CASSSLGTSGLTDTQYF

SEQ ID NO: 523705 - protein, 15 aa, Homo sapiens
  CDR3 for alpha chain variable domain of TCR clone 261853 (TRAV27, TRAJ50)
CAGRERGTAYDKVIF

SEQ ID NO: 523706 - protein, 16 aa, Homo sapiens
  CDR3 for beta chain variable domain of TCR clone 261853 (TRBV10-3, TRBJ1-5)
CAISDQVGAPNQPQHF

SEQ ID NO: 523707 - protein, 17 aa, Homo sapiens
  CDR3 for alpha chain variable domain of TCR clone 261854 (TRAV3, TRAJ6)
CAVSDGPRAGGSYIPTL

SEQ ID NO: 523708 - protein, 14 aa, Homo sapiens
  CDR3 for beta chain variable domain of TCR clone 261854 (TRBV7-2, TRBJ2-7)
CASSPKPSFYEQYF

SEQ ID NO: 523709 - protein, 15 aa, Homo sapiens
  CDR3 for alpha chain variable domain of TCR clone 261855 (TRAV26-1, TRAJ22)
CIVRVSFWFCKATDL

SEQ ID NO: 523710 - protein, 14 aa, Homo sapiens
  CDR3 for beta chain variable domain of TCR clone 261855 (TRBV7-8, TRBJ1-2)
CASSPDSLSYGYTF

SEQ ID NO: 523711 - protein, 13 aa, Homo sapiens
  CDR3 for alpha chain variable domain of TCR clone 261856 (TRAV1-1, TRAJ31)
CASYPNNNARLMF

SEQ ID NO: 523712 - protein, 13 aa, Homo sapiens
  CDR3 for beta chain variable domain of TCR clone 261856 (TRBV15, TRBJ1-6)
CATSGGLNSPLHF

SEQ ID NO: 523713 - protein, 16 aa, Homo sapiens
  CDR3 for alpha chain variable domain of TCR clone 261857 (TRAV19, TRAJ42)
CALSVNYGGSHGNLIF

SEQ ID NO: 523714 - protein, 13 aa, Homo sapiens
  CDR3 for beta chain variable domain of TCR clone 261857 (TRBV7-3, TRBJ2-1)
CASSPVAYNEQFF

SEQ ID NO: 523715 - protein, 15 aa, Homo sapiens
  CDR3 for alpha chain variable domain of TCR clone 261858 (TRAV21, TRAJ53)
CATLNSGGSNYKLTF

SEQ ID NO: 523716 - protein, 15 aa, Homo sapiens
  CDR3 for beta chain variable domain of TCR clone 261858 (TRBV7-6, TRBJ1-5)
CASSQSSGINQPRHF

SEQ ID NO: 523717 - protein, 14 aa, Homo sapiens
  CDR3 for alpha chain variable domain of TCR clone 261859 (TRAV20, TRAJ17)
CAVRREAAGNKLTF

SEQ ID NO: 523718 - protein, 13 aa, Homo sapiens
  CDR3 for beta chain variable domain of TCR clone 261859 (TRBV23-1, TRBJ2-1)
CASNRETDNEQFF

SEQ ID NO: 523719 - protein, 14 aa, Homo sapiens
  CDR3 for alpha chain variable domain of TCR clone 261860 (TRAV13-1, TRAJ35)
CAASKGGFGNVLHC

SEQ ID NO: 523720 - protein, 14 aa, Homo sapiens
  CDR3 for beta chain variable domain of TCR clone 261860 (TRBV4-1, TRBJ2-7)
CASSQGTTSYEQYF

SEQ ID NO: 523721 - protein, 14 aa, Homo sapiens
  CDR3 for alpha chain variable domain of TCR clone 261861 (TRAV3, TRAJ34)
CAVRAPGNTDQPIF

SEQ ID NO: 523722 - protein, 17 aa, Homo sapiens
  CDR3 for beta chain variable domain of TCR clone 261861 (TRBV20-1, TRBJ2-7)
CSAAPGLARGISYEQYF

SEQ ID NO: 523723 - protein, 11 aa, Homo sapiens
  CDR3 for alpha chain variable domain of TCR clone 261862 (TRAV1-1, TRAJ23)
CAVRQGGKLIF

SEQ ID NO: 523724 - protein, 20 aa, Homo sapiens
  CDR3 for beta chain variable domain of TCR clone 261862 (TRBV11-2, TRBJ1-6)
CSSSLVFATGGSVHPSTLGT

SEQ ID NO: 523725 - protein, 13 aa, Homo sapiens
  CDR3 for alpha chain variable domain of TCR clone 261863 (TRAV13-1, TRAJ10)
CAATAGGGNKLTF

SEQ ID NO: 523726 - protein, 14 aa, Homo sapiens
  CDR3 for beta chain variable domain of TCR clone 261863 (TRBV12-3, TRBJ2-7)
CASSPAGLKYEQYF

SEQ ID NO: 523727 - protein, 14 aa, Homo sapiens
  CDR3 for alpha chain variable domain of TCR clone 261864 (TRAV1-2, TRAJ16)
CAVNRFSAGQKLLF

SEQ ID NO: 523728 - protein, 12 aa, Homo sapiens
  CDR3 for beta chain variable domain of TCR clone 261864 (TRBV11-2, TRBJ2-1)
CASSPGNNEQFF

SEQ ID NO: 523729 - protein, 15 aa, Homo sapiens
  CDR3 for alpha chain variable domain of TCR clone 261865 (TRAV8-3, TRAJ23)
CAVGDRYNQGESLSS

SEQ ID NO: 523730 - protein, 22 aa, Homo sapiens
  CDR3 for beta chain variable domain of TCR clone 261865 (TRBV29-1, TRBJ2-5)
TVSNMSPEDSSIYLCSAGTQYF

SEQ ID NO: 523731 - protein, 11 aa, Homo sapiens
  CDR3 for alpha chain variable domain of TCR clone 261866 (TRAV41, TRAJ49)
CAVRSRNQFYF

SEQ ID NO: 523732 - protein, 16 aa, Homo sapiens
  CDR3 for beta chain variable domain of TCR clone 261866 (TRBV27, TRBJ2-7)
CASSKQGRGWAYEQYF

SEQ ID NO: 523733 - protein, 16 aa, Homo sapiens
  CDR3 for alpha chain variable domain of TCR clone 261867 (TRAV8-4, TRAJ9)
CAVTFHTGGFKNYLWS

SEQ ID NO: 523734 - protein, 15 aa, Homo sapiens
  CDR3 for beta chain variable domain of TCR clone 261867 (TRBV7-9, TRBJ2-2)
CASSPETGAGGELFF

SEQ ID NO: 523735 - protein, 14 aa, Homo sapiens
  CDR3 for alpha chain variable domain of TCR clone 261868 (TRAV14/DV4, TRAJ15)
CAMRRDQAATALIF

SEQ ID NO: 523736 - protein, 16 aa, Homo sapiens
  CDR3 for beta chain variable domain of TCR clone 261868 (TRBV15, TRBJ2-3)
CATSRDLGIVTDTQYF

SEQ ID NO: 523737 - protein, 11 aa, Homo sapiens
  CDR3 for alpha chain variable domain of TCR clone 261869 (TRAV12-2, TRAJ54)
CAVEGAQKLVF

SEQ ID NO: 523738 - protein, 17 aa, Homo sapiens
  CDR3 for beta chain variable domain of TCR clone 261869 (TRBV18, TRBJ1-3)
CASSPYPTGPSGNTIYC

SEQ ID NO: 523739 - protein, 14 aa, Homo sapiens
  CDR3 for alpha chain variable domain of TCR clone 261870 (TRAV12-2, TRAJ40)
CAVKIPSVTYKYIF

SEQ ID NO: 523740 - protein, 15 aa, Homo sapiens
  CDR3 for beta chain variable domain of TCR clone 261870 (TRBV5-1, TRBJ2-1)
CASSPPRAPYNEQFF

SEQ ID NO: 523741 - protein, 11 aa, Homo sapiens
  CDR3 for alpha chain variable domain of TCR clone 261871 (TRAV21, TRAJ33)
CAVLSNYQLIW

SEQ ID NO: 523742 - protein, 13 aa, Homo sapiens
  CDR3 for beta chain variable domain of TCR clone 261871 (TRBV7-3, TRBJ1-1)
CASSQDWGAEAFF

SEQ ID NO: 523743 - protein, 17 aa, Homo sapiens
  CDR3 for alpha chain variable domain of TCR clone 261872 (TRAV3, TRAJ6)
CAVRDGPRAGGSYIPTF

SEQ ID NO: 523744 - protein, 15 aa, Homo sapiens
  CDR3 for beta chain variable domain of TCR clone 261872 (TRBV20-1, TRBJ2-7)
CSARDRVSGMDEQDF

SEQ ID NO: 523745 - protein, 17 aa, Homo sapiens
  CDR3 for alpha chain variable domain of TCR clone 261873 (TRAV3, TRAJ6)
CAVRDGPRAGGSYIPTF

SEQ ID NO: 523746 - protein, 15 aa, Homo sapiens
  CDR3 for beta chain variable domain of TCR clone 261873 (TRBV20-1, TRBJ1-1)
CSSSWDRFLNTEAFF

SEQ ID NO: 523747 - protein, 14 aa, Homo sapiens
  CDR3 for alpha chain variable domain of TCR clone 261874 (TRAV12-3, TRAJ12)
CAMSEVDSSYKLIF

SEQ ID NO: 523748 - protein, 12 aa, Homo sapiens
  CDR3 for beta chain variable domain of TCR clone 261874 (TRBV18, IGHJ2)
CASSPGREELFF

SEQ ID NO: 523749 - protein, 16 aa, Homo sapiens
  CDR3 for alpha chain variable domain of TCR clone 261875 (TRAV30, TRAJ24)
CGTEIVDADSWGKFQF

SEQ ID NO: 523750 - protein, 11 aa, Homo sapiens
  CDR3 for beta chain variable domain of TCR clone 261875 (TRBV7-6, TRBJ2-5)
CASSSQETQYF

SEQ ID NO: 523751 - protein, 14 aa, Homo sapiens
  CDR3 for alpha chain variable domain of TCR clone 261876 (TRAV23/DV6, TRAJ5)
CAAKRPAGRSALTF

SEQ ID NO: 523752 - protein, 13 aa, Homo sapiens
  CDR3 for beta chain variable domain of TCR clone 261876 (TRBV25-1, TRBJ2-7)
CASSEDGDYEQYF

SEQ ID NO: 523753 - protein, 14 aa, Homo sapiens
  CDR3 for alpha chain variable domain of TCR clone 261877 (TRAV23/DV6, TRAJ22)
CAASVSGSARQLTF

SEQ ID NO: 523754 - protein, 16 aa, Homo sapiens
  CDR3 for beta chain variable domain of TCR clone 261877 (TRBV19, TRBJ2-2)
CASSFTGQGLAGELFF

SEQ ID NO: 523755 - protein, 11 aa, Homo sapiens
  CDR3 for alpha chain variable domain of TCR clone 261878 (TRAV2, TRAJ20)
CAVLNDYKLSC

SEQ ID NO: 523756 - protein, 16 aa, Homo sapiens
  CDR3 for beta chain variable domain of TCR clone 261878 (TRBV11-1, TRBJ2-2)
CASSAEGLKNTGELFF

SEQ ID NO: 523757 - protein, 14 aa, Homo sapiens
  CDR3 for alpha chain variable domain of TCR clone 261879 (TRAV20, TRAJ29)
CAVQAWVGNTPLVF

SEQ ID NO: 523758 - protein, 17 aa, Homo sapiens
  CDR3 for beta chain variable domain of TCR clone 261879 (TRBV29-1, TRBJ2-7)
CSVEFFDRGPTSSTSGR

SEQ ID NO: 523759 - protein, 13 aa, Homo sapiens
  CDR3 for alpha chain variable domain of TCR clone 261880 (TRAV17, TRAJ9)
CATDYTGGFKTIF

SEQ ID NO: 523760 - protein, 13 aa, Homo sapiens
  CDR3 for beta chain variable domain of TCR clone 261880 (TRBV19, TRBJ2-7)
CASSKQGGYEQYF

SEQ ID NO: 523761 - protein, 12 aa, Homo sapiens
  CDR3 for alpha chain variable domain of TCR clone 261881 (TRAV25, TRAJ11)
CAGASGYSTLTF

SEQ ID NO: 523762 - protein, 16 aa, Homo sapiens
  CDR3 for beta chain variable domain of TCR clone 261881 (TRBV4-1, TRBJ2-3)
CASSQSTSGAEDTQYF

SEQ ID NO: 523763 - protein, 16 aa, Homo sapiens
  CDR3 for alpha chain variable domain of TCR clone 261882 (TRAV8-3, TRAJ18)
CAVGARRGSTLGRLYF

SEQ ID NO: 523764 - protein, 14 aa, Homo sapiens
  CDR3 for beta chain variable domain of TCR clone 261882 (TRBV5-4, TRBJ1-3)
YASSSQSAGNTIYF

SEQ ID NO: 523765 - protein, 12 aa, Homo sapiens
  CDR3 for alpha chain variable domain of TCR clone 261883 (TRAV13-1, TRAJ21)
CAAKEGFNKFYS

SEQ ID NO: 523766 - protein, 15 aa, Homo sapiens
  CDR3 for beta chain variable domain of TCR clone 261883 (TRBV25-1, TRBJ1-4)
CASSPGDSTNEKLFF

SEQ ID NO: 523767 - protein, 15 aa, Homo sapiens
  CDR3 for alpha chain variable domain of TCR clone 261884 (TRAV27, TRAJ10)
CAGARLTGGGNKLTF

SEQ ID NO: 523768 - protein, 15 aa, Homo sapiens
  CDR3 for beta chain variable domain of TCR clone 261884 (TRBV6-5, TRBJ1-2)
CASSYSPGQGNGYTF

SEQ ID NO: 523769 - protein, 11 aa, Homo sapiens
  CDR3 for alpha chain variable domain of TCR clone 261885 (TRAV17, TRAJ36)
CAPTGANNLFF

SEQ ID NO: 523770 - protein, 15 aa, Homo sapiens
  CDR3 for beta chain variable domain of TCR clone 261885 (TRBV11-1, TRBJ2-7)
CASSLNYGVSYEQYF

SEQ ID NO: 523771 - protein, 16 aa, Homo sapiens
  CDR3 for alpha chain variable domain of TCR clone 261886 (TRAV27, TRAJ52)
CAGAPAGGTSYGKLTF

SEQ ID NO: 523772 - protein, 14 aa, Homo sapiens
  CDR3 for beta chain variable domain of TCR clone 261886 (TRBV27, TRBJ2-1)
CTSVPAGFYNEQFF

SEQ ID NO: 523773 - protein, 14 aa, Homo sapiens
  CDR3 for alpha chain variable domain of TCR clone 261887 (TRAV2, TRAJ37)
CAVEDQGNTGKLIF

SEQ ID NO: 523774 - protein, 14 aa, Homo sapiens
  CDR3 for beta chain variable domain of TCR clone 261887 (TRBV18, TRBJ2-1)
CASSPQGRFDEQLF

SEQ ID NO: 523775 - protein, 13 aa, Homo sapiens
  CDR3 for alpha chain variable domain of TCR clone 261888 (TRAV29/DV5, TRAJ54)
CAASAQGAQKLVF

SEQ ID NO: 523776 - protein, 12 aa, Homo sapiens
  CDR3 for beta chain variable domain of TCR clone 261888 (TRBV11-2, TRBJ2-2)
CASSLGGGELFF

SEQ ID NO: 523777 - protein, 14 aa, Homo sapiens
  CDR3 for alpha chain variable domain of TCR clone 261889 (TRAV27, TRAJ49)
CAGRPEGTGNQFYF

SEQ ID NO: 523778 - protein, 15 aa, Homo sapiens
  CDR3 for beta chain variable domain of TCR clone 261889 (TRBV19, TRBJ2-1)
CASSIQATSYNQQFF

SEQ ID NO: 523779 - protein, 13 aa, Homo sapiens
  CDR3 for alpha chain variable domain of TCR clone 261890 (TRAV12-2, TRAJ20)
CAVYPSNDYKISF

SEQ ID NO: 523780 - protein, 15 aa, Homo sapiens
  CDR3 for beta chain variable domain of TCR clone 261890 (TRBV18, TRBJ1-2)
CASSPGNGLGYGYTF

SEQ ID NO: 523781 - protein, 13 aa, Homo sapiens
  CDR3 for alpha chain variable domain of TCR clone 261891 (TRAV21, TRAJ45)
CAVMGGGADGLTF

SEQ ID NO: 523782 - protein, 16 aa, Homo sapiens
  CDR3 for beta chain variable domain of TCR clone 261891 (TRBV20-1, TRBJ2-1)
CSARDHRAGGRGEQFF

SEQ ID NO: 523783 - protein, 13 aa, Homo sapiens
  CDR3 for alpha chain variable domain of TCR clone 261892 (TRAV12-3, TRAJ33)
CAMSVSSNYQLIW

SEQ ID NO: 523784 - protein, 13 aa, Homo sapiens
  CDR3 for beta chain variable domain of TCR clone 261892 (TRBV7-2, TRBJ2-2)
CASSVAVTGELFF

SEQ ID NO: 523785 - protein, 15 aa, Homo sapiens
  CDR3 for alpha chain variable domain of TCR clone 261893 (TRAV8-3, TRAJ45)
CASSYPGGGADGLTF

SEQ ID NO: 523786 - protein, 13 aa, Homo sapiens
  CDR3 for beta chain variable domain of TCR clone 261893 (TRBV10-3, TRBJ2-7)
CASKLAVTYEQYF

SEQ ID NO: 523787 - protein, 15 aa, Homo sapiens
  CDR3 for alpha chain variable domain of TCR clone 261894 (TRAV3, TRAJ32)
CAVSSYGGATNTLIF

SEQ ID NO: 523788 - protein, 16 aa, Homo sapiens
  CDR3 for beta chain variable domain of TCR clone 261894 (TRBV5-1, TRBJ2-5)
CASSLSLAGAQETQYF

SEQ ID NO: 523789 - protein, 10 aa, Homo sapiens
  CDR3 for alpha chain variable domain of TCR clone 261895 (TRAV30, TRAJ48)
CGIGDENLTF

SEQ ID NO: 523790 - protein, 15 aa, Homo sapiens
  CDR3 for beta chain variable domain of TCR clone 261895 (TRBV28, TRBJ2-5)
CASSPPRSYQETQYF

SEQ ID NO: 523791 - protein, 17 aa, Homo sapiens
  CDR3 for alpha chain variable domain of TCR clone 261896 (TRAV29/DV5, TRAJ21)
CSASNKFYFGSGTKLNV

SEQ ID NO: 523792 - protein, 16 aa, Homo sapiens
  CDR3 for beta chain variable domain of TCR clone 261896 (TRBV27, TRBJ1-5)
CASSLSGGASNQPQHF

SEQ ID NO: 523793 - protein, 10 aa, Homo sapiens
  CDR3 for alpha chain variable domain of TCR clone 261897 (TRAV36/DV7, TRAJ48)
CAVGNEKLTF

SEQ ID NO: 523794 - protein, 17 aa, Homo sapiens
  CDR3 for beta chain variable domain of TCR clone 261897 (TRBV7-9, TRBJ1-6)
CASSSPGRGIHPSTLGT

SEQ ID NO: 523795 - protein, 14 aa, Homo sapiens
  CDR3 for alpha chain variable domain of TCR clone 261898 (TRAV26-1, TRAJ38)
CIADNAGNNLKLIW

SEQ ID NO: 523796 - protein, 15 aa, Homo sapiens
  CDR3 for beta chain variable domain of TCR clone 261898 (TRBV20-1, TRBJ2-7)
CSARDRVSGMDEQYF

SEQ ID NO: 523797 - protein, 14 aa, Homo sapiens
  CDR3 for alpha chain variable domain of TCR clone 261899 (TRAV1-2, TRAJ16)
CAVNRFSDGQKLLL

SEQ ID NO: 523798 - protein, 16 aa, Homo sapiens
  CDR3 for beta chain variable domain of TCR clone 261899 (TRBV12-4, TRBJ1-5)
CASSRPVGGSNQPQHF

SEQ ID NO: 523799 - protein, 15 aa, Homo sapiens
  CDR3 for alpha chain variable domain of TCR clone 261900 (TRAV3, TRAJ45)
CAVRTPWGGADGLTV

SEQ ID NO: 523800 - protein, 16 aa, Homo sapiens
  CDR3 for beta chain variable domain of TCR clone 261900 (TRBV6-1, TRBJ2-2)
CASSFGQGANTGELFF

SEQ ID NO: 523801 - protein, 12 aa, Homo sapiens
  CDR3 for alpha chain variable domain of TCR clone 261901 (TRAV1-2, TRAJ29)
CAVPSGNTPLVF

SEQ ID NO: 523802 - protein, 13 aa, Homo sapiens
  CDR3 for beta chain variable domain of TCR clone 261901 (TRBV7-2, TRBJ1-1)
CASNLKGAKVAFF

SEQ ID NO: 523803 - protein, 13 aa, Homo sapiens
  CDR3 for alpha chain variable domain of TCR clone 261902 (TRAV13-2, TRAJ8)
CAFMNTGFQELVF

SEQ ID NO: 523804 - protein, 17 aa, Homo sapiens
  CDR3 for beta chain variable domain of TCR clone 261902 (TRBV28, TRBJ2-1)
CASSSARQALTYNEQFF

SEQ ID NO: 523805 - protein, 15 aa, Homo sapiens
  CDR3 for alpha chain variable domain of TCR clone 261903 (TRAV21, TRAJ53)
CATLNSGGSNYKLTF

SEQ ID NO: 523806 - protein, 17 aa, Homo sapiens
  CDR3 for beta chain variable domain of TCR clone 261903 (TRBV7-8, TRBJ2-2)
CASSLSGTSGGTGELFF

SEQ ID NO: 523807 - protein, 14 aa, Homo sapiens
  CDR3 for alpha chain variable domain of TCR clone 261904 (TRAV38-1, TRAJ40)
CALRPTSGTYKYTF

SEQ ID NO: 523808 - protein, 16 aa, Homo sapiens
  CDR3 for beta chain variable domain of TCR clone 261904 (TRBV13, TRBJ2-2)
CASSPRTGEHTGELFF

SEQ ID NO: 523809 - protein, 15 aa, Homo sapiens
  CDR3 for alpha chain variable domain of TCR clone 261905 (TRAV3, TRAJ4)
CAQNMFSGGYNKRIF

SEQ ID NO: 523810 - protein, 16 aa, Homo sapiens
  CDR3 for beta chain variable domain of TCR clone 261905 (TRBV3-1, TRBJ1-6)
CASSQEFQGSYSPLHF

SEQ ID NO: 523811 - protein, 14 aa, Homo sapiens
  CDR3 for alpha chain variable domain of TCR clone 261906 (TRAV12-1, TRAJ26)
CVVKGSNYGQNFVF

SEQ ID NO: 523812 - protein, 17 aa, Homo sapiens
  CDR3 for beta chain variable domain of TCR clone 261906 (TRBV11-2, TRBJ2-6)
CASRQRDIFSGANVLTF

SEQ ID NO: 523813 - protein, 14 aa, Homo sapiens
  CDR3 for alpha chain variable domain of TCR clone 261907 (TRAV4, TRAJ26)
CLVGPHNYGQNFVF

SEQ ID NO: 523814 - protein, 17 aa, Homo sapiens
  CDR3 for beta chain variable domain of TCR clone 261907 (TRBV24-1, TRBJ2-1)
CATSDVSTSVTYNEQFF

SEQ ID NO: 523815 - protein, 13 aa, Homo sapiens
  CDR3 for alpha chain variable domain of TCR clone 261908 (TRAV8-6, TRAJ13)
CAVSSGGYQKVTF

SEQ ID NO: 523816 - protein, 15 aa, Homo sapiens
  CDR3 for beta chain variable domain of TCR clone 261908 (TRBV7-9, TRBJ2-7)
CASSLPMGQANDQYF

SEQ ID NO: 523817 - protein, 13 aa, Homo sapiens
  CDR3 for alpha chain variable domain of TCR clone 261909 (TRAV25, TRAJ10)
CAGRTGGGNKLTF

SEQ ID NO: 523818 - protein, 15 aa, Homo sapiens
  CDR3 for beta chain variable domain of TCR clone 261909 (TRBV19, TRBJ2-1)
CASSSPGVPLGEQFF

SEQ ID NO: 523819 - protein, 15 aa, Homo sapiens
  CDR3 for alpha chain variable domain of TCR clone 261910 (TRAV27, TRAJ45)
CAGAPSQEEVLRTHL

SEQ ID NO: 523820 - protein, 12 aa, Homo sapiens
  CDR3 for beta chain variable domain of TCR clone 261910 (TRBV24-1, TRBJ2-7)
CATSDPGYEQYF

SEQ ID NO: 523821 - protein, 12 aa, Homo sapiens
  CDR3 for alpha chain variable domain of TCR clone 261911 (TRAV12-3, TRAJ17)
CAMTLTGNKLTF

SEQ ID NO: 523822 - protein, 14 aa, Homo sapiens
  CDR3 for beta chain variable domain of TCR clone 261911 (TRBV19, TRBJ1-1)
CASSPNRGDTEAFF

SEQ ID NO: 523823 - protein, 15 aa, Homo sapiens
  CDR3 for alpha chain variable domain of TCR clone 261912 (TRAV12-3, TRAJ6)
CAMSATTGGSYLPTF

SEQ ID NO: 523824 - protein, 19 aa, Homo sapiens
  CDR3 for beta chain variable domain of TCR clone 261912 (TRBV25-1, TRBJ2-2)
CAILVYRVDRGRKTGELFF

SEQ ID NO: 523825 - protein, 13 aa, Homo sapiens
  CDR3 for alpha chain variable domain of TCR clone 261913 (TRAV38-1, TRAJ42)
CARSGGSQGNLIF

SEQ ID NO: 523826 - protein, 17 aa, Homo sapiens
  CDR3 for beta chain variable domain of TCR clone 261913 (TRBV20-1, TRBJ2-1)
CSARDTLAGVWDNEQFF

SEQ ID NO: 523827 - protein, 13 aa, Homo sapiens
  CDR3 for alpha chain variable domain of TCR clone 261914 (TRAV35, TRAJ44)
CAGLSGTASKLTF

SEQ ID NO: 523828 - protein, 14 aa, Homo sapiens
  CDR3 for beta chain variable domain of TCR clone 261914 (TRBV23-1, TRBJ2-5)
CASSFLRSQETQYF

SEQ ID NO: 523829 - protein, 17 aa, Homo sapiens
  CDR3 for alpha chain variable domain of TCR clone 261915 (TRAV3, TRAJ42)
CAVRGRDYGGSQGNLIF

SEQ ID NO: 523830 - protein, 15 aa, Homo sapiens
  CDR3 for beta chain variable domain of TCR clone 261915 (TRBV6-6, TRBJ2-7)
CASSYPYGGSYEQYF

SEQ ID NO: 523831 - protein, 13 aa, Homo sapiens
  CDR3 for alpha chain variable domain of TCR clone 261916 (TRAV6, TRAJ3)
CSTGYSSASKIIF

SEQ ID NO: 523832 - protein, 13 aa, Homo sapiens
  CDR3 for beta chain variable domain of TCR clone 261916 (TRBV14, TRBJ1-2)
CASSQQGYYGCTC

SEQ ID NO: 523833 - protein, 15 aa, Homo sapiens
  CDR3 for alpha chain variable domain of TCR clone 261917 (TRAV12-3, TRAJ6)
CALSAASGGSYIPTF

SEQ ID NO: 523834 - protein, 12 aa, Homo sapiens
  CDR3 for beta chain variable domain of TCR clone 261917 (TRBV11-2, TRBJ2-3)
CASSPPEDTQYF

SEQ ID NO: 523835 - protein, 12 aa, Homo sapiens
  CDR3 for alpha chain variable domain of TCR clone 261918 (TRAV12-2, TRAJ31)
CAVNTPDSRLMF

SEQ ID NO: 523836 - protein, 15 aa, Homo sapiens
  CDR3 for beta chain variable domain of TCR clone 261918 (TRBV4-2, TRBJ1-1)
CASSQDQGLNTEAFF

SEQ ID NO: 523837 - protein, 15 aa, Homo sapiens
  CDR3 for alpha chain variable domain of TCR clone 261919 (TRAV21, TRAJ53)
CATLNSGGSNYKLTF

SEQ ID NO: 523838 - protein, 15 aa, Homo sapiens
  CDR3 for beta chain variable domain of TCR clone 261919 (TRBV20-1, TRBJ2-7)
CSSRDRVSGMDEQYF

SEQ ID NO: 523839 - protein, 13 aa, Homo sapiens
  CDR3 for alpha chain variable domain of TCR clone 261920 (TRAV13-2, TRAJ40)
CAEFTSGTNKYIF

SEQ ID NO: 523840 - protein, 14 aa, Homo sapiens
  CDR3 for beta chain variable domain of TCR clone 261920 (TRBV10-2, TRBJ1-5)
CASSSTGRNQPQHF

SEQ ID NO: 523841 - protein, 16 aa, Homo sapiens
  CDR3 for alpha chain variable domain of TCR clone 261921 (TRAV30, TRAJ24)
CGTEIVDADSWGKFQF

SEQ ID NO: 523842 - protein, 18 aa, Homo sapiens
  CDR3 for beta chain variable domain of TCR clone 261921 (TRBV7-9, TRBJ2-7)
CTSSLTTSGSRTWCEQYF

SEQ ID NO: 523843 - protein, 15 aa, Homo sapiens
  CDR3 for alpha chain variable domain of TCR clone 261922 (TRAV12-1, TRAJ36)
RVVNEHQTGANNLFF

SEQ ID NO: 523844 - protein, 12 aa, Homo sapiens
  CDR3 for beta chain variable domain of TCR clone 261922 (TRBV29-1, TRBJ2-3)
CSVTGGADTQYF

SEQ ID NO: 523845 - protein, 13 aa, Homo sapiens
  CDR3 for alpha chain variable domain of TCR clone 261923 (TRAV35, TRAJ42)
CAGFPGSQGNHIF

SEQ ID NO: 523846 - protein, 14 aa, Homo sapiens
  CDR3 for beta chain variable domain of TCR clone 261923 (TRBV19, TRBJ2-1)
CACPTFVLSGEQFF

SEQ ID NO: 523847 - protein, 16 aa, Homo sapiens
  CDR3 for alpha chain variable domain of TCR clone 261924 (TRAV1-2, TRAJ6)
CAVRAQGTGGSYIPTF

SEQ ID NO: 523848 - protein, 13 aa, Homo sapiens
  CDR3 for beta chain variable domain of TCR clone 261924 (TRBV28, TRBJ2-7)
CASTPGLAGEQYF

SEQ ID NO: 523849 - protein, 15 aa, Homo sapiens
  CDR3 for alpha chain variable domain of TCR clone 261925 (TRAV13-1, TRAJ5)
CAASNAETGRRALTF

SEQ ID NO: 523850 - protein, 16 aa, Homo sapiens
  CDR3 for beta chain variable domain of TCR clone 261925 (TRBV7-2, TRBJ2-1)
CASSLGRTSGDNEQFF

SEQ ID NO: 523851 - protein, 15 aa, Homo sapiens
  CDR3 for alpha chain variable domain of TCR clone 261926 (TRAV12-3, TRAJ49)
CAMAVTPNTGNQFYF

SEQ ID NO: 523852 - protein, 14 aa, Homo sapiens
  CDR3 for beta chain variable domain of TCR clone 261926 (TRBV7-8, TRBJ2-3)
CDSSLEAGTDTQYF

SEQ ID NO: 523853 - protein, 14 aa, Homo sapiens
  CDR3 for alpha chain variable domain of TCR clone 261927 (TRAV1-2, TRAJ16)
CPVNRFSDGQKLLF

SEQ ID NO: 523854 - protein, 15 aa, Homo sapiens
  CDR3 for beta chain variable domain of TCR clone 261927 (TRBV7-9, TRBJ1-6)
CASSSPGRGNSPLHF

SEQ ID NO: 523855 - protein, 14 aa, Homo sapiens
  CDR3 for alpha chain variable domain of TCR clone 261928 (TRAV12-2, TRAJ24)
CAVTPADSWGKLQF

SEQ ID NO: 523856 - protein, 16 aa, Homo sapiens
  CDR3 for beta chain variable domain of TCR clone 261928 (TRBV29-1, TRBJ2-7)
CSVEDAEDGTAYEQYF

SEQ ID NO: 523857 - protein, 16 aa, Homo sapiens
  CDR3 for alpha chain variable domain of TCR clone 261929 (TRAV17, TRAJ35)
CATAEGGIGFGNVLHC

SEQ ID NO: 523858 - protein, 10 aa, Homo sapiens
  CDR3 for beta chain variable domain of TCR clone 261929 (TRBV19, TRBJ1-1)
CASRQVEAFF

SEQ ID NO: 523859 - protein, 16 aa, Homo sapiens
  CDR3 for alpha chain variable domain of TCR clone 261930 (TRAV16, TRAJ4)
CALSRMFSGGYNKLIF

SEQ ID NO: 523860 - protein, 13 aa, Homo sapiens
  CDR3 for beta chain variable domain of TCR clone 261930 (TRBV4-1, TRBJ2-7)
CASSQGQAYEQYF

SEQ ID NO: 523861 - protein, 12 aa, Homo sapiens
  CDR3 for alpha chain variable domain of TCR clone 261931 (TRAV12-3, TRAJ17)
CAMTLTGNKLTF

SEQ ID NO: 523862 - protein, 13 aa, Homo sapiens
  CDR3 for beta chain variable domain of TCR clone 261931 (TRBV27, TRBJ2-7)
CASSFSQGYEQCF

SEQ ID NO: 523863 - protein, 20 aa, Homo sapiens
  CDR3 for alpha chain variable domain of TCR clone 261932 (TRAV26-1, TRAJ42)
CCVLLHRQTYYGGGQGNLIF

SEQ ID NO: 523864 - protein, 16 aa, Homo sapiens
  CDR3 for beta chain variable domain of TCR clone 261932 (TRBV7-3, TRBJ2-2)
CASSLKRGTLSGELFC

SEQ ID NO: 523865 - protein, 14 aa, Homo sapiens
  CDR3 for alpha chain variable domain of TCR clone 261933 (TRAV20, TRAJ37)
CAVQAASNTGKLIF

SEQ ID NO: 523866 - protein, 15 aa, Homo sapiens
  CDR3 for beta chain variable domain of TCR clone 261933 (TRBV5-1, TRBJ1-4)
FAPAAWKDGNEKLFF

SEQ ID NO: 523867 - protein, 16 aa, Homo sapiens
  CDR3 for alpha chain variable domain of TCR clone 261934 (TRAV4, TRAJ22)
CLVGDLYSGSARQLTF

SEQ ID NO: 523868 - protein, 16 aa, Homo sapiens
  CDR3 for beta chain variable domain of TCR clone 261934 (TRBV7-9, TRBJ2-1)
CASSDVAGCSYNEQFF

SEQ ID NO: 523869 - protein, 14 aa, Homo sapiens
  CDR3 for alpha chain variable domain of TCR clone 261935 (TRAV8-4, TRAJ54)
CAVSEVFGAQNLVI

SEQ ID NO: 523870 - protein, 13 aa, Homo sapiens
  CDR3 for beta chain variable domain of TCR clone 261935 (TRBV7-9, TRBJ1-2)
CASSLKQNYGYTF

SEQ ID NO: 523871 - protein, 12 aa, Homo sapiens
  CDR3 for alpha chain variable domain of TCR clone 261936 (TRAV8-4, TRAJ37)
CAKSSNTGKLIF

SEQ ID NO: 523872 - protein, 15 aa, Homo sapiens
  CDR3 for beta chain variable domain of TCR clone 261936 (TRBV28, TRBJ2-7)
CASSLISGGSYEQYF

SEQ ID NO: 523873 - protein, 12 aa, Homo sapiens
  CDR3 for alpha chain variable domain of TCR clone 261937 (TRAV13-2, TRAJ39)
CAENSERNMLTF

SEQ ID NO: 523874 - protein, 14 aa, Homo sapiens
  CDR3 for beta chain variable domain of TCR clone 261937 (TRBV20-1, TRBJ1-1)
CSAMGGTAKTEAFF

SEQ ID NO: 523875 - protein, 12 aa, Homo sapiens
  CDR3 for alpha chain variable domain of TCR clone 261938 (TRAV22, TRAJ22)
FAPGGSARQLTF

SEQ ID NO: 523876 - protein, 13 aa, Homo sapiens
  CDR3 for beta chain variable domain of TCR clone 261938 (TRBV15, TRBJ1-6)
CATSGGFNSPLHF

SEQ ID NO: 523877 - protein, 14 aa, Homo sapiens
  CDR3 for alpha chain variable domain of TCR clone 261939 (TRAV1-2, TRAJ16)
CAVNLFSDGQKLLF

SEQ ID NO: 523878 - protein, 14 aa, Homo sapiens
  CDR3 for beta chain variable domain of TCR clone 261939 (TRBV25-1, TRBJ1-1)
RASTHLGGNTEAFF

SEQ ID NO: 523879 - protein, 12 aa, Homo sapiens
  CDR3 for alpha chain variable domain of TCR clone 261940 (TRAV21, TRAJ29)
CAVTSGNTPLVS

SEQ ID NO: 523880 - protein, 17 aa, Homo sapiens
  CDR3 for beta chain variable domain of TCR clone 261940 (TRBV20-1, TRBJ2-2)
CSASGSGQGGLTGELFF

SEQ ID NO: 523881 - protein, 14 aa, Homo sapiens
  CDR3 for alpha chain variable domain of TCR clone 261941 (TRAV20, TRAJ22)
CAVQVSGSARQLPF

SEQ ID NO: 523882 - protein, 13 aa, Homo sapiens
  CDR3 for beta chain variable domain of TCR clone 261941 (TRBV20-1, TRBJ2-5)
CSAREGGKETQYF

SEQ ID NO: 523883 - protein, 12 aa, Homo sapiens
  CDR3 for alpha chain variable domain of TCR clone 261942 (TRAV27, TRAJ9)
CAGESGGFKTIF

SEQ ID NO: 523884 - protein, 14 aa, Homo sapiens
  CDR3 for beta chain variable domain of TCR clone 261942 (TRBV18, TRBJ2-7)
CASSPRGGAYEQYF

SEQ ID NO: 523885 - protein, 15 aa, Homo sapiens
  CDR3 for alpha chain variable domain of TCR clone 261943 (TRAV12-2, TRAJ53)
CTVNGGGGSNYKLTF

SEQ ID NO: 523886 - protein, 17 aa, Homo sapiens
  CDR3 for beta chain variable domain of TCR clone 261943 (TRBV7-3, TRBJ2-3)
CASSLMKRMRGADTQYF

SEQ ID NO: 523887 - protein, 15 aa, Homo sapiens
  CDR3 for alpha chain variable domain of TCR clone 261944 (TRAV12-3, TRAJ6)
CAMSATSGGSYIPTF

SEQ ID NO: 523888 - protein, 15 aa, Homo sapiens
  CDR3 for beta chain variable domain of TCR clone 261944 (TRBV11-3, TRBJ2-7)
CASSPGPASSYEQYF

SEQ ID NO: 523889 - protein, 13 aa, Homo sapiens
  CDR3 for alpha chain variable domain of TCR clone 261945 (TRAV20, TRAJ37)
CAGCSSNTGKLIF

SEQ ID NO: 523890 - protein, 15 aa, Homo sapiens
  CDR3 for beta chain variable domain of TCR clone 261945 (TRBV29-1, TRBJ2-3)
CSVEVTTGDTDTQYF

SEQ ID NO: 523891 - protein, 14 aa, Homo sapiens
  CDR3 for alpha chain variable domain of TCR clone 261946 (TRAV1-2, TRAJ8)
CAVREDTGFQTLVF

SEQ ID NO: 523892 - protein, 15 aa, Homo sapiens
  CDR3 for beta chain variable domain of TCR clone 261946 (TRBV29-1, TRBJ2-1)
CSVPTGLALYNEQFF

SEQ ID NO: 523893 - protein, 15 aa, Homo sapiens
  CDR3 for alpha chain variable domain of TCR clone 261947 (TRAV13-1, TRAJ49)
GAASTEGNTGNQFYF

SEQ ID NO: 523894 - protein, 12 aa, Homo sapiens
  CDR3 for beta chain variable domain of TCR clone 261947 (TRBV11-2, TRBJ2-2)
CASSLGGGELFF

SEQ ID NO: 523895 - protein, 10 aa, Homo sapiens
  CDR3 for alpha chain variable domain of TCR clone 261948 (TRAV1-2, TRAJ20)
CACNDYKLCF

SEQ ID NO: 523896 - protein, 16 aa, Homo sapiens
  CDR3 for beta chain variable domain of TCR clone 261948 (TRBV20-1, TRBJ2-1)
CSARDLKQGMNNEQFF

SEQ ID NO: 523897 - protein, 16 aa, Homo sapiens
  CDR3 for alpha chain variable domain of TCR clone 261949 (TRAV3, TRAJ10)
CAVRDMRAGGGNKLTF

SEQ ID NO: 523898 - protein, 19 aa, Homo sapiens
  CDR3 for beta chain variable domain of TCR clone 261949 (TRBV6-3, TRBJ1-2)
CASSYSKVRTGPPNYGYTF

SEQ ID NO: 523899 - protein, 18 aa, Homo sapiens
  CDR3 for alpha chain variable domain of TCR clone 261950 (TRAV21, TRAJ53)
CAVKGGENSGGSNYKMTF

SEQ ID NO: 523900 - protein, 14 aa, Homo sapiens
  CDR3 for beta chain variable domain of TCR clone 261950 (TRBV11-3, TRBJ1-5)
LTGDRLYYNQPQHF

SEQ ID NO: 523901 - protein, 17 aa, Homo sapiens
  CDR3 for alpha chain variable domain of TCR clone 261951 (TRAV26-1, TRAJ22)
CIVRVPSHSGSARQLTF

SEQ ID NO: 523902 - protein, 16 aa, Homo sapiens
  CDR3 for beta chain variable domain of TCR clone 261951 (TRBV28, TRBJ2-1)
CASRRSGRMVGNEQFF

SEQ ID NO: 523903 - protein, 16 aa, Homo sapiens
  CDR3 for alpha chain variable domain of TCR clone 261952 (TRAV30, TRAJ24)
CGTEIVDANSWGKFQF

SEQ ID NO: 523904 - protein, 15 aa, Homo sapiens
  CDR3 for beta chain variable domain of TCR clone 261952 (TRBV7-9, TRBJ1-4)
CASSARTGGNEKLFF

SEQ ID NO: 523905 - protein, 11 aa, Homo sapiens
  CDR3 for alpha chain variable domain of TCR clone 261953 (TRAV2, TRAJ33)
CAVESNYQLIW

SEQ ID NO: 523906 - protein, 14 aa, Homo sapiens
  CDR3 for beta chain variable domain of TCR clone 261953 (TRBV7-8, TRBJ2-3)
CASSFPDGQDTQYF

SEQ ID NO: 523907 - protein, 13 aa, Homo sapiens
  CDR3 for alpha chain variable domain of TCR clone 261954 (TRAV12-3, TRAJ33)
CAMSVSSNYQLIW

SEQ ID NO: 523908 - protein, 13 aa, Homo sapiens
  CDR3 for beta chain variable domain of TCR clone 261954 (TRBV4-1, TRBJ2-2)
CASSQENTGELFF

SEQ ID NO: 523909 - protein, 12 aa, Homo sapiens
  CDR3 for alpha chain variable domain of TCR clone 261955 (TRAV12-2, TRAJ10)
WGVTGGGNKLTF

SEQ ID NO: 523910 - protein, 18 aa, Homo sapiens
  CDR3 for beta chain variable domain of TCR clone 261955 (TRBV12-4, TRBJ2-2)
CASSLVAGTRGRTGELFF

SEQ ID NO: 523911 - protein, 11 aa, Homo sapiens
  CDR3 for alpha chain variable domain of TCR clone 261956 (TRAV3, TRAJ39)
CAVIEWSNMLT

SEQ ID NO: 523912 - protein, 14 aa, Homo sapiens
  CDR3 for beta chain variable domain of TCR clone 261956 (TRBV7-8, TRBJ2-3)
CASSFPDGQDTQYF

SEQ ID NO: 523913 - protein, 14 aa, Homo sapiens
  CDR3 for alpha chain variable domain of TCR clone 261957 (TRAV8-2, TRAJ37)
CVVSISGNTGKLIF

SEQ ID NO: 523914 - protein, 15 aa, Homo sapiens
  CDR3 for beta chain variable domain of TCR clone 261957 (TRBV11-2, TRBJ2-1)
CASSKNRGLIYEQFF

SEQ ID NO: 523915 - protein, 12 aa, Homo sapiens
  CDR3 for alpha chain variable domain of TCR clone 261958 (TRAV1-1, TRAJ8)
CAGGTGFQKLVF

SEQ ID NO: 523916 - protein, 14 aa, Homo sapiens
  CDR3 for beta chain variable domain of TCR clone 261958 (TRBV7-2, TRBJ1-2)
CASSQTGSTYGYTF

SEQ ID NO: 523917 - protein, 15 aa, Homo sapiens
  CDR3 for alpha chain variable domain of TCR clone 261959 (TRAV8-3, TRAJ27)
CAVGPSKTNAGKSTF

SEQ ID NO: 523918 - protein, 13 aa, Homo sapiens
  CDR3 for beta chain variable domain of TCR clone 261959 (TRBV2, TRBJ2-7)
CASSVGGSGEQYF

SEQ ID NO: 523919 - protein, 10 aa, Homo sapiens
  CDR3 for alpha chain variable domain of TCR clone 261960 (TRAV12-3, TRAJ18)
CAMSAEVQPW

SEQ ID NO: 523920 - protein, 13 aa, Homo sapiens
  CDR3 for beta chain variable domain of TCR clone 261960 (TRBV15, TRBJ1-6)
CATSGGLNSPLHF

SEQ ID NO: 523921 - protein, 18 aa, Homo sapiens
  CDR3 for alpha chain variable domain of TCR clone 261961 (TRAV29/DV5, TRAJ52)
CAAGFRGAGGTSFGKLTF

SEQ ID NO: 523922 - protein, 16 aa, Homo sapiens
  CDR3 for beta chain variable domain of TCR clone 261961 (TRBV15, TRBJ2-3)
CATSRDLGIVTDTQYF

SEQ ID NO: 523923 - protein, 15 aa, Homo sapiens
  CDR3 for alpha chain variable domain of TCR clone 261962 (TRAV21, TRAJ53)
CATLNSGGSNYKPTF

SEQ ID NO: 523924 - protein, 14 aa, Homo sapiens
  CDR3 for beta chain variable domain of TCR clone 261962 (TRBV12-5, TRBJ2-5)
CASGSRTHQETQYF

SEQ ID NO: 523925 - protein, 15 aa, Homo sapiens
  CDR3 for alpha chain variable domain of TCR clone 261963 (TRAV8-1, TRAJ8)
CAVNAMNTGFQKLVF

SEQ ID NO: 523926 - protein, 13 aa, Homo sapiens
  CDR3 for beta chain variable domain of TCR clone 261963 (TRBV27, TRBJ2-1)
CASSSGSYNEQFF

SEQ ID NO: 523927 - protein, 12 aa, Homo sapiens
  CDR3 for alpha chain variable domain of TCR clone 261964 (TRAV29/DV5, TRAJ49)
CAASAIGNQFYF

SEQ ID NO: 523928 - protein, 17 aa, Homo sapiens
  CDR3 for beta chain variable domain of TCR clone 261964 (TRBV5-1, TRBJ2-2)
CASSRTSVRFSTGELFF

SEQ ID NO: 523929 - protein, 14 aa, Homo sapiens
  CDR3 for alpha chain variable domain of TCR clone 261965 (TRAV8-4, TRAJ13)
CAVTLSGGYQKVTF

SEQ ID NO: 523930 - protein, 14 aa, Homo sapiens
  CDR3 for beta chain variable domain of TCR clone 261965 (TRBV7-2, TRBJ1-2)
CASSPTGSTYGYTF

SEQ ID NO: 523931 - protein, 11 aa, Homo sapiens
  CDR3 for alpha chain variable domain of TCR clone 261966 (TRAV2, TRAJ33)
CAVDSNYQLIW

SEQ ID NO: 523932 - protein, 12 aa, Homo sapiens
  CDR3 for beta chain variable domain of TCR clone 261966 (TRBV11-2, TRBJ2-2)
CASSLGGAELFF

SEQ ID NO: 523933 - protein, 14 aa, Homo sapiens
  CDR3 for alpha chain variable domain of TCR clone 261967 (TRAV1-2, TRAJ16)
CAVNRFSDGQKLLF

SEQ ID NO: 523934 - protein, 15 aa, Homo sapiens
  CDR3 for beta chain variable domain of TCR clone 261967 (TRBV12-4, TRBJ2-1)
CASSLLATGNNEQFF

SEQ ID NO: 523935 - protein, 17 aa, Homo sapiens
  CDR3 for alpha chain variable domain of TCR clone 261968 (TRAV13-1, TRAJ31)
CAPRDRLMFGDGTQLVV

SEQ ID NO: 523936 - protein, 14 aa, Homo sapiens
  CDR3 for beta chain variable domain of TCR clone 261968 (TRBV7-2, TRBJ1-1)
CASSFLTGTTEAFF

SEQ ID NO: 523937 - protein, 15 aa, Homo sapiens
  CDR3 for alpha chain variable domain of TCR clone 261969 (TRAV8-3, TRAJ27)
CAVGPSKTNAGKSTF

SEQ ID NO: 523938 - protein, 15 aa, Homo sapiens
  CDR3 for beta chain variable domain of TCR clone 261969 (TRBV7-2, TRBJ2-1)
CPSSSGLAEGNEQFF

SEQ ID NO: 523939 - protein, 16 aa, Homo sapiens
  CDR3 for alpha chain variable domain of TCR clone 261970 (TRAV25, TRAJ52)
YAGGFLSGTSYGKLTF

SEQ ID NO: 523940 - protein, 16 aa, Homo sapiens
  CDR3 for beta chain variable domain of TCR clone 261970 (TRBV28, TRBJ2-3)
CASSRSSGQGSDTQYF

SEQ ID NO: 523941 - protein, 11 aa, Homo sapiens
  CDR3 for alpha chain variable domain of TCR clone 261971 (TRAV1-2, TRAJ11)
CAVRGYSTPTF

SEQ ID NO: 523942 - protein, 15 aa, Homo sapiens
  CDR3 for beta chain variable domain of TCR clone 261971 (TRBV3-1, TRBJ2-2)
CASSQDWTRAGELFF

SEQ ID NO: 523943 - protein, 15 aa, Homo sapiens
  CDR3 for alpha chain variable domain of TCR clone 261972 (TRAV8-3, TRAJ45)
CASSYSRGCADGLTF

SEQ ID NO: 523944 - protein, 13 aa, Homo sapiens
  CDR3 for beta chain variable domain of TCR clone 261972 (TRBV10-3, TRBJ2-7)
CASKLAVNYEQYF

SEQ ID NO: 523945 - protein, 12 aa, Homo sapiens
  CDR3 for alpha chain variable domain of TCR clone 261973 (TRAV30, TRAJ43)
CGTEERGNDMRF

SEQ ID NO: 523946 - protein, 13 aa, Homo sapiens
  CDR3 for beta chain variable domain of TCR clone 261973 (TRBV27, TRBJ2-7)
CASSCSQRYEQYF

SEQ ID NO: 523947 - protein, 15 aa, Homo sapiens
  CDR3 for alpha chain variable domain of TCR clone 261974 (TRAV13-1, TRAJ44)
CAASRGGGTASKLSF

SEQ ID NO: 523948 - protein, 14 aa, Homo sapiens
  CDR3 for beta chain variable domain of TCR clone 261974 (TRBV7-2, TRBJ2-5)
CASSPRGSSETQYF

SEQ ID NO: 523949 - protein, 15 aa, Homo sapiens
  CDR3 for alpha chain variable domain of TCR clone 261975 (TRAV20, TRAJ43)
CAVQAGKSRNNDMRF

SEQ ID NO: 523950 - protein, 13 aa, Homo sapiens
  CDR3 for beta chain variable domain of TCR clone 261975 (TRBV27, TRBJ1-1)
CASSLSIGAEAFF

SEQ ID NO: 523951 - protein, 16 aa, Homo sapiens
  CDR3 for alpha chain variable domain of TCR clone 261976 (TRAV3, TRAJ10)
CAVRDMRAGGENKLTF

SEQ ID NO: 523952 - protein, 14 aa, Homo sapiens
  CDR3 for beta chain variable domain of TCR clone 261976 (TRBV7-2, TRBJ2-7)
CASSPKTSFYEQYF

SEQ ID NO: 523953 - protein, 13 aa, Homo sapiens
  CDR3 for alpha chain variable domain of TCR clone 261977 (TRAV4, TRAJ33)
CLVGDMSNYQLIW

SEQ ID NO: 523954 - protein, 14 aa, Homo sapiens
  CDR3 for beta chain variable domain of TCR clone 261977 (TRBV7-9, TRBJ1-1)
CASSLGGANTEAFF

SEQ ID NO: 523955 - protein, 10 aa, Homo sapiens
  CDR3 for alpha chain variable domain of TCR clone 261978 (TRAV1-2, TRAJ34)
CAVNTDKLIF

SEQ ID NO: 523956 - protein, 18 aa, Homo sapiens
  CDR3 for beta chain variable domain of TCR clone 261978 (TRBV7-9, TRBJ2-7)
CASSLTISGSRTWYEQYF

SEQ ID NO: 523957 - protein, 11 aa, Homo sapiens
  CDR3 for alpha chain variable domain of TCR clone 261979 (TRAV3, TRAJ21)
CAVGNFNKFYF

SEQ ID NO: 523958 - protein, 13 aa, Homo sapiens
  CDR3 for beta chain variable domain of TCR clone 261979 (TRBV12-5, TRBJ2-3)
CASGDRQTDTQYF

SEQ ID NO: 523959 - protein, 12 aa, Homo sapiens
  CDR3 for alpha chain variable domain of TCR clone 261980 (TRAV12-3, TRAJ17)
CAMTLTGNKLTF

SEQ ID NO: 523960 - protein, 15 aa, Homo sapiens
  CDR3 for beta chain variable domain of TCR clone 261980 (TRBV18, TRBJ2-1)
CASSPPSASHNEQFF

SEQ ID NO: 523961 - protein, 22 aa, Homo sapiens
  CDR3 for alpha chain variable domain of TCR clone 261981 (TRAV8-6, TRAJ6)
CAVTLGEVATYLHLEEGPALLF

SEQ ID NO: 523962 - protein, 15 aa, Homo sapiens
  CDR3 for beta chain variable domain of TCR clone 261981 (TRBV7-2, TRBJ1-1)
CASSPQGGANTEAFF

SEQ ID NO: 523963 - protein, 14 aa, Homo sapiens
  CDR3 for alpha chain variable domain of TCR clone 261982 (TRAV12-1, TRAJ17)
CVVNYKAAGNKLTF

SEQ ID NO: 523964 - protein, 16 aa, Homo sapiens
  CDR3 for beta chain variable domain of TCR clone 261982 (TRBV13, TRBJ2-2)
CASSPRTGEHTGELFF

SEQ ID NO: 523965 - protein, 11 aa, Homo sapiens
  CDR3 for alpha chain variable domain of TCR clone 261983 (TRAV12-3, TRAJ43)
CAMSVSNDMRF

SEQ ID NO: 523966 - protein, 14 aa, Homo sapiens
  CDR3 for beta chain variable domain of TCR clone 261983 (TRBV7-9, TRBJ1-6)
CASSLGLATGPLHF

SEQ ID NO: 523967 - protein, 11 aa, Homo sapiens
  CDR3 for alpha chain variable domain of TCR clone 261984 (TRAV14/DV4, )
CAMREISRTLT

SEQ ID NO: 523968 - protein, 14 aa, Homo sapiens
  CDR3 for beta chain variable domain of TCR clone 261984 (TRBV2, TRBJ2-1)
CASSDRAYYNERFF

SEQ ID NO: 523969 - protein, 15 aa, Homo sapiens
  CDR3 for alpha chain variable domain of TCR clone 261985 (TRAV21, TRAJ53)
CATLNSGGSNDKLTF

SEQ ID NO: 523970 - protein, 13 aa, Homo sapiens
  CDR3 for beta chain variable domain of TCR clone 261985 (TRBV12-4, TRBJ2-7)
CASSFVPTAEQYF

SEQ ID NO: 523971 - protein, 15 aa, Homo sapiens
  CDR3 for alpha chain variable domain of TCR clone 261986 (TRAV10, TRAJ42)
SLLHLWGGSQGNLIF

SEQ ID NO: 523972 - protein, 12 aa, Homo sapiens
  CDR3 for beta chain variable domain of TCR clone 261986 (TRBV9, TRBJ2-2)
CASSLVTGELFF

SEQ ID NO: 523973 - protein, 18 aa, Homo sapiens
  CDR3 for alpha chain variable domain of TCR clone 261987 (TRAV26-1, TRAJ23)
CIVRVGLEVWNQGGKLIF

SEQ ID NO: 523974 - protein, 16 aa, Homo sapiens
  CDR3 for beta chain variable domain of TCR clone 261987 (TRBV12-4, TRBJ2-5)
CASSFFVRGLQETQYF

SEQ ID NO: 523975 - protein, 13 aa, Homo sapiens
  CDR3 for alpha chain variable domain of TCR clone 261988 (TRAV23/DV6, TRAJ22)
CAPYSGSARQLTF

SEQ ID NO: 523976 - protein, 13 aa, Homo sapiens
  CDR3 for beta chain variable domain of TCR clone 261988 (TRBV12-4, TRBJ1-2)
CASSLRQGKGYTF

SEQ ID NO: 523977 - protein, 14 aa, Homo sapiens
  CDR3 for alpha chain variable domain of TCR clone 261989 (TRAV26-1, TRAJ38)
CIADNAGNNRKLIW

SEQ ID NO: 523978 - protein, 13 aa, Homo sapiens
  CDR3 for beta chain variable domain of TCR clone 261989 (TRBV4-1, TRBJ2-7)
CASSQGQAYEQHF

SEQ ID NO: 523979 - protein, 16 aa, Homo sapiens
  CDR3 for alpha chain variable domain of TCR clone 261990 (TRAV4, TRAJ22)
CLVGDLYSGSARQLTF

SEQ ID NO: 523980 - protein, 16 aa, Homo sapiens
  CDR3 for beta chain variable domain of TCR clone 261990 (TRBV7-9, TRBJ2-2)
CASSLKRGTLSGELFF

SEQ ID NO: 523981 - protein, 14 aa, Homo sapiens
  CDR3 for alpha chain variable domain of TCR clone 261991 (TRAV21, TRAJ15)
CALSLNQAGTALSF

SEQ ID NO: 523982 - protein, 11 aa, Homo sapiens
  CDR3 for beta chain variable domain of TCR clone 261991 (TRBV20-1, TRBJ2-7)
CSARTSYEQYF

SEQ ID NO: 523983 - protein, 13 aa, Homo sapiens
  CDR3 for alpha chain variable domain of TCR clone 261992 (TRAV12-1, TRAJ6)
CVVFPGGSYIPTF

SEQ ID NO: 523984 - protein, 13 aa, Homo sapiens
  CDR3 for beta chain variable domain of TCR clone 261992 (TRBV7-9, TRBJ1-2)
CASSLKQNYGYTI

SEQ ID NO: 523985 - protein, 14 aa, Homo sapiens
  CDR3 for alpha chain variable domain of TCR clone 261993 (TRAV3, TRAJ28)
CAVRRGAGSYQRTF

SEQ ID NO: 523986 - protein, 16 aa, Homo sapiens
  CDR3 for beta chain variable domain of TCR clone 261993 (TRBV4-1, TRBJ2-7)
CASSQEWTSGPLEQYF

SEQ ID NO: 523987 - protein, 16 aa, Homo sapiens
  CDR3 for alpha chain variable domain of TCR clone 261994 (TRAV1-2, TRAJ16)
CAVNRFQMARSCSLQG

SEQ ID NO: 523988 - protein, 13 aa, Homo sapiens
  CDR3 for beta chain variable domain of TCR clone 261994 (TRBV7-3, TRBJ1-1)
CASSQDWGAEAFF

SEQ ID NO: 523989 - protein, 15 aa, Homo sapiens
  CDR3 for alpha chain variable domain of TCR clone 261995 (TRAV27, TRAJ38)
CAARRNAGNHCKLIW

SEQ ID NO: 523990 - protein, 13 aa, Homo sapiens
  CDR3 for beta chain variable domain of TCR clone 261995 (TRBV12-5, TRBJ2-3)
CASGDRQSDTQYF

SEQ ID NO: 523991 - protein, 14 aa, Homo sapiens
  CDR3 for alpha chain variable domain of TCR clone 261996 (TRAV35, TRAJ22)
CAWLRPGSARQLTF

SEQ ID NO: 523992 - protein, 14 aa, Homo sapiens
  CDR3 for beta chain variable domain of TCR clone 261996 (TRBV11-3, TRBJ2-3)
CASSSGQGPDTQYF

SEQ ID NO: 523993 - protein, 13 aa, Homo sapiens
  CDR3 for alpha chain variable domain of TCR clone 261997 (TRAV13-1, TRAJ52)
CAAKNPNAGGTSY

SEQ ID NO: 523994 - protein, 15 aa, Homo sapiens
  CDR3 for beta chain variable domain of TCR clone 261997 (TRBV6-1, TRBJ2-3)
CASSERGGITDTQYF

SEQ ID NO: 523995 - protein, 14 aa, Homo sapiens
  CDR3 for alpha chain variable domain of TCR clone 261998 (TRAV16, TRAJ33)
CALSAMESNYQLIW

SEQ ID NO: 523996 - protein, 15 aa, Homo sapiens
  CDR3 for beta chain variable domain of TCR clone 261998 (TRBV9, TRBJ1-6)
CASSVAGTGDSPLHF

SEQ ID NO: 523997 - protein, 13 aa, Homo sapiens
  CDR3 for alpha chain variable domain of TCR clone 261999 (TRAV1-2, TRAJ9)
CSALNTGGFKTIF

SEQ ID NO: 523998 - protein, 12 aa, Homo sapiens
  CDR3 for beta chain variable domain of TCR clone 261999 (TRBV11-3, TRBJ1-1)
CASSHRQGEAFF

SEQ ID NO: 523999 - protein, 12 aa, Homo sapiens
  CDR3 for alpha chain variable domain of TCR clone 262000 (TRAV12-3, TRAJ17)
CAMTLTGNKLTF

SEQ ID NO: 524000 - protein, 11 aa, Homo sapiens
  CDR3 for beta chain variable domain of TCR clone 262000 (TRBV28, TRBJ2-1)
CDSRRVNEQFF

SEQ ID NO: 524001 - protein, 14 aa, Homo sapiens
  CDR3 for alpha chain variable domain of TCR clone 262001 (TRAV12-2, TRAJ40)
CAVKIPSGTYKYIF

SEQ ID NO: 524002 - protein, 13 aa, Homo sapiens
  CDR3 for beta chain variable domain of TCR clone 262001 (TRBV7-3, TRBJ1-5)
CASSLDSNQPQHF

SEQ ID NO: 524003 - protein, 13 aa, Homo sapiens
  CDR3 for alpha chain variable domain of TCR clone 262002 (TRAV12-1, TRAJ33)
CGDAPDSNYQLIW

SEQ ID NO: 524004 - protein, 16 aa, Homo sapiens
  CDR3 for beta chain variable domain of TCR clone 262002 (TRBV13, TRBJ2-2)
CASSPRTGEHTGELFL

SEQ ID NO: 524005 - protein, 13 aa, Homo sapiens
  CDR3 for alpha chain variable domain of TCR clone 262003 (TRAV27, TRAJ3)
ASLRGSSASKIIF

SEQ ID NO: 524006 - protein, 15 aa, Homo sapiens
  CDR3 for beta chain variable domain of TCR clone 262003 (TRBV28, TRBJ1-3)
CARSMGWASGNTIYF

SEQ ID NO: 524007 - protein, 14 aa, Homo sapiens
  CDR3 for alpha chain variable domain of TCR clone 262004 (TRAV12-3, TRAJ58)
CAMSTETSGSRLTF

SEQ ID NO: 524008 - protein, 17 aa, Homo sapiens
  CDR3 for beta chain variable domain of TCR clone 262004 (TRBV4-1, TRBJ1-3)
CASSPQRGIRFGNTIYF

SEQ ID NO: 524009 - protein, 12 aa, Homo sapiens
  CDR3 for alpha chain variable domain of TCR clone 262005 (TRAV27, TRAJ9)
CAGESGGFKTIF

SEQ ID NO: 524010 - protein, 18 aa, Homo sapiens
  CDR3 for beta chain variable domain of TCR clone 262005 (TRBV10-2, TRBJ2-2)
CISAPAVHRQTDAGELFF

SEQ ID NO: 524011 - protein, 15 aa, Homo sapiens
  CDR3 for alpha chain variable domain of TCR clone 262006 (TRAV4, TRAJ32)
CLVGDDGGATNKLIF

SEQ ID NO: 524012 - protein, 14 aa, Homo sapiens
  CDR3 for beta chain variable domain of TCR clone 262006 (TRBV7-2, TRBJ2-5)
CASSPRGSSETQYF

SEQ ID NO: 524013 - protein, 14 aa, Homo sapiens
  CDR3 for alpha chain variable domain of TCR clone 262007 (TRAV1-2, TRAJ16)
CAVNRFSDGQKLLF

SEQ ID NO: 524014 - protein, 15 aa, Homo sapiens
  CDR3 for beta chain variable domain of TCR clone 262007 (TRBV20-1, TRBJ2-7)
CSARDPTEVGHEQYF

SEQ ID NO: 524015 - protein, 13 aa, Homo sapiens
  CDR3 for alpha chain variable domain of TCR clone 262008 (TRAV30, TRAJ24)
CGTVTDSWGKLQF

SEQ ID NO: 524016 - protein, 14 aa, Homo sapiens
  CDR3 for beta chain variable domain of TCR clone 262008 (TRBV6-3, TRBJ2-2)
CASTYKPDTGELFF

SEQ ID NO: 524017 - protein, 18 aa, Homo sapiens
  CDR3 for alpha chain variable domain of TCR clone 262009 (TRAV26-1, TRAJ22)
CIVRVALISSGSARQLTF

SEQ ID NO: 524018 - protein, 16 aa, Homo sapiens
  CDR3 for beta chain variable domain of TCR clone 262009 (TRBV5-4, TRBJ2-3)
CASQQPGAGGADTQYF

SEQ ID NO: 524019 - protein, 18 aa, Homo sapiens
  CDR3 for alpha chain variable domain of TCR clone 262010 (TRAV26-1, TRAJ23)
CIVRVGLEVWNQGGKLIF

SEQ ID NO: 524020 - protein, 16 aa, Homo sapiens
  CDR3 for beta chain variable domain of TCR clone 262010 (TRBV12-3, TRBJ2-5)
CASSFFVRGRHETQYF

SEQ ID NO: 524021 - protein, 11 aa, Homo sapiens
  CDR3 for alpha chain variable domain of TCR clone 262011 (TRAV3, TRAJ40)
CAVRDRRNLQI

SEQ ID NO: 524022 - protein, 15 aa, Homo sapiens
  CDR3 for beta chain variable domain of TCR clone 262011 (TRBV11-1, TRBJ1-3)
CASTDPRAFGNTIYF

SEQ ID NO: 524023 - protein, 14 aa, Homo sapiens
  CDR3 for alpha chain variable domain of TCR clone 262012 (TRAV12-3, TRAJ12)
CAMSRMDSSNKLIF

SEQ ID NO: 524024 - protein, 14 aa, Homo sapiens
  CDR3 for beta chain variable domain of TCR clone 262012 (TRBV20-1, TRBJ1-4)
CSARSGQSNEKLFF

SEQ ID NO: 524025 - protein, 14 aa, Homo sapiens
  CDR3 for alpha chain variable domain of TCR clone 262013 (TRAV12-2, TRAJ24)
CAGTPADSWGKLQF

SEQ ID NO: 524026 - protein, 16 aa, Homo sapiens
  CDR3 for beta chain variable domain of TCR clone 262013 (TRBV6-4, TRBJ2-3)
APSEGGRAWGTDTQYF

SEQ ID NO: 524027 - protein, 14 aa, Homo sapiens
  CDR3 for alpha chain variable domain of TCR clone 262014 (TRAV13-1, TRAJ22)
CAASYSGSARQLTF

SEQ ID NO: 524028 - protein, 15 aa, Homo sapiens
  CDR3 for beta chain variable domain of TCR clone 262014 (TRBV20-1, TRBJ2-7)
CSARDRVSGMDEQYF

SEQ ID NO: 524029 - protein, 14 aa, Homo sapiens
  CDR3 for alpha chain variable domain of TCR clone 262015 (TRAV23/DV6, TRAJ40)
CAASLTSGTYKNLF

SEQ ID NO: 524030 - protein, 14 aa, Homo sapiens
  CDR3 for beta chain variable domain of TCR clone 262015 (TRBV5-1, TRBJ2-3)
CASSRGQGGGTQYF

SEQ ID NO: 524031 - protein, 14 aa, Homo sapiens
  CDR3 for alpha chain variable domain of TCR clone 262016 (TRAV1-2, TRAJ8)
CAVREDTGFQKLVF

SEQ ID NO: 524032 - protein, 16 aa, Homo sapiens
  CDR3 for beta chain variable domain of TCR clone 262016 (TRBV24-1, TRBJ2-2)
CATSDSSPGLGGELFF

SEQ ID NO: 524033 - protein, 13 aa, Homo sapiens
  CDR3 for alpha chain variable domain of TCR clone 262017 (TRAV3, TRAJ15)
CAVRDQAGTALIF

SEQ ID NO: 524034 - protein, 15 aa, Homo sapiens
  CDR3 for beta chain variable domain of TCR clone 262017 (TRBV11-1, TRBJ2-7)
CASSLNYWASYEQYF

SEQ ID NO: 524035 - protein, 12 aa, Homo sapiens
  CDR3 for alpha chain variable domain of TCR clone 262018 (TRAV3, TRAJ20)
CAVRDGDYKLSF

SEQ ID NO: 524036 - protein, 17 aa, Homo sapiens
  CDR3 for beta chain variable domain of TCR clone 262018 (TRBV4-1, TRBJ2-7)
CASSRDPLGVRGGEQYF

SEQ ID NO: 524037 - protein, 14 aa, Homo sapiens
  CDR3 for alpha chain variable domain of TCR clone 262019 (TRAV12-3, TRAJ10)
SHLPPTGGGNKLTF

SEQ ID NO: 524038 - protein, 16 aa, Homo sapiens
  CDR3 for beta chain variable domain of TCR clone 262019 (TRBV20-1, TRBJ1-2)
CSASMGQGVANYGYTF

SEQ ID NO: 524039 - protein, 12 aa, Homo sapiens
  CDR3 for alpha chain variable domain of TCR clone 262020 (TRAV3, TRAJ20)
CAVREPDYKLSF

SEQ ID NO: 524040 - protein, 15 aa, Homo sapiens
  CDR3 for beta chain variable domain of TCR clone 262020 (TRBV19, TRBJ2-7)
CASSPAGSGEAVRYF

SEQ ID NO: 524041 - protein, 11 aa, Homo sapiens
  CDR3 for alpha chain variable domain of TCR clone 262021 (TRAV3, TRAJ13)
CAVTSYQKVTF

SEQ ID NO: 524042 - protein, 12 aa, Homo sapiens
  CDR3 for beta chain variable domain of TCR clone 262021 (TRBV11-2, TRBJ2-4)
CASSSASGSEYF

SEQ ID NO: 524043 - protein, 13 aa, Homo sapiens
  CDR3 for alpha chain variable domain of TCR clone 262022 (TRAV21, TRAJ22)
CAVKSGSARQLTF

SEQ ID NO: 524044 - protein, 13 aa, Homo sapiens
  CDR3 for beta chain variable domain of TCR clone 262022 (TRBV7-2, TRBJ2-2)
CASSSVRAGELFF

SEQ ID NO: 524045 - protein, 15 aa, Homo sapiens
  CDR3 for alpha chain variable domain of TCR clone 262023 (TRAV21, TRAJ53)
CATLNSGGSNYKLTF

SEQ ID NO: 524046 - protein, 16 aa, Homo sapiens
  CDR3 for beta chain variable domain of TCR clone 262023 (TRBV20-1, TRBJ1-2)
GSASMGQGVANYGYTF

SEQ ID NO: 524047 - protein, 14 aa, Homo sapiens
  CDR3 for alpha chain variable domain of TCR clone 262024 (TRAV27, TRAJ23)
CAGAFDNQVGKLIF

SEQ ID NO: 524048 - protein, 15 aa, Homo sapiens
  CDR3 for beta chain variable domain of TCR clone 262024 (TRBV7-3, TRBJ2-7)
CASSLTGQGKYEQYF

SEQ ID NO: 524049 - protein, 16 aa, Homo sapiens
  CDR3 for alpha chain variable domain of TCR clone 262025 (TRAV3, TRAJ37)
CAVRVKGSGNTGKLNF

SEQ ID NO: 524050 - protein, 13 aa, Homo sapiens
  CDR3 for beta chain variable domain of TCR clone 262025 (TRBV10-3, TRBJ1-2)
CAISERDSYGYTF

SEQ ID NO: 524051 - protein, 17 aa, Homo sapiens
  CDR3 for alpha chain variable domain of TCR clone 262026 (TRAV26-2, TRAJ42)
CILRDVGYGGSQGNLIF

SEQ ID NO: 524052 - protein, 16 aa, Homo sapiens
  CDR3 for beta chain variable domain of TCR clone 262026 (TRBV4-2, TRBJ1-1)
CASSQAGFGMNTEAFF

SEQ ID NO: 524053 - protein, 17 aa, Homo sapiens
  CDR3 for alpha chain variable domain of TCR clone 262027 (TRAV13-1, TRAJ52)
CAAGRNAGGTSYGKLTF

SEQ ID NO: 524054 - protein, 13 aa, Homo sapiens
  CDR3 for beta chain variable domain of TCR clone 262027 (TRBV12-5, TRBJ2-3)
CASQNRGTDTQYF

SEQ ID NO: 524055 - protein, 13 aa, Homo sapiens
  CDR3 for alpha chain variable domain of TCR clone 262028 (TRAV35, TRAJ36)
GAGPRIGANNLFF

SEQ ID NO: 524056 - protein, 15 aa, Homo sapiens
  CDR3 for beta chain variable domain of TCR clone 262028 (TRBV28, TRBJ2-5)
CASSPPWSYQETQYF

SEQ ID NO: 524057 - protein, 14 aa, Homo sapiens
  CDR3 for alpha chain variable domain of TCR clone 262029 (TRAV25, TRAJ22)
CAVRSSGSARRLTF

SEQ ID NO: 524058 - protein, 16 aa, Homo sapiens
  CDR3 for beta chain variable domain of TCR clone 262029 (TRBV4-2, TRBJ1-1)
CASSPSPGRAAPEAFF

SEQ ID NO: 524059 - protein, 12 aa, Homo sapiens
  CDR3 for alpha chain variable domain of TCR clone 262030 (TRAV13-2, TRAJ23)
CAERHRGGKLIF

SEQ ID NO: 524060 - protein, 13 aa, Homo sapiens
  CDR3 for beta chain variable domain of TCR clone 262030 (TRBV7-9, TRBJ1-2)
CASSLKQNYSYAF

SEQ ID NO: 524061 - protein, 14 aa, Homo sapiens
  CDR3 for alpha chain variable domain of TCR clone 262031 (TRAV1-2, TRAJ8)
CAVRDDTGFQKLVF

SEQ ID NO: 524062 - protein, 16 aa, Homo sapiens
  CDR3 for beta chain variable domain of TCR clone 262031 (TRBV19, TRBJ2-3)
CASGTGPNDGTDTQYF

SEQ ID NO: 524063 - protein, 13 aa, Homo sapiens
  CDR3 for alpha chain variable domain of TCR clone 262032 (TRAV8-1, TRAJ28)
CAVSGAGSYQLTF

SEQ ID NO: 524064 - protein, 14 aa, Homo sapiens
  CDR3 for beta chain variable domain of TCR clone 262032 (TRBV7-2, TRBJ2-2)
CASRGQGAAGELFL

SEQ ID NO: 524065 - protein, 16 aa, Homo sapiens
  CDR3 for alpha chain variable domain of TCR clone 262033 (TRAV13-1, TRAJ37)
CAASSLGSSNTGKLIF

SEQ ID NO: 524066 - protein, 14 aa, Homo sapiens
  CDR3 for beta chain variable domain of TCR clone 262033 (TRBV2, TRBJ2-1)
CASSEALIYNEQFF

SEQ ID NO: 524067 - protein, 16 aa, Homo sapiens
  CDR3 for alpha chain variable domain of TCR clone 262034 (TRAV12-2, TRAJ18)
CAVTTDRGSTLGRLYF

SEQ ID NO: 524068 - protein, 14 aa, Homo sapiens
  CDR3 for beta chain variable domain of TCR clone 262034 (TRBV5-4, TRBJ1-1)
CASSLDSRRDEAFF

SEQ ID NO: 524069 - protein, 15 aa, Homo sapiens
  CDR3 for alpha chain variable domain of TCR clone 262035 (TRAV17, TRAJ22)
CATVAPSGSARQLTF

SEQ ID NO: 524070 - protein, 15 aa, Homo sapiens
  CDR3 for beta chain variable domain of TCR clone 262035 (TRBV27, TRBJ1-6)
CASSFDRGLGSPLLF

SEQ ID NO: 524071 - protein, 12 aa, Homo sapiens
  CDR3 for alpha chain variable domain of TCR clone 262036 (TRAV17, TRAJ20)
CATDGDDYKLSF

SEQ ID NO: 524072 - protein, 13 aa, Homo sapiens
  CDR3 for beta chain variable domain of TCR clone 262036 (TRBV29-1, TRBJ1-3)
CSAGTGRGNTIYF

SEQ ID NO: 524073 - protein, 14 aa, Homo sapiens
  CDR3 for alpha chain variable domain of TCR clone 262037 (TRAV13-1, TRAJ40)
CAASMPSGTYKYIL

SEQ ID NO: 524074 - protein, 15 aa, Homo sapiens
  CDR3 for beta chain variable domain of TCR clone 262037 (TRBV7-3, TRBJ2-1)
CASSPTGGGEVEQFF

SEQ ID NO: 524075 - protein, 13 aa, Homo sapiens
  CDR3 for alpha chain variable domain of TCR clone 262038 (TRAV3, TRAJ20)
CALRDTPRYKLSF

SEQ ID NO: 524076 - protein, 14 aa, Homo sapiens
  CDR3 for beta chain variable domain of TCR clone 262038 (TRBV11-1, TRBJ2-7)
CASTFAVPSYEQYF

SEQ ID NO: 524077 - protein, 14 aa, Homo sapiens
  CDR3 for alpha chain variable domain of TCR clone 262039 (TRAV12-2, TRAJ40)
CAVKIPSGTYKYIF

SEQ ID NO: 524078 - protein, 15 aa, Homo sapiens
  CDR3 for beta chain variable domain of TCR clone 262039 (TRBV12-4, TRBJ1-2)
CASRLGVAGNYGYTF

SEQ ID NO: 524079 - protein, 11 aa, Homo sapiens
  CDR3 for alpha chain variable domain of TCR clone 262040 (TRAV35, TRAJ30)
CAGLRDDKIIF

SEQ ID NO: 524080 - protein, 16 aa, Homo sapiens
  CDR3 for beta chain variable domain of TCR clone 262040 (TRBV24-1, TRBJ2-3)
CATSDPGTGATDTQYF

SEQ ID NO: 524081 - protein, 17 aa, Homo sapiens
  CDR3 for alpha chain variable domain of TCR clone 262041 (TRAV12-2, TRAJ45)
CAVNLWGSGGGADGLTF

SEQ ID NO: 524082 - protein, 18 aa, Homo sapiens
  CDR3 for beta chain variable domain of TCR clone 262041 (TRBV20-1, TRBJ2-6)
CSAETTPTHGSGANDLTF

SEQ ID NO: 524083 - protein, 18 aa, Homo sapiens
  CDR3 for alpha chain variable domain of TCR clone 262042 (TRAV8-4, TRAJ52)
CAVTRANAGGTSYGKLTF

SEQ ID NO: 524084 - protein, 14 aa, Homo sapiens
  CDR3 for beta chain variable domain of TCR clone 262042 (TRBV7-9, TRBJ2-3)
CASSLEQGTNTQYF

SEQ ID NO: 524085 - protein, 18 aa, Homo sapiens
  CDR3 for alpha chain variable domain of TCR clone 262043 (TRAV13-1, TRAJ52)
WAAKNPNAGGTSYGKLTF

SEQ ID NO: 524086 - protein, 11 aa, Homo sapiens
  CDR3 for beta chain variable domain of TCR clone 262043 (TRBV29-1, TRBJ2-5)
CSEDRTGTQYF

SEQ ID NO: 524087 - protein, 14 aa, Homo sapiens
  CDR3 for alpha chain variable domain of TCR clone 262044 (TRAV12-2, TRAJ17)
CAVLFKAAGNKLTF

SEQ ID NO: 524088 - protein, 18 aa, Homo sapiens
  CDR3 for beta chain variable domain of TCR clone 262044 (TRBV7-9, TRBJ1-2)
CASSSIAGTSQANYGYTF

SEQ ID NO: 524089 - protein, 16 aa, Homo sapiens
  CDR3 for alpha chain variable domain of TCR clone 262045 (TRAV12-2, TRAJ32)
CAVNLGQGGATNKLIF

SEQ ID NO: 524090 - protein, 15 aa, Homo sapiens
  CDR3 for beta chain variable domain of TCR clone 262045 (TRBV20-1, TRBJ2-7)
CSAKGPLAGGREQYF

SEQ ID NO: 524091 - protein, 13 aa, Homo sapiens
  CDR3 for alpha chain variable domain of TCR clone 262046 (TRAV26-1, TRAJ48)
SIVRVVGDEKLTF

SEQ ID NO: 524092 - protein, 17 aa, Homo sapiens
  CDR3 for beta chain variable domain of TCR clone 262046 (TRBV7-3, TRBJ2-2)
CASSLSGTSGGTGELFF

SEQ ID NO: 524093 - protein, 13 aa, Homo sapiens
  CDR3 for alpha chain variable domain of TCR clone 262047 (TRAV21, TRAJ20)
CAVGLRVDYKLSF

SEQ ID NO: 524094 - protein, 14 aa, Homo sapiens
  CDR3 for beta chain variable domain of TCR clone 262047 (TRBV20-1, TRBJ1-4)
CSARSGQSNEKLFF

SEQ ID NO: 524095 - protein, 15 aa, Homo sapiens
  CDR3 for alpha chain variable domain of TCR clone 262048 (TRAV29/DV5, TRAJ53)
CAARYSGGSNYKLTF

SEQ ID NO: 524096 - protein, 16 aa, Homo sapiens
  CDR3 for beta chain variable domain of TCR clone 262048 (TRBV7-7, TRBJ2-1)
CASSLASGTSYNEQFF

SEQ ID NO: 524097 - protein, 12 aa, Homo sapiens
  CDR3 for alpha chain variable domain of TCR clone 262049 (TRAV1-2, TRAJ33)
CAALDSNYQLIW

SEQ ID NO: 524098 - protein, 17 aa, Homo sapiens
  CDR3 for beta chain variable domain of TCR clone 262049 (TRBV4-1, TRBJ2-7)
CASSRDPLGVRGGEQYF

SEQ ID NO: 524099 - protein, 20 aa, Homo sapiens
  CDR3 for alpha chain variable domain of TCR clone 262050 (TRAV17, TRAJ17)
CFLLLCYGRVNNPQGNKLTF

SEQ ID NO: 524100 - protein, 12 aa, Homo sapiens
  CDR3 for beta chain variable domain of TCR clone 262050 (TRBV5-4, TRBJ2-5)
CASSSIRETQYF

SEQ ID NO: 524101 - protein, 13 aa, Homo sapiens
  CDR3 for alpha chain variable domain of TCR clone 262051 (TRAV26-1, TRAJ34)
CIVRHWITDKLIF

SEQ ID NO: 524102 - protein, 13 aa, Homo sapiens
  CDR3 for beta chain variable domain of TCR clone 262051 (TRBV5-1, TRBJ2-1)
CASSLGSYNEQFF

SEQ ID NO: 524103 - protein, 13 aa, Homo sapiens
  CDR3 for alpha chain variable domain of TCR clone 262052 (TRAV12-1, TRAJ26)
CVVRRNYGQNFVC

SEQ ID NO: 524104 - protein, 14 aa, Homo sapiens
  CDR3 for beta chain variable domain of TCR clone 262052 (TRBV6-3, TRBJ1-1)
CASRYTGESTEAFF

SEQ ID NO: 524105 - protein, 12 aa, Homo sapiens
  CDR3 for alpha chain variable domain of TCR clone 262053 (TRAV1-2, TRAJ29)
CAVRNLNTPLVF

SEQ ID NO: 524106 - protein, 18 aa, Homo sapiens
  CDR3 for beta chain variable domain of TCR clone 262053 (TRBV15, TRBJ2-1)
CVPPPGCSGGPTTNEQLF

SEQ ID NO: 524107 - protein, 14 aa, Homo sapiens
  CDR3 for alpha chain variable domain of TCR clone 262054 (TRAV13-1, TRAJ35)
CAASKGGFGNVLHC

SEQ ID NO: 524108 - protein, 16 aa, Homo sapiens
  CDR3 for beta chain variable domain of TCR clone 262054 (TRBV4-3, TRBJ2-2)
CASSHLQGSGTGELFF

SEQ ID NO: 524109 - protein, 16 aa, Homo sapiens
  CDR3 for alpha chain variable domain of TCR clone 262055 (TRAV8-3, TRAJ13)
CAVGAYPSGGYQKVTF

SEQ ID NO: 524110 - protein, 15 aa, Homo sapiens
  CDR3 for beta chain variable domain of TCR clone 262055 (TRBV19, TRBJ1-5)
CASIIVWAENQPQHF

SEQ ID NO: 524111 - protein, 14 aa, Homo sapiens
  CDR3 for alpha chain variable domain of TCR clone 262056 (TRAV41, TRAJ48)
CAVISNFGNEKLTF

SEQ ID NO: 524112 - protein, 15 aa, Homo sapiens
  CDR3 for beta chain variable domain of TCR clone 262056 (TRBV11-3, TRBJ2-2)
CASSYVSTGTGELFF

SEQ ID NO: 524113 - protein, 14 aa, Homo sapiens
  CDR3 for alpha chain variable domain of TCR clone 262057 (TRAV26-1, TRAJ38)
CIADNAGNNRKLIL

SEQ ID NO: 524114 - protein, 15 aa, Homo sapiens
  CDR3 for beta chain variable domain of TCR clone 262057 (TRBV20-1, TRBJ2-7)
CSARDRVSGVDEQYF

SEQ ID NO: 524115 - protein, 15 aa, Homo sapiens
  CDR3 for alpha chain variable domain of TCR clone 262058 (TRAV13-2, TRAJ32)
CREYELCGATNKLIF

SEQ ID NO: 524116 - protein, 14 aa, Homo sapiens
  CDR3 for beta chain variable domain of TCR clone 262058 (TRBV15, TRBJ2-5)
CATSSTGYQETQYF

SEQ ID NO: 524117 - protein, 16 aa, Homo sapiens
  CDR3 for alpha chain variable domain of TCR clone 262059 (TRAV30, TRAJ24)
CSTEIVDADSWGKSQF

SEQ ID NO: 524118 - protein, 15 aa, Homo sapiens
  CDR3 for beta chain variable domain of TCR clone 262059 (TRBV7-9, TRBJ1-4)
CASSARTGGNEKLFF

SEQ ID NO: 524119 - protein, 14 aa, Homo sapiens
  CDR3 for alpha chain variable domain of TCR clone 262060 (TRAV12-3, TRAJ58)
CAMSTETSGSRLTF

SEQ ID NO: 524120 - protein, 13 aa, Homo sapiens
  CDR3 for beta chain variable domain of TCR clone 262060 (TRBV19, TRBJ2-7)
CARRKAGGSEQYF

SEQ ID NO: 524121 - protein, 17 aa, Homo sapiens
  CDR3 for alpha chain variable domain of TCR clone 262061 (TRAV3, TRAJ42)
CAVRDRDYGGSQGNLIF

SEQ ID NO: 524122 - protein, 15 aa, Homo sapiens
  CDR3 for beta chain variable domain of TCR clone 262061 (TRBV19, TRBJ2-1)
CASSSPGVPLDEQFF

SEQ ID NO: 524123 - protein, 12 aa, Homo sapiens
  CDR3 for alpha chain variable domain of TCR clone 262062 (TRAV35, TRAJ49)
CAGWNTGNQFYF

SEQ ID NO: 524124 - protein, 15 aa, Homo sapiens
  CDR3 for beta chain variable domain of TCR clone 262062 (TRBV7-2, TRBJ2-3)
CASSLAGAFIDTQYF

SEQ ID NO: 524125 - protein, 13 aa, Homo sapiens
  CDR3 for alpha chain variable domain of TCR clone 262063 (TRAV8-1, TRAJ23)
CAVTGGQGGTLIF

SEQ ID NO: 524126 - protein, 15 aa, Homo sapiens
  CDR3 for beta chain variable domain of TCR clone 262063 (TRBV20-1, TRBJ2-2)
CSAIPGHSNTGELFF

SEQ ID NO: 524127 - protein, 15 aa, Homo sapiens
  CDR3 for alpha chain variable domain of TCR clone 262064 (TRAV8-3, TRAJ11)
CAVGLLNSGYSHLTF

SEQ ID NO: 524128 - protein, 23 aa, Homo sapiens
  CDR3 for beta chain variable domain of TCR clone 262064 (TRBV7-9, TRBJ1-2)
EAQLEKSRLLSDRFSSGEDGYTF

SEQ ID NO: 524129 - protein, 13 aa, Homo sapiens
  CDR3 for alpha chain variable domain of TCR clone 262065 (TRAV3, TRAJ31)
CAVREGNNARLMF

SEQ ID NO: 524130 - protein, 11 aa, Homo sapiens
  CDR3 for beta chain variable domain of TCR clone 262065 (TRBV25-1, TRBJ2-7)
CASSTSYEQYF

SEQ ID NO: 524131 - protein, 16 aa, Homo sapiens
  CDR3 for alpha chain variable domain of TCR clone 262066 (TRAV12-1, TRAJ15)
CVVSPAGQPGRNCPDL

SEQ ID NO: 524132 - protein, 13 aa, Homo sapiens
  CDR3 for beta chain variable domain of TCR clone 262066 (TRBV7-2, TRBJ2-4)
CASSREHANIQYF

SEQ ID NO: 524133 - protein, 13 aa, Homo sapiens
  CDR3 for alpha chain variable domain of TCR clone 262067 (TRAV8-3, TRAJ28)
CAVGAVGSYQLTF

SEQ ID NO: 524134 - protein, 15 aa, Homo sapiens
  CDR3 for beta chain variable domain of TCR clone 262067 (TRBV2, TRBJ2-3)
CASSDFEKATDTQYF

SEQ ID NO: 524135 - protein, 12 aa, Homo sapiens
  CDR3 for alpha chain variable domain of TCR clone 262068 (TRAV13-1, TRAJ49)
CAASTMGNQFYF

SEQ ID NO: 524136 - protein, 13 aa, Homo sapiens
  CDR3 for beta chain variable domain of TCR clone 262068 (TRBV20-1, TRBJ2-2)
CSASAAGNGELFF

SEQ ID NO: 524137 - protein, 14 aa, Homo sapiens
  CDR3 for alpha chain variable domain of TCR clone 262069 (TRAV12-3, TRAJ57)
CEMSAGGGSEKLVF

SEQ ID NO: 524138 - protein, 14 aa, Homo sapiens
  CDR3 for beta chain variable domain of TCR clone 262069 (TRBV7-8, TRBJ2-7)
CASSPRDRVYEQYF

SEQ ID NO: 524139 - protein, 15 aa, Homo sapiens
  CDR3 for alpha chain variable domain of TCR clone 262070 (TRAV3, TRAJ5)
CAVRDLDTGRRALTF

SEQ ID NO: 524140 - protein, 14 aa, Homo sapiens
  CDR3 for beta chain variable domain of TCR clone 262070 (TRBV20-1, TRBJ2-3)
CSARGGTSTDTQYF

SEQ ID NO: 524141 - protein, 12 aa, Homo sapiens
  CDR3 for alpha chain variable domain of TCR clone 262071 (TRAV12-1, TRAJ23)
CVVNNQGGKLIF

SEQ ID NO: 524142 - protein, 16 aa, Homo sapiens
  CDR3 for beta chain variable domain of TCR clone 262071 (TRBV7-9, TRBJ1-2)
CASSLGFSSGEDGYTF

SEQ ID NO: 524143 - protein, 18 aa, Homo sapiens
  CDR3 for alpha chain variable domain of TCR clone 262072 (TRAV21, TRAJ52)
CAVRPSPAGGTSYGTLTF

SEQ ID NO: 524144 - protein, 16 aa, Homo sapiens
  CDR3 for beta chain variable domain of TCR clone 262072 (TRBV13, TRBJ2-2)
CASSPRTGEHTGELFF

SEQ ID NO: 524145 - protein, 10 aa, Homo sapiens
  CDR3 for alpha chain variable domain of TCR clone 262073 (TRAV25, TRAJ20)
CAVNDYKLSF

SEQ ID NO: 524146 - protein, 18 aa, Homo sapiens
  CDR3 for beta chain variable domain of TCR clone 262073 (TRBV20-1, TRBJ2-6)
CSAETTPTHGSGANVLIF

SEQ ID NO: 524147 - protein, 15 aa, Homo sapiens
  CDR3 for alpha chain variable domain of TCR clone 262074 (TRAV34, TRAJ38)
CGADFTPGNNRKLIW

SEQ ID NO: 524148 - protein, 13 aa, Homo sapiens
  CDR3 for beta chain variable domain of TCR clone 262074 (TRBV24-1, TRBJ2-2)
CATSDCSTGELFF

SEQ ID NO: 524149 - protein, 16 aa, Homo sapiens
  CDR3 for alpha chain variable domain of TCR clone 262075 (TRAV12-3, TRAJ53)
CAVSPGSGGSNYKLTF

SEQ ID NO: 524150 - protein, 11 aa, Homo sapiens
  CDR3 for beta chain variable domain of TCR clone 262075 (TRBV29-1, TRBJ2-5)
CSEDRTETQYF

SEQ ID NO: 524151 - protein, 12 aa, Homo sapiens
  CDR3 for alpha chain variable domain of TCR clone 262076 (TRAV2, TRAJ10)
CASTGGGNKLTF

SEQ ID NO: 524152 - protein, 13 aa, Homo sapiens
  CDR3 for beta chain variable domain of TCR clone 262076 (TRBV19, TRBJ1-5)
CASSMRGYQRQHF

SEQ ID NO: 524153 - protein, 14 aa, Homo sapiens
  CDR3 for alpha chain variable domain of TCR clone 262077 (TRAV35, TRAJ33)
CAGSSQDTNYQLIW

SEQ ID NO: 524154 - protein, 14 aa, Homo sapiens
  CDR3 for beta chain variable domain of TCR clone 262077 (TRBV28, TRBJ2-1)
CASSLNGRNNEQFF

SEQ ID NO: 524155 - protein, 13 aa, Homo sapiens
  CDR3 for alpha chain variable domain of TCR clone 262078 (TRAV38-1, TRAJ42)
CARWGGSQGNLIF

SEQ ID NO: 524156 - protein, 14 aa, Homo sapiens
  CDR3 for beta chain variable domain of TCR clone 262078 (TRBV6-1, TRBJ1-3)
CASVQGGGGKTIYF

SEQ ID NO: 524157 - protein, 11 aa, Homo sapiens
  CDR3 for alpha chain variable domain of TCR clone 262079 (TRAV1-1, TRAJ23)
CAVRQGGKLIF

SEQ ID NO: 524158 - protein, 16 aa, Homo sapiens
  CDR3 for beta chain variable domain of TCR clone 262079 (TRBV7-6, TRBJ2-5)
CASSETSGRAVETQYF

SEQ ID NO: 524159 - protein, 16 aa, Homo sapiens
  CDR3 for alpha chain variable domain of TCR clone 262080 (TRAV8-3, TRAJ52)
FAVQPAGGTSYGKLTF

SEQ ID NO: 524160 - protein, 15 aa, Homo sapiens
  CDR3 for beta chain variable domain of TCR clone 262080 (TRBV11-2, TRBJ2-7)
CASSLAGGVATEQYF

SEQ ID NO: 524161 - protein, 17 aa, Homo sapiens
  CDR3 for alpha chain variable domain of TCR clone 262081 (TRAV3, TRAJ38)
CAVRDCLNAGNNRMLIW

SEQ ID NO: 524162 - protein, 12 aa, Homo sapiens
  CDR3 for beta chain variable domain of TCR clone 262081 (TRBV11-2, TRBJ2-2)
CASSLGGGELFF

SEQ ID NO: 524163 - protein, 12 aa, Homo sapiens
  CDR3 for alpha chain variable domain of TCR clone 262082 (TRAV3, TRAJ20)
CAVRDHDYKLSF

SEQ ID NO: 524164 - protein, 15 aa, Homo sapiens
  CDR3 for beta chain variable domain of TCR clone 262082 (TRBV9, TRBJ1-6)
CASSVAGTGDSALHF

SEQ ID NO: 524165 - protein, 14 aa, Homo sapiens
  CDR3 for alpha chain variable domain of TCR clone 262083 (TRAV13-2, TRAJ22)
CADGTLGSARQLTF

SEQ ID NO: 524166 - protein, 16 aa, Homo sapiens
  CDR3 for beta chain variable domain of TCR clone 262083 (TRBV7-3, TRBJ2-2)
CASSLKRGTLSGELFF

SEQ ID NO: 524167 - protein, 16 aa, Homo sapiens
  CDR3 for alpha chain variable domain of TCR clone 262084 (TRAV3, TRAJ21)
CAVRDIERGNFNKSYF

SEQ ID NO: 524168 - protein, 13 aa, Homo sapiens
  CDR3 for beta chain variable domain of TCR clone 262084 (TRBV4-2, TRBJ1-1)
CASSQAGNTEAFF

SEQ ID NO: 524169 - protein, 15 aa, Homo sapiens
  CDR3 for alpha chain variable domain of TCR clone 262085 (TRAV25, TRAJ53)
CPTSNSGGSNYKLSF

SEQ ID NO: 524170 - protein, 14 aa, Homo sapiens
  CDR3 for beta chain variable domain of TCR clone 262085 (TRBV11-2, TRBJ2-3)
CASSRLARTDTQYF

SEQ ID NO: 524171 - protein, 12 aa, Homo sapiens
  CDR3 for alpha chain variable domain of TCR clone 262086 (TRAV12-1, TRAJ23)
CVVNNQGGKLIF

SEQ ID NO: 524172 - protein, 16 aa, Homo sapiens
  CDR3 for beta chain variable domain of TCR clone 262086 (TRBV11-1, TRBJ2-7)
CVSSAQTGTLSYEQYF

SEQ ID NO: 524173 - protein, 11 aa, Homo sapiens
  CDR3 for alpha chain variable domain of TCR clone 262087 (TRAV3, TRAJ21)
CAVGNFNKFYF

SEQ ID NO: 524174 - protein, 15 aa, Homo sapiens
  CDR3 for beta chain variable domain of TCR clone 262087 (TRBV5-1, TRBJ2-1)
CASSLAANSYNEQFF

SEQ ID NO: 524175 - protein, 12 aa, Homo sapiens
  CDR3 for alpha chain variable domain of TCR clone 262088 (TRAV1-2, TRAJ26)
CAVNNYGQNFVF

SEQ ID NO: 524176 - protein, 14 aa, Homo sapiens
  CDR3 for beta chain variable domain of TCR clone 262088 (TRBV7-2, TRBJ1-1)
CASSFLTGTTEAFF

SEQ ID NO: 524177 - protein, 15 aa, Homo sapiens
  CDR3 for alpha chain variable domain of TCR clone 262089 (TRAV1-2, TRAJ15)
CAVDVMGSAGTALIF

SEQ ID NO: 524178 - protein, 14 aa, Homo sapiens
  CDR3 for beta chain variable domain of TCR clone 262089 (TRBV9, TRBJ2-7)
CASSVGVGSYEQYF

SEQ ID NO: 524179 - protein, 16 aa, Homo sapiens
  CDR3 for alpha chain variable domain of TCR clone 262090 (TRAV26-1, )
CIDIQNPDPAVYQLRD

SEQ ID NO: 524180 - protein, 13 aa, Homo sapiens
  CDR3 for beta chain variable domain of TCR clone 262090 (TRBV24-1, TRBJ1-4)
CATNNGRSEKLFF

SEQ ID NO: 524181 - protein, 13 aa, Homo sapiens
  CDR3 for alpha chain variable domain of TCR clone 262091 (TRAV22, TRAJ29)
CAVGGSGNTPLVF

SEQ ID NO: 524182 - protein, 14 aa, Homo sapiens
  CDR3 for beta chain variable domain of TCR clone 262091 (TRBV7-2, TRBJ2-7)
CASRSQGAAYEQYF

SEQ ID NO: 524183 - protein, 13 aa, Homo sapiens
  CDR3 for alpha chain variable domain of TCR clone 262092 (TRAV12-3, TRAJ33)
CATSVNSNYQLIW

SEQ ID NO: 524184 - protein, 14 aa, Homo sapiens
  CDR3 for beta chain variable domain of TCR clone 262092 (TRBV6-1, TRBJ1-3)
CASVQGGGGNTIYF

SEQ ID NO: 524185 - protein, 14 aa, Homo sapiens
  CDR3 for alpha chain variable domain of TCR clone 262093 (TRAV12-1, TRAJ26)
CVVKGSNYGQNFVF

SEQ ID NO: 524186 - protein, 16 aa, Homo sapiens
  CDR3 for beta chain variable domain of TCR clone 262093 (TRBV12-5, TRBJ2-5)
CASGPRTSGHQETQYF

SEQ ID NO: 524187 - protein, 14 aa, Homo sapiens
  CDR3 for alpha chain variable domain of TCR clone 262094 (TRAV1-2, TRAJ16)
CAVNRFSDGPKLLF

SEQ ID NO: 524188 - protein, 14 aa, Homo sapiens
  CDR3 for beta chain variable domain of TCR clone 262094 (TRBV7-9, TRBJ2-1)
CASSSMVGFGEQFF

SEQ ID NO: 524189 - protein, 16 aa, Homo sapiens
  CDR3 for alpha chain variable domain of TCR clone 262095 (TRAV2, TRAJ4)
CAVDARFSGGYNKLIF

SEQ ID NO: 524190 - protein, 13 aa, Homo sapiens
  CDR3 for beta chain variable domain of TCR clone 262095 (TRBV7-7, TRBJ2-5)
CASSRSGQETQYF

SEQ ID NO: 524191 - protein, 19 aa, Homo sapiens
  CDR3 for alpha chain variable domain of TCR clone 262096 (TRAV29/DV5, TRAJ49)
CSVLLCSKLTVDTGNQFYF

SEQ ID NO: 524192 - protein, 13 aa, Homo sapiens
  CDR3 for beta chain variable domain of TCR clone 262096 (TRBV11-2, TRBJ2-2)
CASSLQNTGELFF

SEQ ID NO: 524193 - protein, 14 aa, Homo sapiens
  CDR3 for alpha chain variable domain of TCR clone 262097 (TRAV1-1, TRAJ27)
CAVIYNTNAGKSTF

SEQ ID NO: 524194 - protein, 14 aa, Homo sapiens
  CDR3 for beta chain variable domain of TCR clone 262097 (TRBV10-2, TRBJ1-3)
CASRPPAAENTIYF

SEQ ID NO: 524195 - protein, 12 aa, Homo sapiens
  CDR3 for alpha chain variable domain of TCR clone 262098 (TRAV21, TRAJ33)
CAKMDSNSQLIW

SEQ ID NO: 524196 - protein, 14 aa, Homo sapiens
  CDR3 for beta chain variable domain of TCR clone 262098 (TRBV2, TRBJ2-7)
CASSLTPGGYEHYF

SEQ ID NO: 524197 - protein, 12 aa, Homo sapiens
  CDR3 for alpha chain variable domain of TCR clone 262099 (TRAV12-2, TRAJ10)
WGVTGGGNKLTF

SEQ ID NO: 524198 - protein, 15 aa, Homo sapiens
  CDR3 for beta chain variable domain of TCR clone 262099 (TRBV7-3, TRBJ2-2)
CASSETGQGTGELFF

SEQ ID NO: 524199 - protein, 17 aa, Homo sapiens
  CDR3 for alpha chain variable domain of TCR clone 262100 (TRAV19, TRAJ58)
CALRGLRVGTSGSRLTF

SEQ ID NO: 524200 - protein, 14 aa, Homo sapiens
  CDR3 for beta chain variable domain of TCR clone 262100 (TRBV25-1, TRBJ2-4)
CASPETKTFSTSAP

SEQ ID NO: 524201 - protein, 14 aa, Homo sapiens
  CDR3 for alpha chain variable domain of TCR clone 262101 (TRAV1-2, TRAJ16)
CAVIRFSDGQKLLF

SEQ ID NO: 524202 - protein, 13 aa, Homo sapiens
  CDR3 for beta chain variable domain of TCR clone 262101 (TRBV19, TRBJ2-1)
CQSDFRFSGEQFF

SEQ ID NO: 524203 - protein, 11 aa, Homo sapiens
  CDR3 for alpha chain variable domain of TCR clone 262102 (TRAV20, TRAJ40)
CAVGGTYKYIF

SEQ ID NO: 524204 - protein, 15 aa, Homo sapiens
  CDR3 for beta chain variable domain of TCR clone 262102 (TRBV10-3, TRBJ2-1)
CAISDVQDRAYEQFF

SEQ ID NO: 524205 - protein, 13 aa, Homo sapiens
  CDR3 for alpha chain variable domain of TCR clone 262103 (TRAV30, TRAJ24)
CGTVTDSWGKLQF

SEQ ID NO: 524206 - protein, 15 aa, Homo sapiens
  CDR3 for beta chain variable domain of TCR clone 262103 (TRBV19, TRBJ1-1)
CASTSGQIHNTEAFF

SEQ ID NO: 524207 - protein, 14 aa, Homo sapiens
  CDR3 for alpha chain variable domain of TCR clone 262104 (TRAV26-1, TRAJ6)
CIVSPVGVSYIPTF

SEQ ID NO: 524208 - protein, 16 aa, Homo sapiens
  CDR3 for beta chain variable domain of TCR clone 262104 (TRBV4-1, TRBJ2-5)
CASSSGLAGVLGTQYF

SEQ ID NO: 524209 - protein, 17 aa, Homo sapiens
  CDR3 for alpha chain variable domain of TCR clone 262105 (TRAV3, TRAJ6)
CAVRDGPRAGGSYIPTF

SEQ ID NO: 524210 - protein, 13 aa, Homo sapiens
  CDR3 for beta chain variable domain of TCR clone 262105 (TRBV11-2, TRBJ2-5)
CASSRGPSETQYF

SEQ ID NO: 524211 - protein, 12 aa, Homo sapiens
  CDR3 for alpha chain variable domain of TCR clone 262106 (TRAV26-1, TRAJ20)
CIVGSNDYKLSF

SEQ ID NO: 524212 - protein, 15 aa, Homo sapiens
  CDR3 for beta chain variable domain of TCR clone 262106 (TRBV5-1, TRBJ2-1)
CASSPPRAPYNEQFF

SEQ ID NO: 524213 - protein, 14 aa, Homo sapiens
  CDR3 for alpha chain variable domain of TCR clone 262107 (TRAV12-2, TRAJ53)
CAVKGGGSNYKLTF

SEQ ID NO: 524214 - protein, 14 aa, Homo sapiens
  CDR3 for beta chain variable domain of TCR clone 262107 (TRBV7-9, TRBJ2-2)
CASSLVQDTGELFF

SEQ ID NO: 524215 - protein, 15 aa, Homo sapiens
  CDR3 for alpha chain variable domain of TCR clone 262108 (TRAV3, TRAJ5)
CAVRDLDTCRRALTF

SEQ ID NO: 524216 - protein, 13 aa, Homo sapiens
  CDR3 for beta chain variable domain of TCR clone 262108 (TRBV9, TRBJ2-7)
CASSASDSYEQYF

SEQ ID NO: 524217 - protein, 11 aa, Homo sapiens
  CDR3 for alpha chain variable domain of TCR clone 262109 (TRAV1-2, TRAJ20)
CAVRFDYKLSF

SEQ ID NO: 524218 - protein, 14 aa, Homo sapiens
  CDR3 for beta chain variable domain of TCR clone 262109 (TRBV27, TRBJ2-3)
CASGYGSWADTQYF

SEQ ID NO: 524219 - protein, 17 aa, Homo sapiens
  CDR3 for alpha chain variable domain of TCR clone 262110 (TRAV13-1, TRAJ52)
CAAGRNAGGTSYGKLTF

SEQ ID NO: 524220 - protein, 14 aa, Homo sapiens
  CDR3 for beta chain variable domain of TCR clone 262110 (TRBV6-1, TRBJ1-3)
CASVQGGGGNTIYF

SEQ ID NO: 524221 - protein, 14 aa, Homo sapiens
  CDR3 for alpha chain variable domain of TCR clone 262111 (TRAV2, TRAJ39)
CAVEGDNGGNMLTF

SEQ ID NO: 524222 - protein, 14 aa, Homo sapiens
  CDR3 for beta chain variable domain of TCR clone 262111 (TRBV28, TRBJ2-7)
CASSLRARGNEQYF

SEQ ID NO: 524223 - protein, 15 aa, Homo sapiens
  CDR3 for alpha chain variable domain of TCR clone 262112 (TRAV3, TRAJ22)
CAVRDRGGSARQLTF

SEQ ID NO: 524224 - protein, 13 aa, Homo sapiens
  CDR3 for beta chain variable domain of TCR clone 262112 (TRBV12-4, TRBJ1-5)
CASSPDRAQPQHF

SEQ ID NO: 524225 - protein, 15 aa, Homo sapiens
  CDR3 for alpha chain variable domain of TCR clone 262113 (TRAV3, TRAJ5)
CAVRDLDTGRIALTS

SEQ ID NO: 524226 - protein, 13 aa, Homo sapiens
  CDR3 for beta chain variable domain of TCR clone 262113 (TRBV12-4, TRBJ2-7)
CASSPTETYEQYF

SEQ ID NO: 524227 - protein, 14 aa, Homo sapiens
  CDR3 for alpha chain variable domain of TCR clone 262114 (TRAV8-4, TRAJ37)
CAVSEPSNTGKRIF

SEQ ID NO: 524228 - protein, 14 aa, Homo sapiens
  CDR3 for beta chain variable domain of TCR clone 262114 (TRBV28, TRBJ2-1)
CAIHRTGARTEQFF

SEQ ID NO: 524229 - protein, 15 aa, Homo sapiens
  CDR3 for alpha chain variable domain of TCR clone 262115 (TRAV3, TRAJ4)
CAVRDGTGGYNKLIF

SEQ ID NO: 524230 - protein, 14 aa, Homo sapiens
  CDR3 for beta chain variable domain of TCR clone 262115 (TRBV15, TRBJ2-3)
CATRSGTSTDTQYF

SEQ ID NO: 524231 - protein, 14 aa, Homo sapiens
  CDR3 for alpha chain variable domain of TCR clone 262116 (TRAV4, TRAJ6)
CLVPASGGSYIPTF

SEQ ID NO: 524232 - protein, 12 aa, Homo sapiens
  CDR3 for beta chain variable domain of TCR clone 262116 (TRBV6-5, TRBJ2-3)
CASSPSTDTQYF

SEQ ID NO: 524233 - protein, 12 aa, Homo sapiens
  CDR3 for alpha chain variable domain of TCR clone 262117 (TRAV17, TRAJ53)
SATEGSNYKLTF

SEQ ID NO: 524234 - protein, 19 aa, Homo sapiens
  CDR3 for beta chain variable domain of TCR clone 262117 (TRBV5-1, TRBJ2-3)
CASSLWTSGGITTPDTQYF

SEQ ID NO: 524235 - protein, 13 aa, Homo sapiens
  CDR3 for alpha chain variable domain of TCR clone 262118 (TRAV1-2, TRAJ9)
CAALNTGGFKTIF

SEQ ID NO: 524236 - protein, 13 aa, Homo sapiens
  CDR3 for beta chain variable domain of TCR clone 262118 (TRBV19, TRBJ1-2)
CASSVPGQDGYFF

SEQ ID NO: 524237 - protein, 15 aa, Homo sapiens
  CDR3 for alpha chain variable domain of TCR clone 262119 (TRAV38-1, TRAJ37)
CAFIFGSGNTGKLIF

SEQ ID NO: 524238 - protein, 15 aa, Homo sapiens
  CDR3 for beta chain variable domain of TCR clone 262119 (TRBV6-3, TRBJ2-7)
CASSSPGTVFYEQYF

SEQ ID NO: 524239 - protein, 10 aa, Homo sapiens
  CDR3 for alpha chain variable domain of TCR clone 262120 (TRAV25, TRAJ20)
CSVNDYKLSF

SEQ ID NO: 524240 - protein, 18 aa, Homo sapiens
  CDR3 for beta chain variable domain of TCR clone 262120 (TRBV20-1, TRBJ2-6)
CSAETTPTHGSGANVLTF

SEQ ID NO: 524241 - protein, 16 aa, Homo sapiens
  CDR3 for alpha chain variable domain of TCR clone 262121 (TRAV16, TRAJ42)
CARKMNYGRRQGNLIF

SEQ ID NO: 524242 - protein, 15 aa, Homo sapiens
  CDR3 for beta chain variable domain of TCR clone 262121 (TRBV20-1, TRBJ2-7)
CSAREGRDSLYEQYF

SEQ ID NO: 524243 - protein, 10 aa, Homo sapiens
  CDR3 for alpha chain variable domain of TCR clone 262122 (TRAV20, TRAJ49)
CALGGNQFYF

SEQ ID NO: 524244 - protein, 14 aa, Homo sapiens
  CDR3 for beta chain variable domain of TCR clone 262122 (TRBV7-3, TRBJ1-1)
CASSLKGGNTEAFF

SEQ ID NO: 524245 - protein, 12 aa, Homo sapiens
  CDR3 for alpha chain variable domain of TCR clone 262123 (TRAV12-3, TRAJ17)
CAMTLTGNTLTF

SEQ ID NO: 524246 - protein, 15 aa, Homo sapiens
  CDR3 for beta chain variable domain of TCR clone 262123 (TRBV20-1, TRBJ2-7)
CSARDRVSGMDEQCF

SEQ ID NO: 524247 - protein, 17 aa, Homo sapiens
  CDR3 for alpha chain variable domain of TCR clone 262124 (TRAV12-3, TRAJ26)
CAMSGGRCDNYGQNFVF

SEQ ID NO: 524248 - protein, 12 aa, Homo sapiens
  CDR3 for beta chain variable domain of TCR clone 262124 (TRBV19, TRBJ1-1)
CASSTTGIEAFF

SEQ ID NO: 524249 - protein, 15 aa, Homo sapiens
  CDR3 for alpha chain variable domain of TCR clone 262125 (TRAV38-1, TRAJ37)
CAFIFGAGNTGKLIF

SEQ ID NO: 524250 - protein, 12 aa, Homo sapiens
  CDR3 for beta chain variable domain of TCR clone 262125 (TRBV7-9, TRBJ2-7)
CASSLEGYEQYF

SEQ ID NO: 524251 - protein, 13 aa, Homo sapiens
  CDR3 for alpha chain variable domain of TCR clone 262126 (TRAV13-1, TRAJ41)
CADAPNSGYALNF

SEQ ID NO: 524252 - protein, 13 aa, Homo sapiens
  CDR3 for beta chain variable domain of TCR clone 262126 (TRBV19, TRBJ2-7)
CASEGTTTHEQYF

SEQ ID NO: 524253 - protein, 14 aa, Homo sapiens
  CDR3 for alpha chain variable domain of TCR clone 262127 (TRAV12-3, TRAJ54)
CAMRAIQGAQKLVF

SEQ ID NO: 524254 - protein, 13 aa, Homo sapiens
  CDR3 for beta chain variable domain of TCR clone 262127 (TRBV19, TRBJ1-1)
CASSPSNGGEAFF

SEQ ID NO: 524255 - protein, 14 aa, Homo sapiens
  CDR3 for alpha chain variable domain of TCR clone 262128 (TRAV16, TRAJ33)
CALSAMDSNYQLIW

SEQ ID NO: 524256 - protein, 14 aa, Homo sapiens
  CDR3 for beta chain variable domain of TCR clone 262128 (TRBV20-1, TRBJ2-1)
CSPNDEASYNEQFF

SEQ ID NO: 524257 - protein, 11 aa, Homo sapiens
  CDR3 for alpha chain variable domain of TCR clone 262129 (TRAV3, TRAJ21)
CAVGNFNKFYF

SEQ ID NO: 524258 - protein, 11 aa, Homo sapiens
  CDR3 for beta chain variable domain of TCR clone 262129 (TRBV6-5, TRBJ2-2)
CASSRTGELFF

SEQ ID NO: 524259 - protein, 13 aa, Homo sapiens
  CDR3 for alpha chain variable domain of TCR clone 262130 (TRAV17, TRAJ9)
CATAITGAFKTIF

SEQ ID NO: 524260 - protein, 16 aa, Homo sapiens
  CDR3 for beta chain variable domain of TCR clone 262130 (TRBV15, TRBJ2-1)
CATSRNLAGGYNEQFF

SEQ ID NO: 524261 - protein, 15 aa, Homo sapiens
  CDR3 for alpha chain variable domain of TCR clone 262131 (TRAV27, TRAJ38)
CAARRNAGRNRKLIW

SEQ ID NO: 524262 - protein, 13 aa, Homo sapiens
  CDR3 for beta chain variable domain of TCR clone 262131 (TRBV12-5, TRBJ2-3)
CASGDRQSDTQYF

SEQ ID NO: 524263 - protein, 14 aa, Homo sapiens
  CDR3 for alpha chain variable domain of TCR clone 262132 (TRAV3, TRAJ7)
CAVREEEREQQTRF

SEQ ID NO: 524264 - protein, 12 aa, Homo sapiens
  CDR3 for beta chain variable domain of TCR clone 262132 (TRBV7-8, TRBJ2-7)
CASSLEDREQYF

SEQ ID NO: 524265 - protein, 14 aa, Homo sapiens
  CDR3 for alpha chain variable domain of TCR clone 262133 (TRAV17, TRAJ57)
CATDPQGGSEKLVF

SEQ ID NO: 524266 - protein, 14 aa, Homo sapiens
  CDR3 for beta chain variable domain of TCR clone 262133 (TRBV6-1, TRBJ2-7)
CASTRTGDYYEQYF

SEQ ID NO: 524267 - protein, 16 aa, Homo sapiens
  CDR3 for alpha chain variable domain of TCR clone 262134 (TRAV3, TRAJ37)
CAVRPHGSGKTGKLIF

SEQ ID NO: 524268 - protein, 17 aa, Homo sapiens
  CDR3 for beta chain variable domain of TCR clone 262134 (TRBV20-1, TRBJ2-1)
CSASSSGLAGSYNEQFF

SEQ ID NO: 524269 - protein, 18 aa, Homo sapiens
  CDR3 for alpha chain variable domain of TCR clone 262135 (TRAV21, TRAJ52)
CAVRPSPAGGTSYGKLTF

SEQ ID NO: 524270 - protein, 14 aa, Homo sapiens
  CDR3 for beta chain variable domain of TCR clone 262135 (TRBV12-4, TRBJ1-1)
CASSFDRVNTEAFF

SEQ ID NO: 524271 - protein, 16 aa, Homo sapiens
  CDR3 for alpha chain variable domain of TCR clone 262136 (TRAV12-3, TRAJ53)
CAMSPGSGGSNDKLTF

SEQ ID NO: 524272 - protein, 17 aa, Homo sapiens
  CDR3 for beta chain variable domain of TCR clone 262136 (TRBV28, TRBJ2-5)
CASGTPEGDALQETQYF

SEQ ID NO: 524273 - protein, 12 aa, Homo sapiens
  CDR3 for alpha chain variable domain of TCR clone 262137 (TRAV27, TRAJ58)
CAGARDTSRLTF

SEQ ID NO: 524274 - protein, 14 aa, Homo sapiens
  CDR3 for beta chain variable domain of TCR clone 262137 (TRBV7-3, TRBJ2-1)
CASSLGTSANEQFL

SEQ ID NO: 524275 - protein, 15 aa, Homo sapiens
  CDR3 for alpha chain variable domain of TCR clone 262138 (TRAV26-1, TRAJ29)
CIVRVEGSGNTPLVF

SEQ ID NO: 524276 - protein, 13 aa, Homo sapiens
  CDR3 for beta chain variable domain of TCR clone 262138 (TRBV6-1, TRBJ1-1)
CASSEVFGTEAFF

SEQ ID NO: 524277 - protein, 16 aa, Homo sapiens
  CDR3 for alpha chain variable domain of TCR clone 262139 (TRAV8-6, TRAJ39)
CAVMPMNNNAGNILTF

SEQ ID NO: 524278 - protein, 16 aa, Homo sapiens
  CDR3 for beta chain variable domain of TCR clone 262139 (TRBV15, TRBJ2-5)
CATSRYLEAAQETQYF

SEQ ID NO: 524279 - protein, 14 aa, Homo sapiens
  CDR3 for alpha chain variable domain of TCR clone 262140 (TRAV1-2, TRAJ8)
CAVREDTGFQKLVF

SEQ ID NO: 524280 - protein, 13 aa, Homo sapiens
  CDR3 for beta chain variable domain of TCR clone 262140 (TRBV11-2, TRBJ1-6)
CASSLAGTSPLHF

SEQ ID NO: 524281 - protein, 16 aa, Homo sapiens
  CDR3 for alpha chain variable domain of TCR clone 262141 (TRAV3, TRAJ4)
CAVRPSPSGGYNKVIF

SEQ ID NO: 524282 - protein, 12 aa, Homo sapiens
  CDR3 for beta chain variable domain of TCR clone 262141 (TRBV7-9, TRBJ2-7)
CASSQGVYEQYF

SEQ ID NO: 524283 - protein, 12 aa, Homo sapiens
  CDR3 for alpha chain variable domain of TCR clone 262142 (TRAV38-2/DV8, TRAJ47)
CAYKEYGNKLVF

SEQ ID NO: 524284 - protein, 14 aa, Homo sapiens
  CDR3 for beta chain variable domain of TCR clone 262142 (TRBV28, TRBJ2-7)
CASSYRSGSYEQYF

SEQ ID NO: 524285 - protein, 14 aa, Homo sapiens
  CDR3 for alpha chain variable domain of TCR clone 262143 (TRAV8-3, TRAJ31)
CAVGRGLNNARLMF

SEQ ID NO: 524286 - protein, 14 aa, Homo sapiens
  CDR3 for beta chain variable domain of TCR clone 262143 (TRBV7-2, TRBJ2-2)
CASSQAVNTGELFF

SEQ ID NO: 524287 - protein, 13 aa, Homo sapiens
  CDR3 for alpha chain variable domain of TCR clone 262144 (TRAV12-3, TRAJ33)
CAMSVNSNYQLIW

SEQ ID NO: 524288 - protein, 16 aa, Homo sapiens
  CDR3 for beta chain variable domain of TCR clone 262144 (TRBV12-4, TRBJ1-5)
CASSRPVGGSNQPQQF

SEQ ID NO: 524289 - protein, 14 aa, Homo sapiens
  CDR3 for alpha chain variable domain of TCR clone 262145 (TRAV8-3, TRAJ34)
CAVGPPHNTDKLIF

SEQ ID NO: 524290 - protein, 14 aa, Homo sapiens
  CDR3 for beta chain variable domain of TCR clone 262145 (TRBV18, TRBJ2-7)
CASSPRGGAYEQYF

SEQ ID NO: 524291 - protein, 18 aa, Homo sapiens
  CDR3 for alpha chain variable domain of TCR clone 262146 (TRAV12-3, TRAJ52)
CAMSVGGASGTSYGKLTF

SEQ ID NO: 524292 - protein, 14 aa, Homo sapiens
  CDR3 for beta chain variable domain of TCR clone 262146 (TRBV7-2, TRBJ2-7)
CASRSQGAAYEQYF

SEQ ID NO: 524293 - protein, 13 aa, Homo sapiens
  CDR3 for alpha chain variable domain of TCR clone 262147 (TRAV29/DV5, TRAJ31)
CAASRNNNARLIF

SEQ ID NO: 524294 - protein, 16 aa, Homo sapiens
  CDR3 for beta chain variable domain of TCR clone 262147 (TRBV20-1, TRBJ1-4)
CSAPGQGLLTNEKLFF

SEQ ID NO: 524295 - protein, 13 aa, Homo sapiens
  CDR3 for alpha chain variable domain of TCR clone 262148 (TRAV27, TRAJ29)
CAGAHSGNTPLVF

SEQ ID NO: 524296 - protein, 11 aa, Homo sapiens
  CDR3 for beta chain variable domain of TCR clone 262148 (TRBV12-4, TRBJ2-3)
CASTATDTQYF

SEQ ID NO: 524297 - protein, 14 aa, Homo sapiens
  CDR3 for alpha chain variable domain of TCR clone 262149 (TRAV13-1, TRAJ20)
CAARPGSNDYKLSF

SEQ ID NO: 524298 - protein, 16 aa, Homo sapiens
  CDR3 for beta chain variable domain of TCR clone 262149 (TRBV7-3, TRBJ2-2)
CASSLKRGTLSGELFF

SEQ ID NO: 524299 - protein, 15 aa, Homo sapiens
  CDR3 for alpha chain variable domain of TCR clone 262150 (TRAV26-1, TRAJ22)
CIVRVSFWFCKATDL

SEQ ID NO: 524300 - protein, 12 aa, Homo sapiens
  CDR3 for beta chain variable domain of TCR clone 262150 (TRBV7-9, TRBJ1-2)
SSSLKQNYGYTF

SEQ ID NO: 524301 - protein, 14 aa, Homo sapiens
  CDR3 for alpha chain variable domain of TCR clone 262151 (TRAV2, TRAJ9)
CAVEDRSGGVKTIF

SEQ ID NO: 524302 - protein, 15 aa, Homo sapiens
  CDR3 for beta chain variable domain of TCR clone 262151 (TRBV6-6, TRBJ2-7)
CASSYSYGGSYEQYF

SEQ ID NO: 524303 - protein, 12 aa, Homo sapiens
  CDR3 for alpha chain variable domain of TCR clone 262152 (TRAV10, TRAJ43)
CVVVRVGNDMRF

SEQ ID NO: 524304 - protein, 15 aa, Homo sapiens
  CDR3 for beta chain variable domain of TCR clone 262152 (TRBV2, TRBJ2-7)
CASGEGLARSYEQYF

SEQ ID NO: 524305 - protein, 18 aa, Homo sapiens
  CDR3 for alpha chain variable domain of TCR clone 262153 (TRAV21, TRAJ53)
CAVKGGENSGGSNYKLTF

SEQ ID NO: 524306 - protein, 16 aa, Homo sapiens
  CDR3 for beta chain variable domain of TCR clone 262153 (TRBV7-3, TRBJ2-2)
CASSLKRGTLSGELFF

SEQ ID NO: 524307 - protein, 12 aa, Homo sapiens
  CDR3 for alpha chain variable domain of TCR clone 262154 (TRAV12-2, TRAJ10)
WGVTGGGNKLTF

SEQ ID NO: 524308 - protein, 20 aa, Homo sapiens
  CDR3 for beta chain variable domain of TCR clone 262154 (TRBV19, TRBJ2-1)
CAGSIPRTVTSTRLNNEQFF

SEQ ID NO: 524309 - protein, 14 aa, Homo sapiens
  CDR3 for alpha chain variable domain of TCR clone 262155 (TRAV13-1, TRAJ35)
CAASKGGFGNVLHC

SEQ ID NO: 524310 - protein, 14 aa, Homo sapiens
  CDR3 for beta chain variable domain of TCR clone 262155 (TRBV7-3, TRBJ2-3)
CASSSTGVADTQYF

SEQ ID NO: 524311 - protein, 13 aa, Homo sapiens
  CDR3 for alpha chain variable domain of TCR clone 262156 (TRAV17, TRAJ5)
CAPMDTGRRALTF

SEQ ID NO: 524312 - protein, 14 aa, Homo sapiens
  CDR3 for beta chain variable domain of TCR clone 262156 (TRBV12-5, TRBJ2-5)
CASGSRTHQETKYF

SEQ ID NO: 524313 - protein, 14 aa, Homo sapiens
  CDR3 for alpha chain variable domain of TCR clone 262157 (TRAV21, TRAJ42)
CAVLGGGSQGNLIF

SEQ ID NO: 524314 - protein, 15 aa, Homo sapiens
  CDR3 for beta chain variable domain of TCR clone 262157 (TRBV5-1, TRBJ1-1)
CASSSTTGTNTEAFF

SEQ ID NO: 524315 - protein, 14 aa, Homo sapiens
  CDR3 for alpha chain variable domain of TCR clone 262158 (TRAV1-2, TRAJ16)
CAVNRFSDGQKLLS

SEQ ID NO: 524316 - protein, 12 aa, Homo sapiens
  CDR3 for beta chain variable domain of TCR clone 262158 (TRBV7-2, TRBJ1-6)
CASSLSSSPLHF

SEQ ID NO: 524317 - protein, 14 aa, Homo sapiens
  CDR3 for alpha chain variable domain of TCR clone 262159 (TRAV12-3, TRAJ57)
CARALEGGSEKLVF

SEQ ID NO: 524318 - protein, 14 aa, Homo sapiens
  CDR3 for beta chain variable domain of TCR clone 262159 (TRBV6-1, TRBJ1-3)
CASVQGGGGNTIYF

SEQ ID NO: 524319 - protein, 12 aa, Homo sapiens
  CDR3 for alpha chain variable domain of TCR clone 262160 (TRAV12-3, TRAJ17)
CAMTLTGNKLTF

SEQ ID NO: 524320 - protein, 15 aa, Homo sapiens
  CDR3 for beta chain variable domain of TCR clone 262160 (TRBV20-1, TRBJ2-7)
CSARDRVAGVDEQYF

SEQ ID NO: 524321 - protein, 13 aa, Homo sapiens
  CDR3 for alpha chain variable domain of TCR clone 262161 (TRAV30, TRAJ24)
CGTVTDSWGKLQF

SEQ ID NO: 524322 - protein, 14 aa, Homo sapiens
  CDR3 for beta chain variable domain of TCR clone 262161 (TRBV6-3, TRBJ2-2)
CANTYTPDTGELFF

SEQ ID NO: 524323 - protein, 14 aa, Homo sapiens
  CDR3 for alpha chain variable domain of TCR clone 262162 (TRAV1-2, TRAJ8)
CAVREDTGFQNLVF

SEQ ID NO: 524324 - protein, 15 aa, Homo sapiens
  CDR3 for beta chain variable domain of TCR clone 262162 (TRBV12-4, TRBJ2-5)
CASSPPTGLQETQYF

SEQ ID NO: 524325 - protein, 14 aa, Homo sapiens
  CDR3 for alpha chain variable domain of TCR clone 262163 (TRAV1-2, TRAJ8)
CAVREDTGFQKLVF

SEQ ID NO: 524326 - protein, 16 aa, Homo sapiens
  CDR3 for beta chain variable domain of TCR clone 262163 (TRBV29-1, TRBJ2-6)
CSVEDITYSGANVPTF

SEQ ID NO: 524327 - protein, 14 aa, Homo sapiens
  CDR3 for alpha chain variable domain of TCR clone 262164 (TRAV12-1, TRAJ13)
CVVIDSGGYQKVTF

SEQ ID NO: 524328 - protein, 13 aa, Homo sapiens
  CDR3 for beta chain variable domain of TCR clone 262164 (TRBV19, TRBJ1-2)
CASSVPGQDGYTF

SEQ ID NO: 524329 - protein, 12 aa, Homo sapiens
  CDR3 for alpha chain variable domain of TCR clone 262165 (TRAV12-3, TRAJ17)
CAMTLTGNKLTF

SEQ ID NO: 524330 - protein, 17 aa, Homo sapiens
  CDR3 for beta chain variable domain of TCR clone 262165 (TRBV6-3, TRBJ2-1)
CASSYSSGTRGLDEQFF

SEQ ID NO: 524331 - protein, 13 aa, Homo sapiens
  CDR3 for alpha chain variable domain of TCR clone 262166 (TRAV17, TRAJ15)
CATDARAGTALIF

SEQ ID NO: 524332 - protein, 15 aa, Homo sapiens
  CDR3 for beta chain variable domain of TCR clone 262166 (TRBV20-1, TRBJ2-7)
CSARDRVSGMDEQYV

SEQ ID NO: 524333 - protein, 16 aa, Homo sapiens
  CDR3 for alpha chain variable domain of TCR clone 262167 (TRAV38-1, TRAJ37)
CAFKGDVSSNTGKLIF

SEQ ID NO: 524334 - protein, 13 aa, Homo sapiens
  CDR3 for beta chain variable domain of TCR clone 262167 (TRBV12-4, TRBJ2-5)
CASSLFRRETQYF

SEQ ID NO: 524335 - protein, 17 aa, Homo sapiens
  CDR3 for alpha chain variable domain of TCR clone 262168 (TRAV3, TRAJ6)
CAVSRRTDTGGSYIPTF

SEQ ID NO: 524336 - protein, 13 aa, Homo sapiens
  CDR3 for beta chain variable domain of TCR clone 262168 (TRBV11-2, TRBJ2-7)
CASSTLDRYEQYF

SEQ ID NO: 524337 - protein, 17 aa, Homo sapiens
  CDR3 for alpha chain variable domain of TCR clone 262169 (TRAV3, TRAJ42)
CAVRDRDYGGSQGNLIF

SEQ ID NO: 524338 - protein, 18 aa, Homo sapiens
  CDR3 for beta chain variable domain of TCR clone 262169 (TRBV5-1, TRBJ1-6)
CASSVGGGYGERNSPLHF

SEQ ID NO: 524339 - protein, 13 aa, Homo sapiens
  CDR3 for alpha chain variable domain of TCR clone 262170 (TRAV12-1, TRAJ40)
WVVPTSGTYKYIF

SEQ ID NO: 524340 - protein, 18 aa, Homo sapiens
  CDR3 for beta chain variable domain of TCR clone 262170 (TRBV7-6, TRBJ2-1)
CASSPRTSGMSSYNEQFF

SEQ ID NO: 524341 - protein, 12 aa, Homo sapiens
  CDR3 for alpha chain variable domain of TCR clone 262171 (TRAV16, TRAJ21)
CALLGNFNKFYF

SEQ ID NO: 524342 - protein, 13 aa, Homo sapiens
  CDR3 for beta chain variable domain of TCR clone 262171 (TRBV4-1, TRBJ2-2)
CACRQGAYGELFF

SEQ ID NO: 524343 - protein, 13 aa, Homo sapiens
  CDR3 for alpha chain variable domain of TCR clone 262172 (TRAV8-6, TRAJ50)
CAVIKTSYDKVIF

SEQ ID NO: 524344 - protein, 18 aa, Homo sapiens
  CDR3 for beta chain variable domain of TCR clone 262172 (TRBV12-4, TRBJ2-2)
CASSLVAGTRGRTGELFF

SEQ ID NO: 524345 - protein, 12 aa, Homo sapiens
  CDR3 for alpha chain variable domain of TCR clone 262173 (TRAV25, TRAJ11)
CARASGYSTLTF

SEQ ID NO: 524346 - protein, 16 aa, Homo sapiens
  CDR3 for beta chain variable domain of TCR clone 262173 (TRBV15, TRBJ1-2)
CATSRGPRTGGGGYTF

SEQ ID NO: 524347 - protein, 15 aa, Homo sapiens
  CDR3 for alpha chain variable domain of TCR clone 262174 (TRAV26-1, TRAJ48)
CIARWSWFGNKKLTF

SEQ ID NO: 524348 - protein, 12 aa, Homo sapiens
  CDR3 for beta chain variable domain of TCR clone 262174 (TRBV19, TRBJ2-5)
CASSISEETQYF

SEQ ID NO: 524349 - protein, 15 aa, Homo sapiens
  CDR3 for alpha chain variable domain of TCR clone 262175 (TRAV23/DV6, TRAJ33)
CAASNSGGGNYQLIW

SEQ ID NO: 524350 - protein, 19 aa, Homo sapiens
  CDR3 for beta chain variable domain of TCR clone 262175 (TRBV6-3, TRBJ2-1)
SASSYSWTSGRATYNEQFF

SEQ ID NO: 524351 - protein, 13 aa, Homo sapiens
  CDR3 for alpha chain variable domain of TCR clone 262176 (TRAV8-1, TRAJ30)
CAVTMNRDDKTIF

SEQ ID NO: 524352 - protein, 14 aa, Homo sapiens
  CDR3 for beta chain variable domain of TCR clone 262176 (TRBV7-2, TRBJ1-6)
CASSLQGANSPLHF

SEQ ID NO: 524353 - protein, 17 aa, Homo sapiens
  CDR3 for alpha chain variable domain of TCR clone 262177 (TRAV29/DV5, TRAJ45)
CAADGPFSGGGADGLTF

SEQ ID NO: 524354 - protein, 13 aa, Homo sapiens
  CDR3 for beta chain variable domain of TCR clone 262177 (TRBV6-5, TRBJ2-2)
CASRTVNTGELFF

SEQ ID NO: 524355 - protein, 15 aa, Homo sapiens
  CDR3 for alpha chain variable domain of TCR clone 262178 (TRAV21, TRAJ52)
CAVRGGGTSYGKLTF

SEQ ID NO: 524356 - protein, 15 aa, Homo sapiens
  CDR3 for beta chain variable domain of TCR clone 262178 (TRBV18, TRBJ1-5)
GASSPSDRSNQPQHF

SEQ ID NO: 524357 - protein, 15 aa, Homo sapiens
  CDR3 for alpha chain variable domain of TCR clone 262179 (TRAV8-3, TRAJ11)
CAVGLLNSGYRPSPL

SEQ ID NO: 524358 - protein, 16 aa, Homo sapiens
  CDR3 for beta chain variable domain of TCR clone 262179 (TRBV7-9, TRBJ1-2)
CASSLGFSSGEDGYTF

SEQ ID NO: 524359 - protein, 11 aa, Homo sapiens
  CDR3 for alpha chain variable domain of TCR clone 262180 (TRAV1-2, TRAJ31)
CAVNNNARLML

SEQ ID NO: 524360 - protein, 15 aa, Homo sapiens
  CDR3 for beta chain variable domain of TCR clone 262180 (TRBV28, TRBJ2-1)
CASSIIVGGRSEQFF

SEQ ID NO: 524361 - protein, 14 aa, Homo sapiens
  CDR3 for alpha chain variable domain of TCR clone 262181 (TRAV8-3, TRAJ34)
CAVGAWENTDKLIF

SEQ ID NO: 524362 - protein, 15 aa, Homo sapiens
  CDR3 for beta chain variable domain of TCR clone 262181 (TRBV2, TRBJ2-1)
CASSELAGSYNEQFF

SEQ ID NO: 524363 - protein, 13 aa, Homo sapiens
  CDR3 for alpha chain variable domain of TCR clone 262182 (TRAV8-3, TRAJ36)
CAVGATGANNLFF

SEQ ID NO: 524364 - protein, 18 aa, Homo sapiens
  CDR3 for beta chain variable domain of TCR clone 262182 (TRBV7-9, TRBJ2-1)
CASSTGLAEGSSYNEQFF

SEQ ID NO: 524365 - protein, 15 aa, Homo sapiens
  CDR3 for alpha chain variable domain of TCR clone 262183 (TRAV12-2, TRAJ53)
CAVNGGGGSNYQLTF

SEQ ID NO: 524366 - protein, 17 aa, Homo sapiens
  CDR3 for beta chain variable domain of TCR clone 262183 (TRBV7-3, TRBJ2-3)
RSSSLMKGMRGADTQYF

SEQ ID NO: 524367 - protein, 12 aa, Homo sapiens
  CDR3 for alpha chain variable domain of TCR clone 262184 (TRAV13-1, TRAJ20)
CAASMGDYKLSF

SEQ ID NO: 524368 - protein, 14 aa, Homo sapiens
  CDR3 for beta chain variable domain of TCR clone 262184 (TRBV20-1, TRBJ2-5)
CSAGDSGSGETQYF

SEQ ID NO: 524369 - protein, 13 aa, Homo sapiens
  CDR3 for alpha chain variable domain of TCR clone 262185 (TRAV12-3, TRAJ31)
CAMSANNNARLMF

SEQ ID NO: 524370 - protein, 16 aa, Homo sapiens
  CDR3 for beta chain variable domain of TCR clone 262185 (TRBV7-9, TRBJ1-2)
CASSLVFSSGEDGYAF

SEQ ID NO: 524371 - protein, 17 aa, Homo sapiens
  CDR3 for alpha chain variable domain of TCR clone 262186 (TRAV26-2, TRAJ42)
CILRDVGYGGSQGNLIF

SEQ ID NO: 524372 - protein, 14 aa, Homo sapiens
  CDR3 for beta chain variable domain of TCR clone 262186 (TRBV5-1, TRBJ2-7)
CASSRGESLYEQYF

SEQ ID NO: 524373 - protein, 15 aa, Homo sapiens
  CDR3 for alpha chain variable domain of TCR clone 262187 (TRAV21, TRAJ37)
CAVRPTLSNTGKLIF

SEQ ID NO: 524374 - protein, 16 aa, Homo sapiens
  CDR3 for beta chain variable domain of TCR clone 262187 (TRBV24-1, TRBJ2-3)
CATSDRRQDLSDTQYF

SEQ ID NO: 524375 - protein, 12 aa, Homo sapiens
  CDR3 for alpha chain variable domain of TCR clone 262188 (TRAV13-1, TRAJ15)
CAVSQAGTALIF

SEQ ID NO: 524376 - protein, 14 aa, Homo sapiens
  CDR3 for beta chain variable domain of TCR clone 262188 (TRBV19, TRBJ2-2)
CASSTLHRSGELFF

SEQ ID NO: 524377 - protein, 14 aa, Homo sapiens
  CDR3 for alpha chain variable domain of TCR clone 262189 (TRAV35, TRAJ38)
CAGSNAGNNRKLIW

SEQ ID NO: 524378 - protein, 12 aa, Homo sapiens
  CDR3 for beta chain variable domain of TCR clone 262189 (TRBV19, TRBJ2-7)
CASTDRGYEHYF

SEQ ID NO: 524379 - protein, 14 aa, Homo sapiens
  CDR3 for alpha chain variable domain of TCR clone 262190 (TRAV1-2, TRAJ8)
CAVREDTGFQKLVF

SEQ ID NO: 524380 - protein, 15 aa, Homo sapiens
  CDR3 for beta chain variable domain of TCR clone 262190 (TRBV7-6, TRBJ2-1)
CASSPGQGPYNEQFF

SEQ ID NO: 524381 - protein, 14 aa, Homo sapiens
  CDR3 for alpha chain variable domain of TCR clone 262191 (TRAV21, TRAJ58)
CAVRRGRSGSRLTF

SEQ ID NO: 524382 - protein, 15 aa, Homo sapiens
  CDR3 for beta chain variable domain of TCR clone 262191 (TRBV10-3, TRBJ2-3)
CAISLTSGGTDTQYF

SEQ ID NO: 524383 - protein, 15 aa, Homo sapiens
  CDR3 for alpha chain variable domain of TCR clone 262192 (TRAV3, TRAJ22)
CTVRDRGGSARQLTF

SEQ ID NO: 524384 - protein, 17 aa, Homo sapiens
  CDR3 for beta chain variable domain of TCR clone 262192 (TRBV13, TRBJ2-3)
CASSLSRVAGGRNTQYF

SEQ ID NO: 524385 - protein, 16 aa, Homo sapiens
  CDR3 for alpha chain variable domain of TCR clone 262193 (TRAV4, TRAJ9)
CLVGDPNRPGGFKTIF

SEQ ID NO: 524386 - protein, 14 aa, Homo sapiens
  CDR3 for beta chain variable domain of TCR clone 262193 (TRBV20-1, TRBJ1-1)
FSAQTRIGGTEAFF

SEQ ID NO: 524387 - protein, 13 aa, Homo sapiens
  CDR3 for alpha chain variable domain of TCR clone 262194 (TRAV8-3, TRAJ30)
CAVGGWRDDKIIF

SEQ ID NO: 524388 - protein, 12 aa, Homo sapiens
  CDR3 for beta chain variable domain of TCR clone 262194 (TRBV20-1, TRBJ2-7)
CSAGLKMGEQYF

SEQ ID NO: 524389 - protein, 12 aa, Homo sapiens
  CDR3 for alpha chain variable domain of TCR clone 262195 (TRAV25, TRAJ38)
CAGTGNNRKLIW

SEQ ID NO: 524390 - protein, 14 aa, Homo sapiens
  CDR3 for beta chain variable domain of TCR clone 262195 (TRBV19, TRBJ1-5)
CASSKMTGPQPHHF

SEQ ID NO: 524391 - protein, 14 aa, Homo sapiens
  CDR3 for alpha chain variable domain of TCR clone 262196 (TRAV17, TRAJ31)
CATVFRNNNASLMF

SEQ ID NO: 524392 - protein, 14 aa, Homo sapiens
  CDR3 for beta chain variable domain of TCR clone 262196 (TRBV12-4, TRBJ2-5)
CASSLWQKQETQYF

SEQ ID NO: 524393 - protein, 15 aa, Homo sapiens
  CDR3 for alpha chain variable domain of TCR clone 262197 (TRAV17, TRAJ56)
CATEPFTGANSKLTC

SEQ ID NO: 524394 - protein, 15 aa, Homo sapiens
  CDR3 for beta chain variable domain of TCR clone 262197 (TRBV28, TRBJ1-5)
CASSRTGGYVQPQHF

SEQ ID NO: 524395 - protein, 10 aa, Homo sapiens
  CDR3 for alpha chain variable domain of TCR clone 262198 (TRAV16, TRAJ26)
CAPAELWSEF

SEQ ID NO: 524396 - protein, 15 aa, Homo sapiens
  CDR3 for beta chain variable domain of TCR clone 262198 (TRBV7-2, TRBJ2-3)
CASSLTGTSTDTQYV

SEQ ID NO: 524397 - protein, 15 aa, Homo sapiens
  CDR3 for alpha chain variable domain of TCR clone 262199 (TRAV3, TRAJ36)
CAVRASQTGANNLFF

SEQ ID NO: 524398 - protein, 14 aa, Homo sapiens
  CDR3 for beta chain variable domain of TCR clone 262199 (TRBV7-3, TRBJ1-1)
CASSLKGGNTEAFF

SEQ ID NO: 524399 - protein, 13 aa, Homo sapiens
  CDR3 for alpha chain variable domain of TCR clone 262200 (TRAV2, TRAJ13)
CAARILGVTRKLP

SEQ ID NO: 524400 - protein, 14 aa, Homo sapiens
  CDR3 for beta chain variable domain of TCR clone 262200 (TRBV19, TRBJ2-1)
CASEVTGARNEQFF

SEQ ID NO: 524401 - protein, 14 aa, Homo sapiens
  CDR3 for alpha chain variable domain of TCR clone 262201 (TRAV8-4, TRAJ16)
CAVSPVCRWPEAAL

SEQ ID NO: 524402 - protein, 15 aa, Homo sapiens
  CDR3 for beta chain variable domain of TCR clone 262201 (TRBV7-3, TRBJ1-6)
CASSLGRGAGSPLHF

SEQ ID NO: 524403 - protein, 14 aa, Homo sapiens
  CDR3 for alpha chain variable domain of TCR clone 262202 (TRAV1-2, TRAJ8)
CAVREDTGFQKLVF

SEQ ID NO: 524404 - protein, 16 aa, Homo sapiens
  CDR3 for beta chain variable domain of TCR clone 262202 (TRBV5-7, TRBJ2-5)
CAITLAPAGGRETQYF

SEQ ID NO: 524405 - protein, 12 aa, Homo sapiens
  CDR3 for alpha chain variable domain of TCR clone 262203 (TRAV13-1, TRAJ17)
CAAPRCRQQANF

SEQ ID NO: 524406 - protein, 15 aa, Homo sapiens
  CDR3 for beta chain variable domain of TCR clone 262203 (TRBV6-3, TRBJ2-7)
CASSSPGTVFYEQYF

SEQ ID NO: 524407 - protein, 10 aa, Homo sapiens
  CDR3 for alpha chain variable domain of TCR clone 262204 (TRAV1-2, TRAJ23)
CAGQGGKLIF

SEQ ID NO: 524408 - protein, 15 aa, Homo sapiens
  CDR3 for beta chain variable domain of TCR clone 262204 (TRBV6-3, TRBJ2-7)
CASSSPGTVFCEQYF

SEQ ID NO: 524409 - protein, 16 aa, Homo sapiens
  CDR3 for alpha chain variable domain of TCR clone 262205 (TRAV3, TRAJ37)
CAVRGKGSGNTGKLTF

SEQ ID NO: 524410 - protein, 14 aa, Homo sapiens
  CDR3 for beta chain variable domain of TCR clone 262205 (TRBV20-1, TRBJ2-3)
CSARGGTSTDTQYF

SEQ ID NO: 524411 - protein, 14 aa, Homo sapiens
  CDR3 for alpha chain variable domain of TCR clone 262206 (TRAV12-2, TRAJ17)
CAALFKAAGNKLIF

SEQ ID NO: 524412 - protein, 16 aa, Homo sapiens
  CDR3 for beta chain variable domain of TCR clone 262206 (TRBV20-1, TRBJ2-2)
CSASASGIPGAGELFF

SEQ ID NO: 524413 - protein, 15 aa, Homo sapiens
  CDR3 for alpha chain variable domain of TCR clone 262207 (TRAV13-1, TRAJ8)
CAASIPNTGFQKLVF

SEQ ID NO: 524414 - protein, 13 aa, Homo sapiens
  CDR3 for beta chain variable domain of TCR clone 262207 (TRBV5-4, TRBJ1-1)
CASSLQVNTEAFF

SEQ ID NO: 524415 - protein, 15 aa, Homo sapiens
  CDR3 for alpha chain variable domain of TCR clone 262208 (TRAV26-2, TRAJ57)
CILRDIRGGSEKLVF

SEQ ID NO: 524416 - protein, 15 aa, Homo sapiens
  CDR3 for beta chain variable domain of TCR clone 262208 (TRBV2, TRBJ2-1)
CASDIGIAGEGEQFF

SEQ ID NO: 524417 - protein, 13 aa, Homo sapiens
  CDR3 for alpha chain variable domain of TCR clone 262209 (TRAV2, TRAJ15)
CAVASQAGTALIF

SEQ ID NO: 524418 - protein, 14 aa, Homo sapiens
  CDR3 for beta chain variable domain of TCR clone 262209 (TRBV12-4, TRBJ2-3)
CASTIAGWGDTQYF

SEQ ID NO: 524419 - protein, 16 aa, Homo sapiens
  CDR3 for alpha chain variable domain of TCR clone 262210 (TRAV3, TRAJ37)
CAVRPHGSGNTGKLIF

SEQ ID NO: 524420 - protein, 17 aa, Homo sapiens
  CDR3 for beta chain variable domain of TCR clone 262210 (TRBV20-1, TRBJ2-1)
CSASSSGLSGSYNEQFF

SEQ ID NO: 524421 - protein, 15 aa, Homo sapiens
  CDR3 for alpha chain variable domain of TCR clone 262211 (TRAV14/DV4, TRAJ21)
CAMREEGYNFNKFYF

SEQ ID NO: 524422 - protein, 16 aa, Homo sapiens
  CDR3 for beta chain variable domain of TCR clone 262211 (TRBV4-1, TRBJ2-3)
CASSQRAGGLTDTQYF

SEQ ID NO: 524423 - protein, 15 aa, Homo sapiens
  CDR3 for alpha chain variable domain of TCR clone 262212 (TRAV9-2, TRAJ49)
CALSPPDHTGNQFYF

SEQ ID NO: 524424 - protein, 16 aa, Homo sapiens
  CDR3 for beta chain variable domain of TCR clone 262212 (TRBV6-5, TRBJ2-7)
CASSSDPTSGFYEQYF

SEQ ID NO: 524425 - protein, 17 aa, Homo sapiens
  CDR3 for alpha chain variable domain of TCR clone 262213 (TRAV30, TRAJ42)
CGTLRADYGGSQGNLIF

SEQ ID NO: 524426 - protein, 13 aa, Homo sapiens
  CDR3 for beta chain variable domain of TCR clone 262213 (TRBV7-6, TRBJ2-3)
CASSLAVGDTQYF

SEQ ID NO: 524427 - protein, 15 aa, Homo sapiens
  CDR3 for alpha chain variable domain of TCR clone 262214 (TRAV35, TRAJ23)
CAGQRGYNQGGKLIF

SEQ ID NO: 524428 - protein, 15 aa, Homo sapiens
  CDR3 for beta chain variable domain of TCR clone 262214 (TRBV6-6, TRBJ2-5)
CASSYGKIIQETQYF

SEQ ID NO: 524429 - protein, 12 aa, Homo sapiens
  CDR3 for alpha chain variable domain of TCR clone 262215 (TRAV29/DV5, TRAJ34)
CAASGNTDKLIF

SEQ ID NO: 524430 - protein, 14 aa, Homo sapiens
  CDR3 for beta chain variable domain of TCR clone 262215 (TRBV5-1, TRBJ2-7)
CASSRGESLYEQYF

SEQ ID NO: 524431 - protein, 14 aa, Homo sapiens
  CDR3 for alpha chain variable domain of TCR clone 262216 (TRAV12-3, TRAJ15)
CAMIPPQAGTALIF

SEQ ID NO: 524432 - protein, 12 aa, Homo sapiens
  CDR3 for beta chain variable domain of TCR clone 262216 (TRBV11-2, TRBJ2-1)
CASSPGNNEQFF

SEQ ID NO: 524433 - protein, 14 aa, Homo sapiens
  CDR3 for alpha chain variable domain of TCR clone 262217 (TRAV12-2, TRAJ13)
RAVKKTGGYQKVTF

SEQ ID NO: 524434 - protein, 15 aa, Homo sapiens
  CDR3 for beta chain variable domain of TCR clone 262217 (TRBV27, TRBJ2-1)
CSSSNGGGSSNEQFF

SEQ ID NO: 524435 - protein, 14 aa, Homo sapiens
  CDR3 for alpha chain variable domain of TCR clone 262218 (TRAV12-2, TRAJ13)
CAVKKTGGYQKVTF

SEQ ID NO: 524436 - protein, 15 aa, Homo sapiens
  CDR3 for beta chain variable domain of TCR clone 262218 (TRBV20-1, TRBJ2-1)
GSARGIGGTYNEQFF

SEQ ID NO: 524437 - protein, 17 aa, Homo sapiens
  CDR3 for alpha chain variable domain of TCR clone 262219 (TRAV1-2, TRAJ8)
CAVRDPDENTGFQKLVF

SEQ ID NO: 524438 - protein, 15 aa, Homo sapiens
  CDR3 for beta chain variable domain of TCR clone 262219 (TRBV20-1, TRBJ2-7)
CSARDRVSGMDEQYF

SEQ ID NO: 524439 - protein, 12 aa, Homo sapiens
  CDR3 for alpha chain variable domain of TCR clone 262220 (TRAV21, TRAJ33)
CAKMDSNYQLIW

SEQ ID NO: 524440 - protein, 17 aa, Homo sapiens
  CDR3 for beta chain variable domain of TCR clone 262220 (TRBV20-1, TRBJ2-1)
CSARDPLAGVWDNEQFF

SEQ ID NO: 524441 - protein, 13 aa, Homo sapiens
  CDR3 for alpha chain variable domain of TCR clone 262221 (TRAV35, TRAJ32)
CAGVGGATNKLIF

SEQ ID NO: 524442 - protein, 17 aa, Homo sapiens
  CDR3 for beta chain variable domain of TCR clone 262221 (TRBV4-3, TRBJ2-1)
CASSHFSSGRASGEQFF

SEQ ID NO: 524443 - protein, 21 aa, Homo sapiens
  CDR3 for alpha chain variable domain of TCR clone 262222 (TRAV25, TRAJ47)
TATQTTDVGTYFWEYGNKLVF

SEQ ID NO: 524444 - protein, 16 aa, Homo sapiens
  CDR3 for beta chain variable domain of TCR clone 262222 (TRBV6-6, TRBJ2-1)
CASSWGGQGAYNEQFF

SEQ ID NO: 524445 - protein, 16 aa, Homo sapiens
  CDR3 for alpha chain variable domain of TCR clone 262223 (TRAV3, TRAJ21)
CAVRDIERGNFNKFYL

SEQ ID NO: 524446 - protein, 12 aa, Homo sapiens
  CDR3 for beta chain variable domain of TCR clone 262223 (TRBV11-2, TRBJ2-2)
CASSLGGGELFF

SEQ ID NO: 524447 - protein, 14 aa, Homo sapiens
  CDR3 for alpha chain variable domain of TCR clone 262224 (TRAV12-1, TRAJ39)
CVVNFNNAGNMPTF

SEQ ID NO: 524448 - protein, 14 aa, Homo sapiens
  CDR3 for beta chain variable domain of TCR clone 262224 (TRBV12-4, TRBJ1-1)
CASSLGTGGTEAFF

SEQ ID NO: 524449 - protein, 16 aa, Homo sapiens
  CDR3 for alpha chain variable domain of TCR clone 262225 (TRAV26-1, TRAJ46)
CIVRVGKEKQRRQADF

SEQ ID NO: 524450 - protein, 13 aa, Homo sapiens
  CDR3 for beta chain variable domain of TCR clone 262225 (TRBV12-5, TRBJ2-3)
CASGDRQSDTQYF

SEQ ID NO: 524451 - protein, 15 aa, Homo sapiens
  CDR3 for alpha chain variable domain of TCR clone 262226 (TRAV3, TRAJ3)
CDVRDRDSSASKIIF

SEQ ID NO: 524452 - protein, 15 aa, Homo sapiens
  CDR3 for beta chain variable domain of TCR clone 262226 (TRBV29-1, TRBJ2-7)
CSVEFFDRGSYEQYF

SEQ ID NO: 524453 - protein, 23 aa, Homo sapiens
  CDR3 for alpha chain variable domain of TCR clone 262227 (TRAV26-1, TRAJ38)
CIADNAGNNHIQNPDPAVYQLRD

SEQ ID NO: 524454 - protein, 14 aa, Homo sapiens
  CDR3 for beta chain variable domain of TCR clone 262227 (TRBV7-9, TRBJ2-5)
CASSFPQGVETQYF

SEQ ID NO: 524455 - protein, 15 aa, Homo sapiens
  CDR3 for alpha chain variable domain of TCR clone 262228 (TRAV1-2, TRAJ10)
CAVRGFTGGGNKLTF

SEQ ID NO: 524456 - protein, 12 aa, Homo sapiens
  CDR3 for beta chain variable domain of TCR clone 262228 (TRBV7-7, TRBJ2-3)
CQQLSRADTQYF

SEQ ID NO: 524457 - protein, 11 aa, Homo sapiens
  CDR3 for alpha chain variable domain of TCR clone 262229 (TRAV12-2, TRAJ43)
CASTIGNDMRF

SEQ ID NO: 524458 - protein, 13 aa, Homo sapiens
  CDR3 for beta chain variable domain of TCR clone 262229 (TRBV7-3, TRBJ1-2)
CASSLKRGYGYTF

SEQ ID NO: 524459 - protein, 11 aa, Homo sapiens
  CDR3 for alpha chain variable domain of TCR clone 262230 (TRAV21, TRAJ53)
NSGGSNYKLTF

SEQ ID NO: 524460 - protein, 13 aa, Homo sapiens
  CDR3 for beta chain variable domain of TCR clone 262230 (TRBV11-2, TRBJ2-5)
CASSSTGEETQYF

SEQ ID NO: 524461 - protein, 13 aa, Homo sapiens
  CDR3 for alpha chain variable domain of TCR clone 262231 (TRAV12-1, TRAJ33)
CGDAPDSNFQLIW

SEQ ID NO: 524462 - protein, 14 aa, Homo sapiens
  CDR3 for beta chain variable domain of TCR clone 262231 (TRBV7-2, TRBJ2-7)
CASRSQGAAYEQYF

SEQ ID NO: 524463 - protein, 15 aa, Homo sapiens
  CDR3 for alpha chain variable domain of TCR clone 262232 (TRAV13-1, TRAJ17)
CAASIERAAVNKLTF

SEQ ID NO: 524464 - protein, 13 aa, Homo sapiens
  CDR3 for beta chain variable domain of TCR clone 262232 (TRBV27, TRBJ2-1)
CASRTLGVGEQFF

SEQ ID NO: 524465 - protein, 11 aa, Homo sapiens
  CDR3 for alpha chain variable domain of TCR clone 262233 (TRAV12-2, TRAJ33)
CAVGSNYQLIW

SEQ ID NO: 524466 - protein, 14 aa, Homo sapiens
  CDR3 for beta chain variable domain of TCR clone 262233 (TRBV19, TRBJ2-7)
CASSMGQGAIEQYF

SEQ ID NO: 524467 - protein, 12 aa, Homo sapiens
  CDR3 for alpha chain variable domain of TCR clone 262234 (TRAV12-3, TRAJ17)
CAMTLTGNKLTF

SEQ ID NO: 524468 - protein, 12 aa, Homo sapiens
  CDR3 for beta chain variable domain of TCR clone 262234 (TRBV11-2, TRBJ2-5)
CASSPPAETQYF

SEQ ID NO: 524469 - protein, 15 aa, Homo sapiens
  CDR3 for alpha chain variable domain of TCR clone 262235 (TRAV2, TRAJ9)
CAVEDRGTGGFKTIL

SEQ ID NO: 524470 - protein, 11 aa, Homo sapiens
  CDR3 for beta chain variable domain of TCR clone 262235 (TRBV12-4, TRBJ2-3)
CASTATDTQYF

SEQ ID NO: 524471 - protein, 16 aa, Homo sapiens
  CDR3 for alpha chain variable domain of TCR clone 262236 (TRAV13-1, TRAJ53)
CSKLESSGGSNYKLTF

SEQ ID NO: 524472 - protein, 19 aa, Homo sapiens
  CDR3 for beta chain variable domain of TCR clone 262236 (TRBV7-9, TRBJ2-1)
RASSHNRGALLRSYNEQFF

SEQ ID NO: 524473 - protein, 11 aa, Homo sapiens
  CDR3 for alpha chain variable domain of TCR clone 262237 (TRAV2, TRAJ33)
CAVDSNYQLIW

SEQ ID NO: 524474 - protein, 12 aa, Homo sapiens
  CDR3 for beta chain variable domain of TCR clone 262237 (TRBV11-2, TRBJ2-2)
YASSLGGGELFF

SEQ ID NO: 524475 - protein, 12 aa, Homo sapiens
  CDR3 for alpha chain variable domain of TCR clone 262238 (TRAV17, TRAJ31)
CATEQGNARLMF

SEQ ID NO: 524476 - protein, 14 aa, Homo sapiens
  CDR3 for beta chain variable domain of TCR clone 262238 (TRBV28, TRBJ2-7)
CASTTDRDGIVQYF

SEQ ID NO: 524477 - protein, 18 aa, Homo sapiens
  CDR3 for alpha chain variable domain of TCR clone 262239 (TRAV23/DV6, TRAJ21)
CAASSGGGTTSTNFTLYL

SEQ ID NO: 524478 - protein, 11 aa, Homo sapiens
  CDR3 for beta chain variable domain of TCR clone 262239 (TRBV7-8, TRBJ2-7)
CASSLSLEQYF

SEQ ID NO: 524479 - protein, 14 aa, Homo sapiens
  CDR3 for alpha chain variable domain of TCR clone 262240 (TRAV13-1, TRAJ26)
CAASSAHYGPNFVF

SEQ ID NO: 524480 - protein, 17 aa, Homo sapiens
  CDR3 for beta chain variable domain of TCR clone 262240 (TRBV25-1, TRBJ2-5)
CASSRRGGRGGQETQYF

SEQ ID NO: 524481 - protein, 11 aa, Homo sapiens
  CDR3 for alpha chain variable domain of TCR clone 262241 (TRAV8-3, TRAJ49)
CAVNTGNQFYF

SEQ ID NO: 524482 - protein, 14 aa, Homo sapiens
  CDR3 for beta chain variable domain of TCR clone 262241 (TRBV11-2, TRBJ1-2)
CASSLGTANYGYTF

SEQ ID NO: 524483 - protein, 17 aa, Homo sapiens
  CDR3 for alpha chain variable domain of TCR clone 262242 (TRAV12-3, TRAJ52)
CAMSARAGGTSYGKLTF

SEQ ID NO: 524484 - protein, 13 aa, Homo sapiens
  CDR3 for beta chain variable domain of TCR clone 262242 (TRBV10-2, TRBJ2-7)
CASGASGGYEQYF

SEQ ID NO: 524485 - protein, 16 aa, Homo sapiens
  CDR3 for alpha chain variable domain of TCR clone 262243 (TRAV4, TRAJ37)
SLVGWFGSSNTGKLIF

SEQ ID NO: 524486 - protein, 15 aa, Homo sapiens
  CDR3 for beta chain variable domain of TCR clone 262243 (TRBV12-4, TRBJ2-3)
CASSLAERPTDTQYF

SEQ ID NO: 524487 - protein, 15 aa, Homo sapiens
  CDR3 for alpha chain variable domain of TCR clone 262244 (TRAV12-3, TRAJ23)
CAMILLYNQGGKLIF

SEQ ID NO: 524488 - protein, 14 aa, Homo sapiens
  CDR3 for beta chain variable domain of TCR clone 262244 (TRBV27, TRBJ1-5)
CASSLDPRNQPQHF

SEQ ID NO: 524489 - protein, 14 aa, Homo sapiens
  CDR3 for alpha chain variable domain of TCR clone 262245 (TRAV26-1, TRAJ38)
CIADNAGNNRRLIW

SEQ ID NO: 524490 - protein, 17 aa, Homo sapiens
  CDR3 for beta chain variable domain of TCR clone 262245 (TRBV15, TRBJ1-1)
CATSRVGGADGDTEAFF

SEQ ID NO: 524491 - protein, 13 aa, Homo sapiens
  CDR3 for alpha chain variable domain of TCR clone 262246 (TRAV35, TRAJ52)
GAQGGTSYGKLTF

SEQ ID NO: 524492 - protein, 16 aa, Homo sapiens
  CDR3 for beta chain variable domain of TCR clone 262246 (TRBV2, TRBJ1-4)
CASNLLQGATNEKLFF

SEQ ID NO: 524493 - protein, 16 aa, Homo sapiens
  CDR3 for alpha chain variable domain of TCR clone 262247 (TRAV12-1, TRAJ28)
CVVIAYSEAGSYQLTF

SEQ ID NO: 524494 - protein, 14 aa, Homo sapiens
  CDR3 for beta chain variable domain of TCR clone 262247 (TRBV5-4, TRBJ1-1)
CASSLDSRRDEAFF

SEQ ID NO: 524495 - protein, 10 aa, Homo sapiens
  CDR3 for alpha chain variable domain of TCR clone 262248 (TRAV13-1, TRAJ45)
SGGGPDGLTF

SEQ ID NO: 524496 - protein, 12 aa, Homo sapiens
  CDR3 for beta chain variable domain of TCR clone 262248 (TRBV12-4, TRBJ2-7)
CASSLGGYEQYF

SEQ ID NO: 524497 - protein, 14 aa, Homo sapiens
  CDR3 for alpha chain variable domain of TCR clone 262249 (TRAV35, TRAJ46)
CAGPQKSSGDKLTF

SEQ ID NO: 524498 - protein, 14 aa, Homo sapiens
  CDR3 for beta chain variable domain of TCR clone 262249 (TRBV11-2, TRBJ2-7)
CASSSTGEGYEQYF

SEQ ID NO: 524499 - protein, 13 aa, Homo sapiens
  CDR3 for alpha chain variable domain of TCR clone 262250 (TRAV8-3, TRAJ8)
CDPMNTGFQKLVF

SEQ ID NO: 524500 - protein, 13 aa, Homo sapiens
  CDR3 for beta chain variable domain of TCR clone 262250 (TRBV10-2, TRBJ2-3)
CASSEAGDHTQYF

SEQ ID NO: 524501 - protein, 11 aa, Homo sapiens
  CDR3 for alpha chain variable domain of TCR clone 262251 (TRAV2, TRAJ13)
CASGGYQKVTF

SEQ ID NO: 524502 - protein, 17 aa, Homo sapiens
  CDR3 for beta chain variable domain of TCR clone 262251 (TRBV27, TRBJ2-1)
CASSSERGGQSADEQFF

SEQ ID NO: 524503 - protein, 15 aa, Homo sapiens
  CDR3 for alpha chain variable domain of TCR clone 262252 (TRAV26-1, TRAJ40)
CIVRVTTSGTYKYIF

SEQ ID NO: 524504 - protein, 14 aa, Homo sapiens
  CDR3 for beta chain variable domain of TCR clone 262252 (TRBV11-2, TRBJ2-5)
CASSRTGGIETQYF

SEQ ID NO: 524505 - protein, 15 aa, Homo sapiens
  CDR3 for alpha chain variable domain of TCR clone 262253 (TRAV21, TRAJ53)
CATLTSGGSNYRLTF

SEQ ID NO: 524506 - protein, 15 aa, Homo sapiens
  CDR3 for beta chain variable domain of TCR clone 262253 (TRBV11-3, TRBJ2-3)
CASSAGTVVTNTQYF

SEQ ID NO: 524507 - protein, 14 aa, Homo sapiens
  CDR3 for alpha chain variable domain of TCR clone 262254 (TRAV12-3, TRAJ10)
SHLPLTGGGNKLTF

SEQ ID NO: 524508 - protein, 16 aa, Homo sapiens
  CDR3 for beta chain variable domain of TCR clone 262254 (TRBV5-8, TRBJ2-2)
CASSLINHGGAGELFF

SEQ ID NO: 524509 - protein, 17 aa, Homo sapiens
  CDR3 for alpha chain variable domain of TCR clone 262255 (TRAV3, TRAJ6)
CAVRDGPRAGGSYIPTF

SEQ ID NO: 524510 - protein, 18 aa, Homo sapiens
  CDR3 for beta chain variable domain of TCR clone 262255 (TRBV7-9, TRBJ2-7)
CASNLTTSGSRTWYEQYF

SEQ ID NO: 524511 - protein, 13 aa, Homo sapiens
  CDR3 for alpha chain variable domain of TCR clone 262256 (TRAV1-2, TRAJ9)
CAALNTGGFKTIF

SEQ ID NO: 524512 - protein, 15 aa, Homo sapiens
  CDR3 for beta chain variable domain of TCR clone 262256 (TRBV4-3, TRBJ2-3)
CASSPSLLSTDTQYF

SEQ ID NO: 524513 - protein, 14 aa, Homo sapiens
  CDR3 for alpha chain variable domain of TCR clone 262257 (TRAV1-1, TRAJ30)
CAVRSLNRDDKIIF

SEQ ID NO: 524514 - protein, 12 aa, Homo sapiens
  CDR3 for beta chain variable domain of TCR clone 262257 (TRBV11-2, TRBJ2-1)
CASSPGNNEQFF

SEQ ID NO: 524515 - protein, 14 aa, Homo sapiens
  CDR3 for alpha chain variable domain of TCR clone 262258 (TRAV2, TRAJ9)
CAVEDRSGGFKTIF

SEQ ID NO: 524516 - protein, 12 aa, Homo sapiens
  CDR3 for beta chain variable domain of TCR clone 262258 (TRBV2, TRBJ2-1)
CAKREGYNEQFF

SEQ ID NO: 524517 - protein, 13 aa, Homo sapiens
  CDR3 for alpha chain variable domain of TCR clone 262259 (TRAV27, TRAJ29)
CAGAHSGNTPLVF

SEQ ID NO: 524518 - protein, 14 aa, Homo sapiens
  CDR3 for beta chain variable domain of TCR clone 262259 (TRBV7-9, TRBJ2-7)
CTSSIGQGAGEQYF

SEQ ID NO: 524519 - protein, 14 aa, Homo sapiens
  CDR3 for alpha chain variable domain of TCR clone 262260 (TRAV35, TRAJ13)
CAGRSPGGYQKVTF

SEQ ID NO: 524520 - protein, 19 aa, Homo sapiens
  CDR3 for beta chain variable domain of TCR clone 262260 (TRBV25-1, TRBJ2-2)
CAILVYRVDRGRKTGELFF

SEQ ID NO: 524521 - protein, 16 aa, Homo sapiens
  CDR3 for alpha chain variable domain of TCR clone 262261 (TRAV16, TRAJ52)
CALSGVGGTSFVKLTF

SEQ ID NO: 524522 - protein, 14 aa, Homo sapiens
  CDR3 for beta chain variable domain of TCR clone 262261 (TRBV19, TRBJ1-2)
CASSLQGQAYGYTF

SEQ ID NO: 524523 - protein, 15 aa, Homo sapiens
  CDR3 for alpha chain variable domain of TCR clone 262262 (TRAV12-1, TRAJ6)
CVVNSPSGGRYIPTF

SEQ ID NO: 524524 - protein, 15 aa, Homo sapiens
  CDR3 for beta chain variable domain of TCR clone 262262 (TRBV18, TRBJ1-1)
CASSGRTGEVTEAFF

SEQ ID NO: 524525 - protein, 15 aa, Homo sapiens
  CDR3 for alpha chain variable domain of TCR clone 262263 (TRAV25, TRAJ53)
CPTSNSGGSNYKLTF

SEQ ID NO: 524526 - protein, 14 aa, Homo sapiens
  CDR3 for beta chain variable domain of TCR clone 262263 (TRBV7-3, TRBJ2-1)
CASSLAGGTNEQFF

SEQ ID NO: 524527 - protein, 15 aa, Homo sapiens
  CDR3 for alpha chain variable domain of TCR clone 262264 (TRAV4, TRAJ9)
CLVGEKGTGGFKTIF

SEQ ID NO: 524528 - protein, 15 aa, Homo sapiens
  CDR3 for beta chain variable domain of TCR clone 262264 (TRBV10-3, TRBJ1-2)
CAILNTGGSNYGYTF

SEQ ID NO: 524529 - protein, 13 aa, Homo sapiens
  CDR3 for alpha chain variable domain of TCR clone 262265 (TRAV2, TRAJ40)
CAVVTSGTYKYIF

SEQ ID NO: 524530 - protein, 15 aa, Homo sapiens
  CDR3 for beta chain variable domain of TCR clone 262265 (TRBV7-2, TRBJ2-7)
CASSLALGSAYEQYF

SEQ ID NO: 524531 - protein, 15 aa, Homo sapiens
  CDR3 for alpha chain variable domain of TCR clone 262266 (TRAV21, TRAJ53)
CATLNSGGSNYKLTF

SEQ ID NO: 524532 - protein, 13 aa, Homo sapiens
  CDR3 for beta chain variable domain of TCR clone 262266 (TRBV7-9, TRBJ2-3)
CASSPGSTDTQYL

SEQ ID NO: 524533 - protein, 13 aa, Homo sapiens
  CDR3 for alpha chain variable domain of TCR clone 262267 (TRAV3, TRAJ21)
CAVREPDFNKFYF

SEQ ID NO: 524534 - protein, 11 aa, Homo sapiens
  CDR3 for beta chain variable domain of TCR clone 262267 (TRBV7-8, TRBJ2-7)
CASSLSLEQYF

SEQ ID NO: 524535 - protein, 14 aa, Homo sapiens
  CDR3 for alpha chain variable domain of TCR clone 262268 (TRAV26-1, TRAJ38)
CIADNAGNNRKLIW

SEQ ID NO: 524536 - protein, 15 aa, Homo sapiens
  CDR3 for beta chain variable domain of TCR clone 262268 (TRBV7-9, TRBJ2-1)
CASSLSSGSFDEQFF

SEQ ID NO: 524537 - protein, 12 aa, Homo sapiens
  CDR3 for alpha chain variable domain of TCR clone 262269 (TRAV13-1, TRAJ5)
CAVDTGRRALTF

SEQ ID NO: 524538 - protein, 12 aa, Homo sapiens
  CDR3 for beta chain variable domain of TCR clone 262269 (TRBV28, TRBJ2-1)
CASRFYRHEQFF

SEQ ID NO: 524539 - protein, 10 aa, Homo sapiens
  CDR3 for alpha chain variable domain of TCR clone 262270 (TRAV12-2, TRAJ52)
RSTSYGKLTF

SEQ ID NO: 524540 - protein, 17 aa, Homo sapiens
  CDR3 for beta chain variable domain of TCR clone 262270 (TRBV7-3, TRBJ2-5)
CASSLGSGRSGSETQYF

SEQ ID NO: 524541 - protein, 11 aa, Homo sapiens
  CDR3 for alpha chain variable domain of TCR clone 262271 (TRAV23/DV6, TRAJ48)
CAPRWGEKLTF

SEQ ID NO: 524542 - protein, 14 aa, Homo sapiens
  CDR3 for beta chain variable domain of TCR clone 262271 (TRBV29-1, TRBJ1-3)
CSVADRVVANTIYF

SEQ ID NO: 524543 - protein, 15 aa, Homo sapiens
  CDR3 for alpha chain variable domain of TCR clone 262272 (TRAV29/DV5, TRAJ24)
CAASGATDSWGKFKV

SEQ ID NO: 524544 - protein, 15 aa, Homo sapiens
  CDR3 for beta chain variable domain of TCR clone 262272 (TRBV27, TRBJ2-1)
CASSNGGGSSNEQFF

SEQ ID NO: 524545 - protein, 22 aa, Homo sapiens
  CDR3 for alpha chain variable domain of TCR clone 262273 (TRAV1-2, TRAJ10)
CAVRGATHGRRKQTHLWDRHSA

SEQ ID NO: 524546 - protein, 14 aa, Homo sapiens
  CDR3 for beta chain variable domain of TCR clone 262273 (TRBV11-2, TRBJ1-2)
CASSLGTANYGYTF

SEQ ID NO: 524547 - protein, 15 aa, Homo sapiens
  CDR3 for alpha chain variable domain of TCR clone 262274 (TRAV8-3, TRAJ27)
CAVGPSKTNAGKSTF

SEQ ID NO: 524548 - protein, 15 aa, Homo sapiens
  CDR3 for beta chain variable domain of TCR clone 262274 (TRBV2, TRBJ2-1)
CASSELAGSYNEQFF

SEQ ID NO: 524549 - protein, 14 aa, Homo sapiens
  CDR3 for alpha chain variable domain of TCR clone 262275 (TRAV35, TRAJ22)
CAGLRPGSASQLTF

SEQ ID NO: 524550 - protein, 14 aa, Homo sapiens
  CDR3 for beta chain variable domain of TCR clone 262275 (TRBV5-1, TRBJ2-7)
CASSRGESLYEQYF

SEQ ID NO: 524551 - protein, 14 aa, Homo sapiens
  CDR3 for alpha chain variable domain of TCR clone 262276 (TRAV9-2, TRAJ42)
CALSTVGSQGNLIF

SEQ ID NO: 524552 - protein, 16 aa, Homo sapiens
  CDR3 for beta chain variable domain of TCR clone 262276 (TRBV19, TRBJ2-1)
CASSMGGGSSYNEQFF

SEQ ID NO: 524553 - protein, 13 aa, Homo sapiens
  CDR3 for alpha chain variable domain of TCR clone 262277 (TRAV8-3, TRAJ4)
WLFYSGGYNKLIF

SEQ ID NO: 524554 - protein, 16 aa, Homo sapiens
  CDR3 for beta chain variable domain of TCR clone 262277 (TRBV12-5, TRBJ2-5)
CASGPRTSGNQETQYF

SEQ ID NO: 524555 - protein, 13 aa, Homo sapiens
  CDR3 for alpha chain variable domain of TCR clone 262278 (TRAV13-2, TRAJ13)
CAERPGGYQKVTF

SEQ ID NO: 524556 - protein, 15 aa, Homo sapiens
  CDR3 for beta chain variable domain of TCR clone 262278 (TRBV18, TRBJ2-5)
CQLTTVGRGAKTQYF

SEQ ID NO: 524557 - protein, 12 aa, Homo sapiens
  CDR3 for alpha chain variable domain of TCR clone 262279 (TRAV21, TRAJ30)
CAVMNRDDKIIF

SEQ ID NO: 524558 - protein, 17 aa, Homo sapiens
  CDR3 for beta chain variable domain of TCR clone 262279 (TRBV5-1, TRBJ1-1)
CASSPIRTVGVNTEAFF

SEQ ID NO: 524559 - protein, 13 aa, Homo sapiens
  CDR3 for alpha chain variable domain of TCR clone 262280 (TRAV26-1, TRAJ20)
CIVRVGNDYKLSF

SEQ ID NO: 524560 - protein, 16 aa, Homo sapiens
  CDR3 for beta chain variable domain of TCR clone 262280 (TRBV7-9, TRBJ2-3)
CASSLIPTSWTDTQYF

SEQ ID NO: 524561 - protein, 12 aa, Homo sapiens
  CDR3 for alpha chain variable domain of TCR clone 262281 (TRAV17, TRAJ12)
CTTLRSSYKLIF

SEQ ID NO: 524562 - protein, 11 aa, Homo sapiens
  CDR3 for beta chain variable domain of TCR clone 262281 (TRBV7-2, TRBJ2-7)
CASSSGLWQYF

SEQ ID NO: 524563 - protein, 11 aa, Homo sapiens
  CDR3 for alpha chain variable domain of TCR clone 262282 (TRAV3, TRAJ21)
CAVGNFNKFYF

SEQ ID NO: 524564 - protein, 16 aa, Homo sapiens
  CDR3 for beta chain variable domain of TCR clone 262282 (TRBV28, TRBJ1-2)
CASSHGQGVYKDGYTF

SEQ ID NO: 524565 - protein, 15 aa, Homo sapiens
  CDR3 for alpha chain variable domain of TCR clone 262283 (TRAV8-3, TRAJ21)
CAVGALPPRGYKFYF

SEQ ID NO: 524566 - protein, 16 aa, Homo sapiens
  CDR3 for beta chain variable domain of TCR clone 262283 (TRBV11-2, TRBJ2-7)
CASSTVTAPKTYEQYF

SEQ ID NO: 524567 - protein, 17 aa, Homo sapiens
  CDR3 for alpha chain variable domain of TCR clone 262284 (TRAV26-1, TRAJ46)
IASSESEKKSSGDKLTF

SEQ ID NO: 524568 - protein, 16 aa, Homo sapiens
  CDR3 for beta chain variable domain of TCR clone 262284 (TRBV27, TRBJ2-2)
CASSFRGLVRTGELFF

SEQ ID NO: 524569 - protein, 14 aa, Homo sapiens
  CDR3 for alpha chain variable domain of TCR clone 262285 (TRAV26-1, TRAJ38)
CIADNAGNNRKLIW

SEQ ID NO: 524570 - protein, 15 aa, Homo sapiens
  CDR3 for beta chain variable domain of TCR clone 262285 (TRBV20-1, TRBJ2-1)
CSARFSAGGLNEQFF

SEQ ID NO: 524571 - protein, 11 aa, Homo sapiens
  CDR3 for alpha chain variable domain of TCR clone 262286 (TRAV3, TRAJ21)
FAVGNFNKFYF

SEQ ID NO: 524572 - protein, 15 aa, Homo sapiens
  CDR3 for beta chain variable domain of TCR clone 262286 (TRBV6-3, TRBJ2-7)
CASSSPGTVFYEQYF

SEQ ID NO: 524573 - protein, 15 aa, Homo sapiens
  CDR3 for alpha chain variable domain of TCR clone 262287 (TRAV36/DV7, TRAJ53)
WEGENSGGSNYKLTF

SEQ ID NO: 524574 - protein, 13 aa, Homo sapiens
  CDR3 for beta chain variable domain of TCR clone 262287 (TRBV10-3, TRBJ2-7)
CAISEKGGYEQYF

SEQ ID NO: 524575 - protein, 14 aa, Homo sapiens
  CDR3 for alpha chain variable domain of TCR clone 262288 (TRAV12-3, TRAJ10)
SHLPLTGGGNKLTF

SEQ ID NO: 524576 - protein, 14 aa, Homo sapiens
  CDR3 for beta chain variable domain of TCR clone 262288 (TRBV11-2, TRBJ2-1)
CASSPGSRDNEQFF
